United States Patent Application Publication US 2005/0228172 A9 - sequence listing, part 96

SEQ ID NO: 438929 - DNA, 696 bp, Homo sapiens
taacctcttgccccagtgtgaattaaatcttctttttctaagaccagccttggatgtacataattattttctcagtttgaaataaggtgctgtgttttgctttttcaatatacttaatacaactataacaaacctgttatgatgccactttgctgattttcttcatccatataattttgaaaaataaaataaattcataatattcatgtgtggtttgcccctggggtggattgctgtaatgcgaggatattggagcctttccctgagtcattagaaagcctccagaaagcaacccctgctctccttcaaagkcggagggaaggagagaatctttaatcataataatcctgagtaaaaaaaaatcttggaaatataacatctgcttctgtgctttgttgttttgcaggataacagtgattgctttagcagcttctattgccatatgtgtacaataagtaaatgaacataaaattgaacaaacacataaaagaaggataaacccacccagcttaacaaatccactctctcacctgctgtgccctgaaacataaaaaaagaaattatttggatcatgaggattagtaaaataacagtctctgttaacaacattgacaggcagtataaggataatttgtctgatgtgggggctaacagtcttgcgtcttaattcttaatactgctctctttcaccactat

SEQ ID NO: 438930 - DNA, 597 bp, Homo sapiens
attgggtcacactagaatggccataggctttttgggcatctggctaaaggaaagtctgagttgagtctattatgtggttgaacactaccacgtataatgaagtatttattgttctattattggaatagcttccagaaacactcctattgcccacactactratgtaactggcactaaggtgtggaggcacaaggacaaaggcaattttgcaacatagctatgtcctacacttcatacttctgaaagcatgtgtggttgaagatgaaaaaaagaattgaaatgtaggaagccagaaactgttctggagaaaattatttcgatcatcagacataaagtgtaagtaaaaggttgattctcatcaatgcttagtcaaaacagacattttctcctgtcaataatatacttgatcaataatggaatgtgtgtgtgtgtgtgtgtgtgtaatgagacttgtatcagagttcctatactgcattaacatgtagtggtgctgaaattactaatgcatttgcaactgtacagtatttatgaaaaagtaatctatagatgactcaaatataaaatcaactaataataattagacattattgataaatt

SEQ ID NO: 438931 - DNA, 587 bp, Homo sapiens
gaaaatgtggttagagaaccagaaggtctctcagaggacaaagaggaaaaatgcaagtagaagtataaatagtcttgtggaatatggggaaatagttgaacaaaagcatttttcaagtttgaaaatggaaaagagaatgaagcagaagatatatttgaggataaaattrccaaaagttttccaaaattgattaaagcctctaatacacagattcaataagttatgaaaaccctgagtagaataagtagaaagagaattatatctaggcaattgaaataatcccaaaaaccaaagggaaaattttgaaaacatctaagagggaggcatgatgagagaggaagacacagtgccttcaaattaacagaaaaaaaaataacatttgagttctgtagagaccatggaggccataggaaaacacatttcatattaatataatttttaaagtgtcaaactggaattttgtacaaacaaaaagtttttaaaatggaatgaagataacttcagaccaaactattaagagaatttattatgagcaattctttattgaaagatatatgcaaggagttattgcgaaagaaaaaaaaaat

SEQ ID NO: 438932 - DNA, 587 bp, Homo sapiens
gaaaatgtggttagagaaccagaaggtctctcagaggacaaagaggaaaaatgcaagtagaagtataaatagtcttgtggaatatggggaaatagttgaacaaaagcatttttcaagtttgaaaatggaaaagagaatgaagcagaagatatatttgaggataaaattaccaaaagttttccaaaattgattaaagcctctaatacacagattcaataagttatgaaaaccctgagtagaataagtagaaagaraattatatctaggcaattgaaataatcccaaaaaccaaagggaaaattttgaaaacatctaagagggaggcatgatgagagaggaagacacagtgccttcaaattaacagaaaaaaaaataacatttgagttctgtagagaccatggaggccataggaaaacacatttcatattaatataatttttaaagtgtcaaactggaattttgtacaaacaaaaagtttttaaaatggaatgaagataacttcagaccaaactattaagagaatttattatgagcaattctttattgaaagatatatgcaaggagttattgcgaaagaaaaaaaaaat

SEQ ID NO: 438933 - DNA, 624 bp, Homo sapiens
ttagtaaattatttgtttctctttctcccctccacaaagatcctctccatctygctgcacatgtctctactccgaactcctgctacacactcctccagccacctttcaagatctttctggatctcttcattttagttttattacaccacagtgaaaacatctctcagcctctccagtttgcatcaccaccagttactccacaaagacaaacaaagaacacttctcaggatctactctcctttgaaggggagaggccatgagaagtgactatcaataatataagcagagagtagtgacttgaaatactgtgctatttttcctggtagatattaaagcatgaatccagggaactttgggaaactgggaagaccaggagcattcgtcaatatttattgttacttccagaataaaacacaaccagatggcaagctctgacaggttacctttgcagaagttgctgtcacataccttgggacagatcacttgactactggggtgtttgataaccacacctgtttcttctttacttttttctttctttgcaggcacatatatggcaccagtctttcaaatcataagaaacttcccataagtccctcaccaggcaaggttaagctataacaa

SEQ ID NO: 438934 - DNA, 624 bp, Homo sapiens
ttagtaaattatttgtttctctttctcccctccacaaagatcctctccatcttgctgcacatgtctctactccgaactcctgctacacactcctccagccacctttcaagatctttctggatctcttcattttagttttattacaccacagtgaaaacatctctcagcctctccagtttgcatcaccaccagttactccacaaagacaaacaaagaacacttctcaggatctactctcctttgaaggggagaggccatgagaagtgamtatcaataatataagcagagagtagtgacttgaaatactgtgctatttttcctggtagatattaaagcatgaatccagggaactttgggaaactgggaagaccaggagcattcgtcaatatttattgttacttccagaataaaacacaaccagatggcaagctctgacaggttacctttgcagaagttgctgtcacataccttgggacagatcacttgactactggggtgtttgataaccacacctgtttcttctttacttttttctttctttgcaggcacatatatggcaccagtctttcaaatcataagaaacttcccataagtccctcaccaggcaaggttaagctataacaa

SEQ ID NO: 438935 - DNA, 553 bp, Homo sapiens
aagcatgaatccagggaactttgggaaactgggaagaccaggagcattcgtcaatatttattgttacttccagaataaaacacaaccagatggcaagctctgacaggttacctttgcagaagttgctgtcacataccttgggacagatcacttgactactggggtgtttgataaccacacctgtttcttctttacttttttctttctttgcaggcacatatatggcaccagtctttcaaatcataagaaacttcccataagtccctcaccaggcaaggttaagctataacaacccgaatagatttttgaataagctggctggttgaaagcacaggaaaagagctgggtttttctcttttgacaggcatataatgggtcatgggaaagtggtttaaaaagtcagtctccatgtgaggccaaggttaagataaagactctagaggccagaagagcaaagtaactacagcaattcacatgcttccamgagcagccctttatatctgagggattgatttttcccactatttttccagtaacccaacttgtgtcttta

SEQ ID NO: 438936 - DNA, 448 bp, Homo sapiens
ctctaaaaaaaaaatatatatatatatgtgtgtgtgtatatatatatatacgtgtgtgtatatatatatatatatatatatatatacgtatatgtatatgtatatatgtgtatatatatacatgtatatatacataggtcccttagaaagtgattattgtttctttgtggcaagttgtggaatgagcttagaacttggaaaatatgtatatgtatatacatatatatatatatgcacacacacacacacacacacatacacacacacaaagtagccagktgtggtggtgcacacctgtatttggagctacttgggaggctggggtgcacctgagcctagctagagagggcaaggctgcagtaagtggtgattgcaccaccacactccagcctcgacaatagagtgaaaccctgtctccaaaaataaataaataaataaaagatatgga

SEQ ID NO: 438937 - DNA, 575 bp, Homo sapiens
acttgctcatcaactttaacaaatctttttacttgtgatagtcaagcctctttgaaagtcccaagttcctgtaggcctgtaagggtcagctcytccaccttattgctggcccaaaacttaattcactctatacaatgagcatgttggcatttctttgccctgttgactgttttgtcttttactacttcttacttacatttgaagggaagtgctacaaaaatattttttacatgctgaagggacagaaagtgattaaaagtaacttcttttcaagatctatctactaattaatcaagcacaaaatatgatatgctatttttctggaagcagcatgatttctctctttacttccatgttttatctgctgttttacaccattgggtttttagcttacttgattatatgtatttttatatttgtttaaattctacctagcatctttaaattgtgcctagttagttgttcaaattcaaattgtgtgtgtgtgtgcatatatatatagttatatatacacacaatttgaatatatatcatatatatgatatatgatgtgttatatataattcaaattatat

SEQ ID NO: 438938 - DNA, 575 bp, Homo sapiens
acttgctcatcaactttaacaaatctttttacttgtgatagtcaagcctctttgaaagtcccaagttcctgtaggcctgtaagggtcagctcctccaccttattgctggcccaaaacttaattcactctatacaatgagcatgttggcatttctttgccctgttgactgttttgtcttttactacttcttacttacatttgaagggaagygctacaaaaatattttttacatgctgaagggacagaaagtgattaaaagtaacttcttttcaagatctatctactaattaatcaagcacaaaatatgatatgctatttttctggaagcagcatgatttctctctttacttccatgttttatctgctgttttacaccattgggtttttagcttacttgattatatgtatttttatatttgtttaaattctacctagcatctttaaattgtgcctagttagttgttcaaattcaaattgtgtgtgtgtgtgcatatatatatagttatatatacacacaatttgaatatatatcatatatatgatatatgatgtgttatatataattcaaattatat

SEQ ID NO: 438939 - DNA, 644 bp, Homo sapiens
tatgctatttttctggaagcagcatgatttctctctttacttccatgttttatctgctgttttacaccattgggtttttagcttacttgattatatgtatttttatatttgtttaaattctacctagcatctttaaattgtgcctagttasttgttcaaattcaaattgtgtgtgtgtgtgcatatatatatagttatatatacacacaatttgaatatatatcatatatatgatatatgatgtgttatatataattcaaattatattataagttcaattatatacaattttatattttacaaattcaaatgtatattacaaattcaaattttattataatatataaatattatatattatttgtatataaaatttgtatataaaaatttatatataaaagtatacataaaataattgtactatatataaaatatataaatatttatatataaataagtattgtatagtatatagtatatagtatatttatatataatatgtaatacatatatttacatatactatatagtagtatattataatatattatatatatttatttgctatcctgtacctgatcattccaacttctggtggttccaggaatcaaattctgttattgtgtatttttgctgattcaatt

SEQ ID NO: 438940 - DNA, 386 bp, Homo sapiens
ttcacagcagctctatgaggcagagaatatcattgtctccattctataggtggggaaatgaagcacaccacagttaggtaacctccccaaggctgaacagctagtaagtgcgagagctgggattctaacccagcagtacaattccagagtccatatgcttaaccattttgccatgctgacaaagttggggctgaacccctagtctcctgacttytacttcaatgcctatcccagttatatacatgtatataggtacttatacacactcccaactttccctctcaggagtctatataaacaagggacatctgaaggtgccttctctaatcaagttgctagaattgagatgcccatggggaatctgtgttggcactccaccctgaggg

SEQ ID NO: 438941 - DNA, 386 bp, Homo sapiens
ttcacagcagctctatgaggcagagaatatcattgtctccattctataggtggggaaatgaagcacaccacagttaggtaacctccccaaggctgaacagctagtaagtgcgagagctgggattctaacccagcagtacaattccagagtccatatgcttaaccattttgccatgctgacaaagttggggctgaacccctagtctcctgacttctacktcaatgcctatcccagttatatacatgtatataggtacttatacacactcccaactttccctctcaggagtctatataaacaagggacatctgaaggtgccttctctaatcaagttgctagaattgagatgcccatggggaatctgtgttggcactccaccctgaggg

SEQ ID NO: 438942 - DNA, 386 bp, Homo sapiens
ttcacagcagctctatgaggcagagaatatcattgtctccattctataggtggggaaatgaagcacaccacagttaggtaacctccccaaggctgaacagctagtaagtgcgagagctgggattctaacccagcagtacaattccagagtccatatgcttaaccattttgccatgctgacaaagttggggctgaacccctagtctcctgacttctacttcaatgcctatcccagtyatatacatgtatataggtacttatacacactcccaactttccctctcaggagtctatataaacaagggacatctgaaggtgccttctctaatcaagttgctagaattgagatgcccatggggaatctgtgttggcactccaccctgaggg

SEQ ID NO: 438943 - DNA, 386 bp, Homo sapiens
ttcacagcagctctatgaggcagagaatatcattgtctccattctataggtggggaaatgaagcacaccacagttaggtaacctccccaaggctgaacagctagtaagtgcgagagctgggattctaacccagcagtacaattccagagtccatatgcttaaccattttgccatgctgacaaagttggggctgaacccctagtctcctgacttctacttcaatgcctatcccagttawatacatgtatataggtacttatacacactcccaactttccctctcaggagtctatataaacaagggacatctgaaggtgccttctctaatcaagttgctagaattgagatgcccatggggaatctgtgttggcactccaccctgaggg

SEQ ID NO: 438944 - DNA, 597 bp, Homo sapiens
agtaataacccaccatgagcaccaggttacccgaacacagacccatygcgtattctagcgcaacccaagtatttccgggtggcgagtcgctggcacatggtgccccagtgagcccgcacccggagctcgaagccctgtaggcgcagaggaccccactgccaactgaaatgggtgttttgacccaaaccaatcctcagctcctttttgccccgggcgccgcctgaaaccccgaggcgacggctggcccgcgatgtgcactttttgcgctctgcgctgggggagttgcaggtggagaggcgcccccatccatcccggcaccgcccctagggaagccccaagtttataccgcaagggaccaactcgccgcgactcggcgtccaccctcaatgctgacacagttcaggcccggcaaacgaagcagggcggggctgggcattaggggcgccgcctgccgaagatgcggtaccacgtgcgcgctgtacggaccccgaatcctgtgagtccagctccggccacaggctttcgaagaactgggccctcggctttagggcggggcctcttctttgcctcctgcctggatgtcgactcccacccacg

SEQ ID NO: 438945 - DNA, 597 bp, Homo sapiens
agtaataacccaccatgagcaccaggttacccgaacacagacccattgcgtattctagcgcaacccaagtatttccgggtggcgagtcgctggcacatggtgccccagtgagcccgcacccggagctcgaagccctgtaggcgcagaggaccccactgccaactgaaatgggtgttttgacccaaaccaatcctcagctcctttttgccccgggcgccgcctgaaaccccgaggcgacggctggcccgcgatgtgcactttttgcgctctgcgctgggggagttgcaggtggagaggcgcccccatccatcccggcaccgcccctagggaagccccaagtttataccgcaagggaccaactcgccgcgactcggcgtccaccctcaatgctgacacmgttcaggcccggcaaacgaagcagggcggggctgggcattaggggcgccgcctgccgaagatgcggtaccacgtgcgcgctgtacggaccccgaatcctgtgagtccagctccggccacaggctttcgaagaactgggccctcggctttagggcggggcctcttctttgcctcctgcctggatgtcgactcccacccacg

SEQ ID NO: 438946 - DNA, 463 bp, Homo sapiens
gaaacttttccctgtccattccatcaagtcctgaaaaatcaaaatggatttagagaaaaattatccgactcctcggaccagcaggacaggtaggaccgcgatacgggctccagatgtgcaaactccgggacacggccaggccttggtccccacgcagggtgaccctggaggaggagggggcgcgccgcattttcgtagagactgtctaactgcggcgtgtttgttatgttttttcacctatctgttcacacacttctgcatcagtccaaatatctgtgagtttgtctgtgtttttctctgtttctgaatgttcacgctggcgtccttccgggggtctgcaagttagggcctgtgtgtttatataagggactcagtgtgytcattacagtatatgtatttttaaaagatgtaaaaatatatgagtttgtgtccaaaagttgtttgcctgtgtgtgtgtgtgtgt

SEQ ID NO: 438947 - DNA, 517 bp, Homo sapiens
ggtctgcattcacctgttatatcccaagtgatttttggatgtgagaaagaagtggctacactgacctttccatttttggatgtcaacggctgtccgatgcatacacgccaatgttcacattgtgtctctaggcaaactcctagacgtgggtctggggcctatggagatccgtggtgtttagcatgtgcattgtaaggcccagtgtccattctattgggagataggaccaggaatgaaggtgtgaattcagggcatgcagcctcttggtgtgcagtgagcactgttcaggctaccatttgtacaaacaggtctcctgtggcaggcacaaccttgcagatgacagcggacacctgtagggttagttgtgacatttctagggacccccagcctacattcactttcacctagacaagcctctgacactggsgtgtgtatttgtgtgtacacacagacacacacacactgtgtcctcaggttttatcctgtgggtgccgcaccagtggaggagagcacagtg

SEQ ID NO: 438948 - DNA, 572 bp, Homo sapiens
atcctcagcgtcgttcttgagccagggcccagatggctcacagaactatagcttcttgggtgaagaatgactgtcacacgcttccttttcaaggtccagtttctttgattgttgtctcagagccttaaaacccacaaagaagcggactcgctagtcaaagatcccttgtgtagcaagagagttctgctacaaatccatccattttgtctacatagggacaggaacttcccctgtagagggaaggtcagtttcccatcaactggaagctgccgcattgcakcgcgcctggccgctttgcttgacccttgcagatagaatgcgcctgtccacccgcccgcttcagggacccttattagccctggacgcgacttggctcattcggttctcaagaagccttgagccgggtgcggaatttctccggtggacagaagcgcaacaccagctcccaaagcctctggcagttcctgatctgaggcaggaaagagggccagccactctgcttgggcaacctggcccaaagccttagcccctccacccaggtgcgccctggtgcgccccagttactaacttta

SEQ ID NO: 438949 - DNA, 540 bp, Homo sapiens
ccagcatcgctgtggggaggtccagcccgcgtgggacccgcagcgggactctccaggcactgcgtgggcccctttcccctccccacagccgcgatccactaggccttagtccagcgcgtttgtcaatgaacgtggcgccgccgcctgggccccgccccccattctctcccattgcccaggtgtccgctaatcaggcggagcctgtgggctgcttagccaatggggcggtgtttcgggccagggccggctgacgccactctgattggcttggtggagcgtgattggcaggttagcccccgccccgcccccgcccggagggagctgagccccgggcggcgctgtccacacgcagcgggtcctgaaagcggctccggggcggcgcggtggcgcactgtgcgcgccgagcaggcggagggctagcgacggcggcggcggcggcaacgcaggcagtcagagccgactgcggctccatctcagccccggcagccccggcggccttggtggcwgggaccctctgctctctcctctgttcctcactcc

SEQ ID NO: 438950 - DNA, 515 bp, Homo sapiens
tagtcttccaatcatttatttttccttctataaatccctgtggccttgcagggttagtgtgaggatcaagataattcgaggaagagctctgtaaactttagggtgctgtggctgaattatagtgagttgtattatagtaaaaattggctttacattataaaattgacaggacaattggagrctgcagagattgctgtgtgccttgacttagggtgcttttctagccatctggtttttttgggatattgttaaaaagttgtttgtgagtaataattttttggcaattacagaaaaattgctgaaagcaattttttagaaagagggaagataggttgagtttttaccttatggtcaaaatttgtaaatgactcactcttttcaatgaaaaacagacatttcactttcacatcactgcttccaaagtatttcatctctttcaggatattcactaacttggccttacccaaacatacccaggctgagaatttcagcatctctgtaaatgtgaccagtca

SEQ ID NO: 438951 - DNA, 500 bp, Homo sapiens
ctctcttctgctcctgctgctcctgagcagatgtcagacgtctttaactcwgtaggctgcggtgctgtgttgctgcaggaggcagtgggcctgccatctctgttgttttatgaggttgatggtatcatcttttctcccattgtcacctggactcgcagcagatgtgcctaagctggggcctggatgtatttgttcacggtggagggacagattgtgtgagactcccccagaggctgagggatccaggtggagatttttggggaaagagaaaagctagtttgatgtttaccaccaaacagacaggttctggcctgggggcattatttactttgttttcggagtgctatattggcttgcagtctgaccagcagtcatggttttgcccctcaagctcctttacaaggtatagcgtggtcagaatgtgggtggtgttggtcttgactactccgtactactcagatcatgcccggaggaggactgcagcccatttgggggtattg

SEQ ID NO: 438952 - DNA, 297 bp, Homo sapiens
ttgacggaggctttcgaacatttagtctagaagcatttagggagatagttttgagctatgtgtctcagatgctcaagaaacattcactctgctgagtgtttcaggtaaaaagataacatgacagtgactagccctgcactatccaacagaagyagaatgcaagccacgtgtaattttaaatgatctagtaactacattaaaaagagtaaaaagaaacaagtggaattaattttaataatatattttatttaatccagtataccccaaatatcatcatttcaacatgtcagcatataa

SEQ ID NO: 438953 - DNA, 591 bp, Homo sapiens
cccagccctgtctctggcttcggcaatggctccccccagaggcacctgctttatttatggcttctccccaactccccacaggcagagggaagtccattagtgtgtttgcagactctgccagctctgagcagatgcaaagcttatttgcagactgtcattgccctggcctcctccagagactctcatgctgggctcagccttgtgcctccaagagccacctccctcaggcagccaccggkgcaagccgctttcctgatttccctaagcatagtcttggcttggagttgggaaaattaaattaaatgccacgaaggaaccatagcagtgcattgggccatgttgacagtagggaatgaagtcttctctgtcgataggagttcattgttttgacataaattagggaggcattgagagaaagtggaaaaagtcttgacctgagaacctgggacccaagttcaagtctctgttaggctgctgagtatcctggtgatttggggcaacagtttattgccttctgggcctcagtttccaagctgcacaaggagctgtagacaggcttggaatccactccaagctccagaattctctgat

SEQ ID NO: 438954 - DNA, 603 bp, Homo sapiens
cttgtcttcatcctccagtaggggacggggctaagacttgaagctctctctagctctggtgggaagggcagggccagatacccagtatgtagctcagggatcaacggatccaggaggcttgaggcaggagtcagaggcctcatgtccaagctcaccttgaatctgctgtctggcccctgacagatccctttgccatctggcctcccgtttgccatcctcgaatgtggaatcaccagcccttggggcctttcccacactgacagcctgtgactcattgggtaacacccggcacaatcggattcactctggtcaaacctgaacgtatttggcaattttacaatttcgcattttccttctccaagaagaaagattgagtgaaacaaatggctgaataatggtagtttcagtggaaattttcctccatgccaccttgatttttcttagtctgcagccccagtttaggacaggatttagaaaatgactcagaacattkgtttttgttccaggctaccaagggacatttagagcctggccaccctcatccctagcatggggcctggctcatagtagatgtcctagaagcgtttgccaacttaacctggt

SEQ ID NO: 438955 - DNA, 568 bp, Homo sapiens
accaattgcatcactcttttttattttcttcatggcacttccattgtgtgatattgtttatggaatatctctcctggtaaattgtgagcttctgaaacagggaccatacttgtttacttctctactgaatctcccatacctagaataatgtttggcacatactgctttttcagtaaatatctgttcaatgtaagatttcagactgggcacctagatgttcaaagcctaatcctcaggtgagtgaacatatgagtgatgcatgacatttgatgatacygctcctagaaaggactcttctcctccataccccaaatccaccccactctatttggatgagtttgtcgtcttgggattttatatgccaaaatatatatatatatatatttgggcctagtaagattccaaagcaaggaaggggtattttcttttttttttttttctaaatcaaatatttgtccaaacatatttcaataggtattggtatttttactttattggagagaattattttcaggacagaaaatgttctttctacatttatttcaggcataggattctataagtctat

SEQ ID NO: 438956 - DNA, 607 bp, Homo sapiens
tcttttttctttgtaaaaaccagtctcaggtatttctttatagcaatacacatggactaagacagttgccacagaaaaaagagccaggaagagcaagtctcagtagttaatggatctcatttcaaagaaatttatcagaggattctagactttaagagaaagggggtccttgaagcttattaacttgctcatagcacaaatgagtacacaaaatccaagatcacaaagcaggtttgtggcagaaacaagactggaagctagaaagtctgaccttaagctcatgtttcactgttttattatttaaattatttagggatcctgtgattttttttttttaaccatcacacatagtttgaagtaagtmgaccattgtttatgtgatgtaagatagattttaatgatgtttattttaatgagatttaagccatgaaccattaaaccattttaggaaagctatgaacctttaaacaattttaagaaagtccatattagaggaacagaagttcagcttgtacacagagaaaatggcaaatagaagattcaaggcacatgaggaagaaagaattgacctggtctccgatgatatatggaggtggaaagaaaggaa

SEQ ID NO: 438957 - DNA, 571 bp, Homo sapiens
accttttccttatttttcaggactttttgttttgaataggcccaattttgtctttcctctccttacacatcctcaagtgtggtgtgtttgatccacacagttaaccagccttcagtccattagaaattactttgatttacttctgccttccttgggcactgattgagacccctttctacatccacagatggaaatacctgtagaattccagcttaaattctaaagctgagcatgctctaatctagtgttgctctgttgaaaaaagtgaaatgctctcctgttctggatcactgctcagtttcttgagattccaggtaatatggtgtatacaaaatagacttccttaagatgaactgcatccagatttcttcctatttctatccacaacaatttactttgggtggctatacttcccacagagcaatatggcattattcccctccatrtttctctagctgttgttttctgagaccagtggtttctgggtagatattaaaaaaaaatgaggcaaggagtaaagcaaagtgctaagagcacagagatgactacattctttaaaagattaatatag

SEQ ID NO: 438958 - DNA, 571 bp, Homo sapiens
accttttccttatttttcaggactttttgttttgaataggcccaattttgtctttcctctccttacacatcctcaagtgtggtgtgtttgatccacacagttaaccagccttcagtccattagaaattactttgatttacttctgccttccttgggcactgattgagacccctttctacatccacagatggaaatacctgtagaattccagcttaaattctaaagctgagcatgctctaatctagtgttgctctgttgaaaaaagtgaaatgctctcctgttctggatcactgctcagtttcttgagattccaggtaatatggtgtatacaaaatagacttccttaagatgaactgcatccagatttcttcctatttctatccacaacaatttactttgggtggctatacttcccacagagcaatatggcattattcccctccatatttctctagctgttgttttctgagaccagtggtttctgggtagatattaaaaaaaaatgaggcaaggagtaaagcaaagtgctaagagyacagagatgactacattctttaaaagattaatatag

SEQ ID NO: 438959 - DNA, 592 bp, Homo sapiens
ctcaccaatattaaggaatgaacagtcatttacatctttgccagatgataaataaaaattacatcttctcattactatagtttgcatttcttttatttttagtgaggttgaatatttcttcctatgcttattggccactgattgtgggaaagttgctaatkattaattgaggataggaattctcacctatttcttgtctcatatatagggctgccaccagcacatagtacatcttgaacagattagaaaaatgtgtcccttcctcatgacactttactgccatctaccagaaaattgctattatagataaacaaatcagggatgattatagttgtgagtgattaatggggctctgtagagttgtgcagtgctcaacccacacatctgtatgagacagccctgctaatattcaggcttagtttctgattctcagccaagatagctgttgtcatcttgacctctctagctttcgttccttgtgccttagctctctgactgagtctaggacatagtcccctgccccaccccaccccgcttttttccctaaatcccttgggctgtcttggtttttcctttctggctcatttcatct

SEQ ID NO: 438960 - DNA, 537 bp, Homo sapiens
ggtctcttctgctcaaaataatttgtacacacctccatcaaagcactttctatcctgttagtaaccctctccctactttctcaaagatatcaataacgtagcattmatctctaggtcttcagtgcttacacaatgtctagaataataaatctaaatgaaaaaactgactggctgaatacataaaccattcttgggaattagtgggtatgatcagttgcccatttcagtggctctgttggtctagctctatgacaaactataaagagagaccagtctcgtttgtacaactttttctccttttttattttgagatagaggttcactcttgttgcccggtctgaagtgcaatggcatgatctctgctcactgaaacctccacctcccagttcaagcaattctcctacctcagcctcccgagtagctgggattacaggcacctaccaccatgcccagctaatttttgtatttttggtagagacggagtttcaccacattggccgggctggtctcaaattcctgacctcaggtgatcctcct

SEQ ID NO: 438961 - DNA, 652 bp, Homo sapiens
ccactcaatgagtgccaaaaccattgtgcctagatcagctgcagacaaaagtagagctgtcagtggacattttaaacaggtgggatcaagatcctgtactattttctcaaagaattgtatcagcaagtgaaacatggctttactgatatgawcttgaagatgaaatacaaagcattggctaccagaagtggaagtggttcagtcaaagcaaaagcagaccaatcaaaagcaaaggtcatgtcaacagtttctagggatcctcaaggcattttgctgttgactttttctgcagggccaaagaaagataacatctgtttattatgaaagtgttttgagaaagccaaatctttagcagaaaaatgcctgggaaagcttcaccgagagtcattctccaccatgccaatgctcccgctcatccttctcatcaaacaagggcaattttgcaatttatagtcctggtttggctccctctgacttctttttgttttctaatcgtaaacgatgccaatttttctgcagttaataatgtaaaaaagactgcattggcacgattaaattcccagcactttcagttcttttgggggatggactaaacagctggtattatcactaataaaagtgtcttgaatttgacagagctatgttcagaaat

SEQ ID NO: 438962 - DNA, 473 bp, Homo sapiens
ttacaatcactcagagctttttgcccaaacccaaaacctgaaaaatatcattaaatccttgtgtgcagttagtttctaatgttagacaattttctaagcctacctagtatttatttctgcccttaaatatataaacctcaatacagttcatgagaacrtatagattcatagcctgtagaaataattgcttttcaaatgtattagtcagagagaattgtttaagaatttttttaaagatctgtcaaaatcacaaaaaccagaccatctctgagaggcaggggaaccatctgctcagatccatattggcactgctctccctccagaacactgctctccctccagagtagcttgttctgaaaggatgaggacctgtctcaagtggctacagatcctggctcaggtgataacctttcttaggtagactatattgatagctggaggagtgatagagtactctgttttaattgtaaaga

SEQ ID NO: 438963 - DNA, 587 bp, Homo sapiens
actccttaataccaaaataagcaaaatattccaagactttttggaaagcactgtcacattatttgtgtgtgtgtgtgtgtgtgtgtgtgtgtgtgtgtgtgtgtatttatctcaaagccacccacataatttttgaggatcactgttttagagattaaaaacatcaccgtattttttaaatcttggtgttagttgcctggccatgcactggagccttagagcattttctaaagaaatatttcctgtggaaataagtgagggaagattatgacagggaaaaagaagcatttctaacaaattgggtcaaaaagaaaagaagatttaataccctcaaaaattatacttacattaatgctcagaacatttatataggagctagaggaggggtaaagctcttgtgattaggagagtatgaatttagagttgtgaaattagccttaccacatttgagtattctagtgagaatcatattctaacagagagagtatcagagtgtttcttctgccttattatttcagttttacttctggcaaggtaaccaagagagtttgctgccgcgtgatgattctctatgaactyacatagcg

SEQ ID NO: 438964 - DNA, 603 bp, Homo sapiens
tttttttgtttaagtcagtattgaaaaagttctataaccttttctctgttaatttataggtttacgttctctttttcttgttgaataaatatttkttaaggaaataaatgtttgtagtatagtgttctaccatttgtatttggctaagtgtgtctttataatgttatttaatatgttcttctgtcccctgtaaatcagtgcatgtatcttgagacttgattagattcaggttcaatatttttcacaagaatgctttacagataatgttgtatacttacatcaggagacacataatatctcattgtctttttttgtgatctgaacaaacattggcgagcattgcctagactcattaatcattagggtcacattggaagatattctaattttgtaatttctcatttatttcttctgtaattgaaaagcttttcttcattaactacgtggttgcccttaggtttaactcccacagaaaaagcaagataaatgcttgattctcccccctattccttatttatttatttatttattactagttttcaaaataatttgggtctctatcattctccaaaaagaccaattatttgttttttcttaatatca

SEQ ID NO: 438965 - DNA, 523 bp, Homo sapiens
gtttgtaacacaaaggataaatgcttgatgtgatggataccccatttactataatgtgattattacacattgcatgcctgtatcaaaatatctcatgtaacccataaatacatacacctactatgtacccccaaaaaaactaaaatttaaaattgtttaaaaagaaatgctagtgagccatgtagcaagaatgagaaggtgggtggaggagtaagagacagagagaaggagagaagaaaaaaaggaagggytgggggaagaagggaagaaggaaatattgctttgaatgtgtttaataaaaaggctgcatatcaaaaataatccttgaaaaaagcaacatgacataaaatatgaagtaatagtaatctggacctaaagtgctatattatgttttagtatcctaaaatgtaattaataaggtgagagatagaaagtaaaagcatactaggtttctcagcttttaccttttgccataagtgaaatgttttaaatttccaaaaattaaggactttcacacaactaa

SEQ ID NO: 438966 - DNA, 534 bp, Homo sapiens
gattggacttagttcccatgcccaccctagtcctaacatttgcaaagaccacttttaagtcatcctgggttaggagtgaggccgatctttcttaagaccaagatggctttactagccacaaatcatgtttctgttttcaggatgataggctgggaggattagctcttgggaaaccagtaaacttccttccaccaaagacctcccaccaaagacaatgagaaacacacctacagttggaccaattgagtttggtgctcatggcagtsagggagaatgcacatcatggggaatcatctcagtaagaaagtataagaaaagattaattataggatttgggcatgggttaggtgactttgggggcgttaaagagagttggactttgctatgaattggatactgtcaggaaacagagacaattctagactgggtatctctattagttcattttcaccctgtcaataaagacatacctgaggctgggcaatttacaaaagagcaaggtttattggacttacagttccatgtggctgggaa

SEQ ID NO: 438967 - DNA, 540 bp, Homo sapiens
atgtttctgttttcaggatgataggctgggaggattagctcttgggaaaccagtaaacttccttccaccaaagacctcccaccaaagacaatgagaaacacacctacagttggaccaattgagtttggtgctcatggcagtcagggagaatgcacatcatggggaatcatctcagtaagaaagtataagaaaagattaattataggatttgggcatgggttaggtgactttgggggcrttaaagagagttggactttgctatgaattggatactgtcaggaaacagagacaattctagactgggtatctctattagttcattttcaccctgtcaataaagacatacctgaggctgggcaatttacaaaagagcaaggtttattggacttacagttccatgtggctgggaaggcctcacaatcacagcagaaggtgaaaggcacatctcacatggcagcagacaagagaagagaacttgtgcagggaaactcccatttttaaaaccttcagatctcatgagacttatttattatcacgaga

SEQ ID NO: 438968 - DNA, 540 bp, Homo sapiens
atgtttctgttttcaggatgataggctgggaggattagctcttgggaaaccagtaaacttccttccaccaaagacctcccaccaaagacaatgagaaacacacctacagttggaccaattgagtttggtgctcatggcagtcagggagaatgcacatcatggggaatcatctcagtaagaaagtataagaaaagattaattataggatttgggcatgggttaggtgactttgggggcgttaaagagagttggactttgctatgaattggatactgtcaggaaacagagacaattctagactgggtatctctattagttcattttcaccctgtcaataaagacatacctgaggctgggcaatttacaaaagarcaaggtttattggacttacagttccatgtggctgggaaggcctcacaatcacagcagaaggtgaaaggcacatctcacatggcagcagacaagagaagagaacttgtgcagggaaactcccatttttaaaaccttcagatctcatgagacttatttattatcacgaga

SEQ ID NO: 438969 - DNA, 599 bp, Homo sapiens
  misc_feature (1)...(599): n = A,T,C or G
nnnnnnnnggatgcgcccaattttgaagttgtcttgtctcacttgttttttctctcactccattayagtcagagtgccttggtctgttgttgatgttctatgagatcatttgtgtccaacaggcaaacactatgaactagatgtaaatatcaggccagtttccttacgtcaggagctgtttttctctttttcagtggttttattcagatgatggagttgaggtgagaacaagtcctaatgctgttagttgtacttaatatttttgatacttcatacacctaataagaggcacaaacttggaaatattttcctcataactaattttaaagaaaaaatgtgtttctatctaaactaatgaaacagttaattttctgtatgcaagaaatggtgacctttctctcactctctcttcccctggagaacctctagggtgtttctgtttacaataaatacgtagggctttatttatttacttggtcttctctaacactcacaaacattgatttatagcagtgaccttatttaaacagcaaaaccaaaaaataataataataataagcttctccaaatgagcatttctaagccaagtttcttgccag

SEQ ID NO: 438970 - DNA, 599 bp, Homo sapiens
  misc_feature (1)...(599): n = A,T,C or G
nnnnnnnnggatgcgcccaattttgaagttgtcttgtctcacttgttttttctctcactccattatagtcagagtgccytggtctgttgttgatgttctatgagatcatttgtgtccaacaggcaaacactatgaactagatgtaaatatcaggccagtttccttacgtcaggagctgtttttctctttttcagtggttttattcagatgatggagttgaggtgagaacaagtcctaatgctgttagttgtacttaatatttttgatacttcatacacctaataagaggcacaaacttggaaatattttcctcataactaattttaaagaaaaaatgtgtttctatctaaactaatgaaacagttaattttctgtatgcaagaaatggtgacctttctctcactctctcttcccctggagaacctctagggtgtttctgtttacaataaatacgtagggctttatttatttacttggtcttctctaacactcacaaacattgatttatagcagtgaccttatttaaacagcaaaaccaaaaaataataataataataagcttctccaaatgagcatttctaagccaagtttcttgccag

SEQ ID NO: 438971 - DNA, 599 bp, Homo sapiens
  misc_feature (1)...(599): n = A,T,C or G
nnnnnnnnggatgcgcccaattttgaagttgtcttgtctcacttgttttttctctcactccattatagtcagagtgccttggtctgttgttgatgttctatgagatcatttgtgtccaacaggcaaacactatgaactagatgtaaatatcaggccagtttccttacgtcaggagctgtttttctctttttcagtggttttattcagatgatggagttgaggtgagaacaartcctaatgctgttagttgtacttaatatttttgatacttcatacacctaataagaggcacaaacttggaaatattttcctcataactaattttaaagaaaaaatgtgtttctatctaaactaatgaaacagttaattttctgtatgcaagaaatggtgacctttctctcactctctcttcccctggagaacctctagggtgtttctgtttacaataaatacgtagggctttatttatttacttggtcttctctaacactcacaaacattgatttatagcagtgaccttatttaaacagcaaaaccaaaaaataataataataataagcttctccaaatgagcatttctaagccaagtttcttgccag

SEQ ID NO: 438972 - DNA, 599 bp, Homo sapiens
  misc_feature (1)...(599): n = A,T,C or G
nnnnnnnnggatgcgcccaattttgaagttgtcttgtctcacttgttttttctctcactccattatagtcagagtgccttggtctgttgttgatgttctatgagatcatttgtgtccaacaggcaaacactatgaactagatgtaaatatcaggccagtttccttacgtcaggagctgtttttctctttttcagtggttttattcagatgatggagttgaggtgagaacaagtcctaatgctgttagttgtrcttaatatttttgatacttcatacacctaataagaggcacaaacttggaaatattttcctcataactaattttaaagaaaaaatgtgtttctatctaaactaatgaaacagttaattttctgtatgcaagaaatggtgacctttctctcactctctcttcccctggagaacctctagggtgtttctgtttacaataaatacgtagggctttatttatttacttggtcttctctaacactcacaaacattgatttatagcagtgaccttatttaaacagcaaaaccaaaaaataataataataataagcttctccaaatgagcatttctaagccaagtttcttgccag

SEQ ID NO: 438973 - DNA, 545 bp, Homo sapiens
ttccagttccactggagatggtagcttctgggtctcagtgatcaacaaagagaacagagtgctttgtggaaacagaaattgaggcttttgccatccccagcttactttccaagtgctgctgttctgcacttgctcgccattttaaccaccttttttttaatgttacaacagtaagatataaagtgtatttacaaagcaatctgtttatttaaaaatacatgatatacaccaaattgctgagaggacattattggtcaattgaaatggatactttttatctttttctatatctctataatcagcatatgttacttccacaataagagaaaaacaaacmctaaataggtcataatagagttaagaaagcagactgcatcataccaccaaattgaaaacctaatctgtccttatcttcttaaataaactccctttttcactctctcagctcaaggaatccaaaacaagaagaataaaccggcaataattaagtcaattgggcaaataagccaaaaaagtcacttatttggaaattatctcatataatt

SEQ ID NO: 438974 - DNA, 606 bp, Homo sapiens
  misc_feature (1)...(606): n = A,T,C or G
ctaactttgccatctgctacttcatcaaatggtttataggaaagcttctaacctagagaaaaaccaatgcagctgtgggctgcttgcttctatctttttaaattaagacttttcaaaaaagtgtatggcccaattcaagctgcaagaaaaaggtaaatgattttatgtagtatagtgcccacaaaccctggaatttataattgtaaaagctcaaccacaatgtatttagaattgacggcatagtaggcactgtcctagccactggggatatctagataaaggaaatattatagaacttggccyactagccaatcaggacatcttcccaactgctctctttccagatagagtcagcaaatctccctcccagttatcaacactgaagggcactatccaatatctgtatagctatggagtcactattagaggaggataaaatcagggtcgtctctcccttacctgccctgactctcccggaccccccacctggtcttttgagttcacaacgaagttctctctagcccaaatccaactcttataacacagagagaagagagtctcaggtttgtccgtagatgataacacagantaatgcccctaaacaga

SEQ ID NO: 438975 - DNA, 353 bp, Homo sapiens
aatgcccctaaacagacaacttcaaggtttctttaagtggcttagcttttatttaataagtcagtaaaaagtctttgtaggtctaagaccgaaaagaaagcataatcatctacagcttcaactgattcatttttaaaggagagtcagggtcataaagcaaacagaattactcatcgatagtgccaggaactgacctgtttytgataactggcccccttttttgagaggtgactgtatctgtttcttaatacctggggcaaagtcagttacacaccttgtgatgacagacaaaaagaggcagccaggacagaaagacaaacttcgcatgttctcagctcatttgtgggagctaa

SEQ ID NO: 438976 - DNA, 591 bp, Homo sapiens
aatctcttaatcccatcatcttcataagctgaggaggatgtatgtcacctcatgaccctgtgatgattgtgttaactgcacaaattgtttgtagagcatgtgtgtttgaacaatatgaaatctgggctscttgaaaaaagaacaggataacagcaatgttcaaggaacaagagagataaccttaaactctgactgccggtgagccgggggggaaacagagccatatgtctcttctttctaaagcaaatgggagaaatatcgctgaattgtttttctcagcaaggaacatccctgagaaagagaatgcgtccctgagggtaggcctctaaaatggctgctttgggggtggctgtcttttacggtcactgctgtagggaagaaataagccccagtctcctgtagcgctcccaggcttattaggacgaggaaattccctcctaataaattttggtcagaccggttgtctgctttcaaaccctgtctcctgataagatgttatcagtgacaatgcatgcccgaaacttcattagcaattttaattttgcctcagtcttatggtcctgtgatcttgccctgcctccatttaccttg

SEQ ID NO: 438977 - DNA, 591 bp, Homo sapiens
aatctcttaatcccatcatcttcataagctgaggaggatgtatgtcacctcatgaccctgtgatgattgtgttaactgcacaaattgtttgtagagcatgtgtgtttgaacaatatgaaatctgggctgcttgaaaaaagaacaggataacagcaatgttcaaggaacaagagagataaccttaaactctgactgccggtgagccgggggggaaacagagccatatgtctcttctttcwaaagcaaatgggagaaatatcgctgaattgtttttctcagcaaggaacatccctgagaaagagaatgcgtccctgagggtaggcctctaaaatggctgctttgggggtggctgtcttttacggtcactgctgtagggaagaaataagccccagtctcctgtagcgctcccaggcttattaggacgaggaaattccctcctaataaattttggtcagaccggttgtctgctttcaaaccctgtctcctgataagatgttatcagtgacaatgcatgcccgaaacttcattagcaattttaattttgcctcagtcttatggtcctgtgatcttgccctgcctccatttaccttg

SEQ ID NO: 438978 - DNA, 529 bp, Homo sapiens
ttttcaaaattattttaatctctttgttaaagttatctgataggattatgaattccttctctgtgatattttgaatttcactgagcttcctcaaagcagctattttgaattctctgaaaggtcacatatctctgttactctgagattggtcactggtaccttatttagttcacttgggaggtcatgttttcctagatggtcttgatgcttgtggatgtttgtcaatgtctgggcattgaagagttaggtgcttactatagtctttgcagtttgagcttgtttgtacccttccaccttgggaaggctttccargtattcaaagggaattggatattgttatctaagtctttggttactgcagctgtatctgcattaggggtcaccccaagcctaggaaagtaacactgtgatgcttgcaggctcatagttataccatcttggtggtcttgcataagtctgagagaatttcctggattacctggcagagactcttgttctcttcccttactttcccccaaacgaatgcagt

SEQ ID NO: 438979 - DNA, 616 bp, Homo sapiens
tgaaagcctctgaacagcaaaggaaacaattaacaaagtgaataaacaactcacagaatgggagaaaataattgcaaactatccatctgacaggagattaataaccaacatatgtaaggagctcaaacaactcaatagcagaaaaacccaaacaatccaatttaaaaatgagcaaaagatctgagtagacatttcttgaaagaagacatacaaatggccaactggtatatttaaaaatgctcagcatcactaatcattagggaaattcaaatcaaaactacagtgaaatatcatctcacctcagttaaaatgacttatcaaaaagacaaaaaatattrgatgctgatgaggatgcagagaaaggagaatgctcatacactgttggtaggaatgtaaattactatagccactatggaaaatagcatggaggttcctcaaaaaactaaaaatagaactaccctatgatccagcaatcccattgctaaatccaaaagaaagaaaatcttttgaatccaaaagaaaggaacccaaaggaaaggaaatcttcatttgaatccaaaagaaaggaaatcactatattgaagtaatatctgcactcccatgtttcctgcagcac

SEQ ID NO: 438980 - DNA, 543 bp, Homo sapiens
tttagtatttataagaaactttaacaactttatgagaaaaaaaaacccatagaaaagcaggtaaagaacatgaacagacattttttggaagtaataataataaaacaagtttttattattccttctttgaaatggaggtaaaatacatataaagaaaagcacagatcttatgtatttgcttgaatgagatttgacaaacacgtacatgtgattgcacaacgcctagatgaacatatggaacattcattttaccttaggctcctttyaagttcagttccagttcttcaggggaaatgttatactgactagaaactcatactcacctgtttttaatccttatataataaaattatgtaataacataaaataaataaataaataaatttttggactgtttttctatttctgtgaagaattttattagcgttttaatagggaattacattgaatctgttgattgctttgggcagtatggacattttaacaatatcgatccttccactccattaatatggaatatctttcaatttttttgtgttccct

SEQ ID NO: 438981 - DNA, 543 bp, Homo sapiens
tttagtatttataagaaactttaacaactttatgagaaaaaaaaacccatagaaaagcaggtaaagaacatgaacagacattttttggaagtaataataataaaacaagtttttattattccttctttgaaatggaggtaaaatacatataaagaaaagcacagatcttatgtatttgcttgaatgagatttgacaaacacgtacatgtgattgcacaacgcctagatgaacatatggaacattcattttaccttaggctcctttcaagttcagttccagttcttcaggggaaatgttatactgactagaaactcatactcacctgtttttaatccttatataataaaattatgtaataacataaaataaataaataaataaattttyggactgtttttctatttctgtgaagaattttattagcgttttaatagggaattacattgaatctgttgattgctttgggcagtatggacattttaacaatatcgatccttccactccattaatatggaatatctttcaatttttttgtgttccct

SEQ ID NO: 438982 - DNA, 543 bp, Homo sapiens
tttagtatttataagaaactttaacaactttatgagaaaaaaaaacccatagaaaagcaggtaaagaacatgaacagacattttttggaagtaataataataaaacaagtttttattattccttctttgaaatggaggtaaaatacatataaagaaaagcacagatcttatgtatttgcttgaatgagatttgacaaacacgtacatgtgattgcacaacgcctagatgaacatatggaacattcattttaccttaggctcctttcaagttcagttccagttcttcaggggaaatgttatactgactagaaactcatactcacctgtttttaatccttatataataaaattatgtaataacataaaataaataaataaataaatttttggactgtttttctatttctgtgaagaattttattagcgttttaatagggaattacattgaatctgttgattgctttgggsagtatggacattttaacaatatcgatccttccactccattaatatggaatatctttcaatttttttgtgttccct

SEQ ID NO: 438983 - DNA, 534 bp, Homo sapiens
aactaatgttattacttacacaatgtgatgttattatatattattataaataatgtggaaatactttggaggcataaaattttcttatgaagaaacatacccagactctagctcagaaacatatatatgtgtgtgtatatacatatgagtatatacgtgtgcatatatatgtatacacatacacatgtatatataaaacacatatatacatatataaacatatatgtatatatacgtatgtgtgtatatatacatgtgtctatatatacacaaacacatacacatacattcatgcacaaaaacatgcacagagactatgtcaaagggatatatatatatatatatatatatatggagaaaaatgaatattcatcaactcrttcatcagatatttactacatttttcagtgtttggatatgaactgcttgtgattaatctcctcaattagtattcagtctgtctactatctgagtgaacttaggtgaactagagatacataaatcaaatctatatctcacttttattgatacaaa

SEQ ID NO: 438984 - DNA, 220 bp, Homo sapiens
gggctgaacatggcccatgtctggaagcaccaaaacatttatgttcaggaaaattggagagaaaaacaatttcataatgggtattaagttaattaaatttcatctaggcctgaaawacatgaaaacagaacaaaaaccctcccactttttaggtttttttttttttttccagctcttttacttggacatcttaaaattattcacaattaagtttttctca

SEQ ID NO: 438985 - DNA, 605 bp, Homo sapiens
aaaagtcaaggagtcaggccctacattctctgcggtagagggtacccccaaaacctcgctcctttgatgttccccagtgtcaagccggcggctccaccagcctcctgtagagaggccttgactcccgcgggtcactcgggggggcgacaggtgcgcaggtggaggcgccgcgccgctgggggagcgatgagcggcgcgcacctgccgcaggtgaggcccagccgtgcggaaaggggaggagccgtcgccgcagcactcaggtgagccgacccccggctcccgggacctaaggcgagggcagccgcgggcttcaacgtggccgctgccaggcgacctatgctgcagactgcggccccggcggctccgagtcccgcgcggcgcggcagccccaggagaacattcgaggcagcagcggcgttggaggcccggggtccgttcggtatttgaatagcacaaaggaaccgccttggtctgattggccagccgagtagccccggggcgggctgcgmctgtcactcaggagactctcagagctcctattggctcttctcatgtggggcggggcccgggcacccggctaaatagctggggccggggccggccga

SEQ ID NO: 438986 - DNA, 288 bp, Homo sapiens
agatctctgaactcagcaggaccccagacgagggctcccctcccctctgccgggtgatctgagcctaagccgcacactggaatctagcaatgccaagggawgggatggggcgctctgggagcaccctaaagagaggtgcccttccccttcccttatcttctcggggcccaaggacctgggcagccccacaaagggttagtgccctgagtataattccccttgacccaaaacgcaacccactggcaatctacccgtctcaccaagacattccacacaaaactgtaacag

SEQ ID NO: 438987 - DNA, 533 bp, Homo sapiens
atgcttgtgggattcaagaaaaacatatcacctgacttaggcccaagtcttgggcacaccaaaccctcagctttgctctccttccaaccccaacctctgcccaggattttcctcccaggaaggcttcttcctctcacctctcacgagcatgaagcggcctctgccccggcgaaccaaaaaggagcacaagtggctgagttcagcttgtccatcctggagctcctgtggcccaggatgctgggaagtgacacccgcccttcagctctgcrgccagccccacactcagagggcttctttcggacatgttgagccgctggggtgccagcagcaggccaacctccaccgagcacagcacaggctacaggtgcacgtgcctccatggcccatctcccagggcctgagtgggctcccatcctgcccagaagcccacgcccacgtcctcggagctctcactgcccctcatgccttacatttccctgtaaaaataaacccagcccaacccgccgccaaaccggcgcagggtctgccttcct

SEQ ID NO: 438988 - DNA, 616 bp, Homo sapiens
ttgcatcaaaatccctgaagcggtccataaaaatgccaattctcggcctaccctcagacctcccaccactcagtgatcatacacactaacatttgaaggcagcactttggagatgcctccaaagggtaagacccttcccaggtatgccatgggagagccagactcagactgcccgagctttgaggagcctttggccacttgataaaggagaagggaggcccccatcgcccccactccccatgcagcaggtccttgcctcagcctccaagctcatcaggacagagctggactgcagcttttcggggctggggtggctggtgcttctctgactgcccatgccccagatgggagattccgaggccccaagtgtcagaggggctggcctaagattcagagcaaaacagtggggtaggaggaagcaggagccccaggttccacatcttttgctttgtccccagcccaggaccaagtgcggcagcagggacgggcacaytggccagcccccactcacctcggccttatacatgcggatgagaccctggttcactttggaccaggaagggacggcgctgatgttccacagctggttggagtgctctgcaaatgggccagtctt

SEQ ID NO: 438989 - DNA, 490 bp, Homo sapiens
aaaacacaatgtaacaaaacctgtggaatacagcaaaagcattgctaagagggaaatttatagcattaaacgcctacatcaaaaaagtagaaagatcacaaaataacctaacattgtacttgaagtaactagaaagacaagaacaaactaaacacacacttagcagaagaaaagaaataacaaagatcagagcagaacgaaatggagataaaaaattacaaaagatcaaccaaacaaaaagttggttcttttgttttgaaaaaagataaacagaattgataaaccattatctagactaaccaagaaaaggagaagatccaaatracacaatcagaagtgaaaaaggagacattacaactgataccacagaaatacaaaagatcatcagagactattatgaacagctatatactcacaaaccagaaaacctagaggaaatgtataaattccagcctcacaagattgaaccaggaagaaataaaacttctga

SEQ ID NO: 438990 - DNA, 490 bp, Homo sapiens
aaaacacaatgtaacaaaacctgtggaatacagcaaaagcattgctaagagggaaatttatagcattaaacgcctacatcaaaaaagtagaaagatcacaaaataacctaacattgtacttgaagtaactagaaagacaagaacaaactaaacacacacttagcagaagaaaagaaataacaaagatcagagcagaacgaaatggagataaaaaattacaaaagatcaaccaaacaaaaagttggttcttttgttttgaaaaaagataaacagaattgataaaccattatctagactaaccaagaaaaggagaagatccaaataacacaatcagaagtgaaaaaggagacattacaactgataccacagaaatacaaaagatcatcagagactattatgaacagctatwtactcacaaaccagaaaacctagaggaaatgtataaattccagcctcacaagattgaaccaggaagaaataaaacttctga

SEQ ID NO: 438991 - DNA, 421 bp, Homo sapiens
gtgaggcctgagtatttctcccctggctcccctgacctgtgaggttgcctcaggctgattttattcctggcccagtgatcactcctccagaggtagcttctctgcctgaccctctccaatgggttccagtactgcccccatcccattgcacctggctattgaggggactgacatttctgttgcttctcatctggttcttgatcacctytggtggttcccctccatttaactcagacctttataaacagtccctttggaaagaaaactttcttgaattattctaagttgcacacactgtcttccttctgttgggactctggcagatacaaatatcaaaacatacaacaaggagataaaaaccattaaacaaatcaggaggcatgaagatacagaactagaaattgagagagctgtgaccatg

SEQ ID NO: 438992 - DNA, 585 bp, Homo sapiens
ccagtaaatttacagagttgtgcaaccatctcgccaatctaattttagaacatttccatcacccagggaaaataaaccttgtgcccatttgcagtcattcccccttcctttgcccagccccaggcaaccactaatctactttctgtctctatagatttgcctctcgaattcgtgtgtgtgtgtgtgtgttgcgtgaattttatttgaacacaagtgttaactctaagctttctggaagctgaagcaaaargggaatttcaacactttgtatggtctcccggctggttcctgctaggactacaattctatcatttcttggaataattatttgtattcttataacattgggtaatataatagacaatgcctggctacattctggcaagagatatataaatctctaatagttttctttctgttgcttcttgctaagagttaagaaattatttgtcatctagttgagtctgtcatctagttgagattagtgaaggcagttttgtaaaaagctacaatattaagatttatgcccatggatttctgatgatctaaattaatacagtggaagaacataagaaagctacagaa

SEQ ID NO: 438993 - DNA, 568 bp, Homo sapiens
agaagaatcaccagagacaattctgttctttcccagatgtacatttatgaaggctgtcccttctcaaaagcaacttctgcaggcataaggtgccaagcaacagagccctttgaacaagaacctcacaaccctcataattaggaaatgaggcctcacagctcccacttctgtttatcatagaggggtcctggaggaacagtgccaaccccagagcaaactgttcccaccatcctggggctgtgcttccaactcctctggcccttgcctgcttccctcattccagcgagcctctcccatgtctctgttctgtattargtttttcttcctccattgtgtcctaggaccccagttgttgggcagctttagagggcagcccaaagctgtgtccgctgaggatgtttcctggctctgaggatgtacttccaaggaaagctctttcaaggatcgctttctgagacctctgttattgcctcagattagggattgtaaactcaaatacctccagtgatcagggaattgagggaaatggaagaagcggaagacaacagggaaggcggaaatgtggtgg

SEQ ID NO: 438994 - DNA, 622 bp, Homo sapiens
ggtttcactctttgcttatttataatccctatctcaatgcctggtgcataataggtgtttaatagatacatgaatgagccttagaatatctaattggggatacatctggaagttaccatcattattctcccattatggaaggagaaacagtctcagaggaatttggtgactttcttaaggccacttagctgatgagtggtgaaaacaagattagaacacagtggcrtcttctgttttcctagtacatactttggggtggggaggagaggtggacttttctgacaagtaggctagtttgtgattgtaaaaattaggttccatagggtgtaaaggggtaaatccaacccgttctgtgagagaatgataagctctcctgacatctgtgtttggtgggacttactactgactctggtccactcagcagcctttgaagagaaggtactgtgggcatcagaagaaacaaaatcatcatattacaaacaacaacagtatatagctgtcatttattgagcagctactgtgtgtccaacaagatatttacaaacattgtctttaatacacaggttacccattaaagactgcattatgtagagtttacagaccaggagatagagattcagag

SEQ ID NO: 438995 - DNA, 553 bp, Homo sapiens
tgtagctttcacttgggttgcagggtagttgctgtgcacaactgcaaggactttggactcagaaagatatgaattaaaaatcccatctctcctgattagtaagctgtgtgatcttgaccaagctatgcagcctmtctgagtctctgtcctgatggataaagcaaataacaataccaacctgtagggttgatatgagaatgaaagataaggtatatcaatgcttagcacatggtacaccttgagtatctggtatgtgttattttcactcttggttgttattattattcttacaattattatgcattggctaggtccaggtgagacatgaggaaacacactcatgattagtacctctaaaacctagaaatgtttataagaacatcttttaaaggcagggggcactactattaagatcattggagagagaaggcggaaaatgggccttggataattagaaaaatggactcaaagacataaacagagacatgctggtatggacattttaaacagatattaattgaccaacatttttttttttcaccagctcctgtat

SEQ ID NO: 438996 - DNA, 361 bp, Homo sapiens
tctagaggctagctgatctttgactttagaacaatttggtggcaatgttgttaaatttatgtggcatgacagcaaatgctacatggtggtaaattccactgtaacaagcttgaaaaaaattccataatttcatttcatagatgattgcattttrgttactagcgtactttaaaataaatagtaatacatgttttttttttacatcctatggcattttcaaactatcattttttttttgagtgtctattaaagatttcttgggagtagggactggcatgcaagggtcaggatggctttccaactgtttttgtaaataaggttttattggaactcagctaattctgttcatttacatattgtc

SEQ ID NO: 438997 - DNA, 565 bp, Homo sapiens
tacatataatatcaaaaggaatatagcacagccaggtgtggtggctcatgcctgtaatcctagcactttgggagaccaaggtgggaggattgcttgagcccaggcttttgagacmagcctgggcaacatagaaagccctgccaaaaaaaaaaaaaaaaggaatatagcacaatctaatgttggaactgtgtactcctttgagttcataattcacatggcgctgactgatgtctactgtggctgtgtttctctggggtgacttagtgcacaatttgagaactgattgcaggtataatgataaatttttcagttcactttttgtatcccacaatatgccttagagatctgtccatgttacacataaagatctccctcatagaaaacactgctgcagaatcatccagaatatgaacagatcacagtctatttacccattttcctgatgatggccattaatgttatttctaatattttgtaattttatataatattgcagtgaagattcttgttgggtacctctttgtccacatgggtaagttggagaataaagaacttactgggccat

SEQ ID NO: 438998 - DNA, 459 bp, Homo sapiens
cagcaaatgccagctcttattatggttatgcatttacatcaaagaatatggataacacaggacctgaggcttactggataacacaaaggagatagagtgaggtgcaagagctcaatggacggtaaatttgctcttctgatttcctctccggcatcaagcaggtgggatgcctccagaaggagagctccctgacctcaggatgggtaccccaggacaccccctgtatcatctctaaactacaggtgtataaagtgactctaagtgacattccctgagcagcttcagggacctcatggttagtgrtctcaaaagctgcccagctctcagcatgtcgaagtgatctttgtatgtgctgtagagagggccagccactgggaccagcgtggtgcctacttcaaatgcctgtcagtaacatggttctgaactcccccagtcttttggcttctttattttgtgata

SEQ ID NO: 438999 - DNA, 504 bp, Homo sapiens
aagacttaaatctaagacctgaaaccattaagattctagaaggtagcattggataacatgggataaacccttctagacattgggttaggcaaagactccatgaccaaaaacccaaaagcaagtgcaacaaaaacaaacataaatatatgggacttaattaagctgaaaaactcctgcacaaaaaataaataatcagcagagttaacagacaacccacagagtgggagacaatcttcacaatctatacattygacaaaggactaatatccagaatctacaaagaactccaacaaatcagcaagaaaaaaacaagcaatcccatcaaaaagtgggctaaggacatgaatagaccattctcaaaagaagatatacaaatgggcaacaaacatgtgagaaaatgctcaacatcactaatgatcagagaaatgcaaataaaaaccacaatgtgatacgttactactgcaagaatggccataattaaaaataaaaaaataataaatgttg

SEQ ID NO: 439000 - DNA, 475 bp, Homo sapiens
ctcctaactaatctaaagtaaacgtgattactttccctgctttgcgtcaagaaaaaaacagagtgggccgggtgtggtgacttgcacctataatctcagcactttggaaggctgaggcaggaggatcacttgaagctaggagttcaaaaccagcctgggtagcatagggagacctcgtttctagaaaagtttaaaaattagccaagtgtggtagtgcatgcctrtagtcccagatactcaggacactgaggtggaagactgcttgagttcaggtcaaggctgcagtgagttgtgatcaaccaatgcactccagcctaggagacagagtgagaccctgtctcaaaaaagaaaaaagaaaaagaaaaagaaaaaaaagaacacaacattggagcaatattcccaagataatgaagggtacagccaggactggaagttgaatctcattccacggcttaggatgataaccactgcacta

SEQ ID NO: 439001 - DNA, 587 bp, Homo sapiens
aaaaccatgttgatttggagagcttccaacaaacagcattttatttggagatttcccttagctaattttaaagacataactgatgagcacactctgtttaaatttttaaaaagtaaggaagaaatttcaactattattaatagagctctccctttatttaaccaaatagattaataataactactcaaagcaggtgttctccctttaggggaatggcatatgtatactggaggtatcaatttgaaaagtaaagtcaatatttgtcttagtttacatagcaaaccaaaacaactcttagtataacaaacgaattgttcttggcaaatttttttaygttatttctgataacaagatcagtagagacccagaaaatatttaccaaggaagtcatacacagaaaaagtaacacagtttccataagaccacaaatattatgactatgtgaagcaatccaaatatcccacagtttagatgttgacagaaaaaaacaaccgcaccgtctctacggactgaggctgctgcctgtttgccttcatgtataatggtagattacctggagagatgcacgctcaaacaagatgtgctcc

SEQ ID NO: 439002 - DNA, 572 bp, Homo sapiens
aaaataacattaacaataatacttgtactctacttcttcaaaaacccatctttcctcctggctatgtactttgtctcactacatttataaggtaagtgaatcgttattatttagatgactgctaaagatatrtaagtaaagtcttttttttctttcttttttttttgagacagagtctcgctgtatcacccaggctggagggcagtggcgcgatctccattcactgcaacctccgcctcccaggttcaggcgattctcatgcctcagcctcccaaatagctgggactacaggcgcgcgccactgcgcctggccaattaaagtcttaaatcttagataattttttttgtatttttagtagagacagggtttcactatgttagccaggctggtcttgaactcctgacctcgtgatttgcctacctcagcctcccaaaagtgctgggattacaggtgtgagccacctcgcctggccaagtaaagtcttaaatcttagatactggtctactagtaattcactgcttagaatgaccttgcatttgtgccacatatctgcccatttccattttcctgc

SEQ ID NO: 439003 - DNA, 580 bp, Homo sapiens
gcgggttatgcgcggcgctcgctgctcctcccagctccgcgctccgggctcgctggcgcgctctaccgcgcacaccccgcacacacccactcgccccacacccacgccggccggggagccagtgcgtccgcccggaacgcgggcgccccacctgtgacacattgctaagctgccctctgactgggttctagggaaacacggttcttycgtcccgagatgtgtactgggatcccagcttgtgccgggcacggtgcttggtatgggaaaatcacatagaacaaaacagatttttttaaatccctgccttccggaaacctgcattctggtgggacagatagataataaatatgtaagctaattaataaggtaattttggaggatcagtcctacgtttaccacgaaacaggttaatggaatagagaatggcaggaagggagcgtacctcattagactgggttcctctgccggactggtgttggagccgaggcttgaaggcaagaaggtttgcaatctgaagaaagggttgaggtctccgagacccaaagaagcaacagagacgcagagtttatttgcgctatcc

SEQ ID NO: 439004 - DNA, 595 bp, Homo sapiens
tgttatcagttctcgtaagtgggtaaatcttcatcaaggctacctcttactgaaagttttgtcttttggagacaaaagtgctaaaagtctcatctgctgtctcacttgggtattaaaaacccaacccaacccttcccccatgctgtcagagctggttgtatcttccgtatttatttatttatttttgagatgacgtctcactctgtcgcccaggctggagtgcaatgacacgatcttggctcactgcaacctctgtcccctgagttcaagcaattctcctgtctcggcctcctaagtagctgggattacaggcatgtgccaccacgctcagctaattcttttgtatttttgtaaagatggggtttcaccatgttgccaggctggtctcgaactcctgacctcaagtgatccacctgcctcggcctcccaaagtgctgggattacaggtgtgagccactgtggcccgcytcttccttactttctttcagaggcagatgtacatttaaatgatgcttgctctatgttattaatatgtttctagtaccctgtagctagagggtttttgagtttcttgttcaccatcctgccagattca

SEQ ID NO: 439005 - DNA, 583 bp, Homo sapiens
gaaatttaaaacaagataccatttacatttgyactccccaaaatgaaatgtttaggtacgaatctaagaaaatatgtacaagatctaagtgatggttgatttttggtacccacttgactgaattaagggatactcagttggctggtaaagcaatatttatcctcagttcttccataggcactgaacccattccatggcccctgagaggaaactcatgtggttttgcttttcattagagtgattgagcctcctcaggtgcatctctgaaaaaatttctgaaaaagattagcatgtgttggtagactgaatgggggagatcttccatcagtgtgggcagacaaaatccaatcatctggtgtccagatgaaacaaaaatgtgaagaaagggctacttcttactctatctctgacaaagccaggacaatcttctactacccttggacatcaggactccagcttttctgaactttggactctgggacctgcatcagttactcactaggttttctgacctttgtcttcagaatgagagttacaccatcatctttcttagttctgaggccttcaaacttaactgtgttgc

SEQ ID NO: 439006 - DNA, 583 bp, Homo sapiens
gaaatttaaaacaagataccatttacatttgcactccccaaaatgaaatgtttaggtacgaatctaagaaaatatrtacaagatctaagtgatggttgatttttggtacccacttgactgaattaagggatactcagttggctggtaaagcaatatttatcctcagttcttccataggcactgaacccattccatggcccctgagaggaaactcatgtggttttgcttttcattagagtgattgagcctcctcaggtgcatctctgaaaaaatttctgaaaaagattagcatgtgttggtagactgaatgggggagatcttccatcagtgtgggcagacaaaatccaatcatctggtgtccagatgaaacaaaaatgtgaagaaagggctacttcttactctatctctgacaaagccaggacaatcttctactacccttggacatcaggactccagcttttctgaactttggactctgggacctgcatcagttactcactaggttttctgacctttgtcttcagaatgagagttacaccatcatctttcttagttctgaggccttcaaacttaactgtgttgc

SEQ ID NO: 439007 - DNA, 571 bp, Homo sapiens
tgtcaggaaaagacactgataagaaatatttttctaggctaacagataatttaactcttaaaactataccaagtgtcctgaatcacctggaaaactcacaggtgcctcaaacaggagaaaygtttctcaatccatgatttatttttgtttccctcattattttgggttgccatggtagcatttcctgtgttgtcaaaatttcaattccatggaagtggtgagttgtcactttgaaagtggaaatacattgttatagctattcattgttctcatgtataataccatagtctgacacaagttaatatgttcaatctttcatttatttttttttaacaaatgtttagtggtcctttttgctaagcatcttactagatgttgaccacgtaaagatcaattagaccatgtgagtggcatgaatacagatatgttgtagatagcagaggttgtgtttgggaaactgtgtcagatgtgctaagagtaacaggagatgatgttgggaccaaatattgaaggatctaagtcatgctaaagactttagaatgtatctgttaggatgaaggcttgattgagg

SEQ ID NO: 439008 - DNA, 577 bp, Homo sapiens
ctaaattctaggaaaatcatggtgtacacaaaaatgtagatatgaaaacaaaataagacaattaatataaaaggtacttagatatatttgtaatttattaatttcagagtggaaatagttatcctttcaatagttccctttaaagtcaccttctttgcatgacaaagtttattttttaaaatagtgtttttatttgttttatgaaacttaaatgtgttattttatttattagattaatatataggatcagtttggtgctatgaacttttagtattatttaaaagactaagaaattttgaataaaaaataaaatctgctgtgagatatttcccaaagagatctaaatgtaagaggggccagggtgatcccagaagcccaagtgaaaatctatatccacaaatttctgtctctgaggaggaaaaaaaargaagtctattaatctgttggcttccttctatagaaaataactagcttttggtatttaagagtgccatgtaacatttgtatgttcattctaaattgatataactataattgtgggtagttatacagatttataacagactggattgaacag

SEQ ID NO: 439009 - DNA, 614 bp, Homo sapiens
aaattttaaatatttatacatactataaatgtataatatctttttgtatctttccttaggccaagtattgcacattggaacattcctggttctagtgtacaaaaacaaacaaaataacaaccaaaaaaaattgatagaatctaaatgtacacttctaagttttcatttaaattttgcataaatgatctaaaagagtctgaactctgagtcctaactgccatcattgttgagcaaaagtcttgagcaaatatgaagagaaatgtttgatatagactggaaattataggtaggagagttaactgaccacaaatatcctgcctwttggaaattgtggggctgtgtttctttagagggacctcacctccctgttctcccttttgtttgggtcaagaatgaatgtggtctcatgtgggagaataaacattttggattcaggcactaagcagtctgaggttatatgctggataatttaggaaggccttgggggaaaactaacatgctagaacctagaaactttgggaaatccattcctgtggaaagttgagctgtgtacagtttctacagtggggaagaatggtggtttgttaatttgttaactaatttgttaacaggca

SEQ ID NO: 439010 - DNA, 540 bp, Homo sapiens
cttcacacatgctttccctccactctgcccaggcccatgagtgccactgctcctcattattcccatgactttatagctttgtttttttccaaagcctcaaacatctttcaggaaataacttatataatatttagtgataaaaatatttctrtgaaagggctcaaaaatcaatctgccatgcagagcttgggcacaaatttcacactatactctccattgtttatttgtttttttaaaatgtggtaaaaatgcataacattaaatttacagtcaagcatttttatgtgtatatttgagtagtgccttagcactactcaatgtatattcacattgttgtgaatcttctagaactctttcatctttcaaaactaaaattctgtatttattaagcactaactctccttctgctatctctccatccttggcaaccatcattgtactttctctttctctgattttgactcttaaatacttcatatgagtaggatcttaaagtatttgtcattttctggctgtcatagtttacttatcattatgtcc

SEQ ID NO: 439011 - DNA, 590 bp, Homo sapiens
gtacaaactactatgcatgtaggccatatggtatagcctattgcgcctaggttagaaaactgtacagcatgttactgtactgaatactgtaggtgatcgtaagacaatggtcagtatatatgtatctaaagatgtctaaacaaggyaaaggcatagtaaaaatatggtaaaaaatatttaaaagaagatgtacacctgtgtagggcacacaccatagatgaagattacaggactggagttgttctaattgagtcagtgagtgaatgataagtgaatgtgaaggtataagatattactgtatgctactgtatactttataaacactgcacacttaggctaaactaaatttatttaaaaatgtttttctttcttcaataagaaattaacttcagcttactgtaacattttaacttcatatacttctaaatttttattaactttttgactcttgtaataatgcttaggttaaaacagacacgttgtacagttgtacaaaaatacattcttttttatatccttattctataagcatttttctatttaaaattgtttttatttatttttactttttaaactttcttgttaaaact

SEQ ID NO: 439012 - DNA, 590 bp, Homo sapiens
gtacaaactactatgcatgtaggccatatggtatagcctattgcgcctaggttagaaaactgtacagcatgttactgtactgaatactgtaggtgatcgtaagacaatggtcagtatatatgtatctaaagatgtctaaacaaggcaaaggcatagtaaaaatatggtaaaaaatatttaaaagaaratgtacacctgtgtagggcacacaccatagatgaagattacaggactggagttgttctaattgagtcagtgagtgaatgataagtgaatgtgaaggtataagatattactgtatgctactgtatactttataaacactgcacacttaggctaaactaaatttatttaaaaatgtttttctttcttcaataagaaattaacttcagcttactgtaacattttaacttcatatacttctaaatttttattaactttttgactcttgtaataatgcttaggttaaaacagacacgttgtacagttgtacaaaaatacattcttttttatatccttattctataagcatttttctatttaaaattgtttttatttatttttactttttaaactttcttgttaaaact

SEQ ID NO: 439013 - DNA, 546 bp, Homo sapiens
tattgagacaggccaggcacagtggctcatgcctgtaaacccagcactttgggaggccgaggcgggtggatcacctgagatcaggagtttgagaccagcctggccaacatgtcgaagccccgtttctactaaaaatacaaaaattagccaggggtggtggtgcacatctgtaatcccagctacttgggaggctggggtaggagaatcccttgaacctggaaggtggaagttgcagtgagccaagatcatgccactgcactccagcctgggcaacagagctagactctgtctaaaataaataaataaataaawaaaccccaaaaaacatatatacacacgcacattgagacaaacagaaatgaaaatataacatacgaaaacatgtagaatgtagcaaaagcagtaccaagaggaaagtttacagtgataaacactcacatttaaaaagaataaatgtctcaaaattaaaaatctaactttacatctcaaagatctagaaaaaggagaataaactctgctcaaagttacccaaaaagaggaaataat

SEQ ID NO: 439014 - DNA, 498 bp, Homo sapiens
ttaattaccattatagacagcaacagtagataggtaactgttgggcatgtgacctgccagaacctacgaagttgagcagagagcatgatgttcttagggaaagattggatgtgcaatcagcaatgacatgttttgacctgcatgacgagaaaaaagaaaaaatcaagggcttgtggacaaaggcttatatctgttgccacagtaacaaagcagcagcccttaacctgttctaagcctgtgagtttcagaattcattgattatgtatgctaatatgtcttttaaaagtcttgaactgtcgctaaaaatatataaaataamtattccttgaaatctttcccaaagggacctgtagtcatttatgagaattaaaaaaatcagtgaaatgaaagtactgacataatttgaaagttgttagaatcatggtctaaactattacttatgtcatgggctttaaaatatcattatgactagtttattagggtagggtattatggaat

SEQ ID NO: 439015 - DNA, 498 bp, Homo sapiens
ttaattaccattatagacagcaacagtagataggtaactgttgggcatgtgacctgccagaacctacgaagttgagcagagagcatgatgttcttagggaaagattggatgtgcaatcagcaatgacatgttttgacctgcatgacgagaaaaaagaaaaaatcaagggcttgtggacaaaggcttatatctgttgccacagtaacaaagcagcagcccttaacctgttctaagcctgtgagtttcagaattcattgattatgtatgctaatatgtcttttaaaagtcttgaactgtcgctaaaaatatataaaataactattccttgaaatctttcccaaagggacctgtagtcatttatgagaattaaaaaaatcagtgaaatgaaagtactgacataatttgaaagttgttagaatcatggtctaaactattacttatgtcatgggctttaaaatatcattrtgactagtttattagggtagggtattatggaat

SEQ ID NO: 439016 - DNA, 610 bp, Homo sapiens
aatatctgtgagaaagaagcacatatcaagcgtgagttgggttgggtaagggttatgagggccattttgatgggtttgaaaaacagctacgaagattgcataaaagaagcacaatgagctgaaacagtaggaaagcatgagactggagtagtgacaaaatgatgaagggtcttggggaaattgtgaagattctgtgtctgtgttaattttgatggaccatcattagaaggttttgagctggtgagtactatgacctgattcgcgttttttacttgattgctttcattgttctgtgaagaatagcatgttgatgttaaacatggaagcaagattagaggttgttgtagtagctttatgtggtggggttgtccgagtacatcagaactaaacatcctcagagcattgcacaagtaagttgtttataattatttgatttgttttatatccatataataattacatcaatatgtctcaaaagctattaaatacaatctttaaatttccatgcttcattcagatgacgaaaraagaatttctaaaaggaataattgaaagcaatctattgttcataacatcagaaagaataaatcttgtacttcagaaatatttg

SEQ ID NO: 439017 - DNA, 533 bp, Homo sapiens
gtaacacctcttctaaatggtcaacttgaccatatgcttaaatgagtattgtaatagataattcattatgtcataagacagcctattctctcttcagccaacctctaactaaatttaattttttatttatggcaaaatagcagcgactctttgctcaactgcagagaaagcattttcatgtttctgcatggttagatttctctgaacataaaaaactggcatctcagctaaagaacaagattttgaacttaacagactattgaataaatagaaacctctggaaatatgtagaggttcctcatctccaaaaaccataagtttatactttaaaatttaataaaaccagaggtcagtcatctatattctaaagagtcataaattaggtatttatttttctttagaaataatatttgtttacattagggagattagttttctcttccactctaatgaataggggagagtaggtctatagccgttttcatataaactccagactcataatgytgtggttccttttctatggtagatac

SEQ ID NO: 439018 - DNA, 577 bp, Homo sapiens
attcacaatagcaaagacatggaatcagcttaggtgcccgctaatgatggattggataaagaaaatgtgatacatatgtagcatgaaatagtacacagccataaaaaagaacaaaatcatgtcctttgcagcaatgtgaatgcagttggaggccataatcgtgagcaattactcactgtcatctattgkttttttgacttttagatagaagccattctgacctgtgtgcaatagcatttcatggttgttttaatttgcatttctctgacaattagtgatgttgagcattttttcatgtttgttggctgcttgtattcttcttttgagaaatctattcatgtcctttgcccattttaatgggttatttgtggggtttttttattgttaatttgtttaagttccttacagattctgattactatacctttgtgagatgcacagtttgcaattattttctcccattctgtaggttgtttatttactttgttgatctgttgatagtttcttttgttgtgcagaggctccttagtttaattagatctcacttattgctttttgtttttgttgcaattgtttt

SEQ ID NO: 439019 - DNA, 573 bp, Homo sapiens
gaattatgatgagtacagttagatttcttaagctaccttatagaggacccataaaagtatttcccaataataaccagaaaatgacatggttttcttccagatgtgcaacaaccatgatcgcacatctttgagtacagaagcatttactttctgatcataattccattcttacaggccagtctcaccaattgttttccaagtggtgagaatgacattactggaaacatttttgtgtctcatatttgtttcccatatttaaacggggcaacaaaaccgtgcatttctttgtcctatctggaagataatttttatactcatttatatatgtatttatttatctaataagtgctatttgatattagattgtccatctctttttcatattccttatatgtctgactttaaagcctgttttargtcaaatgtttgtctatttttagtatattcattttcttgaacatactaacatttatagtcttatctctcatcatttcattctctaaaataatttcatttgactatcatgtttcaaatatgcacaattctcattatcttggtgcaattttaaatgtc

SEQ ID NO: 439020 - DNA, 523 bp, Homo sapiens
cttgacctccaaaggagagcaggtgatcctctcacctcagcttcttggtagctgggccttcaggcatgcaccacratgaatggctaattaactcctaaacgtcttagaaatactaccataatatatttccaaaacacatatatccatggaaattttaaaattgtttagtacacaaaattaaagtatgtaggtaaattgaattgttttttttttttttttctgaaagatacattaccaggaatcttcctaatcaaccagattttccctgagaacctgaaataactcagtggagaagatgtctgatccatgccttaatgatgatgatattttgtttctttgcaaataaaaatactatcatttatatagtagttactatgagacagctactaacagttaaacaatttgtccaagatcaccaatacaggaattggtcaaactagatgaatcaaactgtctggctcctgtgtccatgctcttatctgttttgaattactactgcttaatgaaaagctgtggcaacaaa

SEQ ID NO: 439021 - DNA, 614 bp, Homo sapiens
ggtattgcaaagtaagactctcaggaaatgattcaagggaaggacatttgagatctcaaayacttgatagacatagtatttaagtagcttgaaggtcttccaactggtgaacccatccagtggcaagcataaaaatgagatacacatgcaaggtgtcagcaaacaatgaaagactgaagggaagacccaaaggccaatttagtcctttataatttgtggatatttataactacaattaggccactgatttgtgaattgaaaaaatgcaaaataaaaaatggttttgaaaaattattaaccatagatattttcatttaaatgatatgcaagcccaaagggaaacactcacaaaagaggatatcctggctgattctaggacattgttctgggtcataactggtactatctatggggaacctgtaagtatacataattagaaaatccttgggtcctttgacccaagagcatatgagaagctccttaaatatgggtcaataagaattcagttattagttcttaatttatggtcttacgtgataataaacattgttcccaggtattgtaagaccctcatggcaaggggaagatatcaaatccaataaagtcttatttgg

SEQ ID NO: 439022 - DNA, 396 bp, Homo sapiens
atcatgtgctgaatataagaagcccaactaaatttaaagatataaagtgaaaaggtggaaaaatatctaccatgccaaaagtaatcaaaactaaaggagttatattaatatcaaatgaactatattgcagagaaaaatattctaacatggataaagactgtcacttcataagtttaccaaaaggacagaaaaaccctgactatttataaactcagtaacaagactcacagatttacaaagcaaaaactcagaggactgtaaaaataaatagataaattcacaattataattggatacatyaacactcttctctcaataagtgatagaaaattttgacacaaaatcagtaataacatagaaggcttaaacagtctatcaactaatttaacctgcttg

SEQ ID NO: 439023 - DNA, 564 bp, Homo sapiens
tatatgccagtcatcatggtgtgtgcctatattcccacctactcaggatgctgaggcaggaggatcgygtgcccaggagatggaggaggcagtgagctatgattgtgcaactgcactcaagcctttgtgacagatcaagatcctgtctctgaaaaaaataaataaatcataaaataaatcaaataaaaaacagttatttgtaaaaactgatacgttgaatctacttctagccaaattaaccatgcaaaaaagggagatgacaaaactaccactatcaaaattgagagagagaatatccctataaatcagataaaataataagtgagaaatctgaataacctgtggcagtttaaaaatatttctataattctttataagtccccctttgaaaagtagagctttattgtgctcttctcagtgagggcttgatttggtgatttgtttctaatgaataatgtaaggtagaaatgattatgtaccagcttagaagctacataatgaaagacatagtggcttccttctctctcttgaatcacttgctctgggagttttcatattgtgagg

SEQ ID NO: 439024 - DNA, 554 bp, Homo sapiens
gctggacagaattactctgccaaatatggaaagtaatgtcattctttcatatttgtggtcaagaatggcaccacaaactgctagatctccaaaatacatagcttggaagccatttctgtaagagaaggtgtattagtccattctcatattgccatgaagaaataccatcctgggagatggaggttgtagtgagccaagaaagtgccactgcactccagcctgggtgacagagcaagactctgtctcaaaaataataataataaataaaaacaaataaacaaaattaaaaaaaagaaatacctgaaactgggtaatttataaagagaacgaygtttaatggactcacacttccacatgcctggggaggcctcacaatcacggcagaggcgaaggaggagcaaacgcccatcttacatgacagcaggcaagagaaaatgtgtgggggcactaccctttataaaactatcagttcgcatgagacttattcactatcacggaaacaacccacccccatgatttcattacctcccactgagttcctcccatgacacatg

SEQ ID NO: 439025 - DNA, 554 bp, Homo sapiens
gctggacagaattactctgccaaatatggaaagtaatgtcattctttcatatttgtggtcaagaatggcaccacaaactgctagatctccaaaatacatagcttggaagccatttctgtaagagaaggtgtattagtccattctcatattgccatgaagaaataccatcctgggagatggaggttgtagtgagccaagaaagtgccactgcactccagcctgggtgacagagcaagactctgtctcaaaaataataataataaataaaaacaaataaacaaaattaaaaaaaagaaatacctgaaactgggtaatttataaagagaacgatgtttaatggactcacacttccayatgcctggggaggcctcacaatcacggcagaggcgaaggaggagcaaacgcccatcttacatgacagcaggcaagagaaaatgtgtgggggcactaccctttataaaactatcagttcgcatgagacttattcactatcacggaaacaacccacccccatgatttcattacctcccactgagttcctcccatgacacatg

SEQ ID NO: 439026 - DNA, 554 bp, Homo sapiens
gctggacagaattactctgccaaatatggaaagtaatgtcattctttcatatttgtggtcaagaatggcaccacaaactgctagatctccaaaatacatagcttggaagccatttctgtaagagaaggtgtattagtccattctcatattgccatgaagaaataccatcctgggagatggaggttgtagtgagccaagaaagtgccactgcactccagcctgggtgacagagcaagactctgtctcaaaaataataataataaataaaaacaaataaacaaaattaaaaaaaagaaatacctgaaactgggtaatttataaagagaacgatgtttaatggactcacacttccacatgcctggggaggcctcacaatcacggcagaggcgaaggaggagcaaacgcccatcttacatgacagcaggcaagagaaaatgtgtgggggcactaccctttataaaactatcagttcgcatgagacttattcactatcacrgaaacaacccacccccatgatttcattacctcccactgagttcctcccatgacacatg

SEQ ID NO: 439027 - DNA, 602 bp, Homo sapiens
aatgcagtattaaagaaaccagcccttttccatttcaaagaggtagtgaggaagctacagtacctgtcattctactttcttctataaaatgtgagaagtgaagaaaagagaaaatattgacttgtgaaataaaggatgaaatcatttggggtcttctgtttagagaaggcaaataaaataaagagagtattaattaaaaggacccagagaccacttaatattaaggaaaaatggcattgactcattaaatgtcctttcgttggtaaataaaggagagagaaaaaaactgaaagatgaatggaggaaaaaggaatgaaagaaataaagtaagagaggaagtaatccttataaaaagaaaatagaccaggagaatttgggaaaatagaaacctaaataaaaaactgtagcatcagtagattactttaaaygcttgttttctctagtagttaaatgtaaaataatataacaaggatacaaaattttggggtcacccattagcaaagattaaaaagaaatttaatatccagtttgggcaagtatgtggaaaaacagtcttgtacactgctagtggaaatataaataaataaactgtgtgtggaact

SEQ ID NO: 439028 - DNA, 613 bp, Homo sapiens
tttgtgaattaaggtggagtgatttcccagatacattaagtaaaagaaaaaaaagcaataagtaaaaaaaatttatattactatattttgtgtaaaaataaaggggcaatatattttcttggctttataaaaagaaataaagaaaagataagacaaaaactaatgaaaatgtttataggtgytaattgggaataaatggaatgaatagggataggagagagtttttcaatattaccttttaatataattttgacatttgatccatgtaagtggtttacatattattttaaaatcaaatgaaattttaaaaatgggaaaaaaattactaacattgaaaacaaatagaacttcactgtacataaagttgataacatagccaaacagaagaattaattcaagtaacttttatacatggaagtctggttgaaaatccttagaatattttaggggcagaaaaaacaaacaaagaagcttgactcggttgttagttgtcttagtggaataattctggaactttctgtgtatatgtaagatagagcaaatgagtaaatgaattggttctttggtgaaccaagtcccttgctgtggggaaggggagatacacttgtggaat

SEQ ID NO: 439029 - DNA, 613 bp, Homo sapiens
tttgtgaattaaggtggagtgatttcccagatacattaagtaaaagaaaaaaaagcaataagtaaaaaaaatttatattactatattttgtgtaaaaataaaggggcaatatattttcttggctttataaaaagaaataaagaaaagataagacaaaaactaatgaaaatgtttataggtgttaattgggaataaatggaatgaatagggataggagagagtttttcaatattaccttttaatataattttgacatttgatccatgtaagtggtttacatattattttaaaatcaaatgaaattttaaaaatgggraaaaaattactaacattgaaaacaaatagaacttcactgtacataaagttgataacatagccaaacagaagaattaattcaagtaacttttatacatggaagtctggttgaaaatccttagaatattttaggggcagaaaaaacaaacaaagaagcttgactcggttgttagttgtcttagtggaataattctggaactttctgtgtatatgtaagatagagcaaatgagtaaatgaattggttctttggtgaaccaagtcccttgctgtggggaaggggagatacacttgtggaat

SEQ ID NO: 439030 - DNA, 597 bp, Homo sapiens
ttattagttgaataaataattatttcttttcttttcttttctttttcgaggtggagtctcgctcagccacccaggttggagtgcagtggtgtgatctcagctcaccgcaaccaccatctcccgggttcaagtgattctcccatctcagcctcccgagtagctgggattacaggcacctgccatcatgcctggctaatttttgtattttagtagagacagggtttcaccatgttggtcaggctggtcttgaactcctgacctcaggagatctgcccgcctcggcttcccaaagtgctgrgattacaggtgtgagccactgcgtccagccataaataattatttctatttactactatgtgccagaaactgttctaggggctgaggacacaagtcaaagtgcctgctctcagggagcattttcattcaattctatgaggtgcaatatcctgactttgattagtcaggtgagatatgcaattgacttattataaaatcaataatcgttgcacacatctctttcatccagttctatatgtttattaatacataagggaaccaataaggataaaacatgctgtcagaattatgatgatttta

SEQ ID NO: 439031 - DNA, 534 bp, Homo sapiens
aaacatcttacatggcagcaggcaagagagcgtgtgcaggggaactgccctttttaaaaaccatcagatctcgtgagacgtattcactaacaygagaacagcatgggaaaaaaatgcccccgtgattcagttacctcccaccaggtccctcccacaacacatggggattatgggagctacaattcaagatgagatttggctgaggacacagccaaaccatatcagtagggcataactcaagatggaaaaatagaataaatgactaatcctaggatagtttaataggataccttaatttctgtcctactttccaaaaagtttctggagccaatgtctgaagtgtcctttcaatggaacctggtggataggcaagagtggtgatgaatattgggaaggtgaccgtggaacagtaggagcaggacgtctctaaaggtacagtaaactccttcttcaaagaaaacatccacatattggttgatcagatatttgatcattagctccaataagttttagctattggtaattaattgtgat

SEQ ID NO: 439032 - DNA, 589 bp, Homo sapiens
ggtggcagacaggacaggatgagaaccaagcaaaagggttagcccttataaaaccatcagatctcatgagacttattcactaccatgagaacagtatgggggaaactgtccccatgattcaattatctctcaccaggtcccttcagcaactcgtgggaattatgggagctacaattcaagatgagatttgggtggggacacagccaaactatatcagacctatgtctatcatattaataaccttccaagacagaaatcaacagtcccaaatcgattatcagtaaattctctcaaatatttaaggaagaaattgtgccaattctctacaagytccttcagaagatagaatcagaaggaatactttcaaacttattctacgaggcaatcattaccctaataccaaacaaaaaaaattacaagaaaagaaagctacagaccaatatctctcatgaacatagatgaaaaaaatcctaaaaaaattgagcaaatcaaattcaacgagtaaaaaaaattatacatcacaatgaaatgacttttatttcaggtatgcaaggctgattcaacattagaaaatcaattaatataatcc

SEQ ID NO: 439033 - DNA, 589 bp, Homo sapiens
ggtggcagacaggacaggatgagaaccaagcaaaagggttagcccttataaaaccatcagatctcatgagacttattcactaccatgagaacagtatgggggaaactgtccccatgattcaattatctctcaccaggtcccttcagcaactcgtgggaattatgggagctacaattcaagatgagatttgggtggggacacagccaaactatatcagacctatgtctatcatattaataaccttccaagacagaaatcaacagtcccaaatcgattatcagtaaattctctcaaatatttaaggaagaaattgtgccaattctctacaagttccttcagaagatagaatcagaaggartactttcaaacttattctacgaggcaatcattaccctaataccaaacaaaaaaaattacaagaaaagaaagctacagaccaatatctctcatgaacatagatgaaaaaaatcctaaaaaaattgagcaaatcaaattcaacgagtaaaaaaaattatacatcacaatgaaatgacttttatttcaggtatgcaaggctgattcaacattagaaaatcaattaatataatcc

SEQ ID NO: 439034 - DNA, 589 bp, Homo sapiens
ggtggcagacaggacaggatgagaaccaagcaaaagggttagcccttataaaaccatcagatctcatgagacttattcactaccatgagaacagtatgggggaaactgtccccatgattcaattatctctcaccaggtcccttcagcaactcgtgggaattatgggagctacaattcaagatgagatttgggtggggacacagccaaactatatcagacctatgtctatcatattaataaccttccaagacagaaatcaacagtcccaaatcgattatcagtaaattctctcaaatatttaaggaagaaattgtgccaattctctacaagttccttcagaagatagaatcagaaggaatactttcaaacttattctacgaggcaatcattaccctaataccaaacaaaaaaaattacaagaaaagaaagctacagaccaatatctctcatgaacatagatgaaaaaaatcctaaaaaaattgagcaaatcaaattcaacgagtaaaaaaaattatacatcacaatgaaatgacytttatttcaggtatgcaaggctgattcaacattagaaaatcaattaatataatcc

SEQ ID NO: 439035 - DNA, 568 bp, Homo sapiens
aagttatggaacttatgaagctatataaaattgaggttaagaactggggcttgagtttcattgccttgagttccagtcctgacacaatcattaactagctgtgtgattgtgggaggaaaatggactctctaagcctcagtttctttacctatgaaatgggagtgggaatggagaataggagctactgcaaacagttgttttgaggattcatgtcagactagaaatacttaattattatcatcaaagtgattaaggtataaatttcagagatggaattcaaacctcaagctcatctcatttcaccatattgccctttagatggtgttcacaaaggccaacatttttcatggcgagatktctagaatttgaactttagaatgatccttctggtcaatttaaatctgctgtgaagcaagttgcccacctacaggtaaagcccccgttatgtcttaaaatgaatgatgaaaatggctgcaagaatttgggagggaggccctgagtcccatataatttcatgttgcaggacatggaatggaaggacatggaagatacaaatagagtcggacaa

SEQ ID NO: 439036 - DNA, 503 bp, Homo sapiens
aagttatggaacttatgaagctatataaaattgaggttaagaactggggcttgagtttcattgccttgagttccagtcctgacacaatcattaactagctgtgtgattgtgggaggaaaatggactctctaagcctcagtttctttacctatgaaatgggagtgggaatggagaataggagctactgcaaacagttgttttgaggattcatgtcagactagaaatacttaattattatcatcaaagtgattaaggtataaatttcagagatggaattcaaacctcaagctcatctcatttcaccatattgccctttagatggtgttcacaaaggccaacatttttcatggcgagatgtctagaatttgaactttagaatgatccttctggtcaatttaaatctgctgtgragcaagttgcccacctacaggtaaagcccccgttatgtcttaaaatgaatgatgaaaatggctgcaagaatttgggagggaggccctgagtcc

SEQ ID NO: 439037 - DNA, 518 bp, Homo sapiens
tctaccttaatgaatatttactaagcaccagttgtgtcaggttataatagatatggagacacagtctttcttcaaggaacattgcatctatgggaaggaaagcacatgaccaattgtgatggttaatattcagtgtggacttgattggattgaaggatgcaaagtattgttgctgggtgtatctgggtgttgccagaatagattaacatttgagtcagtggactgggagaggaagacccaccctcagaaagacccacccacaatgtgggtgggcatcatccaatcagatgccagcacagctagaaaaatcaggtagaagctggagggtgctgacttgctgtgtcttccagcctccatctttctcctgtgctgatgcttcctgtccttgaacatcagactccargttcttcaattttttaactcttggacttaccagtgggtttgccaagggctttcaggactttggccacaaactgaagactgcactttcagcctccctactttttttttttaaatgg

SEQ ID NO: 439038 - DNA, 648 bp, Homo sapiens
ttcaaaatgataagtcaggtctaaaatggattaaccttcctgtttctcagtgtgagaagtaatgagtgaggcaaatgtaaattacttttattgtttttattggcacaagtcaaagaaaatgcatcaaaaagaacatcaactctgaaggagtaagttggtttcctatttcagccaatacttgctgccatctgctggcctaaacggaaagctgcaaggaatggacagctgtgtasagggagttggatcaggtttgtgccagagcatttacatagggcagggaggagttaattacccagaattgtccttttagaaatactgtccaccccagcttcagagccagcactttctgactggcaaagagaagaagagggtagatggttgatggctatctgtccccagagtaataagtatttgccgtggtctaagagtctggtgatgggcacctttatttcaagctccaccttccttacgctggtttgcaaagcaatagagtgcatttcttattgtgtggcataacatttcctaaaatgttgtctcaaggaaaactctctctccttggtcagtggttgaaggttaggtacaaattgcaacattcagacacagaattttgaaatatgtgggtgttgattctaaaataaggaaaggccg

SEQ ID NO: 439039 - DNA, 648 bp, Homo sapiens
ttcaaaatgataagtcaggtctaaaatggattaaccttcctgtttctcagtgtgagaagtaatgagtgaggcaaatgtaaattacttttattgtttttattggcacaagtcaaagaaaatgcatcaaaaagaacatcaactctgaaggagtaagttggtttcctatttcagccaatacttgctgccatctgctggcctaaacggaaagctgcaaggaatggacagctgtgtagagggagttggatcaggtttgtgccagagcatttacatagggcagggaggagttaattacccagaattgtccttttagaaatactgtccaccccagcttcagagccagcactttctgactggcaaagagaagaagagggtagatggttgatggctatctgtccccagagtaataagtatttgccgtggtctaagagtctggtgatgggcacctttatttcaagctccaccttccttacgctggwttgcaaagcaatagagtgcatttcttattgtgtggcataacatttcctaaaatgttgtctcaaggaaaactctctctccttggtcagtggttgaaggttaggtacaaattgcaacattcagacacagaattttgaaatatgtgggtgttgattctaaaataaggaaaggccg

SEQ ID NO: 439040 - DNA, 569 bp, Homo sapiens
actgcccagtgccgtagaacaacttctgacttcctttcttgaattttcctttttctgagtacctgggaggttacctttggtaaagttcaaaagctacaagtatttgctgttttgcctggctagagtctgataatgagattttttttttttaaaagaatgctatggttaaaagtcagcttaattaaaagtggatattcaagctctaacagcctgggactccttgggaaaaacaggaggcactacagaccctgtttgaggaaaaacctctgctttcttcatgaaaacccagaaattgaaatcagatagatccctctcaaaatctaaggctctcctctgttttgcaytgtgatgtctgacagtattgacttttaggggtatcagaaattactttgcattatgagagagctttggtgtgtaataactaggtaggaaatatacttttggggatggctaatggcagttatagggagatacttggcattttgcatgtttggattagagaatcatgttcttggccacctagaaagtatgaaaatgtccccattccccactgagagatgagactccta

SEQ ID NO: 439041 - DNA, 565 bp, Homo sapiens
gatattccttctatggaacaaagttgtgttaaaactaatgtaaaaagcctatgtgaaaaataatcattcttgctgcacttcatataaataatcaggccaaggataataaagcaagtcggtcttactatcatttgtctttagtaaaaatgggagactggaaagagaaaaattacgtttctaaaactattgtgcaccctatcagattctagtctcatcagttatttttgagggttttttgttgttgttgttgcaatttggacttaccctgcttattcctgtaaaccaactagtgatctccagctgcagctcagaataaacgtgagggatgggtaatgtaaaaatccagatcagtattctacatctgggtacatattgggatcagttagcaatcccgtatcagcttgcttccaacagtggtgtagttcatggaaagccttcttatttagtttactggggataattttccttattttgctttactgttgtggaatttattactattgcactcttygtataggaattcaggataagcttactgaatgttttattgaattaaatacttatt

SEQ ID NO: 439042 - DNA, 578 bp, Homo sapiens
cttcatttggcaagagtcttggctggtgacagctcatcattgagttccttcctaggctttgcctagctgaaagttwcatctcctcccctgtggtcacctatatccaatgactggttgatgcagagacacaggagtccataccttttgtttcaaccaggacagctataaagggccatctaaacagctccccatgccatcagctgaggtttttattctgatggcatggcagttcagcatctcccctggacaagtacgttttcttcactcggtcatgtgtgttctggacagcactcccagataaactttctgaatacaaatctttgtctcagaatcttttctggggaactcacctaagacaactccagacataatttgagatacaataggctattctaacagaaataacatagagtttggaaagcataaaagtacatatgactcagtcattagaagtactgacttgtggtctctatggtaacaaagtggaatttcaagattagtactgatttactaaaccaatttagattccactgacaaataactggaaaggagagaaattgtaccagggctgtgactct

SEQ ID NO: 439043 - DNA, 578 bp, Homo sapiens
cttcatttggcaagagtcttggctggtgacagctcatcattgagttccttcctaggctttgcctagctgaaagtttcatctcctcccctgtggtcacctatatccaatgactggttgatgcagagacacaggagtccataccttttgtttcaaccaggacagctataaagggccatctaaacagctccccatgccatcagctgaggtttttrttctgatggcatggcagttcagcatctcccctggacaagtacgttttcttcactcggtcatgtgtgttctggacagcactcccagataaactttctgaatacaaatctttgtctcagaatcttttctggggaactcacctaagacaactccagacataatttgagatacaataggctattctaacagaaataacatagagtttggaaagcataaaagtacatatgactcagtcattagaagtactgacttgtggtctctatggtaacaaagtggaatttcaagattagtactgatttactaaaccaatttagattccactgacaaataactggaaaggagagaaattgtaccagggctgtgactct

SEQ ID NO: 439044 - DNA, 578 bp, Homo sapiens
cttcatttggcaagagtcttggctggtgacagctcatcattgagttccttcctaggctttgcctagctgaaagtttcatctcctcccctgtggtcacctatatccaatgactggttgatgcagagacacaggagtccataccttttgtttcaaccaggacagctataaagggccatctaaacagctccccatgccatcagctgaggtttttattctgatggcatggcagttcagcatctcccctggacaagtacgttttcttcactcggtcatgtgtgttctggacagcactcccagataaactttctgaatacaaatctttgtctcagaatcttttctggggaactcacctaagacaactccagacataattygagatacaataggctattctaacagaaataacatagagtttggaaagcataaaagtacatatgactcagtcattagaagtactgacttgtggtctctatggtaacaaagtggaatttcaagattagtactgatttactaaaccaatttagattccactgacaaataactggaaaggagagaaattgtaccagggctgtgactct

SEQ ID NO: 439045 - DNA, 619 bp, Homo sapiens
aaaaccataagaaaaataacttttcagcacaaaagcttagaggcccttgaggatagatgatgccagaaaaatgtgagattattgtttctgccagggtatattaatactataaacatagattatttactgagaaaaaagatccttgaaaacgtaccaaatgcatgatgctgaatataaagttaaacagcaaaaacagagtgccaacaaaacatagattccttgcccttctttcttttccagtgtacagaaacatgactgatgtctcatagggatccagtggattcaactgggcaccaaactgcattcattcattttctttctcattctttcttctctttttagattcttcatctcattaaacttatagataaccatctactaattgaagagcttaatgctcaagttcattattttgttcaacaaatgtttatcaaacaactttgaagtgtctgacactcttctaggcaccyaggatatatcagtgaacaaaatatacgaatttcctgccctattggaacttacattatagtggcagtagatggtatagacagaaaacaataaacataacaagtgagtaaattatactgtgtggtagaaattgctatggaaagcaagtaga

SEQ ID NO: 439046 - DNA, 549 bp, Homo sapiens
tatgataaaataattaaaatagctcttgacaactttggaaagaaaacaaagaattttgttaatggctagacctaataaaaaatctgatgtgctaaactagagaaactgacaagcacaattccccccacaagaataatttgttaccaatgatgaaactgagaaattaaccagaatgaaagttgtgagatttatagtgaaagccctccgggtaaaattaatttctttataacacmgtttaaaggcaaacaaaaggaaattgcttgtgccagatggggtacggaaggcattgtgaatgaaaatgagcatctcttttctgcttacaaatatttgaattaagatgataccagcgtgtctagttaatggaaaacagtattgatggttgtacaacttttaaagatttcctcattccttttaaatggactttgtcaacacaacaaagtactttaagcaatatattaagcctgccacttactatcacagcacatgtattctccttgaattattgtttcaggcaaaacaggaagaatacaatggctagaatgctgggct

SEQ ID NO: 439047 - DNA, 567 bp, Homo sapiens
cctaactgcattaccacacactaattagttgccccaatcatgcctgcggtttccacagtaagtgtgtgacttatcctgcttttgcatatctttttccatgaaactatatctaaccacttcggttttcaatgaatgcctaatagatgaattccctgcacaatgcttttggaacttaatcatctgttgtcatctttcatttcaaaaaatgacatagaattctatggccacttaaaattgattataaagatcctgagtacatgaatttcattttattctctataccacctaatgtcattttaggaggtactgaaatgtatttgttagaaatgcataaataattgagtaaatgaataaatgaaaacactgtctttgaaacacaccacgtttatgatttgttagtgattatcttgccccatctggtgactgaatttaaaaatctgaattctagttcagtaggraggcattttaaaagtcttgtgagattccgtgactttttgccacaaacagccctgaaataaggtcctttcaaaccttttgaagagctagagatttggaggttcagactca

SEQ ID NO: 439048 - DNA, 608 bp, Homo sapiens
acttaaaaaaacagcctatgatagtttgaatccccctccacttgatgagcagagatttgcctcttttggggggttctcattttcagacattgatgatgggaaggaaggaatgaaggtatgtctccaggtttagatacactacagtccaacctgctgtttgttggtcaccttagccaatccccttgtttctgacaactgttacactttctatagatcatcatttctcactagtagttgctattttacacagcccctcttccaaagcacagctaaaaccaaattgtaacatataacaaaacagactcgtggttgtgttgatttttctagggctgctgtaacaaattactgcaaacttggtggcttaaaaccacagaaatatattctctatagttctggaggcgaaaagtacaaaaccaaggkgccagcagggtcacactctctccaaaggatctagaggaaggagaattttttcttgcctctaccagcgcctggcattcctttgcttgtagatgcactgctccaatctctgcctccagagagttcctctgccttttcctctctgtgtatccctttttgtctcgaataagaatactccaattagatataca

SEQ ID NO: 439049 - DNA, 546 bp, Homo sapiens
tgagagttttattgacaatgtggagtaataacttctcttcatatagattttcaaaccactttattttcacttacctcattgactttatcctgttcgatcttttatgatatctgatgtttctaattctttgggcctttccaagatgctacggagaaaaaaaaaaaaaaagctgcttgcattttacagtatctctctctacaagcccttagatttgaatttcttcattctgataaatcggatgctattgcgccacccatttccatgtactagtatttcaaagttgtggacattacctagagtrtgtgtttagagtatgtgtctttttcttcttgtttgtgtgtgattttccatagaaaagagaattgaaacctgaagctgagctttgttttttgataatacctgaagctaatgaaaataggaatgaggagaatgtcattccaggaagggagagcaatatggttttaatagttactaaaagtatatgtgtgatagacagaataacatctcacccaaaagatgccaatattcctaatccccagaacctgt

SEQ ID NO: 439050 - DNA, 637 bp, Homo sapiens
tgcctttcttgtctaacgcccagaaaattctcaataagattttaaaaataaactctccagatcttgatttcctcctctgtaaatagtgaataacaatcacagtgttgttgcaatcaatatgagttaatatatattttagtaatagtaatccagtatattatttgaataaaccagttttcattactaataaactagtgtatctcagtataaaagttgaaggaagacattttataaacatacttttatataattatgaaaacacttttaaaatacactggacaatgcacaattcaaaagctttggattcaaagtgggcctgccaaacgatggatatttcctgtgggactgttaccagtctttcaattgcagtcctgattgagaatgctgcagttggaagaagtgttttgcaatgacaaaggaatactggttgaactctgatgagtagacttatcatgtgtggcaggaagtaaggttatctgtgtccaggaaacagatggaaacccatagactgcttatgaaagaaatgaattcaggggattagaaagtcataccatttasttttgaggggaaattattgacggagtttgcagtaatttggcttgtcatccccaacatctgttgcctttgccgttacacc

SEQ ID NO: 439051 - DNA, 596 bp, Homo sapiens
tctctgtctttccagatatcagtgcaaaaaaaaaaaaaaagaaagaaaaaaatggtaaacgaaagtgttctttctttcttttttctatccgaagtaaaattaaaaatgtttattaataaattgattccccaggctgtcactgatctactatttgtaaagaaccaatctgagtctcagttttgctcagaacaaaaaacgttattgaatagctaccatgagctaggcttatattcaatgctgggtcagaaatttwaaaaaaaagtctcagcccctgccttcaataaactcttggtttgagaaaaggcattcgatgataaaaataactagtaattaaaagtatagatattataataaaaagaatgaggaattgtaaacatacatggggatgactaatttggctgggtacagcattttgagaaaatattttggaggaagaggcaggtaaaatttggttggtattttggaggtgtatgaaaaggctgacttgaatctcaggaggcagagaaagagattaagggcatccagcaatacaatgagtattgctttacaatgagtaaagtcaaggcattctcaagtgctcacagacctctgaaaat

SEQ ID NO: 439052 - DNA, 534 bp, Homo sapiens
cacttaggataatggcctctagttccattcaagttgctgcaaaatacattattttgttcttttttatggctgaatagtgttccatggtatactacttccatggtattctatgtgtatatatacacacaccattttttttatccattcattatctgatgggcatttagattgattttacatctttgtaattgtgaattgtgctgtgatagatacacaagtgcgggtgtctttttgatgtaagtgcaggtgtctttttctttgggtagatatccagtagtgggattgctagagtgaacggtagatctacttttagaactttgagaaatctccatactgtttgccatagaggtcttacttattcacattcctactaacagtgtctaggcattccctycttaccatagccaagccatttattgtttttgacttgcatttttaattttaatttgcatttccccgatgattagtgatgttgggcatttttaaatatatatatttttttgccatttgtatatcttcttttgaaaagtttca

SEQ ID NO: 439053 - DNA, 460 bp, Homo sapiens
ccaaaatctgctttatctagaaatcatgaaataacaagatggtagcattagtccagactttagagagagagggagggagacagggagagagaaatgcttaaatacaatagttaaacagtgacatgcatctcttcatttttaggaatgttttttcaatactcactctgaaagacatttttatattgctgaaaaaatatstttattgagatcctaacaattatatttgcataaaaacagaggaatgaatcaagatagtaataattttttttatgtttaaacatgagaaaggacacacacacacacactcagacacacacacacagtttgaatctaagctcacctaaatatagacaccaccattcttctcatggcatacatccaaaggacaggcatagtgcatacaaataattacttgatctccatatgactagtcgtgcattttttatttgttttagaaaca

SEQ ID NO: 439054 - DNA, 569 bp, Homo sapiens
acatcatgtcagacctttcatgattcagtttggggtcactgttctagtgatgacgtaccaaaaactgtagacagtattctcatggtgttcgctagtgtcatctttcaagttctaaaggaatttcatccctttgaactggaaagcggaagacaaataatcatccaacttttgagttattttggtggaacagatggattgagttatttatatttatacatatatatatcagactcagggaaaaataaatttggtttagtctactggcacctacattcttgtttaccaataggttgttaatgactggattatgaaaaggctgacaaaaatcttggaaaatattaacaaacttcagataaatttgcagcagatagtaccacgcaacacacctcctaagctttgatttaaaaatactyacacagcttaaaaaaacaaaaacattaaagtcgtagagaccaattattaagcgtataggaacatgatattcatgtatcattaaaacgtagagaccaattattaagcgtataggaacatgatattcatgtatcattaaaataaggattctttcaaga

SEQ ID NO: 439055 - DNA, 563 bp, Homo sapiens
tggggagcattttctccctaaaggggaaatttgagagctgatgagacaattggccacctgaactttagattcagtgttgctgcaatggatsggtcttgtctggcctccctgagctcctcattttcctcaccctgctgcaggcaatgcttttctccctttctttctttcctttctcttttctatcttttctgttactcagggcaactgtctacggtttcagtttgcccagaaaccacatgtggaaactcctggtcagaagatcattccacaccaatttgagtggatcaaagatgaaaaggcccaactagaatcatgtttgagccttcccagtttgatactgggtgctaagcagagtggctaatgtctatgttttgtcacatttattttgctctggctggtttggaagatgttaattgggttaccccatgcaatctcttgggtgacatcttgcaaaattgagaggcttttgcctatggtttcatgaaatggaaaaaggtgattttcctttgtgttgtggtttggcccctagggctatggtgccacaagacaggtcactagggctg

SEQ ID NO: 439056 - DNA, 563 bp, Homo sapiens
tggggagcattttctccctaaaggggaaatttgagagctgatgagacaattggccacctgaactttagattcagtgttgctgcaatggatcggtcttgtctggcctccctgagctcctcattttcctcaccctgctgcaggcaatgcttttctccctttctttctttcctttctcttttctatcttttctgttactcagggcaactgtctacggtttcagtttgcccagaaaccacatgtggaaactcctggtcagaagatcattccacaccaatttgagtggatcaaagatgaaaaggcccaactagaatcatgtttgagccttcccagtttgatactgggtgctaagcagagtggctaatgwctatgttttgtcacatttattttgctctggctggtttggaagatgttaattgggttaccccatgcaatctcttgggtgacatcttgcaaaattgagaggcttttgcctatggtttcatgaaatggaaaaaggtgattttcctttgtgttgtggtttggcccctagggctatggtgccacaagacaggtcactagggctg

SEQ ID NO: 439057 - DNA, 553 bp, Homo sapiens
cagggcaactgtctacggtttcagtttgcccagaaaccacatgtggaaactcctggtcagaagatcattccacaccaatttgagtggatcaaagatgaaaaggcccaactagaatcatgtttgagccttcccagtttgatactgggtgctaagcagagtggctaatgtctatgttttgtcacatttattttgctctggctggtttggaagatgttaattgggttaccccatgcaatctcttgggtgacatcttgcaaaattgagaggcttttgcctatggtttcatgaaatggaaaaaggtgattttcctttgtgttgyggtttggcccctagggctatggtgccacaagacaggtcactagggctgctcagggaaagggaacccagaagcctggcatgccagcaaaagggtaagaatttcttaccattcagacttctggcctctctgtgcaaacgagttataggaatggtaaacatccctctttattcctgtgtaaagttttaattaataggaaaaagaattttcccattaagttagtcttaagctgtagtg

SEQ ID NO: 439058 - DNA, 615 bp, Homo sapiens
gatgcccaggctgggacaagaggaaaaagaagaggggattctgtcatccatctgtgtctgggataaagaaggcagagaggagagttacttaggctggcagtgctaaggagagggatttctgaatggctctaggtgagcttgtggtttgggtggctrtagagagagagttgtcttgaccttgagctgtggcaggagctggttatctgtggtgggcaaataggattcagcaactgagtggccatgacccaccttgcttttcatgatttgaaatagctgtctcctgttctgtagccaggaaactcagtcttctatactctactcaaagtgttgcctcctccatgatgcattcctggaggccctgggagaggccaccactctgctccgtgttcctccatcatgattaatgggaggctgtgcttgacatttgtcgctgcagagaacttttggagctctcagcacctgaccaaacacatctatgttcaaggcccaccatggaagtggaatatagaagagtgactgttggaaatggccaacttctcctcaagagtccatggccgtgtcagcgggagtccctggggtcattcctagctcttccctgggtggttccctcacact

SEQ ID NO: 439059 - DNA, 577 bp, Homo sapiens
gtttttctgtgttgagtgaccttccatccatcacctgggaactcaagatatctctctggggttcccactctgctctcagcactgagccaccacagagatgagcaaaatccaggcccctaccttctaggagctcccggtgtagctggggtgagactcctagtgctytgatgggaaatttgccagggtataattacagaatgcattgtgtggtgtgaccatgagtgttctgggaggtcagggaagacaggaatgactctttaccaaaggcagatggcattcttggtgatagaaagaagtacaacacaattctcatggtagatgtagacaagcaacaaacgcacagagcagcataaatagaaaagaagaaaggaaggaagaaaaaggaaaaaaggcaggaagcaggaagaaagaaaaggaaaaaacagaaagaaaaagaaagggaaagaaggaaggaaggaagggagggaaggagggagggagggagggaaggaacattccacaagttacatgttgacagcagggagaggccacctctatgggcttgagagaaggagtcagaagcttgaatgagccttga

SEQ ID NO: 439060 - DNA, 554 bp, Homo sapiens
gacatatatctctatattctaacatagactgtggattagaaagacttaggttcaaatcccacctccaccacttgctcaaggacacttggcaggtgagcccagctacagccaccaaagacaagatgagcccagccatggggaaagagcaactggattccaagccagggttccgtctcaacccagaagcttttacccacttcttgtagggatggcagagcctccacgagtgtggctggcttgacttttgctgcaataggcaagggggtgcccaagaacttggcctgcagtgactgggattgcaagattctgattccaggaaaggaagcaaggaggttaaaaaaaaaaaaaaaaggctagaaagttaaggagaaaagaaggccttaaagagactggtctggcagggttaatagtttctttccttcaatagagatttcatgccacrttgaataaataaaataccacacaattgcaaaagatgcattccacagtatattagataccaccacactgttacccacatctgtcagctactaccatcagagtgactgatgact

SEQ ID NO: 439061 - DNA, 530 bp, Homo sapiens
cctgagatctggatgctgcatctgttaataaagccccagaccacttataagccaccaggtcacttcttgactcgttataaatccactaaactcatggttccttttcaaggtatagagcctagtcttcccattcctatagttacataactgatatttttagcacaaatgcagtatatttgtctgtataacattttatcttttggttttttaaaatgttgtttataccaatttgtaaagcagggggcaaggataaatgcagactcaaagcgtgagtactcaggcacaggctggcagcatggatgtggtcctttcagacccttgccatcccatgaagaggcatgcttgggatgaacgtgtcttagagtgccatgtgtgcgctgtgtgatccaggagagggatcactgtgctccgttgtcttgcatattartgatggatgtgggaagggatagatctttagctttgcaattggttacaaccttgccagcatgagaaatagcttgtctccccagaaaaattaagtgaggagttcg

SEQ ID NO: 439062 - DNA, 575 bp, Homo sapiens
acacccattttcaactctacaaggctcctagcactctcagtggtgtgtctgggagaattaactgcctgaatgcctaatgacagacatgaggagcagacagcgtgtgtatgtgtcgtgtgtgtgtgtgtgtgtgtgtgtgtgtgtgcgtgagagagagagagagaagtagggaagaggcagtgcctttctctctttgaaattatttgtgactgcatggcagatttccattttcacagcctccatcttctttctgggaatctccctgtgcaaccaccactaccattcctaagtctccagccaggagcctgacctctcagttttcccaagcaggccttttccaatgccttttcctcaagcttagcactaatgcctgccatattcaaggtgccctcacttgctgtgacccactccaggctgacacagtgacttcctctatgggccctccctggtcactctrttgccaaaaagcattccctggggccagtcagagttaagtccagggtggtgcatttcttccttgcttcttccacttctgagctatgaaattatccattgaagcaaatcaataattcatc

SEQ ID NO: 439063 - DNA, 601 bp, Homo sapiens
gtttgtcttttttattcatgtactagaaaatctgtcaatatgaaaactgtcaacgtggcaattcatatcyctttagatctggaaaaaaatttaactattatttctttgctaatgtcttcccccattttgctattctctccttcctgaactcctattactcaaaattaatcctctaattttcttaactcttctctgtctcctgtccccagtccccactcatccctgcatctgttgtctttttattctgagtcttgggagacttcctcagctttattttcaactcgattttaaattttaaaattactgccatatatatatttaattccaagaactctttcttattctctgaatgttttcttttatagaatcctatttttgtttcatcgatgctgcatattttcctacatttctaaagatattaaaaattgttaaaatttccttttgcttttttcattgcatgtttttttctttttccttgttgcttttactatggggagagggatgatttgtccaaatgttttcttactatttgctgatgaaatgcatgaggcaaaaagaaaatctgaggacctcaccatcatgtcattcctcaggtcacaag

SEQ ID NO: 439064 - DNA, 509 bp, Homo sapiens
gctgatgttcctgtgcaggaagaagcaacgcccaggcccactgcccccactctctcagcagattctcattttcagaatcctggaaaccagagctagaaatctgcctccctctgtttaccctgagttccaatgtcaccaacccccttaattaatgctagggtgctgggtcatgcatagcacggtcagcttggtctccagttctggcagcagctgcagccaaggtcaagaacaacgggggctgggttagctcttactcatccacctaaatgccactgcccacgctctccgctctcgcccctcccgctgagcagtggctgccagggcggcaggaagtccttcttcctgggcctggcgccctccagcggtgggcgcagagcactaggctccaaaactaggaagccggctcakcctgcagcagggcagcttgggcagcttcacacctaaaccagcctctaaacgggcgcacctggacaaaacccagtaatttagaaaagcctgtgtttctagac

SEQ ID NO: 439065 - DNA, 650 bp, Homo sapiens
gcaatgtttaaggtaggcaatattttttgcatatgtagatggcagcctgtgyttacagagcctaacgagggaagaggccacggcaaccccaaagtctaattagaaaatcaatgcatccagccctaactgacaacgctaatcatctctttgaactaaagtgtcctagctgcactagaatcattagagcctgtcagcaaaagataagagtttaagatttccgcaaggaaacagggttttttactcagcagacctggacttaatcaatatttccaatatcatgacccacgaccttcctccaattaacaaatgcttatgcttggtaatagacttcacactctggactcctgatggctttgcctgctgtgaggctgcatccctctggacctgcatggccatcttggtgcctacaactgagtagtgcaatgaggttggaagaaaactttaccagggaacctgcttttactgtaaattcttgaccacagccctcagattggcatccaatactgcctggtaattgcattatgtttgttttctggggaaaagtttagcactgtaggagatgactatttgataccttttcttctcactccaagcttctcacctctgttccttcactgcttactctcctggaacaagagaagccatctgac

SEQ ID NO: 439066 - DNA, 650 bp, Homo sapiens
gcaatgtttaaggtaggcaatattttttgcatatgtagatggcagcctgtgcttayagagcctaacgagggaagaggccacggcaaccccaaagtctaattagaaaatcaatgcatccagccctaactgacaacgctaatcatctctttgaactaaagtgtcctagctgcactagaatcattagagcctgtcagcaaaagataagagtttaagatttccgcaaggaaacagggttttttactcagcagacctggacttaatcaatatttccaatatcatgacccacgaccttcctccaattaacaaatgcttatgcttggtaatagacttcacactctggactcctgatggctttgcctgctgtgaggctgcatccctctggacctgcatggccatcttggtgcctacaactgagtagtgcaatgaggttggaagaaaactttaccagggaacctgcttttactgtaaattcttgaccacagccctcagattggcatccaatactgcctggtaattgcattatgtttgttttctggggaaaagtttagcactgtaggagatgactatttgataccttttcttctcactccaagcttctcacctctgttccttcactgcttactctcctggaacaagagaagccatctgac

SEQ ID NO: 439067 - DNA, 650 bp, Homo sapiens
gcaatgtttaaggtaggcaatattttttgcatatgtagatggcagcctgtgcttacagagcctaacgagggaagaggccacggcaaccccaaagtctaattagaaaatcaatgcatccagccctaactgacaacgctaatcatctctttgaactaaagtgtcctagctgcactagaatcattagagcctgtcagcaaaagataagagtttaagatttccgcaaggaaacagggttttttactcagcagacctggacttaatcaatatttccaatatcatgacccacgaccttcctccaattaacaaatgcttatgcttggtaatagacttcacactctggactcctgatggctttgcctgctgtgaggctgcatccctctggacctgcatggccatcttggtgcctacaactgagtagtgcaatgaggttggaagaaaactttaccagggaacctgsttttactgtaaattcttgaccacagccctcagattggcatccaatactgcctggtaattgcattatgtttgttttctggggaaaagtttagcactgtaggagatgactatttgataccttttcttctcactccaagcttctcacctctgttccttcactgcttactctcctggaacaagagaagccatctgac

SEQ ID NO: 439068 - DNA, 558 bp, Homo sapiens
aataaacactggagctaggctttgaatccaatcagtgtggtatcaaagtccatgcacttaacagttactctcttctgtctttgattctaataacagtaacggtaatattcctttagtttttctatgtaccaggcactgctctgaatatattacgtgttttacttcatttaatcttcccaatacttgctgtgaggtaggcaatacttttctccttgattatctttgcaaatkaactttgcttaaataaacccaaataaaaattcaaacgttttctcagagaaacctggaagtgaatattcactacaaaagagtatgtatgtactcttctaagaaacttgtttcagaattccttgaaattctagattcctcagactatttaatacaaatttgaaggcatgttttcagtatgagagtgaaagtgtctctattgaataatataccatttacccattcagcaaatgtttattgagcacctaatatgtgcaagacactagatacatcagagaatgtttccgccctgaaggacataaaagtctagaaaaggggttaaaaagcaag

SEQ ID NO: 439069 - DNA, 454 bp, Homo sapiens
tttggtctctctctccagacctgggatacccttttcttctcctgctttggacatcaagacttcagcctatctggactttggacttcagaatgtatagcagcagcccctcagtgaactgggcatcttaatatctamaaaagtagataattctaaacccaaatatgactgaaaaagctatggaatatgtccaagatattgccaagttgtgagggatacccaacagtccatatttaaatgcagaggtgagatatacggcatagccaaaattacccttgaaaatctttcaggaaagggttacatcagagactagcaccccatctatcattaattccaacagagcaagtttttctgccagcactggaacagcttgcagctatttcagattgggacagatgaagtagttggctgagtttagcggccatgttgtaggaaaaatatgtacctttaaacacga

SEQ ID NO: 439070 - DNA, 454 bp, Homo sapiens
tttggtctctctctccagacctgggatacccttttcttctcctgctttggacatcaagacttcagcctatctggactttggacttcagaatgtatagcagcagcccctcagtgaactgggcatcttaatatctacaaaagtagataattctaaacccaaatatgactgaaaaagctatggaatatgtccaagatattgccaagttgtgagggatacccaacagtccrtatttaaatgcagaggtgagatatacggcatagccaaaattacccttgaaaatctttcaggaaagggttacatcagagactagcaccccatctatcattaattccaacagagcaagtttttctgccagcactggaacagcttgcagctatttcagattgggacagatgaagtagttggctgagtttagcggccatgttgtaggaaaaatatgtacctttaaacacga

SEQ ID NO: 439071 - DNA, 454 bp, Homo sapiens
tttggtctctctctccagacctgggatacccttttcttctcctgctttggacatcaagacttcagcctatctggactttggacttcagaatgtatagcagcagcccctcagtgaactgggcatcttaatatctacaaaagtagataattctaaacccaaatatgactgaaaaagctatggaatatgtccaagatattgccaagttgtgagggatacccaacagtccatatttaaatgcagaggtgagatatacggcatagccaaaattacccttgaaaatcyttcaggaaagggttacatcagagactagcaccccatctatcattaattccaacagagcaagtttttctgccagcactggaacagcttgcagctatttcagattgggacagatgaagtagttggctgagtttagcggccatgttgtaggaaaaatatgtacctttaaacacga

SEQ ID NO: 439072 - DNA, 513 bp, Homo sapiens
ggccaatcccaggcccatcatcccaaacaggcagtaccaacgtcctagagcagccatctcttctcttccttcttggttaaacttggaaaaccacttcttaacatttatagcaacaaaaataatagcttttatttacaaagatttacaagtagtttattaaaccctttcaggggattaggtgagaaaatttcaaaaagtggtgtcttatacaaagatattaaagttggcaagttttggaattcagactagatccgagttacctaacccccgattcagggmtttacactcactgcttctgaaacagagagccatttatcaaaacttttaaaacttattactcctagaatagtattttcttgacactaaccataagcaggtattaacataacgataaataggcttttgaaaaggaatttgcaaaatttcaagaaatataagctgtaagtggatactaacaggagcattaggctgaggtcaaagacaacattaatataggaatttcaggcttttatt

SEQ ID NO: 439073 - DNA, 565 bp, Homo sapiens
tttgaacagactacacagattttgttgactaattgagatcaatcccagttgtaaatcrcctagctatcctacagctttaattaagctagcagagggagctgtttatcaattaacacttgttacaaattattagtaattatatggactttgtgtatgtactatagcttgcaagaccagaactgcctttcccagttgttagggagcaaattgagtagttaatgggctatttggatgaaggcatcagtcatcaccataattacagaatttcttctttggcagaaagatttaaggtgagttccagcactattagcagtagttgaataaacatcactttaagtgtttcttttgccagggctttgcaagaccgtattaactggtggactttctaatatggacttcagatctgtatttactttttgagtaacagacataatgaagatgggaatattaggtaaaagttgataatgtattcaagcattaaggctacctattgcagtatgcactgcattctgtgataattttaattggcttaattgagatgcacaagcctgattaatgtttaatt

SEQ ID NO: 439074 - DNA, 581 bp, Homo sapiens
acttggttttaaaaattaagttaaaaattaagtggcatagttttagttataatggtgagagacccttgaaagatgtcctacatttttacaggcggctctggcaaatgtaaggaggtccctccactctctaaaaagcaaattaaaaaaaaaaaaaacccaggaaaaaatgaattatatcacgagaaagacctgggaaggaaaatctcctaagagcrtggaatcattttgtcagttctggcaatttatctcatctgaacccaccatataaaaatcaacccagattttcttaaaaccaagcccagttaaagatattcagccaacctctgctaaacgaggacccaattcaaatttgtaacaaagcttagaaatccaacagttatctttcccttcctgatcttcagtgtaattgtgaaactcaacagatgtaacataaaatacagaagttgttctcttttggtaaagcaaaaatttaccttcttagctcaaaaacctatcaatgcctataacatagaaccaacagctaaaactaatgtgaaccacacatttcaagtaggaaaatccggcatatacaaagcatcagt

SEQ ID NO: 439075 - DNA, 409 bp, Homo sapiens
gaattaacactgtatccatgttaatttcctgattttgacaattatactatagttatactatagttatatgggatagtgtcattgtttttaggaaatacacactgaaatgcaagacagtaaagttgtatgtctgcaacttagtctcaaatgattcagagaaagggcattttatatatatatctgtccgtatatacatatacgcataaatataagcattttatatgtgtgcatatatatatatatakagagagagagagagagacagagaaaattatagggcatcccactaagaacacattttggtaaaaaatatgaacatttggggaatctagatgaaggatatataagaacatactataggctgagcacaggagctcatgcctgaaatcccagcactttggcaggccaa

SEQ ID NO: 439076 - DNA, 644 bp, Homo sapiens
aattctttttgattgttgttaggcaccaaagacttttcagctccatctcatggaatttcaaattaaaaattgttaaattagttcttgtactttttctttctaggtttcagacatgtatccatagggataagaacaaaaagcaaactgtcatgagttccagaaaaaaggtgkgggcaatgtgcaaataacggtgcttagcgcaaatcgttgagttgagatgaggcctgaggtaggggctgcacacacatacatctttaatattgcttttgactctggccacaccaccctatcttcagttctttgattatggcattccccttaaactttcaggcctttgttcatagtacttttcccctggtaatctgtttcctcttttctgtttcatcagcttttctttcctgccttagttttctttttcccccatagcacttaccacttttgaacacattatataatttattatgtttattgtctgttctcccatcctcctactagaatataaaagatccatgagtgcagggatctttgtttttttgttcactgatctatctcaagcacctagaatactactttgaatataataggtattcagtaaatgtttgttaaatgaccaagcggatccttgaaggtgcaactcaaatgtt

SEQ ID NO: 439077 - DNA, 644 bp, Homo sapiens
aattctttttgattgttgttaggcaccaaagacttttcagctccatctcatggaatttcaaattaaaaattgttaaattagttcttgtactttttctttctaggtttcagacatgtatccatagggataagaacaaaaagcaaactgtcatgagttccagaaaaaaggtgggggcaatgtgcaaataacggtgcttagcgcaaatygttgagttgagatgaggcctgaggtaggggctgcacacacatacatctttaatattgcttttgactctggccacaccaccctatcttcagttctttgattatggcattccccttaaactttcaggcctttgttcatagtacttttcccctggtaatctgtttcctcttttctgtttcatcagcttttctttcctgccttagttttctttttcccccatagcacttaccacttttgaacacattatataatttattatgtttattgtctgttctcccatcctcctactagaatataaaagatccatgagtgcagggatctttgtttttttgttcactgatctatctcaagcacctagaatactactttgaatataataggtattcagtaaatgtttgttaaatgaccaagcggatccttgaaggtgcaactcaaatgtt

SEQ ID NO: 439078 - DNA, 644 bp, Homo sapiens
aattctttttgattgttgttaggcaccaaagacttttcagctccatctcatggaatttcaaattaaaaattgttaaattagttcttgtactttttctttctaggtttcagacatgtatccatagggataagaacaaaaagcaaactgtcatgagttccagaaaaaaggtgggggcaatgtgcaaataacggtgcttagcgcaaatcgttgagttgagatgaggcctgaggtaggggctgcacacacatacatctttaatattgcttttgactctggccacaccaccctatcttcagttctttgattatggcattccccttaaactttcaggcctttgttcatagtacttttcccctggtaatctgtttcctcttttctrtttcatcagcttttctttcctgccttagttttctttttcccccatagcacttaccacttttgaacacattatataatttattatgtttattgtctgttctcccatcctcctactagaatataaaagatccatgagtgcagggatctttgtttttttgttcactgatctatctcaagcacctagaatactactttgaatataataggtattcagtaaatgtttgttaaatgaccaagcggatccttgaaggtgcaactcaaatgtt

SEQ ID NO: 439079 - DNA, 595 bp, Homo sapiens
aatgatggaattagaacaaagatgaaaggcaaagaagatttttcctcacaaataataaaggtgaaggaaagatatatctaaggcagaaatgagaacacttactgaatttacatctaatggtctcaatctccctaatgcaggagaagaaataagcatatgggaagtggctgagtgtggtggtgtgtgcctgtaatcccagctactagagaggccgaggtgggagaatggctttaaacccaggagttcaaggctgcagtgagctattatcgcaccactgaactctggcctgggcaacacaaaaagattctgtcttaaaatatatatatataagaaaaagaatatgggaagcaaagagagcaagaatgaaatctgagacatgaggttattaaaggttggaagagtcactacaggaaacacattacactggtagttaataagtaaaattattgtgaattgagtgaaaatctgggaaacacaggactggcacgcacaattccacattttttagcaagacaaacattaaagctaaccgtagagcwagaactaataaggaatttgagagcggcaacattccctactgaaaggggtgattatc

SEQ ID NO: 439080 - DNA, 526 bp, Homo sapiens
aacccacagctaacattataatcaacaaagaaaagctgaaagcttttccactaaaatccaacataaaacaaggatgcccactctaaccacttctattcaacatagtactgaaagtactagcatgagcaatcaggaaagagaaagaaataaaaggtatccatccaaatgagaaagaaagaagtgaaaatatctctattggcagatgacatgtctcatacatagaaaagtccaaaaattcaattaaaacctgttataactaataaatgaatgcagtaaagttgctaaatayaaaatcaacatgcaaagataagtagcatttctacacataagtaacagcctagctgaaaaagaagtcaaaaaacaatctcatttatgatagcatcaaatacctaagaacaactttaaccaaggagatgaaagatttgtatactgaaaactataaaacattgataaaaggaattgaagaagccacacataaataaaaatatatcccactttcatggatggaataattaatactgttgaa

SEQ ID NO: 439081 - DNA, 670 bp, Homo sapiens
tactgcccatagcaatgtagaaatttaacacaatcactaccaaaattccaaaggcatttttcacagaaatagaaaaaaattgctaaagtttgtrtggagccacaaaaactcatgaatagccaaagcaatagtgagaaagaaaaacaaagttgcaagccacatatctgataaggagttaataactaaaatctacaaagaattcttacaactcaaaagaagaaaaacaattccattttaaaaataaacagaggacctgaacgacatttcttcaaagaaaacataaaaatagccaacaggtatatgaaaaggtgctcaacatcactaatcatcaagaaaaaggcaaattaaagccactataagatatcacctcacacccgtaagggtgactattatcaaaaagacaagagataacagatggcggcaaggatgtgaagaaaagggaaccctagtatactgttgatgagaatgtagattggtagagcattatggaaaacaggtttctaaagaaattaaaaatagaactaccacatgacccagtgatccctcttctgagtatatacccaaaggtgatgaaatcaccacataataaagatgtctgctctcccatgttcactgtggcattattcaaaatagtcatgatgtgaaaacaatgtaatgtccatcagtagac

SEQ ID NO: 439082 - DNA, 630 bp, Homo sapiens
ggcaccctaataagccaatggacagtttgctcattggggctgaaaatggaaaacacacagatgtacataaaacacgctgaaaagaaattaacatggacccacttgtgggtaaggattgattgcataatgtgatgtcatcctgttggatgtcagctagccagggaaacccataactgggtcatgactattggtgtygggggagatgtttcccctctagattctgggggaagaataagagggccgtgatgagtcatagggagcagtgggctgggaggcttcttcatagagtaatttgaggattaactatgaagagatgcataaagggttcagcacggtacctgcccagtaaggggtagttctgttttcatccctaaagatggatgattctggctgaggacttatttgcttctctgtttcactgactcccactagttttcttatatttatctcatgggagatgacaggagatgactcataccaagtagcaaaaagagccagcacgctggctccggtaaaatgttgtgtggggcagtaaggagctaataataataataaggtataacagctacggcttcacttaatttacactttttatgtcccagccaatgggctaaaagtttaggtgtgtta

SEQ ID NO: 439083 - DNA, 588 bp, Homo sapiens
ctagtgtcaattctcttgcgcagagccctctgccatgagctctttctccaggatattcttcctcaattctgaagggcctctggaaccaacatgtaatggtctgcttttctattcatgaaggaggacgactttgtgtctctgaagagttacagtgcaaaaatgtatctgacaggcaccctaataagccaatggacagtttgctcattggggctgaaaatggaaaacacacagatgtacataaaacacgctgaaaagaaattaacatggacccacttgtgggtaaggattgattgcataatgtgatgtcatcctgttggatgtcagctagccagggaaacccataactgggtcatgactattggtgtcgggggagatgtttcccctctagattctgggggaagaataagagggccgtgatgagtcatagggagcagtgggctgggaggcttcttcatagagtaatttgaggattaactatgaagagatgcataaagggttcagcamggtacctgcccagtaaggggtagttctgttttcatccctaaagatggatgattctggctgaggacttatttgcttctctgtttc

SEQ ID NO: 439084 - DNA, 630 bp, Homo sapiens
ggcaccctaataagccaatggacagtttgctcattggggctgaaaatggaaaacacacagatgtacataaaacacgctgaaaagaaattaacatggacccacttgtgggtaaggattgattgcataatgtgatgtcatcctgttggatgtcagctagccagggaaacccataactgggtcatgactattggtgtcgggggagatgtttcccctctagattctgggggaagaataagagggccgtgatgagtcatagggagcagtgggctgggaggcttcttcatagagtaatttgaggattaactatgaagagatgcataaagggttcagcacggtacctgcccagtaaggggtagttctgttttcatccctaaagatggatgattctggctgaggacttatttgcttctctgtttcactgactcccactagttttctyatatttatctcatgggagatgacaggagatgactcataccaagtagcaaaaagagccagcacgctggctccggtaaaatgttgtgtggggcagtaaggagctaataataataataaggtataacagctacggcttcacttaatttacactttttatgtcccagccaatgggctaaaagtttaggtgtgtta

SEQ ID NO: 439085 - DNA, 593 bp, Homo sapiens
ttattaggaaaatggatatagccttagtgtaaactgaaagtgagatggcttttaccatgggacaaaattgttaataaaagttgagagttcttcagtactggtatataattattttgaatcattaatgctaacaaaaaattggaaataaaaagaaaatgcaatgaactcagtaagatatatattagttttactatgtactttaggacaggggttctcaacctttcccttgttatgcacaagagaaatgatactttgtgaatgatacactgaaatgaacagatgaagctgctcatggccagagatcacttgccatagggctcctgttcccctctaggttcaggctggctacccaagggttgacaggatcctaggattaaaaccctaatgtaactcattcttggtacaccagtgttgtggcacagttgttagaggaagctctatattaaaagatgttgttgtcagtgaaatatgcataataattcttggcgytgttttgtggttgtatctacaacacattacaattatattaaaatggaaggaaaaagtatctttgtaaagtaaacattgccaagaaaatatccatctgggactag

SEQ ID NO: 439086 - DNA, 461 bp, Homo sapiens
tgaaaacaatttcagatgttctgctcttcccaatacagaaataatatttaaaatgaaagaaaagctttatatgcttcatggtttcttcccttttctagatttcccaatgcattaagatgtcttattaaaaggaataaaatagatcacatgtacagacatggacaaatgtccaaaatacacagttaagtataaaaagcaacctgcaaatcagcatgtgtactgtgatctcatcttcataagataatagatttatatgtttgtttctatggagaaaatacccacaagaatataagccaaackgttaaccacattatcctgggggctgaggaagcagggggaaggcagcagtaggcttcctgagccatcatgcctgcaatgtaatatatagaataagctcatattattttttataaccaggaaaatattaggacagtgcttctctgtgtttaaagactaagggg

SEQ ID NO: 439087 - DNA, 461 bp, Homo sapiens
tgaaaacaatttcagatgttctgctcttcccaatacagaaataatatttaaaatgaaagaaaagctttatatgcttcatggtttcttcccttttctagatttcccaatgcattaagatgtcttattaaaaggaataaaatagatcacatgtacagacatggacaaatgtccaaaatacacagttaagtataaaaagcaacctgcaaatcagcatgtgtactgtgatctcatcttcataagataatagatttatatgtttgtttctatggagaaaatacccacaagaatataagccaaacggttaaccacattatccygggggctgaggaagcagggggaaggcagcagtaggcttcctgagccatcatgcctgcaatgtaatatatagaataagctcatattattttttataaccaggaaaatattaggacagtgcttctctgtgtttaaagactaagggg

SEQ ID NO: 439088 - DNA, 600 bp, Homo sapiens
agggtgcccagacatttggtcaaatgttattctgggtatgtctgtgagagtatttcaggatgaggttgatatttgaagtggtaatgtttgaagtggtgggctgagtgaagcagactgccctccctaatgtgggtgggcctcatccaatcaattgaaggcctggatagaacaaaaagattgagtaaaaggaattcctcccacttgactgctggagctgagataytagtcttttctaaccttcagtcttataccaaaacatcagctcgtcttgggtttcaagcctgctggcttttggactggatcttacaccatcagctctcatggttctcagccctttggactcagactgcaactggacattggctctcctgggtctgcaacttgcagactgcagatctggactttttcaacctgtaattctttaagatgagtaaacaagtaagtacataaaaacataacttattgattctgtttctgttctctgaagaacagagccagtagtctgtttctgactaatacacactatattaacgttcctcagatcttaagttcctccaaacactttggaaaatgccggaaagctttcttaggtagaggcca

SEQ ID NO: 439089 - DNA, 628 bp, Homo sapiens
cctttctgtcggcactttctctgggctctcatctttgattgtccttggtggctcttgctgtttttttgattcctaaagttgactatatacctttcactgtagaacgtgtttattgatcagttaggccttggggtaatctggctttcgcccaggctctgttgagagccatgctattttagaattgatgatgatagccrcagactcccctgctctgctgtgatgctgcaggagatcttccttcccagtgtcctgggcctgttcttactggcctttttagaaactaagtcttttctctgtatttccataagttcctgcttcaggactagtgtttctctgctaagcacaactttggacatcctttctcagtaatcttcctggagctataataaaccaagttgtctgatgctcattgctttatctaagctgggagaagtaggggaataaggctttgccttaagacagcatttgaatattgaccctgcctctagttgtgtcacccagcacaaattctttagcctctctgagcatctccagagactccactgtaaaatggaattgcattacctaccttggaggttattacagggaatagagttagacaaaagggccaggcaggcacagatcttca

SEQ ID NO: 439090 - DNA, 628 bp, Homo sapiens
cctttctgtcggcactttctctgggctctcatctttgattgtccttggtggctcttgctgtttttttgattcctaaagttgactatatacctttcactgtagaacgtgtttattgatcagttaggccttggggtaatctggctttcgcccaggctctgttgagagccatgctattttagaattgatgatgatagccgcagactcccctgctctgctgtgatgctgcaggagatcttccttcccagtgtcctgggcctgttcttactggcctttttagaaactaagtcttttctctgtatttccataagttcctgcttcaggacwagtgtttctctgctaagcacaactttggacatcctttctcagtaatcttcctggagctataataaaccaagttgtctgatgctcattgctttatctaagctgggagaagtaggggaataaggctttgccttaagacagcatttgaatattgaccctgcctctagttgtgtcacccagcacaaattctttagcctctctgagcatctccagagactccactgtaaaatggaattgcattacctaccttggaggttattacagggaatagagttagacaaaagggccaggcaggcacagatcttca

SEQ ID NO: 439091 - DNA, 577 bp, Homo sapiens
catggtttgatggaagaccttacccctctctgtccctagagaataaatcttggttagtttgagccaatcataatcattttatcctctttgccagggactggtttgggatgagcatgtggttgaattctaaccaatgaaacatgaagtgggggactttggggaaagttttcccccatcttaaagagcagtgacagtaagggctacacaatcttagtctctatggttttagagtttgctgratgaggacagggtgcttgatgtacttgcaaccaaaagagtcacaccgaggacaaatgccgacacactgtggttggccaatttgcatgatgaaaagaacctgaatccatggtggtgtcactgagccactgaattaactagctctggaaatgttctacctctggacttcttatcaaatgagacagcaaaatgtctttattgtttaaaatagttgacttgagctttctatgatcagtcacccaatgcatccttattgatacatatcaccaggtaggatcagattcccaaatcagtgtttagatggccctttgaagtggctggagtgatctctgagaccacc

SEQ ID NO: 439092 - DNA, 582 bp, Homo sapiens
agctgcttggccctagagcataagcactttgttgcttactttctcagggttatccattctcatacactgcagcctgagaaaggattgataggaatttgtttgcagacattcaagatcatgtattttgtgtatttgtgtcctctattcatttggttgttatgaactctctatataaactacccttctactttctgtgacaagtgacatcctttttcttgtgcaattaaaagtgctaaatttatttcaatccaaaacacatcctttgcaaatccctacatttgtaatattgaacaaagtgagcagctatgccatttaagtaacaattccttccaacgctgctcattatatgtgtgaaatttaaatctttgatcaatgagtgatgacgatgagtgtgctgttgataatgctctgagagcatctacttttaggtgaaggaaagaatgcaaggatrtggaacccatttagtcacacatatgtttaagccctagaaactgttggttatgtggttcatttgcgatcaccatcctctattctgcttgttttaaacacgggatgaaaatctttcaacacaagaattttgtg

SEQ ID NO: 439093 - DNA, 561 bp, Homo sapiens
aggtggggcctggtagaaggtgattggatcattggagcagatccctcatgaatggtttagctctccttggtgataagtgagtcctgttcagttcacacaagatctaaatgtttaaaagtctgggacctgtcctttcctcttgctcctgttgttgccttgtgacatgcttgctccacatttgcctttcaccatgagtaaaagctcccctgaggcctcctcagaagccaagcagatgctggtatcatgcttgwacagtctgcagaacagtgagccaattaaacctcttttctttataaattacacagtcttatttataggtatttataacaatgtaagaacagcctaacacatcatcaaagcagaaagttgaatgtgattgctggggctttggggaaacagggaattatgtaatgggtataaattatacaagatgaaaaaggtctaaagatctattctacatcattgtgtttataattaactaatgtattgcacatttaacaatttgttgagagggtagatctcatgttttgtgtttttttaaccacaataaaaaagtaatat

SEQ ID NO: 439094 - DNA, 603 bp, Homo sapiens
gtggtaactttcctgttttctctgtaggatccttttcccaaacttcctctcctttctctagactgttcatgccacttcaaatcctaatttgagaattagccagagctatgaggggggatatgtaaaggaagatttgatggatctgccaaagaaaggagatcaaaaacacaggccattaacctgtcggtgcctcagggtcccagctcatcctgtctccttcacttcttcagcagaagctttcccccatttttctgttctttactctcctcttgcttcttatcaacctaacccccagccccacaccccaagtgaatggcttttggcttaatgaatgtttactaatggataagctactgtcctacactttcagaataaatgttgagagtctgacaaatagtcacagcttttacaatatacttctggggcatatcctaaggaaccaatcagaggccaaatatttatgttcactgatgtgcattacartattacaatctgagatgctcatgcaacaaaatactatccaaccatcagaataacattttctgggaatatttaataacagagggaaatgcttgtgattgccatcatgaaaatcaaaataaa

SEQ ID NO: 439095 - DNA, 586 bp, Homo sapiens
ttgtgaatttatatgagagaccctttgtcaaatgactactctagtcctacccacagcaggaattcaataaatggtatatacatatataaatttaaaatattactacccaaaatatatgaaagtcttattaccacaggttaccactaagtagtggtattacaggtttttcaatttattctccatgtttctttatttttaagttatgtatagtaagtatatattacttttacaattataattaaaatattataagtaaattgacataaagtttgcaacagctgagatatttattttgttttcgtttttattttctyttcttgctagagacaagataaaaagatctagggctattgccaacaacatgccaaggtcaaataggagactctgtgtgacctaatatttcctggcagacatgaaggctcaggatggctcttgcctacttaagcaaaaccttaattcagaaaacaggtctgtaggaacagtttgtgttatatttataaaacttaaaactacctaaacagtaagatactgtagttgctgagaatcacgctctgcagtgaggacaccaaattaattatcgttgatg

SEQ ID NO: 439096 - DNA, 580 bp, Homo sapiens
agatctaagagagaacaaacaaagagaagtctgctcccagcactagaatgaaactgattcagagactcagtaaagcgatgagataagcaaattgagtttaagacacaaagtcaaaactccataaactgatgacttattataggtattgagctgtcatttacaccaatattattgctttggcacttcagtcaaagacctctcaagccaagagaagtcaatttaggctgattcaatgttaatttcaatcaccccaaaagcaatcggcttattctccaattgcttatctatgcttcagaagaactcacgatgagaaaaacaggtcaaagcagttaactttattttctcaaagagccactaagttttcccaagtcactactattattatagatcaatatamctacagtgttgctcttacgatcattttcctagccaagaatccaaaacattctccatttgtatctggaattaacattccctttgtttctttgatcaaacccattcccaacaaccttatttctcttagttttctttgagatgcctagagaaaataataaaacctatctgttagggttgttttaag

SEQ ID NO: 439097 - DNA, 580 bp, Homo sapiens
tctcaacttcccagagttgcaggcctactttcccagtcagtcagttgcccactctttaccaagtcacttgataccatgtttaacatttttctcaaaatcattctctttctttccatccccactactgctctcagaaaaatgaagtctggaaacctgagttctaatttcagctaagacattgtcttattaggtaatctgaaattaatctcaccctctacattttaccccaaaccctctgttgctcttatttcctatctaacataaatggctttgctctggttataacagatccrtatcagtagctctcaaatcctgtgccccaagactacctgtggaattcttatttaaatcatacattaggaagcaactgagttggggggacatacatgaccaagactgaaagtccccgctataaattactttcagggcctcaaagtgaaatgcttactgtgatggtctgatgttcaattctcaatttttccactccaacaccataaagttcacgtagaatacacataattcttgtcttttttccagcacctgatggtccgtacactaacagatgaggaaagtcaccaca

SEQ ID NO: 439098 - DNA, 569 bp, Homo sapiens
ttgcaagagaaacagacatttcaagaaaaaatacatagactagcattggatgtggtttatgcatgtggaccatgcattattttacatgactatcttgataacataaaaattttcctactgtttttgctttagagtaattctttctctgtactttcccttctctgtttgataacctcaakcctcattccttccttgtgggcccagttctacagtttcatggaatttctcatattgctgataaaaagcattccaaaaaattcagcagactaacacattttagtacttgcatgttattttataatacagagatatgaaagaagatcccaataaataaaggcatacaaaaatggtttgggagggaaaactgttttataaaagatatcaattcttcccaaaatatactgcaagacaattccaatgaaagtcacaaagagttttcttcccctttttgaatttctgaaaaaattattccaaggtatattaagaagaataaatagacaaaaattactaacttttttaatggcattaaggaataatttctctacagcagattaaaatgtgttctttag

SEQ ID NO: 439099 - DNA, 478 bp, Homo sapiens
gctgctttttctggaggcttggaggaagaatctattcaatgcctctctcctagcttccygtgcttgctggcaatgcagcattctccagtgtgcagaggcatcactctcatctctgcctctgtcttcacatggtctccctctcagtcttctcctctgtgtctctgtatcaaatctcccacccatttctcttacaaggacactagtcattggatttaggccctactcaaaatccaggatcgtctcgtcttgggatccttaacttgattatatcggcaaagaccctgtttccaaatgtcacattcacaagtaccggggttgggacatggacataatttggggggccggggagacacaacgtaacccttcacaacaagctttacttgttattacttccaaaggaagtagttactaaaaccaagcttttgtgctgcccaggaggccagggacaatgagactggaacttgaattcattgatcta

SEQ ID NO: 439100 - DNA, 563 bp, Homo sapiens
tttactagaacctaggtgaaccttggattaaggaatcaccaagagccaaaaaggaggcaacaacctagcactgaagaatctctcagaaaatatatctaataaaaccaaaaatatctagacaaagaagactgaaataaataactaactctttaatacaaagacatacacatacattcacaagaaaaaaacaaaacaaaacagcaagcagggtactatgacctcttcaatagacagartaaggaaccagtgcctgacctcaatgagaaggcaatatgtgagctctctgaccaagaattcaaaatagcagttgtaaggaaactcagcaatctccaagataacacagaaaatcaatgcagaaatttatcagactaattttatgaagactgaaataataataataaaaaagaaacaaaaattttggaactgagaaatacatttgctgaattgaaaaatttattagaggctctcaacagcagaatggatcaagcagaagaaagaatcagtcacctcaaagacagattatttgaaaatatggttaggagagaaaaaagaaaaaagaatga

SEQ ID NO: 439101 - DNA, 563 bp, Homo sapiens
tttactagaacctaggtgaaccttggattaaggaatcaccaagagccaaaaaggaggcaacaacctagcactgaagaatctctcagaaaatatatctaataaaaccaaaaatatctagacaaagaagactgaaataaataactaactctttaatacaaagacatacacatacattcacaagaaaaaaacaaaacaaaacagcaagcagggtactatgacctcttcaatagacagaataaggaaccagtgcctgacctcaatgagaaggcaatatgtgagctctctgaccaagaattcaaaatagcagttgtaaggaaactcagcaatctccaagataacacagaaaatcaatgcagaaatttatcagactaattttatgaagaytgaaataataataataaaaaagaaacaaaaattttggaactgagaaatacatttgctgaattgaaaaatttattagaggctctcaacagcagaatggatcaagcagaagaaagaatcagtcacctcaaagacagattatttgaaaatatggttaggagagaaaaaagaaaaaagaatga

SEQ ID NO: 439102 - DNA, 548 bp, Homo sapiens
aaaagccttccttgcttttagaattcaagtaatcttagagcaataaatagttgtttctccatgtcttatcttccttgttttgtactgtgagaggcatttacaagtatattgaatttctcttgcttatgaattcaactgctgctgcttttcaacaaacagccttaatcctttgtttggctgtcatagttgctactgcaggaattatgatgctgccaacagagaattcaggagataaaatgaagaggtttgtaaatgccagtacacttgcacccttttcttgatattaccaactgtacatatgtgtatatctctttctatatatttgtcctattaaactccaaccttgttcagtgcgtggaccataaggtttatttaatctgaaaacatgctttgcatgctataattattattacagaagaaaataaatgtactcactaatcagaatatccactascaatgaagaaggaaaatgctgccgtccttgggggtagatttctgtaatgttcctcatgcccatgccagaattttgttttctttttctttcaact

SEQ ID NO: 439103 - DNA, 551 bp, Homo sapiens
atttaatttccttctcaaaccatcttgttttatgtaagttgaccttttcatgactgtaaaatttcctcattagaaartgacaggctctctgggattgcaaacctttcctgataacactctgtataaaggtgtctgtgaaagatttttctcacttaaaaatgaaaagagacccttttgtctactccactagcagctttcagagcacacagacaatccacttgaattttgtttaaaaaaaaacaaacaaacaggaaaccttcacttgttggggcagccagtaagggggtgtcagagatgaatctgaaggatctggttttaagaaactcagaatcattatccacttcattttcagagtacccattctctgttaagtatgtaacatatgccattgctagaatttcctacagctctacaggggttcctattacagttgaggaaacttggattcagaaaggtccagaggcttgcccaaggtcattgagcaggagagtgacagagctagtgcttcaacctaggtccttgtggctctgttctttccactgcatcattct

SEQ ID NO: 439104 - DNA, 534 bp, Homo sapiens
gctgactgtgtttgtaaattgagctttactggaaaacagccatgcccatttacttaccgctattatagctgttttcctgctataatgacaaagtagagtagttgtaataggtatggtatagcttgcaaggcctgaaacatttactgtttggccctatatataaaaagtttgcttcatcagcaagatgaacagataaagaaatgattatatatatatatgtaaatatatatacacaccatcatttattgatattatatatcaatgtgtgtgtatatatatatattatatatatatgtataccatcattgtgtgtatgtgtgtgtgtgtgtgtgtgtgtrtatatatatatatatcagggcctggtgattgaggggaaaatggggagatgttgttcagagagtacaaacttttatttataagttttgtagatctaatatatagaatggtgactatagttaacaatactgtattgtatacttaaaatttgctaagaaattagatcttaaatgttcccaccaaaagacaaaagacaaa

SEQ ID NO: 439105 - DNA, 534 bp, Homo sapiens
gctgactgtgtttgtaaattgagctttactggaaaacagccatgcccatttacttaccgctattatagctgttttcctgctataatgacaaagtagagtagttgtaataggtatggtatagcttgcaaggcctgaaacatttactgtttggccctatatataaaaagtttgcttcatcagcaagatgaacagataaagaaatgattatatatatatatgtaaatatatatacacaccatcatttattgatattatatatcaatgtgtgtgtatatatatatattatatatatatgtataccatcattgtgtgtatgtgtgtgtgtgtgtgtgtgtgtatatatatatatatatcagggcctggtgattgaggggaaaatggggagatgttgttyagagagtacaaacttttatttataagttttgtagatctaatatatagaatggtgactatagttaacaatactgtattgtatacttaaaatttgctaagaaattagatcttaaatgttcccaccaaaagacaaaagacaaa

SEQ ID NO: 439106 - DNA, 523 bp, Homo sapiens
atttggcctttgcccattctaaaatggacaaataatttttttcttttttttccagattttatttgaaaccatagattaaaaggatttaaaggagggctacctagttgttcgtaaaatatgttactaccttttacctttttgatactgtaaatttaccacgaaaggtaaaggaagtctgacagacattcccagtcatgaggaaattatcctagagagttgatgaggtggcaagagaagaagacattgctatcatggctcacagaatattgccagagtagttgatgtatcttcttttccaaccacagccagtacacttgtgggctttaaaaaaatttaattgtaggtaatagaagagttttgccatctaaatacatcgctgacttcatattgcaagtmaatggaaaaactatactttctttatagagatttaattaacactaaatttaatggaataattgtgttgataaagcttactaaaggttattgagatttatagatattaagaaagatcatacaacttcat

SEQ ID NO: 439107 - DNA, 615 bp, Homo sapiens
ttaataggccaattgaatttttcagctgcagaatttctgtttgatttttaaaaatttttcaatgtctttgttacatttatctaataggactctgacttgcttctctatgttatcttgaatttcattgcacttcctcaaaacagctgtttggaattctctgtctgaaaggtcacatatctctttcacttctggactggtcactgataccttatgtagtttgtttggtgaggtcatgtttcctggatgaccctsctgcttgtagatgttcatagatgtatggacattgaagagttaggtatttattgtagtatgggcttgtttatacctgtccttcttgggaaggcattccaagtgttcagagaaaattgagtgttgtgatctaagtctggttactgtagccatatatgcattagggggcaccccagtaatgctgtgactctttcaggctcatagagatattgccttggtggtcttgggtaagatacaagagaattccctagattactaatcagagactcttgttctcttcccttttctccagacaaatggagtttctgtctctccatgctgagttgcctggagctaggggagaggtgatacaagcatgcctatgac

SEQ ID NO: 439108 - DNA, 615 bp, Homo sapiens
ttaataggccaattgaatttttcagctgcagaatttctgtttgatttttaaaaatttttcaatgtctttgttacatttatctaataggactctgacttgcttctctatgttatcttgaatttcattgcacttcctcaaaacagctgtttggaattctctgtctgaaaggtcacatatctctttcacttctggactggtcactgataccttatgtagtttgtttggtgaggtcatgtttcctggatgaccctgctgcttgtagatgttcatagatgtatggacattgaagagttaggtatttattgtagtatgggcttgtttatacctgtccttcttgggaaggcattccaagtrttcagagaaaattgagtgttgtgatctaagtctggttactgtagccatatatgcattagggggcaccccagtaatgctgtgactctttcaggctcatagagatattgccttggtggtcttgggtaagatacaagagaattccctagattactaatcagagactcttgttctcttcccttttctccagacaaatggagtttctgtctctccatgctgagttgcctggagctaggggagaggtgatacaagcatgcctatgac

SEQ ID NO: 439109 - DNA, 658 bp, Homo sapiens
gatgctgaagtgagctcatgaagggtggatatgagagtgagtggaaacttgtgattatgttggggagtgtgactggaggtcaggggtgacctggagatctgtttggagagttatggggctgggagtaagttgargagatcaccagtagtctcgagttttcaaactatagaatttttttctttagggtaatgagaagcctttggaaattattgagcagaaagtgatataatccaataaatggtatagattttagatactttatggagttatttgataggggatcacatttcaacatgagatttggaggggacaactcaaatatgattccaagaacctaacctgagctatggtgagttatgcaggaggaaggggagttctgtcttggacatatgatgttgcagaggcgattttgagatgtaaagagaggtaaagcctagggatgtattgatgaaaataatcgattgattgtagctcaaactgtagaaatagaagagagaagaagaaagagaacaaaattcattttggaatagtgaggaacagtcagaaactggacaaagatgcaaaattagaagaatgaagacatagaaacatagaaggaggatttctaaataggagtgttatcaccagcatcagttgttgctggagaggtttccaggga

SEQ ID NO: 439110 - DNA, 630 bp, Homo sapiens
tgttgctacagttatgcagacaaaacatacatatatagaaagaaatttcatttaatagtctgtagagttatgttaagagtaaacatatttaaaataaaatccatggaattctatggagcacatttgggactctgggttaaagaaatttctctgtggtagaaagaagtctgcacatgccatgtgagattttcatttaattacttgttttgccatttacaactttcctaaacttaaatgagtcattttattatcttgactctcagtttttctatgttttgtagataatcataccaacataaaataagttgtataagaatgttatgttctttgtgaggatttacataacaattgcatagcaaggtaagattctctataaatataaatatacatttaatgtgtgtatatacacagcacatttgtgtaggcatatctgaaactagatgaataaaatgcatcctacaatttcccaaactcccctaagggagctgccttatatagaatttccacagagaagtccttggtggycatggtttatagcatgtttgtattcattttggccactgctattaggccgggctcaaaaatacatattgaaccagtagcttgtctataagaggattatgaacagtg

SEQ ID NO: 439111 - DNA, 450 bp, Homo sapiens
tatattcaataaaaaatgactgctatgatgatttaattccttgattgagtagggtctttcagtctttatttgctgtaactctctttttctgagtggtagacttgagtgaagctctgaataaatacatggcatgtagatgagataagtttcacttttgactatttgggaacagaactgttatctgccctaccagtcctctcttcccctcaatccacatgacaaaatagtgaggtcattagaggtttctgtttattatttaagggttaagagtagaagtcaggttggaggacrtatacatttcttaacacaaatttttgaaataattttttttctgataattgcctcagattcagaagagcaatgaagttacagtgttgtatggccgttagatgtcttacaattcatgaagatttagagattaaagtagcaggagacactctaaagtagaaa

SEQ ID NO: 439112 - DNA, 592 bp, Homo sapiens
tatatttttaatttggggtgtgtgtgtgtgtgtgtgtgtgtgtgtgtgtgtgtgtgtgaaacaatgcattttaccaccaaacaggattggagaatggattggagagctattttggaatgtaaaacatcgtactaggaagacaaccaagatgctaaatagtcagttcattagaaagcctcctggttactggatagttataatgatgtgaccaagagtttactctttgaagctactgctataagatgatacacccttcaggtatcattgacgtgctttttacttatctatcasagttcctcacaaaaatttgtttttggatcaggtggaactgagtaaatatccatgaagtttcaggatagagccatttgccttcctttaaatctttgaaatatatgttgttcagcatttttactcacatagacctttcttcatacctcaggtattgcagtcaccacctactactatgttggtctcctcttcttttcctcctcctcttccttgtcattctacttttgcttcttcttgcctctttcctcttccttctcaacttcctccccctactcctgctttgccccctctccctgtcagcagt

SEQ ID NO: 439113 - DNA, 620 bp, Homo sapiens
tcggacagggcacacattaaccttttcaagcttctgtaaatattctgtaaatatggatttttctcattacactgtggttcctaatgatttgtcactcaattcactttcagcagtttaatgtatatatgttaccacatcaataagataaaggaagaaaggaaatataagaaaatgactgaacattttgtgtccagaataacaaagtgtgacrttacttatgtgatcttcatatggtttaggccataatcataattaaaaatggggtatgtggaatcatgacttttattctctgtttcaacttctggtaagtcaccctctctcctaatccttctcttcaaataaaggtagaattgtattcggcaggagagaccctttgtaaactccaaagagcaagagataatagtgaaaaaatccactacatctcaatagtaagctgatgatgtgcattttggcctagtatttcaagaaagtccacagtaagaattagttctaaatgagaattgatagaacaatatctgacattttactttattttcagtatgttctgtaggccaagattgattttatatttcaaattgaattaagttccatgtgaactaggaagacatagtgtgagagtt

SEQ ID NO: 439114 - DNA, 620 bp, Homo sapiens
tcggacagggcacacattaaccttttcaagcttctgtaaatattctgtaaatatggatttttctcattacactgtggttcctaatgatttgtcactcaattcactttcagcagtttaatgtatatatgttaccacatcaataagataaaggaagaaaggaaatataagaaaatgactgaacattttgtgtccagaataacaaagtgtgacgttacttatgtgatcttcatatggtttaggccataatcataattaaaaatggggtatgtggaatcatgacttttattctctgtttcaacttctggtaagtcaccctctctcctaatccttctcttcaaataaaggtagaattgtattcggcaggagagaccctttgtaaactccaargagcaagagataatagtgaaaaaatccactacatctcaatagtaagctgatgatgtgcattttggcctagtatttcaagaaagtccacagtaagaattagttctaaatgagaattgatagaacaatatctgacattttactttattttcagtatgttctgtaggccaagattgattttatatttcaaattgaattaagttccatgtgaactaggaagacatagtgtgagagtt

SEQ ID NO: 439115 - DNA, 596 bp, Homo sapiens
tcaccatctaagatatctttcaacagcaaatacaaaggcttcccactccatataatttccccagaaatatagtgcagattaatacacttctggaagtaaaatatgaaaaattttgggccacaagtttacaatagttgttagtgattttcacattctgaaatgactactgacttaaattactggaagactggacctagsgggtaaaacccttatcaacaattcctggactctaatgtggttgttgagagaagataatgagcagtggaaaaacacccctggcaaaataaattaaagcctcctgggatatatcctagcttgggattttgcctaaggccagctttgttttaatgctgctctagatatattaggaaataggtccccgttttatctcttaccttgggaaccattggtaatgctaaaggcaaatattaagtaacggttcagttaacctgcgaatgcttccctggggatatttttgttattattttatgcaagttaagatagtgagatgtaaagacaaaaccgaaagcagaagactgacttctatttttgtttacattttgacttctttttttttgtctctagtttcacattat

SEQ ID NO: 439116 - DNA, 596 bp, Homo sapiens
tcaccatctaagatatctttcaacagcaaatacaaaggcttcccactccatataatttccccagaaatatagtgcagattaatacacttctggaagtaaaatatgaaaaattttgggccacaagtttacaatagttgttagtgattttcacattctgaaatgactactgacttaaattactggaagactggacctagggggtaaamcccttatcaacaattcctggactctaatgtggttgttgagagaagataatgagcagtggaaaaacacccctggcaaaataaattaaagcctcctgggatatatcctagcttgggattttgcctaaggccagctttgttttaatgctgctctagatatattaggaaataggtccccgttttatctcttaccttgggaaccattggtaatgctaaaggcaaatattaagtaacggttcagttaacctgcgaatgcttccctggggatatttttgttattattttatgcaagttaagatagtgagatgtaaagacaaaaccgaaagcagaagactgacttctatttttgtttacattttgacttctttttttttgtctctagtttcacattat

SEQ ID NO: 439117 - DNA, 545 bp, Homo sapiens
cttgcaacaataatttgcaaattagcaccactctagaaacccatctttgagttacactgccctatatccatcccatgtcataggtatttatatttgcgtgtgacatatatatatatttcttcattggagattagctgagaatcaagaaaaatatatgcaagcttgtatgaatcttaggataaaagacatccatatgtggaaattttactaattataggcattttctaaaatgatttttgaaatctcacttagccctacataaagataatttggaaaaatcaataaacactaagctaggaaaatgagaaaggagtttcttagcatagttttytccccccaattcctaaatgcacctgtacttgagatagttatgagtgaagaaactcacttctctaacgagacactgaatggataccccaaatgaaaagcctagttcagagaaaacaccactgtgcattgtttagcctattatttttactttctggagatatacgtgtatttggtttcagcaagtgtgaacaagctctaacaataaatttataata

SEQ ID NO: 439118 - DNA, 606 bp, Homo sapiens
acctgtgcctgaatctgcgatacacaaattttaggtgctttattcagccagtaccgatagcattttgttgtttagccttcatattgcagttacattaatacttttgtttgtggttagcaggttaacctcattttaacaggtggaaaccattaaaaccataatggcaacacaacatgcctgttttcttgtgacacattctaaatattgatgttccctttgtcatctcatctcatagcccaggccaaaaaactaggtttttttctttttaaaatatttttgttacaagcatggacatctatgtggattatataatggttagatttttctgtaactgccatcttcagataaaaataattaatacaacaatgttttaatgatatgwatatatttttctttttaaattatgtgctgaatgagccacagagtgatatttgaaatttagaatattccaaatggacttacttctgaatttgagttgttcttgaaagactgggtagaaaacatataccttgtagcaccaaaatagctcaaggacattgtaatttagtcatttactaaaataggatatgtttaatatccctgagtatattagtatagtaagttttg

SEQ ID NO: 439119 - DNA, 606 bp, Homo sapiens
acctgtgcctgaatctgcgatacacaaattttaggtgctttattcagccagtaccgatagcattttgttgtttagccttcatattgcagttacattaatacttttgtttgtggttagcaggttaacctcattttaacaggtggaaaccattaaaaccataatggcaacacaacatgcctgttttcttgtgacacattctaaatattgatgttccctttgtcatctcatctcatagcccaggccaaaaaactaggtttttttctttttaaaatatttttgttacaagcatggacatctatgtggattatataatggttagatttttctgtaactgccatcttcagataaaaataattaatacaacaatgttttaatgatatgtatatatttttcttttyaaattatgtgctgaatgagccacagagtgatatttgaaatttagaatattccaaatggacttacttctgaatttgagttgttcttgaaagactgggtagaaaacatataccttgtagcaccaaaatagctcaaggacattgtaatttagtcatttactaaaataggatatgtttaatatccctgagtatattagtatagtaagttttg

SEQ ID NO: 439120 - DNA, 445 bp, Homo sapiens
atggtatgttatgcttccattttaatttgtctcaagcttttgtttggtttcccttttgatttcttcttttacgcattggttgattagaagtgcattaaattttacacatttgtgaattttttgattttcttcctattgttgattaatctcaatcaatagatgtagatccatagatatattgtcattattttgatgaaaaagatatatttggatggaaggattttactagcttttggagttttgggtgaccactaagatagtcatttggtgaaagctctaaaatggtagggacatgggatagttcaataccagtggtacttcatttagcacataaacattttacttaaaaataaatacatgcttcccakaataaagtttacaggaggtcaacactattgtacagaaataatataaaattctgctatctatgaaagagttgatttgt

SEQ ID NO: 439121 - DNA, 518 bp, Homo sapiens
acagtactctgggacaagccatcaatggagagcctattaacataaagcattagccaggccttccctacccatgcaagcaccaataccctttgagaccagaagccctacagaagatatggcccctcctggaaaaatttctattgtacaggctgactcagacttgccagccttcttgtaaaactccaatcctgcctgtgaaaaaaacacatgaggagtagcacttagttcaagaccttagggcagtgaatgactcagtttattctcatttatcctatggtccctaatccatacactatcctctcccaaatccctgggtacacttagttctacactgtgctagatctaaaagatgctttcttttgtataccactgcttyctaactccacctacatgtttgtcctttaatggaaggatccagagatccaggaatcttcacagtatacccggatagtgctactctatgggtttctggatagcccccactctttgggtgagacttggcaaaagacctcgagaac

SEQ ID NO: 439122 - DNA, 618 bp, Homo sapiens
tttacatcagtagatatgcacaataatccaaaacagtattacctattaacgtctaaaactgtatacaacccaaatgtgtattgtataagaaagcaaattgtgatacatttatacactaaacataaatgaagtacacatgcgactgcatatatgaatattgcaaacattttgtaaagttaaacaaatttagacaccaaataatacaccttttgcttccacatataatatccaaaagatacaaagctaaaccatagtttgtcaaaagwtatgaacagctggtaagctatacttttaaggtttgtgcatgtttctacatgtgtgctatattttgtaaaaatattttttaaagattttttttaaagactgaggtacaaaaaggtgctgacaagctctattatatgcatgagttgtgttcacttatggccgtatcttgttgaaggttgcaatactgccagggtatcctgtatcagctaataatataaatctcaagataaaatgtgttaaatgataaggaaacaagtatatcatataatcaggaatccagagaacaggtaagtttcatggctgatttacttggtggctcattatttttgccggtcattcaagttcatttggttt

SEQ ID NO: 439123 - DNA, 618 bp, Homo sapiens
tttacatcagtagatatgcacaataatccaaaacagtattacctattaacgtctaaaactgtatacaacccaaatgtgtattgtataagaaagcaaattgtgatacatttatacactaaacataaatgaagtacacatgcgactgcatatatgaatattgcaaacattttgtaaagttaaacaaatttagacaccaaataatacaccttttgcttccacatataatatccaaaagatacaaagctaaaccatagtttgtcaaaagatatgaacagctggtaagctatacttttaaggtttgtgcatgtttctacatgtgtgctatattttgtaaaaatattttttaaagattttttttaaagactgaggtacaaaaaggtgctgacaagctctattatatgcatgagttgtgttcacttatggccktatcttgttgaaggttgcaatactgccagggtatcctgtatcagctaataatataaatctcaagataaaatgtgttaaatgataaggaaacaagtatatcatataatcaggaatccagagaacaggtaagtttcatggctgatttacttggtggctcattatttttgccggtcattcaagttcatttggttt

SEQ ID NO: 439124 - DNA, 420 bp, Homo sapiens
tcaaggaataaacgaccactgtttttagtcacgaatattttgtgtgtgtgtgtgtgtgtgtgtgtgtgtaattgctgtagcagcaactaattactatgccttaaaagagatgttggaagtaaatctgagtactctgctttttaaaaatttaagtttttataaatgtagttattctacttgctgtttataaatatcatcaacacatcactacataagttatttcaacattctggttaacaacatattttatgttgtttttttttcggtttgttttgtttggtttgtcaaggtagtgccaaagtaaaaagttaagaaatccctccaagcattgttaaggaaggaaatataaatccacagaactcaagtaacsatttgcagtcaagattctgatgccataggtaagcaagccaagttggaaat

SEQ ID NO: 439125 - DNA, 581 bp, Homo sapiens
cccatggtagtttaatcagagaaaatagatggctgggttcgttctgagaaaagcaaaaatacagasagggatgtttttgttaggagtgaatttttaaatttacacctaacatgattaatgtaatcctaatctgttactacttaatgcaattaaaacttttttggacaattatgtattataaatagtaaaagcaaaaatatatttattaataatggctagttataaagtttatttcaggttgggctcagtggctcatgcctgtaatcccagcactttgaaaggccgaggtgggcagatcatgaggtcaggagttggagactagcctggccaacatggtaaagcctgtctctactaaaaatgcaaaaattagctgggtgtggtggcacgcacctgtaatctcagctgagtaggaggctgaggcaggggaattgcttgatcccaggaggcggaggttgcagtgagccggttgcagtgagctgagatcgtgccactgttctccagcctgggcaacagagcaagactctgtcttggagggaaaaaaaaaaaagttcctttcagcaagcttgtttaagaaggcatag

SEQ ID NO: 439126 - DNA, 610 bp, Homo sapiens
gaaacaaccttttctcttcctctctatcctcacaccctctctcccaggcactgagaacaagatggttaccagccaagagacataaaagcatactctggctggctctatttgaaagatggggcccagcaggcgaaatgtatgaacacgtaggggctgtctactgaagtgagagctttgacattacgccttcaaattattcctttccttgcctattctacagaagactcataagccttgagcaattgtgtgtggagttatgctcctgggtggcaacataaatgctaaagtaggaaaaatattagtaaagatacagtctgggccccaaagaaccacattagagtcttaactccaattatagtcttggaaacctgaattcataawttccttccatccttctgcagccttaggaagatgtaattctttaatcactttatttgagagcttaggaaaataaacagtaacaaaaagctgttcagtggagctatatggctgcaacacacgactgcacggacaaaaatgtggtgctgaaatcactgctattttaataatcggtacatttaattctagctctttattattttaaaatagttttttgtttctatgtttttgg

SEQ ID NO: 439127 - DNA, 610 bp, Homo sapiens
gaaacaaccttttctcttcctctctatcctcacaccctctctcccaggcactgagaacaagatggttaccagccaagagacataaaagcatactctggctggctctatttgaaagatggggcccagcaggcgaaatgtatgaacacgtaggggctgtctactgaagtgagagctttgacattacgccttcaaattattcctttccttgcctattctacagaagactcataagccttgagcaattgtgtgtggagttatgctcctgggtggcaacataaatgctaaagtaggaaaaatattagtaaagatacagtctgggccccaaagaaccacattagagtcttaactccaattatagtcttggaaacctgaattcataatttccttccatccttctgcagccttaggaagatgtaattctttaatcactttatttgagagcttaggaaaataaacagtaacaaaaagctgttcagtggagctatatggctgcaacacacgactgcrcggacaaaaatgtggtgctgaaatcactgctattttaataatcggtacatttaattctagctctttattattttaaaatagttttttgtttctatgtttttgg

SEQ ID NO: 439128 - DNA, 530 bp, Homo sapiens
tctttgcaaagaaatgtggggaaatgtgggtagaagggtaaatagaaaatgtgtcactagcgaggaattaactagagcaaggtccacatgctatgtcttggcagctctctgcttggaatgtcatatgttattcaaaaaacaatatttaattgcaggatctgcatgtctagagcagcagggagatgctacttggcttgcttgctcaaagataagttttatacaaatattaaaagattctgtaatcttgtatttgttaaaaagaataacaaattcctatttctgaggttatgagaatcttattactcaactggtcagtgcatatagccactactagaaaataaagaacatctaatmcctttagtaacttcattatcattttaacattctatatctttgcaatgtgttttcaatcatcggatagcctagaaaccaagcaaatcatgcaagaagaggtgaaccagtccttagaattaggtaatctgcagaagatcccgtacgtggatcaatgaacagaaaaaaaagttccatta

SEQ ID NO: 439129 - DNA, 448 bp, Homo sapiens
cttctccctacatgcctgagcttggacccagctcaatccgtgttacacaagagggacctgtagcttgggcagccttggcaacctgccaaacggtgagtgagccgtgaggatgggaccctcatcctaaacccagtctttgtttagatgatgatgacttgcaaggtggtgggtttttctsgaagtctagtctttcctaaaagtgggctatcacaggcgctcttgtggggcgaggaggtgagcaaagagcgggccgagatgaggaggcggctggcaggtccttccctatgatcccttcccagtgttgtgccatgttacttcttccgcattttttttctctaaaggaatgacgatagactcatgctaaaaaggctagcagaccaaagcaaaaatctttcagctggggctgcgaggggagccttagctatcatagagagtaagtccaacagca

SEQ ID NO: 439130 - DNA, 448 bp, Homo sapiens
cttctccctacatgcctgagcttggacccagctcaatccgtgttacacaagagggacctgtagcttgggcagccttggcaacctgccaaacggtgagtgagccgtgaggatgggaccctcatcctaaacccagtctttgtttagatgatgatgacttgcaaggtggtgggtttttctcgaastctagtctttcctaaaagtgggctatcacaggcgctcttgtggggcgaggaggtgagcaaagagcgggccgagatgaggaggcggctggcaggtccttccctatgatcccttcccagtgttgtgccatgttacttcttccgcattttttttctctaaaggaatgacgatagactcatgctaaaaaggctagcagaccaaagcaaaaatctttcagctggggctgcgaggggagccttagctatcatagagagtaagtccaacagca

SEQ ID NO: 439131 - DNA, 561 bp, Homo sapiens
attgttctaacaaaaacataaaacaaactcagcattctttagggacttttgcacacaataaaaagaacttttaaaaactcttgggctgggtgtggtgaccctgtaaccctagcattttaagaggctgaggcaggagattgcctaaggccaagaggtcctgaccagtctaggcaacatagcagaccctgtctctacaaaaaataaaaaaaattagcygggatggtggcacatgcctatagtcccagctacttgggatgctgtggctggagggctgcttgagcccaggagttagagtctgcactgaggtgagatagtgccaccgccctcctgcctaggagacagagcaagaccctggcttaaaaaaaaaaaaaattaaagactcaagttatgaaattcatgaccaagtagtcagtgcctctgactcacagtaaccacacagggctgattactgtacacgattttatggataacttcaaatagtcttgccaaagtgctacaaatcagaacaagtttttaagtcataaaagtaaagtcctagaattattgtaatatgatataatt

SEQ ID NO: 439132 - DNA, 540 bp, Homo sapiens
tatgtcctgatatgtcctggctgtttctaacaacctatgctcacatatgggaccaaaaaaaaatgacttaaatttggattttatatttaaacaggaagcagagcataaaagtttggaaaatttgaagcctgcccatgaggmagaaaaaaaaaaaaaaaaaagctttttcgggagaggaattcaagcaggctacagagcaacaacttgctagataaatttgcataactgaaagggaaccaagtgctggtatccaaaacaatgaagaaaagactgaaaaggtatttcagagaccttcatagtagcccctctcatcataggcacagaggcttaggaagaaaggatggttgtatgggccagacccagggctacactgccctgcacagcctcaggacactgttgcctatgtcccagcttctccagcttcaggcttggatcaagggaccctagatacagctcaggctgctgcttcagacagttcaagccataagctttagcagcttccatgtgatgttaaacccacaggcacacagaatgcaaaag

SEQ ID NO: 439133 - DNA, 646 bp, Homo sapiens
tgctttgctgctgttctaggtactcaactctggtagctcttttacaactcaaggattctctcttttttaaaaaattaacttttattttaagttcaggattacatatataggtgtgttacataggtaatcttgtgtcatggggatttgttgtacagatcattttgacacccaggtattaaacctagtatccattagttattttttcctctctctcctcctgccctccaccctccaacaggccccagtgtgtgttgtttccctctrtgtgtccatatattctcatcatttagctcccacttataagtgagaacatgcagtatttcattttctgttcctgaattaatttcctaaaaataatggcctccagctccatctatgttcctgcaaagaacatgatctcattctttttatggctgcatagtatcccatggcatatatgtaacacattttctttacctaatctaccattgatgggcatataggttgattccatgcctttgctgttatgaatggtcctgcaatgaacgtacgggtgtgtgtctttataacagaacaatttatatttctctgggtgtatacccagtaatgggattgctgggtcaaatggcgtttctatttttaagtcttagagtaatacccacactgt

SEQ ID NO: 439134 - DNA, 591 bp, Homo sapiens
tcagaattctaaaccttaggataccttagtccacacccagggtcaaggcggccacaagtgtctcattctgacctagttctagtcacaggcccttaaaggactttgccattattcctatcatcgtttttaagaattgtcaacctttttaattcatttttttctaaatgatatgttattttctgatttatgcattattcttgatattgaaaaaaaccatcagtaccaggttttattttgagtttayaattgcatctatatttacaagaaatagtaatttattattgtatatttgcccacattccctaactcagtcttatgtggctctctttcattcctgtgttctgggtttgaccaggccatcttcatctgtctgtacccctcacaattcttagaattaatatctttatccttgtttacttgctattgtctaaatcttcagatgtactcctagttgcttcttgatatacctctattaaaaaaacttgcataaattttcctcaatgtacattttgttgtgttcatttcacaggcaagcatgtttgtatcacaaagaaaaggtattgttacgtgaaaccaaacaggcattagctt

SEQ ID NO: 439135 - DNA, 397 bp, Homo sapiens
atttattttggctttattttggtttttattttttacaaccaccttcaaacatctgaaacttgggtttcaaatgcaaataagagattaattacttgctgtgctttgaacaggaaggtgaagttattgatgcattgaagaaaaggacattgtaaatttatttactgactttgattttggtgacaatttcaacactgaaagttgtcaacaatctgatcaacttttcctccattctccacattccttcatccagtgccttcccacctgttctctttcctattgtgttcccaggacgatgggagccttttaacaccaatggagcaggagatgcactgattcacatgcacycaaatacaacaccaaccccacaagctctcagctcaccagtcacagacatcac

SEQ ID NO: 439136 - DNA, 619 bp, Homo sapiens
gaaagaactcttggtgtttaaagatgttaactttcatctatcatctgtgatgcaaatgtatttttaactctataatttctcactgacctcgtttcaatctcctacagattttggtttcttttcttggttaagaagtctctacaaaccctaaactgtatgtataggctcccagactttcttctgaaaattcattcattcactcatttatctattcatttatttatttttacactgaagtcttcagttccctggaatttatttgtctatattctgagaaacaagtgcccatttctattttctcctggrtggagagtcagcaccttccttctcaccctgaattgaaatagcaacttcataatatattaaagttgcatatattttggaagctagttggaaggtctgctattcaatcactctaacatgtttatttatttcaaaaactgtaaatgacttatgtatttgattatagtgactttgcagtgtgttttaatatctacactcactattcttttcatacattttattcttgggcatttaattttctatataaactttaagatcacttaatattatttgcaaatggtgtgcttctaattggaattgcaatatattgtgtaat

SEQ ID NO: 439137 - DNA, 619 bp, Homo sapiens
gaaagaactcttggtgtttaaagatgttaactttcatctatcatctgtgatgcaaatgtatttttaactctataatttctcactgacctcgtttcaatctcctacagattttggtttcttttcttggttaagaagtctctacaaaccctaaactgtatgtataggctcccagactttcttctgaaaattcattcattcactcatttatctattcatttatttatttttacactgaagtcttcagttccctggaatttatttgtctatattctgagaaacaagtgcccatttctattttctcctggatggagagtcagcacyttccttctcaccctgaattgaaatagcaacttcataatatattaaagttgcatatattttggaagctagttggaaggtctgctattcaatcactctaacatgtttatttatttcaaaaactgtaaatgacttatgtatttgattatagtgactttgcagtgtgttttaatatctacactcactattcttttcatacattttattcttgggcatttaattttctatataaactttaagatcacttaatattatttgcaaatggtgtgcttctaattggaattgcaatatattgtgtaat

SEQ ID NO: 439138 - DNA, 605 bp, Homo sapiens
tattttatggtgataacaatggcggtgccagtgattatccgtgagactggaccgatgatccgccatgtgtgctccattttcctaccttgttcattctgtgagaagtggatttggccaacatgttgaaagtatccaaacgcagccctttctgtgtttggaggaagtaattttacattagttcgttagtttttttttttttagttctgtagytttatatatcgttgaaaagaacatcttttgaaagtagagagtccattcagcaatctagcatctgtgtttggttgccacgaaggcctaaccattgccatttcaggggggagcacagggggcagggggatggggagagaaaagaaaaagcaagcacatagactgcatattcaaatcagcacctcaaattcatgatgctaacttacatgatattttcctggtttgaaagttcttattgtaaggaaataaacacaaaacttgtcaaataatatagtattaaaatactaaaaattagtggtattaaactgaaactaataattttagactaaaacaccattttagtgtgaccagtcatgttttgcttagagtgaatgtcatttcttaaatgttcatacaaa

SEQ ID NO: 439139 - DNA, 605 bp, Homo sapiens
tattttatggtgataacaatggcggtgccagtgattatccgtgagactggaccgatgatccgccatgtgtgctccattttcctaccttgttcattctgtgagaagtggatttggccaacatgttgaaagtatccaaacgcagccctttctgtgtttggaggaagtaattttacattagttcgttagtttttttttttttagttctgtagctttatatatcgttgaaaagaacatcttttgaaartagagagtccattcagcaatctagcatctgtgtttggttgccacgaaggcctaaccattgccatttcaggggggagcacagggggcagggggatggggagagaaaagaaaaagcaagcacatagactgcatattcaaatcagcacctcaaattcatgatgctaacttacatgatattttcctggtttgaaagttcttattgtaaggaaataaacacaaaacttgtcaaataatatagtattaaaatactaaaaattagtggtattaaactgaaactaataattttagactaaaacaccattttagtgtgaccagtcatgttttgcttagagtgaatgtcatttcttaaatgttcatacaaa

SEQ ID NO: 439140 - DNA, 589 bp, Homo sapiens
caatctgaactgtcagattcctattgtttggattttgttaactgtgtattcttggataagttatcctgttcttttctcctatttcctgaaaaatggcagcaccattcagagggttaatcagactaattttggcattttggcaagactataggagacatgtaaacatgtctctgtttttgttggcaaacattaatgcccaatatattgatccatcaattcgttgaatggagggcagtaccaaatagtgatattctattatttaaaaaattattaccagaatttaaaaataaacagatactttccttcatctattatggttacccaatgatatagtcatataggaaaggcagaataaatgcttgattctttctctttatttaccatcctctgaaggtgatcaattattttttgataattaaatattaatgaatagatttattcacatttgttgattttaatccattggcaattattttccttatagaggctaaatttttccatctttggccattagaaatctcataaagttggcttgccctattgacatgtttctagtagtcatgayttattttttgacaaggtatttcag

SEQ ID NO: 439141 - DNA, 587 bp, Homo sapiens
aatcctaacatgacaaatgacttggaggttagaatagagcaaatcaggaccagaacaatgtttaaaatttaytgatttcaaagattgtagtcactcaactgatctattttcagtttagaaaatagtgggatgttacactttgtaatactaagcactgtatggttgaagttaaagcccagtaagtccattttaccaggagtcaggaattttgagttctaatccttgctacaactcttaattttagttaacactaatatttctggaattcagttgtattatctgtaaaataaaacaattcagatgaatttgactagagtgaggagactgcttcatatgacttcctaacctcagggtttttcagtcagtgtttcttattgaggtataaaagaccatgttccagagatggcacctcacagagacatgaaattgataggatttaatattcatattcttctcaacagaccttttatttaaataggcaaaatagatactctcttttacaaaggggacactggggcactcagtggagtgcctttgttcagtaccatagctactcacctccattcagaatgccttctttcatgaac

SEQ ID NO: 439142 - DNA, 550 bp, Homo sapiens
attgccttcccatgaagtaggtagaattaaagtgctttgatttttttgttgttagagtgtgagaaatcctaacatgacaaatgacttggaggttagaatagagcaaatcaggaccagaacaatgtttaaaatttactgatttcaaagattgtagtcactcaactgatctattttcagtttagaaaatagtgggatgttacactttgtaatactaagcrctgtatggttgaagttaaagcccagtaagtccattttaccaggagtcaggaattttgagttctaatccttgctacaactcttaattttagttaacactaatatttctggaattcagttgtattatctgtaaaataaaacaattcagatgaatttgactagagtgaggagactgcttcatatgacttcctaacctcagggtttttcagtcagtgtttcttattgaggtataaaagaccatgttccagagatggcacctcacagagacatgaaattgataggatttaatattcatattcttctcaacagaccttttatttaaataggcaaaata

SEQ ID NO: 439143 - DNA, 546 bp, Homo sapiens
ctttggttaacctctgtcttctcwactagactatgagctactgaatagcagatattgaatctgcttttgcttgccattttatctccagggccacattaaaaaaaatttttttggagagtaaatgagggagtagttgtgtttgtccagcacatttttaccagagtagaaaagcagacacagggaaagagacctaggcagagacagtgatcaggcatttttggcgtggagtactccgtgattcacactccaacactgagcaaagcggctggcagtaaaagaaactgtcagggtgagaatgtccttaacagacatgttgctctttgacgttgtttttctttgcttggccactatttgtaaaaagaaggaagaagaatttatgatgaagaaacaagagattgtattctcataatttacaaacagaattaaagttcacttgttaaaacttgaagtggaagaatgtttcaaagagcttttgaagctaagttcatttgaaactaagtcttaaaaaccacatgttctcgcttatgagtgggagctaaccaattg

SEQ ID NO: 439144 - DNA, 546 bp, Homo sapiens
ctttggttaacctctgtcttctctactagactatgagctactgaatagcagatattgaatctgcttttgcttgccattttatctccagggccacattaaaaaaawtttttttggagagtaaatgagggagtagttgtgtttgtccagcacatttttaccagagtagaaaagcagacacagggaaagagacctaggcagagacagtgatcaggcatttttggcgtggagtactccgtgattcacactccaacactgagcaaagcggctggcagtaaaagaaactgtcagggtgagaatgtccttaacagacatgttgctctttgacgttgtttttctttgcttggccactatttgtaaaaagaaggaagaagaatttatgatgaagaaacaagagattgtattctcataatttacaaacagaattaaagttcacttgttaaaacttgaagtggaagaatgtttcaaagagcttttgaagctaagttcatttgaaactaagtcttaaaaaccacatgttctcgcttatgagtgggagctaaccaattg

SEQ ID NO: 439145 - DNA, 546 bp, Homo sapiens
ctttggttaacctctgtcttctctactagactatgagctactgaatagcagatattgaatctgcttttgcttgccattttatctccagggccacattaaaaaaaatttttttggagagtaaatgagggagtagttgtgtttgtccagcacatttttaccagagtagaaaagcagacacagggaaagagacctaggcagagacagtgatcaggcatttttggcgtggagtactccgtgattcacactccaacactgagcaaagcggctggcagtaaaagaaactgtcagggtgagaatgtccttaacagacatgttgctctttgacgttgtttttctttgcttggccactatttgtaaaaagaaggaagaagaatttatgatgaagaaacaagagattgtattctcataatttacaaacagaattaaagttcacttgttaaaacttgaagtggaagaatgtttcaaagagcttttgaagctaagttcatttgamactaagtcttaaaaaccacatgttctcgcttatgagtgggagctaaccaattg

SEQ ID NO: 439146 - DNA, 563 bp, Homo sapiens
tcaaaaatccatagtttgcataatctacctaccctcctgaggctgtttcttccagacaacacygtagctgggaattgaaacatctaacaacgcatactaatgaactatgagatttagtgttccaggccaacacacaagcaatcaaagaatatgtcgtttgcttaattgtacaggtcattgggaaatggtgaggaggcagtcttgtagtactcttttcaagttccattgcacacactatagattgtcaatgcactaatcttctgagattagcacttatgtaaatttaatcagttttcattgatagactgcaaacctcttgtatgttgcttgtattgttggatgatttctttgtcttacttttccacagctctgctcttatcttcatgaagcctagatttttctaatccaaaaacttgccatagatttagttacagttttttccttggaagacatgccgcgattctgagagagagacaaaaaaagggcaagagagatccaagcctattgtatttcttataaagcagagtacagatgaattagctgctgctaaatagatgacttat

SEQ ID NO: 439147 - DNA, 563 bp, Homo sapiens
tcaaaaatccatagtttgcataatctacctaccctcctgaggctgtttcttccagacaacaccgtagctgggaattgaaacatctaacaacgcatactaatgaactatgagatttagtgttccaggccaacacacaagcaatcaaagaatatgtcgtttgcttaattgtacaggtcattgggaaatggtgaggaggcagtcttgtagtactcttttcaagttccattgcacacactatagattgtcaatgcactaatcttctgagattagcacttatgtaaatttaatcagttttcattgatagactgcaracctcttgtatgttgcttgtattgttggatgatttctttgtcttacttttccacagctctgctcttatcttcatgaagcctagatttttctaatccaaaaacttgccatagatttagttacagttttttccttggaagacatgccgcgattctgagagagagacaaaaaaagggcaagagagatccaagcctattgtatttcttataaagcagagtacagatgaattagctgctgctaaatagatgacttat

SEQ ID NO: 439148 - DNA, 489 bp, Homo sapiens
ttggcatttcatttcttttaattctcttttctcctcttgctcagcacttctctgaattagtgcttcattttgaactagtagccactgtaagccattagcagcaattcatacccatccctctcttctcatttcctaactaaatttctaaactttgcagtcagcttctaatgcagtaacaagaggtggccacctggtaggattacgagaagccttcacactcccaactctctatgtgtgtgtgtacacacaaacacacacacacacacacatacgcacgcacgcaagcatgtacccctcccagacccaggttgccactcctcaagtcccattgtggtcttagtcagtctactaaaatggaaggtttccataaaaaggaacataataggattattaatatacctcmgtatgaacaagtaaatcatttctcaacagcagggtttacagagacaggccaaaggagcctgtttatctgtaggagtggaaagaggt

SEQ ID NO: 439149 - DNA, 570 bp, Homo sapiens
atggatcagaattttttttttgaagaaaatgaataagatcatgtttatgacacacagctcttctaaggagattcatggctatattaaacacagttctggacctattttttcacggatttaaactacaaatgctatcaaaattatattccactccaggagattactgatttctaccatcagtttctagtttcctaggcatttgaactagtagtcacacagaacgggcaactygtattgtcaattgaattgtaacacttggatggctcccaggtgatgtcacaaataacatttattttcaaaattacttagaaaaaacagaaaaaaagcacacaaaatatattcttcagtgatctttgcatccctttcaatatgtgtctcaaaggtaacttttaggtagcctgagattggcagcgtcgggcagcagccagctgtggtcccaagcttccttggaatgccatgtctccgatgagaaaacatgtgatgaagacattgagctgccaaacaaagtatttgtgcctccctgtacccctcaccttacatgttgtagagctgttggtagtaagtggttgt

SEQ ID NO: 439150 - DNA, 570 bp, Homo sapiens
atggatcagaattttttttttgaagaaaatgaataagatcatgtttatgacacacagctcttctaaggagattcatggctatattaaacacagttctggacctattttttcacggatttaaactacaaatgctatcaaaattatattccactccaggagattactgatttctaccatcagtttctagtttcctaggcatttgaactagtagtcacacagaacgggcaacttgtattgtcaattgaattgtaacacttggatggctcccaggtgatgtcacaaataacatttattttcaaaattacttagaaaaaacagaaaaaaagcacacaaaatatattcttcagtgatctttgcatccctttcaatatgtgtctcaaaggtaacttttaggtagcctgagattggcagcgtcgggcagcagccagctgtggtcccaagcttccttggaatgccatgtctccgatgagaaaacatgtgatgaagacattgagctgycaaacaaagtatttgtgcctccctgtacccctcaccttacatgttgtagagctgttggtagtaagtggttgt

SEQ ID NO: 439151 - DNA, 575 bp, Homo sapiens
gcaattttgtttaaccttgtaatactagctcctaatacactgcttggcacatagaagatgtacagtacattttctttatggttttttttttagatggagtcttgctctgttgcccaggctggagtgcagtgacgtgatctcggctcactgcaagctctgcctcctgggttcatgccattctcctgcctcagcctcccgagtagctgggactacaggygcccggcatcacgcccggctaattttttttgtatttttagtagagacggggtttcaccgtgttagccaagatggtctcgatctcctgacctcgtgatccacccgcctcagcctcccaaagttgtgggattacaggtgtgagccaccgcgcccggcctatgctttttttttaaaaaaaatattttcaaacttttattttagattcagggggtacatgggtaggtttgttacctgggtatattgtatgatgctgaggtttggggtataattaagtctatcagccatgtactgagtgagcatagtacctaatagttgcccctcttcctccctccctcctccccccacctctagtagtcccc

SEQ ID NO: 439152 - DNA, 575 bp, Homo sapiens
gcaattttgtttaaccttgtaatactagctcctaatacactgcttggcacatagaagatgtacagtacattttctttatggttttttttttagatggagtcttgctctgttgcccaggctggagtgcagtgacgtgatctcggctcactgcaagctctgcctcctgggttcatgccattctcctgcctcagcctcccgagtagctgggactacaggcgcccggcatcacgccyggctaattttttttgtatttttagtagagacggggtttcaccgtgttagccaagatggtctcgatctcctgacctcgtgatccacccgcctcagcctcccaaagttgtgggattacaggtgtgagccaccgcgcccggcctatgctttttttttaaaaaaaatattttcaaacttttattttagattcagggggtacatgggtaggtttgttacctgggtatattgtatgatgctgaggtttggggtataattaagtctatcagccatgtactgagtgagcatagtacctaatagttgcccctcttcctccctccctcctccccccacctctagtagtcccc

SEQ ID NO: 439153 - DNA, 575 bp, Homo sapiens
gcaattttgtttaaccttgtaatactagctcctaatacactgcttggcacatagaagatgtacagtacattttctttatggttttttttttagatggagtcttgctctgttgcccaggctggagtgcagtgacgtgatctcggctcactgcaagctctgcctcctgggttcatgccattctcctgcctcagcctcccgagtagctgggactacaggcgcccggcatcacgcccggctaattttttttgtatttttagtagagacggggtttcaccgtgttagccaagrtggtctcgatctcctgacctcgtgatccacccgcctcagcctcccaaagttgtgggattacaggtgtgagccaccgcgcccggcctatgctttttttttaaaaaaaatattttcaaacttttattttagattcagggggtacatgggtaggtttgttacctgggtatattgtatgatgctgaggtttggggtataattaagtctatcagccatgtactgagtgagcatagtacctaatagttgcccctcttcctccctccctcctccccccacctctagtagtcccc

SEQ ID NO: 439154 - DNA, 433 bp, Homo sapiens
cctagtttttgggggtttgttttttaatttataaagtgatgttgtatttcattgcaagctttttctatgtctattgagatgatcatatcatcttcgttgttaatactgtttatgtggtgagtcacatttrctaattgccttgtatcccaggaattaagcctacttggtcatggtgaattaacactttgatgtgctgctggatttggtttgctagtattttgtttaggagtttttgtgtctatatttattagggttttcttttttcctgtgttttgtcacttaggtgatgcaagcttcgtagaatgagttgacgaatctctcctcctcaaattttttttttaatagtttcagtagaattggtaccagctcttctttgcatgtctggtagaatttggctgtgaaaccatccggtccaggagtttattttttgatt

SEQ ID NO: 439155 - DNA, 433 bp, Homo sapiens
cctagtttttgggggtttgttttttaatttataaagtgatgttgtatttcattgcaagctttttctatgtctattgagatgatcatatcatcttcgttgttaatactgtttatgtggtgagtcacatttactaattgccttgtatcccaggaattaagcctacttggtcatggtgaattaacactttgatgtgctgctggatttggtttgctagtattttgtttaggagtttttgtgtctatatttattagggttttcttttttcctgtgttttgtcacttaggtgatgcaagcttcrtagaatgagttgacgaatctctcctcctcaaattttttttttaatagtttcagtagaattggtaccagctcttctttgcatgtctggtagaatttggctgtgaaaccatccggtccaggagtttattttttgatt

SEQ ID NO: 439156 - DNA, 519 bp, Homo sapiens
gtattaagcctagtacccattagttattyttcctgatcccctccctcctcacaccttctaccctctgataggccttggtgtatgttgttcctttctacgtatccatgtgttctcaacatttagttgccacttaaaagtgagaacatgcagtatatggttttttgttcctgcattagtttgctaaggataatggcctctggctccatccatgtccctgcaaagcacatgacctggttctttttatggatgcatagtattccatagtgtatatataccacattttctttatccagtctatcactgatgggcatttaggtcaattccatgcctttgttattgtgaacagtgctgcatgtgtcttgataatgaacatacatgtgcatgtatctttataatagaacaacttatattcctttgggtacatactcagtcatgggattgctgagtccagtggtatttctgtctttacacgcaatgacatacataggctaaaaatgaagagatggagaaaaatctacc

SEQ ID NO: 439157 - DNA, 519 bp, Homo sapiens
gtattaagcctagtacccattagttattcttcctgatcccctccctcctcacaccttctaccctctgataggccttggtgtatgttgttcctttctacgtatccatgtgttctcaacatttagttgccacttaaaagtgagaacatgyagtatatggttttttgttcctgcattagtttgctaaggataatggcctctggctccatccatgtccctgcaaagcacatgacctggttctttttatggatgcatagtattccatagtgtatatataccacattttctttatccagtctatcactgatgggcatttaggtcaattccatgcctttgttattgtgaacagtgctgcatgtgtcttgataatgaacatacatgtgcatgtatctttataatagaacaacttatattcctttgggtacatactcagtcatgggattgctgagtccagtggtatttctgtctttacacgcaatgacatacataggctaaaaatgaagagatggagaaaaatctacc

SEQ ID NO: 439158 - DNA, 504 bp, Homo sapiens
gcacatcccatggaaaacaaacctggcctagaggggcagaaagagacttaaaggcaggccctgtgacactgtgttctctcacagctgccctccctggagaggaactcctctgttgtgtctgtcgctctgagactgtggtccctgggaaccggctggtcagctgtgagaagtgtcgccatggtgagagggcaggtcacctgaatggtccagcttgctcttccctccaggatggtctctatatcacctgtcctggccttagtccccaagccactgctctggccaggctgcttagccttatcttagtcctcatccgctttcagcccagggagaagcagccatggaaaggggtggtwtaacctttgcaggcagaagatggtttaaatgcatccttttctaaccatatgacctcggacaagtcccttaacctctaggagcctcagttccctgacttgtaaaataaggataatgcaccccctcatcaagaccatggtcagggattaaatg

SEQ ID NO: 439159 - DNA, 613 bp, Homo sapiens
ataaaagttgaggctgttctgcctatgggatagccctgctctgtctatggagcagccattaaagtaaaaaataaaagttgagaaaaaaacatacttgccaactacctactgttactcatgtgtgggcactgctctaggcacaatgatcagtccctgttcttcttattaatttattattattattattattatttgagacagagtctcgcttttttatacaggcyggagtgcaatggcgccatctcggctcactgcaacctccgcctcccaggttcaagtgattcttctgcctcagcctcctgagtagctgggattacaggcatgtgccaccatgcccagctaattttcgtatttttagtagagacagggtttcaccattttggccaggctggactcgaactcctgacctcaagtgatccacctgcctcagccttccaaagtgctgggattacaggcatgagctaccacactcggccatatttattattttttaattgaaacggggtcctgccatgctccccaggctgttctcgaactcctgggctcctcaggcaatctgcctgctttggcatcccaaagtgctgggattataaacgtgagccactatgcctgg

SEQ ID NO: 439160 - DNA, 434 bp, Homo sapiens
ggtgcccttggctctctggcttcatttctactgctccttcctgaagtgttcagaatttctttccatattrcttgtgtgcactgttacagatccagatgcctgccacactgcccactactgaactgtgaaagggctattttgtcctggaggaattttggtataatatttattgccagactaacttaaattcatgggaaaagggctagtgactacaaatagtaaaataacctgttatgagaatcctattcttatttaaaatagaaatgaatctcaagattataggattcaccatatatatattataaatacaataccttaaaatttaaaatatattcattcctaagaattctaatttgttacgcttattatgtaattttgttccatagcgtcacaattcatagtggaaggtagaacatttaaatgacttctcctct

SEQ ID NO: 439161 - DNA, 519 bp, Homo sapiens
tacctgttgactagataacccccacatgcttaataataggaactcagtgacttcccacttaagtaaatctattcctctccatccccaaatcttaggtcggtccacatcatgtcctttctgggatcctgctttctgtcttgcttcctctcacccactgtttatttagtaactggtggggcttctctcatccagagaaggcctaaagaacatgtaggatttggatgccagaaaggaaaaggaatgttctgggaagaagaaatttacatgtgcggcaagagagwgaaagaaataatagtccattcgaggaaaggaagcatgttccttggcctgggtgatggtttatgaaaaggagggggtggcgagacatgagacaggacgtaggcagggactctcaggttacacaaaggagcttatgctttctcaaatatgaaaatacttgaaggcctaggagagtttgataaggtactgggatcccgccacacttcctactttccacatctctctgcctttttgtgccca

SEQ ID NO: 439162 - DNA, 681 bp, Homo sapiens
cctgctgtatacacacacatatacacacacacacacacctattcaatgcagcaatggaaacaaaagagtctttctgccttcatatgaaattaaaactagcctgctaagaagtgaacaaataatcctttccagaagatgccaactgcatcctggttgaatgcagttgaagttcagggttcaagaaagaaagcaataatctcagttggactctagagttgccttcatctctgtgtcagaaacaaatagggactaaatttgtcttctaggcrttttaggagacccttttcatttgcttaaacatatggagcaattttaaagtgaaggaatgtttcatgaaacctaacagctcatttcgatgcattttagaaaataatataacaccattatcactcaagaaacattaaattctgggtcctgcccacacccaccctggattgatagaggtttgtgcaaaaagaattttgaaggagggaaggattagggaacagaggatttgtcctgccattttgttgtgactatgaagaaagcaaggctttgcatgattataattatttcaggaagaacccagagggtgctgaggttcactctcatactgattggattggcgaacgtaaacgaggaagtgaagacaaggagaggccagataagctctggccacccatgactctgaactggaataag

SEQ ID NO: 439163 - DNA, 584 bp, Homo sapiens
gcataagcagtctttcattttttatttgaaaattctaaatttagtttaaaaattataaaattctaaatttagtcgaccagtagagttatgcataactgatcattataagtccactatactgtgaactatgccactgacagccacagccacatgattgttggacttctgaaatgaacatgctggggcagatgaaaatgtacctgtatttatatgattcaatttgtatttaattgcttcatttaatgtaytaatattaaaatatttaatgtttttctatttccttctcttctacatttctctgaagaaaattttatatttgttaaaaatgtattttctaacaatctacataataacaatataaacatttttatggcatcttgcagttcacagaacacttttatcgcattatttcctttgattcttgataagccgtaaggtagggaggatgctttttcatgttggaaaagagaggctaaaataaatgaaaaacagtatttgttcaggatgatttaattgttaattttctttaaagcagatatttctcttgaggatttatccatccctgtgattccatattttaacag

SEQ ID NO: 439164 - DNA, 442 bp, Homo sapiens
tttggaaaaatggcactgataagacttgcttgatttagggttaccataaaccttaaatttgcaaaacttacaacatctgtgaagcacaataaatcaaagtgcaataaagtgaggtatgcctgtattgaaagataaatataatatatttaaagtcatctcttatagtcagcaaataattgggtcttgcttctttattcctcctttctgtctgtctgtatctttttttcttttcctttttttttttttttttttttkggagagagggtcttgctttgtctcccaggctggagtacagtagcatgatcatagctcactgcagcctgaatctcccaggctcaagcaatcctcccacctcagcttcctgagtagctgggactacaggcatgcaccactacgcctagctaattattgtatttttttttgtagagacagggtttcactg

SEQ ID NO: 439165 - DNA, 442 bp, Homo sapiens
tttggaaaaatggcactgataagacttgcttgatttagggttaccataaaccttaaatttgcaaaacttacaacatctgtgaagcacaataaatcaaagtgcaataaagtgaggtatgcctgtattgaaagataaatataatatatttaaagtcatctcttatagtcagcaaataattgggtcttgcttctttattcctcctttctgtctgtctgtatctttttttcttttcctttttttttttttttttttttgggagagagggtcttgctttgtctcccaggctggagtacagtagcatgatcatagctcactgcagcctgaatctcccaggctcaagcaatcctcccacctcagcttcctgagtagctgggactacaggcatgcaycactacgcctagctaattattgtatttttttttgtagagacagggtttcactg

SEQ ID NO: 439166 - DNA, 614 bp, Homo sapiens
ttcataattagtgcaatgaccgatatatttcatttttattattttctcttgctttatatttggtatttatttcatattcttgttttttccttttcctttcttcatttttaatggtttggccatgttgatagtccttccatttcttctcattgttaatttgaaattgtaatatacttttctattctgttaacgtttaccacccctttttccattttctttaatgtttacctcgctcttttctggttggacacattgcttgaacatattttagacaacagtttccattattatttaaartaagatatcaattatactcctaccaagaggtaacattttcccaatcaagtaactttttcttctaacgtttcaccctttccagtatcaagagaccttcagaacactttcattttccctatctcagcttcctatcaatagacctttgaaaaatttttacttcaccccttctccatctctaaacttttggctttccgatgaaaaggggtattatttttacagtattaacagaatttcaccagtattttaagaaatttagcgcttatattgcatgttctcacatattgtatcattagagataaatactgagtccaaacaag

SEQ ID NO: 439167 - DNA, 599 bp, Homo sapiens
gcagtcccttcctctcatgaatcgataaatatgattctagtgccttctagcttccggtgttatacatgagaagtccaattataatgtgattcatttaataattccttttttggaggtagaggaggctgagcttttktaagattttctcattatgtttagagatcaagaattttactaagacattccaggtgtttatctactcaactttttttactctgcagtcttggattattcttagctctataatttattaataattgcctctcctccatctcctacttttactttctgaaatgcctatcatatgcatcttaactcctccgaatttatcctctatatctcttacctttttccctcataattttcatatctttacatttttctatgtgctttgagataactattgcattttattctccctaattaggtctgaagagtgactttttgacaaaaaatcatttagttgtgaattactgtgtgttaactctagaaaatctcttttgtgctacatttgagtcccactattgttctccttactttttaaaatttaagttgtcatctaatcccaactattttgctggcagatattacgttctgtc

SEQ ID NO: 439168 - DNA, 599 bp, Homo sapiens
gcagtcccttcctctcatgaatcgataaatatgattctagtgccttctagcttccggtgttatacatgagaagtccaattataatgtgattcatttaataattccttttttggaggtagaggaggctgagcttttgtaagattttctcattatgtttagagatcaagaattttactaagacattccaggtgtttatctactcaactttttttactctgcagtcttggattattcttagctctataatttattaataattgcctctcctccatctcctacttttactttctgaaatgcctatcatatgcatcttaactcctccgaatttatcctctatatctcttacctttttccctcataattttcatatctttacatttttctatgtgctttgagataactattgcattttattctccctaattaggtctgaagagtgactttttgacaaaaaatyatttagttgtgaattactgtgtgttaactctagaaaatctcttttgtgctacatttgagtcccactattgttctccttactttttaaaatttaagttgtcatctaatcccaactattttgctggcagatattacgttctgtc

SEQ ID NO: 439169 - DNA, 529 bp, Homo sapiens
gcatactgcagcctctaactcctgggctcaagtaatcttcccacctcagcctcctgagtagctgggtccacaggcacatgccactgagactggctaattaattttttttttctagagatggggtcttgctttgttgcccaggctggtttcaaaatcctggcttaaagtgatcctcctgcctcagcctcccaaaatgctgggattatagatatgagccaccatactcggccttgtttttatctttttgatcacagtcatcctagtgggtgtggagtattatatcaatgtggttttgatttgcatttctctgatggctaatgacttttttttttttgagatggaatctccctctrttgcccaggctggtgtgcaatggcacaatcacggctcactgcaacctctgcctcctgtttcagggtattctattgcctcagcctcccaggtaactgggattacaggcacacaccactatacccagctcattttttgtatttttagtagagatggggttttactatgttggccaggc

SEQ ID NO: 439170 - DNA, 606 bp, Homo sapiens
gccttctttcaacaatattttgtaattttcagtacataaatcttgcaggtctttagtaattttattccaaaatattttattctttttgatgctattgtaaatggcattgttttcttaatttcatttttgaggtgtgcatagctgatatattaaaatatgcttgatttttgcatatttctcttatatccagcaaacacatcgaaccagtctattagttgtaatagtttttattgaatttcttagaattttctatatacaaaattatgttatctgtaaacagaggtagttgtacttctttttttctaatctggatgcccttcatttctctttctgactaaacacctggctaaaaccttcagtacaatattgcatataagtgccattaatggacatctttgtcttgttcccgatcttataagggaaagcatacagtcttttaccattaastatgatgttaggtgtgggttttccatatatgtctgtcttagctcaggctgctacaacaaatacatcataaactgggaggcttaaacaacaaacatttatttctcacagttctggaggttgggaagtctaagatcaaggtgccagtagatttagtgtctg

SEQ ID NO: 439171 - DNA, 599 bp, Homo sapiens
tctctctggtaagctctaatccttgctctcttgtttacttttatcaatttgaggattactctgaaggtagagttctctcaactttttaagcacccattgtttacatctctttacaaacttaggggcttacaagactagatagtttacttgattattgacaaacttgagcttctcaggttcctctacaagcagcaaagcaggttcttaggcacagctcttctgtgggtgaccacagttcctcactgacaagaaaactcaaagctatttgaagctttcagtgactgtattttggtctttggttgacaatatttgattagatgaaaaaattagaatgaaagaaacattagctacacttagacacacctgccttattttaggatggaggtgggtggggttggagggaagctatagttgtatgtatttccctgctcttctttctcagtccctcaaatacactaaagcaactctgagcaataattaatctttatttgatcatttaaaaggatgttctgagatcatggatctctactataggtatgcccaagtgctagaatctggtgctagagaaaaataaatgygtaagagttagctaactatca

SEQ ID NO: 439172 - DNA, 609 bp, Homo sapiens
aacaagggacaattaaaaggaaaaacatgcataagaaacaactgcttacttagcaaatcacaactaaaccaccatactttcttatgtctaaaatttaactgacactttacgagtttctaactgctagtatttcaatctggcaacaagcgccttctctagatgagaaaaaatcaatggtacatctttttgcacaacatgcatttacttgtatttacatgcatattatatgtgtatattgcttcatacattcatctgttcrgtcttaactgcaagcatctaaagagcctatttaatttgcttcataaagcatatccttcagcaccacttacaaagtaaatacttctgatgggaaaaataaaatccacccaaaagagaaattgcagaacaaaggaaatcaaatgaggattaagagaaacataacagagatggtaaatatgtaaattcaaaacagcataaatttataaattcaataaacttgtaaatctcatcctccactgtcagccactattagcatgttggtatatttctccttgcagccttaatttcaatgtgtttgcgaaacatgaatattcccttatcatcaggtaaacagggttctcagcccatttc

SEQ ID NO: 439173 - DNA, 536 bp, Homo sapiens
caatattttatcaggcccaagagtaaaatattctgcagctactgcagtgtttttattgccactcttaaggtagaaccctgttaaatggtgtataagtatgtggattcagatatgatagaaaatcctgtttccacaattatagtgtatatataagacgtagagttagattggatggtgatttctagccacagaggagctctatcattcattcactcatcaaagacttattgataaatgtggcaaccattgttttaggtactggggatataatggtatatacaagaaagtctctkctctaatggagcttatattttggtatgcaagaaggacaataagtaaatgaataaatagtatcacatagtgttaactactatgaaggaaataatctaggacaaggactgggagtaataatgttagattacctcagagaagatgatacatgagcaaagaattaaataatgtgaaggagaataccatgtattaacagggagtataaaggtactgagattggaatgtactccagaaacagaaatatc

SEQ ID NO: 439174 - DNA, 560 bp, Homo sapiens
tggctacttttctgatctcatccccagccactctccttattcttagtatactgtagctgtgttagctccttccctttcctccaacatgttcaagcaaagtcttgcctcagaacctttgcacttcctattccctktgcatggggtgttcgtgagtactgccctgattaccctgtataaagtaatccacaaactcccctcacctgatccttcctactcttcttatttggcatagcagttattatgacattgcaagttgtttattatttgtcctcctgaccactaaacgataagcttcatgacaacatgggcgttatctgtttttattcaatgctgtgtccctaccattgagaattctgttggattttcaatatgaatagtgaatgtgacttggtatggtctcttttcatccattgtgcctaggaattataatagtagattcagtttgaaaaatccgattttttcatttctgggaaattttcttgaattgattcttcaatagttttttcacctcttttttttttctttctcttccagaacatccattttgggatattggaact

SEQ ID NO: 439175 - DNA, 545 bp, Homo sapiens
tcaggtcacagtgtcactaaaataaatacggttttggataatttttcccttctaattcatacctacgactgtggcaatacattaactaaacacatttttaaaatacatgwtataaatattgatggaggtagggaagtaatcagagtctgtacatgaatggcattggcatccagttgagttggtaacaattcgcaactaagctccacctccatccttacctagtaaggagtcagagtgctagtacttttcagattacctctccatacaaccttttggacataaaacagtgaggatacaaatgaatatttcttgagagtctgataataaacagtaccagacactttgtatacatagcttaatatggtccatacacactcctgaagtgcaggtatcattacatccatattaaaaattgggagattgaaggtaagagacatcagttacctagcacaaagtcacataacagtgtcaggtctaatccatcaactgaaaactttgaatttaatgaaagtcttagtaatgcattttaagagtacatctgttat

SEQ ID NO: 439176 - DNA, 630 bp, Homo sapiens
atttcagctattgtactctgcaactcattcagtagctaaaactatggtaacaaaatcttacctaaaagacctcttcagttaatttgattcacaaagtatgtgagaaggagttgtaattaacctagtgatatgtatacataaattaattttttatgtttttagaaattctttacatttttctccgtatatttaaacatttcttcccgatcctgttgaaaactattaaattggagttattttacaacaaagttttcctgaggaaagtattatcccagtctatgtctgtattctcttgaatttgaacttagtggcatcagaattaatattgttccacttcagaggctttaattatttttctactcatttatacacttctttctatattcagacttttgctatattttgagttttactcactggaaacctcagctatgatgctataatggttcaagtaatcctgcatataataataaaatctctacactcactacgtrtattacaagccaagaaatttgatgtatagttatatctgtaatactattgttgtagccttggacatgtcccgtattttcactctttcatctataaaattgtgtaggagttggaaacatttagaatagaccattctta

SEQ ID NO: 439177 - DNA, 580 bp, Homo sapiens
catttggaaagtcaaacactgaaggttgcaggagttctatcagaaattacttgaaacttagtttctgtcactgactttgtaaagttaagcataaattaaaggctcaatcttagctaaaaattttcatcctattagtaatatcattccccattttaatgagagacacaaaaaataaaatgaacaaatttcattatctgtattggccaactatatttctgacataccaaatgcttactgcacaaataaattttctccgaattatatatacagtttcacctarttgtgtaaaatcggatattaatcgacacctttaaaccttattactaggaaatctggggcattaaaatcatccttaggaactcataggaaatggtaaacatataatatcaccaagtctccctttttgaaaattagaaataactcaatcatgctccattcctggtcaaccaagaattttaaatttataatgcttgcatgactaaatgtgattttgttctatgacacagagactaagcatacataaactaaatcagccacttagacacgtagcttgaagtacttatgtacataacaaagcact

SEQ ID NO: 439178 - DNA, 548 bp, Homo sapiens
caacaatatgaaaaggaaacctgtgggttgggagaaatatttgcaaatcatacatctgataaggagttaatacccaaaatatataaggaactcacacaactcaatagcaaaataacaacccaattaaaaaaaggaacaaaggacctgaygagacatttttccaaagaagacataaaaatggctaacaagtatatgaaaagatgcttaacagtactaatcatcagggaaatgcaaatcaaagctgcagtgagatgtatcacctcacacctattaggatggcctttattaaaaagacaagaggtaagtgttagggcgtggaggaataggaacctttgtacgttatttgtgggaaaggaagtttggtacagtcattacggaaaacagcatggaagttcctcaaaaagttaaaagtagactatcagatgatccagcaatgctgcttctgggtatatatccaaaagaaatgatcttgatacctcaaagagatgcctgcattcccatgttcattgcagcataattcacaatagccaagatagccaagatgtgga

SEQ ID NO: 439179 - DNA, 528 bp, Homo sapiens
gcttgggcattattttgccttggattcatgaggaatcaatgatcaatcctggacagtaataatcaaacaatcttatgatttcttttggctgccctgcagttacccatatrcaaattaatcataggtaatgaagtgtacatttatataaggcacattaagtttgaggggcctaaaactgattagggagattaaaattggactctatcaggtggctgttgtctcttcagaccatcgttctgtacacttgtccatccattcatcaatcttttatgttgagctacaaataaacaaaagtattgtcctttgctgagagaggaacccaagatgattaagacgcagtcctttggtctacctgaggatacaggtcctcaccaggtgtggatcagatcaggaaatacgatgtatcttggagcaagtgggtcaaagcttaggactagatccaaaaggagaaaacagttcaaacaaagtcaaggaagtaagaaagagatgagatctggactcttactaccatgccctgtatcaccagga

SEQ ID NO: 439180 - DNA, 603 bp, Homo sapiens
agatactgttctaaaccctaatatatgtattatctgatgtattcctttcttcacagtctacccatgggatagtttctgttaccctgttcactttatagttggggacactgaagcacagagattaggtaacttgtctagggtcacagttacaaagtgaaaagtaccaggaaagcaatctcctctgtgcatgcactatctggaaaaggaaagtattgggaaagttttatatttcttccattctggtctttatctggaagaaacttctcgagttttgttatgtatagttgctaggctccctaattttaaggctgataaagatattttacttttgcttggccatgtcaatttctgaacagaatcacatattaaaagataatggacttatcatacttrgtttacaaacgtgaaccctcattatcttaagtccacaatttataaaaccatagttgataagagattactttatcttctttcaaaaattttaaaaacacatgaagggccaaggacactcagttatttacatattagtgtgaatcagattgcttacctcttgatcattagctaagagggactttaaagaattttgtttggcaaagagtagag

SEQ ID NO: 439181 - DNA, 594 bp, Homo sapiens
tgctttccttcccatagatataattgactctgcgatatgagaaatgtatatgatatatgcacatttaatatttacatatttacttgtgctagaaatgctggtcatgaagcctgcttgcccccatacccttgcaggtgagaacggtcctcccacagcttccattaaggggaagcatatcagaagcacagctgagatcacgcgaacagcttcctctccctgaacacatattcccaaagtggtgcatttataaccattttaaaggtaatatatcaatatgagagttattaatattygatgaaaaggattcactgtaaaaaaaagaaggcaagaagcacaatagagaagtggttttcctttagatgtgttctcgcaaccattaaccaagggtggcagattctaccaccccagtggtcctagttccttaactcactttcctactttacagatgttaaaatttggtgatgcttcagagaaggcctcttcagatactgtccctctactctctcccagcttggtcccaggtagctggtgcaggcattggtacttaaactaaaccaaccactactggagtgaaaagaagtaaacagtgagaga

SEQ ID NO: 439182 - DNA, 594 bp, Homo sapiens
tgctttccttcccatagatataattgactctgcgatatgagaaatgtatatgatatatgcacatttaatatttacatatttacttgtgctagaaatgctggtcatgaagcctgcttgcccccatacccttgcaggtgagaacggtcctcccacagcttccattaaggggaagcatatcagaagcacagctgagatcacgcgaacagcttcctctccctgaacacatattcccaaagtggtgcatttataaccattttaaaggtaatatatcaatatgagagttattaatatttgatgaaaaggattcactgtaaaaaaaagaaggcaagaagcacaatagagaagtggttttcctttagatgtgttctcgcaaccattaaccaagggtggcagattctaccaccccagtggtcctagytccttaactcactttcctactttacagatgttaaaatttggtgatgcttcagagaaggcctcttcagatactgtccctctactctctcccagcttggtcccaggtagctggtgcaggcattggtacttaaactaaaccaaccactactggagtgaaaagaagtaaacagtgagaga

SEQ ID NO: 439183 - DNA, 509 bp, Homo sapiens
ataatttagaaatgcacgtgagaataatgaatactacctttgggatcatcatactttgggtgaggaaggaaggggatgaaatatagcaaggctgcataggaggaaggaaggggatgaaatatagyaaggctgtataggaggattccatcccatggtatcattactatatgtctgtaagactggtgaaacttggcaatgggcacacaagttgactattgtgtatgactatttatttaccttatatgttttcttcacattttatatatttaaatatttcacaataaaacagtttgttatattggtacctatcctcacaggtttttctttctatatattatatcctaaatataaaatatttagcatatctataaaaatacataaaaatgagatcccaatgtatatattaatttttgaaagttatttattcacctaacaatatttcgtgaacatcccttacccatcaataaatatacttctaccacatcatttataagacctttggtatgtac

SEQ ID NO: 439184 - DNA, 550 bp, Homo sapiens
ttttatatgtaatttttatagttcttgggctactttgcatttatctgtgccatcgcccatctcttacttatcttacacttctttctgtcccacaaagctgtgggggacagcagaaggtgtgacttgttcctcctgcctctttcagaatgcctggtaatttgatctcaataaacgtgggtgaatgaataaataaatggaaaaataagaatgacttggcaagaaaaggtgaaaacagggaaaagtacaagtaggaaggaaaaatgtcagcattcattttacatgtgaagcgtttcactatttctggttttggtaagaccaagtcatcaacgctaagaaacgcaaaagaggtatatattctgtattcctttctctgtcttttaaatatacgtagccacacactgaacaacaattaacccsttttgctcttgttaattagaatgaatcattttggatgtttcatatattttttatccatttagttctcaaatatttttcctttttcaaaacttgtcctcaggaagaaaacgatacttacattagtcacagtttt

SEQ ID NO: 439185 - DNA, 548 bp, Homo sapiens
ataaaaatttatattatttgtgctattatttgatattaataatacttgaaataatatatcactcacataaattttaaacrttcgagccttgtaaccatagagcattttttaaaattaaactttaaaattaaattttactttctatatattttttgcagtaaggtatacctgggcagccatacttttggttcttttttattttgcagaaagaggaaaactttcaatcataaaatatactacgttatgatagcatgagtctaaagagaaaagaaaatgagataaatgtccaatatatttacttttatgaataactgagtatctaactggcatggtatttacattctagcagaaacatctacaattaatatttataattttccagatataacttcctttgcaactatttcaacttatgatgatgaattttaaatgccaacttacaaatgtgcctgtggtcgatattttctaaattcttttaggggtttaaaagtaaaaatttggaaaggtaggtcatgacctttataattctttcccttttctccctggca

SEQ ID NO: 439186 - DNA, 529 bp, Homo sapiens
tattttataaacggagataccactactaaaaacagaatgctataaagagtatgatgtcttttgttccaaagtcgatacactagagtgatgcaaaaataataataaaattaagatattttgtggcaaagttatcttagggtaaacactgcagcrgcaagcaccactggagaatatcctcagggcagatgggaaagggaatgaacatgcatctcagaggtgagaggagctgcttctgtagcagccaccatggggttccatagctcacatgccattggcacaacacagaaccctgagctgcagaattggccccttagcatccagaagaccatgtgacaggtgataccccaaatcaatgatgaggaattgaacatggagatccactcaaggactgcaggccctgtaaacaaacaagtcagggactgcagcccactctgtagcagtggtcctggccctctcatgttgctccttttgtgactctctggtcctgctctgttcctggatcaacccacttctaatcatctccaatctg

SEQ ID NO: 439187 - DNA, 531 bp, Homo sapiens
gattttggtactacgagtggttctagaggaagataattataagaatgagtttccttaattggcttgggagtttctagaatttgctcactaatctgattagatcaaaaaatgctaaggactctgcttctaatagcacagagagcactgatagttcatggaatgaactgtttacagagayacaaaaaaatctgcatttcatattcctaatcaaccacttataagtggccaagaaattggctaaattatttccatcctgtaggactttggggaaggtggaatttaagagtgataaactagggtatctggcaggagagatttccaagcaaaatattgagggagctgtgtggctaattttaatcgaataaagtaagctgcaagagaaaagaaatgacttatagacataatttagaattaaaagagaagcaaaactaaaaagattttgaaaaatttcagcctggccctgaaaaaaattaaaaaagcatgttcagatgacaaaccaagggtgtggccaagtgaccatttgctaaggag

SEQ ID NO: 439188 - DNA, 601 bp, Homo sapiens
cagtatgtgaattttgtataaaatgacaatgaatggtgttgcttttcttctaaaaaattattttgtcctcagaattccttctcgtcctgggacaacaatttggagatgaaattaaaacagcttcatcactttttaggaaacaaaaatccgactctgttcaatgtcaaatacttcagtaaggttttcatttcagaactatggtaacttgattttattttgtattctatccaaggtcaagcctggattatagctcwtctagaaaactgctgagaaacctctgggcattttggaaagcttcaacagaacacaatttcacagccagttgaattaaaatcaataattgctgatatgaacaaaggttagtattcaggaaattttcgacagaccattgaatattttgaatcagcttatctcaagggaaggcatagataaaatatttgatcattctcagtttctattactttaaaagcacaaacttagcaaatggaaacactataactgctttgtcataagactgagagaatattaatataaatattataatgcatttttttgatagagatttcaaactcctttaatttggaagactaaaggagatttt

SEQ ID NO: 439189 - DNA, 598 bp, Homo sapiens
ggggttccatagctcacatgccattggcacaacacagaaccctgagctgcagaattggccccttagcatccagaagaccatgtgacaggtgataccccaaatcaatgatgaggaattgaacatggagatccactcaaggactgcaggccctgtaaacaaacaagtcagggactgcagcccactctgtagcagtggtcctggccctctcatkttgctccttttgtgactctctggtcctgctctgttcctggatcaacccacttctaatcatctccaatctgtaccttatccctgaccctgtatgctacacatccattagccttctgtttcctcaggtttttatttatttgtttaaatttaacaaacacattgatcttagtactttacaaacatgaatccctacaatgatgagacgatgaggtaatcctagtgttacccccactttgtaggaatttgtcatcacttttgcctattaatgttcctagacactgcatatagccagcctcttgggcatccagctagttcagcgtcactattatcagtcttatcagtgcctttctcagagcagggttggatggtacccactgtatggtagcaa

SEQ ID NO: 439190 - DNA, 598 bp, Homo sapiens
ggggttccatagctcacatgccattggcacaacacagaaccctgagctgcagaattggccccttagcatccagaagaccatgtgacaggtgataccccaaatcaatgatgaggaattgaacatggagatccactcaaggactgcaggccctgtaaacaaacaagtcagggactgcagcccactctgtagcagtggtcctggccctctcatgttgctccttttgtgactctctggtcctgctctgttcctggatcaacccacttctaatcatctccaatctgtaccttayccctgaccctgtatgctacacatccattagccttctgtttcctcaggtttttatttatttgtttaaatttaacaaacacattgatcttagtactttacaaacatgaatccctacaatgatgagacgatgaggtaatcctagtgttacccccactttgtaggaatttgtcatcacttttgcctattaatgttcctagacactgcatatagccagcctcttgggcatccagctagttcagcgtcactattatcagtcttatcagtgcctttctcagagcagggttggatggtacccactgtatggtagcaa

SEQ ID NO: 439191 - DNA, 565 bp, Homo sapiens
cccactgtttttatgatgtgagtaagacttttgttcacttgacccagaacttttcttcttatatgaatctagtaagaatttagtgtgtttcctatccatttcatttctaggagcactatgatgaaccagccaatgccataggcctgtggagtcagactattctratagttgctttgactctgctgcccatcacagtaaccacgcccaccttgcctttggcagttgagtgctgccattcggcccctgccaccccatgatccagttgctcccactgcattaggttttccaattgagtggctgtggttcccactgtaaggtgtggcctgcaaagaagagtgatcacagaacccttcaaagacactgggggtcccctcacaaatttatttctccagggctggtgaaaggtattgtctttgtctatttccactgctataacaaaatactagagagtagggtagtttgtaaacaatagaaacttatttttcttggctctggaggctgggaagtccaaaagcaaggcgctggaaggattggtgtctggagagggctgctttctggttccacg

SEQ ID NO: 439192 - DNA, 587 bp, Homo sapiens
tttgtacagaccttaaaaatattctagcggtgtgtagaaaactaaagcatgctttagacacatattttgtgcatttaaaagggtttcatgtgacttactcctgggatctcatcccaaactgcctrtactgtttccctaatcccaagcatcacacaactaaaagaggcttgtgaattcctctataccagagacactaagccaaggccaatccattgtctttcaacttctccttgcaccaagcacacatcccttgagctagaacgaaaattgtacatctcaaagggataaataaatgtttgctgaaggagattgaatgagaggggcagaaagttgaggccccttgtaccactaacagaattgtaagtacttttaattgggcaggaagtgggttagaatgattagccccatagtgatttagccataaatgatctgtacagacataaaacaggctgaatgggtcatatgacatttggatatattaggtccctacagagatggtagggaaatggtgccaaactgcccagatgcgtacactaatcattgaatgccagagagactacgtgggccagagatgtggaacaatggtt

SEQ ID NO: 439193 - DNA, 587 bp, Homo sapiens
tttgtacagaccttaaaaatattctagcggtgtgtagaaaactaaagcatgctttagacacatattttgtgcatttaaaagggtttcatgtgacttactcctgggatctcatcccaaactgcctatactgtttccctaatcccaagcatcacacaactaaaagaggcttgtgaattcctctataccagagacactaagccaaggccaatccattgtctttcaacttctccttgcaccaagcacacatcccttgagctmgaacgaaaattgtacatctcaaagggataaataaatgtttgctgaaggagattgaatgagaggggcagaaagttgaggccccttgtaccactaacagaattgtaagtacttttaattgggcaggaagtgggttagaatgattagccccatagtgatttagccataaatgatctgtacagacataaaacaggctgaatgggtcatatgacatttggatatattaggtccctacagagatggtagggaaatggtgccaaactgcccagatgcgtacactaatcattgaatgccagagagactacgtgggccagagatgtggaacaatggtt

SEQ ID NO: 439194 - DNA, 609 bp, Homo sapiens
  misc_feature (1)...(609): n = A,T,C or G
actgtaaattttagtgtttcacacaggtaggttatcataacaaatcatctagccaggagatgctgaacttttatgtaacttttcctacacaggaagaatagctcgtagatcatagcttcagcagcttagaaaagagcaattatagagggaatacatgtgtatatttagccctacgtttagttctatcaaggcagctcttaagagactctagaagtttttaaaattatcttatttaaaagaattcagggtcataaaagctttgggcaaggtccttatgggcccattttcatgaaaaaaacaagaggctgtgctcggttagtaaagaagaaatgatattattcccagaagctccaccatgcatcccttctgtctcacctcccaaccacaaaaattaaaattcaatttyggcaaatttttatggaaacctacagtacgcctggaactattgtatacactctgtagtaaagaacaagatagacaagattcctcatcttcatggagccaactttctattagagcaggcaggtgggacacatgagaacagaaaatgagaaaaaataagaaaatgttcaagagtaataaagatttttaagacaataaaatgggtnn

SEQ ID NO: 439195 - DNA, 471 bp, Homo sapiens
  misc_feature (1)...(471): n = A,T,C or G
nnnnnnnnnnnnnnnnnnnnnnnnnntgctatacagtaatactgatactgatacatgaactttgggacatactgcatggagyttgggagctgaggactgtatatatggtggtgtgtatgcttggaatttggataacagacatcctgaaattaaactcactcactgtggtgttcctggaattttttgatggataggctttgcagagcttgcccgtaccgcctttaatgaattactttccatctatgcacatgtactatggaaccaggtaaagaggggaatgagagcctctttgcagccaacccagattatggctcttaattactgcaagtcatttatggatagaagttaatgctaggatttatgaattgaggattatggcctttgatctcaaatttacttttaaagaagaaaaaggaatggtgacttttagtacggctgattgccacagtcatagtgataagatgctctgct

SEQ ID NO: 439196 - DNA, 562 bp, Homo sapiens
gacttctgggtcgggtggggacttggagaacttttctgttttacaagaggattgtaaaatgcaccaatcagcactctgtagctaggattgtaaaatgcaccaatcagcactctgtggctagctagaggtttgtaaaatggaccaatcagtgctctgtaaaaacacaccaatcagcactctgtggctagctagaggtttgtaaaatggaccaatcagcagtctgtaaaatggaccaatcagcactctgtaaaatgggccaatcrgcaggacatgggcagggacaaaaaagggaataaaagctggccaccagccagcagtggcaacccgctggggtccccttccatgctatgggaggtttgttctttcactctccacaataaaccttgctgctgctcactctttgggtccacaccacctttatgagctgtaacactcaccgtgaaggtccacggcttcattcctgaagtcagcgagaccacaaactcaccggaaggaaccaactccagacacagaaggaggagtcatactaaatatgttgtgaagttagtacatttttgtttga

SEQ ID NO: 439197 - DNA, 606 bp, Homo sapiens
gaagtctgcgtatctaaaaaagcaggaaggtgtgcctgatccctcccactctcatttgtccatccacctacctactcatccagccacctacctatccatccatctacctacccatccayccatctacctacccatccacccatctatccgcttatccgcctacctgtccatcaatctacccatccatccatccatccatccagccctccctctgtctttccatccatgcagtagtcactcaggatccacttcatacagaccccatgttaggcaaataaagatacagtgaaacctacaggcatcacctgccctcgggggcccacagtccaggggagagattgactgtccaggtggccaggtgcagcctgcccctctcccgtggggccagagccaggttgcgcccctgtaagatgagcccctcagcccctgggttctacttctggtggatgagcagagtctgccagagactgtgttcccagaaccagactcttggtccaatcagcaaatctttgtcaagctcctgccctgtgcagaccctgccctttcactgagacacagcagacaaggttcctgttcatactcaccctctgctccttgtgctggctc

SEQ ID NO: 439198 - DNA, 554 bp, Homo sapiens
cgcctgtaatcccagcattttgggaggccaaggcgggcagatcacraggtcaggagatcgagaccatcctggctaatatggtgaaaccacatctctactaaaaatataaaaaattagccaggtgtggtggcaggcgcctgtagtcccagctactcgggaggctgaggcaggagaatggcgtgaacccaggaggcggaggttgcagtgagccgagatcgagccactgcactccagcctgggcgacagagcgagactccatctcaaaataaataaaattaaattaaaattaaaaaataaatattaaaattcaatgtaaaacaattaagttatgatgataaacatcatacgatatcaactcacacaagattcatggtccttttcaatgtcaggtaaattcatccttgatttcatgaaaatccagggattaaagcagagtagtttcatctaagtgcagctaatgtctattccattttcaggtatgtccgtggagaacatacctgaaaatgatatgttcatggagaatcaacttgcctttcattcacttcaacttgtct

SEQ ID NO: 439199 - DNA, 565 bp, Homo sapiens
aactttgaacttgagagagatgatttagggcatctggcaggagaaatttctaagcagcaaaacattcaagaggtgatctggatttttctgaaagcatacagtcacatacggtcacaaagagatgatttgaaattggaatttttgttttgttttgttcttttgagatagagtcttgctatgtcacccaggctggagtgcagtggtgcgatatcagctcagtgctttctatgctaaaaccagaaaagtcccaaacaagacayattggtcacttttaggaatacatgaataaataccttttcccaaagagactgaaggaagttgaaatgtaatggtgagttgagattgcagttcctaggctgccctaccaatacttagcaaattcataagtcatgtaaaaactttttctaagccttgaaagtatgtttgtttagtccctgaaatctgaccactcgtctcctttttatttatttatttatttatttttgaaatggagtctcatctgtcgcccaggctggagtgcaatggcgctatcttggctcactgcaacctccgcctcccgggctca

SEQ ID NO: 439200 - DNA, 537 bp, Homo sapiens
cctcaacactttgggaggcagaggcaggtggatcacgaggtcaggagttcaagaccagcctggccaacatggtgaaaccccgtctctactaaaaatacaaaagttagctgggcgtggtggtgggtgcctgtaatcccagctacttgggaggctgaggcagagaattgcttgaacccgaggtggaggttgcagtgagccgagatsgcaccactgcactccagcctggacagagcgagactctgtccaaaaaaaaaggaagggaggaagggaggaaggcaggcaggtaggcaggaaggcaggaaggcaagcaggcaggccggccccttcaaataaaagctaatccagtcacctatgctgttaacatcatcccttcaataattttattctataaaatatctttttcctatatttcctacccttccttctccactgatttcttccttcaatatgaaaatgttctaggttattccctgagaggaaggttaaaaaacaacccttgaattcatatatcttcaccctctaggtattttaaaccat

SEQ ID NO: 439201 - DNA, 613 bp, Homo sapiens
acactatttataatagaatccaaaagaataaaatacctagaaataaaattaatcagatttaaaaaatacacaatgttgctgaaagaaattaaagaagacctaaaccaatggaaaacattccacrttcacaagctgaatcgtttaatattgtaaagatgacaatactctgcagattaatctaaagttaatgtaatctctatcaaaattcctactacacattttgtataaatagataagctgatcctaaaatacttgccaggatgttcccaaatatctatattttagtaatggtaatgataataaacaaaacaccccaatacatcacatgtatatatggtaaagtgttataggtattctaaaagcacatcctttttacagaagagtcaaggtagccatttggggaaagggtggacctttgtaggcatttacaaaaaagaatgtccttcactggtagactagatactagatacttcatgaaaactgtagcacttatctgtaaacaccctcctcccagcattgaaagccacacgttacaactgtatttaaaataggactgctctttagttaaacaagtacaggtcttcacaaaaactcattacataacccaagcaac

SEQ ID NO: 439202 - DNA, 596 bp, Homo sapiens
tatacacattatgtactgactaccacagtcaaattaacacaatcaacaccaccacccatagtgaccatgggtcacttacaatttgctctctttatcaaatttcaagtaagcaatacagtataatcaactatagtaaccatgctgtacattacatcccctccctatttcccctacctcctccccaggcactagcaaccacccttgtatgctctgcttttatgagttcaacttgttggattccacatattaatgagactatacaatatttgtctttctgtatctggcttatttcacttagcataatatctcccartttcatccataatgtcaccaatgacaggatttccttctttttatggctaaatagtattctgctgtgtgtgtgtatgccacaatttctttacacattcatccgtcgatggacactaacgttacttccacatctcagctattgtgaataatgctacaattaacatgggggtacagatatctcttcaatctactgatttcacttcctttggatatatacctagaagtgggattgctgaattgtacagtagttctatttttaattttgagaagaacctccatattgt

SEQ ID NO: 439203 - DNA, 585 bp, Homo sapiens
aagttattaacagaattatgaatttatattttgattttcactcaatgaatgcaagtgatacatgcacatctacagcctttcaccttgtttcaattcagttctcaattaaatactatattgtagcagccctaatgatccactgcaaagaaagtaattcaaagaaagtygactttcggctaggcgtggtggctcacgcctgtaatcccagcactttgggaggccgaggcggatggatcacctgaggtcaggagttcaagaccagcctggccaacatggcaaaaccccgtctctactaaaaatacaaaaattagctgggtgtggtggcaggcgtctgtaatcccagctactagggaccctgaggcagggagaattgcttcatctgggaggccgaggttgcagtgaactgagatcaccccattgcaccattccagcctcggtgacaagagcaagactcatctcaataaaaaaagaaagaaaaaaaaaaaaaagaaagttgactttcccaaaatttcaaaaagtaatttggcatagacccatggaccatcatattagcaaaataatttcattatagcattattttaagag

SEQ ID NO: 439204 - DNA, 585 bp, Homo sapiens
aagttattaacagaattatgaatttatattttgattttcactcaatgaatgcaagtgatacatgcacatctacagcctttcaccttgtttcaattcagttctcaattaaatactatattgtagcagccctaatgatccactgcaaagaaagtaattcaaagaaagtcgactttcggctaggcgtggtggctcacgcctgtaatcccagcactttgggaggccgaggcggatggatcacctgaggtcaggagttcaagaccagcctggccaacatggcaaaaccccgtctctactaaaaatacaaaaattagctgggtgtggtggcaggcgtctgtaatcccagctactagggaccctgaggcagggagaattgcttcatctgggaggccraggttgcagtgaactgagatcaccccattgcaccattccagcctcggtgacaagagcaagactcatctcaataaaaaaagaaagaaaaaaaaaaaaaagaaagttgactttcccaaaatttcaaaaagtaatttggcatagacccatggaccatcatattagcaaaataatttcattatagcattattttaagag

SEQ ID NO: 439205 - DNA, 585 bp, Homo sapiens
aagttattaacagaattatgaatttatattttgattttcactcaatgaatgcaagtgatacatgcacatctacagcctttcaccttgtttcaattcagttctcaattaaatactatattgtagcagccctaatgatccactgcaaagaaagtaattcaaagaaagtcgactttcggctaggcgtggtggctcacgcctgtaatcccagcactttgggaggccgaggcggatggatcacctgaggtcaggagttcaagaccagcctggccaacatggcaaaaccccgtctctactaaaaatacaaaaattagctgggtgtggtggcaggcgtctgtaatcccagctactagggaccctgaggcagggagaattgcttcatctgggaggccgaggttgcagtgaactgagatcacyccattgcaccattccagcctcggtgacaagagcaagactcatctcaataaaaaaagaaagaaaaaaaaaaaaaagaaagttgactttcccaaaatttcaaaaagtaatttggcatagacccatggaccatcatattagcaaaataatttcattatagcattattttaagag

SEQ ID NO: 439206 - DNA, 585 bp, Homo sapiens
aagttattaacagaattatgaatttatattttgattttcactcaatgaatgcaagtgatacatgcacatctacagcctttcaccttgtttcaattcagttctcaattaaatactatattgtagcagccctaatgatccactgcaaagaaagtaattcaaagaaagtcgactttcggctaggcgtggtggctcacgcctgtaatcccagcactttgggaggccgaggcggatggatcacctgaggtcaggagttcaagaccagcctggccaacatggcaaaaccccgtctctactaaaaatacaaaaattagctgggtgtggtggcaggcgtctgtaatcccagctactagggaccctgaggcagggagaattgcttcatctgggaggccgaggttgcagtgaactgagatcaccccattgcaccattccagcctcggtgacaagagcaagactcatctcaataaaaaaagaaagaaaaaaaaaaaaaagaaagttgactttcccaaaatttcaaaaagtaatttggcayagacccatggaccatcatattagcaaaataatttcattatagcattattttaagag

SEQ ID NO: 439207 - DNA, 523 bp, Homo sapiens
ttgtcctcccctccccccaacacacacacccttgcattggcctggcgcgggggaagggcggtggagagggacggccacggagctgccsggccgggcccagtgagccctgtccaagctgcgcataaatagaacccgagtaagggctgcaaaacgcattcaggtgggactgcagttaccctggggagtagagggcaaaaggaaattcccatccagtactgatggagtaagagcccctacgtcttataccatgttgaaatatcttaattacttaaatgcgcatatgtaaaaagccttttttccggcaatggaataagtctggaagagatcttgggagagtttaataggctagaggttgctgccgtttgaccatacacgctggcactttcagaggattcacccactgagcaccttctgtgctacgtgaaaaggcgcgctgggggacacctcattgcttcctttttttgggtgaagccttggagactggccaggacagtggcgggccgggtggattggatggaaaccc

SEQ ID NO: 439208 - DNA, 591 bp, Homo sapiens
tcaccctcctgtcacctgcagacatttgcgcttacaatcaagaaactgaagtttgaagcacaaaataaaggggccaagttcctaaagatgaagccaaaaaggttgagcatcatttgtgtctcagcttgtgcaggacagtgtcctatgtcagcacagggctcttggagcactctgggctggcccgtttccaaaaggtttcatgttgccctcactattctccctcgtccagccccttctcgggccagaacaagtcttctcgggggtcctctgttgggttttcttcggtccaaaaaagctcttgaatgatagggggcagcagcaactcagtgacaatagtacattaactcaaaaggaagccaggttttcatgcaggacacataaaagctattacttaaaacccarcaggtgcatctcagatgccttccagcatgtgaaggacaccattgcattggctctcaccaccaccatgccctcctccttacccagggtgaagcatgaatctgcacatggggaggcttcagaggacaactgagacaagaagcaggaagctgagaaaggaggacacctcccacacacacatctagcaaaagc

SEQ ID NO: 439209 - DNA, 591 bp, Homo sapiens
tcaccctcctgtcacctgcagacatttgcgcttacaatcaagaaactgaagtttgaagcacaaaataaaggggccaagttcctaaagatgaagccaaaaaggttgagcatcatttgtgtctcagcttgtgcaggacagtgtcctatgtcagcacagggctcttggagcactctgggctggcccgtttccaaaaggtttcatgttgccctcactattctccctcgtccagccccttctcgggccagaacaagtcttctcgggggtcctctgttgggttttcttcggtccaaaaaagctcttgaatgatagggggcagcagcaactcagtgacaatagtacattaactcaaaaggaagccaggttttcatgcaggacacataaaagctattacttaaaacccaacaggtgcatctcagatgccttccagcatgtgaaggacaccattgcattggctctcaccaccaccatgccctcctccttacccagggtgaagcatgratctgcacatggggaggcttcagaggacaactgagacaagaagcaggaagctgagaaaggaggacacctcccacacacacatctagcaaaagc

SEQ ID NO: 439210 - DNA, 566 bp, Homo sapiens
tttgtggtcaaatgtttgatatctgtggcatgcccaaacctcgctcttggagattcaaggcatacttggatataatggaagccttggtaagtccttcggtaatgaattagacatctttcaatccagcattttccagatctatttaaaaatgaaacactctttggcttcatcccttctgccctggagtggggctctaccaggcatcagtctgagaagctgctccaggactgcatctgtcccccgcccccttgtggtttttggagtctgcaggcaagaccagccttcctcactcttgcattccctatgagacccgacgaggtcacattccaggctttgtgagcttgtgtttacatgagctgtgggctgtccctcacccaatgccttaggcatcttccagactcttccctactcccttctgtggctttgtctctggggctctgcrgcactcctgtcaggggtacacatgaagagggagaatgtctaatgtccggcaaggttgggagatgccccagcagactatgggcttcctgaggtcagaacccagtccactgctcgatcctcagccc

SEQ ID NO: 439211 - DNA, 468 bp, Homo sapiens
tctgtgaggctaattagctcccaggggaagctgaggctgctggccctggatgcactgggcagcagaggtctatgggcatcttcagggtgcacctgcgtgctttggagatgaaggagctgtgactcctgttccttttgagagggcaamgctgggaggtgttgggtgcatgggaaatgcaccagcaagtgggactcaccttccctggggtggatgtcatgccgcatatgggatttcacccgtggcaggctgttcatgtcgggtgttgctgaagagattggtaaattaggcagagttttggaggaagttaccttgcaggtccctcccaagtttaaatttgcctgtgggtttgtgagtaagaaaaaataacctatatacttcacattgtgtggctgatgaggggaattcagaactgaagaccatgggtgattcagagaattcctgattttgtaagaaaagcagggtatacac

SEQ ID NO: 439212 - DNA, 468 bp, Homo sapiens
tctgtgaggctaattagctcccaggggaagctgaggctgctggccctggatgcactgggcagcagaggtctatgggcatcttcagggtgcacctgcgtgctttggagatgaaggagctgtgactcctgttccttttgagagggcaacgctgggaggtgttgggtgcatgggaaatgcaccagcaagtgggactcaccttccctggggtggatgtcatgccgcatatgggatttcacccgtggcaggctgttcatgtcgggtgttgctgaagagattggtaaattaggcagagttttggaggaagttaccttgcaggtccctcccaagtttaaatttgcctgtgggtttgtgagtaagaaaaaataacctatatacttcacattgtgtggctgatgaggggaattcagaactgaagaccatgggwgattcagagaattcctgattttgtaagaaaagcagggtatacac

SEQ ID NO: 439213 - DNA, 568 bp, Homo sapiens
caaggacatggattcaaatatgtgaagaactcctgcaagtcagtaagaaaagggcagacatgctaatagaaaaatgggcaaaatatttggatagtgcaatgggtatttttatgggtccacttgactgaacctcagggtgcccagatatgtggtcaggcattatttccaggtgtgtctgtgagggtgtctggaagagtatttaaattggtggactgaggaatgcaggtggccctccccagtgtgggtgggcagcatccaatccattgaaagcccaaatggaacaaaaaggtggaggaaggttgaatttgctctgcctgcttgagctgggacatcaatcttytcctgttctcagtgctcctggttctcaggccttcagaatcttctgaaattccttctggaatctaaaccatcagctctcaggccctcaaaccataccatcagctttcctgggtcaccagcttgcagatgacagattgtgggatttatcaacccccataattgtgcaagccagttccttataataaatttcttgtaaaagacttgtacgaggctgttcagagtacaactg

SEQ ID NO: 439214 - DNA, 568 bp, Homo sapiens
tgctgggaggtgaatcacccaaacaggagcgcccacatggatggagatacgcacaagaggtaaacttttattttgtttagctgtggaggctaggatttggttattacagcagcagctagtataccttcaatagtatatayggtttagtataatctgattcaaatatctgtgcataagtgtgtgcagttatggatgtatgttgccatacgcacttttcattctcttaattgggtagtcagaattcttcaatgtgtctgcataacaaactattccaaaacttagaatcataaacaataagcatttctgatctctcgcagttgctgtgggtcaggaatttgaaagcaattagctgagcggttggggccgctgtctcatctaaaggtatgaatggggctggaggttccacctcccaagcagttcctcatacagctgggcagttggtgctgcttgtgtgtgggaggcatgcagacctctctgccgggctgcttgagcgtccttatggcatggcaactggcttcctccagagtgaggaatcccagagagagcaaggcagaagactcaatgtttt

SEQ ID NO: 439215 - DNA, 568 bp, Homo sapiens
tgctgggaggtgaatcacccaaacaggagcgcccacatggatggagatacgcacaagaggtaaacttttattttgtttagctgtggaggctaggatttggttattacagcagcagctagtataccttcaatagtatatacggtttagtataatctgattcaaatatctgtgcataagtgtgtgcagttatggatgtatgttgccatacgcacttttcattctcttaattgggtagtcagaattcttcaatgtgtctgcataacaaactattccaaaacttagaatcataaacaataagcatttctgatctctcgcagttgctgtgggtcaggaatttgaaagcaattagctgagcggttggggccgctgtctcatctaaaggtatgaatggggctggaggttccacctcccaagcagttcctcatacagctgggcagttggtgctgcttgtgtgtsggaggcatgcagacctctctgccgggctgcttgagcgtccttatggcatggcaactggcttcctccagagtgaggaatcccagagagagcaaggcagaagactcaatgtttt

SEQ ID NO: 439216 - DNA, 568 bp, Homo sapiens
cgtgaacctgagcatgggagaactcaattgttctgattcccttttgattatwcgggaatttggagagtacaaaggattggatttttcaaagagaaacattgagagccttattgctattcttatgaccccatggttttctcctttctctgtctatgactgtcaggtggctgacagccatctcctcatggcactgagttttgcctactctctgttccacgagtctctgcatctgccttctcctttactcgggacccttcatcacattggattggaggcactgaccagacacagactgttctcatgctgtgtatttccctggcacagaggaggaaattgtaggctttgaatgaaggcaccgcctgcccgcaaacaacaatagccccacctggttagcattcagtttggaaaagccattgtatggagtagccaaatggaaagattctgctctaagtactctggacttgccagcagaaattaaaagtatgttcaaatcaggccattgtccaagcataatcagacgcccagacctgctgctttcctgaccacgcctccagagccagacagccct

SEQ ID NO: 439217 - DNA, 587 bp, Homo sapiens
tattcctatcctttggctcccaagtccacatctaagtgattcgtcctaaggatgtatttccaaaattgtttttaaatcttgtttcaggccaggagcggtagctcacgcctgtaatccctgcactttggaggctgaggtgggtagatcacctgaggtcaggagtttgagaccagcctggcccaacatggcaaaaccctgtctctgctaaaaatacaaaatttagccacgtgtggtggcggacacctgtaatcccacctactcggaaggctgaggcaggaaaattgcttgaacccaggaggcagaggttgtagtgagccaagatgatgccattgcactccagcctggkcaacagagtgagactgtctcaaaaaataagtaaataaataaatctttttttaaataaaggttgctagtattatgcatgattacataaagtggggcctacccaggtcccaaatgacaggtggatgagcaaactttggcccccatttgaaagaatactatgataagcttaaaaatgacaaaatgaaattcgtcaaaatatagaaaagtatatatgaaagaatgtccagggaaaatattggaaa

SEQ ID NO: 439218 - DNA, 587 bp, Homo sapiens
tattcctatcctttggctcccaagtccacatctaagtgattcgtcctaaggatgtatttccaaaattgtttttaaatcttgtttcaggccaggagcggtagctcacgcctgtaatccctgcactttggaggctgaggtgggtagatcacctgaggtcaggagtttgagaccagcctggcccaacatggcaaaaccctgtctctgctaaaaatacaaaatttagccacgtgtggtggcggacacctgtaatcccacctactcggaaggctgaggcaggaaaattgcttgaacccaggaggcagaggttgtagtgagccaagatgatgccattgcactccagcctgggcaacagagtgagactgtctcaaaaaataagtaaataaataaatmtttttttaaataaaggttgctagtattatgcatgattacataaagtggggcctacccaggtcccaaatgacaggtggatgagcaaactttggcccccatttgaaagaatactatgataagcttaaaaatgacaaaatgaaattcgtcaaaatatagaaaagtatatatgaaagaatgtccagggaaaatattggaaa

SEQ ID NO: 439219 - DNA, 590 bp, Homo sapiens
tgtcatcaaagaaaggtattattatacctgttaaatttaatcctagaaagtcattgtaagtgtagctatgaagacagtatagcaaatattaatagtaaataattgagctcatagtctatgctagacactataccaagagctacatatgaattgttttgtttaatcctaaaaaccccaggaaataggtactattatgtcttagtccatttgggctgctgcaacaaagtactgtagattgtggcttgtagacaacaaaaaatatatctctcccagctctggtgcctgggaagtccaagatcaaggcaccagcagattcagtgagctccctgggtgtcctttaaaaggacactaattccattcatgatggcgctgcccttataacctaatcayctcccaaacgcttccaaatacttttacatggggagttaggatttcaacgtgtgaattttagggggacacaaacattcagtctatagtctattattatctgcattttacagctaaggaaactaggtcacaggttaagcaacttgcccatggtcacttagtaaataatagagctagaaatcaaactgaggctggctggctcc

SEQ ID NO: 439220 - DNA, 590 bp, Homo sapiens
tgtcatcaaagaaaggtattattatacctgttaaatttaatcctagaaagtcattgtaagtgtagctatgaagacagtatagcaaatattaatagtaaataattgagctcatagtctatgctagacactataccaagagctacatatgaattgttttgtttaatcctaaaaaccccaggaaataggtactattatgtcttagtccatttgggctgctgcaacaaagtactgtagattgtggcttgtagacaacaaaaaatatatctctcccagctctggtgcctgggaagtccaagatcaaggcaccagcagattcagtgagctccctgggtgtcctttaaaaggacactaattccattcatgatggcgctgcccttataacctaatcatctcccaaaygcttccaaatacttttacatggggagttaggatttcaacgtgtgaattttagggggacacaaacattcagtctatagtctattattatctgcattttacagctaaggaaactaggtcacaggttaagcaacttgcccatggtcacttagtaaataatagagctagaaatcaaactgaggctggctggctcc

SEQ ID NO: 439221 - DNA, 569 bp, Homo sapiens
gtgctgaaaactagcaatctatcccaatcagagtattcccatactcctcgatgggaattgtgtgggaatgggcttgcagcacacctgcaagccaaggagatagagatgtgacagagtttctcctgccacttccagaagagtttcctgcaaacgtctgtctatcccaagaaaagaattagcaatattgtagcctaattgcttctgacaatcatcttaaggccacacagaaaattactctcaggatgaagctgatcatttggacatcacagcagaaagggagaagctgggtccttgaggacatggttgagctcctgtatcagaatgacgcccacaagcccctcctttctttgactgacagttacatgcgccaagatatgtcctcactgagcttgcttttctgaggtttgcagctgaaagcctcccagctcctcactatcttgtgttttactctgtgtcatggaattactctctaattactccactaawaataaaggaggattaatatcatgactacaaaacacatttcattctatttgaaaatatgttttgctttccattttaaaaagatt

SEQ ID NO: 439222 - DNA, 589 bp, Homo sapiens
ttttggaaaccttaaaaggtcaaattgaagctttttccacattgtaagtcaccaacagtggagattcctaatatgtaaatataggggattgattaagtatattttcatttcatccatataatggagaactattttgctattacagctgatattgtagaaaagcatatttaattactcagtactatgttaattaaaatgaagcaagttacataagaagatagtctcatttttggaatccatagcccatatatgtgatagaattgtccacatggagataggccaactctaggtgcttggctgtaatatttgttgctggcagcagggattcatatgaaggagagacattaagtacatayaggatatgaactaacttaggaacttggtttgtcttttatccttccactctatttggctttagaaacttcaagtgctgcaagatgcgtaaagtttatctggattatcttgtcatttggagcactcaagtgtctgcatcaatatgccttcgaatcacgagtgccaaatgagagcgatactttgtgcttctcacataagcttcttaccaaggatcccaaagcaccagcaaaatgtt

SEQ ID NO: 439223 - DNA, 569 bp, Homo sapiens
tacctcggtgcatacacataccccaaagataaccataatgagtcaactgccagtttccctcccaaatttcacaaattaaagattttataaacccaacttgcaacaaatctaacatttttttctragtaaactactttacaaagtagcaagttcttatattaaatttttattaaataagataaatttttataccatttatacaaatgtcagtttcaacattatctttttcacactccttatgcacagggcaataaggaatggaaagtacagagattaatttaggtaacaattaccataattcacaattgcattagcgcctattaaggttcattgttctgtggaaattttaatgatacattcctgagtgaataaaagcagaagatgattggaaataaaattgtttctatgtatgctgacaggactgctgagtgtaattatacattttggaggcgacctgtttggagtttactccataattttatgtaaatgttaaataacttcacgtgtcttcctcccaggttaaacgctaatttgtgttatttcaacaaggggagagcttcggggttatt

SEQ ID NO: 439224 - DNA, 581 bp, Homo sapiens
attgaatactagtgatatgccaggtactgctgtcacggttttcacatggttgttttttgttgttgttggtgttgtgtttttgtttttgttttgcatttgtatctcataaaatgtctgtgtgatcctcatctgataggagtggacattaaagctccaaggggttatagaatgtgcctagggttacacctagaataaggtatgragtcaaaatttaagtttagatttctgacccatgagtcaacgattgcaccaggctgccttatggacatggacatgaaaaacaagaatacatggctctatgtgacaagtgcccaacacatctaatgccttagctgatgtgtaactaactcgtctgagaggccactcagatattatagtttttccaatgtcactatgtgtcttacatcaaacaagtaaagtcttattcctacctactctgtagagaagaataaattcatgtaggatcaccatgcctacatcatgggcactaaagtgtcaccttacaggttccattactatgactacaatctgcaattttatatatatttttaatgtctgccaaacaaaatcactggaaaact

SEQ ID NO: 439225 - DNA, 587 bp, Homo sapiens
atgccgttgcactccagactgggcaacagagcaaggccctgtatcaaaaaaatatatttaataagtacttagatttcataaaatttaccattgaaaatgtagattcacttatccaagttgttgcaaacatacttgaaattttgcagtaactaaattgagttttccaataactgaattgaacattgtttttcttatttaaattaaattaaattataaattcagttattcagtcaaactagccacatttaagtgctcaagagcaacatgtggctgtgggtaccatattagatagcacagatgcaaactttgcaaacagataggcttgccattgaattgtatggtcttagacatgttagttgaattgtcttagtcccaatttcctaatttacaatttacaaatttactaatccacaaaaaatatatatccgccrtgaattattctcttcagtaggtgaggtaatgtatcaaccctgcatagcacaataactaacaaattttagtaagtcctcaataaatagtgactactttttacttaatattttaagaacaaaactgaaacaccactaaagctaaagaattatacaatg

SEQ ID NO: 439226 - DNA, 491 bp, Homo sapiens
ggtaatggatcagaatatgtttgttgaaccactttgtgaggcatcaacatcggtttctatttttacttttattgtgaacctgattaaaatggctgataggtaattcagtgttcctgtctccttcaaaatgagatatgcctttacgtaaaatagagagttgccttcataaaggtatattatgacatcaagttaagcctttgatgaattgccatcatgggaaatgtttatgaattgtccagatttttaatgagtsgcaattgaattctctagcttgagttattttcagattgaatttttgatacctgtacttactccttttcctcttttgcttttcttttccaaaaccagttcttctgtatgtagatgttgttctctacctgcagtttagagtctgagaacttttccttttattaattttttgagagttgaataaacaattcttagactttttaaggctttggagttgagatttggggaagcaaaagggcact

SEQ ID NO: 439227 - DNA, 582 bp, Homo sapiens
attagaagagtgaatattaagtgatcagaaatgcacatctcaaattcttatatttttaacaagcctccgggaactcattagaatttttgaattatactaaaaccccatcccctttgtgaatggaaattttagggtttcaaggctgaataaagttgtattttagctctaggcctttgaatatctgttatacattttttggtaggtgtatatgtaggatttctatttttggtaaggtggaagctgcttatatacctttgtcttttccaaagtgagaccttttatatattaaagttttacaccccattattggaatatatgattccctctcataaccactatctattttaaaagtaaggactcatgggactgcagaggaaagcagtaaggagagtcagaggtgggtctsttctcatgtgttctctgtagcttcttctcttactggaagaaacaaaggaggagatgaaggtgttttgttttgctttgcttttcctagatcactagctgtgggaagggtggcacatatgactccaatattggtagtaataagttgctaatatttttctagctcttagcatgtgtggg

SEQ ID NO: 439228 - DNA, 483 bp, Homo sapiens
atagtgggtaagaggaggcacttaggtttggatagagtctgcctgacttccaaagttacagataaagatagggaagatgaaacacagacagtccagtccctcctcatttcttgaaacaagcatgagctttccattagcccgtcactacccgccaccacctctgttagaagtcagggtgaaaaagagtaaattactcacatcagttcaggggtgtgtgtgtgtgtgtgtgtgtgttttggtcagctattacttaaaatctatgttgagtattctaattaatttaggaaacaatgtttaaaaagaagctaaattattagtgagtttcccctcaaagcttcctaaaggacctttatgagaagtaattcaagagattccagaggattaagagactactatatttaaagtacccctataacataatattgaatataatcctaaagagagtttttgtttttkttttttcctaaaaactctatgccatca

SEQ ID NO: 439229 - DNA, 325 bp, Homo sapiens
gacatgggcataaacctatgcaatgcattgtgctaggtgatacatgtgagcygttattattttaatactgccttcaatcctttgtggaaatagaatagtaacagaaaatgaatcagctgtgtatgagatctattaaagtgatattgtttggtagataatcagagacataaattttactatacgaggtaggtcaatggtctgccttccacccgtggactagttttctgcaatatctttcttaaatttttgacacaagaccattgtgagtgaaatggtgttgtagcgcagtgtgtcaggtattgatttcatgctggggtgggcctgt

SEQ ID NO: 439230 - DNA, 425 bp, Homo sapiens
gagttgctaaatggggtgggcatggtgattcacacctgtaatcccagcacttttggagcccaaggtgggtggatcacttgaggtcaggagttcaaggccagcctggccaacatggtgaagccccatctctactaaaaaaatgcaaaattagatgggcatggtggcacgctcctgtagtcccagctactcaggaggctgaggcaggagaatcgcttgaaccagggaggtggacgttgcagttagccgagattgcaccattgcattccattctgggcaacaaaacgagactctgtctcaaaaaaaaaaaaaggattgctgcatgggtcagatcatctgcyccattatttcacagagcttggttttgatgaaaagtgtccacatttcagaaagagggcatagtctgtcataagttgattcatgaattc

SEQ ID NO: 439231 - DNA, 595 bp, Homo sapiens
ttaaacacttgaggctgggtgtagtggctcatgcctataatcaaatataagaacttgagtataaaatttgaaaactacagggggaaatgtctttatcatgcatctcttgatagtctactggtctactgaaaactctctattaagtaaaactgtggctaaaaaaaaaaaaaccatggtgatacttaccttgtgtaatgtaaacaattttttaagctctttaaagtacrtctagatttactggtaatgtatagaagtcaattttatctccaagcatttctacttcctaaaccattagcaagagactcaaaacaacttcaccaaactattggacctccagtgttaacttgccaacataaaaatctgaaaaactttgtaatcactatcagaaatacaaaagagagaataaattcccaggtaaaaggatttaccgaaaagaattactttatgacaattaggatgaaggttatgagctagaagttcagcataatatgagagggtagtattaaaatcatattttagaaacttctttaatgggaactccatatcatgagtttcaaattcttattggctgtttactcatgttgcctatcatata

SEQ ID NO: 439232 - DNA, 602 bp, Homo sapiens
gctcactgctaacactgctgggtggtgctttctaaacctccactggtttaagatgttgctccattcatgaattgttctttgctcaaataaactctataatttctctgaagtttttgtttgttcaatttttttttttttttttttttttttttttaccagtcactattaatccatactatgctagcagctctaggtggcagggaccattgaaragaagggctggaggagaaagacttgttaaaggttaccaaaaccaaagaaggaatgcgttaaacataatcatctccactccctccaggcttcttgaaagcatctcttcctcaccctcttgcctacaatctcgggatttcccttgttgccaggctccctctgcctgaacttctctaggagatttcaggcctcctgctcgcaagagtagtatatatgcccaatgcaaacaagtcagtatagtctggctatttattaaaaagttaataaaaccttaaaacatattcaaactagtttctagaccaaaggacctaacagtctccctgggttggaccccgatcagagcaaatgtttcctgtttagttctgagtaccatactttaaggatacagcctg

SEQ ID NO: 439233 - DNA, 602 bp, Homo sapiens
gctcactgctaacactgctgggtggtgctttctaaacctccactggtttaagatgttgctccattcatgaattgttctttgctcaaataaactctataatttctctgaagtttttgtttgttcaatttttttttttttttttttttttttttttaccagtcactattaatccatactatgctagcagctctaggtggcagggaccattgaagaraagggctggaggagaaagacttgttaaaggttaccaaaaccaaagaaggaatgcgttaaacataatcatctccactccctccaggcttcttgaaagcatctcttcctcaccctcttgcctacaatctcgggatttcccttgttgccaggctccctctgcctgaacttctctaggagatttcaggcctcctgctcgcaagagtagtatatatgcccaatgcaaacaagtcagtatagtctggctatttattaaaaagttaataaaaccttaaaacatattcaaactagtttctagaccaaaggacctaacagtctccctgggttggaccccgatcagagcaaatgtttcctgtttagttctgagtaccatactttaaggatacagcctg

SEQ ID NO: 439234 - DNA, 602 bp, Homo sapiens
gctcactgctaacactgctgggtggtgctttctaaacctccactggtttaagatgttgctccattcatgaattgttctttgctcaaataaactctataatttctctgaagtttttgtttgttcaatttttttttttttttttttttttttttttaccagtcactattaatccatactatgctagcagctctaggtggcagggaccattgaagagaagggctggaggaraaagacttgttaaaggttaccaaaaccaaagaaggaatgcgttaaacataatcatctccactccctccaggcttcttgaaagcatctcttcctcaccctcttgcctacaatctcgggatttcccttgttgccaggctccctctgcctgaacttctctaggagatttcaggcctcctgctcgcaagagtagtatatatgcccaatgcaaacaagtcagtatagtctggctatttattaaaaagttaataaaaccttaaaacatattcaaactagtttctagaccaaaggacctaacagtctccctgggttggaccccgatcagagcaaatgtttcctgtttagttctgagtaccatactttaaggatacagcctg

SEQ ID NO: 439235 - DNA, 602 bp, Homo sapiens
gctcactgctaacactgctgggtggtgctttctaaacctccactggtttaagatgttgctccattcatgaattgttctttgctcaaataaactctataatttctctgaagtttttgtttgttcaatttttttttttttttttttttttttttttaccagtcactattaatccatactatgctagcagctctaggtggcagggaccattgaagagaagggctggaggagaaagacttgttaaaggttaccaaaaccaaagaaggaatgcgttaaacataatcatctccactccctccaggcttcttgaaagcatctyttcctcaccctcttgcctacaatctcgggatttcccttgttgccaggctccctctgcctgaacttctctaggagatttcaggcctcctgctcgcaagagtagtatatatgcccaatgcaaacaagtcagtatagtctggctatttattaaaaagttaataaaaccttaaaacatattcaaactagtttctagaccaaaggacctaacagtctccctgggttggaccccgatcagagcaaatgtttcctgtttagttctgagtaccatactttaaggatacagcctg

SEQ ID NO: 439236 - DNA, 420 bp, Homo sapiens
ttgttggcttcatcgtgacttgggaaatattctccctttttctgtcctctgaagtatttggttaagtttggtattatattttccttaaatatgtggaagaaattctatctaggcctagagttttctttatcacattttaaattatggatgaaatttcttaaaaaggtataggattttcatacyttactgttttttattttgttagcttcattgagtcttatttttctaaggattttccctttgcatctgagtttttaagttattggcatacaaataattataaaatctatttttaatgtctgctggctatatgacgatgaccatttttacatttacaagattggttttttgcaacttttctgtttttctaatcagtcctgctaggattttatcagtttcatttgtcttttctaaaaacca

SEQ ID NO: 439237 - DNA, 573 bp, Homo sapiens
ttccctttgcatctgagtttttaagttattggcatacaaataattataaaatctatttttaatgtctgctggctatatgacgatgaccatttttacatttacaagattggttttttgcaacttttctgtttttctaatcagtcctgctaggattttatcagtttcatttgtcttttctaaaaaccaccttttgcttctttcattctattgtgtctatttgtttatttcattaatctttacttttatcttcattatttccttttttcttttttattttgatttaactttttttcccctagctkcttgagatagaccttggagtattgatttccaggcattttttttgcttttctaatatattcaaccaaagctataaattttctctggaagtacagctttagagatattcttcaagttataacgtgtcatattttcattacaattcattctgaaacactttttaacttccattttgattttatatttgaacaatgggttatttagaaatgtatttttcagatcttaaacagcgggggatcattcagttatctttttgttatttgaagtccttgc

SEQ ID NO: 439238 - DNA, 570 bp, Homo sapiens
tatctttttgttatttgaagtccttgctagttactctgtgatcataacatttacatgattttatgttgaaaattttatttaggtttgtttcatggcccagaatatgaaatattttggcaagtattattttttacttggaaagaacatatatgcaaccattgttgggtatagagttctatgtatgtcagttaggtcaaatctgttgcttattttttatgttttttgtgacatttttcctgcgtattctatcagtttcgagaaaggtgtgttatgtattttgatgattattatggaatttctatcttttattgggtctatcaatttttgctttataaattttaagattatataattaagtatatgcacattaattttcttatgtgaattggccttttgttgtcattaaataaccttatttgtaacaatgtttcttgccttaaatcctattttgtctgatattagcctgtctttctttgygtcatatttgtatggaatatattttccatctttctattttaaacattttacatccttatatttactgtgcatttcttgtaatcagcatatagt

SEQ ID NO: 439239 - DNA, 525 bp, Homo sapiens
ggctgaggtggaaggatcgcttgaacctggaaagctaggctgcagtgagccactatcacatcactgcactctagtctgcataacaggaacaagatactgtctgaaaaaaaamaaaaaaacaaaaaaaaaaaccatggatgaattcctgtatgacccctatatgggtaaagcctttttattattatttaaaatcaagatgcaattaagtaaagaaatttataaattttgcataaaataaaatttcttacataaaaacatgatacacaattcaaaatcaaattaaaatttggagaaaatacttgcagatataacaaagatgaatgactaatcttcctaataaagaacttcttaaaaattataggaaatgaaataacaaaagtttgataaaaatggggaaaaacacagttaacagaaaatactgtgcaagtagtctcttttatttattttataatttaaaaaatgattttttgtttataattggcataactacatatttgtggggtacagtgtgctttttcaatgcat

SEQ ID NO: 439240 - DNA, 562 bp, Homo sapiens
gtgtttgagggatgataggacaatgaggtaaatgccaggtccttggagcctaggttcagtggcagtcttatctcccactgcctccttgggatgaattcctggtcatccccaactccaactctacccagcaacagccctctccccaagtctctccttcagggtcctaggtgcactcagctagtaagtattcccatgcttgaggaagtgcaacattaaatagcaaataaaaacaccatgacaggttgagggagatactacagaagaaagaaactttttttccygctttctgaataaggggcctgaatttttgttttgcatcaggcccggtaaattatgtagtaggtcttgtgtgtacacagtaagcatgaacgtccttaagtccctccttccactgggatggctaatgctaaactccttctatatacacattctggaatcaactgtgtacctcataaggacagtaccaaaaagcaggagaaggtgaggggagagaataaaaatacctggcttgttggaggtaggactgtccctctcagctctcatcttggcaagtccaagaccc

SEQ ID NO: 439241 - DNA, 562 bp, Homo sapiens
gtgtttgagggatgataggacaatgaggtaaatgccaggtccttggagcctaggttcagtggcagtcttatctcccactgcctccttgggatgaattcctggtcatccccaactccaactctacccagcaacagccctctccccaagtctctccttcagggtcctaggtgcactcagctagtaagtattcccatgcttgaggaagtgcaacattaaatagcaaataaaaacaccatgacaggttgagggagatactacagaagaaagaaactttttttcccgctttctgaataaggggcctgaatttttgttttgcaycaggcccggtaaattatgtagtaggtcttgtgtgtacacagtaagcatgaacgtccttaagtccctccttccactgggatggctaatgctaaactccttctatatacacattctggaatcaactgtgtacctcataaggacagtaccaaaaagcaggagaaggtgaggggagagaataaaaatacctggcttgttggaggtaggactgtccctctcagctctcatcttggcaagtccaagaccc

SEQ ID NO: 439242 - DNA, 599 bp, Homo sapiens
aatttcaataaattcatgtctcctcatacttatgaaaattggtaatcagtgagttttcttttgtatagttttaaaaactttattcaggttgctccactgcagagttccagagggcaccattcatagtgttgtgaatctatttgaatagagctctgggattaggggtgctcccattttacagccatcaacacctctgccttttcttttctctataaaggcaatttaggccaaagcaacagattcctatttgtttcattttagtacttattaagtatctctgtcagaggctgggctagaagcttgcaaatgaataagacatgacccctaaaagagactcactatccattagaatgaaaactactaaacygatgtggctgtttctttatgtatagacagatgtgactgatgatgtagtgatacagatacaaagataatataaataatacatgcttgtgcttggatagctagaaaccaagactattatgatattttaaatttggggcacccaaacaaaattctcctatataccttaatcattcacaatagtcaaagctgcctttctctatgggctttcaaatactagatgatgctcgaaaacc

SEQ ID NO: 439243 - DNA, 578 bp, Homo sapiens
ttatcaatacatgtaactggtgatttcatttatattagacatgactggttgcaagctgaaaatgacagtaaattcaatctcaaccagtttaaaatcacagaagaaatttattggagtaactggaaaccccaggagttgtttggcttcaggtgcmcaatgttgctaaatattgggtttctctccctggatctgcgttgtattcattctcggcaagatcccctcttgtggctcaaggtaacggcaacaactccaaattcatatcattgtatttcaaaggttctgatcagaagtcccatggcaaatccaaacagccactgttgtaaggggtaggcagtgccctgaccccttacatctatattaccttctccaaccctgaactgggatggattccccagctaatgactaagactgagagaagggtggttctttaaaagtttgggtttcgtttaccagcagtgggtgaaaggaattttgggtagcagaaaaatagataaccaccacaaagaccataaagagaaatttgatcttctttatcctttaacataatcaatacaacttctgttaataaaagctgtcag

SEQ ID NO: 439244 - DNA, 509 bp, Homo sapiens
tttgtatggttaagtgtcattagattatgtctaaagattatgttggttcccaagtgtattttgtgtcagtcttttaaaatatgatatactagatttgagggtacaacaagctaattcaggcttccaggtatttctctacactgttcccatttcataaaatgcagttccttccttgccatctgcaaatgccccagtcaactttcaaaatctatttgagcagcttccatcccaaaatccattttctcgtttcgggtataatcaagtgttctgtactctgcgtaatattagttcataaatacttctgtctctcagtgcttgtctcaagtgtctcgtcttccatagtaggctgaggaatcactgtaacccgacatgttttttactgtagctgattgttgacaagagctcattaaagaacagagtttttcatcctctttgtatttctagcacctagcccaatatcaagcacaayggggactcataataaacacttcattaaagcataaataaca

SEQ ID NO: 439245 - DNA, 602 bp, Homo sapiens
tacattataaatatacccccaaccctgcacagaggcagtccctcacgccactctcttcagcccactccacccacgacgtgcccctctacttcatacttcattcccttcaagggagttcccactgtgagcaataatctctagcatgcgtccttgcctttgcctgtactgcaccacygtacttaatcctgaatagttttttctgccccttcttctggttggtatctccttcagtactcagctcaagggttatcttttcaaggaaaccttgcccatcttcccagcctgtatttggtgtttctatccctgctcaccaatgtgaaaacatgtatcaagttatattgttatttccaatttctttgtctcctcaattccaatattagctccttttgatcaaaggcctgttcttttcgtctttgaatttctaatacctagcagagtttctgacacttagcaatagatgattgtagaatgaataagtatgtgaagagtaaatcagttgggggtgaaatgttaattttatactgctgttttgatgtatgaattgctatacacttaaaaacaaaacagtgctcatttgactgttttacatttgtatgaactat

SEQ ID NO: 439246 - DNA, 561 bp, Homo sapiens
cactgcttttctggatgacattgggagaagaccttaacttctcagggccacaaactctgtgtgtgtttaataatataccttttcatttctgggacactttcccttcaaaatctgcatggagctgaaataacacaagaggcacttttaagaaggtgctgggaaactagatgactagcgctgcacaggtgaggatactgaggcagggtgagttagcttagtagcctagcatggcgtcatcgtctacaccagtcaggctggttctggcttcaaccacattcttgtttagcaggaaactgaaatttataatcctgaggtccattccaggttgtgaatggcaagacttgtttaagagacaatttctctccctgctgctttttttttttttttttttttttttccttaggatggttctaaaraagaagtatacttattcgctggttaggaaactccatatgcactattggtgacaaaagagttactgagatccactttcggtggttgtaaaagtgtttttgttattatattttcttgatagtagtataatattttatttgccataaa

SEQ ID NO: 439247 - DNA, 480 bp, Homo sapiens
gcttcaaccacattcttgtttagcaggaaactgaaatttataatcctgaggtccattccaggttgtgaatggcaagacttgtttaagagacaatttctctccctgctgctttttttttttttttttttttttttccttaggatggttctaaagaaraagtatacttattcgctggttaggaaactccatatgcactattggtgacaaaagagttactgagatccactttcggtggttgtaaaagtgtttttgttattatattttcttgatagtagtataatattttatttgccataaaaatatagcttccagtggccatttcagtcaaaaagaggaataattaattatctcacatggactcctgttctttgactttcaggaagttaattttacttggtgaaagtgagatacgctttgcttgtgcactgaagatagtagatgatggtactttggccattttcagcaaactcctagatacct

SEQ ID NO: 439248 - DNA, 561 bp, Homo sapiens
cactgcttttctggatgacattgggagaagaccttaacttctcagggccacaaactctgtgtgtgtttaataatataccttttcatttctgggacactttcccttcaaaatctgcatggagctgaaataacacaagaggcacttttaagaaggtgctgggaaactagatgactagcgctgcacaggtgaggatactgaggcagggtgagttagcttagtagcctagcatggcgtcatcgtctacaccagtcaggctggttctggcttcaaccacattcttgtttagcaggaaactgaaatttataatcctgaggtccattccaggttgtgaatggcaagacttgtttaagagacaatttctctccctgctgctttttttttttttttttttttttttccttaggatggttctaaagaagaagtatacttattcgctggttaggaaactccatatgcactattggtgacaaaagagttactgaratccactttcggtggttgtaaaagtgtttttgttattatattttcttgatagtagtataatattttatttgccataaa

SEQ ID NO: 439249 - DNA, 580 bp, Homo sapiens
aaatcatacattcctacattcattcgtttattgaacaaataattatgaagtacctaatacgtcagacactctacaaagcattggtgagtcactggtaaatgagagaatcaaagactctgctcttaccataccgtttttcatttgtttgttgtgtgagtgtgtgtgtgtgtgtgtgtgtgtgtgtgtgtgtgtgtgtgtgtgtgtgatgcagccagtagtcttgtatcttgaaagcaatgattttctgtggcaattgcatatgtacctacttacagttttgtagtttctactatggaacatatttagccattctagcttttgctgatgacaaaggaatgagttcttgcttatggtaaaggagtagatccaatcatgtcaagggaaataatagaatgagcaacatgttcatcttatccagaggatagcctgagttacaggggctgtccacagscttgcttcagccatatttcaaaccctgtgtcaaatcaacctatcggtggaattcctttaaacattctatgtgacatgcgtacattcttaatgatgtattccaattctgggacattcaagtaaaatactt

SEQ ID NO: 439250 - DNA, 560 bp, Homo sapiens
aatttgacatttaccataagaattaaacataagcaaaagtgttatttagsacgtctccttccagaagtgtattgtatagacagacttgcacttgtgcccacaggaaggtgtgcaaggatgtttattaaagttgtctgtaatataaagaaatggaaagaacctaaatgttcatcaaaagaggaatgataaattatgatatagttatagaattgaatactggttaacttttttaaaaaatgcgatgatctatctatctatctatctatctatctatctatctatctatctatctatctatctatctatcatctgtctgcctgtctgtcttgaagatatgttcagagagttgcagaagaatatggagaatatgttctcttttgtgttatgaaaactatgttcatatatatgatcatatattcttggaatatgtctgaagaaataacaaaattaggagtggccagcttttggtaatggggaaacagaggaggcttttagattttgtttagtaatcttctgtattgtttgagtttttttattttataaagagtgtatagttttta

SEQ ID NO: 439251 - DNA, 560 bp, Homo sapiens
aatttgacatttaccataagaattaaacataagcaaaagtgttatttaggacgtctccttccagaagtgtattgtatagacagacttgcacttgtgcccacaggaaggtgtgcaaggatgtttattaaagttgtctgtaatataaagaaatggaaagaacctaaatgttcatcaaaagaggaatgataaattatgatatagttatagaattgaatactggttaacttttttaaaaaatgcgatkatctatctatctatctatctatctatctatctatctatctatctatctatctatctatctatcatctgtctgcctgtctgtcttgaagatatgttcagagagttgcagaagaatatggagaatatgttctcttttgtgttatgaaaactatgttcatatatatgatcatatattcttggaatatgtctgaagaaataacaaaattaggagtggccagcttttggtaatggggaaacagaggaggcttttagattttgtttagtaatcttctgtattgtttgagtttttttattttataaagagtgtatagttttta

SEQ ID NO: 439252 - DNA, 577 bp, Homo sapiens
tgttcaaaggctgtcctaattagcctttgagtaaaagaagccaggtctacgtcagtaacrgtatagttcttacctggcctaaacagccaagaaagaaacaaagagggtctacttccaaagtaagcttctttggtttttgttttattactgtttctgttttgttttcttgctactctacatgaaaataaagatatttgtagaattgctacaagcgaatgtctttcctttagataaagggatgggatcatgcttttcagttgtcagaatcagggaagaaaagtgtggaaatgaatagctgtggttatacttagttttatatgcaggattgctctgaactgatttttttcctaatatctcctctctcctttcatgcatcagttacacactggatttttattacattagagtgtgtggcttcccccacagcactttttttaccctaaagagttctctccagttcactgaagagccatctttgaaaagacacttggtttctctgagcatgcacttagctcatcaatgcatgtgcgtgcatgcctgcttgttatagaagactgaccagtcttaggctgggcat

SEQ ID NO: 439253 - DNA, 577 bp, Homo sapiens
tgttcaaaggctgtcctaattagcctttgagtaaaagaagccaggtctacgtcagtaacagtatagttcttacctggcctaaacagccaagaaagaaacaaagagggtctacttccaaagtaagcttctttggtttttgttttattactgtttctgttttgttttcttgctactctacatgaaaataaagatatttgtagaattgctacaagcgaatgtctttcctttagataaagggatgggatcatgcttttcagttgtcagaatcagggaagaaaagtgtggaaatgaatagctgtggttatacttagttttatatgcaggattgctctgaactgatttttttcctaatatctcctctctcctttcatgcatcagttacacactggatttttattacattagagtgtgtggcttcccccacagcactttktttaccctaaagagttctctccagttcactgaagagccatctttgaaaagacacttggtttctctgagcatgcacttagctcatcaatgcatgtgcgtgcatgcctgcttgttatagaagactgaccagtcttaggctgggcat

SEQ ID NO: 439254 - DNA, 622 bp, Homo sapiens
aatgaattgcttctgaattttttataccttgtatagtaacgggcaaatgagtgaggcctgaaagattttaaccgtgctttcttctactactctttggcctacgttctcacaaaggaaacctgcttttgctttttatttcaaatgcccccatagattgaactgtcatagatgtacctgttaaagaattgargaaaatgagaaaatgatcccacctatattgttcatattattagtatgttcagagagcagttttattagctgcaagaatgtgatagaaagtcaagaagggaagattttcccagctgtgtgtatttagatataaaagtagcctaaataaataatctttaatacatattgggaaattagcatgaaattaataagtaaagcttggaaaagaataggttagtatataataataaatattatgcagtgcaactgtacttggctaggactgttgtcagggtgatttgcaggagaagcagccaataattgtaataacacaggaaatgaaaaagcagaagaggaaagacattttcaaaggggctggatggctagaggagaaatgcctccagcattgacacactgaggagaacttccacgaaaaagatctgattcaagagag

SEQ ID NO: 439255 - DNA, 622 bp, Homo sapiens
aatgaattgcttctgaattttttataccttgtatagtaacgggcaaatgagtgaggcctgaaagattttaaccgtgctttcttctactactctttggcctacgttctcacaaaggaaacctgcttttgctttttatttcaaatgcccccatagattgaactgtcatagatgtacctgttaaagaattgaagaaaatgagaaaatgatcccacctatattgttcatattattagtatgttcagagagcagttttattagctgcaagaatgtgatagaaagtcaagaagggaagattttcccagctgtgtgtatttagatataaaagtagcctaaataaataatctttaatacatattgggaaattagcatgaaattaataagtaaagcttggaaaagaataggttagtatataataataaatattatgcagtgcaactgtacttggctaggactgttgtcagggtgatttgcaggagaagcagccaataattgtaataacacaggaaatkaaaaagcagaagaggaaagacattttcaaaggggctggatggctagaggagaaatgcctccagcattgacacactgaggagaacttccacgaaaaagatctgattcaagagag

SEQ ID NO: 439256 - DNA, 624 bp, Homo sapiens
cgctgggcatggtggctcatgcctgtaatcccagcactttgggaggccgaggcaggtggataatctgaggtcaggagtttgagaccatcctggccaatatggtgaaagcccatctctgctaaaaatagaaaaattagctgagagtggtgatgcgtgcctgtaatcccagctactcaggaggctgaggcaggagaatcccttgaaccacggcgttggaggttgcaatgagccaagatgtcatcactgcactccagcctggcaatagagcaagactccatctaaaaataaaataaaatttaatatwgagcatcttgctaacataagtaagccattatactattttatgttttattatgttgaatttgatcaggtaagactcaaaaatgctaaaagtgtcttttaggataaataggctcttttatgtttttgatagatacttatgaagtttagagccattttcttctttgatatttacctgccaagttaagggggaagaaaaggaaattgtcaggttttgcttggccatgtacactcatttgaggtcttaaaggaacttgggttcctttcattggtttgaaacccctggagggccatttttcattctgaagctattgttggggaagt

SEQ ID NO: 439257 - DNA, 574 bp, Homo sapiens
tcttccattttattttacatagtatgcattttaatttggtttctaataaagcaaagcaaagtcaaacacagaccagaatgagagaataaggagacactccctgcctgagaccttggaagtggtgtacaccttgctgttttgccagacaagtggatgactgcttgttgactsttcacttttacaatcgtgagtggtgaggcccctttctttttccctgcccgttttaataatcgactggtgccagcaattcttttaggtccagtgtgactggtccagcccagtctcccatattggaagcagtaatgcatttttagttggcacactgcatttcacatcaaattattctgtttcagttgtgttgcttctttctcccaaactgggctgttaattccttgaaaacaggagaaacctagaatataggaaagagccagggaaaatcaaggttcaatatcttctgaatattccctataaatcaagttcatcattgtaatgcatgaaatttctatttaataaaagtttacactgttctttataatgttaaaaatattttgagttagtagttaatttgtagcat

SEQ ID NO: 439258 - DNA, 497 bp, Homo sapiens
tggttttatgcagttcacagcctgagtaatggtgtatagcagccttgggtacacgttgccttctttgagctccaacacaccctgtgcttttcctcattaccgtattgtttctatttatatttctatcccttaacacattgtaggtattttagagacaggaattgtgacttaatttctgacccacactcagtacatagtaaaagtttgtatcggggaacctgccccgatattcacgtaggttcttttctattttccctaagtgtcggccagcttgagaaataaagggacagagtacaaaagagagaaattttaaagccgggtgttcgggggagacatcacatgtcggtaggttccgtgatgccccacaagccacaaaaaccarcaagtttttattagggattttcaaaaggggagggagtgtgcgaataggtgtgggtgacagacatcaagtactttacagggtaatagaatatcacaaggcaagtggaggcagggtg

SEQ ID NO: 439259 - DNA, 497 bp, Homo sapiens
tggttttatgcagttcacagcctgagtaatggtgtatagcagccttgggtacacgttgccttctttgagctccaacacaccctgtgcttttcctcattaccgtattgtttctatttatatttctatcccttaacacattgtaggtattttagagacaggaattgtgacttaatttctgacccacactcagtacatagtaaaagtttgtatcggggaacctgccccgatattcacgtaggttcttttctattttccctaagtgtcggccagcttgagaaataaagggacagagtacaaaagagagaaattttaaagccgggtgttcgggggagacatcacatgtcggtaggttccgtgatgccccacaagccacaaaaaccagcaagtttttattagggattttcaaaaggggagggagtgtgygaataggtgtgggtgacagacatcaagtactttacagggtaatagaatatcacaaggcaagtggaggcagggtg

SEQ ID NO: 439260 - DNA, 619 bp, Homo sapiens
catcacatgtcggtaggttccgtgatgccccacaagccacaaaaaccagcaagtttttattagggattttcaaaaggggagggagtgtgcgaataggtgtgggtgacagacatcaagtactttacagggtaatagaatatcacaaggcaagtggaggcagggtgagatcacaggaccacaggactggggcaaaattaaaattgctaatgaagtttcaggcaccattgtcattkataacatcttgtcaggagacagggttttgagatcaaccagtctgaccaaaatttattaggcaggaatttcctcttcctaataagcctgggagcgctatgggagactggagtctatttcacctctgcagtctcgaccataagagacaggagcacctggggggggctgtttataagcctatacctccaggcgcatattctctttctcagggatgttccatgttgagaaaaataattcagcgatgtttctcccatttgcttttgaaagaagagaaatatggctctgttctgcccagctcaccagtggtcagagtttaaggttatctctcttattccctgaacaattgctgttatcctgttcttttttcaaggtgcccacatttcatatt

SEQ ID NO: 439261 - DNA, 619 bp, Homo sapiens
catcacatgtcggtaggttccgtgatgccccacaagccacaaaaaccagcaagtttttattagggattttcaaaaggggagggagtgtgcgaataggtgtgggtgacagacatcaagtactttacagggtaatagaatatcacaaggcaagtggaggcagggtgagatcacaggaccacaggactggggcaaaattaaaattgctaatgaagtttcaggcaccattgtcatttataacatcttgtcaggagacagggttttgagatcaaccagtctgaccaaaatttattaggcaggaatttcctcttcctaataagcctgggagcgctatgggagactggagtctatttcacctctgcagtctcgaccataagagacaggagcacctggggggggctgtttataagcctatacctccaggcgcatattctctttctcagggatgttccatgttgagaaaaataattcagcgatgtttctcccatttgcttttgaaagaagagaaatatggctstgttctgcccagctcaccagtggtcagagtttaaggttatctctcttattccctgaacaattgctgttatcctgttcttttttcaaggtgcccacatttcatatt

SEQ ID NO: 439262 - DNA, 619 bp, Homo sapiens
catcacatgtcggtaggttccgtgatgccccacaagccacaaaaaccagcaagtttttattagggattttcaaaaggggagggagtgtgcgaataggtgtgggtgacagacatcaagtactttacagggtaatagaatatcacaaggcaagtggaggcagggtgagatcacaggaccacaggactggggcaaaattaaaattgctaatgaagtttcaggcaccattgtcatttataacatcttgtcaggagacagggttttgagatcaaccagtctgaccaaaatttattaggcaggaatttcctcttcctaataagcctgggagcgctatgggagactggagtctatttcacctctgcagtctcgaccataagagacaggagcacctggggggggctgtttataagcctatacctccaggcgcatattctctttctcagggatgttccatgttgagaaaaataattcagcgatgtttctcccatttgcttttgaaagaagagaaatatggctctgttctgcccrgctcaccagtggtcagagtttaaggttatctctcttattccctgaacaattgctgttatcctgttcttttttcaaggtgcccacatttcatatt

SEQ ID NO: 439263 - DNA, 301 bp, Homo sapiens
ataaataatggaaaatgaaatgtctcatgggagaaagaagtgtgtttttttgcagaagggtgtgatatgttgttgtttgattggttgtgtgaatgaggcaggcattattctggtaagttcacgcttgtgtccttcatrtcttctagtgtacaattttgggataccagagtaaaataatagtacattttaaataaaagataacagtgtcttcatttcatacctagtggtcttgaggaaaatcacataaggcaaataagataaatgaagaaatcatctaggtagttctggctaaaatgaatac

SEQ ID NO: 439264 - DNA, 560 bp, Homo sapiens
agaagtaaactgatgtgtagtggggttgtagggaggtgagtccatagggaggtgagtcctatagggtctgatagaaggtttaaggactttcttgcttcctctgccaacartttctccaaacactcaatagttccctagttttggaatgtcatagaaaatatggagtaaatgttttccttagaagggctgtggtgattcatctactcacatctcagcagacagagtcaacataatctccacatgatttaaaattttttattcaacctcataaatctctgaaatatagatgatcttagcagacttcaaatagtaaggaagcaatatttcaagtcgttaagtgttctctgtattgacatatacccacgttgcattagatacaacaggtataagctatttttcactgaaaaagggctcgtacccttttactccaaggctagtcaaaggaaggcagttatataataactttcttaagaacaaaagatggggagataaaatgatatattcgtaggctttatgttcgttaggatttttttaaacatatgtgtgttttctttggccaa

SEQ ID NO: 439265 - DNA, 584 bp, Homo sapiens
tgctttatggaaattatactggaacattgatatcccaagacacaattcctgtggaagtcccattgtgacaagggttatgacttaaatcacttcaagttatttggtcttggaggatagttgtcaggaggatgcccactgccacatcaagctatcttcattttcctttgcaaaccaatttggaatgcattcttagtgacattgaatattcttccattagactttgcaaattttcaagagggtaatatttttcctgttatgtattaaaaataagtctacatatctcttaagaaycttaaagaatgtttatagcaagctttcctaagtatggtggtgaataaggaaatataagtagattttgtcttattaataacttgaaaaacaataaaataattatatgggattgtattggtagcaacctaatcacaatcagtcgttctcatttaaagcattaaaagttaatcctgagagcaagaaattagatttgtttgtttataaaaagtagatgaaaagaccaggctgttcacttaataattaataaccatagctggaatttgctgatcagttattatttaccaggtacggtg

SEQ ID NO: 439266 - DNA, 584 bp, Homo sapiens
tgctttatggaaattatactggaacattgatatcccaagacacaattcctgtggaagtcccattgtgacaagggttatgacttaaatcacttcaagttatttggtcttggaggatagttgtcaggaggatgcccactgccacatcaagctatcttcattttcctttgcaaaccaatttggaatgcattcttagtgacattgaatattcttccattagactttgcaaattttcaagagggtaatatttttcctgttatgtattaaaaataagtctacatatctcttaagaaccttaaagaatgtttatagcaagytttcctaagtatggtggtgaataaggaaatataagtagattttgtcttattaataacttgaaaaacaataaaataattatatgggattgtattggtagcaacctaatcacaatcagtcgttctcatttaaagcattaaaagttaatcctgagagcaagaaattagatttgtttgtttataaaaagtagatgaaaagaccaggctgttcacttaataattaataaccatagctggaatttgctgatcagttattatttaccaggtacggtg

SEQ ID NO: 439267 - DNA, 454 bp, Homo sapiens
tttgcaagttaatgtgaatgatagcaatcttttatgtattttcattttctgttttgaggttatttcycccttctcattgtgtatatgtgcatgtgtgtatatggacctcccattctttattagttgtgtttgttatttatcctatttttaaaaataacaatctcttgtatttttaaattctacaacatttctgccctctaattttttttaactttttcagttatttcttattttatattgcttagtttcattttgttcttctttcttgtgtaaatttgtatacttattcagtattttgttttgtttttatttatatgtttatatatatttgagacaggatcttactctgttacccaggctgaagtggagcctggatgacagaatgagatctcagctcactacagttttgacctcccaggcacaagccatcctcccacctcagcctcccaagtag

SEQ ID NO: 439268 - DNA, 560 bp, Homo sapiens
tggagaagaaggatgtatgttaggacaaaaaaccagtctccactactgttattaaggtgctccctggggcataattgagctctaagaggaggctgctatgtctccaaagactgatgtgacagaaaagaaatgtattcttttaggacaattgtagcagaaaaattctagtgttaggaaacagaatctcaagttaatggctcatagattggaacaagttgcttcttgaggtttcaaaatttcgtctttgacatgtggtggattgtttactatgcagggtagagggggagcttctggaatgtatagtatragcctggcaagctaggggctttggctgaaactgcaaacggcaccacggtgattcgaaagctccatcattcttacctatggcttgcaaaagctgactttatatcactgtgtcattgtgtacccacattaaaaacgaaggaacgtctaaggagtatctacaagataaaacatagtttgggaaaattttctcccattcttccaaatacacaaagataatatgtgtttgttattcattttgtctgtaaatggaaaat

SEQ ID NO: 439269 - DNA, 430 bp, Homo sapiens
ggaaccagagatagatcaggttgtccatgagcaaaaagtaggattaaaaaggcttggaaaggttttttgagtatgccaatattgggtaaattacggtgatcagatgggccctttaaaagtaacttgcttggatagagcatactacttctaggggcacaaggtcaaaccagagtaataagtttcaaaatcatgtaccttatgaaatttggaactctcayttattttttcttatccatagttttggccacaatgtaaggaatattatggtttaaggaagtcgttgtgttaagacatagagaaaaactagatttgagaactaaccaattcaaaaagaaatgatgttgcttggaatatatctttttaaaaggcagctcaattaactaaatttatagtgaatgggaagacatatatgtggccaacaatcatatgg

SEQ ID NO: 439270 - DNA, 638 bp, Homo sapiens
ttaagaaggaaagagaaaagaatgaaagggatgagtggtggaaccagagatagatcaggttgtccatgagcaaaaagtaggattaaaaaggcttggaaaggttttttgagtatgccaatattgggtaaattacggtgatcagatgggccctttaaaagtaacttgcttggatagagcatactacttctaggggcacaaggtcaaaccagagtaataagtttcaaaatcatgtaccttatgaaatttggaactctcacttattttttcttatccatagttttggccacaatgtaaggaatattatggtttaaggaagtcrttgtgttaagacatagagaaaaactagatttgagaactaaccaattcaaaaagaaatgatgttgcttggaatatatctttttaaaaggcagctcaattaactaaatttatagtgaatgggaagacatatatgtggccaacaatcatatggaaagctcaacatcactgatcattagagaactgcaaatcaaaagcacaatgagataccatcagagataccagtcagaatggctcttattaaaaagtcaaaaaataacagatgctggtgaggttagggagaaaaaagaatgcttatacactgttggtgagagtgtaaatta

SEQ ID NO: 439271 - DNA, 638 bp, Homo sapiens
ttaagaaggaaagagaaaagaatgaaagggatgagtggtggaaccagagatagatcaggttgtccatgagcaaaaagtaggattaaaaaggcttggaaaggttttttgagtatgccaatattgggtaaattacggtgatcagatgggccctttaaaagtaacttgcttggatagagcatactacttctaggggcacaaggtcaaaccagagtaataagtttcaaaatcatgtaccttatgaaatttggaactctcacttattttttcttatccatagttttggccacaatgtaaggaatattatggtttaaggaagtcgttgtgttaagacatagagaaaaactagatttgagaactaaccaatwcaaaaagaaatgatgttgcttggaatatatctttttaaaaggcagctcaattaactaaatttatagtgaatgggaagacatatatgtggccaacaatcatatggaaagctcaacatcactgatcattagagaactgcaaatcaaaagcacaatgagataccatcagagataccagtcagaatggctcttattaaaaagtcaaaaaataacagatgctggtgaggttagggagaaaaaagaatgcttatacactgttggtgagagtgtaaatta

SEQ ID NO: 439272 - DNA, 569 bp, Homo sapiens
aagaaattccatttcataggaaatcaaaaggtcattgccaaagtaattgagattttgcaagacaacaaccagcagaacgacagacatgagtgaaagtggtatgagaaaaaatatagtcaacttataaaatgtaataaaaatttattttaagtggtagtgataatattaatcccgtcattcaagcctcagagatctgcttcaaacactgacatgtattgttgcagattctgacaacctgacgttgtacagrtaatcacattagctcaaaatatttcaggtgtgtgtttgaaaagcccctttaacttaataaataatacatagacaaaggaatattttggaactaaaagatgtagctaagaaaagtctatattactttgaaataatcagtaaaagaatgaaatcaaagctaatagattatagggcgagttacatccatggcttgttacaatcattttgaactgtaggggtggtttttgaacactaaaatccagcttacatgtgaattttatttttttttatttttctgaaaagctcaaaatgtgtgtaaatcacgtaggaatattagcacc

SEQ ID NO: 439273 - DNA, 569 bp, Homo sapiens
aagaaattccatttcataggaaatcaaaaggtcattgccaaagtaattgagattttgcaagacaacaaccagcagaacgacagacatgagtgaaagtggtatgagaaaaaatatagtcaacttataaaatgtaataaaaatttattttaagtggtagtgataatattaatcccgtcattcaagcctcagagatctgcttcaaacactgacatgtattgttgcagattctgacaacctgacgttgtacagataatcacattagctcaaaatatttcaggtgtgtgtttgaaaagcccctttaacttaataaataatacatagacaaaggaatattttggaactaaaagatgtagctaagaaaagtctatattactttgaaataatcagtaaaagaatgaaatcaaagctaatagattatagggcgagttacatccatggcttgttacaatcattttgaactgtaggggtggtttttgaacactaaaatccagcttacatgtgaatttyatttttttttatttttctgaaaagctcaaaatgtgtgtaaatcacgtaggaatattagcacc

SEQ ID NO: 439274 - DNA, 586 bp, Homo sapiens
acatcctgtttaatgttcttgatttgaattcttgtaagcataaaaatataaaaatgtgatatgcataatcttttttatagttcaacatgaatgaacacataacaagctgaataycaagtgtcttatctgactacttttgaaaatagaaactaattacatttgaatataatagagtccggctcaggaatgctcctttaaaacccccgggtctccccaggcagagccagtttccttattcctctctgctaacatcgtaccttgcttatgtttatattattgtgcttttcactatactgcatttataaagtatattactatatggtatttgcctgaataagtacatgtatgacttaacagtgaagtattagccttgtttatctttacccttgctacttatctcagtacctgacatatagcaaaagctcaataaatgtttgaatgcatgaatgaatgaatgaatgaataaatgaagaaacatgttgatttagggcattcattgaggaaagttatatgcctatttgccttaaagatactgtaacgtaaaaatattttcaaacattattctaggataggataaatgaccaaa

SEQ ID NO: 439275 - DNA, 597 bp, Homo sapiens
agccttattctggatgattaactagaagcacaccattctgaatcatttttatacctcatgccccagccctgcatcttagtctccaaaggaatgcaaggatcctaggctaatattatgtaaggccatttcccatgatgtatgtaattaggagttccctgtagtgtttagtagtaatatatgtatatataaaatgtaaaagcgctactttttttctttgcaactaatgttaagaggaaagctcaatcgatgtgactggcttcacagttttgtggagggagagggtgctattttggattctttcattccatggcaccttagggagtaaagatcatacagagaagatgaaattttgtaaattgttaggctttgatattggaaacatagacaggaactgatacgagttccaacaacatgtagtagaatccrtgaacattctggtgttgtaagtccatgagaacactaaggtcaatacttaatcatacagtgtgctgatgtttctgacatagcagttctaaaaggtgtataggaataattcttaagtttgtactcgtgaatggatttgaagtatctgtataattttagattcatgaggacccc

SEQ ID NO: 439276 - DNA, 562 bp, Homo sapiens
tttcctcagcttggtctattctgctgttaatacttgaaattgcattgtgaaattatcttagggtgtttttcagctctgtcagatccattaggttctttttttytctctctctattttgtccttcagctcttgtatcattttattgtgattcttagtttccttggattgggttttgccattctcctgaatcttgatgattttcatttctatccatattctgaattctgtgtcatttcagccaactcagttgggtaagaaaccttgttggagaactagtttgatcgtttggaagacataagtctctctggccatttgagttgctggagttattgcattggttctttctcatttctctgtgtgggtgctcctttaactgcagtgtagattgagtacaatcaaaagacttcttctttgcacgttttcacagagtcaaggctttgtacagggtcgttatttgtggctcacttcttgtctttggtttcacaggagaatatatttttgttgttgaagctttggggtgtgatgtggtaggtagcactaggtatagtgttcagtaagtagg

SEQ ID NO: 439277 - DNA, 562 bp, Homo sapiens
tttcctcagcttggtctattctgctgttaatacttgaaattgcattgtgaaattatcttagggtgtttttcagctctgtcagatccattaggttctttttttctctctctctattttgtccttcagctcttgtatcattttattgtgattcttagtttccttggattgggttttgccattctcctgaatcttgatgattttcatttctatccatattctgaattctgtgtcatttcagccaactcagttgggtaagaaamcttgttggagaactagtttgatcgtttggaagacataagtctctctggccatttgagttgctggagttattgcattggttctttctcatttctctgtgtgggtgctcctttaactgcagtgtagattgagtacaatcaaaagacttcttctttgcacgttttcacagagtcaaggctttgtacagggtcgttatttgtggctcacttcttgtctttggtttcacaggagaatatatttttgttgttgaagctttggggtgtgatgtggtaggtagcactaggtatagtgttcagtaagtagg

SEQ ID NO: 439278 - DNA, 592 bp, Homo sapiens
tcttctgggaaactaaccaatgtcaccccagaccagccagtaggtgcctccataaaattgagattgttagctctcatgtagaccagaacttcccaaaagccaatgtgtgtaccagttccagtttgtgayggtgtttccacaggaattaggacaatgcagtgagttttttatgaattaaatttactctaaatctattttgtcctttctacatctttggagttcaaatgtcatttttaattgaaatgatagagattttcacttgtacaggttttttgtctgttacgagggttcacaaaataaatgccagtcacctatatgactcccaaattacatgattaaactcttctacacaactctaaactctgaggacaatatatctgccccctctactgggcctttattatctctacttgctgcttattgttctcaactttgcttcctgtcctgaaaggtaaaggcaaagcaccaagccagtgagttgttagtgatgataatgctaatcgcgggtttatcaaatgcttaatgaaggcctagggggaaagcacacacgtcatgcatgtttgtgaacggaattagggccagccacagtatt

SEQ ID NO: 439279 - DNA, 605 bp, Homo sapiens
aatcgtttacagtttacaaaatccttttcatcctgtttcattagtccttgtccaagccctatgaggcaggaggttccaaagatgccttatcctgatgtcccacattgccttctctctggtcatgactgcccaggggcagcaggggctgaggctgggcccccaaagagggaactcrggttctttgactcctagtcctctcctctctcgacctgagcaatctcaacagagacgtgcatgtgataatcactcccagttgacagatcaggaaaccgaggctccaaaagaagtgacttgcccaaggtcacagagctggtgagaggtggtgtggtcctcacacctggccgtatcactgccctgcttaacacctgcagtggctgccctggcccactggctagaagtcatgccactgagcttggctcttgaggcttgcagtgatctggccctcacctccctccccagattaatctctcagtgccctttctacacctctacctttccaactgtgtcatcattccccaaatgtgcaatgacttcttaaccccttgtctttgcacctgatgttccctctgccaggctgcctgtggtctcctgcccatccttgatta

SEQ ID NO: 439280 - DNA, 605 bp, Homo sapiens
aatcgtttacagtttacaaaatccttttcatcctgtttcattagtccttgtccaagccctatgaggcaggaggttccaaagatgccttatcctgatgtcccacattgccttctctctggtcatgactgcccaggggcagcaggggctgaggctgggcccccaaagagggaactcaggttctttgactcctagtcctctcctctctcgacctgagcaatctcaacagagacgtgcatgtgataatcactcccagttgacagatcaggaaaccgaggctccaaaagaagtgacttgcccaaggtcacagagctggtgagaggtggtgtggtcctcacacctggccgtatcactgccctgcttaacacctgcagtggctgccctggcccactggctagaagtcatgccactgagcttggctcttgaggcttgcagtgatctggccctcacctccctccccagattaatctctcagtgccctttctacacctctacctttccaactgtgtcatcattccccaaatgtgcaatgacytcttaaccccttgtctttgcacctgatgttccctctgccaggctgcctgtggtctcctgcccatccttgatta

SEQ ID NO: 439281 - DNA, 626 bp, Homo sapiens
ctccccgcaacacacaccctctcctgatcatctcagctacacgctgatgactgtcagagcctagcttctgccccgactttcccccaagctccacatccacacctctaactacytgggggacaattccacctgcatggtccacaggcaactcagacttgcaaggtccaaaccaaacgagttctgctccttaaatttccccccttcccctataccaagggcggagccaccattcacacaactcacaagccataaacttgggagacatttttcactcctccctccagccccacattccaaccatctgctttctcttttaaatttcattttatttttagagacactgtcttgctctgtcacccaggctggtgtgcagtggcatgatcatggctcattgcagccttgaactcttggcctcaagctatcctcctgcctcagcctcctgagttgctaagaatacaggctcaagatattgcacccagcccaccttccttctaaatcagtggcattgtccttgccacggccactgacctaggctcacgtcactgagacactctccagcccatcttccacatccagtcttgtgccctccaagccattgtatggacatagctagagaggtcaaaagt

SEQ ID NO: 439282 - DNA, 614 bp, Homo sapiens
ttccatgtatttgtgtggttttgagagttcctcttggcattaatttctaattttatttcactgcagtcragagaagatgtttgagatgatttcaatcttattgaatttattgggatttgctttatgaccaaacgtggtcaatcttagagaatgttctatgtgcagatgagaagaatttatcttctttgattgttgggtggataattctatagatgtctgtttattaggtctatttggtaaagtgctgaattcaagtccagagtttgttagttttctgccttgatgatctgtctaatggtgttggtggaatgttaaagtcctccactattatatggctatctcttttcttaggtctagtcttatttgttttataaatcttggtgctctgatgttgggtgcacacatatttagaatagttaaatctccttggaccaggcacagtgactcacgtctgtaatcccagcactttgcggggctaatgctggagggtagcttaagcccaggagcttgagaccagcctagacaacatagtgagatctcatctctacaaataatttaaaaaaattttctgggcatgctgtcctgtgcctgtggtctcagctactaggaggctt

SEQ ID NO: 439283 - DNA, 584 bp, Homo sapiens
ttgatctttcattcagtgaataattttacggaaggatggtcatattactctacacaaaagtcatgcaactgaaatttctctctacttttatgaggaaaaaaatggcaagatagcaaccagatggtaagaaaaacaggtttaacaaacctcagattagcacttaaataactcagaatatagattcaactgctttgacagacctaaaataacatgctttcgattacatagatcaggagtcagcaaaccatggttttgggaacaaatctggcccaccacctgtttttgtaaataaatttttattggaatatagccacacccrttcttttatgaatcgtctgtagctgttgtagaggtggtagctgtgatagagattgtgtgggctgcaaagcctaaaatatttaccatctgatcttttacagaaaatagttgccaacccctggtatagccatttctcttttgtgtaaacctaggagcagttataggggctcttctttgtgaagtcctcagggccccaggatctttctatctcttaaccttctgtaagatgttgcttttgtcttcatagtccaggctcaccatgaggt

SEQ ID NO: 439284 - DNA, 552 bp, Homo sapiens
tcaattaggatagaagcagggcctctgtggaaagcaaagtctaagtgaaatttgaggcatactgtcaaaggacaggttctcaagagagatgacttgaccaacacaggagagatccatgaaggcacctaaggtctcgygatgctagagggcagtgctagtgtcagctgaggaggctttaagctcaaaggctaactaagcacggccttgttacagcctgagccagcaatcttgaagaagtgactgatagagtgtatactgccacaggctgagcattcaatgtctgccaagctcttgagtttatatgtattttggagtcagtaattcatggatgagttaaggtcagtaactaatggatgaggtctgataatgtgtgacataacattgtcaaggggaaggagattacacttcaaattcttatcatagcaaaacttgtcactcatgtagcaaactatgtaagtgtttggaacaatttcaaagcttatctagttgtatttttctttataactcttattaccacctgatctgttatatacacagtatatatttgttatt

SEQ ID NO: 439285 - DNA, 552 bp, Homo sapiens
tcaattaggatagaagcagggcctctgtggaaagcaaagtctaagtgaaatttgaggcatactgtcaaaggacaggttctcaagagagatgacttgaccaacacaggagagatccatgaaggcacctaaggtctcgcgatgctagagggcagtgctagtgtcagctgaggaggctttargctcaaaggctaactaagcacggccttgttacagcctgagccagcaatcttgaagaagtgactgatagagtgtatactgccacaggctgagcattcaatgtctgccaagctcttgagtttatatgtattttggagtcagtaattcatggatgagttaaggtcagtaactaatggatgaggtctgataatgtgtgacataacattgtcaaggggaaggagattacacttcaaattcttatcatagcaaaacttgtcactcatgtagcaaactatgtaagtgtttggaacaatttcaaagcttatctagttgtatttttctttataactcttattaccacctgatctgttatatacacagtatatatttgttatt

SEQ ID NO: 439286 - DNA, 579 bp, Homo sapiens
gtgatcatggctcactgcagcctcaacctcctgagctcagggaatcctcttgcctcggcctccagagtagcagggccacagttgtgtactaccacactcagctcatttttaaaatttttgtagagattgggtctctccacgttgcctagcctggtctccaactactgggctcaagcaatcttcccaccttggcctcccaaagtgcttagwttacaggcatgagccactgcaaccagccctagaagcttcttgatacttcttgataatgtaatatttttaaaagtcatatttatttaaatgtatcattctaaatctatcatttactatgtgggtagtataggcacatgattaaaaaatcgaaagtataaatggcatagcaatcatgggtctcctttctacctgtgtagaagtcacccactctcccttcttccgggaaatcacttctgttagttttttttacccattctttcagagatatttcatgcacacacaagtaaacaggctatattacagttaaatacatcctcttgcccacctgtctagactctgggtccttgtgcttctgaggactctgaaatg

SEQ ID NO: 439287 - DNA, 618 bp, Homo sapiens
gtagaaaattataaaaatgtaattaggactgtctggagctgacaagtacaacaactaaaattttttaaaatcagtgaaaatcagtgacagattggagctcaaagagaacaaagaatcagcaaaattgaagacactgatggggattactcattctgtggagcagagaaaaagaatggtgaaaaatagacagtgcctaagagatccaaragacaacatcaaacatacccacaagttaataacaagagttactaacgaagaggagaaaagggaaccaaaaaatatctgaagaaacaatgtctgaagaccttccaaattgatgaaagacatgaatctctatgtccaagactctaaagaaactataattatgataacatcaaagaacttcaaactgagagaaataataaattgtcagaagacaaagagtcttgaaagtagcaagagacaagggactaaccatgtacaaaggatctgaaataagattaacagccagtctttcattagaaaccatgaagccagaggcagtaagataatggcacctttaaagtaccaaaagaaaaaaaaataacaaaaattctacattaggcaaaactacctttcaaaaaggaaggggaaattaaa

SEQ ID NO: 439288 - DNA, 618 bp, Homo sapiens
gtagaaaattataaaaatgtaattaggactgtctggagctgacaagtacaacaactaaaattttttaaaatcagtgaaaatcagtgacagattggagctcaaagagaacaaagaatcagcaaaattgaagacactgatggggattactcattctgtggagcagagaaaaagaatggtgaaaaatagacagtgcctaagagatccaagagacaacatcaaacatacccacaagttaataacaagagttactaacgaagaggagaaaagggaaccaaaaaatatctgaagaaacaatgtctgaagaccttccaaattgatgaaagacatgaatctctatgtccaagactctaaagaaactataattatgataacatcaaagaacttcaaactgagagaaataataaattgtcaraagacaaagagtcttgaaagtagcaagagacaagggactaaccatgtacaaaggatctgaaataagattaacagccagtctttcattagaaaccatgaagccagaggcagtaagataatggcacctttaaagtaccaaaagaaaaaaaaataacaaaaattctacattaggcaaaactacctttcaaaaaggaaggggaaattaaa

SEQ ID NO: 439289 - DNA, 598 bp, Homo sapiens
gcccacctaataccacctcaactaaggatattttatatctcccataatgtacattgtcagatttttatctctaaatttgattggaaaagaaataaaccaggaaagcaaaatttctgtataagaaagaagcatggtcttacattgacaagatcttctttacttggagatgacttgtccacaagtttctccaaaagctgggaggacacagagtgactgtcagtgcctggaggttgatgattatggatcactcagggagctgtgcttaatgtggtgcatggaggtggtgggttcacatgcatggactgagttgatgcagggccatcctgctgaatggaggaaggatggcaaagaggaggagcaggaaaaaaatgagaaaccaccgggagccaggaaggacaggtttcccctagaagcatcagagrgaacctggtcttgcctatgaattttgcactactagctccgagaactgagacatttctgttgttttaacccacccagtttgtggtccatgtgatttcaggcctaggacgctgatacaccaagacaaatcaatatacctatattttgaatttgcatgcatttatttcatgtatacccc

SEQ ID NO: 439290 - DNA, 598 bp, Homo sapiens
gcccacctaataccacctcaactaaggatattttatatctcccataatgtacattgtcagatttttatctctaaatttgattggaaaagaaataaaccaggaaagcaaaatttctgtataagaaagaagcatggtcttacattgacaagatcttctttacttggagatgacttgtccacaagtttctccaaaagctgggaggacacagagtgactgtcagtgcctggaggttgatgattatggatcactcagggagctgtgcttaatgtggtgcatggaggtggtgggttcacatgcatggactgagttgatgcagggccatcctgctgaatggaggaaggatggcaaagaggaggagcaggaaaaaaatgagaaaccaccgggagccaggaaggacaggtttcccctagaagcatcagaggraacctggtcttgcctatgaattttgcactactagctccgagaactgagacatttctgttgttttaacccacccagtttgtggtccatgtgatttcaggcctaggacgctgatacaccaagacaaatcaatatacctatattttgaatttgcatgcatttatttcatgtatacccc

SEQ ID NO: 439291 - DNA, 536 bp, Homo sapiens
tcatttctataacagcagcacctaacacagtgcctggtcaataggtactcaacgtgtattatctcaatgcacagagtcaaatgttgccaggagggcaggaaagctacaaatcagctatgataacttagtgattgggcttgtgtgtgtgtgtgagtgagctggatgtcaggaagtgggtaaagtattgaactggaggtgagaaaacaatgacacaaactgagggcttctcttcccaagtatttggctgagaagagagatgtagtagtagtcaaagggagacatatggtaaagaaagccttttattccaagattcaacaaaaagggtgagtatacttctatattaaagggaaagagccaatasagaaaatacatttttgagtttagaagggaaggaagaacgaatgcacaagggcccccaaaaggcacaagtgcatgcaatccggattggggcagattagctttggacttctacaaaagcaagaagggatttatttaaaatcatgctttgaataaaaactgactttagatatacctat

SEQ ID NO: 439292 - DNA, 550 bp, Homo sapiens
aaagggaagataatagctataattttcaaataatgtggatccttgtaaaaaccataaaatatacaggaaatagaacgccaaaaagtaacaagatcttcagtatgttagttaattttgaagctttccatttttctaatcactgcttaatatgacctagtcacagatgttggcattggtgtttgactgaaaacccacttagtaacttcgtagccttacctccagcttccatgctctttctctgtcaagaagataaactagcgaatacaggctgttgtcatgtgccatggttcgaagattgaagtagaatctgctataaacactgccagtaacgctgatattgtaattaattagcttcaagaattccctttccaactcattcctggggaaggagaaacacaacaaaaccaacacaggacaatgttagttcaaaaacaytattctcatgtaaaaaatgtggcaaaggcatcatgtgctctactttattagaacacatgaaagaactcacactgtacagaaccctatcgatctaagaaatacaagaaagcatgca

SEQ ID NO: 439293 - DNA, 550 bp, Homo sapiens
aaagggaagataatagctataattttcaaataatgtggatccttgtaaaaaccataaaatatacaggaaatagaacgccaaaaagtaacaagatcttcagtatgttagttaattttgaagctttccatttttctaatcactgcttaatatgacctagtcacagatgttggcattggtgtttgactgaaaacccacttagtaacttcgtagccttacctccagcttccatgctctttctctgtcaagaagataaactagcgaatacaggctgttgtcatgtgccatggttcgaagattgaagtagaatctgctataaacactgccagtaacgctgatattgtaattaattagcttcaagaattccctttccaactcattcctggggaaggagaaacacaacaaaaccaacacaggacaatgttagttcaaaaacattattctcatgtaaraaatgtggcaaaggcatcatgtgctctactttattagaacacatgaaagaactcacactgtacagaaccctatcgatctaagaaatacaagaaagcatgca

SEQ ID NO: 439294 - DNA, 472 bp, Homo sapiens
atcgatctaagaaatacaagaaagcatgcaactttcccagttctctttgaaaacttagaaaaacaaaaacaamatgaatgtaaaaactgtgttaataaacttgattttcccacgtgctttcaaagacatattcgaatttaatatggagaaaattgacataatcttaagaaacacagtaaagccttcagctttttcatttctttgaaaatatgaaaggattcaatggagaaaacccttataaatacaaacatccgtggtaaggtcttcagttgttccagttccacatgaagataagaactcatttctgaaataaaacctatgaatgtatagaatgtggaaatgccttcatttacatgatatttgctccaagatccatgataacacactgtagaaagaccttctaaatataagaaagcatactggattggaaccccagtagattaccaaatacagaaaagttttcagttttaac

SEQ ID NO: 439295 - DNA, 576 bp, Homo sapiens
ttcttaaaaagtgaggtctctgcccaccacctagagaacctggaaatttccatcaatgccacaaagtccaaatcactggatactgctccaatgtatggcagattagaccatctctccattagatctgggtttctattccattgaatgaaatggcttttctattactgtgtcaggataagggagaaaaagggttttacaactgaactccagtgtacagtctgcacagacacaaggcttgtgcaaatatgacacagtaaggccccaggacccttgagccagctgaatgcactgagtttcaggaaacagatacattcagcaaaacagtgggcttcatgctgaaagaaatcaagccaagaacacacacatcactctgacacacacacacacacacacacacacacacacacagacacatattcagacaccttagtggccaataggtcctctcaccaggaacccgcagacaggagagcagaaagcctcccaggggtccattactgcactttmtgggaagctttatcagatggccagccctaggacagcattgtcttatcctcatccagcacaaactgccat

SEQ ID NO: 439296 - DNA, 550 bp, Homo sapiens
cccttgatctgttacttagttatccagtcacaccacccacacaggaaatgcagaatagatgaattattcctttatcagctttccaaataataaattggatcactggaagcctttttcttgcttgtaagcttatttattatagttacaaatccatgcacttattgctgttactatactaattgatgttccaatgacagtaggagcatcatgtcttctcctaggccctgtgatataccctagtaatgtttcatagcatccttattttatgatatgtcaggatgatccagaatcatctcatacattttctgtccaracctaaattcaggcatttctccaaggaactctgatctctttttataaaaaattgttatttccagaatatagcctggatatgagaaatgctgccttactaaggtggtccttgattcatggctttttctgtgaatacacacaggagttctccttccttctaggttctctttttttttgagagttaaagcatatcatgaatccatgatgacttgtcctatccaaattgaggactataaag

SEQ ID NO: 439297 - DNA, 438 bp, Homo sapiens
ttcaatgaaagaaaagtatctcacaagctattttgtttctttctttttgtttgagacagaatctcactctgttgcccaggctggagtgcaatggtatgatcttggctcactgtaatctytgcttcccaggttcaagtgattctcctgcctcagcctcctgagtagatgggattacaggtgcccaccaccacgcctggctaatttttgtacttttagcagagatgggctttcaccatagttgaccaggctggtctcgagcccctgacttcaggtgatctgcccgcctcagcctcccaaattgctgggattagaggcataagccaccactcgcccagctcacagtctttagtctcctcttgagaaaaacagttttatagatatagtctcactcagctggtcctttctgttttcttgaggaacatttctggtattagtttt

SEQ ID NO: 439298 - DNA, 438 bp, Homo sapiens
ttcaatgaaagaaaagtatctcacaagctattttgtttctttctttttgtttgagacagaatctcactctgttgcccaggctggagtgcaatggtatgatcttggctcactgtaatctctgcttcccaggttcaagtgattctcctgcctcagcctcctgagtagatgggattacaggtgcccaccaccacgcctggctaatttttgtacttttagyagagatgggctttcaccatagttgaccaggctggtctcgagcccctgacttcaggtgatctgcccgcctcagcctcccaaattgctgggattagaggcataagccaccactcgcccagctcacagtctttagtctcctcttgagaaaaacagttttatagatatagtctcactcagctggtcctttctgttttcttgaggaacatttctggtattagtttt

SEQ ID NO: 439299 - DNA, 473 bp, Homo sapiens
aacacctgcagggacagaatgttaagttagatattcaaaatgaaccagaggatgtgtctttaggaggacctttatggatatttagtctgactccctgattctttagttgggttaagtaggcccaaagagaagagtaataaggcasttggtaagtagctgggctgtggtgtaactgaactttgcaaatttaatgacaagactctaaaattctagggctcatcattttccattctgggaaatttgaatttcagactcaatgctgtttgttctcaggggattggctttaagacaacgggttcctggtgagcatgtgctgctaataaattaagaactgacagtccttgtttactttgcttacattctcacaccccatttgtcattttagacctcactaagtattctaaccttagtccaatataagttttaaacatatatgtatgcatatacatatgtaaagcttgtttcataagttt

SEQ ID NO: 439300 - DNA, 536 bp, Homo sapiens
caacactatgtgaatagaagtgttataaacacactcaccacattttaattaaataatttactaggttttcttttaatataaacatgagaaatgaaaaccacatcagttgtagcatttatcttttgaaaataaaactgcaatcaatacttcaatctctaagctctgcattccataagtgatactttttcaggaggtagggttcctaaggtttatggaagttctttttaaatagcaggacatgaaatatgatacctgcactcaggctaacatgtgggataataaaatgtattacatcacctactactattrgggtccaattccttctaattcgttacatgtgaattaacacagatcctcctctttatcacatctagggaaaataatttgaggtgatcattgcagataaaagccttgcaaagagctactttacaagagaaaagggcactttgtaaaaacacaagaattccaaaagtcttagtgtaattttaagctttgatccttgtaaaagtaacaatgctagaaatatttacaaaaca

SEQ ID NO: 439301 - DNA, 536 bp, Homo sapiens
caacactatgtgaatagaagtgttataaacacactcaccacattttaattaaataatttactaggttttcttttaatataaacatgagaaatgaaaaccacatcagttgtagcatttatcttttgaaaataaaactgcaatcaatacttcaatctctaagctctgcattccataagtgatactttttcaggaggtagggttcctaaggtttatggaagttctttttaaatagcaggacatgaaatatgatacctgcactcaggctaacatgtgggataataaaatgtattacatcacctactactattggggtccaattccttctaattcrttacatgtgaattaacacagatcctcctctttatcacatctagggaaaataatttgaggtgatcattgcagataaaagccttgcaaagagctactttacaagagaaaagggcactttgtaaaaacacaagaattccaaaagtcttagtgtaattttaagctttgatccttgtaaaagtaacaatgctagaaatatttacaaaaca

SEQ ID NO: 439302 - DNA, 479 bp, Homo sapiens
atctcactttgagaggtaatgctcagcgttaaaggtgggtcttggtggaaggtgttttgrtcaagggagaggatccctcattaattgatgctgtcctcacatcaaggcccatatttctgccatatacgttttggaaaactttttccagtgttaacaataaatactgggagttttattgaaatattaaatttatagaaactgctattattttaataacaagtctttaaacattgaaattaactttatttttaaatttttgtgggtacaaagtaggtgtatatgtttatggggtacatgagatattttaatacaggtatgaaatgtgtataaacacatcagggtaaatgggtatccatgacctcaagcacccctcacaaaatctgagtactcacaagatctggttgtgtggcacttcccttcccccctctctttgccctgcacctgccatgtgagatacttattccccttttgccttccac

SEQ ID NO: 439303 - DNA, 549 bp, Homo sapiens
ctggtcttggctgggctctgcagatctcagctgggctggctcatgtgtctatggtcagctggaggccagatggggagggctggcttgtcagggccttatcttggatgctggatggctggaggccttttccacagggcactttgtcctccagcagcctggctggggccagctgatgtgctggctgcagagtccaagagcaccaagacaggacaagttgtgagttgcaagcgctcttcaagtccccacttctatcacgtttgtccactgtcctatcaacccaagcaagwcacaggctaagcccagagtcagcatgggagggaacacctgcaggcatggatgccaggaggtgggagcaaattggggccgttcctgtcatagagtgccgtagcaccccatagagttttcgtgactgcttatcacttttagtgtttataatctggcccccttttcaagctgaggatctgtcagaaaccagagtttccacttcattatctgaggccaaggtcccagtcaaccctcttgagctccacaaactccacaccagcagcc

SEQ ID NO: 439304 - DNA, 557 bp, Homo sapiens
gattgaaactgccattcggaagctattgcaccttccacacaggcagtgaaaaaggactaacatctgaatttcgctacaaggtaacattcggcttcattctctttcctgtttaatattcacaaccttaactttaaaatggtttccaaactatggygtgtggtataaaaacaaaaagtaagaacagaaggaaaaaagtccattattaagcccctgctgggatccctttctctttaatgcacttcaaaaaaaaaaaaaattccgggcaattttgtattcagatgcatcagcagaaccaggctgcaaatgtctgcattggtggattacatcaccccctactgattgatccttttaatggctcagcattttgcaaatgaagaagcagttacctctgttctgttggctattaattccatctacatagggttctgctggtttaatgagcattgaatatcttccatcaaaatgcagtgctttcaagggatgtaataaaatagcctatgttaaaactggcctataaaagtagcttataataaaatagcccagctaatgtaaaattt

SEQ ID NO: 439305 - DNA, 540 bp, Homo sapiens
accacatctattgactgcaaactgtactgtacccgttagatttacacaaaattgaagccttcatcccagtacccagggatagattcaaggacattggcaatgggatagaagaaaaatcaaatgcttccataatactgcttgcaaaagttcagtgttttctttactttcaacttccaaaacacaggagttcatttagtgggctgagcttttacaacatatgaaacaagagatgctaaagactctgaggaattgaatttttagtctttagtttatgtagtatagctaaaggagggatgaatatcaggtacggactcaatgtattctccacaagtggattattatattttattactttgtttttgtttgatgcataataattatgtcttcccaaatatataattacttgataaatagctaactgagatgctgtcatattgtagaaggaaaacaaaatactaaattacacaagatttaataygtttataccctagtcctccaacaggcttttgtttgtttgtttgataaatcatggaaacagtc

SEQ ID NO: 439306 - DNA, 622 bp, Homo sapiens
ccttctagcttgacaccttgtgtgataggaatagtccaactccattggggggctttcagaaataaggagaagagattgggataccccacagacagtttttgtccagttacatttatatgctttctcaagcatcccctctcaccgagctccacgaacgataagggaatcagtcttaaaagagccgygagttacaggcacacctgagagaaagagatgtttgtattcaccttagaactgactctagccctgggtcctagttctttactggggtccttacttcaatttctcactctctaccttctcattcttttcctctctccactggattcattatgagatgagttgttgaaggctggtggcaaaaatctgtgcggcaaatatgctaaagtacatagatagagtttctccctgctgaattgacaactacaataaagggaaacactaattttcagggtttggaagctcagtctttcaaacaaaggaggacttgctcaatgaagttgcatttctaatcctttagctagagtcaaatgaagccagttttgaagagcatttcaaactctattgatgaccaaattgcactattgattgataccaactgtaaactcgtggctcctcatcc

SEQ ID NO: 439307 - DNA, 647 bp, Homo sapiens
tcccatgtgaaactcaagaatccacactctctcccattctcgcttttcctggcattagttcaagtccactttgtcgctcaattgtatgactttaatatctccttgttcagattcctttgcctcagattcacctcttctttcaatttattctccatatcatttccagcatgatatttctacatctgcactctgatcatgtccttccccacttaaaatcattgatgactatttgtagacttcaagataaagttcaaactccttgccatttattctgaagacatttcgtgtctgcccccagccaggatcttgacctctctttctctattcctttttgccttcctcatacccaaatgtcacatagttgctgggaygtgtgactctcccattgcattcatgtatgctgttccctgtacctggaaccactgtccactaccacttacctcacccacctataatcctccagaaccttcagctctactttagaagtctctgcacggtgttcctgtgctttatagcattttgactatttctctgccatcacatttatctcactgtgttgcaactgtttgtttattggcctttccaactaaactctaaacttcttgagagcagggactaggtggtatttacacacatatccacatatc

SEQ ID NO: 439308 - DNA, 585 bp, Homo sapiens
acctggaaccactgtccactaccacttacctcacccacctataatcctccagaaccttcagctytactttagaagtctctgcacggtgttcctgtgctttatagcattttgactatttctctgccatcacatttatctcactgtgttgcaactgtttgtttattggcctttccaactaaactctaaacttcttgagagcagggactaggtggtatttacacacatatccacatatcctcagcacataccacaatatctctgactgagaccctcttaaaatctttttacaaagagaaggaatggaaagagaagagaagagaataggaagggaacaggaagggagggaagaggaggggagggaaggagaaaggagaggagaagacaagacaagagacggaaaaaaaaaaaaaaaaaaggaagaaagccagttctttcttcttgggaaaaaagaaggccaaaggagtccaaaaaatagtcacagattttactctgaacaggccaaataactaattgtcctgtctagatacagagtctgagttttaatgcattttcttgctagaaaattcaaagtatataaaaggatgt

SEQ ID NO: 439309 - DNA, 557 bp, Homo sapiens
tgcaatgtcttgccttactctttagctagcagtccatctcttccatgacacagaccctttagcaaaatatcaatccctcctttcatactcccacatttgccctccccaaccccacccttggcggtttaacatttcctcctgaatttcctgatgattttgttccctccactgggaagctactccttccctctcttccccagccaacatgatatacacttttcaaaatagcttaacgccattttctacaaaccatgtggactagcgttctagatctcacacacctgtccctgcccctgcctctgatttcttcaaaygccttgttagtaaataccataccttccatgtagggccctttctcaacatgcagtgtgacctaagcattttcagtacttcttatttctctaatgagatataagttcccaggcaagggccatgcactgtactcaccaaaattcctcccaaagcctggtgtgtgctaagctgccaggaagcagccaatcaataccttcattaccaaatatatcgagaagagtgcatgaagctggagtctgctgaac

SEQ ID NO: 439310 - DNA, 557 bp, Homo sapiens
tgcaatgtcttgccttactctttagctagcagtccatctcttccatgacacagaccctttagcaaaatatcaatccctcctttcatactcccacatttgccctccccaaccccacccttggcggtttaacatttcctcctgaatttcctgatgattttgttccctccactgggaagctactccttccctctcttccccagccaacatgatatacacttttcaaaatagcttaacgccattttctacaaaccatgtggactagcgttctagatctcacacacctgtccctgcccctgcctctgatttcttcaaacgscttgttagtaaataccataccttccatgtagggccctttctcaacatgcagtgtgacctaagcattttcagtacttcttatttctctaatgagatataagttcccaggcaagggccatgcactgtactcaccaaaattcctcccaaagcctggtgtgtgctaagctgccaggaagcagccaatcaataccttcattaccaaatatatcgagaagagtgcatgaagctggagtctgctgaac

SEQ ID NO: 439311 - DNA, 618 bp, Homo sapiens
ttgtgagttattcaagataggaatgcaaatttaaatttgctcataactagaatggctcacatggccacaggaacatctgtttttctaaaagcrttagctgattgtccagaggtggtcactcattgtccagagactgggatggagaaagacagaactgggcaacttgtttcttagatggattttgtctcatgtaagagttgcatgagatgaattcaggtagacaatcatttcatatctttttaagacaaaggaagggactactagtatatactgtgctatttgctttgggccaaaaatagcactacgaactttacatgcatatctggttgaattatcccaaatcttacatggtagctattattatcttattttacagacggtgagatttgttcaaactagcataaaatatttaggcaattgtgcttctccatttatatttattttgaggaaaattgaagccatgatttgggattcactgatgctgtacctccctgactagttttgcagattacctatcatggtatacaagatgcacagacaactgtaatgggtatctatcctttttgccttcctagcatccccttctgataaaatagcatcctccctcctgataataca

SEQ ID NO: 439312 - DNA, 562 bp, Homo sapiens
actaactctaagaacaagtaaccctagagctgctgggagaagaatctgccagaaaatgaagtccacacaaagaaaagcagagccaagacatggcagagccagagaaacagggttcagatgccaccatgcaaagtccttgatccagcttctcctggagctcttttattcctgagactccctggtcacatcagtcagtaagtttccctttctgccaatgctagcagtttgagttagtctctgtcgattagactaayagaaacaggtccggcagaaaatgaaataaaaatatatttagcaaaaaatcatctgagttagttttacagttatggatttcaaatttcaccatttgaaacagataaatttgtacactaaatagtaactaaaaatattaatagcaagatctcaaagatacccattgggaaattttaccttggttgcaataatttaagcttaagaagggtttttgccactgacttggaggtaacaatgacatgaccatttctcagggactttttgacaattatcttacttatgaataaaccagaaagatagatgatactaa

SEQ ID NO: 439313 - DNA, 562 bp, Homo sapiens
actaactctaagaacaagtaaccctagagctgctgggagaagaatctgccagaaaatgaagtccacacaaagaaaagcagagccaagacatggcagagccagagaaacagggttcagatgccaccatgcaaagtccttgatccagcttctcctggagctcttttattcctgagactccctggtcacatcagtcagtaagtttccctttctgccaatgctagcagtttgagttagtctctgtcgattagactaatagaaacaggtccggcagaaaatgaaataaaaatatatttagcaaaaaatcatctgagttagttttacagttatggatttcaaatttcaccatttgaaacagataaatttgtacactaaatagtaactaaaaatattaatagcaagatctcaaagatacccattgggaaattttaccttggktgcaataatttaagcttaagaagggtttttgccactgacttggaggtaacaatgacatgaccatttctcagggactttttgacaattatcttacttatgaataaaccagaaagatagatgatactaa

SEQ ID NO: 439314 - DNA, 635 bp, Homo sapiens
atgggggagatgataatagaccgtctttggcgtatctaagttaaatagaagaaatagttcaataaaaaccaacaccctactactatttttaaattattaaactaaatggaagaaatgccttgacctgaatttcctggagctcagtaactctgatttggcttcttgatccttctgtttcagggtgtcagtcatttcctagatttctgccctctcatcacccctgtgaatgctggtcagccccccactcaccctgactgtggccttcaatctatctgacgtgcaatgggtgactctcttctttgttagcctctttagttcttgcctcctccaatggcccctacctcctgcacttgttactaygagaattaagcttaaatggatgctaaaagtgaagataaaaacactagttaccacttcacctagaactctttgcttatatcaccagagacttagaggagaggtgcccaggcagaaaacccattcatctgaggacctgtgacaaggaacaagaaagtggctgcttgagatgaagacaaagatcacaccaagttggggaagatgtcattgccaaaatttctggcatccaccaggagggcggagttgtccaaattacaaatcagaacaattgaaaatgg

SEQ ID NO: 439315 - DNA, 635 bp, Homo sapiens
gagaatgtttttttccattttgctaaatatttttaaaataattttattatttatgaattcaatactcttgggtcaataatattcactgtttggcatgaattatcatttaaacacataaataacttgtaccttagtttggtttgcctggcattgcatagttgttattcacagaaaaactgagaaaaaattataatgcatgcccactcaaatgtaaaacttctgtaacaaggagaggagggagaagccatcatacagatatgtgagtagcaacatctatgtgcttccatgttacaaaaagaaagattattaaaattsctagaaagtatagttttacatttagctatgcagctcttcgatttattaaaacataaattaaatcatcattctcagtaaactatcgcaagaacaaaaaaccaaacaccacatattctcactcataggtgggaattgaacaatgagaacacatggacacaggaaggagaacatcacactctggggactgttgtggcatggggggatgggggagggatagcattaggagatatacctaatgctaaatgacgagttaatgggtgcagcacaccagcatggcacaactatacatatgtaactaacctgcacattgtgcacatgta

SEQ ID NO: 439316 - DNA, 378 bp, Homo sapiens
agacacaacttgtgtttccataagcacccacatggttggtggctatctgaatattttaaggctaggcacaaatgttaggcagtgcaaagaaagggagaaaggatgaagaaaaacatccaagggcagataataaagccagtttacactttcagatggcatttcttaagttcagttcgttttaaagtttttttccttttcttatgtataactagacttccatgagatggtcaaggtggttaactgcaagcatctctgaatttaggtaaagcgttaagccttttttctcaagagtccacccctgtcttcaaaaatacaaaatggtgagtggccgggagtggcagcycacatctgtaatcccagaactttgggacgctaagg

SEQ ID NO: 439317 - DNA, 572 bp, Homo sapiens
gtggaggaagagttggaaagaagctacgtgtgaccagcttcatgaactggtacagctttgactcaacttggcaacttcctctgtgtggcctcccaagaagggccacaagagccacttggcacaaacctcaccacacgtcttttgctttactccygcctctcagggaacctattcagtgggaaatctcccttgagaatctcttaatgaaaaggccccagtcatgtggccttttggctcaggaactccgtgtccccattttaaggtacaatttgccactttggccctctgcctctggcttccgttcctgcccagggaagcccaaagttgcgtaaaattgtgtgagaagagatagcccctacatggggccccacagccagaaggaaacagatgagaggatcctcgcatctccagagccagccagggcctcactgtcctgttggtttgtttgcttctctatggtgtgaagcctgaccttcccatcttcccgctctgttctttatgccccacactactcacatttgtggcgatgttgcaggcatggtctaaacttcgggctgggattttattattat

SEQ ID NO: 439318 - DNA, 572 bp, Homo sapiens
gtggaggaagagttggaaagaagctacgtgtgaccagcttcatgaactggtacagctttgactcaacttggcaacttcctctgtgtggcctcccaagaagggccacaagagccacttggcacaaacctcaccacacgtcttttgctttactcccgcctctcagggaacctattcagtgggaaatctcccttgagaatctcttaatgaaaaggccccagtcatgtggccttttggctcaggaactccgtgtccccattttaaggtacaatttgccactttggccctctgcctctggcttccgttcctgcccagggaagcccaaagttgsgtaaaattgtgtgagaagagatagcccctacatggggccccacagccagaaggaaacagatgagaggatcctcgcatctccagagccagccagggcctcactgtcctgttggtttgtttgcttctctatggtgtgaagcctgaccttcccatcttcccgctctgttctttatgccccacactactcacatttgtggcgatgttgcaggcatggtctaaacttcgggctgggattttattattat

SEQ ID NO: 439319 - DNA, 572 bp, Homo sapiens
gtggaggaagagttggaaagaagctacgtgtgaccagcttcatgaactggtacagctttgactcaacttggcaacttcctctgtgtggcctcccaagaagggccacaagagccacttggcacaaacctcaccacacgtcttttgctttactcccgcctctcagggaacctattcagtgggaaatctcccttgagaatctcttaatgaaaaggccccagtcatgtggccttttggctcaggaactccgtgtccccattttaaggtacaatttgccactttggccctctgcctctggcttccgttcctgcccagggaagcccaaagttgcgtaaaattgtgtgagaagagatagcccctacatggggccccacagccagaaggaaacagatgagaggatcctcgcatctccagagccagccagggcctcactgtcctgttggtttgtttgcttctctatggtgtgaagcctgaccttcccatcttcccgctctgttctttatgccccacactactcacatttgtggcratgttgcaggcatggtctaaacttcgggctgggattttattattat

SEQ ID NO: 439320 - DNA, 497 bp, Homo sapiens
tgcaatacaataatagtaacagactttaatatcccattctcaatagtaagccaatcatctagacagaaaatcaacaaagacacgcacagttacactacataccagacctaataggcctaaatgacatttacagaacatttcrcccaactgctacagaaacacattattttcatcaccacatagaacattctccagaatagattgtatcttaggccacaaaacaagtctgaacaaattcagttaaatagaaatcatatcaagtatcttttctgaccacaatggaataaaactggaaatcaataacaagaggaacctcagaaaatatacaaatgcatggaaattaaacaatatggtcctaaacaacaattgaattaatgaagaaattaagaatgaaattgaaaaatttcttgaagcaaatgaaaatggaaatacagtataccaaaatccgtgggatatagcaaaaacagtactaagagagaagtttataataataaata

SEQ ID NO: 439321 - DNA, 497 bp, Homo sapiens
tgcaatacaataatagtaacagactttaatatcccattctcaatagtaagccaatcatctagacagaaaatcaacaaagacacgcacagttacactacataccagacctaataggcctaaatgacatttacagaacatttcgcccaactgctacagaaacacattattttcatcaccacatagaacattctccagaatagattgtatcttaggccacaaaacaagtctgaacaaattcagttaaatagaaatcatatcaagtatcttttctgaccacaatggaataaaactggaaatcaataacaagaggaacctcagaaaatatacaaatgcatggaaattaaacaatatggtcctaaacaacaattgaattaatgaagaaattaagaatgaaattgaaaaatttcttgaagcaaatgaaaatggaaatacagtataccaaaatcygtgggatatagcaaaaacagtactaagagagaagtttataataataaata

SEQ ID NO: 439322 - DNA, 606 bp, Homo sapiens
ccctaactctcttcaattctatgaagactgaaaaaggtgaggaaaaaaaaattaaaggctagaagagattagttcatgaggtttaagaaaagaagctgtcttcgtaacataaaagtacaaggccatgcagcaagtgctaatagagaagccacagcaagttctccagaagatctaattaaaataactgatgaaggtgcctacactaataacagattttcagtgcagacgaaacagcctaatactggaagaagatgtcatgtaggactttcatagctagggaagaaaagtcaattcttggcttcaaagcaccaaaggactggctgattaataagggctaatgcagctggtaactttcgtgcattgccaatacacatttaccattctgaaaattgtaaggcccttaacaacgatgctactcagcttgtgctgtataatggcagtctactcggcttgtgctgtataatggaacaacaaagcctggatgacawcacatctctttacaacctggattactgaatattttaagcttattgttgagatctatggctcaaaaaagaaaagattcctttcaaaatattgctggtcattgacaatgcacctggtcac

SEQ ID NO: 439323 - DNA, 561 bp, Homo sapiens
ggcttgtgctgtataatggaacaacaaagcctggatgacatcacatctctttacaacctggattactgaatattttaagcttattgttgagatctatggctcaaaaaagaaaagattcctttcaaaatattgctggtcattgacaatgcacctggtcacctaagggctttgatggatatgtacaaaagaattaatgttgttttcatgtcttctaaycaatacctatttacaacccatggatcaaggactaattttaagtttcaaatcttattatttaaaaattacattttgtaaggctccaggtaccataaatcatgattgctctgatgtatctgggcaaagtaatttgataatcttcggggaaagattcagcattccaggtgccattaagaacattcatgaatcacgggaggaagtcaaaatatcaacattaacaggcatttggaaaaacttgattcaaatccttggagttcaagatttcagtggagaaaggcactgcagatatggtggaaatagcaaaatagctagaataagaaatgaagcctgaggccaggcacagtg

SEQ ID NO: 439324 - DNA, 605 bp, Homo sapiens
aactgagctgagaaactatgtgatgttgccagtatgatagccatggacttcataaaaatcgttggattctagttgtgttttgaaggaggagacaatgagatattcttatttattatatgtgaggcrtgaaagaaagagaagagtaaaagatgactccaagggcttggtctgagcaactggaaggatagagtggccaatggccattaaaagatttaggtaaggagatgcgtggaacagctttgggggagaatatcagcaattcagttttagttatgttttgagatgaatctaagatgttcaagtagagatgtcacatagtcagttgtttatatgagcctggagttttagggaagggcctaggatggaaacataaatttgctttacttacattatttcatgtcgtcctcctcatgactcttccctgtggtttattcaaaagtgattgtgacttactcatgattgcataattatcaaggtactaaatgaaattttgaattcttgtcccctcccaaatcttatactttttgaaagcaaattcttcaagagaaatatatttcctttttctcgtctttttttcttttagtttcattcctgtgacccattat

SEQ ID NO: 439325 - DNA, 638 bp, Homo sapiens
gcacttgaaaatgttgaacccaaaatgaggacttagaaaagatggagaagcaataagagaaggggactcaaagaaaaatgggaaagttgaggtcactggctgtcatggaaacatcatgaatatgagatatcaatagagtcactgtcaaccttattatatgcaccactgccattttatgttatatatataacaacatacgtatcccargtgcttttgtacattgagcacatgtattcccagtgcataaggatcccagtggtcataagagaccatctacatctttttttctcattagattttgagctcctcaaggactagaactttctgtgtcttactcatctttgtaatttcagcaccctatataatgcctggctcagaaccatgcaagacagttacatgaatgaatgaatggctaaatgctagacatggaagaatttgttcctagagtttcctgaggggacattctggaaagaaaaaataataatttgagcagaaattaagcatcttgttttctacttcagcgtgaagggtagcagatttctgtggacatctatttgcatatctttttcttaaataggcgggccaatttacatacatttctatgttcaattcaaataaacttgctgtcagtatgtaaa

SEQ ID NO: 439326 - DNA, 431 bp, Homo sapiens
aattaaacttgatcatatgtataggaaaatatagggtttagtactgtttgtgcyttatgcatccactagatatcttggaacatacacccttcaggggtatataaagtctccccttcaagggagacttctgtatacccaaacaatactaggaacactttgcttgttttgtgttgtttttaagttccattcctgagctcattaatttcaaggtgcaatccttttcttaacagatttacactgagaaaacaagaaagtgtttcatctccccaaaaaaaggccacctgcaaaagttctctcagtgtagaatttgccttattctcagggaatagaatgttgcataaattgtccccaatcccagaagtcagtgatgtagggatggcgatctctgcctaaagatgtgccattcaaacaacacacagcagtgtccacca

SEQ ID NO: 439327 - DNA, 431 bp, Homo sapiens
aattaaacttgatcatatgtataggaaaatatagggtttagtactgtttgtgccttatgcatccactagatatcttggaacatacacccttcaggggtatataaagtctcccyttcaagggagacttctgtatacccaaacaatactaggaacactttgcttgttttgtgttgtttttaagttccattcctgagctcattaatttcaaggtgcaatccttttcttaacagatttacactgagaaaacaagaaagtgtttcatctccccaaaaaaaggccacctgcaaaagttctctcagtgtagaatttgccttattctcagggaatagaatgttgcataaattgtccccaatcccagaagtcagtgatgtagggatggcgatctctgcctaaagatgtgccattcaaacaacacacagcagtgtccacca

SEQ ID NO: 439328 - DNA, 644 bp, Homo sapiens
cacttcttttcagtttcaggaaccctccaggtcatttctcaccacagggtctttgcatattctattccctctgcttggagcttccttctctaattctctctttcctccttcacatctctccactaaacacatttcctatcttttttttttaatccaatacctattatcattcaagtcacagacaaaaatcttacttctttgtaaggcgtttctggatcttttggttggatctctgccacagctccctagggatactcctcatgcttgcgagaacgttttgtttccgctcaccactctggattttaaggccccaggaagctgcaattgggcctacgctgttcaccactacatctgaagttctatcactgtgccccagaatgaagtagatgacrataagctatttactgaataatttctaatgaacgtaggtgtttgttaaaaacataaacctaggtaaagggacatttcattctagccgcactcaggcatctctttaccctcttcttagtcttccccatggaagaaagagtaacttgaatgtgcggtaagaaagggcacatatgcatagctcagccttcttcttaagagctgtcctgctcacaaagcacacaaattattgctctgtttttcctctgctctgcatt

SEQ ID NO: 439329 - DNA, 595 bp, Homo sapiens
aaatatgcataggaattttccagtcaaagaaacatacaggaaggacatctcaagtagggcatatttggaaagtattactttattaattaattcattctaccaacacattaaatacctagacatagtgctaggcactggggatacagaaataaatgaaatgtacacaaagcaatgaatattatttttagaatccattttctacacccccaagatattggtcttagatatttctttttgtctttcttgccctgtttctattgatatttctttaaaataaatatagattattcaagagtctgtgatggggaaattgagcccttttatatcaggggcagaccatatcacaatgaggtcattgttttgtatggcattgtattcatatttttgaaatctccttttttttttctgttcggggaattaatgatctccctttcccagacagcagaacaagctgggatagttgttgtaactttggatacccagagcaattagaagtcctcctyctcagctgcctggagacatgttctgatttcagtgctgtcatgtataatcctgacttggtcaagatgaagccgtttgagttgacaacttacac

SEQ ID NO: 439330 - DNA, 291 bp, Homo sapiens
gacctttcctttcatgtaacttctaaaagaaatccactgcagctttgatgtttcatactttagaggtctgtagtaaaaagagtccaagtcttgcatttgtgtaaaatatttactgaatccctgaatcctgtgctccagatgtgttctaagagtcaggtgtgaacctccarccaaacctctgcagtggagtcacaaattccctacccaaatccatccaagcatcagctccattacatcaataaccttatctctttagtacctagctgtgttctaggacataaaacccagcag

SEQ ID NO: 439331 - DNA, 585 bp, Homo sapiens
tcaaaaagcagctccctgggcaggtctgtttgttatcaaactttacctttttgtgaatcagaatttctcctgctttaatggctatccattggtcttaattccattccacaggagacacacagaaaataaccagtctctttgtcatggcagaaccccaaatatttaaaggcagtcaccatattctttctatatcccttctatgttcaggccttccagaggtattcttccttgttttgttttttgtttttggtccttgttatggcttgaatatgcccctcataaagcatgtgttggaaacttaatcccaaaygttacagtggggcctaatgagaggtgtttagatcctgagggctttaccttcatgaaaggattaatgttgattttaaaagtgtttgaggccttgagttcaatctcttgctcttttatgcccatgtgataccttctgccatcttacattgcaacaaaaaaccttcaccagatatggtccctcagtcttggaattcctggtctccaaaaccagaagccaaataaatttctgatttttttttaaaataaattacacagtctcaggttttgttatagcag

SEQ ID NO: 439332 - DNA, 574 bp, Homo sapiens
ctctcatgacacgatgcgaccccagtgctttgaataaaccaacctcagtaattgggggtggcaaagaatgcaagttttgattaattggaaaagggcattttgatgtagatgctttaaatattatatttaggtggaatcttgttctttaggtatctttccctcctttctcctccttttttttctattcttccccttaaatatggatatgcttatgtgaacaaagttcacattgtctatggatgagaaagtagacaatgtttctattgtttaaatttactagaaccaatagctaattaatggcatggcactgtctttgcaaaatgtatggtaggtaacaggagagtgactttgggggtttctcaaaaatgagggaaacatgtcaagtgaagtgttttcaaayagatggctggtgtgagatgcatggtcagggggctgctttgtatgggcctgctctgtcgttagcctctgtatcatttttgctgtattagaagcttaaaactcctcttccttatggtcgaatttgaatagatgatgcttagaataaacaggcacgaccccactgaaaattgttcat

SEQ ID NO: 439333 - DNA, 541 bp, Homo sapiens
tttttccacatcataaaccaattgtttgyatcaccaattcgatttatccaccaggaaattcattacaaaatgatgttatatgtataaataaaggattgatgataagattatatttgctaggttctttcacaaggtagagaaattctaaatgctattgctatagttagcattttactctattttaattgctggtgacaataatatgagctatcttacatttgaaactcatctcattctcatactttagctcattagtgataagatggtggaaatcatttagttactggaaaactgagaggcagcaatatttaaccagaaagatcgctgcattatggttccctcttggggattctaaaatattacagctagtggctaattagttttctgtgcctcttggtgagatagataagcggacttgtcagagtggagatgatttctccaagataactgtacaatcaaaggcagtcagatatgcaaatccaggttacttagtgctcaaggtcatgctgtcagatttaaattcctcatgcaacattttctt

SEQ ID NO: 439334 - DNA, 567 bp, Homo sapiens
cttcttgctgtgtcctaacatggtggaagagacagctgagctcccttgggcctctggtataagtacactaatccctttcttgaggtctccagtctcatcacctgattacctcccaaaggctccacctccaaatatagtcactctggggattaaatttcaacagatgaattttaggaggacacaaactttcagtctgtaacacagtgtgaaaatatttcttacatactttataaaaataacataccacagaggaacagcatgggcatggaatgaaggagcatgaaacaatggaggtaacatggccgttgggagttcaaatctcaccctccttgtgtgatgttggaaactctaatttcctatctatgtctccattgtttttcctctttaaaatgacgggaaccacacctttttcataaaattgttacaaaaattaaatgagctaaaatagtaggttagttctttgatttwtttttctaaaaattaattgttttggtccaaagaacaagacctggttactggttctgatctttcctagttttaaatgaacatccataaaaggcaaactgt

SEQ ID NO: 439335 - DNA, 538 bp, Homo sapiens
atttgctcattggaatcttattgaaatggatttagaggaagctaatatattggaaagaargccttctaaaagccaggactgccattagcgatcttgaagtctttacgaaagttactaaacttctctaggactatattaattaaaagagataatctctcaacccttccaggctgtgacagtctctgaatctatagtttgaggtttaattactgttatatgaatattaaactctaattcatgtcttacataaagatgtcattcattgagcccagtgttctgtgtgaatcaggtactaaggaatgcatttaaggaagttttatttacttattcttttatatatattgattctcctcaaataattttcaataaatgactatgagaacattaattaggccaaattaattaggacaaaaaccaagagccaagagtagtgcaagtagaaaaaactttggctaatgataaccattatagtagaatgcccaacttagtatgagcttcctggttggcaaggcaaaaaggacaatgcaatcaacctcag

SEQ ID NO: 439336 - DNA, 538 bp, Homo sapiens
atttgctcattggaatcttattgaaatggatttagaggaagctaatatattggaaagaaagccttctaaaagccaggactgccattagcgatcttgaagtctttacgaaagttactaaacttctctaggactmtattaattaaaagagataatctctcaacccttccaggctgtgacagtctctgaatctatagtttgaggtttaattactgttatatgaatattaaactctaattcatgtcttacataaagatgtcattcattgagcccagtgttctgtgtgaatcaggtactaaggaatgcatttaaggaagttttatttacttattcttttatatatattgattctcctcaaataattttcaataaatgactatgagaacattaattaggccaaattaattaggacaaaaaccaagagccaagagtagtgcaagtagaaaaaactttggctaatgataaccattatagtagaatgcccaacttagtatgagcttcctggttggcaaggcaaaaaggacaatgcaatcaacctcag

SEQ ID NO: 439337 - DNA, 249 bp, Homo sapiens
aagtcaggacgtgtttgggagtaaaacagtarctccatataatttagagactggctaggtgataactaaaacacacagccttgtcagttggtacctgtctttggttctctgtctccaggcgcagcctggcctccacacacctccgagtctccaggaaagcttggcgctgggcccggtctgacaggtaactgatgaagattccagctgtgttcatacacatgaatagcactgcctgggccacaacctaaa

SEQ ID NO: 439338 - DNA, 536 bp, Homo sapiens
gtaagcaattgagttaaggataaaataactgaactgatatttgaactgcagtccaaaagacagactttcttttgatttcaatcaagttaattacctgctaaagtgaaacggaacaaaacaaaaatcactatttccaggggaatgtaagataattcagtcttaaccatagagcattcacaatgcccagaacatagcacagaattatgtgacataaaaataaacattaaaatgtgactcaatctcaagagaaaagatagtcaacagacatctattctaatctgacccagatgttggaatcagcaggtcgagattataatagttcttacaactttgctcagtgacattctagcagtgaatgaaattcactgaaagtaaatattttagcagtgaatgaaaagataagaaataagaaaagaaatagaaacctcaaaaaargaaaatttcagaactgaaaaagaaaatatctgaaccaactggatattaacagcagaacatagatgacggaagaatcagtaaatttggaaataggccaatag

SEQ ID NO: 439339 - DNA, 574 bp, Homo sapiens
tcagcccagcatgcggcccactgtggctggagcagagagccttgtgggagcctggggaagagctttcagaagcagactctgaaaggtctcaaagggccagaccatggagggtcttgaagcttttctctccatgagatgggaaggccctgcaaagttcttagcacttggaaacatgacctaccatctgtgtttcaagagtcacttgggcgactgggaagaaaacagacagtagtgcagcaaggacagtcagggagacaagttagaggctgcttccaagagtctccttgaaaagagattttgacatggaccacagtggtaattatgcaggtgatgagatagggccacaccctgaatgtattccaagggaagagacaacaggatttgctggtggattttttgtggactacatagaaaagagaagagacaaagatgattctcagcaagttctagttaaaaaaaatgcrgatcctttggccatactgagacccactgaatacaaatatccagggatgtgatcttggagaactttatttttaggaagctcccaagtcgatctgctgcggtgggtccatag

SEQ ID NO: 439340 - DNA, 537 bp, Homo sapiens
tttcctgctggaaccctgaataatacatgaaccacaccttggtgtttgcacatttggttcccttttccttaaatgtctccctgctcccactccaaattctctctctctctctctttctctctctctgtcacacacacacacgcacacacacacaactacttcctcagcatgcttcacaatgcacaagaagcagcttctctttccctgaaagccccctatcttttaggctgtccccctctcacatttcctgccagcaaactgttatcayactgctctatagctcctgtcagttcttgggtcttgtctgtgttttcctgtgggcaggagttactgccatccattgatgtattcctgtagttgacacacagcagtcattcagtaaatctttgttgacaggacgctcctgtggttgtctgtaggagccgctgggagattcagcaggagaggcactgaagaggcaccagtgacctctgtgtgcttgtggctcaagggaaaaaatcatatgcccttatcaagagaatgatttcctgggcagtg

SEQ ID NO: 439341 - DNA, 643 bp, Homo sapiens
aagaaccaggttcagagttctgtcaaatctgcatagggttttggaggaagtttctctctttgaatttgagttgtacaaagtaacatattataatgcagtggaatgttcacatctgtgtctttagtttgtatgccattttaattaaatatttggggagagaaagagaaagagagaaaaaagagagagagaaaaacagatacacaaataagggaagaaaaatgaaggtaagtaaaaggaagcaaaagggagaggaaaggaggaaataaagcactttaaataattccagcaatgctgtctgttcatgagcatttgacatggagtgagaagatgaggatctatagtgtctcaagctgtggcygccaatagcgtgctcactccactggactcagtgtgtcactaggtttaaagttacatctctttcataatcatgctacctaaatacaagccaactgctttatctggagttcaaccatacagaaaggaaatttggctatcctggacttgctgaaatatgatacatccatttactgatttttgtgggcatttgagagagtttttaaaagcatgatttttactcagctgttggttttaaaacctaaccccagtgaagcagtgattccaaggaagttaggtttcacctaag

SEQ ID NO: 439342 - DNA, 371 bp, Homo sapiens
taacatatatatgtgtatatatacattctaggattttaatctatacttcacaggagaaacagagagaagtgcacctacttcacctattccaccttagtctagagacctawtcttttcagaaaaggaagtttgaggagaaattttacttaagaaaaatcttagcagtcctctgcccaactatagtttcaggatagtttgtattgctgctttggaaccattccccagcatttccactcaatgtctaggcatcttttggagaagacctggggaagtgcagaacatgactgaaaaatgcagaaggaggtgggatcatgtggggtacccaggccaccatgtctatccttagtgacatggccaaccctttacagaaa

SEQ ID NO: 439343 - DNA, 596 bp, Homo sapiens
taaatatatatttatatataaataatgtatatatataacatatatatgtgtatatatacattctaggattttaatctatacttcacaggagaaacagagagaagtgcacctacttcacctattccaccttagtctagagacctaatcttttcagaaaagraagtttgaggagaaattttacttaagaaaaatcttagcagtcctctgcccaactatagtttcaggatagtttgtattgctgctttggaaccattccccagcatttccactcaatgtctaggcatcttttggagaagacctggggaagtgcagaacatgactgaaaaatgcagaaggaggtgggatcatgtggggtacccaggccaccatgtctatccttagtgacatggccaaccctttacagaaatggcctgagcttgttactttgaatggtgcagtactcaaagataaaccaggaagttactgacacctaagaaagatcctggttttttattcagaatctgataggctttcctttcattgttcaccaatagctctggccaaagcttgtcaagagaccttgccatgctttgctctctcaaggtccacctagagtc

SEQ ID NO: 439344 - DNA, 371 bp, Homo sapiens
taacatatatatgtgtatatatacattctaggattttaatctatacttcacaggagaaacagagagaagtgcacctacttcacctattccaccttagtctagagacctaatcttttcagaaaaggaagtttgaggagaaattttacttaagaaaaatcttagcagtsctctgcccaactatagtttcaggatagtttgtattgctgctttggaaccattccccagcatttccactcaatgtctaggcatcttttggagaagacctggggaagtgcagaacatgactgaaaaatgcagaaggaggtgggatcatgtggggtacccaggccaccatgtctatccttagtgacatggccaaccctttacagaaa

SEQ ID NO: 439345 - DNA, 596 bp, Homo sapiens
taaatatatatttatatataaataatgtatatatataacatatatatgtgtatatatacattctaggattttaatctatacttcacaggagaaacagagagaagtgcacctacttcacctattccaccttagtctagagacctaatcttttcagaaaaggaagtttgaggagaaattttacttaagaaaaatcttagcagtcctctgcccaactatagtttcaggatagtttgtattgctgctttggaaccattccccagcatttccactcaatgtctaggcatcttttggagaagacctggggaagtgcagaacatgactgaaaaatgcagaaggaggtgggatcatgtggggtacccaggccacmatgtctatccttagtgacatggccaaccctttacagaaatggcctgagcttgttactttgaatggtgcagtactcaaagataaaccaggaagttactgacacctaagaaagatcctggttttttattcagaatctgataggctttcctttcattgttcaccaatagctctggccaaagcttgtcaagagaccttgccatgctttgctctctcaaggtccacctagagtc

SEQ ID NO: 439346 - DNA, 602 bp, Homo sapiens
gtgtagctggagatagggggatgagaataaggtaagtcaaaatactataaagctcactgttcttactgagattctgccaacttttttttcaataaatgctcccaggttgctgcaagattttgtttaattttctgagttctgaaaacattgattatgaccatttttgtcagtgttcaccttgcttttagggaagagataatttttagaggtctttattaaaccactccctctgatatcactcttaaaatgatgtttgaggctggaaatcaacataaaccaagctgactgagtgggaacataaccagagtatttaatggatgtgcaacttttggaagaagtacaattttggctggatcataggggctgtatagagaccccatgtgggaataaggtagggtggcaagattgaagccacattcaaactgacgttcaaaatgtttgaagasagaaatcaacatggggaagacaatgttttaggaatattaatcttgcagtgtgtccaggaggtgggtgagagtagaggcaagaaaaacagttactttagtcagaaggggaacattgtgtacctggaacaagcaataagaataggttgggtgtgaaag

SEQ ID NO: 439347 - DNA, 459 bp, Homo sapiens
tccagtccaaatgctaaattaaattagacttaaaatagtgacacagtygacacctggttcactgcaaatggtaactaatagcacccacgttagtaaatactcattttctatggcagggctccttctttccaaagttctcccacttgacctgaacccaaagctgttttttgtgtgtgtgtgtgtgtgtgtgtgcatgcatgtgtgtattggtgtatactaaggggcaggtctttgtggagaactttgacaaatattggcaatgagtcgccctccccatctgatgcatgtgtgaatgaaagtgctctccactgaaaagatagagcagcaggaaagctaacttctagttcctccttgcttccacccctcagtccagttttcatttgtccctttctcttggtgttcacaggggcaacttgctctaattcctgaccccatcactagaaccagaagtcccaacac

SEQ ID NO: 439348 - DNA, 585 bp, Homo sapiens
aggtttagtcccagtctcaggtccagtgtatgcatacagtgtaattcttagatctcagactaggaattaaacttcagcctcagtttcctcatccagtgatggttttcttaccttgtaggggtgaggtaagtaatgagataacttgcatggacctaaacgcttcccccgggggctgtcttaaaagttcagtgactgctattattaggtgatgaaggactctgcaaggamatctataggcatcctctaatgtggagttattcaagcttcttaaatctgtcagtttggaaaaattctcaggatctagttcttgaaatactgctttttctcaattttctcgtctgtccatctagaacttcaatttcaccttttcagataattttactgtttgccgtgtgtttgctaaacttttcccctctcctgtgctgctttattctgggtattttttctttatctctcttcaagtcactatacctgcctactactgtatattatcaatgtttgaacaaatctgttgaattcttaatttctgtcattgcactttttagttcaaggagttccatttgattatttcttatagattccaat

SEQ ID NO: 439349 - DNA, 222 bp, Homo sapiens
tggctctcaccactctgtgtgtgtgtgkggggggcaccatgcaatttgttgagggctggaagagaacaaaaggcaaaggaagggccaatttgctgtctatgtttgggtcgcgacatccatcttctcctaccctcagacatgagtgctcctggttctcaggcctttggacttggaccaggacttgtattatgccattgtttcccagccccattcccttccagg

SEQ ID NO: 439350 - DNA, 222 bp, Homo sapiens
tggctctcaccactctgtgtgtgtgtggggggggcaccatgcaatttgttgagggctggaagagaacaaaaggcaaaggaagggccaatttgctgtctatgtttgggtcgcgacatccatcttctcctaccctcagacatgagtgctcctggttctcaggcctwtggacttggaccaggacttgtattatgccattgtttcccagccccattcccttccagg

SEQ ID NO: 439351 - DNA, 545 bp, Homo sapiens
ccacctccctacaccattgtaccaatatatactcccaccaggagtgtattggaattcctatttccctgtgtacttgccagttcttttcggatttctgagtcttgcctttttgaaaggcataagtgattatttgttgctttttaaatttttacttccctgactactagcatgaccaagcatctccatgtggaccccgtagttttcctytctggaattatctgttcacatcctttgctcctttttctatgggattgtttgtcttaattttattcacttctataattcttttacatagtgtggattagtcctttttcatttacgggaactgcagatgtattccccacctctgtagcttgtctttttactttgtctatggcgtctcttgtgatgtagattaacaccaatgccatcaaaattatcaagtctgtctattgttacttatagtttttatttcctaagaactgatttccaaccccaacgccatagaggcatcctgctgtatttttttctaaaagtttttctgtttccatacaagtctgtaattt

SEQ ID NO: 439352 - DNA, 606 bp, Homo sapiens
tcagtggctattttggactttccaatacaattcaaacaaaggtcattgtaaaacataaggaggaaaagttagaacaatgtaattttcaaagctatgagtttctgaggagaaaaacaaaagtaactgcattgcttcaatctcacaaagatgttatttcataaagataaccatcattctgttgaattagtgacacaaataattttacatattattttcttgtttatcttaaactttaaaagtaatatgtgcacctttaccttgcaccatgtaaaaaaatttactcaaaatggatgaaaaacctaaatataaaagttaaargtataaaactctttgaagaaaatgtaggaagaaaggttcataacaatggatttggcaataactcttagacctcacaccaaaatcataggaaacaaaagaaaaaataaactgaatttcatcaaaattaaaaactcttatggatcaaaggacacaatagcagagtaaaaaggcaacccacagaatgggaaaaaatatttgcaaatcatgtctgattcgagattaacatccagaatatgtaaagagttcctacaactcaaaaacaaaaaatcaaataacttgatttaaaaa

SEQ ID NO: 439353 - DNA, 592 bp, Homo sapiens
tagacaaatattgtatgatttcacttatacgaggcactagaataggcaaattcataaagacagcaagaatagtggttaccaggggctgaggaaagggagaaattgagttattttgtttaatgagtttccatttgggatgatgaaaaaagttgtggaaatggatattggagatggttgcacaacgctgtgaatgtacttaatgccactgaatcatacacctaaaaatgattaaaattgtaaattttatgttacatgtattttaccactataaaaaagyaataggtgcataagttaaaagcatcacacaccagaaaattatagaaaatgagaagggaaacctcctttttcctgtcctcctccccttaacaaataccaagtgtttgtagtggttgtctctgtaattctaaatcattgatgtaactctctataccttgattgttcctctgtagtgtctgcaacctcctctcaaaggatgaggaattgactgcacttccactaagtcctaccaaccctctgcttctgtctcttgatatttgatagttacatcatactttggattttccagtggttaacttttagctttaaataacat

SEQ ID NO: 439354 - DNA, 483 bp, Homo sapiens
atttaaggtgataggtgattgtgagtgtgtgtgtgtgtgtgtgtgtgtccatcctagtaaactgggctgaattccctttaactacactgggtcattcatcatgaaagacagcaacagcatcctctccacagctggcattccctgaaggactgatcaagaatgaggctgacacatcacttaagtaacattatttaggaagttcctaatagtcaatgcagaagagttacctacagaggagaatgagcttattctgtttgcagtcatcactttatgttaactgtctgccaaatacttctaagaacttgctgttcattatgttctgtgtggacagaaaggaattaagaaagtgatcagagccagatgcagtgacttatgcctrtaatcccagcactttaggaggccaaagtaggttgatcgcttgagcccaggagttcaagaccagtctgggcaacatggcgagaccccatctttaaaaaaataaaa

SEQ ID NO: 439355 - DNA, 483 bp, Homo sapiens
atttaaggtgataggtgattgtgagtgtgtgtgtgtgtgtgtgtgtgtccatcctagtaaactgggctgaattccctttaactacactgggtcattcatcatgaaagacagcaacagcatcctctccacagctggcattccctgaaggactgatcaagaatgaggctgacacatcacttaagtaacattatttaggaagttcctaatagtcaatgcagaagagttacctacagaggagaatgagcttattctgtttgcagtcatcactttatgttaactgtctgccaaatacttctaagaacttgctgttcattatgttctgtgtggacagaaaggaattaagaaagtgatcagagccagatgcagtgacttatgcctgtaatcccagcactttaggaggccaaagtrggttgatcgcttgagcccaggagttcaagaccagtctgggcaacatggcgagaccccatctttaaaaaaataaaa

SEQ ID NO: 439356 - DNA, 576 bp, Homo sapiens
tgggcatagtggtggcgcatctgtaatcacagctacttgggagaattgcttgaaccygggaggaggaggttgcagtgagcccagatcgtgccactgcattccagcctgggcgacagagtgagcctccgtctcaaaaacgaaacaaaacaaaacaaaacaaatgtattttcctttgctgattaaaatgttattttattttattttttgtagtgatggcatctcgctatgttgcccagagtggtctcaaactcctaacctcaagcgatcctcccacctcagcctcctaaagcactaggattataggcatgagccaccatgccttggtcccacctcttttattgttttaaaagataaccagttactattatttgttagtgccttctagtcttctacttctattcaaatatattttatttttatgtaattggaataaaaattgcaaacacttttaaaaaagaagaaatgcaaattctcaggccctacctcaaccttactaaattgtacactgtggaatggggcccatgaatctgtttttccaagcactccagatgattctaaagcatgctgaagttggag

SEQ ID NO: 439357 - DNA, 576 bp, Homo sapiens
tgggcatagtggtggcgcatctgtaatcacagctacttgggagaattgcttgaacctgggaggaggaggttgcagtgagcccagatcgtgccactgcattccagcctgggcgacagagtgagcctccgtctcaaaaacgaaacaaaacaaaacaaaacaaatgtattttcctttgctgattaaaatgttattttattttattttttgtagtgatggcatctcgctatgttgcccagagtggtctcaaactcctaacctcaagcgatcctcccacctcagcctcctaaagcactaggattataggcatgagccaccatgccttggycccacctcttttattgttttaaaagataaccagttactattatttgttagtgccttctagtcttctacttctattcaaatatattttatttttatgtaattggaataaaaattgcaaacacttttaaaaaagaagaaatgcaaattctcaggccctacctcaaccttactaaattgtacactgtggaatggggcccatgaatctgtttttccaagcactccagatgattctaaagcatgctgaagttggag

SEQ ID NO: 439358 - DNA, 600 bp, Homo sapiens
taatttaaagagtggctgatgtggtctcacatagctcttagcatccgcatgaactatatgattaatatgatcagtatagactggggattaatgtagagttagaggctgatttttcctgttagtctcttggctttggtctccaactggataagagttcctgttaatacaatgctgtcagtttcagttagggacaaaaattcagtcgcccatcatttggtgttatatagatcaggaaaggaggggatcatttcttaattcatctgtttgggggcttcctgtttgtttgctttttaaagtcagagtcagtcaaaaagtttgtattcaagaccagcctggccaacatggtgaaatcccatctctactaaaaatacaaaaattaaccaggcrtggtggctaattccagctacttgggaggctgtaatcccagctacttgtgaggctaaggcaggacaatcacttgaacccaggaggtggaggttgcagtgagccaagatcacaccactgcactgcactccagcctgggcaacaagagtgaaactccatctcaaaaacaaacaaacaaacaaacaaaaagtttctaaatttgtaggggaaaaaaag

SEQ ID NO: 439359 - DNA, 600 bp, Homo sapiens
taatttaaagagtggctgatgtggtctcacatagctcttagcatccgcatgaactatatgattaatatgatcagtatagactggggattaatgtagagttagaggctgatttttcctgttagtctcttggctttggtctccaactggataagagttcctgttaatacaatgctgtcagtttcagttagggacaaaaattcagtcgcccatcatttggtgttatatagatcaggaaaggaggggatcatttcttaattcatctgtttgggggcttcctgtttgtttgctttttaaagtcagagtcagtcaaaaagtttgtattcaagaccagcctggccaacatggtgaaatcccatctctactaaaaatacaaaaattaaccaggcatggtggctaattccagctacttgggaggctgtaatcccagctacttgtgaggctaaggcaggacaatcacttgaacccrggaggtggaggttgcagtgagccaagatcacaccactgcactgcactccagcctgggcaacaagagtgaaactccatctcaaaaacaaacaaacaaacaaacaaaaagtttctaaatttgtaggggaaaaaaag

SEQ ID NO: 439360 - DNA, 371 bp, Homo sapiens
ctaattccaaaccattatcaatctcttaagtagcccggctggttagactagtgtccgttgcattagtataatcctatagaaagctgtatgtgatttgaatactgaagtgacattttaaattttgcagttcaggctcttcactaattttattgttccttttccaaatcattgtttctcaaaccctcttaaattcatatctcactagctaaggagatttttatggttttcctttctgtagtaaattaggtagaataataggggggatattttggggtggtgttagtggtggtctgttttccagatatcctgtatctgaatattcagtaagctttttgaagctmcttacacatccgtaaaacttctcagattta

SEQ ID NO: 439361 - DNA, 510 bp, Homo sapiens
atgtttgtgttgtagctaactgttcaagtctggtgctgactgctgttcttagccatcacaaaacgctaaatttgtgtaattggagcttcctgctgttatctggaaatagcaggaaagcgcagctttgtatattgtttcctaaagtatattaaaataaaaaaagaaactattgctactataaaattaccttgactttttttttcctttgctgaaatattagtcacatagccttagcttcacactgccagtaatgtatcaaatcacaagggtttccgcatgaaaaaaatcttttcttcccccacaaaaaaacctttaccatcaaaatcttgccatctgatttagaaaggtgtttyttcttcttcttcttttttttctttaaattggtttagggttttttggtgattttttttttttttttttttctgttggggcagataagtgcttccaaaactggcagcaccaagggcttattttttatgttagacatcaatgtcaatgttactacattct

SEQ ID NO: 439362 - DNA, 510 bp, Homo sapiens
atgtttgtgttgtagctaactgttcaagtctggtgctgactgctgttcttagccatcacaaaacgctaaatttgtgtaattggagcttcctgctgttatctggaaatagcaggaaagcgcagctttgtatattgtttcctaaagtatattaaaataaaaaaagaaactattgctactataaaattaccttgactttttttttcctttgctgaaatattagtcacatagccttagcttcacactgccagtaatgtatcaaatcacaagggtttccgcatgaaaaaaatcttttcttcccccacaaaaaaacctttaccatcaaaatcttgccatctgatttagaaaggtgtttcttcttcttcttcttttttttytttaaattggtttagggttttttggtgattttttttttttttttttttctgttggggcagataagtgcttccaaaactggcagcaccaagggcttattttttatgttagacatcaatgtcaatgttactacattct

SEQ ID NO: 439363 - DNA, 507 bp, Homo sapiens
gtccccacacatcgggtgcgagggaggttgtgatgtgcttagtgagaagggcaggggtgactaggcttgggaaggcgcgattgtgaaagaaaaagaaaatatagcttcaaacaaaagcgccgaattcgcttggggctttttcctgtctagttcctatytagatcctcaccacatctccgcaaggtcagaattaatgtgaaaaatgcagccgagagagatcaagcgatttatctaaactcagctgttaagtggcagagacaggcagaattttaacctccaggttcaaattttttgaatcatcaccctccaggtcagatgatctggctcctaggattgatgctccccggccagagaaggcttggagtgggtgcagctaaatgatttaggggcattaaggtggcagggaaagcatttgctaaccatctacccaattcattcattcattcattcattcattcattcgttcattcattcattcaaccaaacaaacattaagcacctactatg

SEQ ID NO: 439364 - DNA, 516 bp, Homo sapiens
accacttcaggagaggatgttctgaactaagaaaggagaaagaagccctttcactcatgactttcaaggaagaatagcggggtcaggggctctgtctcttttatcttgagtcccaccaggagcccttgataaatttgggggtgggacctaaacatgagcttatcacctttttagttgattcgggggctgctcgctcctctgtttccccccatctaatgttgtctccttcttagaggaacttttagtctccagggtaaaaggkgtaggattaagagcaaaaattttagaaagcactgaagttagataccaggatcgctcagcttatattcagttcttgtttatccctgaagcaggaactaatttactggggaggaatttaatgttaaagttgggcataggtctacaagtcagcccaagaggattcctcacctcattaaacctactcaccaccgcagatgaaaaatatattaatcctcatgtcttgaccaaagaaggaaaccaagggaaactctaagt

SEQ ID NO: 439365 - DNA, 524 bp, Homo sapiens
gaaatgtgaaaggaaaataaacttgggaccctcaaatcactaagccaaaacgaaaagtcaagctgggaacggcatcgggcaaacctgcctcccattctaatgggatagctaaataagatagctacaaagattttaaaaagctacatacctccctcacaattttcccacaaggaaattccttgtgtacctagaacagacagaactcaaagtcatccctctgctcatgggagacaaatgcacatctgatggcttcctttgccctattgtttcrctaagccagactaaggcataagtgactattcctgcaagttgcatattcagtggagggctaatcagaaactcaaaagaatgtaacaatttgtcctttatctacctatgacctggaaaacccctccccacttcaggttgtctcacctttctggatggaattgatgtacatcttacgtatttgctgactgatgtctcatgtctccctaaaatgtataaaacctagctgtgccccaactaccttgggcacatgttat

SEQ ID NO: 439366 - DNA, 471 bp, Homo sapiens
atctcaaaaaaaaaaaaaaaaaagtagcaatgccatagtaagtattcttctaattaagcccttctgaatcagcttaattatttgcttagggtcaatttctaaatgcacagttgctggatcagagtacaagtccactgatacagcatttaattttttcaaagaattgtgactgggccrggcacggtggctcatgcctataatcccagcactttgggaggccaaggcgggcggatcacctgaggttgggagttggagaccagtctgaccaacatggagaaaccccgtctctactaaaaatacaaaattagctgggcatggtggtgcatgcgtgtaatcccagctacacgggaggctgaggcaggagaattgcttgaacccgggaggcagaggttgcggtgagctgagagggtgccagcttgggcaacaagagtgaaactccgtctcaaaaagaaaaaaaaaaaaaaaaaaaga

SEQ ID NO: 439367 - DNA, 447 bp, Homo sapiens
gcagtccccttccaacagcccagccccagccccaggtttcagagcagaatggcccctccccaaggcagcagggctacctgtttgtaatccttccagttccgctgaaaattcacggtgccattctcacggcgctggatgagggtccacctgcctccactgctctgcaggtcacagaacacctggagggggtgggcaaggcacagmtgggagcccttggaggtagccagaggccaggcctgtgctagcccaaatgtggctaagcagacagacccccacagagcaacaggtgagcctgggggtcctgggcatcagaaagatccaggcttaaattccccacccattgtcatcatttttctaaagtggtgggtaaggaatgacctctcagagccttcctctcatttgtaaaatggagattcataccttaacctctttgtgcctcagtctctc

SEQ ID NO: 439368 - DNA, 447 bp, Homo sapiens
gcagtccccttccaacagcccagccccagccccaggtttcagagcagaatggcccctccccaaggcagcagggctacctgtttgtaatccttccagttccgctgaaaattcacggtgccattctcacggcgctggatgagggtccacctgcctccactgctctgcaggtcacagaacacctggagggggtgggcaaggcacagctgggagcccttggaggtagccagaggccaggcctgtgctagcccaaatgtggctaagcagacagacccccacagagcaayaggtgagcctgggggtcctgggcatcagaaagatccaggcttaaattccccacccattgtcatcatttttctaaagtggtgggtaaggaatgacctctcagagccttcctctcatttgtaaaatggagattcataccttaacctctttgtgcctcagtctctc

SEQ ID NO: 439369 - DNA, 534 bp, Homo sapiens
ttgggaaaatagggcaaagtatgttctagacacagggaggctttgctggggtatctccccacgtggcaccaggcctttctgcctgtacractccagtgtgtacctcttctcttattggatccccagcagcctggaggaaaagggtgattgttccccacacaaatgagtaaactaaggcccacaaaggccgagcattactcacagctggtaaaggaagatttttaacttaatggctgagctctttctatgtgcctgtcttgccttcttggtggctgaggctgatcctgcagatggggtgacagggataagattagggtcagacaaagatggtggaagctggctcagaggtccacagtctatcagagaatgatcctcagtgaggacaggacagaaaagtggccacatctcttcccagtctccatggtcctccacggagaacagggtcaggaccagggacatctgtctggctcctggtgagcactccagtctcatcttggccatgctctcctcgctctctgcactgtagacacactg

SEQ ID NO: 439370 - DNA, 618 bp, Homo sapiens
tgtacagcaaggtgtgtttgaccccccagtccctcttcccatcatggccagaaccagttgttcaggatttttwaaaaattattatttccttttgccaagagagaggtccattctgttgggtggcttaggatatttgtttatttattagtttagtttatggtatcccattttgtcgaggtgccagaggcagtattgaaggctaagcttttattgtgtcccatatcaatgctggggtggtgtcctacttgccctggtccattacctcccttggtggaacacttatggtcaaggaacttagagtcaaaagacttatagccaatcaaatgttctaggccagatgggaatggaggtgagcaggcactcattaaccttaaagcctctttaagcaacataagagccaaaaatcaaaagccagaaggcaaggtataaaattggcttatttataaattctatgcaagagctactataatcttggtttgtggcaattagctatacaaactcaagaattatgtttagctatttagggatctgtgtgcctgtccttgatttggagtgtcagaattaattttattcctcaaaactggcccttacaatctcatgtgatagtccctgggcatg

SEQ ID NO: 439371 - DNA, 618 bp, Homo sapiens
tgtacagcaaggtgtgtttgaccccccagtccctcttcccatcatggccagaaccagttgttcaggatttttaaaaaattattatttccttttgccaagagagaggtccattctgttgggtggcttaggatatttgtttatttattagtttagtttatggtatcccattttgtcgaggtgccagaggcagtattgaaggctaagcttttattgtgtcccatatcaatgctggggtggtgtcctacttgccctggtccattacctcccttggtggaacacttatggtcaaggaacttagagtcaaaagacttatagccaatcaaatgttctaggccagatgggamtggaggtgagcaggcactcattaaccttaaagcctctttaagcaacataagagccaaaaatcaaaagccagaaggcaaggtataaaattggcttatttataaattctatgcaagagctactataatcttggtttgtggcaattagctatacaaactcaagaattatgtttagctatttagggatctgtgtgcctgtccttgatttggagtgtcagaattaattttattcctcaaaactggcccttacaatctcatgtgatagtccctgggcatg

SEQ ID NO: 439372 - DNA, 618 bp, Homo sapiens
tgtacagcaaggtgtgtttgaccccccagtccctcttcccatcatggccagaaccagttgttcaggatttttaaaaaattattatttccttttgccaagagagaggtccattctgttgggtggcttaggatatttgtttatttattagtttagtttatggtatcccattttgtcgaggtgccagaggcagtattgaaggctaagcttttattgtgtcccatatcaatgctggggtggtgtcctacttgccctggtccattacctcccttggtggaacacttatggtcaaggaacttagagtcaaaagacttatagccaatcaaatgttctaggccagatgggaatggaggtgagcaggcactcattaaccttaaagcctctttaagcaacataagagccaaaaatcaaaagccagaaggcaaggtataaaattggcttatttataaattctatgcaagagctactataatcttggyttgtggcaattagctatacaaactcaagaattatgtttagctatttagggatctgtgtgcctgtccttgatttggagtgtcagaattaattttattcctcaaaactggcccttacaatctcatgtgatagtccctgggcatg

SEQ ID NO: 439373 - DNA, 517 bp, Homo sapiens
cctcaactcttagttgagaaatctccaaactgctctccacagtggctggactaatttacattcctsccacagtgtataagtttttcctttcctctgcagcctcagcaacatcttttattttttgactttttaacaaagccgttctgatgggtgtgagatagtatttcattgtggttttgatttgcatttatgtgatgattagtgatgacgagcattttttcatgtttgttagctacatgtatgtcttcttttgagaagtttctgcccatgtcctttgcccacttttctatggagttgttttttttttttttttggtttttggtttttggttttttttttttttttttgcttgttgatttgctgaagttccttatagattctggatattagacctttgtcagatgtgtggtttgtgaatattttctcccactctgtgtgttgtctgttactcccttgatggtttctcatgctgtgcagaagctctttaattatgtcccatttgtcaacttttagtttt

SEQ ID NO: 439374 - DNA, 517 bp, Homo sapiens
cctcaactcttagttgagaaatctccaaactgctctccacagtggctggactaatttacattcctgccacagtgtataagtttttcctttcctctgcagcctcagcaacatcttttattttttgactttttaacaaagccgttctgaygggtgtgagatagtatttcattgtggttttgatttgcatttatgtgatgattagtgatgacgagcattttttcatgtttgttagctacatgtatgtcttcttttgagaagtttctgcccatgtcctttgcccacttttctatggagttgttttttttttttttttggtttttggtttttggttttttttttttttttttgcttgttgatttgctgaagttccttatagattctggatattagacctttgtcagatgtgtggtttgtgaatattttctcccactctgtgtgttgtctgttactcccttgatggtttctcatgctgtgcagaagctctttaattatgtcccatttgtcaacttttagtttt

SEQ ID NO: 439375 - DNA, 528 bp, Homo sapiens
acagatgaatgaaatctgattttaatgttaaaacaaataaatagctaagtaaacaytggtcttcaactccatcctctggttccaaaaattacctaggactcaggaaatttgaggaatttattcattgaagtactcaaatgttatatgtgggatttgttatatgtgggatttaaacagaaatatgtcattgctgccatttgaatgaatgtcacaaaaaggtttaggcaaaactatccacattttgatagcctacttagcatcgcatggggtcataaacttgccacaaagaaaatctgactaggctgatgagtgctgtttggtgtataggttcagagtcttcctcaactaaggaacaggaataattgatcccatagccctttcagctctatgagtttctcatagtttgtgtctataatagtaatcatgaaaaacactaagtatatcaggaatgggttaaatatccaaaactattttatctgtattagaagaacagaaatgactcttcaaaaataagccaatgactaggct

SEQ ID NO: 439376 - DNA, 528 bp, Homo sapiens
acagatgaatgaaatctgattttaatgttaaaacaaataaatagctaagtaaacactggtcttcaactccatcctctggttccaaaaattacctaggactcaggaaatttgaggaatttattcattgaagtactcaaatgttatatgtgggatttgttatatgtgggatttaaacagaaatatgtcattgctgccatttgaatgaatgtcacaaaaaggtttaggcaaaactatccacattttgatagcctacttagcatcgcatggggtcataaacttgccacaaagaaaatctgactaggctgatgagtgctgtttggtgtataggttcagagtcttcctcaactaaggaacaggaataattgatcccatagccctttcagctctatgagtttctcatagtttgtgtctataatagtaatcatgaaaaacactaagtatatcaggartgggttaaatatccaaaactattttatctgtattagaagaacagaaatgactcttcaaaaataagccaatgactaggct

SEQ ID NO: 439377 - DNA, 282 bp, Homo sapiens
ctttctgctgtttgaactgtggtctcggtggttagaagcaacaggtagggtccttcccaagccagttcgagtttcccttccctccaacttttgacaaggacacagtccttaagctgatgttggtgtactggaaactgtaggggtggtacctgttctaaaagacctttagttctgagggaagagaaagtggaaaataaaccaagtatataatttctgagaaactcatcttttgttttgaacrtaggaatgtcagcagtggagtgtaaacagggcaacctacac

SEQ ID NO: 439378 - DNA, 613 bp, Homo sapiens
tggtgtttatgtctttaacatgaaaacattttacactttttgctaataaactcaaacacaaggtccaaatcttagaaatatcttaatggaagatcaaaacacaactgaatccctacttaaaacactattttatacagctatatcatggtgaggttcagaaagttgcatttctggatattaataatcagttggataacttcttttaagcagacatcacatttatcagctagtgcagatgtgtcctacttgaatccatatgtgtttatgtatttatatatatgactaggtaaagtttcatataggaatttaaacatacacacttagaggaaaggaaatatctcatttgtctttgtattctatgtaacacctaccactgtctccagcatgtagtaaggaattaaatgaatgtttgttgagttaaatgggaagttcagggaaaataactaagttgattttcatatgaaaatagtcgcagggaattaactcgagaakctcagattaactttctattaaagtgaaggttacttatacttgctccttgaaaagaagataatattctaagatttaacagtcaacattaggtgaaatgcattaaatttcaaaagtaagtgct

SEQ ID NO: 439379 - DNA, 541 bp, Homo sapiens
aaaacatttgacttctgttaacacctgataaaagtgtactctgttgtcattcctcatttactagtcattttctttactcctgtgatatttggctatctaacttttacccaatttttaaagattagaagaaaaaatacaacatagcactcgaattggtcaaatctgctataacctgtcttttgcaagtaaacccacctacatggtaactagcagcttttgaaacatctgcaccctaaaggtttgtggctgtaaatttaagccattctagcttttgagaaatgcaaataataaaarctcatcaaaaggctccataattctcacatctgactagatggaagcatttctgactactccaaattaatagcagctcccaaggccttataagaagagctgtcactgagaaatatactcacaaacaaataagcaattctcttccaagtttgatttgttaaaggcataaagcagcaactcttcaggacaacctagctggattatgaagggagtgatgagctacctttagactcctgatagggtaacttaa

SEQ ID NO: 439380 - DNA, 640 bp, Homo sapiens
gagttggcagaaaattgcccaggagtagcttttgtgactttctaggttgctttggagcccaagtgacaaagtatggctgaaaattggcaatggggcctcttccacactcagtcttcagcrgcattggagttgccaaatcctgaaagctgttaaatcattcctctttgacagggaccttgaaatgagagtgtgagggaagggcaaaggcagggatggagaacctccaggcagcagaggaacaacagtggtgatgattgatcatgtgatgacagcagaaaccaatatgtgagtacatgtgagagatcaattgtggacctcccagaaatactatcctaggggtgacttgatgattgttgggctttgaaatcatcaagaggtgtcttcattcacatgttgggatattggtgttgacttttatctgggaccttctctttcatacttcctgtgtgcttgacagtaagctgagcatccaaaagtggcttctccactggcctgggcttcctcacaacatggcagccttagggtatccaaaccttcttggtgacagcactcctaaagcaagtgctccaactctcaagttggaaactgcattgtcttcatgacccagcctcagaaggcacacagcatcacttctaccaca

SEQ ID NO: 439381 - DNA, 640 bp, Homo sapiens
gagttggcagaaaattgcccaggagtagcttttgtgactttctaggttgctttggagcccaagtgacaaagtatggctgaaaattggcaatggggcctcttccacactcagtcttcagcggcattggagttgccaaatcctgaaagctgttaaatcattcctctttgacagggaccttgaaatgagagtgtgagggaagggcaaaggcagggatggagaacctccaggcagcagaggaacaacagtggtgatgattgatcatgtgatgacagcagaaaccaatatgtgagtacatgtgagagatcaattgtggacctcccagaaatactatcctaggggtgacttgatgattgttgggctttgaaatcatcaagaggtgtcttcattcacatgttgggatattggtrttgacttttatctgggaccttctctttcatacttcctgtgtgcttgacagtaagctgagcatccaaaagtggcttctccactggcctgggcttcctcacaacatggcagccttagggtatccaaaccttcttggtgacagcactcctaaagcaagtgctccaactctcaagttggaaactgcattgtcttcatgacccagcctcagaaggcacacagcatcacttctaccaca

SEQ ID NO: 439382 - DNA, 577 bp, Homo sapiens
aattctgtcaacaaccagtgagcttggaagagaaccctgagcctgagacaagaatcatggccctggccaacacctggacttcagcccartaaaacttggagcagagaaatcagccaacacatacccagactcttgaaccatggaaactgagaaaatgaatttatgttgtttgaagtcactaagtttgtggtaatttgttaaattgcaatggaaaccattacctctgggcagtatcagtggaaaaaagtggtcaaatatatatatggcagaagtaggccacaggccaagtatactgctactttagcaggagtgaatttttcattttatgttctccacatttatcctcccatgtcttcgttttgtttagttttttttatagatacgtaatattttacatacttatggggcacatgtgagagtttttaacacacatagagtgtgtcctaatcaagtcagggtgttattgtattcatcaccttgagtattgatcatttctatgtgttggtaccatttatttatttattcatttatttatttattttgagacagagtctcgggctggagtgcagtggtgcaa

SEQ ID NO: 439383 - DNA, 582 bp, Homo sapiens
ggcatagccattggtagcagaactttaatctcctcgaggtgcaagtggaagttagcctgtcatgacaatgatcaggacgcttttggccacgctgctgttgtggtttgtgctgctgctcttttgattgtgttagaggggatgagtcatccctctcatgccctgtggtcacctggttgtgatgatcctggtgggatcctggtggctcctggtgctccttggggttgagaaggataactcttccccctaagcatattgtttcttgtttagctttatttatttatttatttatttatttatttatttattttttgaratggagtctcgctctgtctcccaggctggagtgcagtggtgcgatctctgctcactgcaagctccacctcctgggttcacgcaattctcctgcctgagcctccccagcagctgggactacaggcgcatgctgccacacccggctaatttttttgtatttttagtagagatgggatttcaccatgttagccaggatggtctcgatctcctgacctcgtgatccacccgcctcagcctcccaaagtgctgggattacaggcgtgagccgcc

SEQ ID NO: 439384 - DNA, 588 bp, Homo sapiens
ccctctgggactaatcctccacgttaaaagattgcgcctttctccaaagccaccctttatacacatcagttcacaagagctgcatcttctcacaatgcccgacagcccccttggccacactactccaggccctcattttctgggctgccatcatccctgaaattaatctaagagaggccccttttacaagagtggcagcaaatatccgattcaatttgctttcacccaagatttcccaggagtcatgccgaatgagataatcaatgatgattatagggtttggcctgccttactgagccaaagtgttaaaaagggggggaatttctgctccggtgcttacccaagtcaggtgctaattcgggcagatccattacttttctcagcagctytaaaccatatgtgctgcaataatcacgctggataggtagaggcgatcagtcctcccacctaagcaaagaaaatgcatttttgcttctccaccccaaaacaacaacaacaacaaaaatgtatagagcatctgcagcaaaaatgagtaggctgttcaaaccaatgatgccgaagagatttaatttagacaggctaaactgt

SEQ ID NO: 439385 - DNA, 594 bp, Homo sapiens
ctataactgagtgagatctttgaagatcttgggaggggtaaatttattttgtatctgggaagactactagtaattgtagtcaaatggaaaactgtggtaggttaaatatggccacagagctttgcagctagctcctcccctcagaaggttgaatctattcygacctttgggtttgggctgggtttgtgactcaatttgcccagtggaatgtagaagaagcaaaactatctgtgtccaaggtctagtcctcaaaggggccttgcagcttcctccatcatcccctttgagcctgttataacctcactgtaagaaagctggtctatttggagactagaatccacatgaaggagcatcagggtgtcctccctaaaagcaccaactggactcagcaaaaacagctgaattccactgcaaacaactctttgacttaaacaagattattctgagaaatcacaaaacaaaagccctttttaaaatcagggcttcctgagagtccaggggaattggaattgtgtgattccagtggcaactggcagataggttgaggaaggccatcttggaccttgcagccttgctgactctccagctggatgc

SEQ ID NO: 439386 - DNA, 514 bp, Homo sapiens
gggctgccatgcagttacaacagcagactcaactcaccccacaaggagctctagagctcasacagctcttgcgggttaccctgaactgaaccaaggggccagcgcttggtaccttctgcagtgatcagtcattggatgcggtctgcccattggtaagcgtcctaacctttagttaggaggctctcttcagccgagggcaattcttaggagagggactcaactgaggaccatcactagacagcattcctagcacttagggaaaggagtgcctcgtcctgaaggggagatctgggaggagctcctgaatgaagagggtcctagtagggggcagtgtagtgagggagtcaaagtaacattcccaaatgtgaggcttcaaactctatttacctggtaccagcagccagtgcagcctgaacactctgacctcgggagaggaactatgagctagttccatgccagctcctgaatctctcacatgggattctaagagtatcggagggtgagaataaagagt

SEQ ID NO: 439387 - DNA, 474 bp, Homo sapiens
aaaaaaaaaaaaaaaaaaaaaaaaaactggggaacttaaatgctggttgttggggtttcggttcaagaaaattctattcagatttgggttacagaaactacattaatagccaagaaaagagggacatggacctcacactaaatcagttcaaggacaggaaaaaaagcagttgtttaaatgggaacactcaggggccaacaagagtgtgtttcttaaagtgtgtcaggggaaaatcaattcccaaaaagtggtaggaaattaaragaaagtcttttaaaaaactgtaatcagagaattagtctaaggcttcttattaaagaagtcttctttttaaaggagaatcacacagaaatccagaaaatttggtacaaagaaggtgggggattctgaaacaaagaacaatgagataaatatagtaggacatgaccagttctgcacaaacagcttttcagagggagagatgtgaggaacaaa

SEQ ID NO: 439388 - DNA, 371 bp, Homo sapiens
ggagttcttcattaaggtaaaaactgaatttttccacttttttttttttttacattttatgcattgcaaatgactcagtcatttacaaaaatggtatgtggcatttccraaagagatttatcaccagattttggggagacaagatgttctaataaggatctcagtcggaaatacagaaaatacagattcatccagggctttgaaataatatgtttaaatcaacaatactgaggctttctgtcaattgtaaggtcctcatttttgggatggcagcattacatgtgagaaacataaacacagacacacacacacacagtctaggaaaacttttcatgaacataagtaaatcatcaagaagtgtgaaaaacaat

SEQ ID NO: 439389 - DNA, 615 bp, Homo sapiens
gcattccttcctaagagacaatggaccatggagtggctctggctagtctatagaagatgyaccatgagagttgtgtcctctgcttcaccttttgacccaagagggccaaaaactccaccccagaatcatgctaataccatttttttgtacatgtaacccatcaagagtcatgaagcttaattgcacatgtacatctttcataaatattcatgactcctcctatagtttactgtgtatttggccactccactcagcataaattcctgtcttatttttcccaacctggaagtgtgtttctggtttctggctggaggctacactttccagactgtagcaatggctaccctgccagtggccacgctttatgaaaaataaagctctcctttccaaattcatgaactttctcattcttcagttgacaccttctatgatgttaattctcaagttgcgctgtcccgtgtgtctcagttgtaaacacaagaggtataaacacagagtcttagtgtaaactgagagtgtaaacacagaggtgactgaatttcactcagggataaatggagacatccgtactcggtgacatgcatcacccagaggcacccattgtagtaaagtgac

SEQ ID NO: 439390 - DNA, 565 bp, Homo sapiens
aggatttcaaagtgagatctttttgttaaaatttctgtcaaatagagkgtagaatggttaccagaggccgggaagggtagtcaggggctgggagtaggtggggatggttaatgggtacaaaacaaaaaatagttaaaaagactgaataagacctactattcgatagcacaatagggtgactgtagtcaataataattgtacattttaaagtaacttagactgtaattggatgatttgtaactcaaaggatgcttgaggggatggttacctcctctgtggtgtgtttatttcacatggcatgcctgtttcaaaacatctcatgtaacctataaatatgtacacctactatgtactcacaaaaattttaaaaattgtatttcagagaaaaaattctgtcaagtgactacagtaattttgcctcagtgttttaagctgggcactaccatagcttacccataggaactgaattggcaaaacatataccaacctattaatagctatgaacgtgtgttgtatgattgacttgtttcttctttacgcttttcccataattctttgtatagtt

SEQ ID NO: 439391 - DNA, 605 bp, Homo sapiens
gcaaaagccacaggcatgaatttgtaaatgctgctggctttcagcaggctgaagccatcctctcttgtgactgatgggggttcagagctcctcaggccttactcttcttttgtaaaatccagcccagagccatctcctagtagtgtaagaatttctcagactaggtccccaggcaaatcccaggttggagaagaggattgctttcctcatcatctctsgctgaaaaccatcagtgtattttcattaaatctggtttttggtctaccgtacagagattacagccagtatttcccctctcttcaataggcacaagcccctgggatatccgaatcatagtcagaagcccatgtttttacagatgaggaaactgagacccagttttagagtgttaggttcaaagcaaaattgagcagaaggtacaggtttcccatatacctcctgtccccgcctatgcacagactcccccattgtcagcatcccccactgcagtggtacatttgttccaactgatgaaccgacactggcacatcattatgacccaaagttcacagtttgccctggggtttgctcctgttgtacattctatggctttggacaaatgtaaa

SEQ ID NO: 439392 - DNA, 620 bp, Homo sapiens
ctccgacctcttggaagcagcaaaaggcaaggcctgagtccgtcaggagcccgactgagctggaaggtcactgccatcatgacccacgtgccccccaaccatgccaacttgctgaccctagcctggcgcttggctcatcaccttcatgtggggctcagaggcccaggaagacccctggcccacaggcggggcattccttgctacgagtgttttccggtttgggggaggagggtctaggaaatgctgctggccacactgacagtcggcccctgaatggattgccgggcccagcggcagcttgaggagggaaggagctcagatgggaagggcgacctcgctagagagggggctccagggcagcaaacgtgtccaagggtgtctgtgtgtctgcctcccacctttgattgtttgggggtgtgtcctttcctctggggcatctgtctgtctgtctgtctccggtgtgtgactgtctggggtctaaatccgttgagtctttccctgtgtctccatctgtatgagtctctkcctctttctttttcaggcaacgtgaaaaacagattccaagaaggaagttctaagcctcccagacatcagccgcctctccctgtccccgccccaca

SEQ ID NO: 439393 - DNA, 549 bp, Homo sapiens
cagtctctgggctggtctaggagggcgaaggtgtccaggctatagcagccccagggacaggcaccactggcaccgctcctctcccctgagctgatgccagctcctactccccaaaactcctttcctgcttcctcagggatggggtagggagaacgttttcccccgaagaaaatcattactctgctgttgagggttacacaggttgcagcagaggtgggaataggacaggggaggcaggaccctcaccctcactctcacccctctcrgaggaagaagctgcgagctaaggctgggtgcaccatctcccggtccagactgtccatttcatgctcacagaggagctcagacccacctcactggtgcccgcagccctcgttccaaagccacccccgctgtgtggtcttgaacaactacctccatctgcagagaggggaaacagaaccctgggtgtgcctgggacgggctgcttcctgaaacctccccctgggcagaactcctactcacactgcaggcctcattctcacatctccttccccgacgagcctccca

SEQ ID NO: 439394 - DNA, 642 bp, Homo sapiens
ttggcttcttctaatcttcggtattaacagtctccaaaaaggcaggaaccatgggacagacacattagaaaaaggctgggggcggagagtgctttgtaaatattaacccagctgtggaggccacatgtatctttgagttatgacctgataaggcttttgagagcttttgccaacttcatgttcaagaaaaacacagaaaaaatttagctgatgatatccttgatgcaattttcctttaagcacagcctcataaataccaactatagagtccaactgaacttattggaaatttcccaaaaaccttggaaaatagacaagtgcaggtggtaagatatttactgaaatgaactgtctgtgaatgaaaaatatatgagcaaaatagatattttatctgtcattttattcacagaaagagatccattaagtttctccatttcattctgctcctgtttggtgaaagcactttaaactagatcttcattttccttttaaaaaatcagtatggaaaayaggggacttgacaccccctccccctccactcagctgccacgaaaacgaaaaaagaaaagtaaatttttttaaagcctcggaagaaacttctgaaaatacacaacatgacttgttactgaatctcaatcttat

SEQ ID NO: 439395 - DNA, 642 bp, Homo sapiens
ttggcttcttctaatcttcggtattaacagtctccaaaaaggcaggaaccatgggacagacacattagaaaaaggctgggggcggagagtgctttgtaaatattaacccagctgtggaggccacatgtatctttgagttatgacctgataaggcttttgagagcttttgccaacttcatgttcaagaaaaacacagaaaaaatttagctgatgatatccttgatgcaattttcctttaagcacagcctcataaataccaactatagagtccaactgaacttattggaaatttcccaaaaaccttggaaaatagacaagtgcaggtggtaagatatttactgaaatgaactgtctgtgaatgaaaaatatatgagcaaaatagatattttatctgtcattttattcacagaaagagatccattaagtttctccatttcattctgctcctgtttggtgaaagcactttaaactagatcttcattttccttttaaaaaatcagtatggaaaacaggggacttgacaccccctccccctccactcwgctgccacgaaaacgaaaaaagaaaagtaaatttttttaaagcctcggaagaaacttctgaaaatacacaacatgacttgttactgaatctcaatcttat

SEQ ID NO: 439396 - DNA, 533 bp, Homo sapiens
tcctactacacttgtagcatatttccccttggcatctcaagtacttagttcaatatcattccattttccttaagatgtgaaacacatttgagaaggcagacatactgcaacatcattggggaatattttagttgcaagtaacagaatatttgacctagagtagcttaaaagacagttgtttatgtttttgttttaaatcatcatccttaacaaaaactctgcagatatgtgttgttgggttggtttagagaagggttcagcaaaccatggccagtggatcaaatctacactgcagcctgtgtctctctttttttttctacagcccccaaattaagaaagattgctaaagcaacagcagcaatagagaccatgggcggcccacaaagcctaaaatgtttaatacstggctgctcacaacacaagctttttggcctctagtttggagattcaaccctgtcttccaggactcagcctccatcttgctgctgtcctggggctactggcgtcatcttccctcatagatagctgcccca

SEQ ID NO: 439397 - DNA, 568 bp, Homo sapiens
aactctcagtctattcattttgatgtttgttttcttccatcaaacttccatcacctccctccagtaactcaactgtcycagggtagtgaatggcagttacttgtatgcagtgacaaaagggaaaataccttacactgtctttcttttaccactgagtccatgacatacctccctctcctctgatgcctcagcctcccactgagactcaccagtggccttggtatgttcaatcaccaaggctctgggataccacctcctgccacaccatctccggccatgccacttccagcagagggccaaacctgctgcagatgcctctgtcatccattgccctgtccaaattccaacttggaagagccaccctagggagagccaccatcctccccgcttgcctgcctcctcactggtctcctgcttctgctcttggctccctacaggccaatttcggctcagcgaaaggatccttttaaaatatcatgtcaccttgagctcaaaaccactgcagtttctcaaagtcttaatttaccataagatctagcaatttcactgctggggatctacctgtttt

SEQ ID NO: 439398 - DNA, 523 bp, Homo sapiens
atcttaaaagcaacaccttctaataatgcaattttttgcaaatatagtaaaatgcataaaaattcatactcattagatccaggagtaaccaatgtgaatatcttgttacacagttttccagtttccctcgtgtatatgtacatagaactatatgtcctgcaaaaatgggctcagataatacctaatgttttgtgttctgcaattttcgtttcttatatcacaagcttctttctatgtcaaaaagtagacatttacataatcatttaayggaggcttaatcttccatggtaatattagttaatcaatccactattactgaatgtttaggactctgaatttttttctttttgcaaataataaaacatgaacatctttgcacatatacctttatgtacttgctttcttctgatatatttctcaaggtgttttttagtaagatgagaaatttgtatacatattactaaattattattttgttaagttgtaccaataattatctaaagtcaaagctaaaaagatgcaa

SEQ ID NO: 439399 - DNA, 523 bp, Homo sapiens
atcttaaaagcaacaccttctaataatgcaattttttgcaaatatagtaaaatgcataaaaattcatactcattagatccaggagtaaccaatgtgaatatcttgttacacagttttccagtttccctcgtgtatatgtacatagaactatatgtcctgcaaaaatgggctcagataatacctaatgttttgtgttctgcaattttcgtttcttatatcacaagcttctttctatgtcaaaaagtagacatttacataatcatttaatggaggcttaatcttccatggtaatattagttaatcaatccactattactgaatgtttaggactctgaatttttttctktttgcaaataataaaacatgaacatctttgcacatatacctttatgtacttgctttcttctgatatatttctcaaggtgttttttagtaagatgagaaatttgtatacatattactaaattattattttgttaagttgtaccaataattatctaaagtcaaagctaaaaagatgcaa

SEQ ID NO: 439400 - DNA, 650 bp, Homo sapiens
ttccctgcctctttctgtcttcactagtcagtaactgctattgttgaagcaggttattttgctcagggaacttacagatgagggcaggcattggaaactgtggcccatgggccaatcagacccaccatcaatttttgttaggcccataagctaagaatagtgtttttattttaaaatggttgaaaaaaatcgaaagaagagtaatatgttgtgatacacacaattatatagattttaataagtttcacttaaacacagtcactctatttctttacatattgtctgtggtgctttcaccctgcaacagcagagttgagaagctaggacagataatgtctatattgctcacaaggtaagaaatatttaccatctgatccctttgtagaaaaagtgtgtggactcctgggctagtgacaataatgtttctagctttcactggagaccaggagctgtcccaggagaacatcatagcagcagttaagagtgtgatagtcaacaggtctcctgggttcaaattccaggttagtgacttactaactgtgrgaccttagactcattgttaaaagtcttttgctaaaacatcctcaactgcagaaaggaaagaataatacatactattgacaaccaatattatcaccaggatcaagtaa

SEQ ID NO: 439401 - DNA, 602 bp, Homo sapiens
cacaaatctctttcataaacttgaggcagatcttgctgtatctaaataaagctctctctgagcataatttaagctcattctttcttttaaaaagtaaaagcattaaagtgaatatctcttaggtgggcagtgagcacctcacctctactgggcagagttgggggtatagagatggaccaagctcttcagccatgctccttgcatccctgtgtctgatcatttagtttgtccggcttgaacactacgtccccagggatggtttccccaaacatcctgtctgcaggggaccttgcctctatttcccaaaacagcccagtgtatgtctttcagagcactaaaaatatagattatttctttgtttaatccattgatttgtttacagtctatgcccacccccattgtratataagctccacaaaggaaaggtcttgtctatctcattcatcaatgtcccaacacttgtacagcattggtgtgaataaatacttgtctcgactctcaaattacccacaattttgttcctcattaagactgacccctactccctctcaactattatctctcccttcattctactaaattcttgtcattttcttgacaca

SEQ ID NO: 439402 - DNA, 527 bp, Homo sapiens
tctatttagtgttgctgtaaaagagtacctgaggatgggtaattcatttatttatttatttttaaatttaattttcttttaagttccaggtaatctattcataagggatcgtctcccgtgacccaagcacctcccattaggcctgtcctccaacactggaggtcagatttcaacgagagattttgtggggacaagcatccaaactgtagcacttggcagcaagtcccaagtccttttccccagctcctcctttgccatccacttctccatctggaggtgctgattcctctgcttggctggctggggactcytaggaccctccaacctcacttttagacgtgccttttctcagctcctcttgtaagtgtgcaagcttcgattcctataataaatcccttgtctataagtcatagtagttctgcctccttaattgaaccctggctgactcacatctttcgtttgaaaatcagggggagacatgatttttttatagctagttttccttaacttcctttaaatacatacac

SEQ ID NO: 439403 - DNA, 591 bp, Homo sapiens
cacaataccttttgactcttctcttgccttccactttgccttctccttgccttctggtaataggtaaatctgaaattctgaaatacaatttaactttctcaattaggaattctatcaactctcagggaaggtgattgccatgctacatattacacgatgcagttgtgctgagaactggatattccaattttgctccagtcagtgaaccacagaaatcagtttctgcaagtccaatattattgactccaaatagatgatcattgtagtagtcatctcattgcagtatcagtgatacatttagcatttaggaaagtattatawtttagaaaagagcaatgctgaataaaaaccagctcagtaacacaaatagttgactcatcactgaactgtttttaaaaaatagttgaaaataacttacttttgtcaatatatttgattaacatttcagacatttaatatgattcctattatggctctgaaatatgtcttgtgagcattactttgtgtaaatatgttttcagaaagccatctctaagaaaattaagtgaaccacattttacaaagcttgcttaattaaaaatgtgtattcta

SEQ ID NO: 439404 - DNA, 473 bp, Homo sapiens
ttccaggaaattacaaattgccccacatcagacattattcaggtcaaatgyctatctatgcatattatatctgagaactaaaaaggtttaatttattccctttgtgtctgtgtctcctacaatcctacatctaaagtgaattccccaagaaacaggagtaacttttccctcagatccccaacctatcacaacacctagcacactgtatatgttaattcatcattcttggataaatgtaagaaaagagatacagatggccaaatggatgaaaaaatacaagaccaagtggaggaacaaatacaagaaggaataaatgaataattaaatagttctttagcctataaatagcagtactactaatttctgcttgagcttcaacaacattaaaatatcagtgttcttacaaacatatatgcaggacacaattgttcaacaaaagaacttggcttgcagctataccctgcacagtaaaa

SEQ ID NO: 439405 - DNA, 495 bp, Homo sapiens
tttccaactgatgtaataacttaattgatgagaacaaagacaagcttatttattcacccaattgcttgcttcttgactaacgtttttcctgggtgttattgtggaaataaatatgcaatattctttttatagaagtctaatttaggtcctttttttcccctattgagaagtcagcatcaccatctgtatctgacaarttcttgctgctttgcaacggaagcatttcgataagatgggaggtggtgtttaccctgatattcagactggctagccgatgtgagaggggaagcattggtctcctagccccctgggtagtgcatgatgagtgttccctgatttccctcacaaggctgaaaatgccatctaatggaacacacacacaacacacacacacacgcacacccctctcatctaatgcgttaaattaattccaccaaagttgagctgattttgtgtgtctcatgaaatggcacggacacactcatctccagcttg

SEQ ID NO: 439406 - DNA, 383 bp, Homo sapiens
agagaatcttgtctattatcaatgaattatacattgctgcaaaaaaaatcatgcattaaaaaaagatttggacttttatgtatggcagtagttcattaatcgcatgaattataattcactgatttcccaagtgatataataacttgattggtgagactaaaggtgagctttttttttaacctttcacctattaataacataagtttttttccatagttatgggagaaattaatgtgtactcttgtttattatttaaattctgagaatggggattttggggttttatatcccacaaatatamcgaagaaggagtttgaagagagtgttcaaaaagttagtgacaaccaagtcatgaaataatggaaatgagaggtcatttggtt

SEQ ID NO: 439407 - DNA, 596 bp, Homo sapiens
ctttgctacacccttcaatcataggtagaggctaagtgcctatcaagattagccttaggcttgattatgtgacttactttgaccagtggaacattactctctgttggaataaactatgcaagctgaggcttgacaatcactagcccattggtgcttgccctgttggaacctgcctgttggaactctgcataaagattccgttgctgcaaggaagatggtttggctcatgtgagagatggcttgcagtagaatcaaggtgatctaactaataggcagcagcaacttccgggmttatgagtgaggccactttgaacattacagcacacacctgctcatctagttgaatgcagttgtatgaatgagcccaaataaaaccaccagagaaactatgcagccaactcactgaattgtgaaaatgttacactattattgttttaagccactacatattatgggtggttcattattcaggagtattggaagacccaatgagacaataaaagtagtctccagtgcattttcaattcataatagaaactcagttcttctcagttccctgtcattattctggctctgaacttggctggtgaaatttc

SEQ ID NO: 439408 - DNA, 561 bp, Homo sapiens
acaggtgtgactcccgaaagacataaagtcctcagagataagtaggttcattcaatgataaatgtgcttcaccctctgagcatctgctggaccacctgtgggtgacatttccttgagtccaagtttggcagaatgaagaatatcagtgccctccatgcccactccaccaccccaccatatcaatgtcccaggcttgctaaggattaggtggtactgcattgggaaaatcaggacatctttcttgcaatgataattttaaaggcaaattgtttcatctacagaatctgataatgataaaatatgacttgaacccctggagagatttctaggccaaatcaacttccactgacagtcaactatagctctcaatctatttgcagactcagttcaatacatgcagttatactgaaaagctcacttacaacttagggaagtcttatcaggggcaaggatgctattatgggtcccaaatttcaatttagacactytgacatttttgctagaattgtatgaaaattttcacttactgcatacatgtaaatgggcaagaagacaagagct

SEQ ID NO: 439409 - DNA, 520 bp, Homo sapiens
ataattgagagttgcccttatagtggattgttagaggctgaagcatttattcaaatgctatttattcaaataaaatgtatagttgcctctactcccatgctgcttttaatctagatactgagtagaaaaacaaataaaacaaaccctgcaccacacagtgtatgaaatgcacagggcgccacagcagggcataagggaagaatggttagagtaatcagggcaggcctcactgaggatgggacattgaagttgaagatagtgaagagatagttagrtcagcggttctcagctgagggtgattttacccactacaggacccttggcaatgtctggagacactttgcgttgtcacactgaaaggtaagggaggtgcctctggcatctagtgagtacagcccagggatgctgttaaacatcctacaatatagaggacagcttccaccacagaaatgacccaggcccaaatatcgatagtgccacagttgggagactctgatgtaggctaagagctgggaggagt

SEQ ID NO: 439410 - DNA, 481 bp, Homo sapiens
tccacactatacaggaggagactacacacgctgttgaacgccagagggagagggtcttgggggcgtcttagaatcctgcctgagactgagaaactacccaggtttgtcagtgtagaagtcaaagagagtatccatgtgtttctgactcaaatttctaccagaagtcctgccattcattgtcaacattcctaaagaggttagccatgcccttggttttgcacaatgtcgtttaatcaagggtctattmgatgtaaaatattcattagtttattcaagaagtatttagtgagggttttctgtatgctaagaactggataggagagattctgacatgaggcagaatggaaacctggagccggatggccagagtttgaagtgtgcctctgccaaaagttagggatgtgacctcctgcaactcacctaacctcagtttttttatctttaaaatgggtatgctagcagtgggacttagttcagagag

SEQ ID NO: 439411 - DNA, 433 bp, Homo sapiens
gtaattctatagatgtattgtttacttctggatgtccatgttgctgaaaactaaagtagaaaatagagtaaaacactatgtgttcagggagtatcttagttcattctggctgccgtaaggaaataccmgagactgggtggcctataaacaacagaaatttgtttctcatagctttaggggctgggaagtctaagaccaaggctgatgcagtgtctgaggcgagcctgctttctccttaacacatattgccttctagctgtgtcctcacgtggtagaagggatgagggaactctctggggtcccatttagaagggcactaatcccatgcaggaggtctctgcccccacctcccagtactatcacctgggggttaggatatcaacttatgaattttggggtacaagagacccaaacattcagaccatagcagaga

SEQ ID NO: 439412 - DNA, 541 bp, Homo sapiens
gctgggttgggagaggagatgtagtctgctcattatccttccctttgtaaggatgtcagcagcaacattaagttgcaaatggaaaacacaaccttggcttgcatctcgtcctcattctccgcagagttgtgtataacccagctgactgcattacccaaccacgccccctcctgtacattacccatcagcaagtgcactgcctctcttcagctgggctttgtctccgacggcawtgcattgccttctctttcacaagaggccactgggtgtgaagggatgtcagtgtgcagctacctccagaacactacaggtgctcttggctttccctctttgcaaatttctcatgcatttcttccctgcaaaaagacaaatatccaacttggaaatggaactcaatgtgaagttagggcaatatgagaaggaggagcaagaaccaggaaccaataggagcagaattctttgagggccaaggtagcgacccagtacaattttaaacacttaaaaaaatccatgtcaactatatatcagaaatgaattttta

SEQ ID NO: 439413 - DNA, 541 bp, Homo sapiens
gctgggttgggagaggagatgtagtctgctcattatccttccctttgtaaggatgtcagcagcaacattaagttgcaaatggaaaacacaaccttggcttgcatctcgtcctcattctccgcagagttgtgtataacccagctgactgcattacccaaccacgccccctcctgtacattacccatcagcaagtgcactgcctctcttcagctgggctttgtctccgacggcattgcattgccttctctttcacaagaggccactgggtgtgaagggatgtcagtgtgcagctacctccagaacactacaggtgctcttggctttccctctttgcaratttctcatgcatttcttccctgcaaaaagacaaatatccaacttggaaatggaactcaatgtgaagttagggcaatatgagaaggaggagcaagaaccaggaaccaataggagcagaattctttgagggccaaggtagcgacccagtacaattttaaacacttaaaaaaatccatgtcaactatatatcagaaatgaattttta

SEQ ID NO: 439414 - DNA, 634 bp, Homo sapiens
tctcttacttattatcactgtaagttgtactctgctgcacactacagtggacatcctttatactcccttgttgcagctgacagatacatatacctaagtgtatgtgtcccttggtgtagcaacagtaaattttacacatcagtcaacattaagcaatccattcatgccccagaacatcactgcttatatcacagtggtatttcttattgtcctgaaagtggagtgatatatgtgactcactccaaaaacaaaacaaacaaacgagaaacaaaggaaggccaggcaagtttggggatgcagtttaggttygaaagcctttgcatgagctggttcttgttgactcctctgattcaattcttatctttcctgtagtttaacgccattttttcacaccagactgcttcctgcccaagcttgttcttgtcacacagtctttatacctgccatccccatcgcttgaaatgtgcttccatgactgtaacatgactggcactccagcatacattctcagctcaggtgtcacttcctctgggacactctctgtgactataccatccctaacttgcactcaatcacagcaccttggttcatttcttcatttcaccatgtgaaattttcttgtttttttatttct

SEQ ID NO: 439415 - DNA, 562 bp, Homo sapiens
atgtagtcccaggaaatgggaatgatgaatgtctctttagaaagaaacatgataaaagggaaaccctctccagaaaggaagacaaagtaaaaggaagcacattttattaaaggctaaagtataaaggtggaaggatgcaataaaaatcttcaggtagggaggatggtgacctgacaccctaagaacttggtggcagactataagcctagaagctccatacttgatacgggggtgtgtattacttcctgtacctattgaaacaaattaccacaaacttagtggcttggaaaaacacaaayttattcccttacagccttgcattcttaggttattcttcagttacacagagacttcagaggagaacatctattccaagttgtataaaaattaatactttggtagtctaaaatgtgttttaaaaaattggtagatgctatggtttgaatggttcccctccaaaattcatgtgttgcaacttaatccccgttatggtggtattaagagtttcggaccctttgggaagtgattaagtcatgaaggctctccctcatgaacggattaa

SEQ ID NO: 439416 - DNA, 562 bp, Homo sapiens
atgtagtcccaggaaatgggaatgatgaatgtctctttagaaagaaacatgataaaagggaaaccctctccagaaaggaagacaaagtaaaaggaagcacattttattaaaggctaaagtataaaggtggaaggatgcaataaaaatcttcaggtagggaggatggtgacctgacaccctaagaacttggtggcagactataagcctagaagctccatacttgatacgggggtgtgtattacttcctgtacctattgaaacaaattaccacaaacttagtggcttggaaaaacacaaacttattcccttacagccttgcattcttaggttattcttcagttacacagagacttcagaggagaacatctattccaagttgtataaaaattaatactttggtagtctaaaatgtgttttaaaaaattggtagatgctatggtttgaatggttcccctccaaaattcatgtgttgcaacttaayccccgttatggtggtattaagagtttcggaccctttgggaagtgattaagtcatgaaggctctccctcatgaacggattaa

SEQ ID NO: 439417 - DNA, 471 bp, Homo sapiens
ttgttcttttttatggctgcagggtattccatggtgcatatgtatgacattttatttatccactccaccagtgatgggcacctaggttgagtccatgtctttgttattgtgaatcgtgctgtgatgaacatgcaartgcaggtgtctttttggtagaacaattcatttttctatgggtatatacccagtaatgggattgctgggccaaatggtagttctatttttagttgagaactctcttcttttcacagtgtttgaactaatttacactcccaccaacagtgaataagctttccctcttctccacggccttgccaacatctgtcatttttgactttttaacaatagccattctgactggtgtgagatggtatctcactgtggtttagatttatatttcactaatgattagtggtgttgagcattttttcatgtttgttggccacctgtatatcttcttttgagaagtat

SEQ ID NO: 439418 - DNA, 657 bp, Homo sapiens
gtagcagtatttcattctttttaatggctgaataatattccattgtatggatataccatattttgtttatccatttatttgctgatgaacatttgggttgtttccatcttttggctattataaataatgctgccatgagcattcatgtaaaagtttttgtgtggacatacattttcatttctattgggaatatacctaggagtgaaattgctgggtcatatggcaactccgtttaaccctttgaggagctgccaaactgttctccaaagcaactgcaccattttacattctcatcagcaatgtatgagggttctatttctccaaatcctcctcarcacttgttgttatctgactttttgattctagccatcccagtgagtatgaagtggtcacccactgtggttttgatttgcatttctctgatgactaatgatgttgagcatcttttcatgtgcttattggctatttgtataacttatttttgagaaatgtctattcagatccttcgtgcactttaaaatctagttatttatctttctgttactgagttataagagttctttatgtatttcagatacaagtcccttatcagatatatgatttgcaaatacttacttccatttttgagttgccttttcactcccttgatagtccttt

SEQ ID NO: 439419 - DNA, 562 bp, Homo sapiens
agtttggtgtctggtaaggacctggtctctacttccaagatggtgccttgagcactgcatcttccagagttggggaatgctgtttttcacatggcagaggagaagagccaagagagtarctgactcctgaaagccctttttaaaaggcattaaactcatccaaaagggcagagtcctcatgggcaaatcacctcctaaaggtccacctctgtatactattacaagggcaattaaatttcagggagttttggagggaacaaacactctggggactgttgtggggtggggggaggggggagggatagcattgggagatatacctaatgctagatgacgagtaagtgggtacagcgcaccagcatgtcacatgtatacatatgtaactaacctgcacattgtgcccatgtaccctaaaacttaaagtataataaaaaaaaaaaataataaataaataaataaattttaaaaaccatagtaaatactatacctcccttatagtccttattggtaagtttcatgacagtaaggacaaaatgagttcttgtttgtatcccccacaaga

SEQ ID NO: 439420 - DNA, 562 bp, Homo sapiens
agtttggtgtctggtaaggacctggtctctacttccaagatggtgccttgagcactgcatcttccagagttggggaatgctgtttttcacatggcagaggagaagagccaagagagtaactgactcctgaaagccctttttaaaaggcattaaactcatccaaaagggcagagtcctcatgggcaaatcacctcytaaaggtccacctctgtatactattacaagggcaattaaatttcagggagttttggagggaacaaacactctggggactgttgtggggtggggggaggggggagggatagcattgggagatatacctaatgctagatgacgagtaagtgggtacagcgcaccagcatgtcacatgtatacatatgtaactaacctgcacattgtgcccatgtaccctaaaacttaaagtataataaaaaaaaaaaataataaataaataaataaattttaaaaaccatagtaaatactatacctcccttatagtccttattggtaagtttcatgacagtaaggacaaaatgagttcttgtttgtatcccccacaaga

SEQ ID NO: 439421 - DNA, 625 bp, Homo sapiens
ataatgaacagaaatttatttcttacagttctggaggctgggaagtccaagatcaaggcaccaacagtttggtgtctggtaaggacctggtctctacttccaagatggtgccttgagcactgcatcttccagagttggggaatgctgtttttcacatggcagaggagaagagccaagagagtaactgactcctgaaagccctttttaaaaggcattaaactcatccaaaagggcagagtcctcatgggcaaatcacctcctaaaggtccacctctgtatactattacaagggcaattaaatttcagggagttttggagggaacaaacactctggggactgttgtggggtggggggaggggggagggatagcattgggagatatacctaatgctagatgacgagtaagtgggtacagcscaccagcatgtcacatgtatacatatgtaactaacctgcacattgtgcccatgtaccctaaaacttaaagtataataaaaaaaaaaaataataaataaataaataaattttaaaaaccatagtaaatactatacctcccttatagtccttattggtaagtttcatgacagtaaggacaaaatgagttcttgtttgtatcccccacaa

SEQ ID NO: 439422 - DNA, 443 bp, Homo sapiens
tttagtgtttccttgcttccattttcagaagtttcttttgctttagtcctcttgccccatccccmacctgacattttcctcaagatcactgttacgtttttaaagccttttataaaaatctgccactcacatataagaagccagtgaaagcacataaagatactttacagttaacatgcaggatgaggtggttccttcctgcctagggcttcagattctccacagctttgtagatttctttataggatgagctgagggtgatgatttcccagatgcctttttcttccccatttcttccttagctcatgctatggagcagtcatatcttcctcctacctctgcttgcctttataaatagtctcactgcacattaagcaggtgctgttcaaattccatgctacccacatatgcattgctacctgacaaacacttctgtttcaatc

SEQ ID NO: 439423 - DNA, 443 bp, Homo sapiens
tttagtgtttccttgcttccattttcagaagtttcttttgctttagtcctcttgccccatcccccacctgacattttcctcaagatcactgttacrtttttaaagccttttataaaaatctgccactcacatataagaagccagtgaaagcacataaagatactttacagttaacatgcaggatgaggtggttccttcctgcctagggcttcagattctccacagctttgtagatttctttataggatgagctgagggtgatgatttcccagatgcctttttcttccccatttcttccttagctcatgctatggagcagtcatatcttcctcctacctctgcttgcctttataaatagtctcactgcacattaagcaggtgctgttcaaattccatgctacccacatatgcattgctacctgacaaacacttctgtttcaatc

SEQ ID NO: 439424 - DNA, 404 bp, Homo sapiens
cctggttgtctggttaagcagcagaggcccagccacctcccacatggtgcaggaagcagtgtctccatggagtctattcctgtgttcatcctgtgtcccttgccctccctgcctgggctgcagtgagcaggtatagaagtgaagcagtcacagtccctgccctcaacaactcagcgttgaacacaagtgatgttgtggagaagccaccctcctcccactgctggtggtcggtttcctgaaattccctccagccaattccgaagtgmccttctggaaagcccaagagaagagctctagaaggttggggccattcaccatgacatgttgttacctgagtgtgccagaggtgaacccaaagatcccaagcaagcactgatgtattcctagcatctacccccaaacct

SEQ ID NO: 439425 - DNA, 539 bp, Homo sapiens
cacagtacttcttggcctttctgtagctcttggctcctctgtggtaggtcagaaggggaatgcagaggtgccatctcctgagggataatagctgtccaaaatcgatgtccctcccatcttctcagggcagcctatttatcttcctgcttccctgtcctctcctcccacccatataacctccttggtccctcatctcactgagcactgggatgccacccttgccctatttctctatctccagccccatgctgttgctcaggttccatgcatttagagctttttctgtgatctctcctgctgatacagtcttccaagagcacctgctgcacagatatcagcagcaacttttaaccacctttcccygcccacctacacactcacactgccaccaactgcttgggccctaataaaaagtttccgtagtaacttccagaatccctctctacctcctgctttctagctttgcctctgcataccattcccccttcccacagccacggcccctcccagctccccacttgtccctctgggtctctgcc

SEQ ID NO: 439426 - DNA, 539 bp, Homo sapiens
cacagtacttcttggcctttctgtagctcttggctcctctgtggtaggtcagaaggggaatgcagaggtgccatctcctgagggataatagctgtccaaaatcgatgtccctcccatcttctcagggcagcctatttatcttcctgcttccctgtcctctcctcccacccatataacctccttggtccctcatctcactgagcactgggatgccacccttgccctatttctctatctccagccccatgctgttgctcaggttccatgcatttagagctttttctgtgatctctcctgctgatacagtcttccaagagcacctgctgcacagatatcagcagcaacttttaaccacctttccctgcccacctacacactcacactgccaccaactgcttgggccctaataaaaagttyccgtagtaacttccagaatccctctctacctcctgctttctagctttgcctctgcataccattcccccttcccacagccacggcccctcccagctccccacttgtccctctgggtctctgcc

SEQ ID NO: 439427 - DNA, 547 bp, Homo sapiens
ttttatctatatctatatctatatctatatctatatctatgtctgtctgtcatctgcaaccaggaccctccctgaggactatcaggcttctgtgttgaagatagactgttggggatatggtgtcaggataaaatgggggacgttatgatgctactgcagtaatggtagcagtagagagagtgagaagtggtcatattctggatggatttttgaagtaaagacaacaggatttactgatggaacggatgtggactgttaggaaaaaaaattcaagaatgacactattgtttttgccctgaattactggaaagatggaattgccyttaactgatgtgagaaataccatgattggagcagatttggtatgtgtaaatggatgatggtggtgggtgggcagggaatcgagagttcatttttgtataggttgagatgaatatttgatatccaaatatatatgttgattaggcaatttgaacctatgagactatctacctcatgagatgacaagctcccctggggcaaggcttgtgtcttgtttgttatgttt

SEQ ID NO: 439428 - DNA, 599 bp, Homo sapiens
cttggctgcacttcagaatcacctgggtgactttttaaaaacagaattagaagcaacacgccagaccgccttaaatagaatctcagaatagagccaacaaatgtgtatttttaccaagttctgcaggtaattctaagcatttggtggggtggggctgggagagccacttgggcctattctgctccccatcccacactctagattgacacagagccggtgaaagggaacaaagttggtctggggaaaggaaagctggagtgatgccccctctacctcccctggaggaggagactttctcgcctggcacagattgtagaaaaaaaggrgagatggcagggaagaggagggggctgtacctttttctttcctaaaagcttaggcttgctttctctccaagatacctgcctgtctcccttacccttattcatgccatgaaagaagcttcttgttgtgtcagatggtgtgcacaaccccctaggtcccatctctgcctggtcttcctagatgcaggaatctaggttgattaggcatcaaccctaagcccctgcctgtgaacttgagcctgcagtggtagagcagtctcagggagatgttacatc

SEQ ID NO: 439429 - DNA, 608 bp, Homo sapiens
tccatctctgtgatgacagattggctagtgactgccggggccagggccctggggagcgccacataatacagagcaggcagccccgacaggaaggccagatgcttgtgccgtaaagttgtctccagtttctcaatggcttccacagacaagactcggagcagcttagggtgttcagtgacagtacctggtaargcctgttgctgctgatcaagggccgttggcatccagggcataactttgtgatgcaggtccgggtcacttgctgtctgcagttccaggaactggctttctggaatgcagggaaaaggagccactgccaggaccccagaaattctgcagtcccaggacctgtgtacacaggcggggatcttgccctggtggatttgtccacatttggagtcgatgtggctctgcagtattgccttgacctgagttaacaagtgtggcctggggatggacactggggccgcaatgggtgacagcacatcgcaagccccgttggcctctagggctacaggctgggggatgctcacgttggctagggctgtgctgctgctggacacagtctgctgatcagtggaggtaaggagcaactggatggactgctg

SEQ ID NO: 439430 - DNA, 608 bp, Homo sapiens
tccatctctgtgatgacagattggctagtgactgccggggccagggccctggggagcgccacataatacagagcaggcagccccgacaggaaggccagatgcttgtgccgtaaagttgtctccagtttctcaatggcttccacagacaagactcggagcagcttagggtgttcagtgacagtacctggtaaagcctgttgctgctgatcaagggccgttggcatccagggcataactttgtgatgyaggtccgggtcacttgctgtctgcagttccaggaactggctttctggaatgcagggaaaaggagccactgccaggaccccagaaattctgcagtcccaggacctgtgtacacaggcggggatcttgccctggtggatttgtccacatttggagtcgatgtggctctgcagtattgccttgacctgagttaacaagtgtggcctggggatggacactggggccgcaatgggtgacagcacatcgcaagccccgttggcctctagggctacaggctgggggatgctcacgttggctagggctgtgctgctgctggacacagtctgctgatcagtggaggtaaggagcaactggatggactgctg

SEQ ID NO: 439431 - DNA, 608 bp, Homo sapiens
tccatctctgtgatgacagattggctagtgactgccggggccagggccctggggagcgccacataatacagagcaggcagccccgacaggaaggccagatgcttgtgccgtaaagttgtctccagtttctcaatggcttccacagacaagactcggagcagcttagggtgttcagtgacagtacctggtaaagcctgttgctgctgatcaagggccgttggcatccagggcataactttgtgatgcaggtccgggtcacttgctgtctgcagtwccaggaactggctttctggaatgcagggaaaaggagccactgccaggaccccagaaattctgcagtcccaggacctgtgtacacaggcggggatcttgccctggtggatttgtccacatttggagtcgatgtggctctgcagtattgccttgacctgagttaacaagtgtggcctggggatggacactggggccgcaatgggtgacagcacatcgcaagccccgttggcctctagggctacaggctgggggatgctcacgttggctagggctgtgctgctgctggacacagtctgctgatcagtggaggtaaggagcaactggatggactgctg

SEQ ID NO: 439432 - DNA, 544 bp, Homo sapiens
aagtgatgctggccttggtttccctggacaaggctggggttgctctgcgtcatctcctcctggttcagtggagcccttggcttctcaatccttgaagaagctatggtgtttgggccccggagcacatctggcacttgaaattcctgccctagctggaggtgatcagcccagtaatcttgtatgccatctgcatacrttgactgggcagctgactgggttaaagatttctgatctgttaattgtgacagtgttggggttacagatgacagtgaaagctctctggtgtgccaggaatgaaactccagactctgatctaaagacatactagacgtagacagcatctctaggcaagaggagccctgcaatggccccgataaagtcagggagatctggttgttctcacccaccagcaattgctgaatctccagagccacagaattgcagatttggcagcagggatctgcacacaggattcgccgcacacttctctccagaggaagccagccctggctaggaagggaaacacggcaaaattaacgatgga

SEQ ID NO: 439433 - DNA, 510 bp, Homo sapiens
tttgaaagacaataatgttgaaggctgacaaagattaccaggcaatcaagacaaggaagaatatagcaagtattgtctrtaagataaaaaaaaaaatgcctaatatgtttggcaaactctaagtagagattaaggtttgggaaggcaattgaccaaaggtgaaattatatgtaaagcaagttggtaaaatataaaacatgtgaaatgttgtatgaaagagtttacacttctctttttgaagtagaagaggcaatggagtattttaatcaaggatttgacattgatttgtgatttaagattgatatttctgagtgcaaaaggaacgaagaatttggctcctagataggctgggctcagggaaactgagtaggagaccattgtagtagccatgagagaagaatgaaggacctcaaatttaacagtagctggggagattcaagagatttttaggagtgaaaaatcaatgctaattgaagagtgactggctaggacagatgaaggagagagagg

SEQ ID NO: 439434 - DNA, 510 bp, Homo sapiens
tttgaaagacaataatgttgaaggctgacaaagattaccaggcaatcaagacaaggaagaatatagcaagtattgtctgtaagataaaaaaaaaaatgcctaatatgtttggcaaactctaagtagagattaaggtttgggaaggcaattgaccaaaggtgaaattatatgtaaagcawgttggtaaaatataaaacatgtgaaatgttgtatgaaagagtttacacttctctttttgaagtagaagaggcaatggagtattttaatcaaggatttgacattgatttgtgatttaagattgatatttctgagtgcaaaaggaacgaagaatttggctcctagataggctgggctcagggaaactgagtaggagaccattgtagtagccatgagagaagaatgaaggacctcaaatttaacagtagctggggagattcaagagatttttaggagtgaaaaatcaatgctaattgaagagtgactggctaggacagatgaaggagagagagg

SEQ ID NO: 439435 - DNA, 510 bp, Homo sapiens
tttgaaagacaataatgttgaaggctgacaaagattaccaggcaatcaagacaaggaagaatatagcaagtattgtctgtaagataaaaaaaaaaatgcctaatatgtttggcaaactctaagtagagattaaggtttgggaaggcaattgaccaaaggtgaaattatatgtaaagcaagttggtaaaatataaaacatgtgaaatgttgtatgaaagagtttacacttctctttttgaagtagaagaggcaatggagtattttaatcaaggatttgacattgatttgtgatttaagattgatatttctgagtgcaaaaggaacgawgaatttggctcctagataggctgggctcagggaaactgagtaggagaccattgtagtagccatgagagaagaatgaaggacctcaaatttaacagtagctggggagattcaagagatttttaggagtgaaaaatcaatgctaattgaagagtgactggctaggacagatgaaggagagagagg

SEQ ID NO: 439436 - DNA, 508 bp, Homo sapiens
tcaggatatcaataagcattttcattagagaaactctaagttctatttcagttttaaaatactatgactttatgaccaagaaagggtttacctcccagttttgtacttagagtcaacacttaagagaatcatgaaagacttcttgtccatgttgatgtgtttattttctgagtctaaagtctttctcctccttctcatctatcttccccattaattcttcaagtttcttctccacatattcctttagcgaccttcgtattgccttcattttcctccgatgaaagatgcaaaaatggaatctagagtaggaaaagaaaataattccaacttcaatatcagtagccccattctttaagccagttatacattgttttttttttttttttttttttttttttttttttgctggatacttctccatttccttttgttccaactattatcccgtcaaactttgcattttattcctttcagtatcccaraatttaaaatgacttcttttgcttta

SEQ ID NO: 439437 - DNA, 645 bp, Homo sapiens
gtgttgcttctaccttatttagaatattttaaaaattatattttaatgtcgaatatcacaatatctattggagtttaaaggtaatcatcacacacaggyttaaaacagagattgatggagttagaaaaaaatgaaaattaaaatgtggatgacgttacgcacactgctaagtcagtttgcaccgtggccagatagtcttccttccccaccctcactgagtatgtacactggaaaaatccagctaagagaaaacataggacttgcagcagaaacatcccttcaggtatcagtgggacttctaactcatatttttaagcttgaagaacagtggcagagaaataaaacatagatttgactctacaaaccagaccctgagtcctgaggaagaaccaggttaatggaaaatgaagaatggcaagaagagcagcccaaagagtaaaccccagagggagggagtaaaactacatatgcccagtgctttttgctatcctcagaggggaataaacagggggattacaagagagagaagagcatgtacatagaggagagaacctgcagagcagagatagagttaggattgttccaaggctattgaaaaaagttctagatgagaattgattgctggctgcagtgaagttattaaaa

SEQ ID NO: 439438 - DNA, 618 bp, Homo sapiens
tttattaaaggcacatcttatttttaaattaaaatgatattacatgactttgtcagaaaggtcaatcaccagcattttgtctcttcatcccacaagattactcccmagatggtaacagtttttctactatttttaagatattttttctatgatatttttaaaattacatttaaaaatgttaaaacattactttctttaaaataatgaaattatatttcatttactcattttagtaactcttgatttcctgttatggtagttgaagatttagctttccacccatcctcacattcctgctttcccttttctcagccttttgactaagatttctttaaactcattaatagattaatagaagatattttcatggtgatgactatgtaaatacaattcacttctaaaggacgtattgtgctatgattacctttcttttcccattgcctcccttcatcactacacactggacttaataattgcttaatttacgttagtttcctatacgtgtatgaacatttttctccaaatgcattgatctgtcaataggaaggattcctcttccttcctatttcccagtctatatcgttgaagtctaggcttgaaacaaagatgttatttgtg

SEQ ID NO: 439439 - DNA, 561 bp, Homo sapiens
tttcatttcacaatgatatcccagtttgccaacttgtagactgagaaaagtgctgcttaaattttttgtgcctaagactccatatctttaaaatgggtttagcaaaatagggataatcaatgaaatattgtatgtaacacgtttagacatacctgatacgtagtaagtacacaatacatattattgaatattagtaagggtactaatattatctagcatgatagccagctagctctggaccttttttgtgctcaaattaatgaatgaataaagaaaaaaatatatattttcttcacaataataagattcagggacattatagaaacttaaactttgaagttatttagttcacacttttaccaaatatgagagtaccataatttatgacaagggattaaatggattcacaccttttttctggatttcttagaagagatkaacgtttttgtcttgcaaaatatttttcttaattaaaatgaaattgaatgaatttagcatttactcattggtgctcacttcaaccccaggaatgtcaagagtgggttcacattttcccacaga

SEQ ID NO: 439440 - DNA, 609 bp, Homo sapiens
ggaaatgtccacattaaatgtccacatcagaaatctagaaagaccttaaatcacaatgaaaagaactacagaagcaaaagcaaataaatccaaaagctggcagaagacaagaaataactaagatcagcatggaaatgaaggagacagagacgtgaaaatcccttgaaaaaattaatgaatccaggagctgtctttttgaaaagaaaataaataaaatagatcactaactagactaataaagaagaaaagagagaagaattgactgggtgcggtggctcacacctgtcataccagcactttgggaggcagaggtggatggatcatgaggtcaggagtttaagatggtgaaactccgtctctmctgaaaatacaaaacctagctgggcatggtgctaggtgcctgcaatcctaactactcgggaggctgaggcaagagaattgcttgaactcggtgggtggaggtcccagtgagctgagatcataccactgcactccagcctgggtgacagagtgagactccatctcaaaaaaattacctaaagataaaaaagagagaagaatcaaatagacactataaaaaatgataaaggggatattaacactgacccc

SEQ ID NO: 439441 - DNA, 609 bp, Homo sapiens
ggaaatgtccacattaaatgtccacatcagaaatctagaaagaccttaaatcacaatgaaaagaactacagaagcaaaagcaaataaatccaaaagctggcagaagacaagaaataactaagatcagcatggaaatgaaggagacagagacgtgaaaatcccttgaaaaaattaatgaatccaggagctgtctttttgaaaagaaaataaataaaatagatcactaactagactaataaagaagaaaagagagaagaattgactgggtgcggtggctcacacctgtcataccagcactttgggaggcagaggtggatggatcatgaggtcaggagtttaagatggtgaaactccgtctctactraaaatacaaaacctagctgggcatggtgctaggtgcctgcaatcctaactactcgggaggctgaggcaagagaattgcttgaactcggtgggtggaggtcccagtgagctgagatcataccactgcactccagcctgggtgacagagtgagactccatctcaaaaaaattacctaaagataaaaaagagagaagaatcaaatagacactataaaaaatgataaaggggatattaacactgacccc

SEQ ID NO: 439442 - DNA, 609 bp, Homo sapiens
ggaaatgtccacattaaatgtccacatcagaaatctagaaagaccttaaatcacaatgaaaagaactacagaagcaaaagcaaataaatccaaaagctggcagaagacaagaaataactaagatcagcatggaaatgaaggagacagagacgtgaaaatcccttgaaaaaattaatgaatccaggagctgtctttttgaaaagaaaataaataaaatagatcactaactagactaataaagaagaaaagagagaagaattgactgggtgcggtggctcacacctgtcataccagcactttgggaggcagaggtggatggatcatgaggtcaggagtttaagatggtgaaactccgtctctactgaaaatacaaaacctagctgggcatggtgctaggtgcctgcaatcctaactactcgggaggctgaggcaagagaattgcttgaactcggtgggtggaggtcccagtragctgagatcataccactgcactccagcctgggtgacagagtgagactccatctcaaaaaaattacctaaagataaaaaagagagaagaatcaaatagacactataaaaaatgataaaggggatattaacactgacccc

SEQ ID NO: 439443 - DNA, 625 bp, Homo sapiens
aaatacaaagaatcgtaagagactaccattaacaattatatgctaataggataacttagaaaaaaggtatcacttcatagaaatttacaatttaccaagattgaatcatgaaaaaatagaaaatctaaacagactaaaaacaaataaggagattgactcggtaatttacaactttccaacaccgaaaagttcaggatctgatggcttcacaggtaaactctaccaagcatttaaaaaagaattaacaccaatccttacaaagctcttccaaaaaaaatttaagaggagggaaaacttccaaactacaaggccagcattaccctgatatctaagccatataaaaaatgatatagaaaagaaaattagaggctatattcctgatgaacatagatacaaacatttttaacaaaacactgtcaarctaaattcaacagcatgttaaaaggatcatacaccatgaccaagtgagattttttttttttttactggaaggcaggaattgttcccctaagatcaggaacaagacaacggtaactacccttgccacttctactcaacatggagctagaagtcctattcagaaattgggtaagaaaaggaataaagggcatgcaaatcagaatat

SEQ ID NO: 439444 - DNA, 625 bp, Homo sapiens
aaatacaaagaatcgtaagagactaccattaacaattatatgctaataggataacttagaaaaaaggtatcacttcatagaaatttacaatttaccaagattgaatcatgaaaaaatagaaaatctaaacagactaaaaacaaataaggagattgactcggtaatttacaactttccaacaccgaaaagttcaggatctgatggcttcacaggtaaactctaccaagcatttaaaaaagaattaacaccaatccttacaaagctcttccaaaaaaaatttaagaggagggaaaacttccaaactacaaggccagcattaccctgatatctaagccatataaaaaatgatatagaaaagaaaattagaggctatattcctgatgaacatagatacaaacatttttaacaaaacactgtcaagctaaattcaacagcatgttaaaaggatcatacaccatgaccaagtgagattttttttttttttactggaaggcaggaattgttcccctaagatcaggaacaagacaacggtaactacccttgccacttctactcaacatggagctagaagtcctattcagaaaytgggtaagaaaaggaataaagggcatgcaaatcagaatat

SEQ ID NO: 439445 - DNA, 539 bp, Homo sapiens
ataactatttgaaaaaataagagaaaaatcccatttgcaatagcatgaaaaaatatttaggaatacatttaaccaatgaggtgaaaaatctatatactgaaaaataggaaacattgataaaaaaattaaagaagatacaagtaaatggaaagatactccatgcttatggacagggagaactgatattataaaatgaccacactctctaaagtaatctgtaagtccaacaaaattcctatcacatttccaatggcaattttcacagaaatagaaaggaagatcytaaaatgtacatggaaccataaaagatactgaacagccaaagcaattttgaaaaacataagaagaaagctgaaggcatcactcttcctgatttcaaactatagtataaagttattgtaatcataacagtatggtactggcataataactgacaaatagaccagtgacacaaagtagagagccaagaagtaaacccaactatattcagtcaactaatctttgatgacagcaccaagaataagcaaacagcagaggac

SEQ ID NO: 439446 - DNA, 590 bp, Homo sapiens
ctggacatatgtaaatgtagatttaattatagtttggaaataagatttgtcccttactacacatagtgtccaacatgatgggttcttgcataaaatgacagcagttgagccactcttgacacagattagtcagaaatcaaaggaaaatatcttcatcaacattatcaatgctaacatcatcatcaaatgaacattaacagcataaagaactgtttaaatatgtcttaaatatttcaatctgaattctttttttatagatggaactctaattaatttatctccactttgacacctctatgtccttctgtatttttttttcttctttggtaccattgatacttctkaatttagtaaaccagtgaatttaattaatgagattctcaccgtttcttccagatcattagcaaaggcattaaataaaaacagtcccaacacttatcccagtattttcccactggctacccctttccaactgtatacactgttggaccttatcaccattaatttaaaattctttagccaaaaacagtcacagctgagatcatttgtggttatttattttaaggagataacacattagcaaattttca

SEQ ID NO: 439447 - DNA, 343 bp, Homo sapiens
tcacagtgcttagctaatggcgtttaatactctatacaggagaattaagtgaaacactcagctaatgtgtaaaatatctagaacagagtaaccactgcatattcctattgtagtataacatacaatagctgacatagctattataactctgtgttttggtttggattacttacagtgattcatatacaaagcccacatattttatgaagcatctactatgtaagttmctctgctagtttttataaaatattaaaaataggtataatgtcattctttttattaagtagcttctaatcaagcaagaggtacactgataatacattagtgaatgcaatataagtta

SEQ ID NO: 439448 - DNA, 551 bp, Homo sapiens
cgtctgtaagtctgtaagagccactgctgggcttgtatgtgggggccagatctgaaggttaattcctgttaaaaataagtatcctgcatatgcaggtctgaagcagaaactagcctgtgaattctaaacctctgctgtccaatacagtagccactagccacatgtgggtgtagatcacttggactrtagttaatgtgacaaactaaattttaaattttatttaacgttaattaaggtaaatttaaaaaccatcactggattcagtgtttgaaaaacttttaagtatatttggaacaactttggatttactttttcaggaatacattttatgttatctaaatacagattgagtatttgcagccaaaaaatttcaaattgagatgtgctgaaagtataaagcccaaagcagattttgaagacttagtgctaaaataaataaacaaaataactcctaagtcattttacatagattggatgttgaaatggtttggatatttgggttaaaatatattaaaattagttttacctgtttctttttattttcttaatac

SEQ ID NO: 439449 - DNA, 586 bp, Homo sapiens
agtataccaacaaagctcagtttaaaccaacaaagctcagagttttaggtgctcagtttcctggatcatgtatcatccctctgtatttgaatttagcttatagaataggggaaagatgatgtatatttccattttttcagcagatgggcataagtgctgtatgcattattctgaggaagaatatttcagttaactattgcagtaatatttctgcataacagaccactctaaaactaagtgattttaaatgacaataatttattatcatgggtctgctttaggctgtggaggctggaggatagctcacctggctggtctctgctaggcaactttgctccatgtatttcttactcctcacatggaatttgctgcattgttggggcatatttttagggtgatgagaaaggtgcataaagttaagcagaaatctgcaaggtttcttaaggccatatctcaaaggtgtcatgctttcccttctactctactccaytgacaagttacatggccaagcccaataatgtgccatggaaagggtgcatatgatcatgaggctactaatttgatctaccacagaagaattgcagtg

SEQ ID NO: 439450 - DNA, 522 bp, Homo sapiens
tgctgttttcaagcaatgttttcctctcaatgttgatgtttcccctgaaaaggcagtacaaggtaggatggggatgagacatgcctgtgcttagaatgacagtgagaagtagaaaagtagtaatgagaagccagatttaagagtacattctgggtgtgaaaaatgtgaaagtaggccaggyggggtggcttatgcctgtaatcccaacactttgtgaagctgaggtgggcagattgcttgagcccaggaattcaagaccagccttggcatcatagtgagacccccatctctagaaaaaaagtaaaaaattaaccaggcattgtagtgcatgcctataatcccagctacttgggaggctgaggctggaggatcacttgagcccaggagttcaaggctgcagtgagctatgaaggtaccactgcactacagcatgggcaacggagtgagtctctgtttctaataaaagtaaaatgtgaagataaaatatggcgtaaggaaataaaggaaataacaactcaaaat

SEQ ID NO: 439451 - DNA, 522 bp, Homo sapiens
tgctgttttcaagcaatgttttcctctcaatgttgatgtttcccctgaaaaggcagtacaaggtaggatggggatgagacatgcctgtgcttagaatgacagtgagaagtagaaaagtagtaatgagaagccagatttaagagtacattctgggtgtgaaaaatgtgaaagtaggccaggtggggtggcttatgcctgtaatcccarcactttgtgaagctgaggtgggcagattgcttgagcccaggaattcaagaccagccttggcatcatagtgagacccccatctctagaaaaaaagtaaaaaattaaccaggcattgtagtgcatgcctataatcccagctacttgggaggctgaggctggaggatcacttgagcccaggagttcaaggctgcagtgagctatgaaggtaccactgcactacagcatgggcaacggagtgagtctctgtttctaataaaagtaaaatgtgaagataaaatatggcgtaaggaaataaaggaaataacaactcaaaat

SEQ ID NO: 439452 - DNA, 522 bp, Homo sapiens
tgctgttttcaagcaatgttttcctctcaatgttgatgtttcccctgaaaaggcagtacaaggtaggatggggatgagacatgcctgtgcttagaatgacagtgagaagtagaaaagtagtaatgagaagccagatttaagagtacattctgggtgtgaaaaatgtgaaagtaggccaggtggggtggcttatgcctgtaatcccaacactttgtgaagctgaggtgggcagattgcttgagcccaggaattcaagaccagccttggcatcatagtgagacccccatctctagaaaaaaagtaaaaaattaaccaggcattgtagtgcatgcctataatcccagctacttgggaggctgaggctggaggatcacttgagcccaggagttcaaggctgcagtgagctrtgaaggtaccactgcactacagcatgggcaacggagtgagtctctgtttctaataaaagtaaaatgtgaagataaaatatggcgtaaggaaataaaggaaataacaactcaaaat

SEQ ID NO: 439453 - DNA, 522 bp, Homo sapiens
tgctgttttcaagcaatgttttcctctcaatgttgatgtttcccctgaaaaggcagtacaaggtaggatggggatgagacatgcctgtgcttagaatgacagtgagaagtagaaaagtagtaatgagaagccagatttaagagtacattctgggtgtgaaaaatgtgaaagtaggccaggtggggtggcttatgcctgtaatcccaacactttgtgaagctgaggtgggcagattgcttgagcccaggaattcaagaccagccttggcatcatagtgagacccccatctctagaaaaaaagtaaaaaattaaccaggcattgtagtgcatgcctataatcccagctacttgggaggctgaggctggaggatcacttgagcccaggagttcaaggctgcagtgagctatgaagrtaccactgcactacagcatgggcaacggagtgagtctctgtttctaataaaagtaaaatgtgaagataaaatatggcgtaaggaaataaaggaaataacaactcaaaat

SEQ ID NO: 439454 - DNA, 647 bp, Homo sapiens
tccttctgtcacatatagtaggctctgataaaaccccagcagattaggccctagtaaaatagtttcttctggtgcaggtcttgtgaaaaagaactgaatactccagcatgtttccaaatggttcctttccccttcctcctgccagaagcatgaggacattttttccaacattcactgagaacctagtagagtttctggaggcataattcacaatagtatggagaccttcaatgagtgtacccacttgaagtttttaactttcagagttgttcacattgagctccagcaatttgttaattacagtttcaggtttttctacttcagcactggtgatttttttttgtgtgtttttttgttttttgttttttctttggtggagttttgctctgttgcacaagctggagtacaatgacatgatcttgcctcactgcaatctccacctcccggctttaagcaattctcctgcctcagcctcttgaatagctgggattacaggttcccgccaacatgcccagctaattttggtatttttagtagagatggggtttcaccgtgttggccaggctggtcttgaactcctgacctcaggtgatytgcccacctcggcctcccaaagtgctgggattacaggcgtgagccactatgcc

SEQ ID NO: 439455 - DNA, 516 bp, Homo sapiens
ggcagagagaggctatgtaacttttccaggatggagtcaggattcaagcccacacagtatatactctagtgtactagaaaatgtggctcctgatctaatggtgacagactaacatgtcaggggtccacattgctaatactgatcgagattcagcaatcaaaactataatcttaattaataaagctaataattataaactaaattcatataaaattagaaaagcacttcctgctttaaaccacaagctaagttttctttattcattttggatagcaaggctttcattctgaaaactttgaggaacgttggattttatcgtaaacataataagtgacattaattttccagtatyccactacatttcctatttatataattgaatttcatacaaaggattttttccaacagatttctgagaaaagattatattaaatgtgttactggaattattttattttagtgtattattcaaatatatattgtaggggaatatttgcattgattatggctaggtag

SEQ ID NO: 439456 - DNA, 623 bp, Homo sapiens
ataagttttttactattctatttgcctgagggaaacattccaggaactgtacttcacatgccttagaagatcaatactgctgttggagagtaatagtaaacatagaatgagaaaaagaaatgtataggttgcaataatccagaaaaaaccttttcgggaagaaaactttgttagtcaactaaaaaaaaatagctcaaatattagcattttctttaagcaacaaataaagacatgattataagtataagggaagtgctaaaaatgtgaaagtctgtagtcaatctttttcaagtttcccttagttcatggccagggaataataatcttagatgtcttcatttacatttgacagagagttttgtttttatcatgaacacataataagttatgtaacaaggaataattgtttaatttacacatattttactcagaatgtgcttattcatcatgcacttgatacattaattccttgtaagtacattaacccaatgtgagaaaatcaaacttctaaattttaaaatgatacataaaatggagaacttttgaagtgcagtttaytatatgtatttcagatactgtgaatgaaatggatagccatgcaaaaagtactagtaatatttttg

SEQ ID NO: 439457 - DNA, 582 bp, Homo sapiens
aagggagattccagtaacttggatcttaattttgaggttattatagatatatagtttaaattaaatataacctgaaaaataaggtagctgcatagagaaatgccattttatagtaattcataactaagttgactaatagtaataggtatgtctgtcccggtactatgaaactgtttatgccttctaataggtcagtttattataatagatcawcttttccaccttgaaaagaagtaaacagtcagtgttaggaaatccacaaatgcagaaataccaaggtagcattgttattaaatgtactcatttgaatatatttcatttgaaatttcatctggtatattacacttgttgtttgactatgcagattcctgggggattttttttcttgtcttggtgcaatcctaaccaacatagcattatttaggatcactttgagaagttaacaagataaacaccaatagatttattaaataacaagaaagtcagatgctcacatataaataatatcctgatattttttaagtcattaatgctttttgcaacccattgcccatatgtatctaagctacactgttaaatagc

SEQ ID NO: 439458 - DNA, 554 bp, Homo sapiens
ggattacaggcatgagccaccttacccagcctaatatagtaatttttattatgcataaaaagttataaagtaaatatgcctcatgggacatcattgtttcatttttatatgaaataaagtaactttctatttttacatggaaatcagaattcatatgtctcacgtgtttttggtgttgttatccacaggagaccaatcattttgcaatggcagtccctaatgatctattccctaatcaactggaaatacttccaaatcagttaataaacttctttcartgtttaaagtttgaaatatctaagttgggttaaagggaaagctcatgtttagttgtcagtgtatctcagcagcacatcatgggaatatttatttgtattgttggaaacatgttttctttcctgttatgtgctggaggagttggctcatgggttgcaggaccaaaacctgaaaatatctctgactgtgtgtcaccagaccacacaatgaatacatcacttaggttagcatgagaaaaggggaaaaacagctgtgaagcccatgaactttccaagaag

SEQ ID NO: 439459 - DNA, 554 bp, Homo sapiens
ggattacaggcatgagccaccttacccagcctaatatagtaatttttattatgcataaaaagttataaagtaaatatgcctcatgggacatcattgtttcatttttatatgaaataaagtaactttctatttttacatggaaatcagaattcatatgtctcacgtgtttttggtgttgttatccacaggagaccaatcattttgcaatggcagtccctaatgatctattccctaatcaactggaaatacttccaaatcagttaataaacttctttcaatgtttaaagtttgaaatatctaagttgggttaaagggaaagctcatgtttagttgtcagtgtatctcagcagcacatcatgggaatatttatttgtattgttggraacatgttttctttcctgttatgtgctggaggagttggctcatgggttgcaggaccaaaacctgaaaatatctctgactgtgtgtcaccagaccacacaatgaatacatcacttaggttagcatgagaaaaggggaaaaacagctgtgaagcccatgaactttccaagaag

SEQ ID NO: 439460 - DNA, 612 bp, Homo sapiens
ctcatgtttagttgtcagtgtatctcagcagcacatcatgggaatatttatttgtattgttggaaacatgttttctttcctgttatgtgctggaggagttggctcatgggttgcaggaccaaaacctgaaaatatctctgactgtgtgtcaccagaccacacaatgaatacatcacttaggttagcatgagaaaargggaaaaacagctgtgaagcccatgaactttccaagaaggtaaaggagaaaaaaaaaaaaagttgggtttgaagtctaagttttactatgaacagcaccctgctgagatcataaaaatgaaaaataccatcaagatacatgaaaaaggaaacaccaaagggaagagtgataacaaggctccacagagcgcagtttcctttgacaagatgaaaaagaaatgaaaagaggaaggagataaatggaacagccctctacctaaagtttctgtccatggagaaactgacatttaagtgctgctcaacaggaaaaagaaaaaagacctggttattgaagttggctttgttggagatgcgttactcagatacagatacaaagatgggtttggccaatgggcatccgtgtcaagaagcctgacc

SEQ ID NO: 439461 - DNA, 612 bp, Homo sapiens
ctcatgtttagttgtcagtgtatctcagcagcacatcatgggaatatttatttgtattgttggaaacatgttttctttcctgttatgtgctggaggagttggctcatgggttgcaggaccaaaacctgaaaatatctctgactgtgtgtcaccagaccacacaatgaatacatcacttaggttagcatgagaaaaggggaaaaacagctgtgaagcccatgaactttccaagaaggtaaaggagaaaaaaaaaaaaagwtgggtttgaagtctaagttttactatgaacagcaccctgctgagatcataaaaatgaaaaataccatcaagatacatgaaaaaggaaacaccaaagggaagagtgataacaaggctccacagagcgcagtttcctttgacaagatgaaaaagaaatgaaaagaggaaggagataaatggaacagccctctacctaaagtttctgtccatggagaaactgacatttaagtgctgctcaacaggaaaaagaaaaaagacctggttattgaagttggctttgttggagatgcgttactcagatacagatacaaagatgggtttggccaatgggcatccgtgtcaagaagcctgacc

SEQ ID NO: 439462 - DNA, 612 bp, Homo sapiens
ctcatgtttagttgtcagtgtatctcagcagcacatcatgggaatatttatttgtattgttggaaacatgttttctttcctgttatgtgctggaggagttggctcatgggttgcaggaccaaaacctgaaaatatctctgactgtgtgtcaccagaccacacaatgaatacatcacttaggttagcatgagaaaaggggaaaaacagctgtgaagcccatgaactttccaagaaggtaaaggagaaaaaaaaaaaaagttgggtttgaagtctaagttttactatgaacagcaccctgctgagatcataaaaatgaaaaataccatcaagatacatgaaaaaggaaacaccaaagggaagagtgataacaaggctccacagagygcagtttcctttgacaagatgaaaaagaaatgaaaagaggaaggagataaatggaacagccctctacctaaagtttctgtccatggagaaactgacatttaagtgctgctcaacaggaaaaagaaaaaagacctggttattgaagttggctttgttggagatgcgttactcagatacagatacaaagatgggtttggccaatgggcatccgtgtcaagaagcctgacc

SEQ ID NO: 439463 - DNA, 621 bp, Homo sapiens
aaactgacatttaagtgctgctcaacaggaaaaagaaaaaagacctggttattgaagttggctttgttggagatgcgttactcagatacagatacaaagatgggtttggccaatgggcatccgtgtcaagaagcctgacctaacacgttctgaatattaagctaccttttatctgccagtccttggtgttcagaagaatccctcctcctcaccctaacttctatggggctatttccaaagacactgtcattgaagtgaggaagagtgagttgggccttatgacacaaagagacaagactatttgaggacaatagacacaggttttcatatacattccatgttattctgaattactgatgggttcrctgatggaattattgagtatagccaataaggagaaccacagttaagctggtgtctctgggttctggacatcatcctcaagaaaactatttactaattacattgaatgaggttattaaaatgtgtaagtttcacacaaaaacaaaaagacaattcattccaaattgtgcatatggatatataatgttaattatgggaattccattttaagaattactacaattctatgtgttctgtataaaaacaggaaaatagttg

SEQ ID NO: 439464 - DNA, 621 bp, Homo sapiens
aaactgacatttaagtgctgctcaacaggaaaaagaaaaaagacctggttattgaagttggctttgttggagatgcgttactcagatacagatacaaagatgggtttggccaatgggcatccgtgtcaagaagcctgacctaacacgttctgaatattaagctaccttttatctgccagtccttggtgttcagaagaatccctcctcctcaccctaacttctatggggctatttccaaagacactgtcattgaagtgaggaagagtgagttgggccttatgacacaaagagacaagactatttgaggacaatagacacaggttttcatatacattccatgttattctgaattactgatgggttcactgatggaattattgagtatagccaataaggagaaccacagttaagctggtgtctctgggttctggayatcatcctcaagaaaactatttactaattacattgaatgaggttattaaaatgtgtaagtttcacacaaaaacaaaaagacaattcattccaaattgtgcatatggatatataatgttaattatgggaattccattttaagaattactacaattctatgtgttctgtataaaaacaggaaaatagttg

SEQ ID NO: 439465 - DNA, 631 bp, Homo sapiens
atttggtaattagtgagtgagtgaggcagtgagatgctccatgcccccactagaggaacagattgctgcttccttttagactgttctgtgtggtacaccccgctgccactaaagtgttcttttgaccaaaatgactatatatgagaaatatgaaatgcatatttctgcagatgtaccttcccatatacaaggaatacccttgagctccatttcctgacaaacatataccagcctccatcccaaagaactagggtcaggacctcatggaacagacaatacctagaggcacattcctctcctgtcctccttctcctttcccttctcygccctgccgctcagggtctgtgcacaaatattctatacacagtaggcaattgataactatcactttacagggaaagatgcccggcaaataccaagagttcttattctttcattgatggctgattcgttttctgggatagccgggcaccctggaagaatctcagctcctccacttactgcccttctgaaatgtaaatcacgaagcctcctaagcctcagctgttttcacttgtgaagtggtaaacctcagatctcctttgcagggagaacaataggaagtctgattttattagcacaatgcccaccc

SEQ ID NO: 439466 - DNA, 631 bp, Homo sapiens
atttggtaattagtgagtgagtgaggcagtgagatgctccatgcccccactagaggaacagattgctgcttccttttagactgttctgtgtggtacaccccgctgccactaaagtgttcttttgaccaaaatgactatatatgagaaatatgaaatgcatatttctgcagatgtaccttcccatatacaaggaatacccttgagctccatttcctgacaaacatataccagcctccatcccaaagaactagggtcaggacctcatggaacagacaatacctagaggcacattcctctcctgtcctccttctcctttcccttctccgcccygccgctcagggtctgtgcacaaatattctatacacagtaggcaattgataactatcactttacagggaaagatgcccggcaaataccaagagttcttattctttcattgatggctgattcgttttctgggatagccgggcaccctggaagaatctcagctcctccacttactgcccttctgaaatgtaaatcacgaagcctcctaagcctcagctgttttcacttgtgaagtggtaaacctcagatctcctttgcagggagaacaataggaagtctgattttattagcacaatgcccaccc

SEQ ID NO: 439467 - DNA, 631 bp, Homo sapiens
atttggtaattagtgagtgagtgaggcagtgagatgctccatgcccccactagaggaacagattgctgcttccttttagactgttctgtgtggtacaccccgctgccactaaagtgttcttttgaccaaaatgactatatatgagaaatatgaaatgcatatttctgcagatgtaccttcccatatacaaggaatacccttgagctccatttcctgacaaacatataccagcctccatcccaaagaactagggtcaggacctcatggaacagacaatacctagaggcacattcctctcctgtcctccttctcctttcccttctccgccctgccgctcagggtctgtgcacaaatattctatacacagtaggcaattgataactatcactttacagggaaagatgcccggcaaataccaagagttcttattctttcrttgatggctgattcgttttctgggatagccgggcaccctggaagaatctcagctcctccacttactgcccttctgaaatgtaaatcacgaagcctcctaagcctcagctgttttcacttgtgaagtggtaaacctcagatctcctttgcagggagaacaataggaagtctgattttattagcacaatgcccaccc

SEQ ID NO: 439468 - DNA, 549 bp, Homo sapiens
agattttgtttgtttgtttgtttgtttgaagattttaaagatgtacaattacaagttttctgaaagaaatgctctaaggaaaaaaagtgaatgacagtgtgtatcccttttagcactaagaaagcttttgtttgttttggtttgtgtttacccttacaccagtaaggcctgtttaaagaagtaccacacatttatagtcagaaaagagatgccgactagctaaacttttcaatatccaaagggaaaggcaaatcccttctctgtacacactttgcatctctatggacaagcattatttgcattattatcaatgtkctgcaagttaacttctgtcactacacagctgtaaagtaactagtccaagatgatggtttacaatcccgtaatatcagctgatctttccattgaaaagatacccagtaatctcctttgcccatttcaaagactgccctcaatttttttcctacagtagttggttcagttttactgctgatgagttgcatatattctggattcaatgaagtgctgaacaagcacttcatccagttc

SEQ ID NO: 439469 - DNA, 557 bp, Homo sapiens
tgattatgaagtactttcaaaacattgacaatgtaaacaaatattaattaataggagacaarcatattaaatgaatccagtataattggtgttacactggtgcaaagtattgaatgtttgcttccccaccccagattcatatgttgaaatcctgaccccaaagtcatggtgtcaggaggctttggagggtaattaagtcaggagggtggagccctaatgaatggaattagtgcccttataaaagaggcccaagagaactcccttgcctttcctgccatgtgaagttataaggcgaagactgtggtctgtgaagcagacactgcatctgctttgcctcaaactcagacttagactttccagcatccagactgagagaaataactgtttgttgtataagccactctgttcatggggttctgttaatagcagcccaaactgactatgagaactcatacagctaaagaaatggaaacaagtggatcttttgattataaaggaagtttggatttttttaaattaaaagaaccactaggaataacagcaaaaccctgctatgt

SEQ ID NO: 439470 - DNA, 557 bp, Homo sapiens
tgattatgaagtactttcaaaacattgacaatgtaaacaaatattaattaataggagacaagcatattaaatgaatccagtataattggtgttacactggtgcaaagtattgaatgtttgcttccccaccccagattcatatgttgaaatcctgaccccaaagtcatggtgtcaggaggctttggagggtaattaagtcaggagggtggagccctaatgaatggaattagtgcccttataaaagaggcccaagagaactcccttgcctttcctgccatgtgaagttataaggcgaasactgtggtctgtgaagcagacactgcatctgctttgcctcaaactcagacttagactttccagcatccagactgagagaaataactgtttgttgtataagccactctgttcatggggttctgttaatagcagcccaaactgactatgagaactcatacagctaaagaaatggaaacaagtggatcttttgattataaaggaagtttggatttttttaaattaaaagaaccactaggaataacagcaaaaccctgctatgt

SEQ ID NO: 439471 - DNA, 557 bp, Homo sapiens
tgattatgaagtactttcaaaacattgacaatgtaaacaaatattaattaataggagacaagcatattaaatgaatccagtataattggtgttacactggtgcaaagtattgaatgtttgcttccccaccccagattcatatgttgaaatcctgaccccaaagtcatggtgtcaggaggctttggagggtaattaagtcaggagggtggagccctaatgaatggaattagtgcccttataaaagaggcccaagagaactcccttgcctttcctgccatgtgaagttataaggcgaagactgtggtctgtgaagcagacactgcatctgctttgcctcaaactcagacttagactttccagcatccagactgagagaaataactgtttgttgtrtaagccactctgttcatggggttctgttaatagcagcccaaactgactatgagaactcatacagctaaagaaatggaaacaagtggatcttttgattataaaggaagtttggatttttttaaattaaaagaaccactaggaataacagcaaaaccctgctatgt

SEQ ID NO: 439472 - DNA, 557 bp, Homo sapiens
tgattatgaagtactttcaaaacattgacaatgtaaacaaatattaattaataggagacaagcatattaaatgaatccagtataattggtgttacactggtgcaaagtattgaatgtttgcttccccaccccagattcatatgttgaaatcctgaccccaaagtcatggtgtcaggaggctttggagggtaattaagtcaggagggtggagccctaatgaatggaattagtgcccttataaaagaggcccaagagaactcccttgcctttcctgccatgtgaagttataaggcgaagactgtggtctgtgaagcagacactgcatctgctttgcctcaaactcagacttagactttccagcatccagactgagagaaataactgtttgttgtataagccactctgttcatgggrttctgttaatagcagcccaaactgactatgagaactcatacagctaaagaaatggaaacaagtggatcttttgattataaaggaagtttggatttttttaaattaaaagaaccactaggaataacagcaaaaccctgctatgt

SEQ ID NO: 439473 - DNA, 581 bp, Homo sapiens
cctatacattgcattttacctcatcagtatttgtggtatttcgcaaagaatatatacttttccaaatatacagccacagacattcaaagacttcactgagctgtcctctggcacacaggtgtatttaaattgttaaagaaaattaaaatggcctgaggtatctctgaccagacaaagccttktaagtggccttaactttgcttgatttaccaatataagcaaaacttaacttgagctatttcttgtaaatggctttaaaaataaaaaaagtcaaacttaaggctaaccaatcagaagccaattaacttatataactagagactttccagcaggatcaaccaaataaggcaattgtataactacaaccagtgaaaaatttgctactatatttaccttacagaagctgtccctttttgttcccttgaaagggtccctgaaccagttcccatttgaagctgcttcaacagtgattcatgaatcactgttagctcaaataaacttttgtgcctccatttaccttttattaatggatacatttatatctgtagttggatgcttttttcctctaagcagacacaaag

SEQ ID NO: 439474 - DNA, 581 bp, Homo sapiens
cctatacattgcattttacctcatcagtatttgtggtatttcgcaaagaatatatacttttccaaatatacagccacagacattcaaagacttcactgagctgtcctctggcacacaggtgtatttaaattgttaaagaaaattaaaatggcctgaggtatctctgaccagacaaagccttgtaagtggcsttaactttgcttgatttaccaatataagcaaaacttaacttgagctatttcttgtaaatggctttaaaaataaaaaaagtcaaacttaaggctaaccaatcagaagccaattaacttatataactagagactttccagcaggatcaaccaaataaggcaattgtataactacaaccagtgaaaaatttgctactatatttaccttacagaagctgtccctttttgttcccttgaaagggtccctgaaccagttcccatttgaagctgcttcaacagtgattcatgaatcactgttagctcaaataaacttttgtgcctccatttaccttttattaatggatacatttatatctgtagttggatgcttttttcctctaagcagacacaaag

SEQ ID NO: 439475 - DNA, 581 bp, Homo sapiens
cctatacattgcattttacctcatcagtatttgtggtatttcgcaaagaatatatacttttccaaatatacagccacagacattcaaagacttcactgagctgtcctctggcacacaggtgtatttaaattgttaaagaaaattaaaatggcctgaggtatctctgaccagacaaagccttgtaagtggccttaactttgcttgatttaccaatataagcaaaacttaacttgagctatttcttgtaaatgkctttaaaaataaaaaaagtcaaacttaaggctaaccaatcagaagccaattaacttatataactagagactttccagcaggatcaaccaaataaggcaattgtataactacaaccagtgaaaaatttgctactatatttaccttacagaagctgtccctttttgttcccttgaaagggtccctgaaccagttcccatttgaagctgcttcaacagtgattcatgaatcactgttagctcaaataaacttttgtgcctccatttaccttttattaatggatacatttatatctgtagttggatgcttttttcctctaagcagacacaaag

SEQ ID NO: 439476 - DNA, 581 bp, Homo sapiens
cctatacattgcattttacctcatcagtatttgtggtatttcgcaaagaatatatacttttccaaatatacagccacagacattcaaagacttcactgagctgtcctctggcacacaggtgtatttaaattgttaaagaaaattaaaatggcctgaggtatctctgaccagacaaagccttgtaagtggccttaactttgcttgatttaccaatataagcaaaacttaacttgagctatttcttgtaaatggctttaaaaataaaaaaagtcaaacttaaggctaaccaatcagaagccaattaacttatataactagagactttccagcaggatcaaccaaataaggcaattgtataastacaaccagtgaaaaatttgctactatatttaccttacagaagctgtccctttttgttcccttgaaagggtccctgaaccagttcccatttgaagctgcttcaacagtgattcatgaatcactgttagctcaaataaacttttgtgcctccatttaccttttattaatggatacatttatatctgtagttggatgcttttttcctctaagcagacacaaag

SEQ ID NO: 439477 - DNA, 521 bp, Homo sapiens
tttgtggcagcaagaatgagaatgactctccaagatgccctggaaactgaatatgttacatcacataagggattttgcagatgtaattaaggttgcagaccttaggagaygatcgtgattcatgcagtgggctccatgtaatcacatgagcacttaagagatttaactctggttggaggcagaagagacacagaagagaggtgtgggtgaggggaagccagagaaactagaagcaggagaatgtctctctgcaccattgctggtttagaaaataaactgggcactatgaagagcaacgcaggcagcctgacattgctgagaggccccaactaccagccagtgatgaattgggacctcactcctacaactacaagaagttgaattctgctctaacctgtatgtgcttggacacacattctgccctagggccttcataaggagcccaagagcaccttgattttgtccttgtaagactataagcagagtcatcagtccagccctcccacacttctaaagtgaga

SEQ ID NO: 439478 - DNA, 521 bp, Homo sapiens
tttgtggcagcaagaatgagaatgactctccaagatgccctggaaactgaatatgttacatcacataagggattttgcagatgtaattaaggttgcagaccttaggagatgatcgtgattcatgcagtgggctccatgtaatcacatgagcacttaagagatttaactctggttggaggcagaagagacacagaagagaggtgtgggtgaggggaagccagagaaactagaagcaggagaatgtctctctgcaccattgctggtttagaaaatraactgggcactatgaagagcaacgcaggcagcctgacattgctgagaggccccaactaccagccagtgatgaattgggacctcactcctacaactacaagaagttgaattctgctctaacctgtatgtgcttggacacacattctgccctagggccttcataaggagcccaagagcaccttgattttgtccttgtaagactataagcagagtcatcagtccagccctcccacacttctaaagtgaga

SEQ ID NO: 439479 - DNA, 521 bp, Homo sapiens
tttgtggcagcaagaatgagaatgactctccaagatgccctggaaactgaatatgttacatcacataagggattttgcagatgtaattaaggttgcagaccttaggagatgatcgtgattcatgcagtgggctccatgtaatcacatgagcacttaagagatttaactctggttggaggcagaagagacacagaagagaggtgtgggtgaggggaagccagagaaactagaagcaggagaatgtctctctgcaccattgctggtttagaaaataaactgggcactatgaagagcaaygcaggcagcctgacattgctgagaggccccaactaccagccagtgatgaattgggacctcactcctacaactacaagaagttgaattctgctctaacctgtatgtgcttggacacacattctgccctagggccttcataaggagcccaagagcaccttgattttgtccttgtaagactataagcagagtcatcagtccagccctcccacacttctaaagtgaga

SEQ ID NO: 439480 - DNA, 553 bp, Homo sapiens
tccttcagagcaaactttccaagagcaactgtgaaaacagacaatgtcaatctgcaaagtttctgattgttttctttcctcatattccgaggtgtgcatatgtgcctcaaattgtattaaaacatttgctatagatgacagattttataacaaaaaacaaataagccaatatatccaagacctatcatttcaaaggtaaaatatttaggaagcactaaaagggataagaatgaaagtactattcatttttttaagtgatactaaataaagttgattatagaaaatgatttgtcaaagtataaatatagtatcacctttagggtttaaattctacaggtgagattattcaagagcccatttccataaatatatacatgctaatgtgagaaatgyttttgagttatttttatgcatatcataattttattcatttttactgtgaaatagatcatatatgtacagttaaaaatattgctaatttttcaaaagaatgtatatattgttacatgaatataccacattttatcagttctactgtcccattttgctattg

SEQ ID NO: 439481 - DNA, 553 bp, Homo sapiens
tccttcagagcaaactttccaagagcaactgtgaaaacagacaatgtcaatctgcaaagtttctgattgttttctttcctcatattccgaggtgtgcatatgtgcctcaaattgtattaaaacatttgctatagatgacagattttataacaaaaaacaaataagccaatatatccaagacctatcatttcaaaggtaaaatatttaggaagcactaaaagggataagaatgaaagtactattcatttttttaagtgatactaaataaagttgattatagaaaatgatttgtcaaagtataaatatagtatcacctttagggtttaaattctacaggtgagattattcaagagcccatttccataaatatatacatgctaatgtgagaaatgcttttgwgttatttttatgcatatcataattttattcatttttactgtgaaatagatcatatatgtacagttaaaaatattgctaatttttcaaaagaatgtatatattgttacatgaatataccacattttatcagttctactgtcccattttgctattg

SEQ ID NO: 439482 - DNA, 578 bp, Homo sapiens
cgtatatcttggaggtccttccaagagtctcagtatctaacagccatggaggctgtgacctttttccttcttttctcagcctgcttgtcatttaagggtcaccagagatgactcatgctctagttcttaaaatcaaacttgttccaccaaatccaagatgctgaatttgtacaaatgtaaaaacatcctcttgccacctgtccaccaaaataccttctattcaagtgaacaacagctttaattgctgactcaactctcaaattctaaaaaggtctgtgcttcatcatcagggacaccaagaatttcacatatcacacrttttctaactttgccatatttttcatggcaaaattgggaaataccatggactttatccatcaagcctgttttctctgagccaatataaattgacaatggaaaagaaaaagaaacataacagaatgaactcattatgaaaactagattaactatactcttttcagtttcacttattttatccttaatgatgctatgtctcataggaaaccatatcaactgaaaaatatgtcatcacacattcttctctggtttcaacttcc

SEQ ID NO: 439483 - DNA, 578 bp, Homo sapiens
cgtatatcttggaggtccttccaagagtctcagtatctaacagccatggaggctgtgacctttttccttcttttctcagcctgcttgtcatttaagggtcaccagagatgactcatgctctagttcttaaaatcaaacttgttccaccaaatccaagatgctgaatttgtacaaatgtaaaaacatcctcttgccacctgtccaccaaaataccttctattcaagtgaacaacagctttaattgctgactcaactctcaaattctaaaaaggtctgtgcttcatcatcagggacaccaagaatttcacatatcacacattttcyaactttgccatatttttcatggcaaaattgggaaataccatggactttatccatcaagcctgttttctctgagccaatataaattgacaatggaaaagaaaaagaaacataacagaatgaactcattatgaaaactagattaactatactcttttcagtttcacttattttatccttaatgatgctatgtctcataggaaaccatatcaactgaaaaatatgtcatcacacattcttctctggtttcaacttcc

SEQ ID NO: 439484 - DNA, 532 bp, Homo sapiens
aaaatgtctttattttcattttttaatgtttttttcactgcatctagaattttaartagaaatattcttactttaagtacttaaataaaatttctagttatatcatacaatgattagattttttaaaaatattttttcacatgtactttgaagtttttaatttctgttcatacaatgctgccattataatggcacttaaatatcactacaacccaagcatttttctgagtgtccagtacgtatccattcacttaatgttcacaggaagatttggaggcatgccctgttattatccccacttaagaggccaagagagtacttgcccagagttgctcagttagtaaaccatgttccataggtgaataaaactttgcctttgcaaacttcaaatgttgaaagataggtttaaagggtgattattgttattattttttaacttttattttaggttcaggggtacatgtgctgatttgttaggtaaattacacatcataggggtttggtgtacacattattttgccacccaggtaat

SEQ ID NO: 439485 - DNA, 532 bp, Homo sapiens
aaaatgtctttattttcattttttaatgtttttttcactgcatctagaattttaagtagaaatattcttactttaagtacttaaataaaatttctagttatatcatacaatgattagattttttaaaaatatttyttcacatgtactttgaagtttttaatttctgttcatacaatgctgccattataatggcacttaaatatcactacaacccaagcatttttctgagtgtccagtacgtatccattcacttaatgttcacaggaagatttggaggcatgccctgttattatccccacttaagaggccaagagagtacttgcccagagttgctcagttagtaaaccatgttccataggtgaataaaactttgcctttgcaaacttcaaatgttgaaagataggtttaaagggtgattattgttattattttttaacttttattttaggttcaggggtacatgtgctgatttgttaggtaaattacacatcataggggtttggtgtacacattattttgccacccaggtaat

SEQ ID NO: 439486 - DNA, 532 bp, Homo sapiens
aaaatgtctttattttcattttttaatgtttttttcactgcatctagaattttaagtagaaatattcttactttaagtacttaaataaaatttctagttatatcatacaatgattagattttttaaaaatattttttcacatgtactttgaagtttttaatttctgttcatacaatgctgccattataatggcacttaaatatcactacaacccaagcatttttctgagtgtccagtacgtatccattcacttaatgttcacaggaagatttggaggcatgccctgttattatccccacttaagaggccaagagagtacttgcccagagttgctcagttagtaaaccatgttccataggtgaataaaactttgcctttgcaaacttyaaatgttgaaagataggtttaaagggtgattattgttattattttttaacttttattttaggttcaggggtacatgtgctgatttgttaggtaaattacacatcataggggtttggtgtacacattattttgccacccaggtaat

SEQ ID NO: 439487 - DNA, 532 bp, Homo sapiens
aaaatgtctttattttcattttttaatgtttttttcactgcatctagaattttaagtagaaatattcttactttaagtacttaaataaaatttctagttatatcatacaatgattagattttttaaaaatattttttcacatgtactttgaagtttttaatttctgttcatacaatgctgccattataatggcacttaaatatcactacaacccaagcatttttctgagtgtccagtacgtatccattcacttaatgttcacaggaagatttggaggcatgccctgttattatccccacttaagaggccaagagagtacttgcccagagttgctcagttagtaaaccatgttccataggtgaataaaactttgcctttgcaaacttcaaatgttgaaagataggtttaaagggtgattattgttattattttttaacttttattttagkttcaggggtacatgtgctgatttgttaggtaaattacacatcataggggtttggtgtacacattattttgccacccaggtaat

SEQ ID NO: 439488 - DNA, 549 bp, Homo sapiens
tcaaatcagtgattgatgagaatacacagtgtatttttcctctaggccacagaaactaatttctgaaatgaaatttttttaactaattgactttttgctagtttttgaatagcccaaagaaaatgggattatattctcaaattcaaatcatcatcatcatcataatcatagcttatgtttttgagcacttcccacatacttccttaagccctttgctcagagatggtcagtatttcattgtcatgacaaccataatcamcttcacccaaatttgtctgaaatgcatgattcccaagtttatatagaaatattgatattttcttttattcttttttttttttttttgagacagtctcgctctttgcccaggttggagtgcagtggtgggatctcagctcactgcaacctccgcctcctgggttcaagagattctcctgccttagcctcccgagtagctgggattatagatgcctgccaccacgcccagctaatttttgtatttttagtagagactgggtttcaccatgttggccaggctggtctggaact

SEQ ID NO: 439489 - DNA, 549 bp, Homo sapiens
tcaaatcagtgattgatgagaatacacagtgtatttttcctctaggccacagaaactaatttctgaaatgaaatttttttaactaattgactttttgctagtttttgaatagcccaaagaaaatgggattatattctcaaattcaaatcatcatcatcatcataatcatagcttatgtttttgagcacttcccacatacttccttaagccctttgctcagagatggtcagtatttcattgtcatgacaaccataatcaccttcacccaaatttgtctgaaatgcatgattcccaagtttatatagaaatattgatattttcttttattcttttttttttttttttgagacagtctcrctctttgcccaggttggagtgcagtggtgggatctcagctcactgcaacctccgcctcctgggttcaagagattctcctgccttagcctcccgagtagctgggattatagatgcctgccaccacgcccagctaatttttgtatttttagtagagactgggtttcaccatgttggccaggctggtctggaact

SEQ ID NO: 439490 - DNA, 549 bp, Homo sapiens
tcaaatcagtgattgatgagaatacacagtgtatttttcctctaggccacagaaactaatttctgaaatgaaatttttttaactaattgactttttgctagtttttgaatagcccaaagaaaatgggattatattctcaaattcaaatcatcatcatcatcataatcatagcttatgtttttgagcacttcccacatacttccttaagccctttgctcagagatggtcagtatttcattgtcatgacaaccataatcaccttcacccaaatttgtctgaaatgcatgattcccaagtttatatagaaatattgatattttcttttattcttttttttttttttttgagacagtctcgctctttgcccaggttggagtgcagtggtgggatctcagctcactgcaacctccgcctcctgggttcaagagattctcctgccttagcctcccgagtagctgggattatagatgcctgccaccamgcccagctaatttttgtatttttagtagagactgggtttcaccatgttggccaggctggtctggaact

SEQ ID NO: 439491 - DNA, 454 bp, Homo sapiens
ggcccaatagcaacctgtcctctgggattccgtcttccaagttggagcaactgggagaacaacaggggccactggaactgtccaacagagtcctgcagctgcaggacagccatggggtagatggaggacagtcagaattctctgctgctttcatttcccacmgagctgttgtccccgtcttcctccccatagtcagtgctgtgggctcactttgcaaaccacacaaggaccggcctgtgagaaacttccagtagaaaatcctgccaccctgagaaaccaggagtttccagaatctttctgtccacatgtcacctacttataaactgagggaggcagtgctggattctgtggtgaggcagggttggggggaagggtttttaacttgaagatctaaataaaccagagttcaagacctgtcacaattccaagtatgatgtaaatcactcatccccct

SEQ ID NO: 439492 - DNA, 454 bp, Homo sapiens
ggcccaatagcaacctgtcctctgggattccgtcttccaagttggagcaactgggagaacaacaggggccactggaactgtccaacagagtcctgcagctgcaggacagccatggggtagatggaggacagtcagaattctctgctgctttcatttcccaccgagctgttgtccccgtcttcctccccayagtcagtgctgtgggctcactttgcaaaccacacaaggaccggcctgtgagaaacttccagtagaaaatcctgccaccctgagaaaccaggagtttccagaatctttctgtccacatgtcacctacttataaactgagggaggcagtgctggattctgtggtgaggcagggttggggggaagggtttttaacttgaagatctaaataaaccagagttcaagacctgtcacaattccaagtatgatgtaaatcactcatccccct

SEQ ID NO: 439493 - DNA, 332 bp, Homo sapiens
acactttgaaaaaggaagatgttttcctactctgtctttctmgaagagttgtgtctggtcctactcaagtctgcagagggtcagtttcctgttcacttgctcacagcagcttgcagtccttctcagtcccaacttctaattttattcattttcaccccaatgtagaatttgtttctcacagtactcatcaacgtaagccacggttcagtcttcctatgcaatgtatattaaatactgtattacattttaaaatacgagttatgagatgttagtcacattcattaatctgcatgtgaaaatacaactaaaatgtgggcacggtgagtccctgg

SEQ ID NO: 439494 - DNA, 569 bp, Homo sapiens
ccaagaaaggggcaggcaattcccagaactgagggttcctccccactttagaccacatagcgtaacttctggacgttgccatggcatttgtaaactgtcatggcgctggtggaagtgtcttttagcatgctaatgaattataattaacttatactgagcaataaggatgaccagaggtcactctcatagccttcttggttttggtgggatttggccagcttctttaccgtatcctgttttatcagcaaggtatttgtgacctgtatcttgcgccgacctcctgtctcatcctgtgactaagaataccttaacctcctaggaatggagcccaacaggtctcagcctcagtgttcccagcccctacgcaagatggttcaaatgcttctgataaagggactcatataktaggaattcacaatctgaaatgagcaataatattctgaatgtaaagatagcctaaatgacatgttttagccagtggcatataaaattagatttgtcatgaattgatgtcatacgtataatttgggggaaaggccagcatagaataattgtaagatagaatggaa

SEQ ID NO: 439495 - DNA, 569 bp, Homo sapiens
ccaagaaaggggcaggcaattcccagaactgagggttcctccccactttagaccacatagcgtaacttctggacgttgccatggcatttgtaaactgtcatggcgctggtggaagtgtcttttagcatgctaatgaattataattaacttatactgagcaataaggatgaccagaggtcactctcatagccttcttggttttggtgggatttggccagcttctttaccgtatcctgttttatcagcaaggtatttgtgacctgtatcttgcgccgacctcctgtctcatcctgtgactaagaataccttaacctcctaggaatggagcccaacaggtctcagcctcagtgttcccagcccctacgcaagatggttcaaatgcttctgataaagggactcatatattaggaattcacaatctgaaatgagcaataatattctgaatgtaaagatagcytaaatgacatgttttagccagtggcatataaaattagatttgtcatgaattgatgtcatacgtataatttgggggaaaggccagcatagaataattgtaagatagaatggaa

SEQ ID NO: 439496 - DNA, 569 bp, Homo sapiens
ccaagaaaggggcaggcaattcccagaactgagggttcctccccactttagaccacatagcgtaacttctggacgttgccatggcatttgtaaactgtcatggcgctggtggaagtgtcttttagcatgctaatgaattataattaacttatactgagcaataaggatgaccagaggtcactctcatagccttcttggttttggtgggatttggccagcttctttaccgtatcctgttttatcagcaaggtatttgtgacctgtatcttgcgccgacctcctgtctcatcctgtgactaagaataccttaacctcctaggaatggagcccaacaggtctcagcctcagtgttcccagcccctacgcaagatggttcaaatgcttctgataaagggactcatatattaggaattcacaatctgaaatgagcaataatattctgaatgtaaagatagcctaaatgacatgttttagccagtggcatataaaattagatttgtcatgaattgatgtcataygtataatttgggggaaaggccagcatagaataattgtaagatagaatggaa

SEQ ID NO: 439497 - DNA, 587 bp, Homo sapiens
tttgaaacatgcatacataattgaatgagtacatcaagctaattaaatatgcattacctcacatacttatttttgtggtgagaaaactaaaaatctattctcagcaattttcaagaacacagtactwtgttattaactatagtcaccattttgtgcgatagatttcttgaacttattcctcctacataactgaaattttgtatcctttgaccaacatctccccaactcccaaactcgctagtccctggtaacaactattccaccttctgcttctatgggctcaacatttttagactccacatataagctggatcctgtagtattggtctttctgtgcctgacttattacaccgaacataatgtcctccaggttcatctatgttctcacaaataaataggatttcttttattttatggccaaatagcattccattgtgtatgtacaccacattttctttatccattcatccacagatggacacttcagttgattccaaatcttggctattatgaataatactgcaatgaacatggttgtacagatatctaaaagacatactgatttaatttcctttggatacatacac

SEQ ID NO: 439498 - DNA, 587 bp, Homo sapiens
tttgaaacatgcatacataattgaatgagtacatcaagctaattaaatatgcattacctcacatacttatttttgtggtgagaaaactaaaaatctattctcagcaattttcaagaacacagtactttgttattaactatagtcaccattttgtgcgatagatttcttgaacttattcytcctacataactgaaattttgtatcctttgaccaacatctccccaactcccaaactcgctagtccctggtaacaactattccaccttctgcttctatgggctcaacatttttagactccacatataagctggatcctgtagtattggtctttctgtgcctgacttattacaccgaacataatgtcctccaggttcatctatgttctcacaaataaataggatttcttttattttatggccaaatagcattccattgtgtatgtacaccacattttctttatccattcatccacagatggacacttcagttgattccaaatcttggctattatgaataatactgcaatgaacatggttgtacagatatctaaaagacatactgatttaatttcctttggatacatacac

SEQ ID NO: 439499 - DNA, 548 bp, Homo sapiens
ccaactcccaaactcgctagtccctggtaacaactattccaccttctgcttctatgggctcaacatttttagactccacatataagctggatcctgtagtattggtctttctgtgcctgacttattacaccgaacataatgtcctccaggttcatctatgttctcacaaataaataggatttcttttattttatggccaaatagcattccattgtgtatgtacaccacattttcyttatccattcatccacagatggacacttcagttgattccaaatcttggctattatgaataatactgcaatgaacatggttgtacagatatctaaaagacatactgatttaatttcctttggatacatacacaatagtgggattgctgaatcatttggtaattctatttttgattttttgaggaacctccctactgctttccataatggatatacaaatttacattgccaccaacagtatacagggatcctcttttcttcacatcttcatcgacacttgttatcttttgtctttttgataataaccattctaac

SEQ ID NO: 439500 - DNA, 548 bp, Homo sapiens
ccaactcccaaactcgctagtccctggtaacaactattccaccttctgcttctatgggctcaacatttttagactccacatataagctggatcctgtagtattggtctttctgtgcctgacttattacaccgaacataatgtcctccaggttcatctatgttctcacaaataaataggatttcttttattttatggccaaatagcattccattgtgtatgtacaccacattttctttatccattcatccacagatggacacttcagttgattccaaatcttggctattatgaataatactgcaatgaacatggttgtacagatatctaaaagacatackgatttaatttcctttggatacatacacaatagtgggattgctgaatcatttggtaattctatttttgattttttgaggaacctccctactgctttccataatggatatacaaatttacattgccaccaacagtatacagggatcctcttttcttcacatcttcatcgacacttgttatcttttgtctttttgataataaccattctaac

SEQ ID NO: 439501 - DNA, 553 bp, Homo sapiens
tcttttgcccatttttaaaaagcacagttatttgttttcttgctattgagatgtttgagttgcctatgtattttaaatattaaccccttatcagatgtattgtttgaaaatatttcctccgatcccataggttgtctttttactctgctgattgtttcctatgtggtgcagaaaattagtttgaaataacctcatctgtctaattttgcttttattgccaatgcttttggggttgtatccagaaaatgatttcctagaccaatatcatggagcttttcccctgtgttttctcttagtagtttcacagttatgggtcataagtttaactctttaatccattttgtgttgatttttgmatatagtgtgagataagggtctaatttcattctgttgtgcatgtatatcccacttacccaataccatttactgaagaaactaaactttcttcattgtgtattcttagcacctctgtcaaaaatcaacagacaataaatgcctggatttagttctgggctctctattgtgttccattggtctatgtatgtgtctgttt

SEQ ID NO: 439502 - DNA, 547 bp, Homo sapiens
cccttctcttccattttttggcagtgtttgagaataattagtattagttctttaaatgcctggtaaaattcagcagtgaagccatcagggcctaggtctttatttaattagagctttttactactgattcaattttattgytcattattggtttgctcagattttctttttttatggttcagttttggcaggttgtatatgtccagaaatttatccacttctaggttgtccaatttgttgaggtatacttattcatagtagtctgttaagatcctttgtatttctgtaatattggttgtaatgttgcctctttcatttctgattttgagacttttttcttaaagatttgtctattttgtttatatgttatatttttatatatatttatatattttttaaaacctgacttttatggattttttttattgtttttctagtctgtattttatttgtttctgctctgatctttattatttctttccttctttaactttgagcttagtttgttcttgttattctagttccttggggtgtaatctttggttgt

SEQ ID NO: 439503 - DNA, 574 bp, Homo sapiens
ttattatttctttccttctttaactttgagcttagtttgttcttgttattctagttccttggggtgtaatctttggttgtttatttgatatcattcttccttgctgatgtaggccattattgctataaasttagaattgcttttgctgtatcccatgtgtcttgatatggcatgggtcaatttttgtttgtctaaagacattttaaaatttccctttaaatttcttctttgacccactggttgttcaggagcatgttgtttcatttccatgtatttctgaattttctttttctttttttttttttttttgagacagtctcactctgtcaccaggctgcagtgcagtggcacgagcttggctcactgcaatctctacctcctgggctcaagcaattcccctacctcagcctcccgagtagctgggacagcaggcgtgcaccatgcccagctaatttttgtattttagaagagatggggtttcatcatgttgtccagaatggtctcgatctcctgatcttgtgatctgcccaccttggcctcccaaagtgctgggattacaggcgtgagccaccac

SEQ ID NO: 439504 - DNA, 590 bp, Homo sapiens
ctttttactactgattcaattttattgttcattattggtttgctcagattttctttttttatggttcagttttggcaggttgtatatgtccagaaatttatccacttctaggttgtccaatttgttgaggtatacttattcatagtagtctgttaagatcctttgtatttctgtaatattggttgtaatgttgcctctttcatttctgattttgagacttttttcttaaagatttgtctattttgtttatatgttatatttttatatatatttatatattttttaaaacctgacttttatggattttttttattgtttttctagtctgtattttatttgtttctgctctgatctttattatttctttccttctttaactttgagcttagtttgttcttgttattctagttccttggggtgtaatctttggttgtttatttgatatcattcttccttgctgatgtaggccattattgctataaacttagaatkgcttttgctgtatcccatgtgtcttgatatggcatgggtcaatttttgtttgtctaaagacattttaaaatttccctttaaatttcttctttgaccca

SEQ ID NO: 439505 - DNA, 574 bp, Homo sapiens
ttattatttctttccttctttaactttgagcttagtttgttcttgttattctagttccttggggtgtaatctttggttgtttatttgatatcattcttccttgctgatgtaggccattattgctataaacttagaattgcttttgctgtatcccatgtgtcttgatatggcatgggtcaatttttgtttgtctaaagacattttaaaatttccctttaaatttcttctttgacccactggttgttcaggagcatgttgtttcatttccatgtatttctgaattttctttttctttttttttttttttttgagacagtctcrctctgtcaccaggctgcagtgcagtggcacgagcttggctcactgcaatctctacctcctgggctcaagcaattcccctacctcagcctcccgagtagctgggacagcaggcgtgcaccatgcccagctaatttttgtattttagaagagatggggtttcatcatgttgtccagaatggtctcgatctcctgatcttgtgatctgcccaccttggcctcccaaagtgctgggattacaggcgtgagccaccac

SEQ ID NO: 439506 - DNA, 574 bp, Homo sapiens
ttattatttctttccttctttaactttgagcttagtttgttcttgttattctagttccttggggtgtaatctttggttgtttatttgatatcattcttccttgctgatgtaggccattattgctataaacttagaattgcttttgctgtatcccatgtgtcttgatatggcatgggtcaatttttgtttgtctaaagacattttaaaatttccctttaaatttcttctttgacccactggttgttcaggagcatgttgtttcatttccatgtatttctgaattttctttttctttttttttttttttttgagacagtctcactctgtcaccaggctgcagtgcagtggcacgagcttggctcactgyaatctctacctcctgggctcaagcaattcccctacctcagcctcccgagtagctgggacagcaggcgtgcaccatgcccagctaatttttgtattttagaagagatggggtttcatcatgttgtccagaatggtctcgatctcctgatcttgtgatctgcccaccttggcctcccaaagtgctgggattacaggcgtgagccaccac

SEQ ID NO: 439507 - DNA, 572 bp, Homo sapiens
ttctgtgttactaattaacatccttttctttcagcccaaagaacttcctttagcatttcttgtaagacacttctgagagtaatgaactcttgactttgtgtgtgtgtgtctctgcaaaagtccttttctcttttcyttctgtagaagagctttgctgtgtattcttggttgacagtttttgttatgttttgtttttttcctttcagcacttgaatatatcatcccgctcttccctggcctgtaaggtttctgctgtgatgtctgcttctagtattaatggaattcccttatatgtgacatgcttcttttgtcttgatgctcttttgctgcagaatactctttttgtccttgaattttcaaagtttgataataatatgtcttggtgtagtcttgcttggattgaatctgattagagacctttgaccttcctgtgtatgaaaatgtaaattttcccccagattgataaaactttttctgcctgccttcctgcctgccttttttccttccttcctgtcttcctttcttctttgctccctccctccttccttgtttctgctactgtttcctctctc

SEQ ID NO: 439508 - DNA, 548 bp, Homo sapiens
gagtaatgaactcttgactttgtgtgtgtgtgtctctgcaaaagtccttttctcttttccttctgtagaagagctttgctgtgtattcttggttgacagtttttgttatgttttgtttttttcctttcagcactkgaatatatcatcccgctcttccctggcctgtaaggtttctgctgtgatgtctgcttctagtattaatggaattcccttatatgtgacatgcttcttttgtcttgatgctcttttgctgcagaatactctttttgtccttgaattttcaaagtttgataataatatgtcttggtgtagtcttgcttggattgaatctgattagagacctttgaccttcctgtgtatgaaaatgtaaattttcccccagattgataaaactttttctgcctgccttcctgcctgccttttttccttccttcctgtcttcctttcttctttgctccctccctccttccttgtttctgctactgtttcctctctctctctatctctttctttacaataaaaacttgatctattagccaggctggagt

SEQ ID NO: 439509 - DNA, 548 bp, Homo sapiens
gagtaatgaactcttgactttgtgtgtgtgtgtctctgcaaaagtccttttctcttttccttctgtagaagagctttgctgtgtattcttggttgacagtttttgttatgttttgtttttttcctttcagcacttgaatayatcatcccgctcttccctggcctgtaaggtttctgctgtgatgtctgcttctagtattaatggaattcccttatatgtgacatgcttcttttgtcttgatgctcttttgctgcagaatactctttttgtccttgaattttcaaagtttgataataatatgtcttggtgtagtcttgcttggattgaatctgattagagacctttgaccttcctgtgtatgaaaatgtaaattttcccccagattgataaaactttttctgcctgccttcctgcctgccttttttccttccttcctgtcttcctttcttctttgctccctccctccttccttgtttctgctactgtttcctctctctctctatctctttctttacaataaaaacttgatctattagccaggctggagt

SEQ ID NO: 439510 - DNA, 548 bp, Homo sapiens
gagtaatgaactcttgactttgtgtgtgtgtgtctctgcaaaagtccttttctcttttccttctgtagaagagctttgctgtgtattcttggttgacagtttttgttatgttttgtttttttcctttcagcacttgaatatatcatcccgctctyccctggcctgtaaggtttctgctgtgatgtctgcttctagtattaatggaattcccttatatgtgacatgcttcttttgtcttgatgctcttttgctgcagaatactctttttgtccttgaattttcaaagtttgataataatatgtcttggtgtagtcttgcttggattgaatctgattagagacctttgaccttcctgtgtatgaaaatgtaaattttcccccagattgataaaactttttctgcctgccttcctgcctgccttttttccttccttcctgtcttcctttcttctttgctccctccctccttccttgtttctgctactgtttcctctctctctctatctctttctttacaataaaaacttgatctattagccaggctggagt

SEQ ID NO: 439511 - DNA, 518 bp, Homo sapiens
ctttatattcttttttctccaattgtataatttcactaaactgtctttgagttcagagcctttcttctgcttcattgattctgctgttgacattctctattgcaattttcatttaattcatgcatttctcagctccagaatttgttagttttttgtataatttcaatctttaattttctcattttattcatttaatgacttactaatttttgaatttttccttttttagataaacagaaatttatttgtaacagttctggagactgrgatgctcaagatcaaggtggtggcatctgtgaaggccttcttgctgtgtcataacaaggcagaaggcatcacatgggtgagagagagacaaaagtagggtccttttataagaaacccactccctcataacataaattttgagggacacattcaaaccagagcagtcccagttccggatctctagttttttccaacatttattttagattcaggaggtacatatgcaggtttgttaccttggtatattgtgt

SEQ ID NO: 439512 - DNA, 606 bp, Homo sapiens
tgagagagagacaaaagtagggtccttttataagaaacccactccctcataacataaattttgagggacacattcaaaccagagcagtcccagttccggatctctagttttttccaacatttattttagattcaggaggtacatatgcaggtttgttaccttggtatattgtgtaatgctgaggttggggtatgaatgatcccttcacccaggtactaactaaacagttagtttttcaaccactgtcccactccctccttttcccttccagtagtctctagtgtctattgttgccatccttatatccatgagttatcaatgtttggcttctacttacaagtgcaaacatgcagtatttgattttctgttcctgtgttaattcacttgggataatggcccccaactgcatcatggtgctacaaaggacatgatttcattattttttatggctgcatagtattccatggtgtatatatatacaccatattttctttattcaatccactactgataagcaccaaggttgattccatgtctttgctattgtgaatactgccatgatgaacacacaagtgyatgtgtctttttggtagaatgattagattt

SEQ ID NO: 439513 - DNA, 594 bp, Homo sapiens
aacctcccaaagtgctgggattacaggcatgagccaccacgctggcccaggtgattttcttatgtgtgttttcaaggatcaaataataataatttttacttggttcctattttttatgcctcttgtttagtctcttctctaattgaaatactctttgtatcataggaaaataaggatagaccctagtgagaagggcctaaaattctttttcagggttacaggaatgaaggaataaataaatctttattgccacaaaataaaggaaactccaaactcagcctctctgagaccaaattataaaaaaaagtcatacatagaatttgagaatatcatagcaccattaagagggaaagaggaaaggagattatgyggttttgcattgataatatactgtgatgtataagtattaaaacatttttgtatctctgaatagaaactttagtcaggcctctctccttgaactcctaagatggagccaaacaaaattttctatttgctttccctactatttttatttttccttctagaaactcatcaatttgaatatagtcaatatgagtcattttataagcatccttatatataaatttaaat

SEQ ID NO: 439514 - DNA, 539 bp, Homo sapiens
tataaatttaaattttatagtgtttgatacatattcatgttctattacatgtatccatatagatacaatcttgtttatgaaaattgacgtagtatgctataagtgaacaaaactatatgaaagaataacagacaatactgcttgatagaaaaagttttaaataatagaaaagtgctgcaacagagataagaagaaaaaatwtaacaacaaaggtcttatgggagcttattatctgccaagcgcagagttaagctcattaagtggataatcttatttttcctcccacaattatgctcattttataaatgagaaagctagaactttgaggagttaaatcacccaactttatacatagtttataactgattcttgttctcaaaggcaactctgtgtgactgtgaagccccagcacaggctcccataaaaaaggcatttccatttactgtaatatttaaaaatccacaaaaactgatttttcaaaagcctacagttgaaagaaagttgctcaaatattacctaaaatagaataatcagtttaa

SEQ ID NO: 439515 - DNA, 539 bp, Homo sapiens
tataaatttaaattttatagtgtttgatacatattcatgttctattacatgtatccatatagatacaatcttgtttatgaaaattgacgtagtatgctataagtgaacaaaactatatgaaagaataacagacaatactgcttgatagaaaaagttttaaataatagaaaagtgctgcaacagagataagaagaaaaaatataacaacaaaggtcttatgggagcttattatctgccaagcrcagagttaagctcattaagtggataatcttatttttcctcccacaattatgctcattttataaatgagaaagctagaactttgaggagttaaatcacccaactttatacatagtttataactgattcttgttctcaaaggcaactctgtgtgactgtgaagccccagcacaggctcccataaaaaaggcatttccatttactgtaatatttaaaaatccacaaaaactgatttttcaaaagcctacagttgaaagaaagttgctcaaatattacctaaaatagaataatcagtttaa

SEQ ID NO: 439516 - DNA, 414 bp, Homo sapiens
cttgaaacaaaactgcttagaccagcacacttctctgatttgtcaatgtcactgatttaaaaatgaaagttaataccttttaagatatctgtacaattctagggcagctgtttcagaaggtcaaataactcacagccaatggggaactagagagatatctgaggatttggctggtaaaccagactttcactgacagggtcccctttggggctgtggtagaggttctcttaaaagacagagcagcttaaagaaatcactgaggattttcactattacaacaacaaaatgatactgaagtgctatattgattktaaatttgacaaaacaacagaatccctgacaaaacagaaccattactgtggaataaatcagttagattctggatcagccccattattcttcatatcatcacaa

SEQ ID NO: 439517 - DNA, 591 bp, Homo sapiens
tgtgtgactgtgaagccccagcacaggctcccataaaaagggcatttccatttactacaatatttaagaatccacaaaaaaatggtttttttcaaaagcctacagttaaaagcaagttgctcaaatattaccaaatattaccaatattaccaataatcagacccaattaaaatcagagagaaaaaaagtaacacaaggctgtgtaactcatgcactactaatatagcmcattgactatttaactcataggatgccttttaaaataatttttattgtggtaaaatatatatcccataaaatctaccattttaaccattttaagtgtacagttcagtggcattaaatatattcacattgttgttcaaccaccacctgcatccagcccctgaactcatttcatcctacagctgaaactcaaatcttctgaataatttgtgaagttggcaacacaccatgctgacccttaatttgtgaagaaggcccacaagtattagaaagatccatttgtagaggtgtcacttgatgtgacattccttgctagcacagatccatctcaaacaaacttctaaagcttgggctactctgctcaac

SEQ ID NO: 439518 - DNA, 356 bp, Homo sapiens
tgtgtgtctggcatgtaacacacactcagactgagaatgtttctgtctctgtgctaactgcagtgtctgccatcctttcctgctctctcatagcaggtacygagtcagtccagacagctgctgcctctgggctcagtgctgatcggcagatctccaacctctgaccttccttctgccccctccgttagttccactcacatttgctccagtcaggcccagaaaataaagataacaattaggaacaaatacacacaggccatgggagatctactaatgcactttgtccactgccccaaaaacgtcccatgacagctagtggacacttttttagatttcccagttagaacggttctaca

SEQ ID NO: 439519 - DNA, 356 bp, Homo sapiens
tgtgtgtctggcatgtaacacacactcagactgagaatgtttctgtctctgtgctaactgcagtgtctgccatcctttcctgctctctcatagcaggtactgagtcagtccagacagctgctgcctctgggctcagtgctgatcggcagatctccaacctctgaccttccttctgccccctccgttagttccactcacatttgctccagtcaggcccrgaaaataaagataacaattaggaacaaatacacacaggccatgggagatctactaatgcactttgtccactgccccaaaaacgtcccatgacagctagtggacacttttttagatttcccagttagaacggttctaca

SEQ ID NO: 439520 - DNA, 622 bp, Homo sapiens
tgtctgcgtgtgtgtgttctatgcayattaggggttaggttatctagaagaattctatcaggaagagataatttacccaagaaatgaattgaggaagctatctatgctataggggaaaatttcagaaatactgaatagctagtacaaaggatggatcttgcttgacatttttaaagagcagctagaagaacatagcacaaaatatttgaagccacagataagcagagaatacggtcgaagttgcttatttctttttatctaaataaggtcagttctttattgaaaatgactacattcatatggtgcataaaagatgtggcaatttacagcaagaattaaagaaaataaaattatatagatttaaattggaagccagttgcaaaggcagaagcaagatgggatgtgaagctgtggcaatggtccaggtaagagatggtgggcaactgggctgtcatggtaataacagaggtgagggaaagctgtcagactccacatatactctgaagctgtgactgacatgatctgtctaacgactgagttgacaggatatgcctatggattgatcgtggagtgtgaaggaatggaagtcattggtaactccacgcatattggctcaagccaa

SEQ ID NO: 439521 - DNA, 622 bp, Homo sapiens
tgtctgcgtgtgtgtgttctatgcatattaggggttaggttatctagaagaattctatcaggaagagataatttacccaagaaatgaattgaggaagctatctatgctataggggaaaatttcagaaatactgaatagctagtacaaaggatggatcttgcttgacatttttaaagagcagctagaagaacatagcacaaaatatttgaagccacagataagcagagaatacggtcgaagttgcttatttctttttatctaaataaggtcagttctttattgaaaatgactacattcatatggtgcataaaakatgtggcaatttacagcaagaattaaagaaaataaaattatatagatttaaattggaagccagttgcaaaggcagaagcaagatgggatgtgaagctgtggcaatggtccaggtaagagatggtgggcaactgggctgtcatggtaataacagaggtgagggaaagctgtcagactccacatatactctgaagctgtgactgacatgatctgtctaacgactgagttgacaggatatgcctatggattgatcgtggagtgtgaaggaatggaagtcattggtaactccacgcatattggctcaagccaa

SEQ ID NO: 439522 - DNA, 622 bp, Homo sapiens
tgtctgcgtgtgtgtgttctatgcatattaggggttaggttatctagaagaattctatcaggaagagataatttacccaagaaatgaattgaggaagctatctatgctataggggaaaatttcagaaatactgaatagctagtacaaaggatggatcttgcttgacatttttaaagagcagctagaagaacatagcacaaaatatttgaagccacagataagcagagaatacggtcgaagttgcttatttctttttatctaaataaggtcagttctttattgaaaatgactacattcatatggtgcataaaagatgtggcaatttacagcaagaattaaagaaaataaaattatatagatttaaattggaagccagttgcaaaggcagaagcaagatgggatgtgaagctgtggcaatggtccaggtaagagatggtgggcaactgggctgtcatggtaataacagaggtgaggraaagctgtcagactccacatatactctgaagctgtgactgacatgatctgtctaacgactgagttgacaggatatgcctatggattgatcgtggagtgtgaaggaatggaagtcattggtaactccacgcatattggctcaagccaa

SEQ ID NO: 439523 - DNA, 564 bp, Homo sapiens
ataaacaaatggagaatatgtccctgagatgttgatgtagcagttcaagaaaygcgaatcaagatggttatcagtggcagggaaggggcgtggggggctggggaggaggtggggatagttatgggcacaaaaaaatagtaagaatgaataagacctagtatttgatagcacaacaaggtgactatagtcaataataatttaattgtacactttaaaataactaaaagtgtataattggattgtctgtaacacaaaggataaatacttgggatggatatcccattttatatgatgtgattattatgcactgcatgcctgtatcaaagtatctcatgaatcccataaatgtgtacacctgctatgcacccacaaaaagtaaaagttttttttaaaaaaagaaactcaaatatctacataggtattttataatccaaacttgacagcctctctctttgcaattttacaactttcagcaaattccccatattctctccatctcagtctgaacagccatttcacatcttacagctcactgttttttgtgtatctcatccattatccatg

SEQ ID NO: 439524 - DNA, 645 bp, Homo sapiens
aactaaaagtgtataattggattgtctgtaacacaaaggataaatacttgggatgkatatcccattttatatgatgtgattattatgcactgcatgcctgtatcaaagtatctcatgaatcccataaatgtgtacacctgctatgcacccacaaaaagtaaaagttttttttaaaaaaagaaactcaaatatctacataggtattttataatccaaacttgacagcctctctctttgcaattttacaactttcagcaaattccccatattctctccatctcagtctgaacagccatttcacatcttacagctcactgttttttgtgtatctcatccattatccatgtttttgtttgcattacttttgctttctgaaatatcctcctgaattattttccaacaactcatgaggtaacgctttctccaaggcctgtcattctcaagtgtcttcgggtctgtgtcttataactgaacactcacaagaaccatctctggtttgttttgtgggttctctcttcagtagcattaacatttttttcaccatgcaaattctgtatagttggtcacagagtaggaaatgaagctattaaatggttataatttgccagtcacagtgatggaggatgaaggagatgcaaagataaa

SEQ ID NO: 439525 - DNA, 476 bp, Homo sapiens
ctgaacactcacaagaaccatctctggtttgttttgtgggttctctcttcagtagcattaacatttttttcaccatgcaaattctgtatagttggtcayagagtaggaaatgaagctattaaatggttataatttgccagtcacagtgatggaggatgaaggagatgcaaagataaagccctatccccaaaaaccttttagctcaaaacgatggaaggctgagtcctgaaccctcatagcactacatttcattgctttagtccaaaacaagtccaagagatgtgcagagccaggaaggatcattttcagtgtggttgttcaaaaaaggcatcctgggagaggatgaatttccctcattcattcaggaaacatttcctgatgtcctagtcctgttaggcacagttaggctttagaggctgagttagttttccagaactgctgtaacaaagtgccacaaactaggtagctaaagtgat

SEQ ID NO: 439526 - DNA, 618 bp, Homo sapiens
tctatgcccatctcctagctgctggtgcctcyggtgttctgtggcttgtccatgcattattccaatcctccctcctcacagggctgcttccctatgtgtccttgcactgtgttccctgtgtgtacatctgtctctgggtccaaaggtccttcttgatgaggacaccagtcatattagattagggtcaaccctcctgactacattttaacttgattacctctgtaaaaaacttatatccaattaaggtcacattctgaggtactgggagttaggattccaacatatgtctttgggaaaccacaagtcaatccaggatagagatgcagggatgaaaggcaggcacagtgactttgaaaggaagctcacactgtgagggggcaccaggaaagtaaatcacttgttccagtgaagctcaacacgctcctacacaaggtaagatcatgagagttgacatctgtcattttaagtgttctggattagtaagaaccttaacctttacgctctttccccacaggctagtaacctttcagagtaagcaaaattggcaaatggcattgccttggctatggtttccctctgaactgcttaacttggtaacaaaaatgctgacggtacctc

SEQ ID NO: 439527 - DNA, 618 bp, Homo sapiens
tctatgcccatctcctagctgctggtgcctccggtgttctgtggcttgtccatgcattattccaatcctccctcctcacagggctgcttccctatgtgtccttgcactgtgttccctgtgtgtacatctgtctctgggtccaaaggtccttcttgatgaggacaccagtcatattagattagggtcaaccctcctgactacattttaacttgattacctctgtaaaaamcttatatccaattaaggtcacattctgaggtactgggagttaggattccaacatatgtctttgggaaaccacaagtcaatccaggatagagatgcagggatgaaaggcaggcacagtgactttgaaaggaagctcacactgtgagggggcaccaggaaagtaaatcacttgttccagtgaagctcaacacgctcctacacaaggtaagatcatgagagttgacatctgtcattttaagtgttctggattagtaagaaccttaacctttacgctctttccccacaggctagtaacctttcagagtaagcaaaattggcaaatggcattgccttggctatggtttccctctgaactgcttaacttggtaacaaaaatgctgacggtacctc

SEQ ID NO: 439528 - DNA, 618 bp, Homo sapiens
tctatgcccatctcctagctgctggtgcctccggtgttctgtggcttgtccatgcattattccaatcctccctcctcacagggctgcttccctatgtgtccttgcactgtgttccctgtgtgtacatctgtctctgggtccaaaggtccttcttgatgaggacaccagtcatattagattagggtcaaccctcctgactacattttaacttgattacctctgtaaaaaacttatatccaattaaggtcacattctgaggtactgggagttaggattccaacatatgtctttggraaaccacaagtcaatccaggatagagatgcagggatgaaaggcaggcacagtgactttgaaaggaagctcacactgtgagggggcaccaggaaagtaaatcacttgttccagtgaagctcaacacgctcctacacaaggtaagatcatgagagttgacatctgtcattttaagtgttctggattagtaagaaccttaacctttacgctctttccccacaggctagtaacctttcagagtaagcaaaattggcaaatggcattgccttggctatggtttccctctgaactgcttaacttggtaacaaaaatgctgacggtacctc

SEQ ID NO: 439529 - DNA, 618 bp, Homo sapiens
tctatgcccatctcctagctgctggtgcctccggtgttctgtggcttgtccatgcattattccaatcctccctcctcacagggctgcttccctatgtgtccttgcactgtgttccctgtgtgtacatctgtctctgggtccaaaggtccttcttgatgaggacaccagtcatattagattagggtcaaccctcctgactacattttaacttgattacctctgtaaaaaacttatatccaattaaggtcacattctgaggtactgggagttaggattccaacatatgtctttgggaaaccacaagtcaatccaggatagagatgcagggatgaaaggcaggcacagtgactttgaaaggaagctcacactgtgaggrggcaccaggaaagtaaatcacttgttccagtgaagctcaacacgctcctacacaaggtaagatcatgagagttgacatctgtcattttaagtgttctggattagtaagaaccttaacctttacgctctttccccacaggctagtaacctttcagagtaagcaaaattggcaaatggcattgccttggctatggtttccctctgaactgcttaacttggtaacaaaaatgctgacggtacctc

SEQ ID NO: 439530 - DNA, 578 bp, Homo sapiens
cctttccagtaggacaggcatggcattcagttgccaggcctgaggcgtgtccctgtgctggccccaggtggtagggtgagcccccttcagaccccatggagtgagatgtagggaagacagtgactgaagataatcgaatggagatcaagaccatgtaaaacagaagtttttatatggaaaaaagtagatttttacattgaccatcactgcttatgttcactgtgagtaaaatgtactttttccaaagcattccctctagatagcaatgcacagatcaattcagattcataacaagatgaacttttggtaccttctaaataaaagcattatttaacctctcattaagataatgttaaggtacattaagaactgaaaagacaggtgatgaaatgggaagaatggaatagcgccgtatccagatgaacatccagacgtggcctgaagaaggtatgggcacccccttccctgtttgtgattcgattcccgaggctgtgctccctgctgactcaatatgtggaaccagagagaagcctgctgtggagttagtgaatttgacytaatcgagacagtctgagaaa

SEQ ID NO: 439531 - DNA, 579 bp, Homo sapiens
gaaagtaaacacactatctgtgggaaatggaacacaatgagaggcgtgccgtcagcctcagggtgccctgactccattccagccctctcckcatatgccccatttgcacatcacccatcacttttgcctaattgtttctactcaccaagtgaagataatggcttctttgcctgctcaagtgataatttgagattatatgtctcatcagatactttattggatgaatgaaaaaatgcacaatgatggttttattaaattatgcagttagttaccaagatgaatggaactacacctatgcaaaaatcaagatgtggagataagggaggttataggctgagttatttaacctttagggctctttctgatattttctgtgagggccaaatagagttctcagtggactgcatgtgagtttctgccaatggcctgtggagcaagtgcctgcaagagggaacactcccccaacttctggggtgataaaggatttctcactgtcccaccagcctgcacagtaggtttcaccattttgttaactattccagctgaacttttcttactgacctctggtttcatctatct

SEQ ID NO: 439532 - DNA, 579 bp, Homo sapiens
gaaagtaaacacactatctgtgggaaatggaacacaatgagaggcgtgccgtcagcctcagggtgccctgactccattccagccctctcctcatatgccccatttgcacatcacccatcacttttgcctaattgtttctactcaccaagtgaagataatggcttctttgcctgctcaagtgataatttgagattatatgtctcatcagatactttattggatgaatgaaaaaatgcacaatgatggttttattaaattatgcagttagttaccaagatgaatggaactacacctatgcaaaaatcaagatgtggagataagggaggttataggctgagtyatttaacctttagggctctttctgatattttctgtgagggccaaatagagttctcagtggactgcatgtgagtttctgccaatggcctgtggagcaagtgcctgcaagagggaacactcccccaacttctggggtgataaaggatttctcactgtcccaccagcctgcacagtaggtttcaccattttgttaactattccagctgaacttttcttactgacctctggtttcatctatct

SEQ ID NO: 439533 - DNA, 601 bp, Homo sapiens
aataattttctttaccttttataataatttttgcactgaaatatactttgtttaatatagccaatccagcttttttaaaaactattattagcataatayatatttttccatgtgtttacacttaggctatttgagccttttttatttaaagtgtgtttcttgtaggcaacatatagttggatcttactttctcatctaatctgaccatcattgccatttaataagagtgtttgcactacttacctttaatatggttgtttatatgattaattttaagtctaacatctactatttgttttttgtttattctttgtccattttcaaagctgctagggagtgtagatgcattttgtaagagaatacattttataaattgttatatacactctgagattttaaccataattgcagttctttttttatgaacacatttttagtaggctgaatattctttctgcttcaacctgctaagattgaaggaaatactgctgaaatagaacatgtacacaaagacagattctgagggagggtttctgtatttttttactttaaagcagcctagttgaaaaagactgtggtacctgattctatatctgtgtag

SEQ ID NO: 439534 - DNA, 601 bp, Homo sapiens
aataattttctttaccttttataataatttttgcactgaaatatactttgtttaatatagccaatccagcttttttaaaaactattattagcataatatatatttttccatgtgtttacacttaggctatttgagccttttttatttaaagtgtgtttcttgtaggcaacatatagttggatcttactttctcatctaatctgaccatcattgccatttaataagagtgtttgcactacttacctttaatatgrttgtttatatgattaattttaagtctaacatctactatttgttttttgtttattctttgtccattttcaaagctgctagggagtgtagatgcattttgtaagagaatacattttataaattgttatatacactctgagattttaaccataattgcagttctttttttatgaacacatttttagtaggctgaatattctttctgcttcaacctgctaagattgaaggaaatactgctgaaatagaacatgtacacaaagacagattctgagggagggtttctgtatttttttactttaaagcagcctagttgaaaaagactgtggtacctgattctatatctgtgtag

SEQ ID NO: 439535 - DNA, 474 bp, Homo sapiens
cattgtcttccttacagtcttgtgaggtgatttatatgactgttaatccccccctcccaactttatgcttttcttttttaaacaaaggacaacatttttgtctcagagaggctgagtgastggacaattaccacactctagttgggggtggagtcagccaacctcctttctctttctgttacccatagtggccttctataccaaccatcaaagctgcctttaacaaaggcacacagactagtgctatccagcagtgcacaggtcagtcacgctgtgtttcccaccatttccactcagcgtttaattaaattgtgtgcacagcagcttacccttaaaacgcatctgggattgcagattgtaaccatgaggctacaacatcctgatgaaattctttggtaatgccagaatttcattactttatcagtaatggctgaaaatatagcttatttgcatttgagtactacttcatcaaag

SEQ ID NO: 439536 - DNA, 474 bp, Homo sapiens
cattgtcttccttacagtcttgtgaggtgatttatatgactgttaatccccccctcccaactttatgcttttcttttttaaacaaaggacaacatttttgtctcagagaggctgagtgagtggacaattaccacactctagttgggggtggagtcagccaacctcctttctctttctgttacycatagtggccttctataccaaccatcaaagctgcctttaacaaaggcacacagactagtgctatccagcagtgcacaggtcagtcacgctgtgtttcccaccatttccactcagcgtttaattaaattgtgtgcacagcagcttacccttaaaacgcatctgggattgcagattgtaaccatgaggctacaacatcctgatgaaattctttggtaatgccagaatttcattactttatcagtaatggctgaaaatatagcttatttgcatttgagtactacttcatcaaag

SEQ ID NO: 439537 - DNA, 474 bp, Homo sapiens
cattgtcttccttacagtcttgtgaggtgatttatatgactgttaatccccccctcccaactttatgcttttcttttttaaacaaaggacaacatttttgtctcagagaggctgagtgagtggacaattaccacactctagttgggggtggagtcagccaacctcctttctctttctgttacccatagtggccttctataccaaccatcaaagctgcctttaacaaaggcacacagactagtgctatccagcagtgcacaggtcagtcacrctgtgtttcccaccatttccactcagcgtttaattaaattgtgtgcacagcagcttacccttaaaacgcatctgggattgcagattgtaaccatgaggctacaacatcctgatgaaattctttggtaatgccagaatttcattactttatcagtaatggctgaaaatatagcttatttgcatttgagtactacttcatcaaag

SEQ ID NO: 439538 - DNA, 474 bp, Homo sapiens
cattgtcttccttacagtcttgtgaggtgatttatatgactgttaatccccccctcccaactttatgcttttcttttttaaacaaaggacaacatttttgtctcagagaggctgagtgagtggacaattaccacactctagttgggggtggagtcagccaacctcctttctctttctgttacccatagtggccttctataccaaccatcaaagctgcctttaacaaaggcacacagactagtgctatccagcagtgcacaggtcagtcacgctgtgtttcccaccatttccactcagcgtttaattaaattgtgtgcacagcagcttacccttaaaacrcatctgggattgcagattgtaaccatgaggctacaacatcctgatgaaattctttggtaatgccagaatttcattactttatcagtaatggctgaaaatatagcttatttgcatttgagtactacttcatcaaag

SEQ ID NO: 439539 - DNA, 201 bp, Homo sapiens
tgaggctacaacatcctgatgaaattctttggtaatgccagaatttcattactttatcagtaatggctgaaaatatagcttatttgcatttgagtactacttcatcaaaggtaaaatgaartcactgaaatgtgtcatctgttagcaggagtgcaaccatgaacaccaacaaactaacaaactgtgagggatgccgagaag

SEQ ID NO: 439540 - DNA, 201 bp, Homo sapiens
tgaggctacaacatcctgatgaaattctttggtaatgccagaatttcattactttatcagtaatggctgaaaatatagcttatttgcatttgagtactacttcatcaaaggtaaaatgaaatcactgaaatgtgtcatctgttascaggagtgcaaccatgaacaccaacaaactaacaaactgtgagggatgccgagaag

SEQ ID NO: 439541 - DNA, 627 bp, Homo sapiens
cttgtgggccccttgctagatgcgtaaacataggtgagctgcccaccatccatatggagggtagtaatgaggccttgtcttttaaaggtatgttaggaattaaatgcaaaatttacttaaagggaactctttgcctgacctagagttctcaaatgctcgataagtgttcattgttaaattgartgattatggaagtgggtacgtggaattctgttacatcctgaaaagttaagttggaaggaggaatgagcagagagaagaaactgtggaagtagttcctactgagggctaaagaaatctgggcactgtctctggcaggggctcacataaatattgctgtaaatcatccaagaataaatcttgcccgatctaggaaaccatgttgcatgagtggaggatgcccctggtctatagcagaacatttaactttgaacaagagctgtgtccacctcctagctgtctggattaagaaaatatatggagtattttagtgtcaatcagatgcacagtgttggttatcagtaattttccatcttgtctactagatcaaattcctgactcttcaattcagaacatagaacaataaaaagcaaaacaaacaaaaattatatctatatatatgtctgt

SEQ ID NO: 439542 - DNA, 627 bp, Homo sapiens
cttgtgggccccttgctagatgcgtaaacataggtgagctgcccaccatccatatggagggtagtaatgaggccttgtcttttaaaggtatgttaggaattaaatgcaaaatttacttaaagggaactctttgcctgacctagagttctcaaatgctcgataagtgttcattgttaaattgaatgattatggaagtgggtacgtggaattctgttacatcctgaaaagttaagttggaaggaggaatgagcagagagaagaaactgtggaagtagttcctactgagggctaaagaaatctgkgcactgtctctggcaggggctcacataaatattgctgtaaatcatccaagaataaatcttgcccgatctaggaaaccatgttgcatgagtggaggatgcccctggtctatagcagaacatttaactttgaacaagagctgtgtccacctcctagctgtctggattaagaaaatatatggagtattttagtgtcaatcagatgcacagtgttggttatcagtaattttccatcttgtctactagatcaaattcctgactcttcaattcagaacatagaacaataaaaagcaaaacaaacaaaaattatatctatatatatgtctgt

SEQ ID NO: 439543 - DNA, 555 bp, Homo sapiens
aagactgcagtgttagctgcccagttagaattattcacagatgggacagaytttattgtgagccaacaacaaataaaaaggaatgctctaatggaaagttgatatatcactgttgtaagaaaccaggatattcagaaaggggatgctgaagaaattaagacgcaaaggattcaacctgagtctgaagctttattagcttctctaggagatttttctcctgagaaactggatgagaaataattggcaaacggtgcaaactagtgtgcaaaactgacataatgaggaaacctttgagttgggaagcagagagctttatatgtctgtttcttttcctcatcttaatcttttcatgtttttttttcttttttttttttgtgaaccctggagccatgtattctgtaatttcttctgaccttttttttgttttaatgttttggatatctccggacaaccttctgtctgttcttgctgctctgaaattattctgcaaatagatcttttgtaaaagaaacatgcttttatctagtctcctgatgcacctagctatttgttgga

SEQ ID NO: 439544 - DNA, 555 bp, Homo sapiens
aagactgcagtgttagctgcccagttagaattattcacagatgggacagattttattgtgagccaacaacaaataaaaaggaatgctctaatggaaagttgatatatcactgttgtaagaaaccaggatattcagaaaggggatgctgaagaaattaagacgcaaaggattcaacctgagtctgaagctttattagcttctctaggagatttttctcctgagaaactggatgagaaataattggcaaacggtgcaaactagtgtgcaaaaytgacataatgaggaaacctttgagttgggaagcagagagctttatatgtctgtttcttttcctcatcttaatcttttcatgtttttttttcttttttttttttgtgaaccctggagccatgtattctgtaatttcttctgaccttttttttgttttaatgttttggatatctccggacaaccttctgtctgttcttgctgctctgaaattattctgcaaatagatcttttgtaaaagaaacatgcttttatctagtctcctgatgcacctagctatttgttgga

SEQ ID NO: 439545 - DNA, 555 bp, Homo sapiens
aagactgcagtgttagctgcccagttagaattattcacagatgggacagattttattgtgagccaacaacaaataaaaaggaatgctctaatggaaagttgatatatcactgttgtaagaaaccaggatattcagaaaggggatgctgaagaaattaagacgcaaaggattcaacctgagtctgaagctttattagcttctctaggagatttttctcctgagaaactggatgagaaataattggcaaacggtgcaaactagtgtgcaaaactgacataatgaggaaacctttgagttgggaagcagagagctttatatgtctgtttcttttcctcatcttaatcttttcatgtttttttttcttttttttttttgtgaacyctggagccatgtattctgtaatttcttctgaccttttttttgttttaatgttttggatatctccggacaaccttctgtctgttcttgctgctctgaaattattctgcaaatagatcttttgtaaaagaaacatgcttttatctagtctcctgatgcacctagctatttgttgga

SEQ ID NO: 439546 - DNA, 559 bp, Homo sapiens
tctggtaaactattctactttttccatctggagaataaaggagttgctagtggtgtgcttactcagaacctaggccctgactatagacctattggttactttcctgtcttgttggattctgttgttctggatatgccaggctttctacaagccacagtagctcttctgattgtgtcactgcccgatgggttcttcctgctcgctgcaaaaaaacaaaacaaaacaaaaaacatggtatttgctgtaaagagtttaaattaactcaaggttggcaacaccacattagagatgaagttattgttcaagtcagtctcatcgaaggctcataggttagggatttttcaaaggtagtttagggaaagggcggggagtggctaggcaatgggtgcttgccgctgattggttgggggtgtaatcataggggtgtgggaaatgattcttctgcatgctgrgttacttatgggtggagctacgggagctgttggcaggtccagtggagccatcggtagtcaaacatgcaaaaaacctggatatctcaaaaggctaatcttagattcta

SEQ ID NO: 439547 - DNA, 559 bp, Homo sapiens
tctctcacggttggcttgcctaagcccaggaatgattaagggcaacttgaaggtcaagggcaagaagggggttaactagatcaggtctccccattgccataattttgtcactgttagaatttgtgcaaaggcggtttcagagctcagctttgaccctaggacattgaacttccatgtgcctcatgttgttgctgctgttttacaaattcatagacagaaaatttctagcacactgccggataagccacgagcaagtcttattatctcatactaatattattctaggcaggtgrcaccttttgagtctggttactctgtttgtagatcctaaccaaataggaggatgtgactgcctcatagtcacagaaaatactcaacctaggcctgattcattcagtattcttattcccaatgctggcaatattgttcattgatggatccgtgtgagagacacacaggaatatacaattgcatcttattttataggtagagatggctttttcttagaacatattatacatgattacaagtgtaaaaatatggtgaaataattttattt

SEQ ID NO: 439548 - DNA, 559 bp, Homo sapiens
tctctcacggttggcttgcctaagcccaggaatgattaagggcaacttgaaggtcaagggcaagaagggggttaactagatcaggtctccccattgccataattttgtcactgttagaatttgtgcaaaggcggtttcagagctcagctttgaccctaggacattgaacttccatgtgcctcatgttgttgctgctgttttacaaattcatagacagaaaatttctagcacactgccggataagccacgagcaagtcttattatctcatactaatattattctaggcaggtggcaccttttgagtctggttactctgtttktagatcctaaccaaataggaggatgtgactgcctcatagtcacagaaaatactcaacctaggcctgattcattcagtattcttattcccaatgctggcaatattgttcattgatggatccgtgtgagagacacacaggaatatacaattgcatcttattttataggtagagatggctttttcttagaacatattatacatgattacaagtgtaaaaatatggtgaaataattttattt

SEQ ID NO: 439549 - DNA, 559 bp, Homo sapiens
tctctcacggttggcttgcctaagcccaggaatgattaagggcaacttgaaggtcaagggcaagaagggggttaactagatcaggtctccccattgccataattttgtcactgttagaatttgtgcaaaggcggtttcagagctcagctttgaccctaggacattgaacttccatgtgcctcatgttgttgctgctgttttacaaattcatagacagaaaatttctagcacactgccggataagccacgagcaagtcttattatctcatactaatattattctaggcaggtggcaccttttgagtctggttactctgtttgtagatcctaaccaaataggaggatgtgactgcctcatagtcacagaaaatactcaacctaggcctgattcattcagtattcttattcccaatgctggcaatattgttcattgatggatcygtgtgagagacacacaggaatatacaattgcatcttattttataggtagagatggctttttcttagaacatattatacatgattacaagtgtaaaaatatggtgaaataattttattt

SEQ ID NO: 439550 - DNA, 559 bp, Homo sapiens
tctctcacggttggcttgcctaagcccaggaatgattaagggcaacttgaaggtcaagggcaagaagggggttaactagatcaggtctccccattgccataattttgtcactgttagaatttgtgcaaaggcggtttcagagctcagctttgaccctaggacattgaacttccatgtgcctcatgttgttgctgctgttttacaaattcatagacagaaaatttctagcacactgccggataagccacgagcaagtcttattatctcatactaatattattctaggcaggtggcaccttttgagtctggttactctgtttgtagatcctaaccaaataggaggatgtgactgcctcatagtcacagaaaatactcaacctaggcctgattcattcagtattcttattcccaatgctggcaatattgttcattgatggatccgtgtgagagacacacaggartatacaattgcatcttattttataggtagagatggctttttcttagaacatattatacatgattacaagtgtaaaaatatggtgaaataattttattt

SEQ ID NO: 439551 - DNA, 515 bp, Homo sapiens
ggaacatgttatgaaaactgatcattttatctgaaaatactcatttttgattacttaatataatacttagctagaatgccctcaaagacagrgaatccacatcaaacttaagtgactgtctttcaataagatggagcttttatacatgaacacaccacacacacacacaaattgcagaggaatgctgtaaaaaataaatgatttataatcttaaaaatacattatatatattaactagtttaattcttaccaagattgccagatagatataatttttctactttacaaagaaagatgatgatttctcccaaggtcacatgcctgctaagacagaaaagaatttgaaggactatggcttccaaaaactattctgtatactctcactctccacagagctgtaacctttgctgtttatgtctaaaatgaagacgtaatcctctgcagaattgttgaaggctgcatatttctataaaagctggcttatccttctagaaggttcatttttccaccttaat

SEQ ID NO: 439552 - DNA, 515 bp, Homo sapiens
ggaacatgttatgaaaactgatcattttatctgaaaatactcatttttgattacttaatataatacttagctagaatgccctcaaagacagggaatccacatcaaacttaagtgactgtctttcaataagatggagcttttatacatgaacacaccacacacacacacaaattgcagaggaatgctgtaaaaaataaatgatttataatcttaaaaatacattatatatattaactagtttaattcttaccaagattgccagatagatataatttttctactttacaaagaaagatgatgatttctcccaaggtcacatgcctgctaagacagaaaagaatttgaaggactatggcttccaaaaactattctgtatactctcactctccacagagctgtaacctttgctgtttatgtctaaaatgaagacrtaatcctctgcagaattgttgaaggctgcatatttctataaaagctggcttatccttctagaaggttcatttttccaccttaat

SEQ ID NO: 439553 - DNA, 415 bp, Homo sapiens
ctggcaccgttaacttctgtaaacacatgctgttggctgtaagggactactagtaaaaaaacccaaacatgcagacagataatatgtgaccactgctaactagctaaaagtaattcwttagaacaagtggacatctacattgtctttttttccttagaagaataattgttcaagtatggtgattttatttttgttgttgacagtaatacaatcctttatgacttatgttaataatggtagtttcagtattttcctttgtatttccactgccctgcttgttttctagaacgttgcttataatgacttataatatcccttccacgcagcatctcttcccatttatttatttatgtatttatcaatttatctttttttattttaagaggcaggttctcattatgttgcccaggctgga

SEQ ID NO: 439554 - DNA, 415 bp, Homo sapiens
ctggcaccgttaacttctgtaaacacatgctgttggctgtaagggactactagtaaaaaaacccaaacatgcagacagataatatgtgaccactgctaactagctaaaagtaattcattagaacaagtggacatctacattgtctttttttccttagaagaataattgttcaagtatggtgattttatttttgttgttgacagtaatacaatcctttatgacttatgttaataatggtagtttcagtattttcctttgtatttccactgccctgcttgttttctagaacgttgcttataatgacttataatatccctkccacgcagcatctcttcccatttatttatttatgtatttatcaatttatctttttttattttaagaggcaggttctcattatgttgcccaggctgga

SEQ ID NO: 439555 - DNA, 529 bp, Homo sapiens
cagttattttaaagatttttygttaacttcaatatctggattatctcttgatcttttccattgtctggtttttgtttccgttttgatgtctgataattttggctgaattctggacatgttggacagaaatttgtagaggctagagaagacaaagtgatcccccagtgaatccccaccacagcctctgataggcttctagattaggcacagttgttaattcaaatcagcatttaactgactcagtgcagcgtctcagtccccatgaggcctagttgatatcttatatctggagtacaatgcttcactagtcccaactgagatttgaaggcctttgccaaaacatttttttgaaaatctctgaattctgccatctgactcctaattgtgatgagtctacagagacccctgcttcgtgacccagcctcatagctgtcctgtcactttctgcttggccaccttgtctcttgcccattgctccttgggagttgaccagtgcttcaagggtaaaagcagaaagagtgttctgagc

SEQ ID NO: 439556 - DNA, 647 bp, Homo sapiens
tccttctgtcacatatagtaggctctgataaaaccccagcagattaggccctagtaaaatagtttcttctggtgcaggtcttgtgaaaaagaactgaatactccagcatgtttccaaatggttcctttccccttcctcctgccagaagcatgaggacattttttccaacattcactgagaacctagtagagtttctggaggcataattcacaatagtatggagaccttcaatgagtgtacccacttgaagtttttaactttyagagttgttcacattgagctccagcaatttgttaattacagtttcaggtttttctacttcagcactggtgatttttttttgtgtgtttttttgttttttgttttttctttggtggagttttgctctgttgcacaagctggagtacaatgacatgatcttgcctcactgcaatctccacctcccggctttaagcaattctcctgcctcagcctcttgaatagctgggattacaggttcccgccaacatgcccagctaattttggtatttttagtagagatggggtttcaccgtgttggccaggctggtcttgaactcctgacctcaggtgatctgcccacctcggcctcccaaagtgctgggattacaggcgtgagccactatgcc

SEQ ID NO: 439557 - DNA, 586 bp, Homo sapiens
gctaattaaatttcaataaatattttttaaaaataaataaagccggtcacagtggctcatgcctgtaatcccaggactttaggaggccaaggcaggcagattacttgattgcccagyctgggcaacacagcaaaactccatctctacaaaaaatacaaaaattatctggacatggtggtgtgtgcctgtagtcccagctactcagtaggctgaggtgtgagggtcgcttgatcccagtgaggtcaaggctgcagtgagccaagatcatgccactgtactccagcctgcgtggcagagtgagaccttgtctcaaaaaaaataaaaatttgtaataaaaaagtaaaataaatagaaactcaaaataagatgaaaaagtcaatccatgtccatcagaaataagtaagttgaagaattggaatgtgaacctactcacagaggattccagactctgtgcaatcaactatctttaccaggaaatgggagaaggagaaaagagagaggaaagaaaagaaatagagaggaaagatcatgcatgaaaattaaagatagagatcaaggcctttactgagaatgcagaaccaaggcc

SEQ ID NO: 439558 - DNA, 587 bp, Homo sapiens
ctcatataccctcagcagctgcagccacacaaccactaccaccacccagtgcccaaaatgcttaggaggaagacaaagctgtattgctctgtttaataaggggtgtggaacttaaagtgccctaagagaatcaaggaaagaggacagatgcctaggagcctgggtactgtgtgaaagttgagaagaaaaaaaaataatcaccacccctactctccattctgctctaggaagaatagctatgtagaaaagactggagaaaagaaatctgtaacagacgatttttcatagtttcttgtttcttaatgtgagacacacatatgcacatacaataaacttcctctcccctctattcttaaaaaccttcagtgcaaactacattatccactaacactttggtaggaggtgattctagagtcactcsgaaggttgccatgccctacatctgaggtgggcattgacaaggggacagtgcacttcctagctatatccctgttcagagcactttctaacataccagagctccacaacaagtcactcgttcgctgattcagtctcagatgtacattttggtgtttcccccaccgaga

SEQ ID NO: 439559 - DNA, 375 bp, Homo sapiens
taatttaacccaaacctggatagaagtaagagggcaggaaccccaccctcttcccttgctaccttctgctcccttttagcccccaggtaagaccccagaactcagatgacaagggcatggctacattattataacagaagaaatgccgctcatgattttgcttcttaaagcagttagtaaaatgcagattattttctgaatagatattatgccacagtgctacattytagaaccacagcctagactttgcgttcagcaactctaaccttgacgattctgcatggcactggctctgttcaacatataaggaaactgaggattcaggaacgtatatgatatgccttaggatatgacatgagcccggattagaagatc

SEQ ID NO: 439560 - DNA, 616 bp, Homo sapiens
gagcatccctcaccagacaccaaatctgccagcactttgattttgaacttcccagtctccagaactgtgagcaatacatttctatttatagattacccagtctctggtattatgttatagcaatacaaagggactaagacatccctgaataatatttcagtggtataaggcaaaatgttatatatatatatatatatatatatatatatatatatataacaaaggaaacagacatattattttactcaagtggaagaaaagtagtgttacacaggaaagactttatgacacaggcagcaatttatcaatttatstgggtcttctgtgaaagataagatgtcatgaacttaagacaggaatctggcaaaggaatgaaggaaatcaagtggaggaaaaactgagaaatcctagtattgcccaactataggttccatgagaggaaacagtgaaaaacagctctggaaaaaatcaatgtggatgatcctgaatgggcaggccaggtaaagcattaggcctttattctgccaataatttggaaccctgaaaggttctgagcaagagacagaatgatccaacctatcctactctggtactattgtaaagtacagattaaaat

SEQ ID NO: 439561 - DNA, 400 bp, Homo sapiens
tcttctggtgctcctataggcagaatctaaggacttgaagaaccagcttcaggaactcccagtccaaaaacaaagctaagtacagaagggtgagtttgaagttggagacaaagcttaagtactaattagcacaactcccattaggccaggtgtgctggtaaacagaatagacaggrcaggctgaaggaactcatcaccaaacatcctgtcccctcgattgatggtgaagtgtgacccctaatgattcccaccaaaaagactcttcccatttgatctggtccccattgaatcacttcatgaggggaagaaaatcagtctggactgatgcccataatgtgtgaatattgtactgagaattttatcatgtgcatcctaatatttaatccttaaaaaacagtca

SEQ ID NO: 439562 - DNA, 614 bp, Homo sapiens
atgttaggccacagaatgtgagcagagatgatgtgtgccactttcaggccaggcccatgaaaaacttcctcatagagcccctatatgcttctcccttctctgctggccgtgatgaaatttggggtcttaagtgatggtggagccacgaaaggaagccgcttggattctggatcaccatgtgaagtaaagtatcctctgtccagcagcacccacgtttcactgatatgtgaagacataaatttcacgtactaattcactaaaatattgaagtgtgcttttttacagcaccaaaaaatcaggacaaytagaaatatttaaggtttcagttaaaaccatctccatgagcatgatactgagggctatggaattgcccttgaccacaggaatctaaccccttaagagtattctaccgctttttgaaaaaaattgtaaccattatattgattaaaaatagccacaatttactcacctttccctatgtgccaggcagggatcttactgtgtgttgtatggatttttaaaaatcatatatatatatatatatatgattaatgattgatgcccctatatatatatatgattaatgactgatgccactatatatatatatgtat

SEQ ID NO: 439563 - DNA, 483 bp, Homo sapiens
atacttcaggaagacaccatataaatatgatttttatctaggtatgacatggcttcaggctgctaaaagcctaaaacaaaacaaagcaaaacaaaacaaaacagaaacaacaacaaaaacaaaataaggygggttggacaagattgctagtatagcaggagtgtccagtattttggcttccctgggccacactggaagaagaagaattgtcttgcgttacaataaaatatactaacactaatgatagctaatgagcttaaaaaaaaaaaatcgcgcaaaaaaaaaaaaaaaatctcacgttttaagaatgtttatggatttgtgttgggctgcattcaaagccatcctgggctgcaagcggccccacaggttggacaagctcgccgtagagggttggttctgttcagctccaggtaggaaagagacaatattaagatcagacataaggggaaagttaggcaactagaagtagaggcattaaga

SEQ ID NO: 439564 - DNA, 483 bp, Homo sapiens
atacttcaggaagacaccatataaatatgatttttatctaggtatgacatggcttcaggctgctaaaagcctaaaacaaaacaaagcaaaacaaaacaaaacagaaacaacaacaaaaacaaaataaggcgggttggacaagattgctagtatagcaggagtgtccagtattttggcttccctgggccacactggaagaagaagaattgtcttgcgttacaataaaatatactaacactaatgatagctaatgagcttwaaaaaaaaaaatcgcgcaaaaaaaaaaaaaaaatctcacgttttaagaatgtttatggatttgtgttgggctgcattcaaagccatcctgggctgcaagcggccccacaggttggacaagctcgccgtagagggttggttctgttcagctccaggtaggaaagagacaatattaagatcagacataaggggaaagttaggcaactagaagtagaggcattaaga

SEQ ID NO: 439565 - DNA, 639 bp, Homo sapiens
tgtgtacgggtatttgtttatttcctacctacatccggacatgccctagagacaatgatcaaactggcagcaataatgctacctttagtgcccatattatataggttckgaaatagtattctcacttaaggatattacaacttttagaaaagtatctgatttcagtcaacctgaatttcaataataataaaaattacaatggactgtaacccaaatgcctttaaatccgtgagttaataataacatttataaataatggccactttcaaagatgttggaaaatcaattcattatcttggtaactactaaataaaagaaaatattacaccctttttctttttttcttacatgaactgtactattaggtaatcaaacaacaggattggggaggggaatccttaaaaagtaatccaaataataataaaagaaaaagaaatgctagaattagactatcaccatttgtagcactcagtgaatgaagagatataaatattaaggccaatcggcctttattttttcacagataattgtaaggaaataaagagatgaaggggaaatctacagacaaaaagaaaactagacatgtttttaaagggcaagactaaactatattatcactggatgcacattctgctcaat

SEQ ID NO: 439566 - DNA, 639 bp, Homo sapiens
tgtgtacgggtatttgtttatttcctacctacatccggacatgccctagagacaatgatcaaactggcagcaataatgctacctttagtgcccatattatataggttcggaaatagtattctcacttaaggatattacaacttttagaaaagtatctgatttcagtcaacctgaatttcaataataataaaaattacaatggactgtaacccaaatgcctttaaatccgtgagttaataataacatttataaataatggccactttcaaagatgttggaaaatcaattcattatcttggtaactactaaataaaagaaaatattacaccctttttctttttttcttacatgaactgtactattaggtaatcaaacaacaggattggggagggraatccttaaaaagtaatccaaataataataaaagaaaaagaaatgctagaattagactatcaccatttgtagcactcagtgaatgaagagatataaatattaaggccaatcggcctttattttttcacagataattgtaaggaaataaagagatgaaggggaaatctacagacaaaaagaaaactagacatgtttttaaagggcaagactaaactatattatcactggatgcacattctgctcaat

SEQ ID NO: 439567 - DNA, 585 bp, Homo sapiens
tcacaattttgtttttcctttttggtttaccatgccttgtaaaactttgtctaattggtgccatatattgcactaaataaaaaaataataatttgagagacataaatctatgagcatgtyaaaggcatagctaaatataattgaggagaattggaaagtgagagccagcaggacgattccagctgtcactgaggattccgtttttaaaaaatttggctcttaagtagtaaaatgaggagatggggttagaattcttttcttcctgggaatctttcaacaaaaacaaaaaatgaagggatctattaacaaaaatttctgttaggctagagggacaaaggcccattacagttttagtgtcctccaatttgaatctcaatctgcactacttgatgttacataatgaagtgacccgtattaaaaaacgggaagctgctagaactcaggcttccagaattgaatgtcgatccttttagaatcaacaacatgcagatgtcagagtctaaaacttcccaaaaactcattgatttctcttgattccctactgtttttcatacggaatactgtttcacctttaatctcaatttg

SEQ ID NO: 439568 - DNA, 585 bp, Homo sapiens
tcacaattttgtttttcctttttggtttaccatgccttgtaaaactttgtctaattggtgccatatattgcactaaataaaaaaataataatttgagagacataaatctatgagcatgtcaaaggcayagctaaatataattgaggagaattggaaagtgagagccagcaggacgattccagctgtcactgaggattccgtttttaaaaaatttggctcttaagtagtaaaatgaggagatggggttagaattcttttcttcctgggaatctttcaacaaaaacaaaaaatgaagggatctattaacaaaaatttctgttaggctagagggacaaaggcccattacagttttagtgtcctccaatttgaatctcaatctgcactacttgatgttacataatgaagtgacccgtattaaaaaacgggaagctgctagaactcaggcttccagaattgaatgtcgatccttttagaatcaacaacatgcagatgtcagagtctaaaacttcccaaaaactcattgatttctcttgattccctactgtttttcatacggaatactgtttcacctttaatctcaatttg

SEQ ID NO: 439569 - DNA, 585 bp, Homo sapiens
tcacaattttgtttttcctttttggtttaccatgccttgtaaaactttgtctaattggtgccatatattgcactaaataaaaaaataataatttgagagacataaatctatgagcatgtcaaaggcatagctaaatataattgaggagaattggaaagtgagagccagcaggacgattccagctgtcactgaggattccgtttttaaaaaatttggctcttaagtagtaaaatgaggagatggggttagaattcttttcttcctgggaatctttcaacaaaaacaaaaaatgaagggatctattaacaaaaatttctgttaggctagagggacaaaggcccattacagttttagtgtcctccaatttgaatctcaatctgcactacttgatgttacataatgaagtgamccgtattaaaaaacgggaagctgctagaactcaggcttccagaattgaatgtcgatccttttagaatcaacaacatgcagatgtcagagtctaaaacttcccaaaaactcattgatttctcttgattccctactgtttttcatacggaatactgtttcacctttaatctcaatttg

SEQ ID NO: 439570 - DNA, 585 bp, Homo sapiens
tcacaattttgtttttcctttttggtttaccatgccttgtaaaactttgtctaattggtgccatatattgcactaaataaaaaaataataatttgagagacataaatctatgagcatgtcaaaggcatagctaaatataattgaggagaattggaaagtgagagccagcaggacgattccagctgtcactgaggattccgtttttaaaaaatttggctcttaagtagtaaaatgaggagatggggttagaattcttttcttcctgggaatctttcaacaaaaacaaaaaatgaagggatctattaacaaaaatttctgttaggctagagggacaaaggcccattacagttttagtgtcctccaatttgaatctcaatctgcactacttgatgttacataatgaagtgacccgtattaaaaaacgggaagctgctagaactcaggcttccagaattgaatgtckatccttttagaatcaacaacatgcagatgtcagagtctaaaacttcccaaaaactcattgatttctcttgattccctactgtttttcatacggaatactgtttcacctttaatctcaatttg

SEQ ID NO: 439571 - DNA, 621 bp, Homo sapiens
agtatgatgtcactgttcaacccatgaaataactgcacgctgtgcaaagttgtcctcaaaggaaaagaagttgaacatattcaggaaaacagatgaaagcatacctgaaattttaaaacatatacaactgtatcagaaatcataagtttaaagatatcatatgggggaaataatgtaattggtccaatgaatttccacaaagaagcttataaacagatctagaacttgctagttctgaacttgaagcacactggttccaggatctcacacttttctgccgtgacacaatcacaaccatgaatgattcagataacattctcaatgagaagttttctttacacatagatagcaggccctggatttttgctctaacattggttgtktaaggtaaagcacagtactgagagatgaaaaatgccagaaaatccactctaactagggcttattttcatagacacataataacgcttgatactgtgcacaaaaccggagataaaaaatgtaaaacaactgacaggaaagtgttcaaaaggtatcctgtgatattcacagggaagtcaattcatagtcagtggtacatttctggggcagggcttccttgccctcccagttttagagtgt

SEQ ID NO: 439572 - DNA, 570 bp, Homo sapiens
tttaacatgtttttttcaagactggagccttaaaatattagaccttgtcaggacggcaaatgcaaaccagacaaaccactactgcactactgttcaaaatgtttgattatccttttaattaaccaggaattcctccctgcaaaatagctttaaggggcatctggaaacatccagctaggctttacgttgtcctggtgaaggtcaaagttgcacactaggtacagcagagacctycccactgacaggcaggtagcggtttttctagtatgtggtcttttctgagacctgcagagaccacagactttgcatttgccacaaaaagaattactgtgcactcacggttttcctgtgtgtggaactgatgtgcaatattgagtcagacgatttttcctttcataatgaaaaatcctctagaaatagacaattatttccctatctaattcattttggggaaattggctatgggatgctaaagaatgattttataaacatcatcagaaataaaaaagtttttaatgtgaaaaattagttctgttctcccaatatgagtgttagaagtttatttgtaaa

SEQ ID NO: 439573 - DNA, 460 bp, Homo sapiens
ttacatatgctaatattttctggagatgtctttgagtcaagacattggaacaaaatattatatataaagtttggttgtctattataactatatcacactggtattcaaarattgattcagaaagcagtatttgctaaagatttttttttttttttttttttttttttttttggtgggctctgaataaacctgggaacaaggaaagggttgaaaagatacggatttttattaaatatgttcgaagcaattcagtaccttggggaaaacaacttcaaacttccaagggcttctctgcagctgggaaagtaaatttgtagaaaacttttttcatgtttaactccaaaacatgaaacctggctctatataccacactgattcacatcttacccagagggacagattcacatctctgttgggatgtacatgcaaggatttcctgtacacagagatggaataagct

SEQ ID NO: 439574 - DNA, 543 bp, Homo sapiens
aaggaggccaaggctgaattagtgctgacccaggctttggggcatttccaagctgagtgttgaactaatacagggaagttcctgctgtgggcagacctgtgcctktaaaaggtgctgagtgaatatttattgatcaagctgttaattaaataccaagtcccaaaccagcattcaatttatttgaattccagaggaagtagtgtagtgtcaacacaaataaacactcacctaagtaatagcatctaaaactgttacacaatttaaacatcacctcaagatgaatccctgattcaagaatgaggatattagtttttctcttttattaggttcctgtttggtttctctaaacaatgtgccaatgaataattgtgacttcctcaaatccttcctaaccaagatctattcccgtggtttcacgttttattttgtttcttttctttgtatggatagctaagccctaataaaactattgctcaacatgggaaatattggaaatattttatgaaatttaggtcattaccatggtgctgtgctaccggatta

SEQ ID NO: 439575 - DNA, 467 bp, Homo sapiens
ttgaaaaaaaagccttgagttgttttctttaagaaaaagttgtgtggcctttttctactctaagtcctgatactcacttggtgcctttattttctgtgtgacagtgacacaacaaagttccaatatattaacattttcatctcaattgacaattttggagcaaaaaaaatttccctgttctaaagagacagagatagacagagggagrcagaaagggtaaacactgagatattgaagaagccgtttgtaattaaaatataaagtactggtttctctgggaggaaggaatctgttcctagccattgtggaaagaattgtcttgttcctggatgatatattttgttcttttttagttttctaatctgtgaaagcaaaaccacagtgggattttaagggaatggcaagttgaggctaaattgtgagaggcatatataataaaggaaattatgagtaaaaagtactagtta

SEQ ID NO: 439576 - DNA, 533 bp, Homo sapiens
gtcagtcactcattagccaattcagttattagattaactgttgtggtattgttctactttattattatagttgttaatctcttactgtatctaatttataaattaaattttatcatagtatgtacgtttaggaaaaacgtagtgtatatagggtttcgttctatccatggattcaggtatcccctgaggttcttaggatatgtctcctggggataaagtgggactgttgtgtaatatgttttsagcttctaatttatgttgctttattcaatttcccttttagacacattttttaaaacaaatctgaaagctttcaaagcaaaaaatagttttgaaattattcacctaagttcttgtaaatgacaaccaaatactgtggaaaaatctgaatagtttattttttaaatccaaatatgcacaattatccatggaactaatattatgcaatcaaatactttaacagaaatttacatttttcataaatacatcttaccttgtagtgctttttgaagtggctgtaagaccttctttgg

SEQ ID NO: 439577 - DNA, 526 bp, Homo sapiens
gtcagattaaaaataagccaggttgagttctaccatgttctcattcaacagtatgtgaggtgcatgtatagtaagcaacacccttcccttaaattgtgaataagccaggaagataactattgataacctggctctgttttccccaaccctttctggaagcaaggtaggtgacatgtctccttcaatgacagcatggtctctgataaaataaagcccttttggacatgagcagataaggagaactaattgtttctgatcttaagtggtggtggagaaagctcttgatgcttctgttcctactgactggttggyttttcaactagttgggctgtggctcatgcatgcaaggtgcataaaaccttcaggccaccagcatgctgggccggtaggaatcatgggaaattatacattatgtgtagacgaaatgtctgtgcatagtagagcttgagcagtcctgccatagtgcatgtagaccttgatgtcaatattactgctatagtgaatttgtcatttcctgcatggtgtg

SEQ ID NO: 439578 - DNA, 554 bp, Homo sapiens
aactaattgtttctgatcttaagtggtggtggagaaagctcttgatgcttctgttcctactgactggttggtttttcaactagttgggctgtggctcatgcatgcaaggtgcataaaaccttcaggccaccagcatgctgggccggtaggaatcatgggaaattatacattatgtgtagacgaaatgtctgtgcatagtagagcttgagcagtcctgccatagtgcatgtagaccttgatgtsaatattactgctatagtgaatttgtcatttcctgcatggtgtgaatctgtacttaagtatttgtttaatctatgcagacagaattatttcagttactggagaaagcttacaacctgaatggcttataattacagcccttatttggtttatctttctttctggaagctaagtgaaatgaaaaaaaaaatactttgggaaggttaaacttattaaagcctggagttataatttctattcatttgtcaaaggagtgatcaacagatggccacaaatctgaggatcagtttgtcattatttgttccgttgttaac

SEQ ID NO: 439579 - DNA, 577 bp, Homo sapiens
aatttttccacttattcaatccttatctaatgatattttgcaaagtaattgattgtatcagagtccagcttcctggcagtactggttgtgacatattacctttatttataatttgttacaatcgttttgacttctaattatgggttttcctattctgcttctcataatgttctcatgttatatwagctatttaaggatttttaggtactggaggccaggcattttttcttagtcccttaaactctctacttcttctttcttacctctgcctcttccctttctcagcttctctttctcctgcaggctccttcacaacagtgagcagagggacaatggaggaaccagccaaacatttgcttgagcctacggcaggagaccatccagaaagaagctggtggtagagggattcatggacagcgctggagccatctggtctggggaggcttgaagaggaggcaagtgaaggaggctcacataggatgtgtcttaaggtgtccttaagaagctgaaaatgtcatgactaacctgccaacatggtgaaaccctgtctttactaaaaatacacaaactagctggg

SEQ ID NO: 439580 - DNA, 577 bp, Homo sapiens
aatttttccacttattcaatccttatctaatgatattttgcaaagtaattgattgtatcagagtccagcttcctggcagtactggttgtgacatattacctttatttataatttgttacaatcgttttgacttctaattatgggttttcctattctgcttctcataatgttctcatgttatattagctatttaaggatttttaggtactggaggccaggcattttttcttagtcccttaaactctctacttcttctttcttacctctgcctcttccctttctcagcttctctttctcctgcaggctccttcacaacagtgagcagagggacaatggaggarccagccaaacatttgcttgagcctacggcaggagaccatccagaaagaagctggtggtagagggattcatggacagcgctggagccatctggtctggggaggcttgaagaggaggcaagtgaaggaggctcacataggatgtgtcttaaggtgtccttaagaagctgaaaatgtcatgactaacctgccaacatggtgaaaccctgtctttactaaaaatacacaaactagctggg

SEQ ID NO: 439581 - DNA, 577 bp, Homo sapiens
aatttttccacttattcaatccttatctaatgatattttgcaaagtaattgattgtatcagagtccagcttcctggcagtactggttgtgacatattacctttatttataatttgttacaatcgttttgacttctaattatgggttttcctattctgcttctcataatgttctcatgttatattagctatttaaggatttttaggtactggaggccaggcattttttcttagtcccttaaactctctacttcttctttcttacctctgcctcttccctttctcagcttctctttctcctgcaggctccttcacaacagtgagcagagggacaatggaggaaccagccaaacatttgcttgagcctacggcaggagaccatccagaaagaagctggtggtagagggattcatggacagcgctggagccatctggtctggggaggcttgaagaggaggcaagtgaaggaggctcacatargatgtgtcttaaggtgtccttaagaagctgaaaatgtcatgactaacctgccaacatggtgaaaccctgtctttactaaaaatacacaaactagctggg

SEQ ID NO: 439582 - DNA, 587 bp, Homo sapiens
atatgggagccaaggagaggtcgctgcctggaatccactactccgtaattcctaagagcaaaggcagcatcatgattgtttcttgatgccagagatgggccatactgaagacagctccattgcctttttttgagggtccaggggcttgtagttgtacaaaccaactgggaaggcaatggattccctgcagagagaatatgggtggactgggcttctggaaatctaggagctgagaagggagtggtaaccagagaaacagaatatgcctacawcctaggggttacgattggaggggcttagaagagaagtctagaaaaaaccacaaaaatactcacgagaaagtgatacagctttaaatatacaccaggaccaaagaaatatctattttccaagtgtatctgttgagcagaaaccttctgttcctctttcctctcctctctccctgagcacaaccctggatgagcctgaaagttagtcagcgaaactctgactaagaacagacacacaggagctgtggggtaggggaagaaaggcttatttttgaatgcagaaaaatagtgatgaaatgtagaaactcaacatttgta

SEQ ID NO: 439583 - DNA, 510 bp, Homo sapiens
tcatgaagaaagaacagagtcaacaatccaacaggagggctggtttgtgcaaaggtaccaagggagaaatcatggcgtgtgtccagtcagtaccaaatagaccagtttttctgtatggcatgtaaaaggaagttacagagattagtctagaaagcttatagcgatgatcaagggatgaatggcaggtaaaggaatttgtacttagctttgtggatacagggagttttcaaaagtttygaaataatagatttgaataatcagagctagaagatgattctgtgtggagggtcagtcagagagggaaaaaaatccagagacgaagagcccagttatgacactaacttgattatgacaaagctgttatttttgtttacatttgaactgatgcccttgactcttagtattctcccatccctatacgtgggttcttatgccacttttatatatgttgtctgaaaagtagactgtttagtgagaaatgatttctctatattcctggggattttataa

SEQ ID NO: 439584 - DNA, 587 bp, Homo sapiens
actaccatgtttttattcatttatttatttttgagacagagtcttgctctgttgcccaggctggagtggagggaccacaggcacacaccaccacgcccagctaatttttgtgtaatttttgtacttttaatagaggcggggtttcaccacgttggccaggctggtctcgaactcctggactcaagccatccatctgccttggcctcccaaagtcctgggcttacaggcatgagccaccatgcccagccactaccatgttttagcaactataatttaaatctgtacgctatgagataataagtcttatctggaaagcagtttctctctcttcctcctttccctcctcctcctcctcctcctccttcttcagaatgtcctagctttatttggaccttgactctttcatatgaagtttataatcattttgtcamtttccatagtttttttttttttggaatcacactgactgtttacattcatataggtaaaaatgacatgatactgcaaaccaaagctgcccatggagaaagctttgtcacatgacacattgtattgctaaaagttcaggttcttactgctgctgttga

SEQ ID NO: 439585 - DNA, 569 bp, Homo sapiens
cttcaacaagtaaaaccctaaacaaagtagccattgaaggaaaatgcttcaaaataatatgagccgtctatgacaaacccacagtcaacatcatgctgaatgggtaaatgctggcagcatttcccttaagaactgaaagaagacaagaatgcttattttcaccacttctatgtattacagtactggaagtccaggccagagcaatgaggcaagagaaagaaataaaagacatccgaatagaaaaagaagaagtaaataatctctctttactgatgatgattccacacctagaaaactctaaagactctaccaaagggctcctggaactaataatgacttcagtaaagtttcaggatacaccagtgacattcaarctgaaagccaaatcaaggatgcaatcccatttacaatagccacaaaaaaatacctaggaatacatctaaccaaggaggtgaatgatctctacaaggagaattacaaacactgctgaaagaaatcataggtgacacaaacaaatggaaaaacattccatgctcttggactgaaagaatcaatattgttaaaatagt

SEQ ID NO: 439586 - DNA, 595 bp, Homo sapiens
aacagtgtaaatgagttgcagttactgacgctttgctcactccttggccagtagctgatcaaatagcaaacaaaattgatattcaggagcaccaatgaggtagacagacatttcaagagactccctctatgtcagttgatgcctgttccaaggaacccgggtgatatggtttgactctgtgtctccatccaaatctcatcttgaattgtaatccccaggcgtttagggagagacctggtgggaggcaactggatcatgggggtggtctccgccctgctgttctgttgatagtgagttctcataagagctgayggttttaaagagtggcacttcctcatttttgcacacactgtgaaggcttgactggactggaagaagggaagatctctttccagactcactcacatggctgttggcaggctttgttccctctacacagagcttcccccaccgtagctggctttcctcaaagtgaggaagccaaaagagaatgaaagcagagcactcaggataaaagccacaatctttttcacaacctaagtttggtagtaacatcccatcgcttttgcagtgctatatttgttaaaattgaatc

SEQ ID NO: 439587 - DNA, 570 bp, Homo sapiens
aataaaggctacatttcagaagggattacagaagggcaygaatgccagaggcaaggattatttcagacagtcttaaaggttgtctgctacactgtctcagagtctgtatgaagattaacagagttaaacataaaaaatgcttaaaacattatacggtaagtaccatataagtgggctcttattaatataagtactatcaccactactgtgattatcttaagcaagagtcaccaaacttattctgtaaatagctagttagtaaatactttaggcttttgagtgcacatatcatctctgttgtatatttttctatatatgtgtagtttctttttacaatgctttgaaaatgtaaaacccagtcttagcatgagagctgtaccaaaagaggtcactagctgcagttatccctcaggccacagtttgaaaatttctgatattaagacacaagttttagaacaacaaagataatggtatttttaaataaagcctgacattacatgtgcattgatctgacaggtacaatgctattttagcagagggagattacttcacatgccaggaaaagacagc

SEQ ID NO: 439588 - DNA, 570 bp, Homo sapiens
aataaaggctacatttcagaagggattacagaagggcatgaatgccagaggcaaggattatttcagacagtcttaaaggttgtctgctacactgtctcagagtctgtatgaagattaacagagttaaacataaaaaatgcttaaaacattatacggtaagtaccatataagtgggctcttattaatataagtactatcaccactactgtgattatcttaagcaagagtcaccaaacttattctgtaaatagctagttagtaaatactttaggcttttgagtgcacatatcatctmtgttgtatatttttctatatatgtgtagtttctttttacaatgctttgaaaatgtaaaacccagtcttagcatgagagctgtaccaaaagaggtcactagctgcagttatccctcaggccacagtttgaaaatttctgatattaagacacaagttttagaacaacaaagataatggtatttttaaataaagcctgacattacatgtgcattgatctgacaggtacaatgctattttagcagagggagattacttcacatgccaggaaaagacagc

SEQ ID NO: 439589 - DNA, 571 bp, Homo sapiens
tgtacctaacattcagaacgaatatgaagagctctgtcatcttttacataatcaccaccaccttgtattttatagggcttttaactttgcaaagaacaacrtgaacaagatattgggcatgaatatcctttgtaaactataacttgctatagtagagatggaaaataggtttaatcttttgtgcaaaatctgatctatctggaatcattgcatgggtcccagtgttgaaaagtttgagtccatgcctgtgctcagctagaaaaagagaagggaaagtatccagtgatgtgggaggatgtaataagggtacatatgctaggtatctgccatccaactagtatgaaagtgtatggtgttatctcccccagttttttcatatttaattcacagaaaaaatatttttatgatttgagtcacaaattttgctacaaagccagcttccaaagtttgattatactgaccataaacatgacgcagaatactggtcacctgaacgcagggaccatattctgctggccatccaccaatttgaagttaaattttataccctaaataccaacacaaattgtta

SEQ ID NO: 439590 - DNA, 496 bp, Homo sapiens
cacagagttggtaagggggtcaggagtgggatggaaaaattagaagatatcatgtacatcagggtctctgtaatcaggtatcttgcaaatgttggggaaaatatttacttacaggactctgttctgtgcttctgtgagtttcaagtacaatggaatccataccacaccatgaagaccatcagcttgcaaaaggacaaccgatactagaaactatgacaagaattatctatgtttactgacatcaagaagaggggccacttgacccaagagttcacgacaatgacaagaactttcttctcaacccacttaagagactgtaaggacagctaggagctgggtactctggtattcacagatrcttgagtcctaaattcaatgacaactaattgtgtttctgttttcactagaaagaaaaggcagccattagagtggatgtacattgaatacatgtcttctgactctctctcttatgtttaccccataacaggaacattcc

SEQ ID NO: 439591 - DNA, 565 bp, Homo sapiens
tcctgcttggaatgcacacaccagaaaccctggaaagcagcaactttttcataaaagtggatctgagttggtggtcagatgtgggccatctgttagaagccaccacccttcccaaagctactcttctgactggccacaggggcctgcaagtcagagttcttggggagacactgccatggtggggttctctctcacaagacaagtttttatgaatgtaaccccacaaagagcacctgcaacccctggacctttgccagggcaaacctgtttctttctctagaaatggaaggaaccttcttacyctgaaggccaaatatccccatgagcattttagaactctgaatgctaacactggggaaacatttcctggaggattgcccctatgtctaagagggaacactctgccaaagctccataccggcaactctcttcgattgctgccctacccttgtaattctaggttcccctttcaaggcaactcatgggttgtattgtgtcatgtaaaatacactgggctggaaggtaacagcctgacttctgtattatgcactggttgtgtgagctt

SEQ ID NO: 439592 - DNA, 546 bp, Homo sapiens
tttcacttgccacatgggccatgtctttcagaaactgattgcctaatgaaattatagaatttaatactcataaaatcatacaaataaaaaataattctataattatttaaatatctaaacaatgtgcacaaagtaactatatatcaggatacagtgatcacataaaattcataggcaaaactaattgtgtattacatttttgatatataaaattagaagaatctggctacattgcacggtggtgtcgggtttggtaattgcgcagaatacccttaggtctagaattacatcgaccaaatggaacaaatctaggcctgcatgtcctatttggcttagctagctctccacccactctcttagggttgtgtccattgtctgggctgagcaagcacaagaacagcactgaygatacttaggggtttcctcttctctaacttcccatggaattgacacctatccttcagcagatgttgaattgtgccctcaggattactcactctagttcacaattaatctctccctgttctgactctgacaggtccttaa

SEQ ID NO: 439593 - DNA, 598 bp, Homo sapiens
agatgaggaatctgaggccaagagagaccatgggatatatccaaggtctttttcacatgcgtaactaacttggttttacattggcatttttcattattttattcatcaatttatcgatttacccaacaacttccaagttccaggacatgtattaagcactgaaaatacaaagttgaacacaagaatsttcctgtcagacactcagaattcactggtatgttggagccagctgctaccagctccaaagggccaactgtgaaattgtcaggaacttagtgagctgtttaacatagtcattactaaaaattaaattctataagcttgcaattaattatattaaaattaaaggtaataagtactcaaaacagaatgtcctaattattttactatgtttctatgctgttgaagttattaacctctagtgtaaaatattatacaatggactgctctagcacatctcttcccaagtccacactcagtgatatcacattcgtagcttgaaattgggtatttacactatgaatattagcaaacactataaggtagctttcttttttttttcccgagtggtggttgttcaaatttaccacctcattac

SEQ ID NO: 439594 - DNA, 251 bp, Homo sapiens
aatgttttccccaaagagagggcttttcagatgagctctgtaatttttcatctagaggaaagagtgtatcatcacccctttaaaaaaataaatgaattacattgacttgatgcacagcaggcttgcagatttcatggggcctttgtattgaacatatgcttgatttctgttgtctcctctcagattattctaggcatccaggagataaaacaggcaggaawgcagcagacatcacagcaaagggcttgata

SEQ ID NO: 439595 - DNA, 578 bp, Homo sapiens
tcacacaagtaactaaatgtaaaaaattaagtatgttcctcaccwtaatatttataacagaaaaatttggaaataacttgtcaattggtacatacttcatataaatccctataatgggatacaatacaatccttatagttaaaatttataagacaaaagtgcccaaaagaaactagtaaagaaaaaagaaggctagaaaaaagcatgtataatattgtcccatttagtagttaatcaaacatcagtaaatagaccacagagagataaattagtcagccagctagtcattgggaaggatacacaaaactgctaacaatcataatctgggtgctgagagtatgaaatttacttcattccttacatctttttgtactctgaattatgtgtcccttttttaattaggaaaaattctattttaattttgaaaaagaaagaaaaatcacaagaatctgctaattgctaaagtaagtttttggtattcttgagaatgggccttaaacacacacacaaaaatcccatctgtggctacttggaaaataattttcaattaaataaattgtaaagtcttacattcctta

SEQ ID NO: 439596 - DNA, 578 bp, Homo sapiens
tcacacaagtaactaaatgtaaaaaattaagtatgttcctcaccttaatatttataacagaaaaatttggaaataacttgtcaattggtacatacttcatataaatccctataatgggatacaatacaatccttayagttaaaatttataagacaaaagtgcccaaaagaaactagtaaagaaaaaagaaggctagaaaaaagcatgtataatattgtcccatttagtagttaatcaaacatcagtaaatagaccacagagagataaattagtcagccagctagtcattgggaaggatacacaaaactgctaacaatcataatctgggtgctgagagtatgaaatttacttcattccttacatctttttgtactctgaattatgtgtcccttttttaattaggaaaaattctattttaattttgaaaaagaaagaaaaatcacaagaatctgctaattgctaaagtaagtttttggtattcttgagaatgggccttaaacacacacacaaaaatcccatctgtggctacttggaaaataattttcaattaaataaattgtaaagtcttacattcctta

SEQ ID NO: 439597 - DNA, 607 bp, Homo sapiens
tggataatctattttaaatatacatcctatcaaccccattcttcttccttgctttttctaattcaaamgtatttatttccacaaatttttatccacagctaaatattacagtgactattccaagcatttttctataaagaaaggtgtagtttacagatttgttcaaagtggaaaaatattttcatcagtagtctttcttccctggtgttaggttcacccctgaatgttctgaactcttccggagaggcagtccttcatctaaatgtcagcgggtggcaaaatgttatattcaaatctggattattctgatacagtgtcacttcagaaagtagcttagtttcatttctggttgatcccctttgttagaattaggaatttttttttaaaaaacaatcttttgtatgtaatgacctttataataataataaatcctgccctgtgtttgtcattggcattaacctctgtctacaccctctaattctctaattatggctccagtgggtacaaaaggtgaattatggttatttggctcatgcagcaaattaattggagaaactgatgacaaatagtctgtgaagaactacaaggtcttgccccatgctgtccc

SEQ ID NO: 439598 - DNA, 606 bp, Homo sapiens
tgtaatgacctttataataataataaatcctgccctgtgtttgtcattggcattaacctctgtctacaccctctaattctctaattatggctccagtgggtacaaaaggtgaattatggttatttggctcatgcagcaaattaattggagaaactgatgacaaatagtctgtgaagaactacaaggtcttgccccatgctgtcccattttagttaccatttagttatgtaggcattatacaaatgcctcaaattaggacayctttgctctctcagtaggtcgagtttatgaaaatttactttatgcagaaaaaataaattctaatttattggttaccagaatcttaatgtatgaaggttctaagtaaatatttgatgaattgatggtagcagcgttaatttttaaatgttccaagctcctagtttttttttttgttttgtttttgcaaaagccttaaagtttggtactaaggaaatcaaagaatcaactcccaccatcatgcttcaggaaagggaaaaatgtctacctttgggtctaacctgcctcccaggtgagcctactggtactagaactgtaactgcaactatgatggcacagggaaaatgc

SEQ ID NO: 439599 - DNA, 606 bp, Homo sapiens
tgtaatgacctttataataataataaatcctgccctgtgtttgtcattggcattaacctctgtctacaccctctaattctctaattatggctccagtgggtacaaaaggtgaattatggttatttggctcatgcagcaaattaattggagaaactgatgacaaatagtctgtgaagaactacaaggtcttgccccatgctgtcccattttagttaccatttagttatgtaggcattatacaaatgcctcaaattaggacatctttgctctctcagtaggtcgagtttatgaaaatttactttatgcagaaaaaataaattctaatttattggttaccagaatcttaatgtatgaaggttctaagtaaatatttgatgaattgatggtagcagcgttaatttttaaatgttccaagctcstagtttttttttttgttttgtttttgcaaaagccttaaagtttggtactaaggaaatcaaagaatcaactcccaccatcatgcttcaggaaagggaaaaatgtctacctttgggtctaacctgcctcccaggtgagcctactggtactagaactgtaactgcaactatgatggcacagggaaaatgc

SEQ ID NO: 439600 - DNA, 542 bp, Homo sapiens
gaatcttaatgtatgaaggttctaagtaaatatttgatgaattgatggtagcagcgttaatttttaaatgttccaagctcctagtttttttttttgttttgtttttgcaaaagccttaaagtttggtactaaggaaatcaaagaatcaactcccaccatcatgcttcaggaaagggaaaaatgtctacctttgggtctaacctgcctcccaggtgagcctactggtactagaactgtaactgcaactatgatggcacagggaaaatgcatgtatgtaatatgcttgtcggcttcagcaacaactcatgtatacatacacatttactatatgtaaacakgtcctgtataatacttaaaacacaagtgtttgatctataaatatttgattcttagtatttaaaatgcttctaatattttaaaagacaaaactccaccatgatatcacattgaacattaaaattattcccacagcaacacttatttcagagaaacaattgagaagtcagttatcttagtcaccactaaaggcacctggtgagaaa

SEQ ID NO: 439601 - DNA, 556 bp, Homo sapiens
taacctgcctcccaggtgagcctactggtactagaactgtaactgcaactatgatggcacagggaaaatgcatgtatgtaatatgcttgtcggcttcagcaacaactcatgtatacatacacatttactatatgtaaacaggtccygtataatacttaaaacacaagtgtttgatctataaatatttgattcttagtatttaaaatgcttctaatattttaaaagacaaaactccaccatgatatcacattgaacattaaaattattcccacagcaacacttatttcagagaaacaattgagaagtcagttatcttagtcaccactaaaggcacctggtgagaaaagctgaactaaattttaaatattaaaaaattaaagagacatctagtgcagagttcaaacctttatgttgaattgtttgagtcgttactgatttcatgatgctgataagtgtttgagttgaaatgattttttaaaatgcagagaaaatgctaacagaatattatatagttcccctaaagatgcttcttctaacctccaagtattaaataaga

SEQ ID NO: 439602 - DNA, 378 bp, Homo sapiens
tggcatgtttaatgtggatgtagaagggataatgtccatggcaactgattggaacacaactgtcagcagcctcaacacaggctaagactgggttaagccccaggagatgcagagaaygactgaggaagctgtgctctaaggggacattacagaaggtagcttggagtgtgctgtgtttccgagagccttttaagttgggtggttgagtaaaggagggtagaggcaggctgttctacttccaatccatggataaatctcattttctcaatgtaatacagaggctgttcttctatgattggcaaacactatttgttcttatcatggaaacagcatactgctatcaagaaatagggaaaagacagtaaaaaaatgtgtgga

SEQ ID NO: 439603 - DNA, 378 bp, Homo sapiens
tggcatgtttaatgtggatgtagaagggataatgtccatggcaactgattggaacacaactgtcagcagcctcaacacaggctaagactgggttaagccccaggagatgcagagaacgactgaggaagctgtgctctaagggsacattacagaaggtagcttggagtgtgctgtgtttccgagagccttttaagttgggtggttgagtaaaggagggtagaggcaggctgttctacttccaatccatggataaatctcattttctcaatgtaatacagaggctgttcttctatgattggcaaacactatttgttcttatcatggaaacagcatactgctatcaagaaatagggaaaagacagtaaaaaaatgtgtgga

SEQ ID NO: 439604 - DNA, 378 bp, Homo sapiens
tggcatgtttaatgtggatgtagaagggataatgtccatggcaactgattggaacacaactgtcagcagcctcaacacaggctaagactgggttaagccccaggagatgcagagaacgactgaggaagctgtgctctaaggggacattacagaaggtagcttggagtgtgctgtgtttcckagagccttttaagttgggtggttgagtaaaggagggtagaggcaggctgttctacttccaatccatggataaatctcattttctcaatgtaatacagaggctgttcttctatgattggcaaacactatttgttcttatcatggaaacagcatactgctatcaagaaatagggaaaagacagtaaaaaaatgtgtgga

SEQ ID NO: 439605 - DNA, 592 bp, Homo sapiens
gggtacagcaaaccaacatggcacatgtaaacaaatgcaacaaacctgcacattgtgcacatgtaccctagaactttaagtataataaaaaaagtgtggaaagaataatatgggtttctaactgaatgcttgcttttgaagagcccaaaaacaaacaaacaaaaaattctaagagcagcaaacatctacgcctgttatgttactgaattaytcttttttaaaatccttatttcataggagagatatttacaattttgaattacaaagtttgaaaaacgttgaaaataacctgaaaggggaaagttgacctaagccattttattctcttaaaaaaacccaaacttttgtataatagtaatccctgaactgagtatttttgaaggtttttcagataatctgatgtgcgaggttagtttgttttactattcagttgtttggaatagtagagcattatatgaggctcttactggaggcttaatggtattaagagattaaaagctttcacattgtttggttttcacatctataaataaaacaagttattatcattttgtaatatttagcttatatacatttttgtgagagttttgtg

SEQ ID NO: 439606 - DNA, 568 bp, Homo sapiens
gggtcacctgatggaagggaggaaggcctcagggtccggggtcccctgccactgcccagctcttccagctgatggctccacatcttgggagtgggctctgatgcatgatgggtcaggggcttctcaggtttctacagcccaaatactgcccagctctggaggcttctatcccaccagggacaggtataacacaaatccttcccaaagatcatgcggtacctgctgagtggatgacaccctcaactctttcccagaggcccagggtctcatggggcagggaaacaggggaagatggagctcctcgcaggcctgacaaaggggytgagtcccaagccaaggcctcacccaagatgaggattctccatgggtttggagttgggtttccttttcctgccctggaggaggaggaagaggtactaggatgggggctgagctccagctgagcagggttaagggaagtgtgtccaccaggcatctgtgcatgggggagttgttggggaagcactggccagtgttctgccccagggcagctcagggggccctgagcacctagggtccaggaagtgcc

SEQ ID NO: 439607 - DNA, 592 bp, Homo sapiens
gggtacagcaaaccaacatggcacatgtaaacaaatgcaacaaacctgcacattgtgcacatgtaccctagaactttaagtataataaaaaaagtgtggaaagaataatatgggtttctaactgaatgcttgcttttgaagagcccaaaaacaaacaaacaaaaaattctaagagcagcaaacatctacgcctgttatgttactgaattattcttttttaaaatccttatttcataggagagatatttacaattttgaattacaaagtttgaaaaacgttgaaaataacctgaaaggggaaagttgacctaagccattttattctcttaaaaaaacccaaacttttgtataatagtaatccctgaactgagtatttttgaaggtttttcagataatctgatgtgcgaggttagtttgttttactattcagttgtttggaatagtagagcattatatgaggctcttactggaggcttaatggtattaagagattaaaagctttcacattgtttggttttcacatctataaataaaacaagttrttatcattttgtaatatttagcttatatacatttttgtgagagttttgtg

SEQ ID NO: 439608 - DNA, 528 bp, Homo sapiens
gtgatgttccccttcctgtgtccatgtgttctcattgttcaattcccagctatgagtgagaacatgcggtgtttcgttttttgtccttgcgatagttgactgagaatgatgaattaaaataaaaatgcatgcactttcaaatgtacttagtgcaacatattgaacttacattccagttttcctggaattwcttgtgtcttgagctaaaggctgtatttggtataacagggaaggaaagaaattatttttcctataaaattagtttaaaaacacatataattaaacaaaataaaaatattatcccatcttttaaagaacatttactaagtcacagatattacccgaagtttagaatatcacctaagaacaattgtttaaaaattatttagggaaaatgaagcaaaattgtttttacaatctgagattttaacagctgttcttttaactcctgttcttcagctgaatgtccccttcattctgaatgtctgcagtagagttgaattggggggcagttaggttccaggaaca

SEQ ID NO: 439609 - DNA, 578 bp, Homo sapiens
cctcaccagaagctaggcagatgccagaaycatgtttgtacagcctgcagctatacaaacctcttttcaaagctcttttctttataaattacccagtctcaggtatttcttcacagcaatgtaagaatggcctaatacagcaaattggtactgagacatggggcattgctataaagatacttgaaagtgtggaagtgactttggaactaggtaatgggcaggagttggaagagtttggactgctcctaatacaggaagatgaaggaaagttctgaatttcttagagactagttaaatggttgtgaccaaaatgctgatagtgatatggacagtgaaggataggctgatgcggtctcagatgaaaatgaggaacttactgagacttggaataaaggtcatgcctgttatgcctttgcaaagaacttggctgcagtctgttcatgtactagggatctgaggaagtttgaacactcagacacaggagcaaaaaaatgacttaaagttggaatttacaattaaatgggaagcagaccatacaagtatagaaaatttgcagcctgcccatttggcaaaggaag

SEQ ID NO: 439610 - DNA, 578 bp, Homo sapiens
cctcaccagaagctaggcagatgccagaatcatgyttgtacagcctgcagctatacaaacctcttttcaaagctcttttctttataaattacccagtctcaggtatttcttcacagcaatgtaagaatggcctaatacagcaaattggtactgagacatggggcattgctataaagatacttgaaagtgtggaagtgactttggaactaggtaatgggcaggagttggaagagtttggactgctcctaatacaggaagatgaaggaaagttctgaatttcttagagactagttaaatggttgtgaccaaaatgctgatagtgatatggacagtgaaggataggctgatgcggtctcagatgaaaatgaggaacttactgagacttggaataaaggtcatgcctgttatgcctttgcaaagaacttggctgcagtctgttcatgtactagggatctgaggaagtttgaacactcagacacaggagcaaaaaaatgacttaaagttggaatttacaattaaatgggaagcagaccatacaagtatagaaaatttgcagcctgcccatttggcaaaggaag

SEQ ID NO: 439611 - DNA, 478 bp, Homo sapiens
aattcttaattctaacctcatcaagtaccaacaaagaatgcccttccatattaatacactttgggaattaagataaagtatatgtaattaaatcatcaaactccttttgttgtttagcaggtagtttgatataataagagaaattgtgttctcattatatatttgtcacaatgaatgaatgtaaaaccttaatcaggctatctgacttcttttagtgacattaccctttttgcaaccaacacatcaaattagtaatatttatcctacaaaaataatgtgaagataaatgagataasatatataatagtcacaaatacttattgaataaagctgtttttatttatatatttctatgtacttactagatatgttcttattaaatattttattatggtatatgtcaagtcttttacttctttttttatacttagtatattatagaactcatcttccaataaaattgtaatacaattttctt

SEQ ID NO: 439612 - DNA, 478 bp, Homo sapiens
aattcttaattctaacctcatcaagtaccaacaaagaatgcccttccatattaatacactttgggaattaagataaagtatatgtaattaaatcatcaaactccttttgttgtttagcaggtagtttgatataataagagaaattgtgttctcattatatatttgtcacaatgaatgaatgtaaaaccttaatcaggctatctgacttcttttagtgacattaccctttttgcaaccaacacatcaaattagtaatatttatcctacaaaaataatgtgaagataaatgagataacatatataatagtcacaaatacttattgaataaagctgtttttatttatatatttctatgtacttactagatatgttcttattaaatattttattatggtatatgtcaagtcttttacttctttttttatacttagtrtattatagaactcatcttccaataaaattgtaatacaattttctt

SEQ ID NO: 439613 - DNA, 414 bp, Homo sapiens
tctctgattcttccttttcctgtttaaactactctcattctcattgtggcctagagttctttttccctaatattgccttcagaaggctaagtttctaatataataacaatttgagtctttaccacttctctctagaatcgtgatttagactaggttattagagtaaacaatatgattccaaattttttctttttttttaatgggctagcatccaaaaagcttaagaattcttgggggaaatgacataattaagctagattattttaatttaaattcagaattaaaaatcattttcaatagcttctttgtcttaatttaayaagcttttgttgaacattgattatattttgaattctattttttcttttatttttagttggcacataattatacgtatttatgggatacagagtg

SEQ ID NO: 439614 - DNA, 557 bp, Homo sapiens
tggccatcgtggtgctgtgcaagtcgcgcaaggagcagaaggagaccaccttctacacagttatgcggctgrctgccaccgacctgttgttcactttgctggtgagccaggtgaccatcgccatgtacacgaagggcgggtaacctgggggccagctgctgtgtgagtacagcatcttcagcctgttcttcttcagtcagtccggcctcagcatcgtctgtgccgtgatacctatacaggtaatttgtgttagacattcttagaagagtttcaaaagttttatgtttttatctgggttataaacagagtcctcaaatgcacacaaaggaaatcatgccatgattgaatttcagcaggaataagtttattttacctatacaaaattaaaatacttttgttgtgtttgaaaatgtgttttaaagatatgtttttgaaaaaagtttaagtaaatatttaatcatgtccccttttctatcccaagaaataatttcatatatagtttatttaaattttttaacaaaaatgtagcataatttttttaaattgtatattttatt

SEQ ID NO: 439615 - DNA, 557 bp, Homo sapiens
tggccatcgtggtgctgtgcaagtcgcgcaaggagcagaaggagaccaccttctacacagttatgcggctgactgccaccgacctgttgttcactttgctggtgagccaggtgaccatcgccatgtacaygaagggcgggtaacctgggggccagctgctgtgtgagtacagcatcttcagcctgttcttcttcagtcagtccggcctcagcatcgtctgtgccgtgatacctatacaggtaatttgtgttagacattcttagaagagtttcaaaagttttatgtttttatctgggttataaacagagtcctcaaatgcacacaaaggaaatcatgccatgattgaatttcagcaggaataagtttattttacctatacaaaattaaaatacttttgttgtgtttgaaaatgtgttttaaagatatgtttttgaaaaaagtttaagtaaatatttaatcatgtccccttttctatcccaagaaataatttcatatatagtttatttaaattttttaacaaaaatgtagcataatttttttaaattgtatattttatt

SEQ ID NO: 439616 - DNA, 557 bp, Homo sapiens
tggccatcgtggtgctgtgcaagtcgcgcaaggagcagaaggagaccaccttctacacagttatgcggctgactgccaccgacctgttgttcactttgctggtgagccaggtgaccatcgccatgtacacgaagggcgggtaacctgggggccagctgctgtgtgagtacagcatcttcagcctgttcttcttcagtcagtccggcctcagcatcgtctgtgccrtgatacctatacaggtaatttgtgttagacattcttagaagagtttcaaaagttttatgtttttatctgggttataaacagagtcctcaaatgcacacaaaggaaatcatgccatgattgaatttcagcaggaataagtttattttacctatacaaaattaaaatacttttgttgtgtttgaaaatgtgttttaaagatatgtttttgaaaaaagtttaagtaaatatttaatcatgtccccttttctatcccaagaaataatttcatatatagtttatttaaattttttaacaaaaatgtagcataatttttttaaattgtatattttatt

SEQ ID NO: 439617 - DNA, 557 bp, Homo sapiens
tggccatcgtggtgctgtgcaagtcgcgcaaggagcagaaggagaccaccttctacacagttatgcggctgactgccaccgacctgttgttcactttgctggtgagccaggtgaccatcgccatgtacacgaagggcgggtaacctgggggccagctgctgtgtgagtacagcatcttcagcctgttcttcttcagtcagtccggcctcagcatcgtctgtgccgtgatayctatacaggtaatttgtgttagacattcttagaagagtttcaaaagttttatgtttttatctgggttataaacagagtcctcaaatgcacacaaaggaaatcatgccatgattgaatttcagcaggaataagtttattttacctatacaaaattaaaatacttttgttgtgtttgaaaatgtgttttaaagatatgtttttgaaaaaagtttaagtaaatatttaatcatgtccccttttctatcccaagaaataatttcatatatagtttatttaaattttttaacaaaaatgtagcataatttttttaaattgtatattttatt

SEQ ID NO: 439618 - DNA, 503 bp, Homo sapiens
gcgcaaggagcagaaggagaccaccttctacacagttatgcggctgactgccaccgacctgttgttcactttgctggtgagccaggtgaccatcgccatgtacacgaagggcgggtaacctgggggccagctgctgtgtgagtacagcatcttcagcctgttcttcttcagtcagtccggcctcagcatcgtctgtgccgtgatacctatacaggtaatttgtgttagacattcttagaagagtttcaaaagttttatgtttttatctgggttataaacagagtcctcaaatgcayacaaaggaaatcatgccatgattgaatttcagcaggaataagtttattttacctatacaaaattaaaatacttttgttgtgtttgaaaatgtgttttaaagatatgtttttgaaaaaagtttaagtaaatatttaatcatgtccccttttctatcccaagaaataatttcatatatagtttatttaaattttttaacaaaaatgtag

SEQ ID NO: 439619 - DNA, 503 bp, Homo sapiens
gcgcaaggagcagaaggagaccaccttctacacagttatgcggctgactgccaccgacctgttgttcactttgctggtgagccaggtgaccatcgccatgtacacgaagggcgggtaacctgggggccagctgctgtgtgagtacagcatcttcagcctgttcttcttcagtcagtccggcctcagcatcgtctgtgccgtgatacctatacaggtaatttgtgttagacattcttagaagagtttcaaaagttttatgtttttatctgggttataaacagagtcctcaaatgcacacaaaggaaatcatgccatgattgaatttcagcaggaataagtttattttacctatwcaaaattaaaatacttttgttgtgtttgaaaatgtgttttaaagatatgtttttgaaaaaagtttaagtaaatatttaatcatgtccccttttctatcccaagaaataatttcatatatagtttatttaaattttttaacaaaaatgtag

SEQ ID NO: 439620 - DNA, 503 bp, Homo sapiens
gcgcaaggagcagaaggagaccaccttctacacagttatgcggctgactgccaccgacctgttgttcactttgctggtgagccaggtgaccatcgccatgtacacgaagggcgggtaacctgggggccagctgctgtgtgagtacagcatcttcagcctgttcttcttcagtcagtccggcctcagcatcgtctgtgccgtgatacctatacaggtaatttgtgttagacattcttagaagagtttcaaaagttttatgtttttatctgggttataaacagagtcctcaaatgcacacaaaggaaatcatgccatgattgaatttcagcaggaataagtttattttacctatacaaaattaaaatacttttgttgtgtttgaaaatgtgttttaaagatatgtttttgaaaaaagtttaagtaaatatttaatcaygtccccttttctatcccaagaaataatttcatatatagtttatttaaattttttaacaaaaatgtag

SEQ ID NO: 439621 - DNA, 577 bp, Homo sapiens
tgaacccttttgaaacctaatagtggctgtaatcataatamattttttctagatagttttacaaacaatttttaatcttcaaaattcaaggctaatgtatgcatattgaatgattatggcattcatatataagctatgtttagaaccagaacttaccagtgcttatatttatgtgtaggtatgatagacaaagcataggaataacaagatatcattagtttactatttattaaaaatatgaatagaactggttttgctctgtaatttttgctatgataaaccttagccatgaacataacctgctattgagcatgtgcgtcatccatcttatgactcaccaaaaatagggaaatgagtctagaaccatcaaagcaattgacaacagaagtgagatttcagcttggatgcattttattataaaagtagtataattatattcaagaatttgttaaccttttatctcactaaataaatttcaatattcattataaataacaaattcaagcatttaaaatattatttatatattcttaatttttattgtttgttttaattacacatgtcaatcctgttatgg

SEQ ID NO: 439622 - DNA, 577 bp, Homo sapiens
tgaacccttttgaaacctaatagtggctgtaatcataataaattttttctagatagttttacaaacaatttttaatcttcaaaattcaaggctaatgtatgcatattgaatgattatggcattcatatataagctatgtttrgaaccagaacttaccagtgcttatatttatgtgtaggtatgatagacaaagcataggaataacaagatatcattagtttactatttattaaaaatatgaatagaactggttttgctctgtaatttttgctatgataaaccttagccatgaacataacctgctattgagcatgtgcgtcatccatcttatgactcaccaaaaatagggaaatgagtctagaaccatcaaagcaattgacaacagaagtgagatttcagcttggatgcattttattataaaagtagtataattatattcaagaatttgttaaccttttatctcactaaataaatttcaatattcattataaataacaaattcaagcatttaaaatattatttatatattcttaatttttattgtttgttttaattacacatgtcaatcctgttatgg

SEQ ID NO: 439623 - DNA, 577 bp, Homo sapiens
tgaacccttttgaaacctaatagtggctgtaatcataataaattttttctagatagttttacaaacaatttttaatcttcaaaattcaaggctaatgtatgcatattgaatgattatggcattcatatataagctatgtttagaaccagaacttaccagtgcttatatttatgtgtaggtatgatagacaaagcataggaataacaagatatcattagtttactatttattaaaaatatgaatagaactggttttgctctgtaatttttgctatgataaacsttagccatgaacataacctgctattgagcatgtgcgtcatccatcttatgactcaccaaaaatagggaaatgagtctagaaccatcaaagcaattgacaacagaagtgagatttcagcttggatgcattttattataaaagtagtataattatattcaagaatttgttaaccttttatctcactaaataaatttcaatattcattataaataacaaattcaagcatttaaaatattatttatatattcttaatttttattgtttgttttaattacacatgtcaatcctgttatgg

SEQ ID NO: 439624 - DNA, 579 bp, Homo sapiens
cccattgccataattttgtgtcttttgaagacatttgccagaattctacttttgaaggctgccccttttgacagtcacttactgaggaagctgtgggacattttcaaagccttttatatagaaaaaaaaamcacaaaatatactgctgtgggtctgtgttcagagactacgaagagcacagatgccactgttctgtgtcgcagatgctgtgggaagtgccttaacacacagaggtttgcttcatgcaaccgggtgaggaacatctctaaaacattttacagtcaaggaaattcagtgttcaggaggttgaatgcgttatccaagatcacacatatgtcctgacagattcggggttcaatgaagaattatgtattttaattaagaattatgtattttgattaataattatatattttaatttcacattttaaatttctgcagttttcttccatcacttttcaccatgctttctacacttggaattactttttttgacttcttgatcttctttacttgtatgttattgattttctacaagttttaacatatatgattaaagagtatttcttaatgttttaa

SEQ ID NO: 439625 - DNA, 484 bp, Homo sapiens
tggatgcatccagaagagcaaggcaggagggaaatgtgcccattgccataattttgtgtcttttgaagacatttgccagaattctacttttgaaggctgccccttttgacagtcacttactgaggaagctgtgggacattttcaaagccttttatatagaaaaaaaaaccacaaaatatactkctgtgggtctgtgttcagagactacgaagagcacagatgccactgttctgtgtcgcagatgctgtgggaagtgccttaacacacagaggtttgcttcatgcaaccgggtgaggaacatctctaaaacattttacagtcaaggaaattcagtgttcaggaggttgaatgcgttatccaagatcacacatatgtcctgacagattcggggttcaatgaagaattatgtattttaattaagaattatgtattttgattaataattatatattttaatttcacattttaaatttctgcagttttc

SEQ ID NO: 439626 - DNA, 484 bp, Homo sapiens
tggatgcatccagaagagcaaggcaggagggaaatgtgcccattgccataattttgtgtcttttgaagacatttgccagaattctacttttgaaggctgccccttttgacagtcacttactgaggaagctgtgggacattttcaaagccttttatatagaaaaaaaaaccacaaaatatactgctgtgggtctgtgttcagagactacgaagagcacagatgccactgttctgtgtcgcagatgctgtgggaagtgccttaacacacagaggtttgcttcatgcaaccgggtgaggaacatctctaaaacattttacagtcaaggaaattcagtgttcargaggttgaatgcgttatccaagatcacacatatgtcctgacagattcggggttcaatgaagaattatgtattttaattaagaattatgtattttgattaataattatatattttaatttcacattttaaatttctgcagttttc

SEQ ID NO: 439627 - DNA, 548 bp, Homo sapiens
atgtgaacatattaattacctcccatttataaatgagaacacgcagtatctgtctttctgtgtctgactttcatctaagataatgtcctccagttccatccaaactgctccaaaatacatgtttcataagtatattatttttaaaggctgaattgtattccattgtgtatatcatcatattttcttatctttaggtggaaatcttttttattatactttaagttctggggtacatgtgcagaacttgcaggtttgttatgtaggtatacacgtgccatagtggtttgctgcactcatcaacctgtcatctacattaagtctttctctaaatgctatccctcccctagcccctcaccctctgacaggctgtggagtgtgatgttcccctccttgtgtccatgtattctcattgttcaacycccacttatgagtgagagcatgcagtgtttggttttctgttcttgtgttagcttgctgagaatgatgtttgccaatttcattcatgtccctgcaaaggacatgaactcatcattttttatggctgcata

SEQ ID NO: 439628 - DNA, 431 bp, Homo sapiens
ggctagccagttttcccagcaccatttattaaatagggaatcctttccccattgcttgtttttctcaggtttgtcaaagatcagatagttgtagatatgcrgcgttatttctgagggctctgttctgttccattgatctatatctctgttttggtaccagtaccatgctgttttggttactgtagccttgtcttctatacatttttaagtagtaccttaaaaactagacaaatccatacagggtcaaaagaactcaactgaattctctatcactgtgaaaatagacttagttcttcattacaaaagcactacaataactacaaaaattatatctcctggagtatatatttacatatccatgcaaaggggaatagataaaagatgtttatgaatgtctaaaccttaatcgtttaagtttacgtagcattatt

SEQ ID NO: 439629 - DNA, 431 bp, Homo sapiens
ggctagccagttttcccagcaccatttattaaatagggaatcctttccccattgcttgtttttctcaggtttgtcaaagatcagatagttgtagatatgcggygttatttctgagggctctgttctgttccattgatctatatctctgttttggtaccagtaccatgctgttttggttactgtagccttgtcttctatacatttttaagtagtaccttaaaaactagacaaatccatacagggtcaaaagaactcaactgaattctctatcactgtgaaaatagacttagttcttcattacaaaagcactacaataactacaaaaattatatctcctggagtatatatttacatatccatgcaaaggggaatagataaaagatgtttatgaatgtctaaaccttaatcgtttaagtttacgtagcattatt

SEQ ID NO: 439630 - DNA, 431 bp, Homo sapiens
ggctagccagttttcccagcaccatttattaaatagggaatcctttccccattgcttgtttttctcaggtttgtcaaagatcagatagttgtagatatgcggcgttatttctgagggctctgttctgttccattgatctatatctctgttttggtaccagtaccatgctgttttggttactgtagccttgtcttctatacatttttaagtagtaccttaaaaactagacaaatccatacagggtcaaaagaactcaactgaattctctatcactgtgaaaatagacttagttcttcattacaaaagcactayaataactacaaaaattatatctcctggagtatatatttacatatccatgcaaaggggaatagataaaagatgtttatgaatgtctaaaccttaatcgtttaagtttacgtagcattatt

SEQ ID NO: 439631 - DNA, 552 bp, Homo sapiens
tgaaacaaattttaccataggccaattgataaaacaatatataagttcctactgcatatttctggtcacaatattatcactgtacttctaaatgaagactaaaacacttaaaacattcaacactgaaataagtgtgaggtatacatacatttttaaaaagattaataaaaacaagtaagatgattatttacccaattattccagttcagagtctcgggtrgcaagagcctattcttactcaacatgcaatgcaggaataaaccctgcacaggatgctattccatggcagggcacaaccacattcactcacatggggacacacagtggggaaatgccaattaaccagacatgcacatcttggggatgtgagaggaagcaggagttcctggagaaaacccatgcaggcatggggagaacatgcagaccctacacagatggtagccctgtccaggaatcaatatttattctcatctacattatagcgaaacatcattgaacaaaacaactttatttgaggacctgttttacttgtacgtctttgggaaaatcttt

SEQ ID NO: 439632 - DNA, 552 bp, Homo sapiens
tgaaacaaattttaccataggccaattgataaaacaatatataagttcctactgcatatttctggtcacaatattatcactgtacttctaaatgaagactaaaacacttaaaacattcaacactgaaataagtgtgaggtatacatacatttttaaaaagattaataaaaacaagtaagatgattatttacccaattattccagttcagagtctcgggtagcaagagcctattcttactcarcatgcaatgcaggaataaaccctgcacaggatgctattccatggcagggcacaaccacattcactcacatggggacacacagtggggaaatgccaattaaccagacatgcacatcttggggatgtgagaggaagcaggagttcctggagaaaacccatgcaggcatggggagaacatgcagaccctacacagatggtagccctgtccaggaatcaatatttattctcatctacattatagcgaaacatcattgaacaaaacaactttatttgaggacctgttttacttgtacgtctttgggaaaatcttt

SEQ ID NO: 439633 - DNA, 552 bp, Homo sapiens
tgaaacaaattttaccataggccaattgataaaacaatatataagttcctactgcatatttctggtcacaatattatcactgtacttctaaatgaagactaaaacacttaaaacattcaacactgaaataagtgtgaggtatacatacatttttaaaaagattaataaaaacaagtaagatgattatttacccaattattccagttcagagtctcgggtagcaagagcctattcttactcaacatgyaatgcaggaataaaccctgcacaggatgctattccatggcagggcacaaccacattcactcacatggggacacacagtggggaaatgccaattaaccagacatgcacatcttggggatgtgagaggaagcaggagttcctggagaaaacccatgcaggcatggggagaacatgcagaccctacacagatggtagccctgtccaggaatcaatatttattctcatctacattatagcgaaacatcattgaacaaaacaactttatttgaggacctgttttacttgtacgtctttgggaaaatcttt

SEQ ID NO: 439634 - DNA, 613 bp, Homo sapiens
gcacttctctgaatgactgttgattttcttcctttctttctttttttcatgttgtctacatttttttttcaaggtgagtttctgctagactgttattactgagcaatcctttggtrgagaaggaggttcatgctgctacaggccacaatttgcctcatttgcagtcagatcaggctttttgtcagagagaggacatgcccattaggcaatatgtattcagatatttccaactgatcgctgccttttctttctgattcaaattcccattctcaatatatttacctaatgtatgcctcccttttgcctttttaagcaagactaaaaaatcaatacccttgaaaaaaattgattaatttggctaacttaaatttaaagtcttcacttctagcaaaatagttttactacatgttttttactatgagaaaatatgtaaactatgtataccaaagcaaatgtataaataatttagaaaaataaaaatatttcaatagaaaagtgggaaaatgtaaaaataggtacttactggaagaatcaagagattagttctaaagaccttaattatttatttaaactaatttaattaaaattttaaaaataattaaatttttcaata

SEQ ID NO: 439635 - DNA, 613 bp, Homo sapiens
gcacttctctgaatgactgttgattttcttcctttctttctttttttcatgttgtctacatttttttttcaaggtgagtttctgctagactgttattactgagcaatcctttggtagagaaggaggttcatgctgctacaggccacaatttgcctcatttgcagtcagatcaggctttttgtcagagagaggacatgcccattaggcaatatgtattcagatatttccaactgatcgctgccttttctttctgattcaaattcccattctcaatatatttacctaatgtatgcctcccttttgcctttttaagcaagactaaaaaatcaatacccttgaaaaaaattgattaatttggctaacttaaatttaaagtcttcacttctagcaaaatagttttactacatgttttttactatgagaaaatatgtaaactatgtataccaaagcaaatstataaataatttagaaaaataaaaatatttcaatagaaaagtgggaaaatgtaaaaataggtacttactggaagaatcaagagattagttctaaagaccttaattatttatttaaactaatttaattaaaattttaaaaataattaaatttttcaata

SEQ ID NO: 439636 - DNA, 635 bp, Homo sapiens
gttagggtctgttgccaaagaagtgaggttgcttctttaaggttccatcccctcagcctcccccttccagaagacctacgcaggaccccagtgggcttctgactgctcatcctccccataggtcaactccttacctgtacacagttatgtccacccagggcctacttggacacctgcacctgatgttcaccaggggcytaggaatccacttggggcctgggatcctacaggggcctaatgttaccctgcagattgagtagccacctggggaccaggtatcaacctggggactgtggttgacctgtgggttaatgtccacctggggactggttattcagctgaggcctgatgcgtacctggggccgaatgtccccctcagggtgaattccacccagatccacctggggcctaatgtctgccttagatctgtgtcccactggggccttgtgttcaccagggactggtatccagctgtggcctgatgacctactgcatcctgttgctcacctacggcctggtgtctacctggggcttggtgatcacctggaaactggatattaacctggggcctgggtgaccacttaaggcctgatgtgtgcctggggcctgactgtccacctggggactgggtgtcc

SEQ ID NO: 439637 - DNA, 635 bp, Homo sapiens
gttagggtctgttgccaaagaagtgaggttgcttctttaaggttccatcccctcagcctcccccttccagaagacctacgcaggaccccagtgggcttctgactgctcatcctccccataggtcaactccttacctgtacacagttatgtccacccagggcctacttggacacctgcacctgatgttcaccaggggcttaggaatccacttggggcctgggatcctacaggggcctaatgttaccctgcagattgagtagccacctggggacmaggtatcaacctggggactgtggttgacctgtgggttaatgtccacctggggactggttattcagctgaggcctgatgcgtacctggggccgaatgtccccctcagggtgaattccacccagatccacctggggcctaatgtctgccttagatctgtgtcccactggggccttgtgttcaccagggactggtatccagctgtggcctgatgacctactgcatcctgttgctcacctacggcctggtgtctacctggggcttggtgatcacctggaaactggatattaacctggggcctgggtgaccacttaaggcctgatgtgtgcctggggcctgactgtccacctggggactgggtgtcc

SEQ ID NO: 439638 - DNA, 511 bp, Homo sapiens
acatttctacaaataatttgaacctcaaagtttcataagcatctatccttcaatatttaggcctaaaaagtaatctccattatctatcaaattctaaatttgaacttattatggtttactcctactttttaattattactttggttaaagatacttcatgatattattaagttccttastaataatgtatatggttgtattacattcatttatccatcaagactaactttgagctactatgaaatataattcaaatcattcatataatatctaatgaatgattattataatacaaagcactatactaggtttcataagtgatacaaaaacaagtgcaaccgcctcagtaaccaacacatttgcagtctaatagaggaaaacaagccctgttataagaataattatagtaaaagactatataaaatacaatccattttgacacacaccttcaactctatttgctaattctaattttcactcttcagtttatttttagattaaatagttattt

SEQ ID NO: 439639 - DNA, 600 bp, Homo sapiens
gaaatagtaatcagatcatgtagttctcctgatcagatctcttcacactctagaataatatgcataccttcattttagcttttagacttttttctgatctagctctagattattgtttgatctcatttttactattcttctcattgctcattcaattcaatttcaagcataatgattttttgctctttttggaatacactagctttttgatttcattagagcctgtacacttccctcttcctgaaatgttcttccccaaatttatgtatagcttattctctctttgttcagggctcagtgtaattgtagattgttctctaccttgaatatgtcttacccctcatttgactggttttccttcataccaattatttgtattctaaaatattttatatttttcygttgacttgttcactgagttccttcctctaaaatgtagcttcatgagggcagatattttgttaaaattgtatgctactgtatcactagaactgagaacaatgcctgaacagagtagctactcatgactcattggctaaaacaagttaatgaatgagaacaggcaggtagaaagccaggaaggaaaggaggctattatat

SEQ ID NO: 439640 - DNA, 532 bp, Homo sapiens
ccctgcttcacacgcacacaaacacacacagacagacacacacacacacacacacattttcagatctgatgtgtatggaattcctgccagctttacctttaaagtgtagtaattccaaatgttgttgaaaattcaccttcccacccccaccacttggtaactatagcgctttccacacaaggccaagtgcacagatttcttgggraaataatgagaactattatacactcttatttcaaggacccttaaaattataggattgccatatttgatactaatttaagcttctgtcattgcccctttttcaatccagtctccacacagctaccacagtgtgcaagtagaagtctcagccatatcaccaaactcctgctttaatgtccctactccattgcttcttttctccttcagaagagtttaagcttaatgaagctgggcaactttacatatttttccatgagctggagatcacttggtgtaaggtaaaaatgaccagtaaatattttcaaataacagaatctacgaataatag

SEQ ID NO: 439641 - DNA, 526 bp, Homo sapiens
caaaaaccttactggtgccagtgaactttctcaaagagaaatacataccgtttttctctctgtctcccttttttataaaacctctaactttctctttatgttttggacatactaaagacacccattctgcatgtatgtgtgaaattgtaatacttgtatctcaaataaaacattttaatttcagatgtttgtctctatatttatttgactttgacaatctgatattatttagcattatttccagtctcccaaataatgtcaaaattttgttatgttagataggaatatcttgttattcaacttgaaggtaaactgcttgatcaatgcatgtaattccttgacagattgtcagcacctctaagacaacatgtagatattgctcattattaacacatttcatcttttcatgataaattacaaaaatttattttcatttttaaaatgcaaaccattatgccttgtattatggcattctkgcgttactataaaggaatacctaagcactacataatttatactgaaaaaa

SEQ ID NO: 439642 - DNA, 394 bp, Homo sapiens
gataggaatatcttgttattcaacttgaaggtaaactgcttgatcaatgcatgtaattccttgacagattgtcagcacctctaagacaacatgtagatattgctcattattaacacatttcatcttttcatgataaattacaaaaatttattttcatttttaaaatgcaaaccattatgccttgtattatggcattcttgcrttactataaaggaatacctaagcactacataatttatactgaaaaaaaagattgacttggctcacagttctgcaggctgtacaggaagctttgcattggcagttgcttgacttcaagaagggtcctcagggagcttttacacatggcagaaggtgaagcaaaagaaggtatgtcacatggccagagcagcag

SEQ ID NO: 439643 - DNA, 394 bp, Homo sapiens
gataggaatatcttgttattcaacttgaaggtaaactgcttgatcaatgcatgtaattccttgacagattgtcagcacctctaagacaacatgtagatattgctcattattaacacatttcatcttttcatgataaattacaaaaatttattttcatttttaaaatgcaaaccattatgccttgtattatggcattcttgcgttactataaaggaatacctaagcactacataatttatactgaaaaaaaagattgacttggctcacagttctgcaggctgtacaggaagctttgcattggcagttgcttgrcttcaagaagggtcctcagggagcttttacacatggcagaaggtgaagcaaaagaaggtatgtcacatggccagagcagcag

SEQ ID NO: 439644 - DNA, 555 bp, Homo sapiens
gcgatctttaatatctttcatagcacctttaattctaacagagaaaaactggaaacatccaagatgttggagaggtgaatggttgaataaactgtgktatatctatatgattaaatactacccagaaattaaaaagtatatacttttgacacatgcaataacttgcattgatctgaagggcattatgcttagtgaaaaaaagcaaatatcaaaaggacacatggcatattatttcatgtatataactttaataaaataacatacatatagaaaacagattagtgatttccagaggttagtgatggtatgggaatgtgagatgaatatggctataaaatgtgaggaagacacttttagtgatggaagagttctgtaacttaattgtaataatggtcacattaatcaacacgtgataaaataggcatagacctatgaattcacattgtataaatgtcaatgcctggtcttgatattgtactaaattatacgagatgtaactcttgaaataaactgtgtagaatagtacacgagacctctctgtatttgaaactccct

SEQ ID NO: 439645 - DNA, 390 bp, Homo sapiens
gttggagaggtgaatggttgaataaactgtggtatatctatatgattaaatactacccagaaatwaaaaagtatatacttttgacacatgcaataacttgcattgatctgaagggcattatgcttagtgaaaaaaagcaaatatcaaaaggacacatggcatattatttcatgtatataactttaataaaataacatacatatagaaaacagattagtgatttccagaggttagtgatggtatgggaatgtgagatgaatatggctataaaatgtgaggaagacacttttagtgatggaagagttctgtaacttaattgtaataatggtcacattaatcaacacgtgataaaataggcatagacctatgaattcacattgtataaatgtc

SEQ ID NO: 439646 - DNA, 555 bp, Homo sapiens
gcgatctttaatatctttcatagcacctttaattctaacagagaaaaactggaaacatccaagatgttggagaggtgaatggttgaataaactgtggtatatctatatgattaaatactacccagaaattaaaaagtatatacttttgacacatgcaataacttgcatwgatctgaagggcattatgcttagtgaaaaaaagcaaatatcaaaaggacacatggcatattatttcatgtatataactttaataaaataacatacatatagaaaacagattagtgatttccagaggttagtgatggtatgggaatgtgagatgaatatggctataaaatgtgaggaagacacttttagtgatggaagagttctgtaacttaattgtaataatggtcacattaatcaacacgtgataaaataggcatagacctatgaattcacattgtataaatgtcaatgcctggtcttgatattgtactaaattatacgagatgtaactcttgaaataaactgtgtagaatagtacacgagacctctctgtatttgaaactccct

SEQ ID NO: 439647 - DNA, 390 bp, Homo sapiens
gttggagaggtgaatggttgaataaactgtggtatatctatatgattaaatactacccagaaattaaaaagtatatacttttgacacatgcaataacttgcattgatctgaagggcattatgcttagtgaaaaaaagcaaatatcaaaaggacacatggcatattatttcatgtatataactttaataaaataacatacatatagaaaacagattagtgatttccagaggttagtgatggtatgggartgtgagatgaatatggctataaaatgtgaggaagacacttttagtgatggaagagttctgtaacttaattgtaataatggtcacattaatcaacacgtgataaaataggcatagacctatgaattcacattgtataaatgtc

SEQ ID NO: 439648 - DNA, 390 bp, Homo sapiens
gttggagaggtgaatggttgaataaactgtggtatatctatatgattaaatactacccagaaattaaaaagtatatacttttgacacatgcaataacttgcattgatctgaagggcattatgcttagtgaaaaaaagcaaatatcaaaaggacacatggcatattatttcatgtatataactttaataaaataacatacatatagaaaacagattagtgatttccagaggttagtgatggtatgggaatgtgagatgaatatggctataaaatgtgaggaagacacttttagtgatggaagagttctgtaacttaattgtaataatggtcacattaatcaacacgtgataaaatwggcatagacctatgaattcacattgtataaatgtc

SEQ ID NO: 439649 - DNA, 592 bp, Homo sapiens
gaagaaatttcaatacaatgtgatgaaaattttaaattatttmtctcttgcaaatttccattgcttgtttgaacattcaggagaatagtactgctttcccattgaatgtataaataaatgtaagaatgaaggttggccctccctccaaattcattaaacattaaattttttaagtaaaagataagagggctgtatgaaaattaaaattcatgattacttccaatatagaaaataattgaaatagataaaaacacaaccaaatagaaatggatattgctaaaaattaccttcttaattaaattagtaaaaaaagtgaaattattgttctatccatattggtgacattgcttcttaaatatcaaattaaaaatattctactggtgagttcaggaaaaaattgacataaaggaatagtatcatacacaaagaaatataactcactgttttagcctagcactagtgtttacagaccaagttacagaatattctgcaatatgaaacaatcctaaagtgtttttaaccttaaatcaaaattcaaattagaattagaaatgaaatgatgttctcatttcagcaatgaatacagaagtga

SEQ ID NO: 439650 - DNA, 592 bp, Homo sapiens
gaagaaatttcaatacaatgtgatgaaaattttaaattatttctctcttgcaaatttccattgcttgtttgaacattcaggagaatagtactgctttcccattgaatgtataaataaatgtaagaatgaaggttggccctccctccaaattcattaaacattaaattttttaagtaaaagataagagggctgtatgaaaattaaaattcatrattacttccaatatagaaaataattgaaatagataaaaacacaaccaaatagaaatggatattgctaaaaattaccttcttaattaaattagtaaaaaaagtgaaattattgttctatccatattggtgacattgcttcttaaatatcaaattaaaaatattctactggtgagttcaggaaaaaattgacataaaggaatagtatcatacacaaagaaatataactcactgttttagcctagcactagtgtttacagaccaagttacagaatattctgcaatatgaaacaatcctaaagtgtttttaaccttaaatcaaaattcaaattagaattagaaatgaaatgatgttctcatttcagcaatgaatacagaagtga

SEQ ID NO: 439651 - DNA, 592 bp, Homo sapiens
gaagaaatttcaatacaatgtgatgaaaattttaaattatttctctcttgcaaatttccattgcttgtttgaacattcaggagaatagtactgctttcccattgaatgtataaataaatgtaagaatgaaggttggccctccctccaaattcattaaacattaaattttttaagtaaaagataagagggctgtatgaaaattaaaattcatgattacttccaatatagaaaataattgaaatagataaaaacacaaccaaatagaaatggatattgctaaaaatyaccttcttaattaaattagtaaaaaaagtgaaattattgttctatccatattggtgacattgcttcttaaatatcaaattaaaaatattctactggtgagttcaggaaaaaattgacataaaggaatagtatcatacacaaagaaatataactcactgttttagcctagcactagtgtttacagaccaagttacagaatattctgcaatatgaaacaatcctaaagtgtttttaaccttaaatcaaaattcaaattagaattagaaatgaaatgatgttctcatttcagcaatgaatacagaagtga

SEQ ID NO: 439652 - DNA, 592 bp, Homo sapiens
gaagaaatttcaatacaatgtgatgaaaattttaaattatttctctcttgcaaatttccattgcttgtttgaacattcaggagaatagtactgctttcccattgaatgtataaataaatgtaagaatgaaggttggccctccctccaaattcattaaacattaaattttttaagtaaaagataagagggctgtatgaaaattaaaattcatgattacttccaatatagaaaataattgaaatagataaaaacacaaccaaatagaaatggatattgctaaaaattaccttcttaattaaattagtaamaaaagtgaaattattgttctatccatattggtgacattgcttcttaaatatcaaattaaaaatattctactggtgagttcaggaaaaaattgacataaaggaatagtatcatacacaaagaaatataactcactgttttagcctagcactagtgtttacagaccaagttacagaatattctgcaatatgaaacaatcctaaagtgtttttaaccttaaatcaaaattcaaattagaattagaaatgaaatgatgttctcatttcagcaatgaatacagaagtga

SEQ ID NO: 439653 - DNA, 573 bp, Homo sapiens
ttcttaattaaattagtaaaaaaagtgaaattattgttctatccatattggtgacattgcttcttaaatatcaaattaaaaatattctactggtgagttcaggaaaaaattgacataaaggaatagtatcatacacaaagaaatataactcactgttttagcctagcactagtgtttacagaccaagttacagaatattctgcaatatgaaacaatcctaaagtgtttttaaccttaaatcaaaattcaaattagaattagaaatgaaatgatgttctcatttcagcaatgaatacagaagtgaaatcacttgatttttctgaagactgtatttttcagtgttcatctagatttaacactttaaagaataccttttattccttaaataacattcagtttgtgaaagtragcacacctttttcagctccgcttattctgcggaaggatccttccatatcaaggattaacacaatatgcatcgtgggttcacaaagttcagtttgcagctatccttagcaaatcatggaaccatctagactgattgatgtggagattgaaagtaattgatcctgc

SEQ ID NO: 439654 - DNA, 573 bp, Homo sapiens
ttcttaattaaattagtaaaaaaagtgaaattattgttctatccatattggtgacattgcttcttaaatatcaaattaaaaatattctactggtgagttcaggaaaaaattgacataaaggaatagtatcatacacaaagaaatataactcactgttttagcctagcactagtgtttacagaccaagttacagaatattctgcaatatgaaacaatcctaaagtgtttttaaccttaaatcaaaattcaaattagaattagaaatgaaatgatgttctcatttcagcaatgaatacagaagtgaaatcacttgatttttctgaagactgtatttttcagtgttcatctagatttaacactttaaagaataccttttattccttaaataacattcagtttgtgaaagtaagcacacctttttcagctccgcttattctgyggaaggatccttccatatcaaggattaacacaatatgcatcgtgggttcacaaagttcagtttgcagctatccttagcaaatcatggaaccatctagactgattgatgtggagattgaaagtaattgatcctgc

SEQ ID NO: 439655 - DNA, 459 bp, Homo sapiens
atatgcaaggatcaccattaataaaagtagattattgtaaagtgaattagcaataattttacttatgaataaaaacttatactatttcaggtcattttcttattgtttcttgaaaaaagaagtcctttataagtccagttaaatattacctaatttttgcatmaaatttcatggtaaacaaggcttattttcttactttactgatgtctaaaagctaaatttcactggtgatatatcatttgtttaagactaggtaactgataacctaagctgagacccaaaatttgtatttttctttattacaagcacaatattttccatcatggtatattacatcttgctaaagaagctgtgcttctttagccagacaattgaaaagcataaacattggtttactagaaagatttttaatattccatattatttacaactgttgccttatttccatgtataaaatga

SEQ ID NO: 439656 - DNA, 558 bp, Homo sapiens
tatatttgtgacaaccatgacagttcagagaaatgcagtgaggtcatttactctgaaactgaaagacactaatctctgctctgagacccacaaaatcagattatctgttttacctgcgtgatttctattcctctcattttgttgttctttttataaaacatctttgttaaataataaagttattactctaaggtagtgtccaagtctctttgataataatgaaatgtccatggccaaatcccattgctttgttttgacactgtgcyccaagaaaattactttgatataccctctcatattagaataaatacattatacatacctattgcctacatcaagttttgaattgtaccactttcaggtttaacctggccatagagcagattttcttaatggttggtgaacacagaataatagtttaatcgttcagataaactattttgcagaaacatttaaaatcagaaattgcagaactactatctgaacttaaccatattttgttttatttagtactcatgctgacaagttgatttaccacctcgttttcccaacaagtgt

SEQ ID NO: 439657 - DNA, 565 bp, Homo sapiens
atatctatagtcagtcatattgaagaaaaacctcagaaatatacttcttagtaactcaacacccaagagcaaatcataatggaaattataaaatatttttaattaaaaaatgtatactacattataaaatgtgtcattttagaggaaartgtagaaccttaaattcttattttatgaggacaacaaattaatatttaaaatgttctgaatttattggaagaagttagaaatatcaacagaaataaaaggaaataaaaaatacatgcatagtgattaagaatacagggaaagaaaagtcaagaaatatggccaaaagtttgttagttgttgtaggagccatacaataacaaaactctggagaaatggcttgataaaattaagagaagaaacaagtatgcaatctcaggaatcaaaataggaaataattatacatcagatgtcaagaattttttttgttttttggaaaggatcaggtggtaaatattttaggtttttgggctatatggtttgttgcaactaatcaattctattgttgtggcataaattgacagtatgtcaatgaatg

SEQ ID NO: 439658 - DNA, 565 bp, Homo sapiens
atatctatagtcagtcatattgaagaaaaacctcagaaatatacttcttagtaactcaacacccaagagcaaatcataatggaaattataaaatatttttaattaaaaaatgtatactacattataaaatgtgtcattttagaggaaaatgtagaaccttaaattcttattttatgaggacaacaaattaatatttaaaatgttytgaatttattggaagaagttagaaatatcaacagaaataaaaggaaataaaaaatacatgcatagtgattaagaatacagggaaagaaaagtcaagaaatatggccaaaagtttgttagttgttgtaggagccatacaataacaaaactctggagaaatggcttgataaaattaagagaagaaacaagtatgcaatctcaggaatcaaaataggaaataattatacatcagatgtcaagaattttttttgttttttggaaaggatcaggtggtaaatattttaggtttttgggctatatggtttgttgcaactaatcaattctattgttgtggcataaattgacagtatgtcaatgaatg

SEQ ID NO: 439659 - DNA, 568 bp, Homo sapiens
atctaagtacttgagccaataatccaagtgctttggggggtcgaggtgagaggatagcatgtggccagaagttcaagaccagcctgggcaacatagcgagactccatctccacaaaaaaaatgttaaaaattagccagacatggtggtgcatgtcttagttctaactactcargaggctgagaaaggaagattactttagcccaggagctcaaaggtgcagtgagctgtgactgcactccagcccgtctaaaaaaaaaaaaaaaaaaaaaaaaacggaaagaaaagaaaaaaagaaataaaaaggtatacacattttttttctgaagtggatggaaatatgtcatgtcagaggtaaattgtgacttgagtaagttttatgttgagcaactctttttgtttacattttctatgttgcccaaataaagtcttattttcataaatcactgctttacgtaacaacttttcctgcagccctgggtatggtggcacacagttgtagtcccaggtacactggatgctgaggcaaaaggatcatttgaacccagaacttcaaggtcaacctgggca

SEQ ID NO: 439660 - DNA, 560 bp, Homo sapiens
ttttggtacaagttttttatgtacatatactttcatttccctacaaattgattggcagtcatatgataggtgcatacgtcaaaatattttaaaaactgacaaggctttttccagagtcattgtactaatttccwttaccattagcagtgcatgtatgttggttgtcctctatagttttgccaacacttggcatggccagcctttttaactttagccattcttttttctttctttctttctttctttttttttttttttgagatgaagtttcactcttgttgcccaggctggagtgcaatgtgcaatggcacaatctcggctcactgcaatctacacctcctgggttcaaacagttctcctgcctcagcctcccaagtagctgggatataggcgcacatcaccatgcccagctaatttttgtatttttagtagagatggggtttccccatgttggtcaggctggtctcgatctcttgacctcaggtgatccacccaccttgacctcccagagtgctgtgattacaggtgtgagccactgtgcctggcctctttttttcttt

SEQ ID NO: 439661 - DNA, 559 bp, Homo sapiens
ttctattatcttccaatgacatttctgtctatctttatgccaatatcacactattttcattactgtagccttataagctttggyattagattgtgctaatccttcaaaaatattcttatttttaagaattattttggctattttagactctttgcatttctactgaagttttaaaattagtgtgtaaattcctataaacaatgcctaataatattttaattgggattgtattgaatctatatttagggataatcacattttaccatgtgaattttctaacccatattcatattacatctttccatttatttaagtcttctttaactttctgcagtgttttgagttttagtgtaccagactcacatcatttgatagattaattcctaattcttctacatttttcatgatattattaatagtacttttattttaattttttattgttcattgctggtatatggaaatattagtttaatatgttgctttttttcttttttatgttgctaactcacttattatagccagcagtgtttttgtagatttcagtggactttctaca

SEQ ID NO: 439662 - DNA, 559 bp, Homo sapiens
ttctattatcttccaatgacatttctgtctatctttatgccaatatcacactattttcattactgtagccttataagctttggcattagattgtgctaatccttcaaaaatattcttatttttaagrattattttggctattttagactctttgcatttctactgaagttttaaaattagtgtgtaaattcctataaacaatgcctaataatattttaattgggattgtattgaatctatatttagggataatcacattttaccatgtgaattttctaacccatattcatattacatctttccatttatttaagtcttctttaactttctgcagtgttttgagttttagtgtaccagactcacatcatttgatagattaattcctaattcttctacatttttcatgatattattaatagtacttttattttaattttttattgttcattgctggtatatggaaatattagtttaatatgttgctttttttcttttttatgttgctaactcacttattatagccagcagtgtttttgtagatttcagtggactttctaca

SEQ ID NO: 439663 - DNA, 616 bp, Homo sapiens
tgttaattttaatggttgcttttgagtttgtagtatacatgtttaactcatcacattctaccttcaaattataatatactactttacatacagtatcatgaataacaacattttcattattttatcctaactgttgttctgttattgtcatgtgatttatttttatatatgttktaaactcattataaattgttattattcttgtttaaattagaggttaataatgttgttttcttctctctctctcttttttttttttttttttttttttgagacagagtctagctttgtaccaggctgcagtgcagtagtgccatctcagctcactgcaacctctgcctcccgggttcaagagattgtcctgcctcagcctcccgagtagctgggattacaggcacatgccaccacacccagctaatgtttgtatttttagtagacacagggtttcatcatgttgcccaggatggtctcaatttcctgacctcgtgatccgcacatctcggcctcccaaaatgctgggattacaggcatgagccaccagaaccggacatgcttcccttaaaagctaaatatttaggcttgtgtgccattaggctctgttacactacttaattct

SEQ ID NO: 439664 - DNA, 616 bp, Homo sapiens
tgttaattttaatggttgcttttgagtttgtagtatacatgtttaactcatcacattctaccttcaaattataatatactactttacatacagtatcatgaataacaacattttcattattttatcctaactgttgttctgttattgtcatgtgatttatttttatatatgttttaarctcattataaattgttattattcttgtttaaattagaggttaataatgttgttttcttctctctctctcttttttttttttttttttttttttgagacagagtctagctttgtaccaggctgcagtgcagtagtgccatctcagctcactgcaacctctgcctcccgggttcaagagattgtcctgcctcagcctcccgagtagctgggattacaggcacatgccaccacacccagctaatgtttgtatttttagtagacacagggtttcatcatgttgcccaggatggtctcaatttcctgacctcgtgatccgcacatctcggcctcccaaaatgctgggattacaggcatgagccaccagaaccggacatgcttcccttaaaagctaaatatttaggcttgtgtgccattaggctctgttacactacttaattct

SEQ ID NO: 439665 - DNA, 616 bp, Homo sapiens
tgttaattttaatggttgcttttgagtttgtagtatacatgtttaactcatcacattctaccttcaaattataatatactactttacatacagtatcatgaataacaacattttcattattttatcctaactgttgttctgttattgtcatgtgatttatttttatatatgttttaaactcattrtaaattgttattattcttgtttaaattagaggttaataatgttgttttcttctctctctctcttttttttttttttttttttttttgagacagagtctagctttgtaccaggctgcagtgcagtagtgccatctcagctcactgcaacctctgcctcccgggttcaagagattgtcctgcctcagcctcccgagtagctgggattacaggcacatgccaccacacccagctaatgtttgtatttttagtagacacagggtttcatcatgttgcccaggatggtctcaatttcctgacctcgtgatccgcacatctcggcctcccaaaatgctgggattacaggcatgagccaccagaaccggacatgcttcccttaaaagctaaatatttaggcttgtgtgccattaggctctgttacactacttaattct

SEQ ID NO: 439666 - DNA, 616 bp, Homo sapiens
tgttaattttaatggttgcttttgagtttgtagtatacatgtttaactcatcacattctaccttcaaattataatatactactttacatacagtatcatgaataacaacattttcattattttatcctaactgttgttctgttattgtcatgtgatttatttttatatatgttttaaactcattataaattgttattattcttgtttaaattagaggttaataatgttgttttcttctctctctctcttttttttttttttttttttttttgagacagagtctagctttgtaccaggctgcagtgcagtagtgccatctcagctcactgcaacctctgcctcccgggttcaagagattgtcctgcctcagcctcccgagtagctgggattacagscacatgccaccacacccagctaatgtttgtatttttagtagacacagggtttcatcatgttgcccaggatggtctcaatttcctgacctcgtgatccgcacatctcggcctcccaaaatgctgggattacaggcatgagccaccagaaccggacatgcttcccttaaaagctaaatatttaggcttgtgtgccattaggctctgttacactacttaattct

SEQ ID NO: 439667 - DNA, 595 bp, Homo sapiens
caaagatatcagagaggatgaaacaaatgaaaaaacattctatgctyatggataggaagaatcaatatcattaaaatggccatattttccttattttcaagtatgctattgtgctctatgactgccagatgtaattctaaaaatctgtttgttaattttattattttatttttggaatttcttcagacattgatggtcttgtcccagttattaacaacatctacatgtttaagaataaattttcttttctatctacttcttattccattgaaaattacctttctatcctcctactctggaagtctttatgattctgtcctaatcgttagtatcccattgcttcttcaagagatgtctatcagtagaatttctccattaatataagttcatacttctatgaaaactttaaatctcaagtctacagtatttctagttctaaaaaatatttaaattagttctttaattatttccatctttatgtttactttccttttttttctagcattttaaacaactttacgtcaacaattctttatcttcactttacctccctttacctttcttcattttatcctagccattggattcagagaaa

SEQ ID NO: 439668 - DNA, 579 bp, Homo sapiens
cagctaactagtgaggtgaaagatctctgtaagaactaaaaacaccaaagatatcagagaggatgaaacaaatgaaaaaacattctatgctcatggataggaagaatcaatatcattaaaatggccatattttccttattttcaagtatgctattgygctctatgactgccagatgtaattctaaaaatctgtttgttaattttattattttatttttggaatttcttcagacattgatggtcttgtcccagttattaacaacatctacatgtttaagaataaattttcttttctatctacttcttattccattgaaaattacctttctatcctcctactctggaagtctttatgattctgtcctaatcgttagtatcccattgcttcttcaagagatgtctatcagtagaatttctccattaatataagttcatacttctatgaaaactttaaatctcaagtctacagtatttctagttctaaaaaatatttaaattagttctttaattatttccatctttatgtttactttccttttttttctagcattttaaacaactttacgtcaacaattcttt

SEQ ID NO: 439669 - DNA, 403 bp, Homo sapiens
gaacttatgtatgtatattgtgtatgaagaaaatcctaatacatttatttaaaaagctgtgaataataagaatcaaattcaataatggtgcagaatgtgtagaatgcaaggtcaatacataaaatacaatatgtaaaattaatggaatttctaaatactagaaataaacaattgagaatacatttaaaagtaaaattttartggtataaaaatagttaagaataatttaagtgaaacctttaaaaatctttcacactaaaactttttaaaatttcttgtagagaaacattacagaagacctaaataaatgtaaagaactaccatattcatagatttgaagatgcaacattgtttgatgtgaattctctggaagttaatctttagaatcaatgcagtaggggct

SEQ ID NO: 439670 - DNA, 403 bp, Homo sapiens
gaacttatgtatgtatattgtgtatgaagaaaatcctaatacatttatttaaaaagctgtgaataataagaatcaaattcaataatggtgcagaatgtgtagaatgcaaggtcaatacataaaatacaatatgtaaaattaatggaatttctaaatactagaaataaacaattgagaatacatttaaaagtaaaattttaatggtataaaaatagttaagaataatttaagtgaaacmtttaaaaatctttcacactaaaactttttaaaatttcttgtagagaaacattacagaagacctaaataaatgtaaagaactaccatattcatagatttgaagatgcaacattgtttgatgtgaattctctggaagttaatctttagaatcaatgcagtaggggct

SEQ ID NO: 439671 - DNA, 403 bp, Homo sapiens
gaacttatgtatgtatattgtgtatgaagaaaatcctaatacatttatttaaaaagctgtgaataataagaatcaaattcaataatggtgcagaatgtgtagaatgcaaggtcaatacataaaatacaatatgtaaaattaatggaatttctaaatactagaaataaacaattgagaatacatttaaaagtaaaattttaatggtataaaaatagttaagaataatttaagtgaaacctttaaaaatctttcacactaaaactttttaaaatttcttgtagaraaacattacagaagacctaaataaatgtaaagaactaccatattcatagatttgaagatgcaacattgtttgatgtgaattctctggaagttaatctttagaatcaatgcagtaggggct

SEQ ID NO: 439672 - DNA, 403 bp, Homo sapiens
gaacttatgtatgtatattgtgtatgaagaaaatcctaatacatttatttaaaaagctgtgaataataagaatcaaattcaataatggtgcagaatgtgtagaatgcaaggtcaatacataaaatacaatatgtaaaattaatggaatttctaaatactagaaataaacaattgagaatacatttaaaagtaaaattttaatggtataaaaatagttaagaataatttaagtgaaacctttaaaaatctttcacactaaaactttttaaaatttcttgtagagaaacattacagaagacctaaataaatgtaaagaactaccatrttcatagatttgaagatgcaacattgtttgatgtgaattctctggaagttaatctttagaatcaatgcagtaggggct

SEQ ID NO: 439673 - DNA, 546 bp, Homo sapiens
gatagtagaatttctatctcattattgtcatgcttaaaccataccatttatgtaagtgcccagtactgtgtctggtgaacaataatgcttaaacactgagttccccacttttttrtggctgttggttcacaggtggtttttaagttcccaagggccagtaaagttaaaaacaggcagtcaaaataaacagcaatgtctcagagcatcatatgaacaagaaaaggaagggtgttctccatccctgaaaatggtctcagtcctcttttaatgtttagctctcatgtgagtcgtcgcaaaataacctcaagaatttgctacatcaccaacagagaattaactctcattgagtttttagctcagtagattctgggtcctaaaattatggactcacctgctttttaaatttttcccatttagaaatattcaatttaaatcttccttcagtaagtaattgttaactattaacaatcctaacattataataaagtcagaagtaacatttattacttttgttttccactcatactgcttgcagtccataagcat

SEQ ID NO: 439674 - DNA, 546 bp, Homo sapiens
gatagtagaatttctatctcattattgtcatgcttaaaccataccatttatgtaagtgcccagtactgtgtctggtgaacaataatgcttaaacactgagttccccacttttttatggctgttggttcacaggtggtttttaagttcccaagggccagtaaagttaaaaacaggcagtcaaaataaacagcaatgtctcagagcatcatatgaacaagaaaaggaagggtgttctccatccctgaaaatggtctcagtcctcttttaatgtttagctctcatgtgagtcgtcgcaaaataacctcaagaatttgctacatcaccaacagagaattaactctcattgagtttttagctcagtagattctgggtcctaaaattatggactcacctgcttttyaaatttttcccatttagaaatattcaatttaaatcttccttcagtaagtaattgttaactattaacaatcctaacattataataaagtcagaagtaacatttattacttttgttttccactcatactgcttgcagtccataagcat

SEQ ID NO: 439675 - DNA, 568 bp, Homo sapiens
atctaagtacttgagccaataatccaagtgctttggggggtcgaggtgagaggatagcatgtggccagaagttcaagaccagcctgggcaacatagcgagactccatctccacaaaaaaaatgttaaaaattagccagacatggtggtgcatgtcttagttctaactactcaagaggctgagaaaggaagattactttagcccaggagctcaaaggtgcagtgagctgtgactgcactccagcccgtctaaaaaaaaaaaaaaaaaaaaaaaaacggaaagaaaagaaaaaaagaaataaaaaggtatacacattttttttctgargtggatggaaatatgtcatgtcagaggtaaattgtgacttgagtaagttttatgttgagcaactctttttgtttacattttctatgttgcccaaataaagtcttattttcataaatcactgctttacgtaacaacttttcctgcagccctgggtatggtggcacacagttgtagtcccaggtacactggatgctgaggcaaaaggatcatttgaacccagaacttcaaggtcaacctgggca

SEQ ID NO: 439676 - DNA, 568 bp, Homo sapiens
atctaagtacttgagccaataatccaagtgctttggggggtcgaggtgagaggatagcatgtggccagaagttcaagaccagcctgggcaacatagcgagactccatctccacaaaaaaaatgttaaaaattagccagacatggtggtgcatgtcttagttctaactactcaagaggctgagaaaggaagattactttagcccaggagctcaaaggtgcagtgagctgtgactgcactccagcccgtctaaaaaaaaaaaaaaaaaaaaaaaaacggaaagaaaagaaaaaaagaaataaaaaggtatacacattttttttctgaagtggatggaaatatgtcatgtcagaggtaaattgtgacttgagtaagttttatgttgagcaactctttttgtttacattttctatgttgcccaaataaagtcttattttcataaatcactgctttacrtaacaacttttcctgcagccctgggtatggtggcacacagttgtagtcccaggtacactggatgctgaggcaaaaggatcatttgaacccagaacttcaaggtcaacctgggca

SEQ ID NO: 439677 - DNA, 536 bp, Homo sapiens
tctaaaattcaggaaagtaaccctatccttacctctgaggataaagcttgttaastataggtaaaccatgataatttaaattcacctgtttgtgactgactttttttaatgactgcttttagtcaagaaaatgtgagggtaggtctgccaagagctactgaaaagagttacattttctaaaaaaaaaaaaatcctcgtcttttctttttgagaataatttgtggtgtttctgaaatcattgtctgcccataaagagagattacttaaacaaaaagtctgtataaaatatgactacaaagaaagatgagaaaaaaatcatattcttgattaatttattgatctattaaattaatagtcttggaagtagatccctctttggacttccagttagagacagggccttactctatggcccaggctggagtgtagtagtgccaccatagctcattgtgtagctcaccgcaacctcaaactcctggactcaagcaaacctcctgcctcagcctcccaagtggctggaatacagacaggtgcca

SEQ ID NO: 439678 - DNA, 536 bp, Homo sapiens
tctaaaattcaggaaagtaaccctatccttacctctgaggataaagcttgttaactataggtaaaccatgataatttaaattcacctgtttgtgactgactttttttaatgactgyttttagtcaagaaaatgtgagggtaggtctgccaagagctactgaaaagagttacattttctaaaaaaaaaaaaatcctcgtcttttctttttgagaataatttgtggtgtttctgaaatcattgtctgcccataaagagagattacttaaacaaaaagtctgtataaaatatgactacaaagaaagatgagaaaaaaatcatattcttgattaatttattgatctattaaattaatagtcttggaagtagatccctctttggacttccagttagagacagggccttactctatggcccaggctggagtgtagtagtgccaccatagctcattgtgtagctcaccgcaacctcaaactcctggactcaagcaaacctcctgcctcagcctcccaagtggctggaatacagacaggtgcca

SEQ ID NO: 439679 - DNA, 617 bp, Homo sapiens
ataatgaaataaggagaattttaaaagccaaatattttggatcagagtaagaagttagtggtaaaagataaaggttatccaacaacctttygcaaatgaagccaaaaaagtaggtttgcgcaacactgaataactaaaattacaactcttttatatttcattaaaaaacatgccctttttcaaaaagtcagatcggtttaatcacaccataaaattatttacccaaagttaaggaaaaatagcatgctttcatataagtagaaaatttaaatacacaattgatatttaacgttctctaagcaatgtaaagattgcttttaagccatctaacagagttgtatttattattagggatcaaaaagtgtgtaaattagcacaatatattttatataaaatgaatctgttttctcttataagagtatacaattataattctgaattttgaatttattcttaaacaaataaaaacaactgctatatctgaattcttgttttatgtcactctatctatctatatttttttactatctatattttttttactatctatatatttttactatctatattttaggcatttttactatctatattttaggcattttataggttaagta

SEQ ID NO: 439680 - DNA, 617 bp, Homo sapiens
ataatgaaataaggagaattttaaaagccaaatattttggatcagagtaagaagttagtggtaaaagataaaggttatccaacaacctttcgcaaatgaagccaaaaaagtaggtttgcgcaacactgaataactaaaattacaactcttttatatttcattaaaaaacatgccctttttcaaaaagtcagatcggtttaatcacaccataaaattatttacccaaagttaaggaaaaatagcatgctttcatataagtagaaaatttaaatacacaattgatatttaacgttctctaagcaatgtaaagattgcttttaagccatctaacagagttgtatttattattagggatcaaaaagtgtgtaaattagcacaatatattttatataaaatgaatctgttttctcttataagagtatacaattataattctgaattttgaatttattcttaaacaaataaaaacaactgctatatctgaattcttgttttatgtcactctatctatctatatttttttactatctatattttttttactatctatatwtttttactatctatattttaggcatttttactatctatattttaggcattttataggttaagta

SEQ ID NO: 439681 - DNA, 559 bp, Homo sapiens
tagttgaacttaaaatataattaatagttactcagcaaaaatagaaagatgttagctgactgtgtcaaaagaaatattttaacactgatttcatttttactaaatgactgaatttttctttatgttttatgcwtaagcttctctgctttctttctattttttgtggtttaaataaagaaccatgattatctgtataactgattgctcaaagtaattaatcatttttcttttgaaattaccagggtaaattaagaatcttataattacagagttttctcttgcctagaggaaacatactgagaaactgtgttaggaaattattatttcaaaacccagtctaagttcttagccactggacatttaaaaaatacatattacatatactttttctaacatgattgagaatatagtttgtttcagatttccacatttcttaaatgaaaacaataaagaattcaaaaggcaaaaggtactgtaaaaaaagttatttgatcacatgtaaatgaaaattctaccttcttattgaattttactaattagaggggtaattattctcaca

SEQ ID NO: 439682 - DNA, 559 bp, Homo sapiens
tagttgaacttaaaatataattaatagttactcagcaaaaatagaaagatgttagctgactgtgtcaaaagaaatattttaacactgatttcatttttactaaatgactgaatttttctttatgttttatgcttaagcttctctgctttctttctattttttgtggtttaaataaagaaccatgattatctgtataactgattgctcaaagtaattaatcatttttcttwtgaaattaccagggtaaattaagaatcttataattacagagttttctcttgcctagaggaaacatactgagaaactgtgttaggaaattattatttcaaaacccagtctaagttcttagccactggacatttaaaaaatacatattacatatactttttctaacatgattgagaatatagtttgtttcagatttccacatttcttaaatgaaaacaataaagaattcaaaaggcaaaaggtactgtaaaaaaagttatttgatcacatgtaaatgaaaattctaccttcttattgaattttactaattagaggggtaattattctcaca

SEQ ID NO: 439683 - DNA, 559 bp, Homo sapiens
tagttgaacttaaaatataattaatagttactcagcaaaaatagaaagatgttagctgactgtgtcaaaagaaatattttaacactgatttcatttttactaaatgactgaatttttctttatgttttatgcttaagcttctctgctttctttctattttttgtggtttaaataaagaaccatgattatctgtataactgattgctcaaagtaattaatcatttttcttttgaaattaccagggtaaattaagaatcttataattacagagttttctcttgcctagaggaaacatactgagaaactgtgttaggaaattattatttcaaaacccagtctaagttcttagccactggacatttaaaaaatacatattacatatactttttctaacatgattgagaatatagtttgtttcagatttccacatttcttaaatgaaaacaataaagaattcaaaaggcaaaaggtactgtaaaaaaagttatttgatcacatgtaaatgaraattctaccttcttattgaattttactaattagaggggtaattattctcaca

SEQ ID NO: 439684 - DNA, 559 bp, Homo sapiens
tagttgaacttaaaatataattaatagttactcagcaaaaatagaaagatgttagctgactgtgtcaaaagaaatattttaacactgatttcatttttactaaatgactgaatttttctttatgttttatgcttaagcttctctgctttctttctattttttgtggtttaaataaagaaccatgattatctgtataactgattgctcaaagtaattaatcatttttcttttgaaattaccagggtaaattaagaatcttataattacagagttttctcttgcctagaggaaacatactgagaaactgtgttaggaaattattatttcaaaacccagtctaagttcttagccactggacatttaaaaaatacatattacatatactttttctaacatgattgagaatatagtttgtttcagatttccacatttcttaaatgaaaacaataaagaattcaaaaggcaaaaggtactgtaaaaaaagttatttgatcacatgtaaatgaaaattctaccttcttaytgaattttactaattagaggggtaattattctcaca

SEQ ID NO: 439685 - DNA, 594 bp, Homo sapiens
tcagtgacaaaggtagttacagtctgattttcttgtccattgccaagaaaaaatgattcagtctgactccaatttataagggcatgttgaaagcaagaatcctgcttgtagagattcttcttctaggcatgaggaatggttattccaggtaatggattcctaatttgcccttctgtggaactagatttgcatgacagatgacagaatatttgtcaccttaagatycttgaaaaattaatttaaagccatgctatttctaattgttttggcttatgctctgaagtgttttttttgttttttgttttttgtttttttttgagacagagtctcgctctgtcgcccaggctggattgcggtggcgcaatctcggctcactgcaagctctgcctcccaggttcacgccattctcctgcctcggcctcccgagtagctgggactacaggcgcccgccactacacctggctaattttctgtatttttagtagagagggggtttcaccgtgtttgccaggatggtctcgatctcctgacctcgtgacccgctcgcctcggcctcccaaagtactgggattacaggcgtgagctaccgcgccc

SEQ ID NO: 439686 - DNA, 594 bp, Homo sapiens
tcagtgacaaaggtagttacagtctgattttcttgtccattgccaagaaaaaatgattcagtctgactccaatttataagggcatgttgaaagcaagaatcctgcttgtagagattcttcttctaggcatgaggaatggttattccaggtaatggattcctaatttgcccttctgtggaactagatttgcatgacagatgacagaatatttgtcaccttaagatccttgaaaaattaatttaaagccatgctatttctaattgtttyggcttatgctctgaagtgttttttttgttttttgttttttgtttttttttgagacagagtctcgctctgtcgcccaggctggattgcggtggcgcaatctcggctcactgcaagctctgcctcccaggttcacgccattctcctgcctcggcctcccgagtagctgggactacaggcgcccgccactacacctggctaattttctgtatttttagtagagagggggtttcaccgtgtttgccaggatggtctcgatctcctgacctcgtgacccgctcgcctcggcctcccaaagtactgggattacaggcgtgagctaccgcgccc

SEQ ID NO: 439687 - DNA, 594 bp, Homo sapiens
tcagtgacaaaggtagttacagtctgattttcttgtccattgccaagaaaaaatgattcagtctgactccaatttataagggcatgttgaaagcaagaatcctgcttgtagagattcttcttctaggcatgaggaatggttattccaggtaatggattcctaatttgcccttctgtggaactagatttgcatgacagatgacagaatatttgtcaccttaagatccttgaaaaattaatttaaagccatgctatttctaattgttttggcttatgctctgaagtgttttttttgttttttgttttttgtttttttttgagacagagtctcgctctgtcgcccaggctggattgcrgtggcgcaatctcggctcactgcaagctctgcctcccaggttcacgccattctcctgcctcggcctcccgagtagctgggactacaggcgcccgccactacacctggctaattttctgtatttttagtagagagggggtttcaccgtgtttgccaggatggtctcgatctcctgacctcgtgacccgctcgcctcggcctcccaaagtactgggattacaggcgtgagctaccgcgccc

SEQ ID NO: 439688 - DNA, 598 bp, Homo sapiens
tgttcctacagcattacctagtttactctaatacaacatggaaaaaactggaacctataataaatagaccctacgttgccatttaaacttctagttctgaggaataataatgtggggaaatactttctatataataaaaaaatagaaaattgcaaaataaaaatatacttatgtatcattcatgtcctattaaaaatgttatttatagactcaccatattcccttcctccagaaaaayagaagtaaaaatatgaaaatgcctgtaatcatgtttttggattatggaatcaagtattgctttttacttttatgttttctgaatttttgttgtacttcactacatttttgagtgccctgatgtattactttcaaaaagaagaagaatactttctgaagccatttcaaccatccccactcacctctctagatcccagtaaccaaatacattatataggactcttcatcagtccttatcaagtttaggaagggcgatgctataccttctttaaaggacacctaccaatgtcttagttgcctttcaaagactcctagcacagctaaatgtgatggatatgctctaaggatataagagctgaag

SEQ ID NO: 439689 - DNA, 554 bp, Homo sapiens
aacttcaaattcattccatctgctatataagaaacactaaaataaataaaaatagcaaagtacacagcagacatacaatgtgttactatttargaaaaaaattttaaaaatacgtgcttttaacatacatttccaaatgtagactatctttagaagaacatatgaatgaaaggcagtagcagttgcttctggaaaggaaacttgaatggcttggaggatgaagtggagattttccaaccatctcccatgggatcttttgaattttgaatcatggaaaggtatgaatttaaaatttagtggcatttaaatagaaaagacagaactgttaaacaataccagacactatataaacaagcattagattatatggcaaaggcaaatcaggaataaatataatgctagaaaaggaattccagtgttatttttcagggttattttaagtaccgacctctctttgtaaatgaaaattactctgattattaagatgtttaagtatatccaaccgtcccagaccacattggcctatttcctcctcttggcaacactgctcgggt

SEQ ID NO: 439690 - DNA, 577 bp, Homo sapiens
cacaaattgaataatgttcttatcctccatttcccaatagacaattagtgcagccaggtctaattgtttttctactgggaatttgcattcaattgtcatattgctaccatactctaccacatataggtccttgggaaccgtgacagtaaatgctaaaaagaaagaaggacaatcttcagaaaagggaaaattcctcgaaacatttacaaaattggcacagcgtttataaatcactttatctggtcggttatgttatcattatatttaagaacttgctaaacacatattttatccaatgggcttgaaatatgttttgggacactatatctcatgctgagacacagtgtcccaatagcagaataataaaattagctaaacaagttgcccccacaatttataaacatatattactgtataaatattatatggagatggagtccttacaaccagggagasttggtttcatgtagacatccccagaatgtcctttgacaggacacctatttgcttcctacatagagggaatggtagattctaacagtcatctctttttacttccctaaacttttgatcagtt

SEQ ID NO: 439691 - DNA, 538 bp, Homo sapiens
aaaaaaaaagtgtgtgtgtgtgtttagacacaggaaatgtccaagatattgacagtgattatatttaggaattaaattagagggagaacaggtaggtttcactctttattgtttttaaagggaaaaaaggaaggaaaagacagaaaaagagagatgagattatggattttttttggtgttctgtgtccaaatttccaagtgaaagaatgttttatttttagtatcaggaaaaaaataaaaccaaaatttcatgaatcacttcaccttaccaaaccgtagaatgtttagcagaccaagtgatataatggaaagaaccccaaaatggagtccaaacatccaaactgacgtagaataataacattcgtttattttttatgtttttttctttattattaaagtaatataatggaattacagaaaataagaaaagaaggggaaaatcccctactrtttcatcactctcacccagggagcatctggtgatgcctggaaacatttttggttgtcaaaattgggctggttgagggaggactgctat

SEQ ID NO: 439692 - DNA, 535 bp, Homo sapiens
ttcaatttttttccctgtaatcttttaaaaagtaatttataaccttatcatacatttaatacccatttgtttcattaaagcttatggcataaatattgcccatcttactgcatggtattcataagcatcttatttaacagttccataatatttaatccctctattgttaggtatcagattgttgccaattttttaaaatatcataagtatttgtgtgttcagcaaatattcgttgagtgcctactgtgtgccagggccccaggctaggccctgaggatagattttcccaaatagtgttgctgatcaaagaaaaagaayatttttctggttctcgacacatgttgataattggtactgttacactgtattttcacccattgtttaaaaaatattatttttttgctaatttgaaagatctgatcattttttggtctgtttatgtcactggtttcttatcaacctgtatgagcccttcatgttaaaagataaaaaggttaagtgaaataacatgagtcatcatcctcttgccagggtt

SEQ ID NO: 439693 - DNA, 463 bp, Homo sapiens
aagacagaaccactgtaaataacctttatacccaacagtgaggaattaatttcatttagttacccaatctaatcgaatgcagcaatgaaaacattttttagaaggttatttaattcatagaaaagcatccacagtaaatttttttcaagtattaaaaaaagaggtagaacaatggtacttttactccttgtgttataagacaaacccagactgaactttgacataggccaaggtcaatgtgtctaagaaatgttttattatactatttttattcttaggctcctccattcctcttttaggactcctttgggttctcagaatggacagagcaaataaattccgttcagggatcctggacctgcttagcgcaggaagagacttacttagatgctgcagctgggataacttacacaagtcatgttactagcaagcagctgrcggtggacttggacccgtgtccaga

SEQ ID NO: 439694 - DNA, 572 bp, Homo sapiens
aaattggactcttcgttgtttgcctttccttcttattcatttcaactgcagttcaaaatactgcataatgaatgaatattgagatagcccttgcattggttatgacatttgcttccaaaataagaattttcacattctgattgtatcacagatttttatttttatctgggaaattattgaggctgacactgccttgatttggcaggagcatggagttctctttggccccaataaaattgcaatagggkttgggcccagctcagatgttccttctttcaaatcacttttgaggtcacatagtagaatagagcaattttggtgactgtaagtttgggtgacttcccaaagttcccgaagttgggtgacttcccaactttggtgactgtgacctctaggaaaatatagacattatgtggcaatacagtttactggtactgcatatatatagtctgtgtatgacacacacatgtacaacaagtttcatgaaaaaatacttagatctactatctgcaatgccctctgatattttcatttaatgttttatttttctaaaaatggtcaagacccagggc

SEQ ID NO: 439695 - DNA, 572 bp, Homo sapiens
aaattggactcttcgttgtttgcctttccttcttattcatttcaactgcagttcaaaatactgcataatgaatgaatattgagatagcccttgcattggttatgacatttgcttccaaaataagaattttcacattctgattgtatcacagatttttatttttatctgggaaattattgaggctgacactgccttgatttggcaggagcatggagttctctttggccccaataaaattgcaataggggttgggcccagctcagatgttccttctttcaaatcacttttgaggtcacatagtagaatagagcaattttggtgactgtaagtttgggtgacttcccaaagttcccgaagttgggtgacttcccaactttggtgactgtgacctctaggaaaatatagacattatgtggcaatacagtttacwggtactgcatatatatagtctgtgtatgacacacacatgtacaacaagtttcatgaaaaaatacttagatctactatctgcaatgccctctgatattttcatttaatgttttatttttctaaaaatggtcaagacccagggc

SEQ ID NO: 439696 - DNA, 587 bp, Homo sapiens
ttgttcatctttcccacctgtttctacccttcagccattcattttcccatacaattgatcaactacccggagattgaaaaacaggctgtgtttagaaaaagagaaattttattacctcagaaaaatatgtaaagcaaaacagatggttaatgagtggggggttaagtcctgaaactctgtgtgaatttttttatttggacgaaatagatggagaagtgctgagatgggagaagagcagtgggragccagggctgaagagctagatactatggtcatcttgaataccaccacttcctattcatgtaacatctactctattcatttttagacatataaattcatcattgccaatgtgctgtttctcagagtgtctctgatggttacttgcattacactcgacttggggttaatgtttaaaatacagattccggggttctgcctgggatccaaacttgggggcagggtcttggaggtcaacattttaacattgtcctcaggtgagtcatgttcacatttgaagttttgaaaactagtgatttaatatttaagggaaaaaatgagccaagagttctttgcaagtacagctg

SEQ ID NO: 439697 - DNA, 587 bp, Homo sapiens
ttgttcatctttcccacctgtttctacccttcagccattcattttcccatacaattgatcaactacccggagattgaaaaacaggctgtgtttagaaaaagagaaattttattacctcagaaaaatatgtaaagcaaaacagatggttaatgagtggggggttaagtcctgaaactctgtgtgaatttttttatttggacgaaatagatggagaagtgctgagatgggagaagagcagtggggagccagggctgaagagctagatactatggtcatcttgaataccaccacttcctattcatgtaacatctactctattcatttttagacatataaattcatcattgccaatgtgctgtttctcagagtgtctctgatggttacttgcattacactcgacttggggttaatgtttaaaatacagattccrgggttctgcctgggatccaaacttgggggcagggtcttggaggtcaacattttaacattgtcctcaggtgagtcatgttcacatttgaagttttgaaaactagtgatttaatatttaagggaaaaaatgagccaagagttctttgcaagtacagctg

SEQ ID NO: 439698 - DNA, 597 bp, Homo sapiens
ttatccagaaattttaagcaagtaaactaataaaacttaaaacaattgactttggggaaaaggtatgtcattcggtttcaattttattatgatgatagatactgtcacatcctggtcagtgggtttaagctgaaggtgtgtctcacaatcatctggggagcatttcatttttttttttttttttttttgagatggagtttcgctctgttgcccaggctggagtgcagtggtgcaatctcggctcactgcaaactttgcctcccgagttcaagcaattctctgcctcagcctcctgagtagctcggattacaggcgctttccaccacgcccagctaatttttgtgtttttattagagacggggtttcaccatcttggccaggctggtcttgaactcctggcctcgtgatccgcccgcctcggcctcccaaagtgctgggattacaggcgtgagccaccgtgcccrgcccgtctggggagcatttcttatccgctactcaaaatctgaactctactgtatctatacacttaaaaacagtgcattagactcacttatttgtttctgaagagaatatttaggttgaacagtgtaatggtaa

SEQ ID NO: 439699 - DNA, 574 bp, Homo sapiens
tcgtacagtttgtggcacattaaaagggctcaaaaaatgttagcttcttgttctactactcctgttgttatagatcattgtgtgtgggtgaagactgttcatttataaccttggaagcaaaaatggagtaaattacttyatattgaaattatacttgaataatttcaatataaataaatatatataaatatatattgaaatttaatttgatagattcaatatataaatatatattgaaattaaatttgatagattacaaagtacaaattataatttttaaacaataataggcattttatttaattcttccaacaactttgtgaaagtagttcccatgtccactttatggttgaggaatctgaaattcaaagacaagtcaaaaaacttactcacatatgaaagttagtaacttaaagcacagaaacatacacttatataagcttagacccatgctttgtataacggaaatcagtaaacaacccaaatatatatcacagagaatgtataaatacattgtgatatgttcatgcaaagggctattatatagcagtgaaaaataaatgaaccaaagcta

SEQ ID NO: 439700 - DNA, 539 bp, Homo sapiens
tttgagtttggtcattattttctctcagcactttggaaatattatttcctgattttctagaatctcttgttgctgataaatcttttgtcagtctatttgtctttcttgttgcttttaatataacctcttcgaatttctattcagtggtttccctaacatagtgtctatgtatggaatttaaaaaatttatcttgtttgggagttactgtgattcttcaatctgaggattcatttccttcattaagtctggcaaattcttagtttgtgtctcttcaatattgcctctcctctattttctcatatacttaatcttggacttattttttattgtgtatatttaatgtgtacaacataaggttttaatgtacacatacatagtgaaatggttacaacagtcaagcaaattaacatatccattatctcacatagttacctatttttttgtggtaagaacaccttaaatctactctcttggcamatttccatgatagaagtatacaatgcaatattattaatatgtcttcttgctgtacagtata

SEQ ID NO: 439701 - DNA, 572 bp, Homo sapiens
tattttccatacaggttcagagagaagacatcatgaggattgcagttgggtgaggtgtgaatggaaggtaaggaactggagacagtgaatatagataattctttcatgaagtcggccactggaaaaagataagaaatagttggatgaaaagacaagaatgaatgaagagtttttcactgtgggagggactttagtagggcttgtgaattagatggaacaagtcactagggtgggtgaaaaggaagaaataaaggagaaaataaatacatattaaggaagcgaaatcctagaccttagggagggagagtagatggtcaagttcgaatctaggtctttaacgatcttyagtaacgtaatataattaactagaaatgctatgatccctaacatcagacccatgactttctttttgacttaaactgtctttcaggcaggctgactgtcactcatgatgagctttgcccctaatgcttcacactctccggtttttttgctccttgggttctcgagagctaacatctcctacactctcctcttcttcctgttcctggctatttacctgaccaccatac

SEQ ID NO: 439702 - DNA, 604 bp, Homo sapiens
agtttcagttagacaggaagaataagctttagggatgaaaagttttgatgaaataaagaaggagtggtactttcttctctgaaactctaggaaagacaatgggaaatttggtatatcttcagaggtcattgaaatgaaaaacaaaaatattgtcaaaaccataagaaatggaccccatctggttagagcagaaagaaggggagtattcttgatgcagcagagcactgagttcccacgaaggaaacagctgggtcttargagagcactggaatcagatagatgctgtgagcaagtctcgctctggataccttctccaagttgtggttcaggaaagaacctacctctttgtatagtctcagtcatgcatcaggaaagtagggctaataaaactgtcctcatttgtaattgcactcttccctttgattgtttacatgacacttgaagttatgtcttatcttttatcctagctacaatggaagctccattaggtacataattatttatttttttcatcattgcatcctcaatccccattagagcccttttcacatagttggtgatcaattaaaaaatacatagagtatggaaaagagtctctttttct

SEQ ID NO: 439703 - DNA, 598 bp, Homo sapiens
gcaaaagccctgatgtacatatatctgaaatgataatttcaaaaatgaactcacaacaaataaaaattgttataattggttttatttttctgcaaattggaatgtacaaactaggaaacatccttttctttgctaataagctagtaagtccagaaaagtgaaagtgatgagttaatttctcactctaaatcattttcttaaggttgtatcaaagtttctgtgtcttaaaaaaatcaacaatattttgaggtctggtagtatgatgcctccagctttgtcctaaaaaaaagtggatgtcatagaaataaaaagtagaacagaggacactagaggctgggaaggttagggggaaggaaggtaaagagatacttgttaaagaatgcaaaattacagctatataggaagaataagttcagtgttctatagcactgcaggatgattgtagttaacagtaatacattacgtagtttcgaatagctagaaggtggatattgaatgttcccaacacaaataaatgacaagtgtttgagawgatggatatgctaattaccctgatctgatcactatacattgtacatattgatcacagtatgtaccc

SEQ ID NO: 439704 - DNA, 532 bp, Homo sapiens
gtcagcagcctcaaagatggaaactagacaaactcatgaagatgagaaagaatcaacgaaaaaacgctgaaaatccaaaaggccagagtgccttttctcctccaaatgatcacaacacctctccagcaagggcgtgaactggatgsaggatgaaatagatgaactgacagaggcaggcttcagaaggtgggtaataacaaactctgctgagctaaaggggcatgttctaacccaatgcaaagaagctaaggaccttgataaaggcttacatgagctgctaactagaacaatcaggaacataaatgatggaatggaacataaatgatgtgatggagctgaaaaacacagcacaagaacttcatgaagcatacgcaagtatcaatagctaaatcgatcaaacagaagaaagaatatcagagtttgaagaccatcatgctgaaataaggcaggcagacaagattaaaggaaaaagaatgaaaagggatgagcaaaacctctgagaaatatgggactatgtaaaaaggcagaacct

SEQ ID NO: 439705 - DNA, 532 bp, Homo sapiens
gtcagcagcctcaaagatggaaactagacaaactcatgaagatgagaaagaatcaacgaaaaaacgctgaaaatccaaaaggccagagtgccttttctcctccaaatgatcacaacacctctccagcaagggcgtgaactggatggaggatgaaatagatgaactgacagaggcaggcttcagaaggtgggtaataacaaactctgctgagctaaaggggcatgttctaacccaatgcaaagaagctaaggaccttgataaaggcttacatgagctgctaactagaacaatcaggaacataaatgatggaatggaacataaatgatgtratggagctgaaaaacacagcacaagaacttcatgaagcatacgcaagtatcaatagctaaatcgatcaaacagaagaaagaatatcagagtttgaagaccatcatgctgaaataaggcaggcagacaagattaaaggaaaaagaatgaaaagggatgagcaaaacctctgagaaatatgggactatgtaaaaaggcagaacct

SEQ ID NO: 439706 - DNA, 617 bp, Homo sapiens
ttaatttttttccaaactttggcttcattttcattacatatataggttggcgtgatgatacaaaccatgatatggagtagctgggtatttctatattatatacaaatgagataatttagagactggggagaggaatttaccacagctagagttaatccaaaaatatcaacatgaatcactgatttctctattactgaaataacttaaggtgtctcttgtttcatcccatctactaccagaattcagatgaggtgttataaatgtgtgtcccacaacttccaagatttagtaaacattctacagcattgttgcrtgtggcagcttgttaggaatgcaaattcttagacctcacccaaaattctactaaatcataatttgtagtggtagatcaaaggaatctgagttttgacaatctttccagaaattctcatgtaccctaacatttgagaagtgttacttttcattcttcatttggaagacaggactatccttcatgaaagacagtcagtgctgaatctggagtggcacctttaggaaaatgatactttccaagagttagcacttgaatttggttatatttccaaggagactggtatgaagcactacttcactaatga

SEQ ID NO: 439707 - DNA, 577 bp, Homo sapiens
ttgtgagcccttaaaagggacagaaattgygcatttggggagctcggattttaaggcagtagcttgctgatgctcccagctgaataaagcccttccttctacaacttggtgtctgagaggttttatctgtggcttgtcctgctacagaagcatcacattacctgacttcaaactatactatgagattatagtaatgaaaacagcatggtactattacaaaaatagacatatagatcagtggaacagaatagagaacccggaaataaagccacatacttaacaaccaactgatctttgacaaagtcaacaaaaataaatggggaaaggataccctattcaataaatggtgctggcaaaactggctatccacacacagaagaatgaaactggaacctatctaatctttcttgatcacatttccaagagatagctcccaggtccttgagaaagacattcctgggctataaaactatcaagagtctgggagaatatttacatctcaaaagagcccagaaaaaaattacaattgtcagttctcgaatgcaaatgtaaagaaaagggaagccaggggcctata

SEQ ID NO: 439708 - DNA, 577 bp, Homo sapiens
ttgtgagcccttaaaagggacagaaattgcgcatttggggagctcggattttaaggcagtagcttgctgatgctcccagctgaataaagcccttccttctacaactyggtgtctgagaggttttatctgtggcttgtcctgctacagaagcatcacattacctgacttcaaactatactatgagattatagtaatgaaaacagcatggtactattacaaaaatagacatatagatcagtggaacagaatagagaacccggaaataaagccacatacttaacaaccaactgatctttgacaaagtcaacaaaaataaatggggaaaggataccctattcaataaatggtgctggcaaaactggctatccacacacagaagaatgaaactggaacctatctaatctttcttgatcacatttccaagagatagctcccaggtccttgagaaagacattcctgggctataaaactatcaagagtctgggagaatatttacatctcaaaagagcccagaaaaaaattacaattgtcagttctcgaatgcaaatgtaaagaaaagggaagccaggggcctata

SEQ ID NO: 439709 - DNA, 507 bp, Homo sapiens
aggaacatgctgaggcaaaatgagtttgacttatccctgagtagtgcaggtaaagcaggttaagaaaaatgcaaattggtaagcatgacagtgcttcattctggagcatatataacttctgactccaaatagtagacattatcattatgttcctcttcttatattggagtagttaccccatttcacctgwcttctataaacttatagaaaataaaagcaccaatattgctctcctagttttcctggcagctaggggatgtgttggtgaccaaattcttgaccagtcagatgcaccaccttattttgaatctagacatagtagtgaaaagaataagaaggggacagttctttctggaagtggtaataaccagtttatagacctccaagaactatgcccagtgactactgctggtagtataggaggaggtacaagctgcagtgaatagagtttggtggctacagtagtgtcctcattagactagttctgggatatgattttcactgcag

SEQ ID NO: 439710 - DNA, 507 bp, Homo sapiens
aggaacatgctgaggcaaaatgagtttgacttatccctgagtagtgcaggtaaagcaggttaagaaaaatgcaaattggtaagcatgacagtgcttcattctggagcatatataacttctgactccaaatagtagacattatcattatgttcctcttcttatattggagtagttaccccatttcacctgacttctataaacttatagaaaataaaagcaccaatattgctctcctagttttcctggcagctaggggatgtgttggtgaccaaattcttgaccagtcagatgcaccaccttattttgaatctagacatagtagtgaaaagaataagaaggggacagttctttctggaagtggtaataacmagtttatagacctccaagaactatgcccagtgactactgctggtagtataggaggaggtacaagctgcagtgaatagagtttggtggctacagtagtgtcctcattagactagttctgggatatgattttcactgcag

SEQ ID NO: 439711 - DNA, 586 bp, Homo sapiens
aaaaggttttccacctgcccttggctgaggggatccggaggaccaccaggatgatgcaggcataggaggcagtaatgaaggccagagctccactgattacaacagcaccttctgtgtgaatcataagggtgttgaggtaggtgctggtgcaggagatcttcatcagagcgtagaggtcacagaagaagtgggggattctgttatctgcacagaagattagttggccyatgagaaaggtatgcagcatggcatgaaggtgggagagagcatggcacatgaccaccatcttcacacacagcattctagtcaggatcatagtgtagtggaaagggtggcagatggcaatgtacctgtcataggccatcacagccaggatgaagttttccatgacggcgaagcaaatgaagaaataagtttgggctaaacagcctgtgtaggaaattacctttgtaggggagaaaataatctgcagcatcttggggaccgtggtggaggtgaagcagatgtctgtcaaggccaagttactgaggaagatgtacatggggatgtggaggcgtggagcagagagaatcagtgtgatgatggc

SEQ ID NO: 439712 - DNA, 588 bp, Homo sapiens
cttaatataattgaagctaacaattacatagttttggtcagttgtttaaactgaccaaattggtgccaattagtaataattgtgataataactcaatgtagatgatttttcataattattttaacacaaaattttgtggtcataagaaataaaaaaacttttattttttattgtgaaaagtaatataggtgattataagagactttccagcataaacatttattacaacaggataaaatttgtataggagaagaatggaaatacatgtttaaatggagaaggaataatgtaaaacatacacattttcaggatgactttgttcttgcattttaaaaatgaatgatgtgattatcaaatcactctgtgtttagatgtcattgggtacattttaagaaataatgtaaagttttgttttaaaagtacaatactccatgtattatatacttatagctatttaaacatcaaatggataattttatatgcctctttttaaaagsgcatgggtcttaataaaaaagcatatataagcaaaaactataaatcattgaaaactataaactcattgattgagaacttgacccaacttct

SEQ ID NO: 439713 - DNA, 464 bp, Homo sapiens
ggacaatgataagtacctatcatttttttgtttaattctcattataaaactaagcatagatattattattcccatactgagatcatgaaaaccgaggaccagggagactaattaactttctcaaggtcaaatagagtagagttggatccagcttgatcttcaatctgtctaactcggaagcaatgctcttcctctctgacctcaccgatttaacacccacgttccattccttccctgtgctggtcttctcttatcaatgtggcattgtaattggattcttcaaatgaagattcayatctctagcctgcagggctgggcatcaggtggccctgagtttatggtttgggaaacgtaagattaatccttctttccagatcttgggaaaggcctatgagtggactgagctctacttgacagtcggtagcctgtgcccagatgctacctgggcaatatctatgtagctc

SEQ ID NO: 439714 - DNA, 617 bp, Homo sapiens
cgtaaactgccctttgtaaatagaggagacactgggataacatgacttaataaagtytctgagtttctctgattcttaatccccagaaatgggaagaaaatctgggtcagttgttaagagaagacacacagtgaaaaaccattccagcggatgatttctgggccacctaactctgattattcttaatacctccctgacggattgaaaatctctggaatctattagctattttctctgattcagggaaaattttactcttcactatgtattagtgaataattttcaattatttccattgaaaataatggcaaaaactgcaattacttttgcaccaacctataaatcattcatactcttttgtggataggttttgataaggggaaatgggagagtccataaagacacagaatgtctgaggatggtgtgaggaggaggcatgacgaggggaggaaaaacacaagacgattaggaagtcaaagacaaacttcacaatactcaatagtattgtacaaaggatcagttttgagaaagatggtcctccctccagaaattactgaaagcctatacaggaattgtcggaggtgtccagaaacttctgtgctctggtgtgcaggctc

SEQ ID NO: 439715 - DNA, 559 bp, Homo sapiens
agtaattgctattattgtgacatgtacccatttagacaatttctatgcacatatgaacatgcatatataaaattttgtttttataaaaataggatcatttgttctggagctttctttgtttctctcatcaatatatcatggacctcctacagcactctcagacctacatcattatttttaagacatttcagaggatattagatgtaccacaagttctaaacatttccacatttccccctcatgccacttactggaattcctttataacttgagctaawcaaaaatttaggcttttgttttcattttatatgcatacaagtcccccacatgcaggcatttggcaaaaacaaacaacaattctgagagtggataatgaactagtcagggcatgaacattttgtgaagatgattaaagatgactgatatcactggttctctcctcatccatttcaaaatgtaaacatggcaacaatgaagtcttgggctgagagacgctatagtggttgggctctcaggagactgatccactcccagctctgagtcttggggtcaggatcct

SEQ ID NO: 439716 - DNA, 584 bp, Homo sapiens
tgggacttgaaattccttttttcccacagaagccatagtgaggatataccaggatctcttaaatagataatactggacattaagtttatccaatccacagcccttgttctgacactatgaaaaaagttggagtaataatcatagctaatactggctgagcactagccattgccaggttctgaattcacttaagtgatagccctgtgcaccagcactgtgaatatctttatttaaaaatgtagaaactgaagttcagggtggcgatgcaattgctgaagtctacagcagcaggtattgaagtgaagtttgtctgagtcaaaagcttaagttctaaaccactgtgctacactgcctttcaatattcaccaagtcattttctgactctagttcagtctcatgcatattttctataaggagsgaatgcaccatcagggaatttaaatatccattcaatttgacagttgcagttctcaaagcaaatgaagatgtggatatttttggcttatgcctcaatcttttgtgaacatgattgacgtgagttagtctactttggtccaatccaatgtctggacaagatccaattt

SEQ ID NO: 439717 - DNA, 597 bp, Homo sapiens
ttatccagaaattttaagcaagtaaactaataaaacttaaaacaattgactttggggaaaaggtatgtcattcggtttcaattttattatgatgatagatactgtcacatcctggtcagtgggtttaagctgaaggtgtgtctcacaatcatctggggagcatttcatttttttttttttttttttttgagatggagtytcgctctgttgcccaggctggagtgcagtggtgcaatctcggctcactgcaaactttgcctcccgagttcaagcaattctctgcctcagcctcctgagtagctcggattacaggcgctttccaccacgcccagctaatttttgtgtttttattagagacggggtttcaccatcttggccaggctggtcttgaactcctggcctcgtgatccgcccgcctcggcctcccaaagtgctgggattacaggcgtgagccaccgtgcccagcccgtctggggagcatttcttatccgctactcaaaatctgaactctactgtatctatacacttaaaaacagtgcattagactcacttatttgtttctgaagagaatatttaggttgaacagtgtaatggtaa

SEQ ID NO: 439718 - DNA, 597 bp, Homo sapiens
ttatccagaaattttaagcaagtaaactaataaaacttaaaacaattgactttggggaaaaggtatgtcattcggtttcaattttattatgatgatagatactgtcacatcctggtcagtgggtttaagctgaaggtgtgtctcacaatcatctggggagcatttcatttttttttttttttttttttgagatggagtttcgctctgttgcccaggctggagtgcagtggtgcaatctcggctcactgcaaactttgcctcccgagttcaagcaattctctgcctcagcctcctgagtagctcggattacaggcgctttccaccacgcccagctaatttttgtrtttttattagagacggggtttcaccatcttggccaggctggtcttgaactcctggcctcgtgatccgcccgcctcggcctcccaaagtgctgggattacaggcgtgagccaccgtgcccagcccgtctggggagcatttcttatccgctactcaaaatctgaactctactgtatctatacacttaaaaacagtgcattagactcacttatttgtttctgaagagaatatttaggttgaacagtgtaatggtaa

SEQ ID NO: 439719 - DNA, 559 bp, Homo sapiens
gattaagaatttgtatataggccgggcgtggtggctcacacttgtaatcccaacactttgggaggctgaggcaggcagatcacctgaggtcaggagtgcaagaccagcctgaccaacatggtgaagctggtcgctactaaaaatacaaaaaaattagccgggcgtggttgtgggcacctgtaattccagctactcaggaggctgaggctgrggaatcacttgaacccaggaggcagtggttgcagtgagccaagatcgcaccactgcactccagcctgggcgacagagggagatactatctcaaaagaaaaaaagaatttgtatataaaaatagagaaaaaagtttgtcctcaatatcttttataaaataagtgtcccttcccattccttgataaatgaaagcagtggctttttataccaaattttctttaccagagcacttttatcacaattaaattctgtatgttgctttatggattccaattgcttttgccaaaatacaagaaatatgcaaagtcttagtataacaaaaagtactaatgtataaaatagaaatgcc

SEQ ID NO: 439720 - DNA, 599 bp, Homo sapiens
ttaatataaatgcactagtaaaatctatggccaaaagccttcacttctgattttgacttgcctgaaatattacagcttgtgccttctgaatagtcaggtttyttgcctgagacattcaaatgttaaggtatttgagaatttaaacatcagctggcccagtcgtggatgcagttaaacttgtcagtgcaatgtaacgtgtgaaacataataaaggtgtgaggcttttgtggtgcaatcttgttgaacagacatctaaatccataggcaagatttacacattcccaagcatcaaccctgaagtattgctctccaacactggagtccaacaaattgcttcttatgcagagatcaaggagcaatattttacagatcctttcagtgtgcagggaagtagtatttgtccaaataagctcaaatgtgaaacagaacctagtatgggaaaacactgaatctttgggttattaatttcatcctagtaaatataatgagggtgattgaaagtgccaattccatttacaataagtgtgttcaattaataaagaagatgaatacaagcaaattatgtcttttgtttagctatagaaaaacctgaagaaatt

SEQ ID NO: 439721 - DNA, 599 bp, Homo sapiens
ttaatataaatgcactagtaaaatctatggccaaaagccttcacttctgattttgacttgcctgaaatattacagcttgtgccttctgaatagtcaggtttcttgcctgagacattcaaatgttaaggtatttgagaatttaaacatcagctggcccagtcgtggatgcagttaaacttgtcagtgcaatgtaacgtgtgaaacataataaaggtgtgaggcttttgtggtgcaatcttgttgaacagacatctaaatccataggcaagatttacacattcccaagcatcaaccctgaagtattgctctccaacactggagtccaacaaattgcttcttatgcagagatcaaggagcaatattttayagatcctttcagtgtgcagggaagtagtatttgtccaaataagctcaaatgtgaaacagaacctagtatgggaaaacactgaatctttgggttattaatttcatcctagtaaatataatgagggtgattgaaagtgccaattccatttacaataagtgtgttcaattaataaagaagatgaatacaagcaaattatgtcttttgtttagctatagaaaaacctgaagaaatt

SEQ ID NO: 439722 - DNA, 543 bp, Homo sapiens
tgctcttgggagagggagactacagcaactaggagactgcctggaacgcagtgctgccctgtcacagcagagatgcccacctatggaggtagcattcagacctgtcctagccagaggagaatcacccatcccagtggtaagagctggagttctggcaagccttaccaccatgggctgaagtgccttggggacgtaaataaacttaaaaggcagtctcggctgtaaggactgcaagtcctggcactgagctgggctcagagcaggtggattttaagggcatgtgacttactgagataccagttggggcagctaagggagagcttgcatcacccttcccccaaacccaggcagcacagcttgcrgctccaaaagagacccctacctcccacttgaggagaagagagggaagaataaggaggactttgtcttgcatcttggataccagctcagccacagtgggatagggcacaggtcacagttgtgaggcccctattccaagttctagcttgccaaccacatttctagacacatgttgggccagaa

SEQ ID NO: 439723 - DNA, 543 bp, Homo sapiens
tgctcttgggagagggagactacagcaactaggagactgcctggaacgcagtgctgccctgtcacagcagagatgcccacctatggaggtagcattcagacctgtcctagccagaggagaatcacccatcccagtggtaagagctggagttctggcaagccttaccaccatgggctgaagtgccttggggacgtaaataaacttaaaaggcagtctcggctgtaaggactgcaagtcctggcactgagctgggctcagagcaggtggattttaagggcatgtgacttactgagataccagttggggcagctaagggagagcttgcatcacccttcccccaaacccaggcagcacagcttgcggctccaaaagagacccctacctcccacttgaggagaagagagggaagaataaggaggactttgtcttgcatcttggataccagctcagccacagtgggatagggcacaggtcacagttgtgaggccccyattccaagttctagcttgccaaccacatttctagacacatgttgggccagaa

SEQ ID NO: 439724 - DNA, 603 bp, Homo sapiens
gccattattctttttttttttttttaatggatgatattgatgttaaattaccatgatatttacagtctagtgaatttccttaagggtgatatatttcatcttaaaacatcaatattcacaatacaccataaattatgttctttgcatctacttaaacttgtaggatgtcaatttaagaatgtacaaaagtatcattgtttttcacaattattttaggttatgtttaagcaaaacaatgtgaaggccctgaataagttttcccaaacacacacaagaattgtttcctgcaagagttatttaaaatcaaggttaaatctgggggctaatatgtatctttatggaatatagtaagtatgaatgacatacttttattgagtgccttactattatttaggtactctggtaagcacttcrtacatattgtaattgtattattattaaatggatagcccgtctacagctgtatgaccactaaacggtagaacctagatccaaacctaggtctgcctgcactcaaagccttagtatgttctttgcaatatagtatatgcctctcagcaccataaataatcataatgcatgttctcagattatgtgaaaccc

SEQ ID NO: 439725 - DNA, 603 bp, Homo sapiens
gccattattctttttttttttttttaatggatgatattgatgttaaattaccatgatatttacagtctagtgaatttccttaagggtgatatatttcatcttaaaacatcaatattcacaatacaccataaattatgttctttgcatctacttaaacttgtaggatgtcaatttaagaatgtacaaaagtatcattgtttttcacaattattttaggttatgtttaagcaaaacaatgtgaaggccctgaataagttttcccaaacacacacaagaattgtttcctgcaagagttatttaaaatcaaggttaaatctgggggctaatatgtatctttatggaatatagtaagtatgaatgacatacttttattgagtgccttactattatttaggtactctggtaagcacttcgtacatattgtaattgtattatwattaaatggatagcccgtctacagctgtatgaccactaaacggtagaacctagatccaaacctaggtctgcctgcactcaaagccttagtatgttctttgcaatatagtatatgcctctcagcaccataaataatcataatgcatgttctcagattatgtgaaaccc

SEQ ID NO: 439726 - DNA, 603 bp, Homo sapiens
gccattattctttttttttttttttaatggatgatattgatgttaaattaccatgatatttacagtctagtgaatttccttaagggtgatatatttcatcttaaaacatcaatattcacaatacaccataaattatgttctttgcatctacttaaacttgtaggatgtcaatttaagaatgtacaaaagtatcattgtttttcacaattattttaggttatgtttaagcaaaacaatgtgaaggccctgaataagttttcccaaacacacacaagaattgtttcctgcaagagttatttaaaatcaaggttaaatctgggggctaatatgtatctttatggaatatagtaagtatgaatgacatacttttattgagtgccttactattatttaggtactctggtaagcacttcgtacatattgtaattgtattattattaaatggatagcccgtctacagctgtatgaccactaaayggtagaacctagatccaaacctaggtctgcctgcactcaaagccttagtatgttctttgcaatatagtatatgcctctcagcaccataaataatcataatgcatgttctcagattatgtgaaaccc

SEQ ID NO: 439727 - DNA, 603 bp, Homo sapiens
cataattagtcaattctaccattgtagcacgtaagcaactatagaccacttaaacgaatggacatgactagaatatggtccagtaaaactttatttacaaaaacagatagtgggctggatttggcctcctggcwgtagtttgccgattcctgctctaaagggttttttttattggtttacatgatatctgtatatcatgtaaacagttgggggcttcaattctcaatgaagagagagagagaagattgtaacaagggcctagtataatttaaaagttacttcagaaagtgtagtacctgctcagggtcaggctttttgatacatgaacctgacctaaagtatcagttaagattgatcaggtctgtatttttcatttattcagttaattttcattgagccccttccatgtgctagcccagtgctaatacctagggatatatagacatctacaagactagccctcaaagagctaggtgggaagaatgatatgtgataaataccgcaaaagatagatacttaaaatacaaggcataaaaggtgcccagtggagggcatgggcatctttgcatggacactccagacttaatcatttcttgatggaaa

SEQ ID NO: 439728 - DNA, 575 bp, Homo sapiens
tagctaacaccatactcaacagtgaaaagctgaaatctttttttgctaggatcaggaacaagacaagggtccccactctcaccagttctattcaacatagtactggaaggcctagccttagcaatcagtcaagaaaaataaaaggaattcaaatcagtaaggaagaagcaaaatagtatgtttgcaggtgacatgatatggaaaacccaaaagactccaccaaaaactgttagaactaatacattcaatacagttgtaagatacaaaatcaatatacaaaaatcagttgtttctttttttttttttttygagacggagtctcactctgtcacccaggctggagtgcagtggcatgatctcggctcactgcaagctccgcctcccaggttcatgccattctcctgcctcaacctcccgagtacctgggactacaggcacctgctaccacgcctggcaaattttttgtatttttagtagagacggggtttcaccatgttagccaggatggtctcgatctcctgaacttgtgatccacctgcctcggcctcccaacgtgctgggattacaggtgtaag

SEQ ID NO: 439729 - DNA, 552 bp, Homo sapiens
  misc_feature (1)...(552): n = A,T,C or G
nnnnnnnnnntccttgcttctgatgtaagtggcttttgaattctttttcctctgttacctcccaggagcatctgaacagatagtgaccgttttggcatgccaaattggaagtttgctagtggagcagaaatcatagttactttgtcatatacatctaaatactgtggtgtgtgtgtgtgtgtgtgcgtgtgtgtgtgtgtgtgtgtgtcatgtgttgtagacagctgggagccccggtgtgccgtgggatgtgccaataatggcttctmaagtactctgtgttttcctaagctgccagtctaaaccctttaaaggtttgctttctaatttgtacatgaaaaataacaggctgagttgaactttttttttcaagtgccccctttgaagatgcagcagtagtaaatactgctctaatgataaactttagttctaagtgctacttaaaagtctgtagtagaaaggctgagaacttgccatctttactaatgaagctttccttaggaaaatgctcacttaaaagggagtaaatgaccaagtccctgaaatttgtga

SEQ ID NO: 439730 - DNA, 532 bp, Homo sapiens
ctggctttcaatgtgacaccatttgttgatcatctgcctaggtgtgaggtatggcagggtgggggttgaggggaatcagtctaagccttgtctacactagaatccttactctgaacccctgccatatgccagatactgagctaggggcacggcaacaaataaacatgtctagcttcttttttttttttttttttggkatacctgttttgtgcatgaaattgtgcagtgggttatgacagaaaaccaaaaaagcaagaaaggaaatttagagttctattacgaagacaagacctgtggagcaatgatctggccacagagatgtagcacaggtaacttttgtgttggagggagaatttcagattgtgaaaatctgtggggaatgcaaggagtattctgggatccaggaaggaaggagagtttgccctgatggaaagaggactagctttagtgaaaaagttctgggtttgggtccctgggacaaaaatttaatgtctctgaaattcctgatcagagaagggaggattagaagtaa

SEQ ID NO: 439731 - DNA, 532 bp, Homo sapiens
ctggctttcaatgtgacaccatttgttgatcatctgcctaggtgtgaggtatggcagggtgggggttgaggggaatcagtctaagccttgtctacactagaatccttactctgaacccctgccatatgccagatactgagctaggggcacggcaacaaataaacatgtctagcttcttttttttttttttttttggtatacctgttttgtgcatgaaattgtgcagtgggttatgacagaaaaccaaaaaagcargaaaggaaatttagagttctattacgaagacaagacctgtggagcaatgatctggccacagagatgtagcacaggtaacttttgtgttggagggagaatttcagattgtgaaaatctgtggggaatgcaaggagtattctgggatccaggaaggaaggagagtttgccctgatggaaagaggactagctttagtgaaaaagttctgggtttgggtccctgggacaaaaatttaatgtctctgaaattcctgatcagagaagggaggattagaagtaa

SEQ ID NO: 439732 - DNA, 550 bp, Homo sapiens
gactatgtcaaatttaaaacttttgttcatcaaaggacacaatcaattgagtgaaaggtggcctacmgaataggagaaaatatttgcaaatcatgtatcagctgaggggttaatatctaacatatataaagaactactataactcaacaacaacaaaaaatcaaattactctaaaaatgagtgaaggacttgaatatacatttcttcaaagatgatatgcaaatgtccaataagcatatgtgaaaatgctagatatccctaatcatcagataaatgcaaaccaaaaccacaatgagatatcagttcacacccatttggatggctactataaaaacaaaacaaaacaaaacagaaaaataacaagtgttggcagggatatggagaagttagaataccatgcaaaaaatgctcaatgatggggggctatccctaacaaatactacaacatattctaaacgctctaaaataaacatagcatggcacatggatagacagactgagcaatgaaacaataaagtacataaatagattgttgaaatttggcaaatga

SEQ ID NO: 439733 - DNA, 550 bp, Homo sapiens
gactatgtcaaatttaaaacttttgttcatcaaaggacacaatcaattgagtgaaaggtggcctaccgaataggagaaaatatttgcaaatcatgtatcagctgaggggttaatatctaacatatataaagaactactataactcaacaacaacaaaaaatcaaattactctaaaaatgagtgaaggacttgaatatacatttcttcaaagatgatatgcaaatgtccaataagcatatgtgaaaatgctagatatccctaatcatcagataaatgcaaaccaaaaccacaatgagatatcagttcacayccatttggatggctactataaaaacaaaacaaaacaaaacagaaaaataacaagtgttggcagggatatggagaagttagaataccatgcaaaaaatgctcaatgatggggggctatccctaacaaatactacaacatattctaaacgctctaaaataaacatagcatggcacatggatagacagactgagcaatgaaacaataaagtacataaatagattgttgaaatttggcaaatga

SEQ ID NO: 439734 - DNA, 573 bp, Homo sapiens
aggcgactggtccttgcagatgtgacgacaaggtcacatatccagtttcgcaagcagatgttcattcagccctatttcaccagcactttgtcatttggtgagagcagacctcatgggaacagactggagcaacacaaaggatggacataaaaaaatcttgcagagaacctgattgcttttatgtattcaggaagaaggggatgggggtagggagggtggcaaggaragaaatgtgcagagcagaatttcatgaggtttttttttttttttctggtttattcaaagattattatgtgttggatacagtaaatcatctatacacccacttccaggaggtaaatcttcagaactccatgtgtgggtagctctgcatttaacagctgccatacagtagctatttgttctgcacttagagacccttatctgtgcatttgttttaagttattgtcaactctcctgttgttcctctattgttgttctcctggttctcattactattacaagggtagctaaaaatctgaactactgagtgatttaaactgacaccatgagttgtaacggtagatgaggggc

SEQ ID NO: 439735 - DNA, 619 bp, Homo sapiens
tgtttccactcaggacctccatctcaaccctgtctgcttctcttcacttgcatctggtatgtcctttccaggaagccaggctcagggtccattcttctttctcacctcctcgtccaaggctgatattaaactcactcatgcccagaacatgcctctgacctatttcctattgcaggcagcgcacatttattaagtttcttttttctttctttcttttttttttttttctgaaacagagtctcacccaggctggagtgcagtggcrccatctcggctctctgcaagctctgcctcccaggttcacgccattcgccagcctcagcctcccgagtagctgggactacaggcgcccaccaccatgccctgctaatttttttgtatttttagtatagacgggatttcactgtgttagccaggatggtctcgatttcctgacctcgtgatccacccacctcagccgcccaaagggctgggattacaggcgtgagccactgcacccagcttactaaagtttcttatgtgatttccccaatttttcctttttgagcaaacacacttgagagatctcagattctccttctgtatcagagtgcagcattcctggcaggttggagactct

SEQ ID NO: 439736 - DNA, 556 bp, Homo sapiens
ttaagcagctaagattatccctgtttaaccagtaacaaagctgaagctcagaaagctaaagtgaggtgctcggtatcagtgttagtaagtgtctgcgtggctttgtatcactctggaagcagagtgcttccacactgytgactgccttgatatctcccattgctggcccatcccttagacaagggaggacttccaggtccttcgagtagagtgattaagaacttaagctctggagtcagattgcttgggttcgaatcttagctccacaacttgacatggccaatatggcagagggtgaagggcagggctgcccccctgccatagacttgggcaagagatgcccctgccctgagctctgggctttaaaaggagcttctctagccctcctcagccccactcctcttctggataagcaactcttgcatctaggggttgctctcacctggaaccctacttttcattctagatgaagatcatattccaggtacctggaataccagggtttcctgtcccagtgcccctgaacccacttccagggcctctgtgggcctcttcc

SEQ ID NO: 439737 - DNA, 556 bp, Homo sapiens
ttaagcagctaagattatccctgtttaaccagtaacaaagctgaagctcagaaagctaaagtgaggtgctcggtatcagtgttagtaagtgtctgcgtggctttgtatcactctggaagcagagtgcttccacactgttgactgccttgatrtctcccattgctggcccatcccttagacaagggaggacttccaggtccttcgagtagagtgattaagaacttaagctctggagtcagattgcttgggttcgaatcttagctccacaacttgacatggccaatatggcagagggtgaagggcagggctgcccccctgccatagacttgggcaagagatgcccctgccctgagctctgggctttaaaaggagcttctctagccctcctcagccccactcctcttctggataagcaactcttgcatctaggggttgctctcacctggaaccctacttttcattctagatgaagatcatattccaggtacctggaataccagggtttcctgtcccagtgcccctgaacccacttccagggcctctgtgggcctcttcc

SEQ ID NO: 439738 - DNA, 548 bp, Homo sapiens
ggcaatcagttgcctaaatttgggttctggttccagcagttcagttctcagggcctcaatttccttatttgtaaaatggacatcatatttcccacctcaaagagttgattgcagtaactcacggaatcctcacgraagtgtgccttaccccaacccacagagttggctcctgcccagtgggggcaagtgtgaacagccccttctgactcaagtccatcttcttatgaaatttgtaatcaggaacttgctattccaacccctctgcctggcagtccccctgagaaacaactcccagcgtagacaatgggcaaaacaaagggcaggaaggaaaggaagtggtctgtcagcacctggggctgctgtggagcgcagacccacctgagctctgcaggtaggcaatcctggctgggattctgcagacaggcctggagcagagccccccccaaccccttcccggcggcagcagcagcagcaatagcagcagcaaccctccttttttaagtcaaatgttgcctggaagtcattgcttcagcaattacctctgaaac

SEQ ID NO: 439739 - DNA, 608 bp, Homo sapiens
attagctcctgtctctgcccatagaggaggaacgaaatatgggattctatcttctaagtgtttctcyctcttcttgcaaacaaaaaggagaagagcatgctgatttgaataataaacaaagagtatttataaaagaaaaaatacaaataatcataaggaataaacaaatttttctttacttataaacaaaagaacaaattaaaacattaatatccctcccccatcccccttacttccttattgtgtgtttatggttgggtgggtcaggaccctggggaagaggttctcccattcactgctggtaagtccttcgagtggtaatttggcaatatgtatcagaagccttaagagttcgcacatgctttgatccagcagttccttctggaacagatcctaaagaaacagagatgtatgcagaaatttaattataagtgtatttaccaaaacattgttgatggtagtgaaaaagcaaaagcaacttaaatgtctgacgattgagctggttatatatcatagtggatttctagggcagtcattaaaaaataatgttgtggaataatatttaatggcatggaaagatgtacatgataaagtattaagtgagaaaa

SEQ ID NO: 439740 - DNA, 608 bp, Homo sapiens
attagctcctgtctctgcccatagaggaggaacgaaatatgggattctatcttctaagtgtttctccctcttcttgcaaacaaaaaggagaagagcatgctgatttgaataataaacaaagagtatttataaaagaaaaaatacaaataatcataaggaataaacaaatttttctttacttataaacaaaagaacaaattaaaacattaatatccctcccccatcccccttacttccttattgtgtgtttatggttgggtgggtcaggaccctggggaagaggttctcccattcactgctggtaagtccttcgagtggtaatttggcaatatgtatcagaagccttaagagttcgcacatgctttgatccagcagttccttctggaacagatcctaaagaaacagagatgtatgcagaaatttaattataagtgtatttaccaaaacattgttgatggtagtgaaaaagcaaaagcaacttaaatgtctgacgattgagctggttatatatcatagtggatttctagggcagtcattaaaaaataatgttgtggaataatatttaatggcatggaaagatgyacatgataaagtattaagtgagaaaa

SEQ ID NO: 439741 - DNA, 584 bp, Homo sapiens
ggagtggaagcgcggccacaacgaggcatgcataagattctgcagaaaccacgttctcccgcttcacagcggtctgctcttttcaggagagcctgggaaaacttctgactgtgcaatttgcttaaaaacaacagagaaacatcatagaagaggatcaattcctgaccatgcatttgaaattagacacttacaggcattccctgcagagtgctctccactggggcccagtggaagcagcatcacccatcagcsgctgggggtggctggtgccaccaggtcaggcctggagcggggcaggagtctcctcaggctcgatgctcttgacctgctgctggtgccaagagttagaagcaaagcacccaccacctcacagtttcctcattcattaattcattcattcatgtattcaacatatgttaattgtcactttctgttatttactggctgccaaacagtacagatagatagcttgggctgggggccgccctgagagctggaagaattgattctgccaagactgttgctcttgtactccatctgtggatcttatccctccatccatcctctgttctaagtttgactca

SEQ ID NO: 439742 - DNA, 584 bp, Homo sapiens
ggagtggaagcgcggccacaacgaggcatgcataagattctgcagaaaccacgttctcccgcttcacagcggtctgctcttttcaggagagcctgggaaaacttctgactgtgcaatttgcttaaaaacaacagagaaacatcatagaagaggatcaattcctgaccatgcatttgaaattagacacttacaggcattccctgcagagtgctctccactggggcccagtggaagcagcatcacccatcagccgctgggggtggctggtgccaccaggtcaggcctggagcggggcaggagtctcctcaggctcgatgctcttgacctgctgctggtgccaagagttagaagcaaagcacccaccacctcacagtttcctcattcattmattcattcattcatgtattcaacatatgttaattgtcactttctgttatttactggctgccaaacagtacagatagatagcttgggctgggggccgccctgagagctggaagaattgattctgccaagactgttgctcttgtactccatctgtggatcttatccctccatccatcctctgttctaagtttgactca

SEQ ID NO: 439743 - DNA, 584 bp, Homo sapiens
ggagtggaagcgcggccacaacgaggcatgcataagattctgcagaaaccacgttctcccgcttcacagcggtctgctcttttcaggagagcctgggaaaacttctgactgtgcaatttgcttaaaaacaacagagaaacatcatagaagaggatcaattcctgaccatgcatttgaaattagacacttacaggcattccctgcagagtgctctccactggggcccagtggaagcagcatcacccatcagccgctgggggtggctggtgccaccaggtcaggcctggagcggggcaggagtctcctcaggctcgatgctcttgacctgctgctggtgccaagagttagaagcaaagcacccaccacctcacagtttcctcattcattaattcattcattcatgtattcaacatatgttaattgtcacwttctgttatttactggctgccaaacagtacagatagatagcttgggctgggggccgccctgagagctggaagaattgattctgccaagactgttgctcttgtactccatctgtggatcttatccctccatccatcctctgttctaagtttgactca

SEQ ID NO: 439744 - DNA, 584 bp, Homo sapiens
ggagtggaagcgcggccacaacgaggcatgcataagattctgcagaaaccacgttctcccgcttcacagcggtctgctcttttcaggagagcctgggaaaacttctgactgtgcaatttgcttaaaaacaacagagaaacatcatagaagaggatcaattcctgaccatgcatttgaaattagacacttacaggcattccctgcagagtgctctccactggggcccagtggaagcagcatcacccatcagccgctgggggtggctggtgccaccaggtcaggcctggagcggggcaggagtctcctcaggctcgatgctcttgacctgctgctggtgccaagagttagaagcaaagcacccaccacctcacagtttcctcattcattaattcattcattcatgtattcaacatatgttaattgtcactttctgttatttactggctgccaaacagtacagatagatagcttgggctgggggcygccctgagagctggaagaattgattctgccaagactgttgctcttgtactccatctgtggatcttatccctccatccatcctctgttctaagtttgactca

SEQ ID NO: 439745 - DNA, 553 bp, Homo sapiens
tgatctctaggggactttccagggctgaaagtctgattttcttacttttccaccattaggagcacaggagggtagaatcccatgaaatgtaagggaaggcttagaattctggggaaaatgtaagagtagtagctgtattcataataacaataatagtaactaccccttcccataagttacttcatctctttagagctctagaattaggcagacctggattcaaagccctattgtgtcccccactagctgtgtgatgttgggcaagttatctaacytctatgagcttcagtttcctcccatgaaataggcagaagccctgcgattcggggatctggcaatgtagacagttggtgtctacgtagcataggtgctggtatatggggtgacacccagcctagggcatggcacgaaggaagcactcatggggcttggcgcatagtgggagcttgcccagtgcagggcctggctcttgcgtgctcaggaaatgtttgctgaatggaatttcagtggaatggaagttaagttagaacactgggagcagcaatacatgttg

SEQ ID NO: 439746 - DNA, 553 bp, Homo sapiens
tgatctctaggggactttccagggctgaaagtctgattttcttacttttccaccattaggagcacaggagggtagaatcccatgaaatgtaagggaaggcttagaattctggggaaaatgtaagagtagtagctgtattcataataacaataatagtaactaccccttcccataagttacttcatctctttagagctctagaattaggcagacctggattcaaagccctattgtgtcccccactagctgtgtgatgttgggcaagttatctaacttctatgagcttcagtttcctcccatgaaataggcagaagccctgcgattcggggatctggcaaygtagacagttggtgtctacgtagcataggtgctggtatatggggtgacacccagcctagggcatggcacgaaggaagcactcatggggcttggcgcatagtgggagcttgcccagtgcagggcctggctcttgcgtgctcaggaaatgtttgctgaatggaatttcagtggaatggaagttaagttagaacactgggagcagcaatacatgttg

SEQ ID NO: 439747 - DNA, 553 bp, Homo sapiens
tgatctctaggggactttccagggctgaaagtctgattttcttacttttccaccattaggagcacaggagggtagaatcccatgaaatgtaagggaaggcttagaattctggggaaaatgtaagagtagtagctgtattcataataacaataatagtaactaccccttcccataagttacttcatctctttagagctctagaattaggcagacctggattcaaagccctattgtgtcccccactagctgtgtgatgttgggcaagttatctaacttctatgagcttcagtttcctcccatgaaataggcagaagccctgcgattcggggatctggcaatgtagacagttggtgtctacgtagcataggtgctggtatatggggtgacacccagcctagggcatggcacgaaggaagcactcatggggcttggcrcatagtgggagcttgcccagtgcagggcctggctcttgcgtgctcaggaaatgtttgctgaatggaatttcagtggaatggaagttaagttagaacactgggagcagcaatacatgttg

SEQ ID NO: 439748 - DNA, 601 bp, Homo sapiens
ggatagtgcttcttgtttgtatgcatactgtatatcctatatatgcatcctgtatgtacttgtatatacaagtatatacacacacaagtagagggagcttaaaggaagaaaaaattctgaataggctttcagactgatgttattcaaccactccatgagatgtcagtatccccaaaaggttgcagatgggcctctcctgtcttcccagctcagagtctgttctcctttcaatgagatatgggctgggcacagagcttggcactactagctctgtgaggkaggaggttctctccctgctttacagatgaggtgactggggtctagagaagtaaaatggcttgcccaaggccatagtagcagctggtggagctgggatcaaatgtagctctacctcactctgaagcattctgtgattctgtgctgcttcctgggctttggctgcttcttatccgagaaacttgtgattcttctgggactgacatagaccctgcctcctgcagcaccacctccaagcatataccacttggaccctggccttttgcaggctgaatgtgggaagagcagctactgcaccctctgggaagtggctatgtggatctgg

SEQ ID NO: 439749 - DNA, 434 bp, Homo sapiens
ttcagaggacagaccaagactagaggaagattctgggtcaatagaacaactttcccattgacaaaaccatcataatggaatgaactctagaatggacataaacagagaatcaatgaaagatgatgaagaagaatttcycaagaacaaaaacaaatagattagaaggtataaaagaacagtttagagatatggaggctacactgagaagctaatattagtctaatggagcttcagaaaaggggcatggaaataattgttgaaatgcaacattgaaatgatcagaactgagaatttttcacttttaaagaaaataccgttaaatatatcaaaaattgattaaataaaaataattctatatctaaagacatattatagaaagcctgtaaagcattaaggaaaaaactaacatgttaaaagctgccagaagaaaaaac

SEQ ID NO: 439750 - DNA, 490 bp, Homo sapiens
ctgtgaccaaatgtgtgcaagattttcctcacacaccaagcaagcgatcagttctgcagcagacatcatctggaggtcctccaattcacttctgactctatctacctggagataatggccaaatcccamaagctgagggctcagtcccacaagaccgcccctccttcaggcaccagtcataagtccaggcctccagaacttccaaccaaccagctttaagttgggattcccacaagcccctctttgggtttgattaatttgctagagtggctcacagaactcagggaaacatgtttaccagtttattataaaggaaattacaaaggatacagatgaagagatgcatagtgcaagatatggaggaaggggcatgcatggagcttccatgacccccctgggagtgccactcttcaggaactcccacgtgtagacctatgtgaaagctctccaaatccattccttttggtttttatggaagcttcattacata

SEQ ID NO: 439751 - DNA, 557 bp, Homo sapiens
cagcacttggtactgcttattttaaaaaacttttcagccattccaatgggtgtgtgacggtatttccttgtggttttagtttacatttccctagtgactaataatgttgaacatctttttatatgttgttgttgttgttgttgtttttggcatctatatattattcggagaagtgtctgttcaaaactgttacccatttttaagttgttttctttttttattactgagttttaagaattctttacatattctttatcagatgtctgctttgcaaatatttttctctccatctatggtttccctcttcattcttagcagtgtctttcaaattttattgaagttcagttatgaattttttcttttatggatcatatttttagtttcatrtctatgaaagcttttcctagtccaaagctcccccacccttcttattctctaaaagttttatgaggcctatgatctattttgtgttaatttttttttctggacagtgtttcactcttgttgcccacactggagtgcaatggcaccatcttggctcaccgcaacttccacct

SEQ ID NO: 439752 - DNA, 557 bp, Homo sapiens
cagcacttggtactgcttattttaaaaaacttttcagccattccaatgggtgtgtgacggtatttccttgtggttttagtttacatttccctagtgactaataatgttgaacatctttttatatgttgttgttgttgttgttgtttttggcatctatatattattcggagaagtgtctgttcaaaactgttacccatttttaagttgttttctttttttattactgagttttaagaattctttacatattctttatcagatgtctgctttgcaaatatttttctctccatctatggtttccctcttcattcttagcagtgtctttcaaattttattgaagttcagttatgaattttttcttttatggatcatatttttagtttcatgtctmtgaaagcttttcctagtccaaagctcccccacccttcttattctctaaaagttttatgaggcctatgatctattttgtgttaatttttttttctggacagtgtttcactcttgttgcccacactggagtgcaatggcaccatcttggctcaccgcaacttccacct

SEQ ID NO: 439753 - DNA, 568 bp, Homo sapiens
tgtagcaggcactgagagctaataccagaaatactgaacagtctgagaaaacaacatctagtagcaaccagaagctgaaatttttcttgtggttcaaacgcttgcctgtcttcacttcagtttcctgattggttttctgcagyccacattccccctggcctccatttctaggtctcctggcttgctcacccttcctagggtctcagatacggacatctccattccttccaaatcccacacggagcactgtctgacacatctgcaccatgtgctgtgctcagcaggtaccttaaaacctgtggctcccatggcttttgtgggagtgagaagacaaatgctatggtttaatctttgatgtgatcttttccttttataatgtgctcccatggattcctttatttttgtttttcagagagccaataatcccttctggcttaccttgagaaggtgtcttttaactacaagcattttgttccttactgattaagatactgtgctctggagtaagtcagaactaagtttgcattctgactttccgtttattatccatgtagccctgagcaaattg

SEQ ID NO: 439754 - DNA, 431 bp, Homo sapiens
caaaataaaggaagggggacccaataaagctacttctgaaagcttatgatcccacccctcatttaaactatgtgatgttgtcattctatataaactctttccaagtaacttaactaaaacacactttgccattagtcttgagtgtgggcacagcattattcttttctaggccttaagggttccttctgcttaaaaataatgtctaactttcatgaagtttacccatgattaaagtgccttctgaatatatattatcttgttctattggtttcaatatacctattttctttaaaaagaaaaaaatgatgaaccatgagtgttaacaccagaaaaaccttaaggtrcatctgatctaatttcccactttaaagtgagaaaatcaaacagtgcctaggggtctgatttttccccaggctaattcgggttttcat

SEQ ID NO: 439755 - DNA, 431 bp, Homo sapiens
caaaataaaggaagggggacccaataaagctacttctgaaagcttatgatcccacccctcatttaaactatgtgatgttgtcattctatataaactctttccaagtaacttaactaaaacacactttgccattagtcttgagtgtgggcacagcattattcttttctaggccttaagggttccttctgcttaaaaataatgtctaactttcatgaagtttacccatgattaaagtgccttctgaatatatattatcttgttctattggtttcaatatacctattttctttaaaaagaaaaaaatgatgaaccatgagtgttaacaccagaaaaaccttaaggtgcatctgatctaatttcccactttaaagtgagaaaatcaaacagtgcctaggggtytgatttttccccaggctaattcgggttttcat

SEQ ID NO: 439756 - DNA, 470 bp, Homo sapiens
aagactaatatgttaatattttgaccgtcaatatttccttaaactagtctactcctttcatagctaayacatcaaagcatattaacttaggaaatgggattctcccaaacaaggaaacattgacggcaagggttcttaatcttttcacatcacatttccttcaaatgctttatacatcttcaagcagacaaataatagtattataatgattacgagaccgatcattactcttttgccaaaaaaaccagcgacaaaagactaacttagtggaccaacctttgtttcttcattatctgtacattgattctgtccttttatttcgtctttcttctaattctgcttctgcttcttgtttcctccctggatttgaactttatttacctaaactaccagttaggttaccttctcagaacctctaaggcagcagtttgagattgacaatggaagatttaagattagaaaaaagaaac

SEQ ID NO: 439757 - DNA, 470 bp, Homo sapiens
aagactaatatgttaatattttgaccgtcaatatttccttaaactagtctactcctttcatagctaatacatcaaagcatattaacttaggaaatgggattctcccaaacaaggaaacattgacggcaagggttcttaatcttttcacatcacatttccttcaaatgctttatacatcttcaagcagacaaataatagtattataatgattacgagaccgatcattactcttttgccaaaaaaaccagcgacaaaagactaacttagtggaccaacctttgtttcttcattatctgtacattgattctgtccttttatttcgtctttcttctaattctgcttctgcttcttrtttcctccctggatttgaactttatttacctaaactaccagttaggttaccttctcagaacctctaaggcagcagtttgagattgacaatggaagatttaagattagaaaaaagaaac

SEQ ID NO: 439758 - DNA, 579 bp, Homo sapiens
attttgtatgctgaggagtcatttttaaaataaatatattgcaaatgaattttcccagtcagtgaaaagtctgactgaaagctgtcaactgaaaaatcacacaatttataaatttagaagggagattttattttttataaatggttacagcctgcaaggtggccattccgacagacagggaggcataccctcctgctgaaacctgaaaagtacgtttccagggaggggaggggggaacagggatttatgttgatgtggtgggccacatatacatattcaacagggaataggaggagctctgaatattcatgaagggatcctgctgcatgcatgctgagtaaacatgcctgttacatgcaacccatgttcactttggrgtggagacaacatttaaatacattataattaggccctatgcttcaaaaggggaagcagggacacaaaggcagtcaagtgcacagcctctgtaaaccgtccagaacccgtccacagccagtgctctcttatcaaggggaagttactgaaatcagtcccttgtccaatcaaagctgtagttatggcttgtgtagggagggctca

SEQ ID NO: 439759 - DNA, 579 bp, Homo sapiens
attttgtatgctgaggagtcatttttaaaataaatatattgcaaatgaattttcccagtcagtgaaaagtctgactgaaagctgtcaactgaaaaatcacacaatttataaatttagaagggagattttattttttataaatggttacagcctgcaaggtggccattccgacagacagggaggcataccctcctgctgaaacctgaaaagtacgtttccagggaggggaggggggaacagggatttatgttgatgtggtgggccacatatacatattcaacagggaataggaggagctctgaatattcatgaagggatcctgctgcatgcatgctgagtaaacatgcctgttacatgcaacccatgttcactttggggtggagacaacatttaaatacattataattaggccctatgcttcaaaaggggaagcagggacacaaaggcagtcaagtgcacagcctctgtaaaccgtccagaacccgtccacagccagtgctctcttatcaaggggaagttactgaaatcagtcycttgtccaatcaaagctgtagttatggcttgtgtagggagggctca

SEQ ID NO: 439760 - DNA, 609 bp, Homo sapiens
ggaactcagtatttaagacttctctggggtctccttggcaaagaagccatctgtccagctagttgggtggcttcagattttaattttagttctgaaagcatttaatttgatgaaattttgccatattttttctttatttttaaagcccgtcatgttctataaaaatctttctactcaggatgtgaatgkattctcttaattttatctctctatgagttccagagtttcagttttaatttttaaattgatgacatctaaaattctactcctaaccaaaacatttttgggggtgactaaggacaactccaaaaatcttccataaatggaagtaagacttactccttaaagaactttctgggatcctgagctgcggggcacagtggctttagtgcacctctgctcttaagactattcagaaattgtctttgtgaacccatcaggctgtttcaaaatcagcaatttagggcttgcttgcaacacgcagttaagcagcagctgttttttggatctcatgagtgcctgcatgcatacttccctgggaattttctaaatttgaattctcatggtatttcaagtggcatagttgtctctttcttttgcctacagcca

SEQ ID NO: 439761 - DNA, 609 bp, Homo sapiens
ggaactcagtatttaagacttctctggggtctccttggcaaagaagccatctgtccagctagttgggtggcttcagattttaattttagttctgaaagcatttaatttgatgaaattttgccatattttttctttatttttaaagcccgtcatgttctataaaaatctttctactcaggatgtgaatgtattctcttaattttatctctctatgagttccagagtttcagttttaatttttaaattgatgacatctaaaattctactcctaaccaaaacatttttgggggtgactaaggacaactccaaaaatcttccataaatggaagtaagacttactccttaaagaactttctgggatcctgagctgcggggcacagtggctttagtgcacctctgctcttaagactattcagaaattgtctttgtgaacccatcaggctgtttcaaaatcagcaatttagggcttgcttgcaacacgcagttawgcagcagctgttttttggatctcatgagtgcctgcatgcatacttccctgggaattttctaaatttgaattctcatggtatttcaagtggcatagttgtctctttcttttgcctacagcca

SEQ ID NO: 439762 - DNA, 584 bp, Homo sapiens
tactcaattcatttcacaaaacaagttgttctctgtgtgtaagcctgttctctttctaatcatactatttcaacattctttcccacttatggtacttagtatgcaaatgttaaaaattcagagtaagataatgtttcctgctcatggcaaataggaaaaaccaatatttatttaatgttcctttacacacagattttcattttatcttctggtaactctgaacaaggtataattattttcagatacattttatttatgagaaaactgaagctcagatmattaaatgacttggctctgttgatatctgagtctagagagtgaaaccatggagatcttttagtagagccacctgtcaggaccaatatatcactgaggcatattgttttcacacttgtctccctgatactcttcccattctcctttggcccttcttcaaagcttcatttgagaccctggattttggcttccaaatcctgataaaaaataggaaagaaaaagtatggtgtaatatcagagcactgaactgggttctagtcccagccaggccacaaacttggttacgtcattgagcaagtcattcttac

SEQ ID NO: 439763 - DNA, 528 bp, Homo sapiens
ttaaaaatgtgtagcaccttgcccttcactctctcttcctcctgctccatccatgtaagatgtgtctgctttcccttcgccttctgccacgattgaaagtttcctgaggcctccccagaagctgctatgtttcctgtactgcctggagaattgtgagccaattaaacctcttttctttataaattacccagtctcrggtatttctttatggcaatgtgagaatggactaatacatgaatcaacacacacattttaaagcataatttcatctcttccaagatctacattttcttctaagttggccacatctcccgtaacccaatcctttgggtcactctgccttcctttctaaattacaggcagtttgacctggtggttaagaacagtgactcagagccaggcattaggttggaatctcagctctccacctacccaccctagggcctcgaggatgttaagactctactcacatcagtttcatcaattgtaacatggggataataattgtatctattctatcagatgtca

SEQ ID NO: 439764 - DNA, 528 bp, Homo sapiens
ttaaaaatgtgtagcaccttgcccttcactctctcttcctcctgctccatccatgtaagatgtgtctgctttcccttcgccttctgccacgattgaaagtttcctgaggcctccccagaagctgctatgtttcctgtactgcctggagaattgtgagccaattaaacctcttttctttataaattacccagtctcgggtatttctttatggcaatgtgrgaatggactaatacatgaatcaacacacacattttaaagcataatttcatctcttccaagatctacattttcttctaagttggccacatctcccgtaacccaatcctttgggtcactctgccttcctttctaaattacaggcagtttgacctggtggttaagaacagtgactcagagccaggcattaggttggaatctcagctctccacctacccaccctagggcctcgaggatgttaagactctactcacatcagtttcatcaattgtaacatggggataataattgtatctattctatcagatgtca

SEQ ID NO: 439765 - DNA, 528 bp, Homo sapiens
ttaaaaatgtgtagcaccttgcccttcactctctcttcctcctgctccatccatgtaagatgtgtctgctttcccttcgccttctgccacgattgaaagtttcctgaggcctccccagaagctgctatgtttcctgtactgcctggagaattgtgagccaattaaacctcttttctttataaattacccagtctcgggtatttctttatggcaatgtgagaatggactaatacatgaawcaacacacacattttaaagcataatttcatctcttccaagatctacattttcttctaagttggccacatctcccgtaacccaatcctttgggtcactctgccttcctttctaaattacaggcagtttgacctggtggttaagaacagtgactcagagccaggcattaggttggaatctcagctctccacctacccaccctagggcctcgaggatgttaagactctactcacatcagtttcatcaattgtaacatggggataataattgtatctattctatcagatgtca

SEQ ID NO: 439766 - DNA, 592 bp, Homo sapiens
tacctttagattgttgctgaattaccaaggaatatcttgcatggtgagaaaaatcaaactctagccctcaaccctaaatctcctagacttgaggagtttgttccttggctttgtccccaggtcatagtccctcaataaacacttgttgagtttggggtataaccataaactatcaatgaattaagcaactgagctaggagccttgagcatttctataaggaacaacttatagggcctggtaattctkgtcctggttacattattttatgtaaaagtctgtaagttctatccataattctctactgtgtaagaaatgagctgaattaagcctcttatctatccctctactttatcatctctaaggtgaaaacaagttaccattgtagaatggtgtacaatgtctttctgagatgccctcttaaatcttggcaagacctaccaatacaatattagcatcttcagtacacatttcagacaattttaggtcagaatctctctcattcttttcaaagaagaaagtaagtaaattgttggcatgaaattttagaacaaaaataggattgtctgatttctagaaaataatcatttgttg

SEQ ID NO: 439767 - DNA, 574 bp, Homo sapiens
gcagtctctatctgggggaagaggcaataatgacaggtttttacaatctgtccagccagcayagaacataaatcggcattacctcattctaaaaaggccgagtccaaccaggctcagtccctctgccggggcaggggctgtactttcctggggcaactttacagcatctggatattactgtgacgaatgacaggatttaagtgacgtgaccaacctgcatcttggtaggaacgttttaacttcttagcttagccttgtgtcctggtttgtttcctaaaccccggtgtttgctattacctctctgatttctgctttcactttttctaaaagtccaagactgcatttttggagagttcctattggagagttagctggaattttagattgaacatcttgccccaaagtgttagacatcatccttgactagtgtgaccagtgccagctctcgcttgcattgtcctctgttgtgacagctagcagatgcattgccttgctgtccctaaccctgctcccctttccaggcctggactggcaccttcacacgacctagcagggtgtcattgtttaaattgca

SEQ ID NO: 439768 - DNA, 591 bp, Homo sapiens
taaaaatcactgattcttgctttattacaggcctcttaaattgagaccttggaaaagtattttcttgcaagagctgatgtttcctattattattattattaatttattttttaagacaaggtctcactgtgtcacccagactggagtgcagtggcactatcttggctcattgcagtcttgacctccctgggctcaagggattctcccacctcagcctcctgagtagatgggactacaggtgtgcaccaccatgcctggctaattttttaatcttttgtagagatgaggtctcactctcttgcccaggctggtctcaaacttatgggctcaaacaatcctcccaccctggcctcccaaagtgctgggattacaggtgtgagccactgcacctgcctgtgatttgtttcctttttatgatatctatgtgagcatcatattttcttttyatcctgcctgctagaaagcgcagagctaggtttggcactcaaatgatgtagtttcctttagctaagtgctttgatgaagtttctcttttgcatttttttttccagaacacatctcatagttgaagagatggtaataattacagta

SEQ ID NO: 439769 - DNA, 598 bp, Homo sapiens
aattcactttgttagtattttgtggagaattttggattaatgttcttttgagttattgctctgtagttatcttttttgatgtgtcttaatctggattttgtgtcagaataatattgacctcatagaaagagtttggaaatattccccccttctctattttttggaatagtttgagtaggatttgtattgcttcttctttaaatgtttggtaaaattcagcagtaaagctactgagtccttggcttttctttgctcaaagacattttattatggcttcaatcttgttrcttgtttttgatctgttcaggttttggttttcttcatggtccaatcttgttagattgtatgtatctaggaatttattcatttctgaaggttttacaacttatagatatatagttgcttacagtagtctctaatgatatgttgaattagttacaaagtatcctttcttatctctgattttatttactctattcttatctcttttttccatagttagtctggctaaagtttggtcaattgtatttaccttttcaaaagccatcttttgttttgttgatcttttgtattttttagcctcaattttatttatttc

SEQ ID NO: 439770 - DNA, 619 bp, Homo sapiens
gttacaaagtatcctttcttatctctgattttatttactctattcttatctcttttttccatagttagtctggctaaagtttggtcaattgtatttaccttttcaaaagccatcttttrttttgttgatcttttgtattttttagcctcaattttatttatttctgcactgaactttatttattttcttctactaatttgggagttttgtttgtttgttttctaatttttaagatgccatattttgttgattatttgaagtttttttgactttttctatgtaggcacttaataactattaactttccagttagttttgctttcaccgtattctgtatcccataggttttggtaccctctgctttcattatcatttgttttaagaacatgttaaaatttccttcttaatttcttcattgactcaattgtcatctaggagcatattatttaatttccatgtgtttgtacagtttcctaacttcctcttgtatactgccctctagttttattccattgtgttcagagaagatacttaatataaattaagtgtttttaaattttttaagacttattttgtggcctaacacaaggtctgtcttgagagtgatccatatgttgaa

SEQ ID NO: 439771 - DNA, 599 bp, Homo sapiens
ctcctccttgctttctaccataattgtgaggtttccccacccatgtgatactgtaagtccaattaaacctcttccttttgtaaattgcctagtctcaggtatgtctttatcaacagcatgaaaaaggactaatacagcttttcagctgtttagatggacttaggtgtagtaatctaagtttatggtctgtgaagctgtatctgcattagggggcactccaagctcagtaatgctggctcttgcagacttgtagaggtactgctctggtggtcctgcataatatctagaagaattacctggattatcttgttctcttcccttactttctctcaaacagagtctctatctctctctctctgtgctgagctgcctggagctggaagagaagcagcctaaatacccccatggtcaccaycagtgggactgcagtgggtcagatctgaagccagcatgatactggttctcatccaaggcctatggtaactactgcctatgttcacttaaggccctggtgctctacaatcagcaggtggtaaacccagccagtcttgtgtccttctcttcagggcaatgagtcccccccacccagacctgggcag

SEQ ID NO: 439772 - DNA, 599 bp, Homo sapiens
ctcctccttgctttctaccataattgtgaggtttccccacccatgtgatactgtaagtccaattaaacctcttccttttgtaaattgcctagtctcaggtatgtctttatcaacagcatgaaaaaggactaatacagcttttcagctgtttagatggacttaggtgtagtaatctaagtttatggtctgtgaagctgtatctgcattagggggcactccaagctcagtaatgctggctcttgcagacttgtagaggtactgctctggtggtcctgcataatatctagaagaattacctggattatcttgttctcttcccttactttctctcaaacagagtctctatctctctctctctgtgctgagctgcctggagctggaagagaagcagcctaaatacccccatggtcaccaccagtgggactgcagtgggtcagatctgaagccagcatgatactggttctcatccaaggcctatggtaactactgcctatgttcacttaaggccctggtgctctacaatcagcaggtggtaaacccagccagtcttgtgtccttctcttcagggcaatragtcccccccacccagacctgggcag

SEQ ID NO: 439773 - DNA, 510 bp, Homo sapiens
tatttcactgctgattattcagggcacaatggctctttaatcagcaggggtaaatcccactgggactgctttcccttcatggcaaaaggttcttttttggcccagggtgtgtgaagaaatgtcatcaggagctaggtcctggaatgggagcctcagggaaactgcccagtccccatcctaytatggttgagttgatatccaagttgcaagacaaagtcttctttactcttcattctcctcttctcaaacagagaggatgaggctcctggagctgtgagttgcactgtctggggttgagggaggggtggtgcaagcactactttgaccatcctggctggtgtctcactaggtcacatgtcccccaagtccactggctccaagttcaccacagcactagaatgtttccaagaattgcagtccttgtgggcgtgactacctttcaagtttatttactttagcccatggtggtgaggcttgctggaactcaggttccaaccactgggatgggca

SEQ ID NO: 439774 - DNA, 510 bp, Homo sapiens
tatttcactgctgattattcagggcacaatggctctttaatcagcaggggtaaatcccactgggactgctttcccttcatggcaaaaggttcttttttggcccagggtgtgtgaagaaatgtcatcaggagctaggtcctggaatgggagcctcagggaaactgcccagtccccatcctactatggttgagttgatatccaagttgcaagacaaagtcttctttactcttcattctcctcttctcaaacagmgaggatgaggctcctggagctgtgagttgcactgtctggggttgagggaggggtggtgcaagcactactttgaccatcctggctggtgtctcactaggtcacatgtcccccaagtccactggctccaagttcaccacagcactagaatgtttccaagaattgcagtccttgtgggcgtgactacctttcaagtttatttactttagcccatggtggtgaggcttgctggaactcaggttccaaccactgggatgggca

SEQ ID NO: 439775 - DNA, 290 bp, Homo sapiens
gcattaagtttcaatccaaactcccacaattatgacactctctttcctgcaagcacatagattctttctccaggccaagctkcagcttttaggagacgaagatggggtggcattggcaattcaatactgtctttcttacttcttcagcacctctttctgtgatatgtagttaaaactaggtactttcatcactcacctgaattttggttcttctgaaggtgcatgtttgtgcagatagttgttcacctggtgttcttgtagggagggcaatcagtaaaagttctattcag

SEQ ID NO: 439776 - DNA, 596 bp, Homo sapiens
ggcagcacattcagttactatataaacatcaggggaaagtgaacaacagtacaactgtctgatctaagcctctagagtctacaattaagctccaagcactaataattttcactacacagttagggatgttaaatttagagaagacattgggtaacacacctgtctgaactagctaccctctgagaagaccgagtatttttttcttatastctgaattattgtttcaattgtagaatttgggcaagcttcccagaatagactattcttgtacatgaatttgacttctgttgaatccaaagaatgactgtgtctactcaatctgttcatccatccatggtaggcagattgtaagatggctattgagattccaaaaacccactgtaccagcactctctccaagttattcagccaaatatcaatccatgtaccaactctgaagggattttgaagagataattatggtcccaaatcagttgaccttaaaacagggagattatcttggtgggcctgacgtaaccacatgagcctttagtttcctttacctgttcatagagcaaatcagagatttgaagcatgaggaaaattctaaacaaggg

SEQ ID NO: 439777 - DNA, 596 bp, Homo sapiens
ggcagcacattcagttactatataaacatcaggggaaagtgaacaacagtacaactgtctgatctaagcctctagagtctacaattaagctccaagcactaataattttcactacacagttagggatgttaaatttagagaagacattgggtaacacacctgtctgaactagctaccctctgagaagaccgagtatttttttcttatagtctgaattattgtttcaattgtagaatttgggcaagcttcccagaatagactattcttgtacatgaatttgacttctgttgaatccaaagaatgactgygtctactcaatctgttcatccatccatggtaggcagattgtaagatggctattgagattccaaaaacccactgtaccagcactctctccaagttattcagccaaatatcaatccatgtaccaactctgaagggattttgaagagataattatggtcccaaatcagttgaccttaaaacagggagattatcttggtgggcctgacgtaaccacatgagcctttagtttcctttacctgttcatagagcaaatcagagatttgaagcatgaggaaaattctaaacaaggg

SEQ ID NO: 439778 - DNA, 591 bp, Homo sapiens
aacacaacaactgcaaggcattgaattcagtgctcttcttttttttttttttttgagtacttgatgatgatttattgaaaattataattgttgagacaaatattgaaaataattttataaggtaataaaagccaatttttaatttatatttaatcttctttaaatgaataaaaataggtttatttgttatttatttttattttattttaaattcaggggtacatatgcaggatgagcaggtttgttacataggtaaacatgtgtcatggtagtttgctaaatagatcatttcaccacctaagtattaagcccagaatccatgagctattcttcctgatgctctccctcctccccccttcaccctctgacaggccccagtgtgtgttgctccctttgtgtccatgtattcccatcattcagctcctacttatcagtgagaacatgtgatatttggttttctgttcctgcatcagttgcctgagaatgatgacctccagttccatccttgtccctgcaaaggacacgatcacacttrctgacttgtggatgttataccaaccttgcatcctggggctgaagcctacttgattg

SEQ ID NO: 439779 - DNA, 599 bp, Homo sapiens
tggggtcagtgattatatcccttttatcatttctaactgtgtttatttgaatcttctctctttttttattagtctagctatctatctatctagttgattgattatttcaaaaaaaccagctcytggattcattgatgctttaaggggatttttctgtctgtatctctttgacttcaactctgatcttggttatttcttggcttctgctagctttggagcttgtatgctcttgattctctagttcttttagttttgttgttagattaacttgagatctttctaggttttgatgtgggcatttagtgctataaatttccttcttaacacttctttagcttcatcccagaaatgctaatccattgtatctttgttctcattagtttcaaataactttttaatttctgccttaatttcattatttactcaagagtccgtcagcagtaggtttttcagtttctatataatggtgtggttttgagttaatttctcaatcttgagttctaatttggttatgctgtggtcttaaagactgttacgatttcagttattttgcatttgctgaggaatgtttccttccaactatgcaatcaattttagag

SEQ ID NO: 439780 - DNA, 599 bp, Homo sapiens
tggggtcagtgattatatcccttttatcatttctaactgtgtttatttgaatcttctctctttttttattagtctagctatctatctatctagttgattgattatttcaaaaaaaccagctcctggattcattgatgctttaaggggatttttctgtctgtatctctttgacttcaactctgatcttggttatttcttggcttctgctagctttggagcttgtatgctcttgattctctagttcttttagttttgttgttagattaacttgagatctttctaggttttgatgtgggcatttagtgctataaatttccttcttaacacttctttagctkcatcccagaaatgctaatccattgtatctttgttctcattagtttcaaataactttttaatttctgccttaatttcattatttactcaagagtccgtcagcagtaggtttttcagtttctatataatggtgtggttttgagttaatttctcaatcttgagttctaatttggttatgctgtggtcttaaagactgttacgatttcagttattttgcatttgctgaggaatgtttccttccaactatgcaatcaattttagag

SEQ ID NO: 439781 - DNA, 599 bp, Homo sapiens
tggggtcagtgattatatcccttttatcatttctaactgtgtttatttgaatcttctctctttttttattagtctagctatctatctatctagttgattgattatttcaaaaaaaccagctcctggattcattgatgctttaaggggatttttctgtctgtatctctttgacttcaactctgatcttggttatttcttggcttctgctagctttggagcttgtatgctcttgattctctagttcttttagttttgttgttagattaacttgagatctttctaggttttgatgtgggcatttagtgctataaatttccttcttaacacttctttagcttcatcccagaaatgctaatccattgyatctttgttctcattagtttcaaataactttttaatttctgccttaatttcattatttactcaagagtccgtcagcagtaggtttttcagtttctatataatggtgtggttttgagttaatttctcaatcttgagttctaatttggttatgctgtggtcttaaagactgttacgatttcagttattttgcatttgctgaggaatgtttccttccaactatgcaatcaattttagag

SEQ ID NO: 439782 - DNA, 599 bp, Homo sapiens
tggggtcagtgattatatcccttttatcatttctaactgtgtttatttgaatcttctctctttttttattagtctagctatctatctatctagttgattgattatttcaaaaaaaccagctcctggattcattgatgctttaaggggatttttctgtctgtatctctttgacttcaactctgatcttggttatttcttggcttctgctagctttggagcttgtatgctcttgattctctagttcttttagttttgttgttagattaacttgagatctttctaggttttgatgtgggcatttagtgctataaatttccttcttaacacttctttagcttcatcccagaaatgctaatccattgtatctttgttctcattagtttcaaataactttttaatttctgccttaatttcattatttactcaagagtccgtcagcagtaggtttttcagtttctatataatggtgtggttttgagttaatttctcaatcttgagttctaatttggttatgctgtggtctkaaagactgttacgatttcagttattttgcatttgctgaggaatgtttccttccaactatgcaatcaattttagag

SEQ ID NO: 439783 - DNA, 565 bp, Homo sapiens
gacacccatggagggaggatttaaaccagccctagccagcggggaattgctgatccmagcagtctacacgtgagtgcccacaaacctcaccacctagtgccagagtgctctggatatttaaggaaacttgaaaggaagtctaagccataaggactgcaatttgtaggtgagtcctaggggcaaactaggcccagagacagtggagtggctgggggcacgcaacatactgaaataccagctactgcagccaagagtttccttccttccacttgaagaaaggagaaggaagagtggggagaactttgtcttgcagcttggataccatttcagccacagcaggatagggcactagtaagagtaattaggctgccattctaggccttagctcccagacaacatctctagaataaccctgaaccggaagggaacctgctgccttgaagaaaggacccagttttgtcagcatttatcacgtgctaactgaagagcccttgggccctgaataaaccaacagtgaaacccagctactacatcatggtccttgggtaagcctctgagaacttct

SEQ ID NO: 439784 - DNA, 580 bp, Homo sapiens
ttctagcaaacatttaaagacaaactaatatcagtcctactcaaactattctgaaaattagagaagagactacttccaaactcattctacaagttcagtattaccttcgtattaaaactagacaaggacacataaaaaacatacaggccaaatatctctgatgactatttatgcagaaattctcaacaaaatactagtaaacaaaactcarcaacacattgtaaaggtcatttattattacgaagtgggatttatccttgtgattcaagaacagttcaacatgtgcaactcaatcaacatgatacgccatatcaacagaatgaggaataaaaaccttatcatcattttgcttgatgataaaaaagcatttggtaaaattcaacatcccttcataataaaaaccctcaaaaatctgggtatagaaggaatatacccacaactagtatcatgaaagtaatttaagacagaaccacagctagcattatattgaatggggaaaaactgaaagcctttcttctaagatccataacatggcaagttgcccactttcactaccactgttattcaaactagtgtgaca

SEQ ID NO: 439785 - DNA, 590 bp, Homo sapiens
aattttttaaaattatagacaggggtgattattcattagaaatacaaagagaatatttatttaacatgtgtaattaaattagatgatatctattcccttctagttttaaaactctatgagtccgatgtttacctatgcttataggaatttaagaccatataaatttctgaattacttaatggtataacgctactgtgtcatgtgtcataccaccatgtagatatgctgtaacatattgatgcgatgattatttactcctcattaacaacttgtggtgaaaaaatgataagtgaagtgggttctggtttytactctgctgtcaacctagcaatgttaccttaggtaaaaatttgatatgtttagacaacagtttttacatccatatacatggtgggtggaaaaacataccaattagtatataagaggacttattagggagacttttgaggtgaagaggttagtaaaattttagcaattacttcatgaacaaaacatcgtggacctggaaaaagaatggaagacatggaataaaggaaggtttcaccctttttcacttgcaactggcatggtctttaggtccctgagaagac

SEQ ID NO: 439786 - DNA, 648 bp, Homo sapiens
cagtttttacatccatatacatggtgggtggaaaaacataccaattagtatataagaggacttattagggagacttttgaggtgaagaggttagtaaaattttagcaattacttcatgaacaaaacatcgtggacctggaaaaagaatggaagacatggaataaaggaaggtttcaccctttttcacttgcaactggcatggtctttaggtccctgagaagacctgttgaaaacttctgatccagagcactctcacattttacagttgaaggaaccaatgactaragagtttaaaacacttgctaacattactgtagttatgacagtactgggtcatgactagaaacaaggtcatttatcatcataattacacgtttcttttcctatatgcctttatccttttttacaccaccccctcttcataaaacaactcatatgatttacatacagatttgccacataacattacaggatgctacatttagaaaggaaccgaggggtacttttactttatagatgagaaaagtaaagacaaaatttacacaaaaatataatgttctttttaagatacagcaaatatttgagtcccaggtgtcagtctgagtccaatgatcttttcacataccaccaaagtagccttatggagaa

SEQ ID NO: 439787 - DNA, 604 bp, Homo sapiens
cgtgactgtatatatattagcactctctttccaagagagaagctgacctccaatcaatataactcaaaaacagttttgactagaaaacaaggttaaagacaaattacaaacgaacaaaatctatgacacacctgtaatataacattatactctagttagtaaagatgtttcacatagaatttcatttagcaattgcctgggcacggtggctcatgcctgtaatcccagcactttgaaaggccaaggcgggtggatcacctaaggtcaggagttcaagaccagcctggacaacatggtgaaaccctgtctctaaaaaaattagcttggcatgatggcgggtgcctgtaatcccacctactggggaggctgaggtggaagaatcacttgaacccaggaggtggaggttgcagtgagctgtgatcatgccattgccctccagcctgggcgacagagcgagactctgtctcaaaaraaaagaaaaaaaaattcatttagcaattatgaaattaatttggatgcatgttagagttcatcaagtagttaaatgcattgtagatgatgggaaataggtttcttattgctagggaaataagttactttcaaa

SEQ ID NO: 439788 - DNA, 577 bp, Homo sapiens
tctgccaacagctaattctgttttccttctgagcaattgttttctctctgtttatttgcctggttttccaagagccttggcagtttatcttataccagttaatgctacatatgaagagcaactttgaataattcctacatagttgggtccttcttctgtgtgtactgacaaaattcttttttttaactagaaagtactgatttgtaattttggagagaaaaataaaataatttggcttactagagcgattagcatgtttaatttgaaaagcctggcaatctgtgatgatttagcacgacttttttagaaaatttccataaaaaaacaatgcaatttggattggagcaaactaatcactgctccaaatatatatatatatatatatatatatatatataaagtttatctttctgatatttatataaatgcactaaactttgagactcttatctagcacaaacagacttaacattatatatgtttagaggggcmttgttcaccatgattacaacttgattctgcactttcactttcacactttcactttctcagtgaactgcttttaaactatacatac

SEQ ID NO: 439789 - DNA, 620 bp, Homo sapiens
ccacattgtttcattctcactgctaaatagttatagtgagataaaawgtacattctcatctttgaattatatgtcttccaatgaaaagccaataatcacaggcaggctttaagcaatgggatacacatacatttttgaggaaaaataaaatttgttttttactcacttccacatatatggagcggttcaatattacactgtcatacttgatgattgatattgcagtttcttgattttgcaatactctgtgtaactcgataatgaatcttttgtgtgttctatatgtaacctcttttcaatgccaatataaatgactccttttcattactatcattaccttgcattatgggagtattattcttgtaggctgctgtttcctatgtctgttttaatgaaggtctgtcaatgaactgggaattgaatatttctgcctatcagttcacacagtcaaagagaaaatgctaaagaaaatgctaaagcattggcagcagaattttggtgagggtcacttagctacaagcagcttacaacaaaccctataatttcctttttcttcttctaatcctgctctacttctcttttaatcatctaattgtatctagagtagtactatgcaaaag

SEQ ID NO: 439790 - DNA, 606 bp, Homo sapiens
aacacactattttatttctatagcttaactttcaaatagtataaaagtgtattcctctgaaatgcatgtttgctttatttgtatccacaacattatcaagacattgataacttctctagatatgcttaaatcrcatcatataaagactttttttacttgttcttttacttttgctcacattcaatagctatatacagtaaatctcatctgtgtcagaaagtaagaaaattatacattaatgctatataataggtttatagttaaatttcacaaaggcatagtctttcattgttagctttccctttagcaatatttccctgtgattaagttagagatctgataaccttcttatgcagtatatgcccaatagcaatataaaactcaatatctgctgcattattttatagacttactccattttacatgtaaaatgaatacaaaataaatagataaaccaaatatgaaatataaaacatggacatttatcacttgcaaatatgaatggaaagaacaaaataaatagaaaacatttgtgatggcaatataagaatatggagaatagataaatccacaactttgtattttttatgtttagatgggctttgt

SEQ ID NO: 439791 - DNA, 606 bp, Homo sapiens
aacacactattttatttctatagcttaactttcaaatagtataaaagtgtattcctctgaaatgcatgtttgctttatttgtatccacaacattatcaagacattgataacttctctagatatgcttaaatcacatcatataaagactttttttacttgttcttttacttttgctcacattcaatagctatatacagtaaatctcatctgtgtcagaaagtaagaaaattatacattaatgctatataatrggtttatagttaaatttcacaaaggcatagtctttcattgttagctttccctttagcaatatttccctgtgattaagttagagatctgataaccttcttatgcagtatatgcccaatagcaatataaaactcaatatctgctgcattattttatagacttactccattttacatgtaaaatgaatacaaaataaatagataaaccaaatatgaaatataaaacatggacatttatcacttgcaaatatgaatggaaagaacaaaataaatagaaaacatttgtgatggcaatataagaatatggagaatagataaatccacaactttgtattttttatgtttagatgggctttgt

SEQ ID NO: 439792 - DNA, 643 bp, Homo sapiens
cctaaagactgcatcaaaaggttcctggaactaataaacttcaataaagtttcaggatacaaaattagtgtacaaaaatcagtagcatttctatataccagtattttcaagctgagagccaaagcaagaacacaatctcatttataatagcctcaaaacaaacaaataaacaaaaacctaggaatacatctaaaccaaaaaggtaaagtttctctacaaggaaatctacaaaaccttgctcaaagacattataaatgatacaaacaaatggaaaaacattccatgctcatggattggaagaatcaatataacatggtcatactgcccaaagcaatctrcagattcaacacgattcctatcaaactgctaacttcatttttcacagaactagaaaaaaaactattataaaattcatatagaactgaaaaagatcccaagtagctatcttaagctaaaagaacaaagccagagtcatcacattatctgacttcaagctatagtataatactatagtaaccaaaacagcatggtactagtacaaatacagacacataaatcagaatacagaacccagaaataaagctgcacacctacagccatctgatctttaagaaagtcggcaaaataagcagcagtaaggact

SEQ ID NO: 439793 - DNA, 551 bp, Homo sapiens
ggtcaaagcaggtcacagtgtattgtctagtccaggaggctaaatgatattttccagccattgtttcaggtggcataaataggacacagctatgaaagtcccaaagttatgtgagcacgtgggttttctgggaacacatggtttatgtgtgacctttagtgagtacatgaccattgcttctattctgaatttagcctcaaggactgactctttcagggtttacctatgacatgaggtcctgagaggaaggctgaagccagattatacaagccatagcaaggcttgaattttatgccaaactcaacaggaaattactgaaaggctttaagcaggggatgacatgggaacatgtgtattttttaaaaagattctatgaatgagtaaaaaattacgtatgcaggtaagaagaaaagatccaaagctctatcagtgaggagattatacaatagtgaaaacaaaacaatgatggtaggtagaacmaaaatggggaaagggaaaaaactacatgtatttggtactctattagaaaggtaatgtcaaaaagacttgcc

SEQ ID NO: 439794 - DNA, 555 bp, Homo sapiens
acatataaactctgttatgcaacttaataatataacttgaaaatttttgcaaattgcatataccgactttctcattcttcttttacattaattaaacttatttaaatcagttctctattgatattcatttaaaaattgtcaataacttgytattacaaaaatcctttaaataattcactctacacttgatatacataattttgtggagatactactatgcttgaagtatatattctcagaaattgaatttctgcggcaaaggaaatatggatttgtaattctgatagatactgctgaactttgttccataagtattgtgctcatatatataattaccagcattttttgaggcttcctgtttcccatacccatgccaacagaattgttattaaactctcaagtctttactgagcccttatgtatttggactttgcaattcacttatttagtatcttttcacatttaaaatttctcatatctcctgactgcaaagtggggtcatttcaatcacctctggaggtgtcatccacaggtggtggacgtggcagctggatc

SEQ ID NO: 439795 - DNA, 495 bp, Homo sapiens
atccataccacctaaagcagtctacagattaagtgcactccctatcaaaataccaatgatattcttcacagaaatagaaaaaatttatgtgaaaccacaaaagagccagaatagccataggtgttttaagcaaaaagcgcaaaactggaggagttgcattacctgacttaaaattatactgaagagctatagtaaccaaaaggtcgttttactrtcataaaagcagacccatagaccaatggaaccgaacggagaacccagaaacaaatccacacacctccagtgaactcatttccgcggaagtgccaagaacatacactggggaaaagacagtctctttcataactagtgctgggaaaactgtgtatccataggcagaagaatgaaactagaccccctatctcccaccatgtacaaaaataaaatcaaaatggattaaataattaagtataagacctcaaagtatggaaccactacaaaaaaaaaaatagcaaa

SEQ ID NO: 439796 - DNA, 684 bp, Homo sapiens
gctgttataggaaccttgtgttttcctctgggtgaggyaggaagtcagtttttaacagaaaagtgaaatgatctgacttacgtttttaaaagattacatgggttgttgaatggagaatagattgtaagagagcacaggcaaagtggagaggaaatttaggaagttgttgcaataatctgagtgagaaatgatttggaatagagtggtagttagctctacatgtagtggtaagaagtaatgtttatgaagtttcctaatgaaataaatgtgagttatgatgaaaagacagtcttgaaagaatggagttactgtatgctgagatagagaggatagcacaagaaatatattttgaagaaagtttaagatcaagagcacagtttccaatatgctatggttgagatacattgtccacttctaagcggagatgttcaataaccactctggacttcaggcataaggtctgagctgaagattccatcatgcatagatactatttcaaaccataagatgaacatgaaggccaagagttaaagtttggctctagtaaaataaagtttgtgaattgagccattagcgactccaacactgagagctccgggagatgtggagggaccagtaagcaacactgaaaaagaaaatccagagatagaaggagaaaatgaggctatcacaaagttttaaaag

SEQ ID NO: 439797 - DNA, 582 bp, Homo sapiens
aaagaattttagaggtaaataagtctctggtttcaggttttttcttttttcttttttgagcttgtcccttgtcgccaggatgttcaggtcccacattacttggaaggcttattcctaaggtcatgtttcatggagataaaatatgatacgtaaaaaagaaagataaaatacacacacgtacacacacacacacacacacacacacacacacacacacagagagaaaaagagagagactttcccagatttayagcaaaatggaaagcaaacctagaagctggttcaggctatgctactgcctcctcaattagagcagttctttggacaactattactctagcctttttggttgcatgttgacttacttgcaagaatatactattacaacattgtaagcaaaagcatggcagaacactaattattattattattcctattatgagcaatatcttctgccacaagttccccaggatccaaaccaaccactcaaccagtcaattaccaagggttttagatctgacaggttggttatctgggttttcatatcagccataagttaagttatattatttgatgtatctg

SEQ ID NO: 439798 - DNA, 605 bp, Homo sapiens
aatggggatggtgctaaaccattcactagaaatctgcccctgtgatccaatcaactcccaccaggtcccacctccaacactggggattacatttcaatatgagatttggggcaggacacacttccaaactataccagtcagtaagacaataagcacttatgtgtctatcacatcataggcactatcctgggaaaaactaaaaatataaacagaagacagattctgtcctatattcatcaagtgcgggtagagataaataaaaccaagtaagaacagaaaagtataattcactagttctacaaccgaggtgaataaaggacagtaagggcacaaaagagaacwgtaagttccacctgggaagctcaggaaatgatgcaaagatagggccatactatgaggtagacccagtgcagtgatatggtttggctctgtgtccccacccaaatctcatcttgaattgtaatcctcatgtgtcaagggagacaccagaggagataactggatcatgcggtggtttcccccatgctgttctcatgatagtgagtgaattctcatgagatctgatggttttacaagtgtttggtagttcctcatacattaattca

SEQ ID NO: 439799 - DNA, 605 bp, Homo sapiens
aatggggatggtgctaaaccattcactagaaatctgcccctgtgatccaatcaactcccaccaggtcccacctccaacactggggattacatttcaatatgagatttggggcaggacacacttccaaactataccagtcagtaagacaataagcacttatgtgtctatcacatcataggcactatcctgggaaaaactaaaaatataaacagaagacagattctgtcctatattcatcaagtgcgggtagagataaataaaaccaagtaagaacagaaaagtataattcactagttctacaaccgaggtgaataaaggacagtaagggcacaaaagagaacagtaagttccacctgggaagctcaggaaatgatgcaaagatagggccatactatgaggtagacccagtgcagtgatatggtttggctctgtgtccccacccaaatctcatcttgaattgtaatcctcatgtgtcaagggagacaccagaggagataactggatcatgcggtggtttcccccatgctgttctcatgatagtgagtgarttctcatgagatctgatggttttacaagtgtttggtagttcctcatacattaattca

SEQ ID NO: 439800 - DNA, 613 bp, Homo sapiens
accctataggcgtgagacctgccttgccaagcccgtgctgcatgagacatactgttgcctgatatccccagctccttctgtggattcttttgtgcagcagaggcagctgagcttctccctggaacactactctagcagccagggaactgccctctgatccccaatggggccgctccactgcttgcacccacatgtggggagccagagtgtggactggcctcacccagcccccacccggctttgccctccacctgccatggtagcataacacaatggacagggacttttgggagatccatggccccaaccattgtctgagactccagagtatttcccttgggtaacctaaggcaawcaaatcccaccactaccactgcaactggcgctcttttgcaagcgccacctcctggctaaaactcaacaagcacagcccatcacaacgtctgcaagcacaatgacacagcaccaaggaagtaggaaacttctgtgcatcttcagttaatcaccactgcctgcatctttctggctaaccaggaggtcctgcaactgtctatgtgcccagcacattaatactacagctggcatttgaaaaaacacacaaaggctatttgta

SEQ ID NO: 439801 - DNA, 592 bp, Homo sapiens
tggcctagaacaaactcaaactccctgctaatttctcttcctccagcactctctacttcaaaaaggacataacctttcccacaggggagcagtctgaaaacctggaaatcatcctcacatgtctttcctgcatcacccgttttgctggcatcatgagtgattcctgacactctcacctgctaaatctgtcactactctgctcttctcttctgcagtccttgctatcaccatctccccagggctttggcagcagcctggcatcttgtctcccactttttgtccccaagccattcttcatattgtggaaagagtgatcttttcaaaccatgagagatgaaaccccagatccttaatatttcctagaaaagtctgcatgtgcagctctgattactacatgggccttagctcaggccatggtccccagcccccatactccaggcatgttgatcttcctttagttctaactccactgtttctttgtcttcagcttttcacrtgggtccctgtgcttggaatgctcccctcagaagagcattgcataagttacttcaggactctgagcctcagttctcatctataaaatgggtataaa

SEQ ID NO: 439802 - DNA, 592 bp, Homo sapiens
tggcctagaacaaactcaaactccctgctaatttctcttcctccagcactctctacttcaaaaaggacataacctttcccacaggggagcagtctgaaaacctggaaatcatcctcacatgtctttcctgcatcacccgttttgctggcatcatgagtgattcctgacactctcacctgctaaatctgtcactactctgctcttctcttctgcagtccttgctatcaccatctccccagggctttggcagcagcctggcatcttgtctcccactttttgtccccaagccattcttcatattgtggaaagagtgatcttttcaaaccatgagagatgaaaccccagatccttaatatttcctagaaaagtctgcatgtgcagctctgattactacatgggccttagctcaggccatggtccccagcccccatactccaggcatgttgatcttcctttagttctaactccactgtttctttgtcttcagcttttcacgtgggtccctgtgcttggaatgctcccctcagaaragcattgcataagttacttcaggactctgagcctcagttctcatctataaaatgggtataaa

SEQ ID NO: 439803 - DNA, 484 bp, Homo sapiens
ttacatgactgtggaggttgaaaagtcccatgatttgccatctacaagctggaagtccaggaaagctagtggtgtagttctagtttgagtctaaaggcccaatacctgggagtatcaatgtcttaggaaaggagaaaatgaatgttccagctcaagcagaaagaataaattcactcttcatccaccttttcattccattcagaccctcagttgattggatgatgcctgtacacattggtgagacatctattattagtcttatttgttatccttactgttagaccctgactttcctaactttattgcctttcccccaccaggtgaattccagtgttctgtctttasacagtctactgattcaaatgctaatatcttccagaaacaaccatatggatacatccagaaataatgtttcaccagctatgtaagcattccttagcccagtaaagtcgacacataaaattaaccctcagagttggcatga

SEQ ID NO: 439804 - DNA, 585 bp, Homo sapiens
atggaatgactagaaatcagtaacaagaggaaatttggaaagcatatgaacatatagaaattaacccccaataatcctgaataaccagtgggtcaatgaaaaacttaagaaattttaaaaatttaytgaaacaaatgaaagtggaaacacaaatagcaaaacctatgagatacagcaaaacagtactaaagagggaagtttgtaggaataagtgcctacaacaaaaagtagaaaaacttcaaatgaacaacataatgatggatcttaaagaactataaaatcaaaagcacaaccccaaattagtacaaaaaagaaataaatgtcatagcataaataaaattcaaatggaaaaatacaaaagatcaattgaaaaattgtttttttgaaaagataaacaaaacttaacctttatcaagactaacaaaaaaagaaaatccaaataaaatcaaaaatgtaaaaagacattgcaagtgatatcacagaaactcaaagaattattagagattattatgagcaactatatgtcagtaaacttgaaaacctagaagagataaataaactcctagacagatacagcctaccaag

SEQ ID NO: 439805 - DNA, 664 bp, Homo sapiens
aaaagccatattatgctgaaaaggcatttgatgaaattcagcatcactttacaaccaaaaaatcccagacaactgggtgatatggttagattgtgtccccacccaaatctgattttgaattgtaatccccataattcccacrtgttaagggagagaacacatggagataatttaatcatgggggtggtttcccccatgctgttcttgtgatagtgagttctcatgagatttgatggtcgtataaggggctcttcccactttgtcacttttccttcctgctgccttgtgaagaaggttccacttcaccttctaccatgattgtaagtttcctgaggcctcccccagccatgctaaattgtgggtcaattgaacctctttcctttataaattacccagtcttggacagttctttatagtagtgtgaaaatggactaatacactggttatagaagaaacatttcaacatagtaaaagccatctatgacgaagccacagctagtatcatattgaatgaagaaaaattgaaagcctttcctctaatatctggaaggagagaaggatgcccattttcaccaatgttattcaacatagtattggaagtcacagctagagcaatcagacaagagaaataaataaatggctttcaaattaggaaggaagaagt

SEQ ID NO: 439806 - DNA, 475 bp, Homo sapiens
ttgtgtgacttcaaattatgctacagaactatagtcaccaaaacagcatggtactggcataggaaacacatacacatacataacggaacagaaaagaatatycagaaatagatccatatatctacagtgaactcattttcaacaaagatgtcaacaatatacattgaggaaaggacagtctctttaataaatgttgctgcaaaaactaaatgttcatatgcagaaaaataaaactataccccatctttcaccatataaaatctaatccaagtggattaaagacttaaatctaagactggaaaatatgaaattactagacaaaatccttggggaaattctccaggacattggtctgagcaaatatttgagtaatattccaaaagcacatgcaaataaagcaaacatggacaaatgggattaaatcacattaaaaagcttctgcacagtgaaggaaacagtcaatagagtgaagaag

SEQ ID NO: 439807 - DNA, 662 bp, Homo sapiens
aagttctctacaataaaagctataaaacattgatgcaggaaattgaggagagcacaaaaaaatgaagatattccatgttcatgtattggaagcaatcaatattgttaaaatgtccatactaatcaaagcaaactacagattcatgaaatcactatcaaagtaccaatggacattcttcacagaaatataaaaaacaatcctaaaatttatatggaaccacaaaagacccagaatacccaaaaccatttttagcaaaataaacaaaactggaggaatcactttgtgtgacttcaaattatgctacagaactatagtcaccaaaacagcatggtactggcataggaaacacatacacatacataacggaacagaaaagaatatccagaaatagatccatatatctacagtgaactcattttcaacaaagatgtcaacaatayacattgaggaaaggacagtctctttaataaatgttgctgcaaaaactaaatgttcatatgcagaaaaataaaactataccccatctttcaccatataaaatctaatccaagtggattaaagacttaaatctaagactggaaaatatgaaattactagacaaaatccttggggaaattctccaggacattggtctgagcaaatatttgagtaatattccaaaa

SEQ ID NO: 439808 - DNA, 608 bp, Homo sapiens
ccatgcataagatctcatatttgatagcacaacagggtgactacagtccagaataatttgttgcatattttagaattgagggagtacaaatcgaatgtttctgacacaaagaaataatgaaagcttgaggtgatggatatcctatttaccctgatgggtatattatatattgtatgcctgtattaaaatcccaygtacctaaatacatacacttactacgtacccataaaaattaaaaatttaaggggtaaaaaactttatgttgttacattaaaaagcctatattaaacaatcactattcttgcttctcttatgtaaataatcaggccaagtttcatgagattaaagttatcttacaaacaaactagtcttactgtgattatctttggtaaaattgggggtgactatagagggaaattttgcttcagtataagcctacctatattgtagctattaatagattttaatcctgttctttgaggttttgttattcaaccttttaaagtggactggatcctgaatttctccagtatttgccctagaattcttcaaatatttacatttttctcccgcctttctcacttagtatgactaagaacaaaaatcgc

SEQ ID NO: 439809 - DNA, 572 bp, Homo sapiens
tttggtaaaacaatatgtatatctaattttaaatgcattaaagagatcactactgcaaaaattcctctaataaaacttttataacacaatttattgattattatagaatatgtaggaactcttcgggggaagaataattgaaaagatctgcctagtttaaaaagttgtttctttttgtctatacaataatcatttcttagcacctactctgtgccaggcccagaagatgtaagaatgaccgtgtcagaccctctcactgccacagagaagccatctgtggagcagacagatggggctggggacgagtaggtgtcctgaaatgtattaggtgatgaggctgaagcctgcacagaaggttttagggyactgggggcaaaatagaaaagacgagtgctcaactgcattcagatgaaggagaatcagaagcaattttaccttagagtgatgattgctcggaactttgaagaggatgtattttctggggcagcaggaaaggagcaggatttcaggctaaagacactacacagggcagcaggtcatcaaataacctggaagctccttatccattctaa

SEQ ID NO: 439810 - DNA, 464 bp, Homo sapiens
agcaagaatacacaatggtttacctgtgctattttttttcaaagagggaaaaatgacaaaatcactttttctataaagaagagaagtacaatgtggcttgggtacataccaattaccttttgttcagtggctctggagagtcaaaaaaggacaaagattcaaggttttggctaccacaactattcaacatgagttytaaactacaggtttttttttttttttttttttttttttttaccagaaatgaaattgccaatactagtttgatgcttggataagcatgtaaagtatctaacccacctgatggcaaaaatcacagcataagccctaacgagaaccctggcattctgtggtttgacctagaaatttaaccactacagcaaatactgtttcaaaggtaacatgcattctgagccaaacaagaaaaaaagaaaaaaagaaaaaaagtttgaaaattcaggagc

SEQ ID NO: 439811 - DNA, 485 bp, Homo sapiens
ttgagaggcataagagaactcagacaaaaatttttgtcttaaagtcttaatgtttttcaaatttatgattttactttgttttgctacacatattttacaagccattacatatagattctacatttaatgactatataatattctctcatattcttgtacaaggtcataagtcttattaacttatgcttttctgcaccaagaaaagttaaagaaaaaccagcataaatttagtatttactctgggcaaatagttacaaatgttgtaagggagatgtgaacaacaaaacaaaacagcacaataacaaatacagtaagaaatagctccagccctcaaagaggaaaagggtaaaaaacagaaaagggagggagcacattataaaaagatagtaatatcacaagtgatagaatatatatattatatatataaagtcrgtattagatattgtgattatcatgattgttaataaaataacaataacaaagta

SEQ ID NO: 439812 - DNA, 602 bp, Homo sapiens
cttagtagccctgtcttgaaacaagtgtgcacaaatccatgctgtctctctagcctcaatggccagcatggagaagtcaaatgtcaagaccccatattttcttcctggaaaatagctgaaaaatgatatacatgaatactaccataagagttactcatagggatagaygaagggcatgaaaggaagaaaataggtcagtaacagaatatgtgacacgggaaaggggcacacttagatttttccactcacatcaagagttctctctactatccctctcaatgggcttaggaaatctccttgtaagaaacttctagataaacccatacgcaactcaaatatctgctctgccactttttagatagctaatttggggcagatttcttaactcctgtgagccccagtttcaacagtttgcatggagatatctactttacagggttgctttgacgattaaattgactaacgtagtaatattatgcaatgtgcttgcagaaaattgctcaaaagatgtaatttttagctttttataatgtggatagcctatgtggctagagcagagttgctctagtgttcagcaaactcccccagccccattgccaacc

SEQ ID NO: 439813 - DNA, 602 bp, Homo sapiens
cttagtagccctgtcttgaaacaagtgtgcacaaatccatgctgtctctctagcctcaatggccagcatggagaagtcaaatgtcaagaccccatattttcttcctggaaaatagctgaaaaatgatatacatgaatactaccataagagttactcatagggatagacgaagggcatgaaaggaagaaaataggtcagtaacagaatatgtgacacgggaaaggggcacacttagatttttccactcacaycaagagttctctctactatccctctcaatgggcttaggaaatctccttgtaagaaacttctagataaacccatacgcaactcaaatatctgctctgccactttttagatagctaatttggggcagatttcttaactcctgtgagccccagtttcaacagtttgcatggagatatctactttacagggttgctttgacgattaaattgactaacgtagtaatattatgcaatgtgcttgcagaaaattgctcaaaagatgtaatttttagctttttataatgtggatagcctatgtggctagagcagagttgctctagtgttcagcaaactcccccagccccattgccaacc

SEQ ID NO: 439814 - DNA, 602 bp, Homo sapiens
cttagtagccctgtcttgaaacaagtgtgcacaaatccatgctgtctctctagcctcaatggccagcatggagaagtcaaatgtcaagaccccatattttcttcctggaaaatagctgaaaaatgatatacatgaatactaccataagagttactcatagggatagacgaagggcatgaaaggaagaaaataggtcagtaacagaatatgtgacacgggaaaggggcacacttagatttttccactcacatcaagagttctctctactatccctctcaatgggcttaggaartctccttgtaagaaacttctagataaacccatacgcaactcaaatatctgctctgccactttttagatagctaatttggggcagatttcttaactcctgtgagccccagtttcaacagtttgcatggagatatctactttacagggttgctttgacgattaaattgactaacgtagtaatattatgcaatgtgcttgcagaaaattgctcaaaagatgtaatttttagctttttataatgtggatagcctatgtggctagagcagagttgctctagtgttcagcaaactcccccagccccattgccaacc

SEQ ID NO: 439815 - DNA, 465 bp, Homo sapiens
aggggcacacttagatttttccactcacatcaagagttctctctactatccctctcaatgggcttaggaaatctccttgtaagaaacttctagataaacccatacgcaactcaaatatctgctctgccactttttagatagctaatttggggcagatttcttaactcctgtgagccccagtttcaacagtttgcatggagatatctactttacagggttgctttgacgattaaattgactaacgtagtaatattatgcaatgtgcttgcagaaaattgctcaaaagatgtaatttttagctttttataatgtggatagcctatgtggctagagcagagttgctctagtgttcagcaaactcccccagycccattgccaaccctcagcccccctcaggtacaagaaaagctaaaaaaaaaaaaaaaatggatagcttcaatacaatggtgtcagtatttaaaataa

SEQ ID NO: 439816 - DNA, 564 bp, Homo sapiens
tgtaagtcgttctcagagtcaatattatcttttctagggggtaacagtaaattcaaaaagatttaaattctgttcctagattatgcatttggtagccaagtattgcatgtttgccaacacaaagatatcagactaataatgcttttatatcttactacaaatatcaatacctgatttaagtattgtctttcaaatttcgaggcttctataaacatatgcatatgaataataggaaaaagacccaacataatgttttcacactctcaagtcaaaggcatagattaatgtggtatctgtttccccagagctttacacatgcaagatgctcaatgctttcaggttgaagacactaatatattgaggggagcctgggcagggcctcacaaaagctactgattattyttcagaaagcagaatgcaggtagtctacttttaagatagatattaatgcggtcttatatttgaacacaggtctgtctaccttcatatcttatacttttttcttctataacaccttgccctttcatgccacattgcatttgcattttttattaggatcagagc

SEQ ID NO: 439817 - DNA, 564 bp, Homo sapiens
tgtaagtcgttctcagagtcaatattatcttttctagggggtaacagtaaattcaaaaagatttaaattctgttcctagattatgcatttggtagccaagtattgcatgtttgccaacacaaagatatcagactaataatgcttttatatcttactacaaatatcaatacctgatttaagtattgtctttcaaatttcgaggcttctataaacatatgcatatgaataataggaaaaagacccaacataatgttttcacactctcaagtcaaaggcatagattaatgtggtatctgtttccccagagctttacacatgcaagatgctcaatgctttcaggttgaagacactaatatattgaggggagcctgggcagggcctcacaaaagctactgattattcttcagaaagcagaatgcaggtagtctacttttaagatagatattaatgcggtcttatatttgaacayaggtctgtctaccttcatatcttatacttttttcttctataacaccttgccctttcatgccacattgcatttgcattttttattaggatcagagc

SEQ ID NO: 439818 - DNA, 564 bp, Homo sapiens
tgtaagtcgttctcagagtcaatattatcttttctagggggtaacagtaaattcaaaaagatttaaattctgttcctagattatgcatttggtagccaagtattgcatgtttgccaacacaaagatatcagactaataatgcttttatatcttactacaaatatcaatacctgatttaagtattgtctttcaaatttcgaggcttctataaacatatgcatatgaataataggaaaaagacccaacataatgttttcacactctcaagtcaaaggcatagattaatgtggtatctgtttccccagagctttacacatgcaagatgctcaatgctttcaggttgaagacactaatatattgaggggagcctgggcagggcctcacaaaagctactgattattcttcagaaagcagaatgcaggtagtctacttttaagatagatattaatgcggtcttatatttgaacacaggtctgtctaccttcatatcttatactwttttcttctataacaccttgccctttcatgccacattgcatttgcattttttattaggatcagagc

SEQ ID NO: 439819 - DNA, 607 bp, Homo sapiens
ctgggtatacatccagagaaatataaatcattctcccataaagacccatggacatgaatgttcattgcagtactatttacaatagtaaagacatagaatgaaccaaaatgctcatcactgagagactggataaagaaaatgtggtacatattcaccatggaatactatgcagccataaaaaagaacaatattatgtctcttgtgggaacatggattgagccgaaggccactatccttaggaaactaatacaggaacagaaagacaaataccacatgttcttacttataattgggtgctaagtgatgagaactcatagacacaaagaaggaagaaacagacgctaagacttccttgggggtgaaggattggaggacggagaagatcagaaaaactaactattgggtactaggattagtgcctgggtggcaaagtaatcagtacaacaaaaccctgtgacacaagtttagctatgtaacaaacctgcacatgtacctctgaacctaaaayaaaataaaaaaaaagatcaaaatttaaagctactgatggttaacaatgtgcctagtcagattcaagagacagtagtctctttgtcacaacttagtgaaa

SEQ ID NO: 439820 - DNA, 607 bp, Homo sapiens
ctgggtatacatccagagaaatataaatcattctcccataaagacccatggacatgaatgttcattgcagtactatttacaatagtaaagacatagaatgaaccaaaatgctcatcactgagagactggataaagaaaatgtggtacatattcaccatggaatactatgcagccataaaaaagaacaatattatgtctcttgtgggaacatggattgagccgaaggccactatccttaggaaactaatacaggaacagaaagacaaataccacatgttcttacttataattgggtgctaagtgatgagaactcatagacacaaagaaggaagaaacagacgctaagacttccttgggggtgaaggattggaggacggagaagatcagaaaaactaactattgggtactaggattagtgcctgggtggcaaagtaatcagtacaacaaaaccctgtgacacaagtttagctatgtaacaaacctgcacatgtacctctgaacctaaaacaaaataaaaaaaaagatcaaaatttaaagctactgatggttaacartgtgcctagtcagattcaagagacagtagtctctttgtcacaacttagtgaaa

SEQ ID NO: 439821 - DNA, 627 bp, Homo sapiens
tcctggtctcaagtgatccactttggcctccaaaagtggtaggattacaggcgtgagccaccgcacctggtggtaaataatttttcttattactagcttctaggtgtcaaagaagtctcaaataaaaaaattagaaaaaaaattaaaattctacaataaattttctctttagtggaagaatatgtaaatacttayttgtaatggggaatgaaaaaataatgcctattaacactatccttattgaccattctactaactagccaaggcagctcaaaaagataagaaaaaatataaaagcctctagaatgtaaagtggaaaataaagctatttttcatagatgacttacctaccaagaacagaaatataaatcaatgtgaacttcacaagtttttagatataagatcaatatacaaaaatattatatatgtatgttaccctaaaataaatggaagttgcaactaaaacacactactaacaatgatataaaaatgagctagggtctaagaatgcatttaaagaaagatgtacaaaacaattgaactggaaagtacaacattttattgacattcactaataaagtcctaaatgaaagcttagaccaggttcataggcttgaacagtttaat

SEQ ID NO: 439822 - DNA, 396 bp, Homo sapiens
tccactcccaagagaagtggtctgactctcctttcctgtggaggactcagttaatcaccagcctatcaacccacgtctggtatccataatccgtggttctaaatcataagagggactgtgagtgtgtgtgygcatgtgtgtgtgtgcatgcgtgcgtgcctgtttaaagtagcattcccctgtaaaacaagtcatcacccctttgtattttggtaactactgtcattgctattcacttggaaccaacactaaaaactaaaggcggccagggaaaagttcagtagtttttagggaaaatgtcagaggtaatgaacaaaacaagcagctgtgcattttcatcaagaatctatctggaagaaggaaacaccacaattattccacacagacagccccttc

SEQ ID NO: 439823 - DNA, 575 bp, Homo sapiens
tattgctgccttaatttccatataaattcttcagagcctctgtgggagtttggtaaacccaaagaagatttattagtataataaacaaaatgttttatttgcgggggaaaaaagtatatttgcaatattccttccacggggagggtcaggcaagagaaattmtctcagttaaatatggaatctaaaaaagtgaaacttatagaagcagagggtagaaaggtggtagccagcagctgcaggggcactgcggggatggccaaaaggtacaagatttcagttacaagatgaataagttctggggatcaaatgtacaagcatgagtaccggtagattgggttaatttcattgtgatgatcattgtacaatgtatacaatatctaatcatcacattgaatatacataatctttgtcaaaaaatttaaaatttttgaaagagaaaatacaaaaggtggtgcagattagagatctaaagttaagggagggggaaaatccaggaagaaggaagaagaaaaataaaacctcagatatgtaaagcttgaaagaaagggacacacatggacaatcaagaaacttta

SEQ ID NO: 439824 - DNA, 559 bp, Homo sapiens
atgtaaaaatccagtaaagatttaaaagccctaaaagacacttttgaacataaagcgatgaacatggggtataacttttaaaatctcttcatgtgaatataatatacagccactctgagaactattatcccagatgtactgacttgggaaaatgtctgtgcaagaaaaggaattgtatgcagactataattgcatcaccaaaaaaaaaaaaaaaaagaatgaaaacatgtgccaatctagtaatgcatataaacaaacattttaaaactctgaattataggaatttgataatgctgggtatttataaacagataagtgtttattgcattcttccctattttttcttgtatgcttatattacttaataatgatattttaaataatatttaaaatctayataagtaaaatcttaacacactggatatctcccagtagtaaaaatagaaaataatgatcatttttaaaattttcacacttgtgtattatttcaatttatttcaaaatgtgagtactcttcttggaaaatgttgaatgctgaacgtaatacagttttttaaaa

SEQ ID NO: 439825 - DNA, 539 bp, Homo sapiens
ctctcatcctaaacaactgtcttattggtgcatatggaaaaatcaaactgaaaagaagacacaaagaaccgtaacagattgccttggagacttccttagcaatattaaaaaggagaaatcagatttagaacaaagttaaaattctttaaactgaccataaattcccttgtctgccctcattacttccctatgtccatgtcccsgaccctctaaaagctcatttgatctttgggtctctaattaaaacccatcttctgcaaattcatctcaatttcctcagtaaactcctttagctcaggagagaaacatttgtaagaatttatttgaattatgactcttggctttggagtacccatttgttactcattctctttctccaaaggagagctgagatcttggcttggccttccgcctgccaggggtatgtaggttgggagctcccaagaatatggtcagaaagaaatgttggttgcaccccatttgcacgtagtataccaactgttgccaactcacagagacactgtctttcttctgtatgt

SEQ ID NO: 439826 - DNA, 539 bp, Homo sapiens
ctctcatcctaaacaactgtcttattggtgcatatggaaaaatcaaactgaaaagaagacacaaagaaccgtaacagattgccttggagacttccttagcaatattaaaaaggagaaatcagatttagaacaaagttaaaattctttaaactgaccataaattcccttgtctgccctcattacttccctatgtccatgtccccgaccctctaaaagctcatttgatctttgggtctctaattaaaacccatcttctgcaaattcakctcaatttcctcagtaaactcctttagctcaggagagaaacatttgtaagaatttatttgaattatgactcttggctttggagtacccatttgttactcattctctttctccaaaggagagctgagatcttggcttggccttccgcctgccaggggtatgtaggttgggagctcccaagaatatggtcagaaagaaatgttggttgcaccccatttgcacgtagtataccaactgttgccaactcacagagacactgtctttcttctgtatgt

SEQ ID NO: 439827 - DNA, 539 bp, Homo sapiens
ctctcatcctaaacaactgtcttattggtgcatatggaaaaatcaaactgaaaagaagacacaaagaaccgtaacagattgccttggagacttccttagcaatattaaaaaggagaaatcagatttagaacaaagttaaaattctttaaactgaccataaattcccttgtctgccctcattacttccctatgtccatgtccccgaccctctaaaagctcatttgatctttgggtctctaattaaaacccatcttctgcaaattcatctcaatttcctcagtaaaytcctttagctcaggagagaaacatttgtaagaatttatttgaattatgactcttggctttggagtacccatttgttactcattctctttctccaaaggagagctgagatcttggcttggccttccgcctgccaggggtatgtaggttgggagctcccaagaatatggtcagaaagaaatgttggttgcaccccatttgcacgtagtataccaactgttgccaactcacagagacactgtctttcttctgtatgt

SEQ ID NO: 439828 - DNA, 623 bp, Homo sapiens
gttatatatttctgtttataaaaagaatttgcaatggcttaaagcatgcctttacttctatacctaccagggctttgttttatcattcttctggctttgggaaaagagagctgtttctgttggattgcaggggaggaaaaaaaaggtctgaatgtgggtgtggtgaggggaagggggaaaggattgtcagttaatacatcaagatggaaaatgaaaacccatttactttgagtattttatttatatcccatttaaaacttccattacagtgcacaacacttacatgtgtgctatgatcacatgggaatcttgttcaaaaagcagcttcctaggccccaactccagaccttctttttcaatgagtcttctatcaggtccaggaatctaaatatttaataagcaaccraggcaagtttgctgggttagaaaacgtactttgagaaatgacacagtgatcactctctctgatttattaatattctgtgcatgacttgctgatcaattcctattcctctcttccagtgacctgactcccatttctaccctcctaaacccatttttagttcattcggggaagttaaactggtaactagtagaaaagtctccctgtaagactacaatca

SEQ ID NO: 439829 - DNA, 623 bp, Homo sapiens
gttatatatttctgtttataaaaagaatttgcaatggcttaaagcatgcctttacttctatacctaccagggctttgttttatcattcttctggctttgggaaaagagagctgtttctgttggattgcaggggaggaaaaaaaaggtctgaatgtgggtgtggtgaggggaagggggaaaggattgtcagttaatacatcaagatggaaaatgaaaacccatttactttgagtattttatttatatcccatttaaaacttccattacagtgcacaacacttacatgtgtgctatgatcacatgggaatcttgttcaaaaagcagcttcctaggccccaactccagaccttctttttcaatgagtcttctatcaggtccaggaatctaaatatttaataagcaaccgaggcaagtttgctgggttagaaaaygtactttgagaaatgacacagtgatcactctctctgatttattaatattctgtgcatgacttgctgatcaattcctattcctctcttccagtgacctgactcccatttctaccctcctaaacccatttttagttcattcggggaagttaaactggtaactagtagaaaagtctccctgtaagactacaatca

SEQ ID NO: 439830 - DNA, 623 bp, Homo sapiens
gttatatatttctgtttataaaaagaatttgcaatggcttaaagcatgcctttacttctatacctaccagggctttgttttatcattcttctggctttgggaaaagagagctgtttctgttggattgcaggggaggaaaaaaaaggtctgaatgtgggtgtggtgaggggaagggggaaaggattgtcagttaatacatcaagatggaaaatgaaaacccatttactttgagtattttatttatatcccatttaaaacttccattacagtgcacaacacttacatgtgtgctatgatcacatgggaatcttgttcaaaaagcagcttcctaggccccaactccagaccttctttttcaatgagtcttctatcaggtccaggaatctaaatatttaataagcaaccgaggcaagtttgctgggttagaaaacgtactttgagaaatgacacagtgatcactstctctgatttattaatattctgtgcatgacttgctgatcaattcctattcctctcttccagtgacctgactcccatttctaccctcctaaacccatttttagttcattcggggaagttaaactggtaactagtagaaaagtctccctgtaagactacaatca

SEQ ID NO: 439831 - DNA, 568 bp, Homo sapiens
aagtaatagaaaattaaaactggaaaaaaatgatatttaaccttgagttatatgtatatacattattaatacgtgttccagacattttgtaaaattcctagaaaactgataagtcctggtaaatcagtcataatcccagttatttttaaatattatgtttcagagataaccaaattttattgtcaattacattttaataaactctcatcagatctttaatcatgtctatttttaagtcttttgtcatctacagacattaagtatgtaaaatccaaaagtgctttatcttcaagaaaattcatggaaatgactgacaagtacagactcctgataactttaagatcataccattggactgggtatgacyatccagtgctctagtgaagatatggacaggttaatgaagctgttaacccatcaagtagagcaagagttacatgggtctcaatggatggatggtgataattgtttaatgactgttttttttgaaacattgcttgttctttaaatgtttatttttccagatttaagaaaaccctctttttcttttaagctatctataccatat

SEQ ID NO: 439832 - DNA, 568 bp, Homo sapiens
aagtaatagaaaattaaaactggaaaaaaatgatatttaaccttgagttatatgtatatacattattaatacgtgttccagacattttgtaaaattcctagaaaactgataagtcctggtaaatcagtcataatcccagttatttttaaatattatgtttcagagataaccaaattttattgtcaattacattttaataaactctcatcagatctttaatcatgtctatttttaagtcttttgtcatctacagacattaagtatgtaaaatccaaaagtgctttatcttcaagaaaattcatggaaatgactgacaagtacagactcctgataactttaagatcataccattggactgggtatgaccatccagtgctctagtgaagatatggacaggttaatgaagctgttaacccatcaagtagagcaagagttacatgggtctcaatgsatggatggtgataattgtttaatgactgttttttttgaaacattgcttgttctttaaatgtttatttttccagatttaagaaaaccctctttttcttttaagctatctataccatat

SEQ ID NO: 439833 - DNA, 434 bp, Homo sapiens
tgggctgcagccatggagggaatatgtaggccagcactaaccagagaggaatcatccatcccagtgatcaaaacctgagttttagcatgccccactagcgtggactaaagtgctctaaggtcttaaataggcctgaaaaacagtgcagaccacaaggccagaaattcctgggcaagttttggtgctgtgctgtactcagagccagttgacctggggtacataagacccagtgaaacaactactgaggtgactaaggaagagttgtaatagccctccctccaataccaggtaacatagctcacagctccaggagggagtccttctgcttgaggaaaggagrggaaggagtaaagaggacttattcctgcaacttggataccagctcagccacagtcaaagcaccaagcagggttctaaagttgccattccaggcc

SEQ ID NO: 439834 - DNA, 490 bp, Homo sapiens
tgatgatcaattccagagtaacagaagtacatgagttttcagacagataatttaaagtagctttattgaggaattccaataaaatccaagataacacagaaggaattyagaatcatgagataaagagtgaaataataataattaagcagaaaatctggagctgaaaaattcaattgacaaactgaagaatacatcagtctctcaacagcagaactgaacgagtggaatagtgagcttgaagacaagctatttgaaagtagaaagtcagaatagataaaagaaaaaataaaaattaataaaccatgtgtataagatctagagaatagcctcaaaagggcacatctaagagttattggccttaaagagcaggtaaagactgaggtagaaattttatacaaaaggataataacagaactttccaaacctagagaaagatatcaatattcaagtacaaaataattatgtaacatcatggagatttaagccaaat

SEQ ID NO: 439835 - DNA, 638 bp, Homo sapiens
acagggatcctgtggcttgggctcatagcrcagaccctttaacctgggctgattacactcagcaattgctgacctgcatctctgtgaggtggagcctccagaagaaaagcaaaagaccccttggccacaccactactgaggtccctttgctgcctccaagctggggaaagaacataattactgagatcaccccagagctgcagtggctaccccaggagtaccaagccatgatctaccgccagcactcaaggaggagaggaacccacattttcagagcattgagagggaacacaactgcaactgtgagaaaatataggggagccacacaaccaagtaagagtctaccaactgaccaataagcctaagagcccctgctggatcacactccagatcttccataccaaaaataccttgctaacataaccccttctgaaaccatagacaagaagtcagcttcaaataaagaccctgcagaaagccttgaccctatgtgtacacccagaaaagaagtctgttgactgtactcaatctacactgtaggcaaggaacacccacatgcagcgatgaaaaagaatcaacacaaaaactccagtaactcatgtggccagagtgtcacatgtcctccaaatgagcgcacc

SEQ ID NO: 439836 - DNA, 648 bp, Homo sapiens
ttctgttttgatgtctttccaggatttgtttcaagatttagagctccctttagcagttcttgtagtgctggcttggtagtggcaaattctctcagcatttgtctggaaaagactgtatgtttctttcatttatgaagcttagttttactggatacaaaagagttggcttgtaatcattttgcttaaggaggctgaagatagggcaccaatccattctagcttgtacggtttctgctgagaaatctgctgttaatctgataggttttcctttataggttacctggtgcttttgcctcatagctcttaagattcttttctctgtcttaactttagataacctgatgacaatgtgcctaggcgatgatcttttggggatgaatttcccaggtgttctttgagcttcttgtatctggatgtctaggtctctagcaaggctggggaagtttttcttgattgttcccccaaatatgttttacaracttttagatttctcttcttcaaaaatgccaattattcttaggtttggtcatttaacataatcccagacttcttggaggctttgttcatattttcttgttcttttttctttctttgttggattgggttaactcgaaaaccttatcttcaggctctgaagttctttcttct

SEQ ID NO: 439837 - DNA, 499 bp, Homo sapiens
ggtaaaatcatttggagagctccttttgaaggattggaacttaaaaaaaaaaatgctgcccatggttgctgtaaaatagaggtgttcatggaaggcatttatctaacacatcatttatagaccaagtccacagtattatagaaacaaaaaatgaagaaattaaggcataaggagcttgaaatgaagggcccacaataacggaaataattactgacaaaaactgaaggcgagaaatccatcccttgatagttaatgctgactataatcaacatccatarataatttaactggagctgaggaaactagaatcaaaccagaaaatatcaaactagacgtgaaggaacaaatgatttcttttttaaattgcaagactgaatccaatatatggttttgtttggtgaaatccaattgacatacatgcaaaacgtacagactgtgatatactattcataggacatttacacttgtccaaattgtgcaatacaagccctggcagcaa

SEQ ID NO: 439838 - DNA, 548 bp, Homo sapiens
tgcatctctggggagaaacaggttttctcttaagtgtccagcctataaataaagaaagcaatttgtgaaacttgctgcagaatcacatctaggtcagaaattatgatccttttgtgtatatctcacttactttgaagttacttactattttggcaaaaatgcatctttggaagcttatctcctatataaaggaagatggtggagtcagcattaaagaattctaggcttcataaagactgtctcgtgaattggtactcatcttttggattaatctggcagtgatatgttaaataattacatagcactttttcctcaaagcacttaaatctcaatactttcccttagtaccccaatgaagaaggcaattttatcatcctaaaacaaataaaaatatggaatccttgtgttatgggttgaatcatgtcttctgaaaagagaggttaaaatcctacccccagcacatcagaatgtgaccttatttagaaataaagtytaggctaatgtcctacctccaacaattcaggatgtgacctcatttagaaataaca

SEQ ID NO: 439839 - DNA, 497 bp, Homo sapiens
tgggtagtttcttacatgaggaggggatgactccaaagtaaatatctgagtattgaaagagggggctgtgacattttatgattttgaaaagacatattatagacagctgtatcggaagaggaaatgttttagatgaggaagaaactgtgtaaaaaaagaatgaatcattagtacagaaaaggttatcacacacacacacagataagttggatgaaattccagagaaataaattttaggacattasctcattgggcggaagctagaatcctatttttgcagaaacgaagaacaaggtctgacattgagcttaggagatacaaatgacctagtcactataaagggtagaatgacagaacaaataagaccaaaggtgtttgggagaataaaaataataatggcaattaatctctacagttagagagttgttcccttttcaaatacattcacgttcatttaatacacacattaaccctgatttagataaagtagaaacgat

SEQ ID NO: 439840 - DNA, 583 bp, Homo sapiens
tacatgaggaggggatgactccaaagtaaatatctgagtattgaaagagggggctgtgacattttatgattttgaaaagacatattatagacagctgtatcggaagaggaaatgttttagatgaggaagaaactgtgtaaaaaaagaatgaatcattagtacagaaaaggttatcacacacacacacagataagttggatgaaattccagagaaataaattttaggacattagctcattgkgcggaagctagaatcctatttttgcagaaacgaagaacaaggtctgacattgagcttaggagatacaaatgacctagtcactataaagggtagaatgacagaacaaataagaccaaaggtgtttgggagaataaaaataataatggcaattaatctctacagttagagagttgttcccttttcaaatacattcacgttcatttaatacacacattaaccctgatttagataaagtagaaacgatcatccctagttgtttactgttgaaacaacaataagttaacacatgaaagcagcaaatcccagactgtgttccctagaattaaatttatttgttccatg

SEQ ID NO: 439841 - DNA, 547 bp, Homo sapiens
ttcagtgttagtcacagctaatagattttcctaaaatcagataattcgagaggagcctgtggtcagaaaagcagagttaggagtttccaggaactgttcagtttcaaagggtaagtcctgctcatgttcattgcattctaatgggccatttawcagcatatatctgtttatgttgtcaagtgaaccacgctgattctgagaacaaaggggcaaagtgagaaacatcccgagttggatctttacctgaagctaagctgcccctcacttcatccttctttcgcattaacacccttctgtttctccaatcccagacttccccagcacaatctttctcccctcctccaccacactacttttctcccctcagccttccatcatctcacagtgggagggcataaacgttgggctagaactgggagatgcatggagtagggtgagaggtgaacagagtgaaccattgttaacccccatttaacaaacgtttagtcccagaacaacttttcaagcctgctatgaaggagattcacagaacagcatccacagtttt

SEQ ID NO: 439842 - DNA, 639 bp, Homo sapiens
ttaatacatcttatttctcttttttttttttaataactttgttccttgtggagtcatctcattggagattaatgagattaatgcttaatttctgtaccaagactctaagtgggatatggctccaaaacaaatatccacagccaaaaaatagaagtaaacaccactctttttttccaagagccattgtgttatggaccatttcgtgcccagctggtcttttctggtttacctattattacactaacttattgccccagtagtggacaggtacagagggagtgcgtgggtggcctttctactcgacatgacaaaataggctatcaaaaactgtgttttagtaattcgcagggagacaggctctctcttttcctattatacttggacagaagagccttttaccttgtgaaatgaaattgtaactacagwggaaaaacctatcacccatgcccagagtctgcttgtgaagaaatgctggagggatagccaaccatgctgaattttctcatcaagattgagagtttgtctgtctttagttttgattctcattcctctttctggtcttcaaatgacctctgtctcctgggtcatattgtattactcaggagttgatgatgacaattacagacttattactgcctt

SEQ ID NO: 439843 - DNA, 629 bp, Homo sapiens
ataataataatattttattgtatgctgaagtgtgctagaaaagtagattttaggtgtccttatcaaacacaaaaagacaactatggaaagtgatgaataagttaatttgcttaactgtgataagcatttaactaagtgtatgtatatcaagacaacatattgtataccttgaatatatataatttagaagtttccagtaaatactcccaagcttccagtgcattgctggattttgccggatttagggaccaccacttggtcttacttcatccattttgagtatataaattctgagaaaaagcacacagttatttttatagacaattattcccactgcctctgattggtccattccccactttttgattgtcttgtcctgttcaacactaacaatcaacattaacattccccccmccgcacctggttctctgggctgctgatgggcattcattgagaaatgctttggacaaggctgtatgttactgctgtaaaagaggtaagcagtgcatgaacttagagactttttctgggcccaatctgaataagtgtccccacacaggtaaaacaactacatgatgcttatctcaatatgtattcaaccaaaaatctcagagggctgtctgtcccat

SEQ ID NO: 439844 - DNA, 502 bp, Homo sapiens
ggcaattcaacagtaacagctggagatttcaataacccactttcaataatggacagaacaagtaagcaaaagatcaacagagtataaacaatttgaataacattgtaactagacccaacagatatctgtagaacactctacttaaatgcagcagaatacatagtcttctagagcacatgtggaacattctctacaatagaccatgtgatcagccataaaacagatatcaatagattgaagattagaatcataccaaatacrttttctgaccacacaggaattaaattagaaatcaataagagaaggaaattcaggaaatgtacacatatatgaaaattaaacaacacacccctaaataactaatgtgtcaaagaagaaaatccaagataaattttaaaaattgacataaataaaaacaaaacctcaatataccaaaatgtatggtatacagttaagaggaactcagatggaaagttatgggtataaatgcaaatattttaaa

SEQ ID NO: 439845 - DNA, 417 bp, Homo sapiens
ggtgagtatactggtaactatgtctttcaaaactcacccaagtgcacactttaaaaggatgaatcttattgtatggaaattacatcccagtaaaccttactttaaaaaataatgctagccagtaaaactgtcagttaattttaatttttttttagacaggggttattagtccattttcatactgctataaagaactgcccaagcctgggtaatttataaaggaaagaggtttaattggctcacagttcagcatggcaggagaggcctcaggaatcttacaatcattgcagaagatgamgaggaagcaagccaccttcctcacagggcagcagaaggagaagtgccaagcgaagggggaaaagccccttataaaaccatcagatcacaggagaattcactcagtatcacaggaacagc

SEQ ID NO: 439846 - DNA, 504 bp, Homo sapiens
tgaaggaatcaagataccttcttcacaagtcacaggaaggataatctatgcaggaggaactgccaaacacttataaaaccatcagatcttgtgagaactcactcattatcaagagaacagcatgggggaagccgtccccatgatctaattacttccacctggtcactcccttgatatatagaaattatgggagttataattcaagatgagatttaggtggggacacaaagcctaaccatatcaacagagtctcactctgtcacccaggctggagcacaatggtacaatcttagctcactgcaacctctgccatccagtctcaagccatcctcccacctcagcctcctgaggaggtgggaccataggcgcatgacacaatgcctggctaattttttgtaatttttttgtacagactggstttcactatgttgcaggctagtctcgaactcctggactcaaggaatctcccaacctcggcctcccaaagtgctgggattacagacg

SEQ ID NO: 439847 - DNA, 556 bp, Homo sapiens
cattaaattcttaatcttaaaaataagaaatcagaatagaagacctagagaggataataagaatatctacatctattactaaacagctacatttactgtgagccagttccattccttaccagggacagtaggaagcatctagttgggctgaaacctaaattagaatagctatgatttaccagaaaactccactaaatcctcaaagccctcagccaggggcaacytgaaagactgttggactcctgatatgaaaagcaatggtttagggattctctgtgaccctattcacacaatgagtcactgaaccatgattcacttgtgcttgggagtttggcaaagaatggcaggacgaggaaggatgttgttcctctgtgccccaggattctgaatcatcaggtgtctttccagccccatttgtctcctgggaatgattgtgctctctggtgtatgaagctctattgtttgaggcatgttaataaaattggtctttcagacaccaattattggacccatctgtaaagttcaggatgagctaagttatgctgcagtaacaaaa

SEQ ID NO: 439848 - DNA, 633 bp, Homo sapiens
gttcattaccttatatttattttaatttcccactccatgtagcatgcagtgtatacatattctcctcaacttaagatggggttgcatcctgataaactcatcataaattgaaaatgtggtaagtaaaaaatgcatgctgggttcagtggctcacacctgtaatctgacttttggaggctgaggctggaggatttcttgagcccaggaatttgagactgcaatgagctaactttgtgccactgcactccagcctgggcaccagagaaaggctgtctcttaaaaaaataaaaatgaaaaaaaaaattaaaaagaatgcatttgatgtatcatagtctaacctaccttaaacatgctcagaacacttacattagcctatagctgggcaaaataatctagcacacagcctattgtataataaagtgttggacatgttatgtcaggggtccccaagtcctcargccatggaggtactggtccatggccttttaggaatgggccacaaaacaggaggtgagtggcaggcgagagagtgaagtttcatctgtatttacagaggcttcccatagctcacattactgcctgagtcagccttctgtcagatcagcggctggcaggactgattttcatcgtggc

SEQ ID NO: 439849 - DNA, 565 bp, Homo sapiens
aaatggaaatagagaggatgttaggattaaataagtgctgagmgtagcactagcatgtggaacaaccacaaaaaattgagatttgaggccaggcgtggtggctcacacctgtaatcccagcactttgggaggccaaggcaagtggatcacaagttcaggagttcaaggccagcatggccaagatggtgaaaccccacctctactataaatacaaaaaattaggcgggtatggtggcaggcacctgtaatcccagctacttgggaggctgaggcagataattgcttgaacctgggaggcagagtttgcagtgagctgagatcaggccactgcactccagcctgggtgacagagtgagactccatctcaaaaaaataaaataataaaataattaattaattaattaattaagattcgagtgtctaaggagttagtcaaggtcacagagtcaaccagtgtggtggaagcaggctgcatctcaggcctgagctcagagctgtgtgtgtaaccgttgcatcctcctgcctctggaaggcagattcacggagccagcaccaaggccagggc

SEQ ID NO: 439850 - DNA, 565 bp, Homo sapiens
aaatggaaatagagaggatgttaggattaaataagtgctgagagtagcrctagcatgtggaacaaccacaaaaaattgagatttgaggccaggcgtggtggctcacacctgtaatcccagcactttgggaggccaaggcaagtggatcacaagttcaggagttcaaggccagcatggccaagatggtgaaaccccacctctactataaatacaaaaaattaggcgggtatggtggcaggcacctgtaatcccagctacttgggaggctgaggcagataattgcttgaacctgggaggcagagtttgcagtgagctgagatcaggccactgcactccagcctgggtgacagagtgagactccatctcaaaaaaataaaataataaaataattaattaattaattaattaagattcgagtgtctaaggagttagtcaaggtcacagagtcaaccagtgtggtggaagcaggctgcatctcaggcctgagctcagagctgtgtgtgtaaccgttgcatcctcctgcctctggaaggcagattcacggagccagcaccaaggccagggc

SEQ ID NO: 439851 - DNA, 565 bp, Homo sapiens
aaatggaaatagagaggatgttaggattaaataagtgctgagagtagcactagcatgtggaacaaccacaaaaaattgagatttgaggccaggcrtggtggctcacacctgtaatcccagcactttgggaggccaaggcaagtggatcacaagttcaggagttcaaggccagcatggccaagatggtgaaaccccacctctactataaatacaaaaaattaggcgggtatggtggcaggcacctgtaatcccagctacttgggaggctgaggcagataattgcttgaacctgggaggcagagtttgcagtgagctgagatcaggccactgcactccagcctgggtgacagagtgagactccatctcaaaaaaataaaataataaaataattaattaattaattaattaagattcgagtgtctaaggagttagtcaaggtcacagagtcaaccagtgtggtggaagcaggctgcatctcaggcctgagctcagagctgtgtgtgtaaccgttgcatcctcctgcctctggaaggcagattcacggagccagcaccaaggccagggc

SEQ ID NO: 439852 - DNA, 565 bp, Homo sapiens
aaatggaaatagagaggatgttaggattaaataagtgctgagagtagcactagcatgtggaacaaccacaaaaaattgagatttgaggccaggcgtggtggctcacacctgtaatcccagcactttgggaggccaaggcaagtggatcacaagttcaggagttcaaggccagcatggccaagatggtgaaaccccacctctactataaatacaaaaaattaggcgggtatggtggcaggcacctgtaatcccagctacttgggaggctgaggcagataattgcttgaacctgggaggcagagtttgcagtgagctgagatcaggccactgcactccagcctgggtgacagagtgagactccatctcaaaaaaataaaataataaaataattaattaattaattaattaagattcgagtgtctaaggagttagtcaaggtcacagagtcaaccagtgtggtggaagcaggctgcatctcaggcctgagctcagagctstgtgtgtaaccgttgcatcctcctgcctctggaaggcagattcacggagccagcaccaaggccagggc

SEQ ID NO: 439853 - DNA, 486 bp, Homo sapiens
ggtctgactcatgagggtcattggtatggggcattgatgactggcacttctcagaattagggtttatgaaatttgtttgattcttatgagtcattgtgagtctggtttcatggtttttccagctcaacatcttttttttaaatttctttttcaaaattggctttctcggggttgacagccyaacattttttttttttttttttgagatagggtctccatcgcccaggctgtagtgcagtggtacaatcacagctcactgcagcctccacctctcctactcagcctctcaagtagctgagactacaggtaggcaccaccacgtctggctaattttggtattttttgtagagatggggttttgtcatgcttcccaggctgctctacagctcaacattcttggccatggaatactttctttgtgcaatggacatagttggtccttaccagcattccttttcccttctttctaagagagagccccaggaa

SEQ ID NO: 439854 - DNA, 531 bp, Homo sapiens
gccagggaaggcagtactcacaatgtgctagcaactctccaagccatacttctatggaattgggtaatacctgctaattccatagaacagaaagtggatagattacacagccctaattttagctgtggagagttttcctggactccttatataaggggattctccctaacctttcctagtgccccctagattgacatctcctaaggtcttagtttctctggcaaagttagtccacaaggcatactctcattatgcttcctgctgttggtagatgtcatagaaacctagcaaatagtcaggtagcacactgccaaggctgtcagaataagatttatattttcaaaaaattctcaaagataggagcaaaagcaggygtgcccttctcttgtgacctgtcacatcctagggcagtacacagagactcccaaaagtctagtctccagaggaagagcctcagacctttaaactgagtgactgggaaataccagcccctcctctggcacaatcaggggctgggatctcatagccaca

SEQ ID NO: 439855 - DNA, 502 bp, Homo sapiens
accaagaaataagggtggcctgtggaagctggaaaggtaaagaaacgaattctctcctagaactttcaggggagatcagcactgccaacaccttaatttgggcycagtgacacccacttcagattcctgatctccagaactataaaataataaattaatgttttcagctacaaagtttgtagtaatctgttacagtagctaatacatttaccattcatatgtatggtacttggtaggataagtaccaagctaatacatttaccgtatcctcttacaagcaaatttcactgagaccgagcaatattgcaccaaaacattgtagctagtatgctgttgtctcagacaaaatgatgtgtttttggtaatgacttcgatgaattttggagtcatatttcaaatagaaacttcaggaagtaacagcatctaattctcctaattaccactactttgtaggagacaagtggtttgtcattttttcagatcatgcatgtcttctgcatta

SEQ ID NO: 439856 - DNA, 554 bp, Homo sapiens
tggtacttatacaccatggaatactacacagccataaaaaagaatgaaatcatgtcctttacagaaatgtggatggagctggaggctgtaatcctaagccaattaatgcagcatcagaaaaccaaatgctgtatattcttacttatatgcgggagctaagcactgaacacatataggcatcaatatgggaaaaacagactctggactacgtgagggtcgagggagagggatgggttaaaaaactacctattgaggaccatctctacagcctgccccgtccgtctcyctccgagtcgctcctcctgctgctctcctgctcctggcaggccttgtgcccaccgggttacctgccctcaagcctccgcccagagaagcacagctgcaggggcgcgtcctgtcactccgccccgccagctaccctcccctgagcccgggtgcccggcttaggccgctccgtgtgaggagacctgggacccggcaccctccgggtcctacccagtgcttctgccctggcgtgcgacaccctcctttgccctgtgcggggcctggagggg

SEQ ID NO: 439857 - DNA, 551 bp, Homo sapiens
gaagacactagttttcatggtggcatcagtatttcgtgtttattcaatttaattcaatcttaaaggcttagatttggcataatggtttttarttatttctattctttgtgcatttacatacattctataagtaatttttattatttacaaaatcagaacattttgatcaacaaagaaaatgactaaaatatccataatgaggacaattctaatgccatcagaaacatctcataacaagtgaaaggtgagggatctgtgaacatggcctaacaatgttaggcccattctagagagcaagtctaggtggcagagggcaggaacacagagtagattgaatcaggggctaaacagataatgtaaagccagagtattcttttcagaaacttataaactttacatgtgttaatttctaccaaatttttgatgtttgagactataacaggcttaacttacattccaataaatactcacatcacagcaaattgatgtctacctgttgattatcttaaagacaaataatacaagaagatttttctattgaagaaaaaaaa

SEQ ID NO: 439858 - DNA, 551 bp, Homo sapiens
gaagacactagttttcatggtggcatcagtatttcgtgtttattcaatttaattcaatcttaaaggcttagatttggcataatggtttttaattatttctattctttgtgcatttacatacattctataagtaatttttattatttacaaaatcagaacattttgatcaacaaagaaaatgactaaaatatccataatgaggacaattctaatgccatcagaaacatctcataacaagtgaaaggtgagggatctgtgaacatggcctaacaatgttaggcccattctagagagcaagtctaggtggcagagggcaggaacacagagtagattgaatcaggggctaaacagataatgtaaagccagagtattcttttcagaaacttataaactttacatgtgttaatttctaccaaatttttgatgtttgagactataacaggcwtaacttacattccaataaatactcacatcacagcaaattgatgtctacctgttgattatcttaaagacaaataatacaagaagatttttctattgaagaaaaaaaa

SEQ ID NO: 439859 - DNA, 601 bp, Homo sapiens
ttaaatagctgaataagtctgaatttgaaagcccaccaggcccaagtttcaaaataagggggtaaggggcctgaaccaatcactttagagttcaaaattctttcattcttaaatgcaaagagaataaaaaaagacatgcttagtccattgtaccaaaggaaattctttaataaagtctctttcaaatgttaaggttcctatgatattcaaggattgatcattcaccatttgctgggtaacctggtgtgagagggtctcctgcaccattcaaatttaagatatttccacgctggacaccacctccaggaagattccaaccrtctggataggacttcaccccacgagcaaagtaatcagcagggtctgagtagagaatgactcctttggcccctgccagctgggcatttttaacctaaaaaacacagtgtctttctttccttattttaaattggttgttccagattcggtaatatcaatttacaatattacacttaaatgagtaccaaaactttatcttcaaccttttctcattaggcctacaacaaaggacatctcggatagaatttcccttttctttttgctactataagctctaaaaatc

SEQ ID NO: 439860 - DNA, 573 bp, Homo sapiens
cattgtaccaaaggaaattctttaataaagtctctttcaaatgttaaggttcctatgatattcaaggattgatcattcaccatttgctgggtaacctggtgtgagagggtctcctgcaccattcaaatttaagatatttccacgctggacaccacctccaggaagattccaaccatctggataggacttcaccccacgagcaaagtaatcagcagggtctgagtagagaatgactcctttggcccctgccagctgggcatttttaacctaraaaacacagtgtctttctttccttattttaaattggttgttccagattcggtaatatcaatttacaatattacacttaaatgagtaccaaaactttatcttcaaccttttctcattaggcctacaacaaaggacatctcggatagaatttcccttttctttttgctactataagctctaaaaatcctcagaacatcagatttagaaatgttcttattagtggtagtgagcatttgctatttcctaccactagcttacaaatataataagcaagtagaccccacaggccaaattcctatttgt

SEQ ID NO: 439861 - DNA, 552 bp, Homo sapiens
tactccagcctgggcaacagagcgagactctgtatagttagctttaggagatattttggaaagcgtaatagaatcatgatagaaatcaaacatratacaggaaaatttggcttcatggtcaggaaatagagacaatttaacttcatatttttcataaatttgaaatagcttaattccctttgaatcagacaagattctccatttaaatgacatgtttatggcaagatattcactgaaaagtctgttaagtcgttcatgtttgctaagacaatattttgaagaataaactacaatatgattaagaaactaactccttgttttgatgtttggtttctagcatatctacttatttactctcatactcccaggaaataaagataaattaattttgacaattgacattaagtggctctaaaaggttcaaacaaaacttagttctttagcaacagagatttttattgctgatttttgaacaagaatatgttacttcagattttggggaaaaaactttgaatactttctcattatattcacttcttatttttatgtgct

SEQ ID NO: 439862 - DNA, 569 bp, Homo sapiens
ggttgaggtagtatttttatactccctttacagaagactaaactgagactcagataggctgttttttttcttgctgtttgttggtattaccttcctttttcagtgttccaaagctcctcacaatttcatgaacaacagctgctccactctgagggtcaataccaccaaacacccatgagtcccggtgacctcccagaatgacatatctgtctagaaagcatagatacaagattatttgtcatttcaggtcaataaaagagaaaattgcaaaygactcaatagcatctaaatacaaagcactcacgcctcagaaaaaaaaaaaaggctaggttccccaagatttgtgaaaatatgttatttctgattttaatatgtgtttcttctatctgagaaagcataaatgtgataaagcaaatatatatttcaatgtattactataattataagtactacattaagtaattaagaaagtttaaggttatccttgttcacattttttgtaactctattacttctcttacctaacttaccactttctaatatattcaaagtaagagaacatagtggcc

SEQ ID NO: 439863 - DNA, 432 bp, Homo sapiens
ataaataatgaaatactgatttatattacaatatggataaatattggaaatattatgccaagttaaaagacaacctaaaaactacatattgtataattccatatatatggaacattcagaggcagaacattagagagaggtaactgatttcttggtactagggtagaaggtkaaattaattgtaaaccagcacaaggcatccttttggagtaatgataatgtcaaaaactaaattatggtgacagttgcggaacacaataaatatactaaaattcattgaaagttacatatgggagaatgttacatgggagaattttatggtatacagattatatctcaataaagttgttgaaagtactgaggaatataaaagttataaaattgccaaagtactcttcaaaaaagaataaaatgagatttacattatctgta

SEQ ID NO: 439864 - DNA, 535 bp, Homo sapiens
ttgagaatctctgatttagcccaatgttcataaaagatgatatgtttakgttgtaaaaggatggacaattttaaaaaatctatttggaaagcacaaaaatagaagtccaggatgtaaacttgccactgtagcttcttgcggtttgtggtgggtgaaaagaatggtaggaaatgcatccccttttgcccatacaactacagcacagtgggaaggctactgtgcaggactcttgcttttcagggtctaggagctcaaggaacaagatatagacccaatgtccagggtcccaggcagccctagttttagacatttctttccttaccccaacgttacaaccagtaggtgatcaggaaatgggcccttactacagaggttcacaatgtgtggctgtgaatatttttaaggttcataaagtcaaaactatttttataataataatactatttagacattaattgccctttgaaattttattatcccatgagtatacaggagattttcccaggggctacatgacatgaaatatcacaaaaga

SEQ ID NO: 439865 - DNA, 535 bp, Homo sapiens
ttgagaatctctgatttagcccaatgttcataaaagatgatatgtttaggttgtaaaaggatggacaattttaaaaaatctatttggaaagcacaaaaatagaagtccaggatgtaaacttgccactgtagcttcttgcggtttgtggtgggtgaaaagaatggtaggaaatgcatccccttttgcccatacaactacagcacmgtgggaaggctactgtgcaggactcttgcttttcagggtctaggagctcaaggaacaagatatagacccaatgtccagggtcccaggcagccctagttttagacatttctttccttaccccaacgttacaaccagtaggtgatcaggaaatgggcccttactacagaggttcacaatgtgtggctgtgaatatttttaaggttcataaagtcaaaactatttttataataataatactatttagacattaattgccctttgaaattttattatcccatgagtatacaggagattttcccaggggctacatgacatgaaatatcacaaaaga

SEQ ID NO: 439866 - DNA, 535 bp, Homo sapiens
ttgagaatctctgatttagcccaatgttcataaaagatgatatgtttaggttgtaaaaggatggacaattttaaaaaatctatttggaaagcacaaaaatagaagtccaggatgtaaacttgccactgtagcttcttgcggtttgtggtgggtgaaaagaatggtaggaaatgcatccccttttgcccatacaactacagcacagtgggaaggctactgtgcaggactcttgcttttcagggtctaggagctcaaggaacaagatatagacccaatgtscagggtcccaggcagccctagttttagacatttctttccttaccccaacgttacaaccagtaggtgatcaggaaatgggcccttactacagaggttcacaatgtgtggctgtgaatatttttaaggttcataaagtcaaaactatttttataataataatactatttagacattaattgccctttgaaattttattatcccatgagtatacaggagattttcccaggggctacatgacatgaaatatcacaaaaga

SEQ ID NO: 439867 - DNA, 535 bp, Homo sapiens
ttgagaatctctgatttagcccaatgttcataaaagatgatatgtttaggttgtaaaaggatggacaattttaaaaaatctatttggaaagcacaaaaatagaagtccaggatgtaaacttgccactgtagcttcttgcggtttgtggtgggtgaaaagaatggtaggaaatgcatccccttttgcccatacaactacagcacagtgggaaggctactgtgcaggactcttgcttttcagggtctaggagctcaaggaacaagatatagacccaatgtccagggtcccaggcagccctagttttagacatttctttccttaccccaacsttacaaccagtaggtgatcaggaaatgggcccttactacagaggttcacaatgtgtggctgtgaatatttttaaggttcataaagtcaaaactatttttataataataatactatttagacattaattgccctttgaaattttattatcccatgagtatacaggagattttcccaggggctacatgacatgaaatatcacaaaaga

SEQ ID NO: 439868 - DNA, 466 bp, Homo sapiens
ttttaaggttcataaagtcaaaactatttttataataataatactatttagacattaattgccctttgaaattttattatcccatgagtatacaggagattttcccaggggctacatgacatgaaatatcacaaaagattgaatagagaagcagatgtgagaatccagatgacttctactaagccagacattaaagkgatttgtaaatatgtaatcaaagccactcttttctttatttttatggttttgcaaagtatacttattttttatagaaatattacattaccaattatggttttataattattttaagttattaataaatagatatttaatatttttcagctttaatttctaatacagcatatcttgacattaaaaaacccacatcaacaaaagcttgtggagactctcaattatttcatcagcttaactgaggtataatttacataccataaaatttact

SEQ ID NO: 439869 - DNA, 466 bp, Homo sapiens
ttttaaggttcataaagtcaaaactatttttataataataatactatttagacattaattgccctttgaaattttattatcccatgagtatacaggagattttcccaggggctacatgacatgaaatatcacaaaagattgaatagagaagcagatgtgagaatccagatgacttctactaagccagacattaaagggatttgtaaatatgtaatcaaagccactcttttmtttatttttatggttttgcaaagtatacttattttttatagaaatattacattaccaattatggttttataattattttaagttattaataaatagatatttaatatttttcagctttaatttctaatacagcatatcttgacattaaaaaacccacatcaacaaaagcttgtggagactctcaattatttcatcagcttaactgaggtataatttacataccataaaatttact

SEQ ID NO: 439870 - DNA, 466 bp, Homo sapiens
ttttaaggttcataaagtcaaaactatttttataataataatactatttagacattaattgccctttgaaattttattatcccatgagtatacaggagattttcccaggggctacatgacatgaaatatcacaaaagattgaatagagaagcagatgtgagaatccagatgacttctactaagccagacattaaagggatttgtaaatatgtaatcaaagccactcttttctttatttttatggttttgsaaagtatacttattttttatagaaatattacattaccaattatggttttataattattttaagttattaataaatagatatttaatatttttcagctttaatttctaatacagcatatcttgacattaaaaaacccacatcaacaaaagcttgtggagactctcaattatttcatcagcttaactgaggtataatttacataccataaaatttact

SEQ ID NO: 439871 - DNA, 605 bp, Homo sapiens
cttccttcttgttttcctaatccctgtgaggaattatacttgacccaaatggtttctaatggatttgttcctggacccagcagcctctgctcctcttcaaattcttctttcagattccattctgatgggatggcagatctttctatcaaacctggtgtttggrcctcctgtgatgctcatgttcttgtgctaattagaagttgactgtctatgcagcataatttttttgagacagacaattgagccagagattcaggtctaccttgcagtatttcagcaactcctcagcatgactcttatgttccttaaggctcttcagagtatactgatggtatctgccagtctctatcatggtcttactcagtggcacctgttgcagcttcctactcaatcacgaatcttgatgatacttttggaatccattcatgaggggcttcttgggctctccatggaattgtatctttgtggaagagtcatagttttctggttgagatctcaattgcacattttctgaggctttattgggataaggggatgttttggattggtgcttcttgggcacaacagagttcttggagttctgaactagattgggggggtcttca

SEQ ID NO: 439872 - DNA, 560 bp, Homo sapiens
acatttcaactaccacttctctgggagcctcagaacattggtcagctcctagttacttagaatacattatagggttgtgggaaacaagtacttaagagcttctcggagacgtgctgatgggtgtttttggttttatttattttgtttttttttttttttttttttgcctcttaggaattgttaatatgtttcttagtttctaggattcattctgtcagagtgatacttgttgaacacataggaaatttctagccacttgaatatgcatattactccagtataatctttaaaagctattttttctcaatccagcattaactgggttattttgaaatgctggatttcattagatggaaagttagtattcatgccttccaraaaccttaggagttcctcttaggaccattagtcttggtttttaggtaatgccatttccaggtgtttgagtcattgataatgtcccagttctgcagacacctcagcaggaactcaaatgcctttactctcacaactcggaggatacatttcagagggtattatttctgaaattcttgctatgt

SEQ ID NO: 439873 - DNA, 560 bp, Homo sapiens
acatttcaactaccacttctctgggagcctcagaacattggtcagctcctagttacttagaatacattatagggttgtgggaaacaagtacttaagagcttctcggagacgtgctgatgggtgtttttggttttatttattttgtttttttttttttttttttttgcctcttaggaattgttaatatgtttcttagtttctaggattcattctgtcagagtgatacttgttgaacacataggaaatttctagccacttgaatatgcatattactccagtataatctttaaaagctattttttctcaatccagcattaactgggttattttgaaatgctggatttcattagatggaaagttagtattcatgccttccagaaaccttargagttcctcttaggaccattagtcttggtttttaggtaatgccatttccaggtgtttgagtcattgataatgtcccagttctgcagacacctcagcaggaactcaaatgcctttactctcacaactcggaggatacatttcagagggtattatttctgaaattcttgctatgt

SEQ ID NO: 439874 - DNA, 560 bp, Homo sapiens
acatttcaactaccacttctctgggagcctcagaacattggtcagctcctagttacttagaatacattatagggttgtgggaaacaagtacttaagagcttctcggagacgtgctgatgggtgtttttggttttatttattttgtttttttttttttttttttttgcctcttaggaattgttaatatgtttcttagtttctaggattcattctgtcagagtgatacttgttgaacacataggaaatttctagccacttgaatatgcatattactccagtataatctttaaaagctattttttctcaatccagcattaactgggttattttgaaatgctggatttcattagatggaaagttagtattcatgccttccagaaaccttaggagttcctcttargaccattagtcttggtttttaggtaatgccatttccaggtgtttgagtcattgataatgtcccagttctgcagacacctcagcaggaactcaaatgcctttactctcacaactcggaggatacatttcagagggtattatttctgaaattcttgctatgt

SEQ ID NO: 439875 - DNA, 456 bp, Homo sapiens
gagtgtttgataaatagcaggtatccaaatattgttgaaagacttaagtaatcaccatctsttgtgttcataataggtttagctttaaaaataaaaggaatattattagttatcacttggtaaatatttataatttgccaggcatcttactaaacattagcaagtcatcttattttaatattgatattacttcagtgagtagattgctaggatacctaaggtgaagaaaatcttgcctatatttgtatatctgggttgatcagttaattatgccaatgtaaataaaaatcactattattttttccatttgcacatacaactgtttctgtgcttttataagcctgagcagtatagtattttataagattttaaagatgtcatagctatgtatgttattgttcttaatttgcatattacagaatgttaaaatttacaattgacatttgaacaacagtg

SEQ ID NO: 439876 - DNA, 456 bp, Homo sapiens
gagtgtttgataaatagcaggtatccaaatattgttgaaagacttaagtaatcaccatctgttgtgttcataataggtttagctttaaaaataaaaggaatattrttagttatcacttggtaaatatttataatttgccaggcatcttactaaacattagcaagtcatcttattttaatattgatattacttcagtgagtagattgctaggatacctaaggtgaagaaaatcttgcctatatttgtatatctgggttgatcagttaattatgccaatgtaaataaaaatcactattattttttccatttgcacatacaactgtttctgtgcttttataagcctgagcagtatagtattttataagattttaaagatgtcatagctatgtatgttattgttcttaatttgcatattacagaatgttaaaatttacaattgacatttgaacaacagtg

SEQ ID NO: 439877 - DNA, 456 bp, Homo sapiens
gagtgtttgataaatagcaggtatccaaatattgttgaaagacttaagtaatcaccatctgttgtgttcataataggtttagctttaaaaataaaaggaatattattagttatcrcttggtaaatatttataatttgccaggcatcttactaaacattagcaagtcatcttattttaatattgatattacttcagtgagtagattgctaggatacctaaggtgaagaaaatcttgcctatatttgtatatctgggttgatcagttaattatgccaatgtaaataaaaatcactattattttttccatttgcacatacaactgtttctgtgcttttataagcctgagcagtatagtattttataagattttaaagatgtcatagctatgtatgttattgttcttaatttgcatattacagaatgttaaaatttacaattgacatttgaacaacagtg

SEQ ID NO: 439878 - DNA, 456 bp, Homo sapiens
gagtgtttgataaatagcaggtatccaaatattgttgaaagacttaagtaatcaccatctgttgtgttcataataggtttagctttaaaaataaaaggaatattattagttatcacttggtaaatatttataatttgccaggcatcttactaaacattagcaagtcatcttattttaatattgatattacttcagtgagtagattgctaggatacctaaggtgaagaaaatcttgcctatatttgtatatctgggttgatcagttaattatgccaatgtaaataaaaatcactrttattttttccatttgcacatacaactgtttctgtgcttttataagcctgagcagtatagtattttataagattttaaagatgtcatagctatgtatgttattgttcttaatttgcatattacagaatgttaaaatttacaattgacatttgaacaacagtg

SEQ ID NO: 439879 - DNA, 271 bp, Homo sapiens
acaggtgcatggagtcttagcagaacagccactcaggcatgcayagagacacaggagctttagatacaccagctttccaggcttcatggcaaaagtaactgcaactccagcacagcaggaggttagacccccatacatacccataaaaaagaggctgaattcaagggcctgagcagtgatggtctgcaggccccacttccacagcacttcacaggataagacccactggcttggatttccagccagccactggtagcagtgttgtgcctat

SEQ ID NO: 439880 - DNA, 271 bp, Homo sapiens
acaggtgcatggagtcttagcagaacagccactcaggcatgcacagagacacaggagctttagatacaccagctttccaggcttcatggcaaaagtaactgcaactccagcacagcaggaggttagacccccatacatacccataaaaaagaggctgaattcaagggcctgagcagtgatggyctgcaggccccacttccacagcacttcacaggataagacccactggcttggatttccagccagccactggtagcagtgttgtgcctat

SEQ ID NO: 439881 - DNA, 271 bp, Homo sapiens
acaggtgcatggagtcttagcagaacagccactcaggcatgcacagagacacaggagctttagatacaccagctttccaggcttcatggcaaaagtaactgcaactccagcacagcaggaggttagacccccatacatacccataaaaaagaggctgaattcaagggcctgagcagtgatggtctgcaggccccacttccacagcacytcacaggataagacccactggcttggatttccagccagccactggtagcagtgttgtgcctat

SEQ ID NO: 439882 - DNA, 598 bp, Homo sapiens
cttgaaaatgttgaagcaactttggaattgggtaatgggcagaggttagaacagtttagagggctcaggataagataggaagatgggaaagcttggaactttctagagacatattaaatagttttgaccaaaatgctgagagtgatgtgaacaatgcagtccaggctgaggtggtctcagatggagatgaggaacttattgggaattggagtaaaggtcactcatgctattctttaacaaagagactggtggcatttttgcccttgccctagaaatatgtggaacrtcgaccttgagagaggtgatttagggtatctggtgaaagaaatttctaagcagcaaaggatttaccaggtgacctggttgattttcaaagtcttcagtcttatgcattcacaaagagatgggttgaaactggaacttatgtttaaaagggaaacagagcatataagttaggaaaatttgcagcccgaccatgtagtagaaaagaaaaatgcatcttctggggaggaatgcaagctagctgcagaaatgtttttgagtaatgtggagcagaatgttaacagccaagacaatgggaaaaatgtctccagggcat

SEQ ID NO: 439883 - DNA, 571 bp, Homo sapiens
gtgtttcagctctgtttgtgttacgcctctttcagtcctgccattcagtggtctcccagttcttgtcccatgtccaggargaatgaggtatgcagatgactggaaggtgagtaaggtggagaggagctttcattgagcgacagaacagctctcaggagacccaaagtgggtagctcctttttaggtagctcctttctgcaggcaggtcatcccaatgagtgtacagctctcagtggagaggagaccagtggtctcccactgtcagggagactagaagtgggtagttccaccctcagctggtagtcctgacatctttctgagtctggctgaatcaattctatgggctcagagggaggaagtgcatgctgattggcccatgggtgggcccctaaaaagcaccataagttctcactcccagctgcagtctccacccagagctggcagcctggcccccgggcttcaggccatccctgtcttgaaggttggatttcacgagggacccacccctttccacccaggaacctgtctgcctcctgccatcaacatgttgtccaggtgcccaggcagttca

SEQ ID NO: 439884 - DNA, 571 bp, Homo sapiens
gtgtttcagctctgtttgtgttacgcctctttcagtcctgccattcagtggtctcccagttcttgtcccatgtccaggaagaatgaggtatgcagatgactggaaggtgagtaaggtggagaggagctttcattgagcgacagaacagctctcaggagacccaaagtgggtagctcctttttaggtagctcctttctgcaggcaggtcatcccaatgagtgtacagctctcagtggagaggagaccagtggtctcccactgtcagggagactagaagtgggtagttccaccctcagctggtagtcctgacatctttctgagtctggctgaatcaattctatgggctcagagggaggaagtgcawgctgattggcccatgggtgggcccctaaaaagcaccataagttctcactcccagctgcagtctccacccagagctggcagcctggcccccgggcttcaggccatccctgtcttgaaggttggatttcacgagggacccacccctttccacccaggaacctgtctgcctcctgccatcaacatgttgtccaggtgcccaggcagttca

SEQ ID NO: 439885 - DNA, 610 bp, Homo sapiens
gctatctaaacttagaaaataatgatggagtcccaaaaatttaatgaaagatatatacatactatattttgcacaagcatacagacacaatgatttatcatcaacaatagatgctgttcctttttgcagtcaacaaagatcctttacctcattttcaactactggtgaatctagatatcagcagcttattataggtgattgtctttgaattacaggagtcctttgtcrgtaatgtaacaccttgtcaagtaatatttttatatgctgcacttgtaaatacgcataaaatattcacaagagccacatgcatagtttttcagcaatccttaaaaaataatctttgagcagtccccagctaattttacattcctgcgaaacagaataataaccagaatatataaagagctcaaacaactgtataggaaaaaatctaatcacatgactttttaaaaagggcaaacaatttgaaaagatttttctcaaaagaagacatacaaatggcaaacaggcatatgaaaggtgctcaacatcactgattatcagatgatattgtttggctctgtgtccccacccaaatctcatcttgaattatagtttccataattcccat

SEQ ID NO: 439886 - DNA, 610 bp, Homo sapiens
gctatctaaacttagaaaataatgatggagtcccaaaaatttaatgaaagatatatacatactatattttgcacaagcatacagacacaatgatttatcatcaacaatagatgctgttcctttttgcagtcaacaaagatcctttacctcattttcaactactggtgaatctagatatcagcagcttattataggtgattgtctttgaattacaggagtcctttgtcggtaatgtaacaccttgtcaagtaatatttttatatgctgcacttgtaaatacgcataaaatattcacaagagmcacatgcatagtttttcagcaatccttaaaaaataatctttgagcagtccccagctaattttacattcctgcgaaacagaataataaccagaatatataaagagctcaaacaactgtataggaaaaaatctaatcacatgactttttaaaaagggcaaacaatttgaaaagatttttctcaaaagaagacatacaaatggcaaacaggcatatgaaaggtgctcaacatcactgattatcagatgatattgtttggctctgtgtccccacccaaatctcatcttgaattatagtttccataattcccat

SEQ ID NO: 439887 - DNA, 576 bp, Homo sapiens
aaaaggtgaattaaagcagaatttcctagaacaattttaaacatcacccttctgtaagtatagtgttggaaaagtttccaagacactgctatttgaggttttctatgactagatgaaatttagatatagtagcttatggttaatattatctaaacccttatagttatagagaactagtgtatttatatcctcaccacttaaacgatttctgtatgtttttggctgtaaatttttaacatattgatacaaaatacatttaattaccaaacatctaagaagttttatcaacatgtatactaattgaagaaagaaaaatgtaatccaaatcccattaattttcatgttaatttattttgtttttcagagtcatatggacatggtgcttgaatacagtataataacttacatttcaataaccttataagtagaaataattttccaaacattgtwccccaatatatatattattacatggctacaactattaaaatcataaccttttatttttctatgtgttctataagtctaagacatttaccaagtttgttagttccagtagggtattttttggcaaac

SEQ ID NO: 439888 - DNA, 576 bp, Homo sapiens
aaaaggtgaattaaagcagaatttcctagaacaattttaaacatcacccttctgtaagtatagtgttggaaaagtttccaagacactgctatttgaggttttctatgactagatgaaatttagatatagtagcttatggttaatattatctaaacccttatagttatagagaactagtgtatttatatcctcaccacttaaacgatttctgtatgtttttggctgtaaatttttaacatattgatacaaaatacatttaattaccaaacatctaagaagttttatcaacatgtatactaattgaagaaagaaaaatgtaatccaaatcccattaattttcatgttaatttattttgtttttcagagtcatatggacatggtgcttgaatacagtataataacttacatttcaataaccttataagtagaaataattttccaaacattgttccccaatatatayattattacatggctacaactattaaaatcataaccttttatttttctatgtgttctataagtctaagacatttaccaagtttgttagttccagtagggtattttttggcaaac

SEQ ID NO: 439889 - DNA, 560 bp, Homo sapiens
ctatcaagtttaaaatgtgatggataaaaattagaaatattttatataaagtacctaaaaagaatagtaaatcayatgaaatgtaaataccattataaattttctcttgagcatattttaaataggatacgattaagagaattctataaaggtatttgaggatatggaaaaaagttaagtacaaataaagacactttaactgaacaaaggtcacataaggagaaatgcccagatttcaataataattcaatattgaatagctgtatcataacatggattttttctgaaaatattaaaactaggttatttcaaaacaatcaggcctaaaaagaagcagtaagagctatatatacacagtcagccagccatcacgcttcaaagcatctcggttaactggatggaaggtcttgctattaaattaacttcttaagttaacaacaacaacaaaaagccagcaaaaatatattgctcatgagacagagagagagacttctgttcctgttgcgttggagatcgttgcaatatgttactttcatactaaccacataacaagacagacc

SEQ ID NO: 439890 - DNA, 560 bp, Homo sapiens
ctatcaagtttaaaatgtgatggataaaaattagaaatattttatataaagtacctaaaaagaatagtaaatcacatgaaatgtaaataccattataaattttctcttgagcatattttaaataggatacgattaagagaattctataaaggtatttgaggatatggaaaaaagttaagtacaaataaagacactttaactgaacaaaggtcacataaggagaaatgcccagatttcaataataattcaatattgaatarctgtatcataacatggattttttctgaaaatattaaaactaggttatttcaaaacaatcaggcctaaaaagaagcagtaagagctatatatacacagtcagccagccatcacgcttcaaagcatctcggttaactggatggaaggtcttgctattaaattaacttcttaagttaacaacaacaacaaaaagccagcaaaaatatattgctcatgagacagagagagagacttctgttcctgttgcgttggagatcgttgcaatatgttactttcatactaaccacataacaagacagacc

SEQ ID NO: 439891 - DNA, 547 bp, Homo sapiens
aacagttttaaacaatcatattttacttattatgagatttatttttcatgatttaacatcactctatgttattagagtattgataaataaaatttccgtgtgtgcatgtgtgtgtatttctagacttayagagagtaaagccaatagatgacagtcaaaatcaaaattaacaaaagggcttaaattatgcagataagaaaaaaagttgcaatattatgataacagaataagaaagttagcacaagtcattacattaccacattagtgtaattctaattaatgaaaatatgctttcttagactttttttatgccttgtattacttgttgtttcctccacaattattattatgcaaataaagtaattatttgataatatcattatagttacatgtagactgaaaaattaggccaggcatggtggcttgcacctgtaatcccagcactttgggagccgagttaggtggatcacttgaacccaggagtttgagaccagtctgggcaacatggcaagactctatctcttcaaaacacacaaaattagcaagc

SEQ ID NO: 439892 - DNA, 547 bp, Homo sapiens
aacagttttaaacaatcatattttacttattatgagatttatttttcatgatttaacatcactctatgttattagagtattgataaataaaatttccgtgtgtgcatgtgtgtgtatttctagacttatagagagtaaagccaatagatgacagtcaaaatcaaaattaacaaaagggcttaaattatgcagataagaaaaaaagttgcaatattatgataacagaataagaaagttagcacaagtcattacattaccacattagtgtaattctaattaatgaaaatatgctttcttagactttttttatgccttgtattacttgttgtttcctccacaattattattatgcaaataaagtaattatttgataatatcatyatagttacatgtagactgaaaaattaggccaggcatggtggcttgcacctgtaatcccagcactttgggagccgagttaggtggatcacttgaacccaggagtttgagaccagtctgggcaacatggcaagactctatctcttcaaaacacacaaaattagcaagc

SEQ ID NO: 439893 - DNA, 586 bp, Homo sapiens
ataacaaatcatcataacagatatggtaataatgacaaagtttgaaaaaaatgtgacacagagacattaagtgagcacatattgttgaaacagtggctccaatagacttgctggaagtaggcttgccacacaccatcaattagcaaaaaacaaaaatgcaacatctgcaaagtacaatgaagtgaagtacaataaaacaaagtatgccactactaatgtaaattctttttcataattgaatataaacctatttatttgggtatcagtccttggtttgttgtcttattgtgatctttatgatctatctcatctatttaacagttatggtgagatatgtaccttctgtggaaatattctgcctgccatatcttaagctgtataatattcccgagtatatttttagcaaatttaattgtgtggtgatgttcaggtgcctcattttaaaaagagctctctgctstttgtaccccactttcagggataccttttatttaatcaagagaaatcttattttaattaataatatattaatataataatatcagtgttgcacataacttacacactgtatataatttatattatt

SEQ ID NO: 439894 - DNA, 538 bp, Homo sapiens
gtgtgtgtgtgagagagagaaggagagagagagagagaacataaaactgagaaacagtgactacaattgtccacaagaacaatctaaaaatagaataagagtatgttgctaaatctatgccaataaaatttaaaactacaacgaatggataaataattttaaaagtacaatgctccaagtccttgtcaaaaagcaatrgcatggatatggaattctatagctattacaaatattgaatcattggctaaatctgttcccgcaagtaactcctcaggccatgtgatgaattaccggcaattctaaccaaacttgcaagaaaatgcatattccaattgtacacaaatttttacaagagcggaatcagaggtcacatttctccactcattctaggaggccaatatgactttgatacaaaaatggaatttgagcagttcaggaaagaaaaacatcatcaggttaatagaaatcatgagcagtaattcaaatatcttaaataaaacaattgtaacctcactccagtagtattaaaaaaaaatct

SEQ ID NO: 439895 - DNA, 538 bp, Homo sapiens
gtgtgtgtgtgagagagagaaggagagagagagagagaacataaaactgagaaacagtgactacaattgtccacaagaacaatctaaaaatagaataagagtatgttgctaaatctatgccaataaaatttaaaactacaacgaatggataaataattttaaaagtacaatgctccaagtccttgtcaaaaagcaatagcatggatatggaattctatagctattacaaatattgaatcattggctaaatctgttcccgcaagtaactcctcaggccatgtgatgaattaccggcaattctaaccaaacttgcaagaaaatgcatattccaattgtacacaaatttttacaagagcggaatcagaggtcacatttytccactcattctaggaggccaatatgactttgatacaaaaatggaatttgagcagttcaggaaagaaaaacatcatcaggttaatagaaatcatgagcagtaattcaaatatcttaaataaaacaattgtaacctcactccagtagtattaaaaaaaaatct

SEQ ID NO: 439896 - DNA, 628 bp, Homo sapiens
cattactacaaaatttccaaaaccaaaagtcgrccattatcccctacatgaatatagattcactgaagcttttaagtcaagaactacattcttcatgaggctgtgcaagaatgagaattgactgcaataactctctgtctttggtagattacattttcagtttgatgcagacactctgaacctgtgaatgctcctgaatgggttgcacaggcatggtggtttcctcctccaatgttaccgaagtcctcgttataggctgtgactactgaacacctattggggccagctaaattctaagtgagctcgttggcattacagagttaatatcttgtattacaactggtgctggtgaattctaaatttgtctagcatgagttgaatccactgatctcaatttcatgatctttatgtgggctgcgagttgttgagattattctgacaccaatccataaatgaaatgatttaatgtcatttgtttattactacatctctggtcattgtacaattatacaaagagtatattatcaaatatttgtttaaagagtgaataggtaaaattatgccgaagttccctcaatcaaggtgactcgaaatggttgtctgacaacataatattctttaggcattt

SEQ ID NO: 439897 - DNA, 628 bp, Homo sapiens
cattactacaaaatttccaaaaccaaaagtcggccattatcccctacatgaatatagattcactgaagcttttaagtcargaactacattcttcatgaggctgtgcaagaatgagaattgactgcaataactctctgtctttggtagattacattttcagtttgatgcagacactctgaacctgtgaatgctcctgaatgggttgcacaggcatggtggtttcctcctccaatgttaccgaagtcctcgttataggctgtgactactgaacacctattggggccagctaaattctaagtgagctcgttggcattacagagttaatatcttgtattacaactggtgctggtgaattctaaatttgtctagcatgagttgaatccactgatctcaatttcatgatctttatgtgggctgcgagttgttgagattattctgacaccaatccataaatgaaatgatttaatgtcatttgtttattactacatctctggtcattgtacaattatacaaagagtatattatcaaatatttgtttaaagagtgaataggtaaaattatgccgaagttccctcaatcaaggtgactcgaaatggttgtctgacaacataatattctttaggcattt

SEQ ID NO: 439898 - DNA, 628 bp, Homo sapiens
cattactacaaaatttccaaaaccaaaagtcggccattatcccctacatgaatatagattcactgaagcttttaagtcaagaactacattcttcatgaggctgtgcaagaatgagaattgactgcaataactctctgtctttggtagattacattttcagtttgatgcagacactctgaacytgtgaatgctcctgaatgggttgcacaggcatggtggtttcctcctccaatgttaccgaagtcctcgttataggctgtgactactgaacacctattggggccagctaaattctaagtgagctcgttggcattacagagttaatatcttgtattacaactggtgctggtgaattctaaatttgtctagcatgagttgaatccactgatctcaatttcatgatctttatgtgggctgcgagttgttgagattattctgacaccaatccataaatgaaatgatttaatgtcatttgtttattactacatctctggtcattgtacaattatacaaagagtatattatcaaatatttgtttaaagagtgaataggtaaaattatgccgaagttccctcaatcaaggtgactcgaaatggttgtctgacaacataatattctttaggcattt

SEQ ID NO: 439899 - DNA, 628 bp, Homo sapiens
cattactacaaaatttccaaaaccaaaagtcggccattatcccctacatgaatatagattcactgaagcttttaagtcaagaactacattcttcatgaggctgtgcaagaatgagaattgactgcaataactctctgtctttggtagattacattttcagtttgatgcagacactctgaacctgtgaatgctcctgaatgggttgcacaggcatggtggtttcctcctccaatgttaccgaagtcctygttataggctgtgactactgaacacctattggggccagctaaattctaagtgagctcgttggcattacagagttaatatcttgtattacaactggtgctggtgaattctaaatttgtctagcatgagttgaatccactgatctcaatttcatgatctttatgtgggctgcgagttgttgagattattctgacaccaatccataaatgaaatgatttaatgtcatttgtttattactacatctctggtcattgtacaattatacaaagagtatattatcaaatatttgtttaaagagtgaataggtaaaattatgccgaagttccctcaatcaaggtgactcgaaatggttgtctgacaacataatattctttaggcattt

SEQ ID NO: 439900 - DNA, 544 bp, Homo sapiens
ctttttaaactatagttgggccttgaacaacatgggtgatagagcactgaccgccacacactcaaaaagcaacataacttttgactctccaaaacttaactactgatagcctgctgttgaccagaagccttactcataacataaacaacactttgtacgttctatgtgttatatactctattcatgcaataaagtaagtcagataacagaaagtgctattacaaaaatcataaggaaaagaaaatatgtttactattcataaagtaaaagtggaccataaagatgtttattcttgtctatgcattgggaaggctgagaagtaggaaaaggagggataggtctttctgtctcagggttggtagaggaagaaraggtaaaggatgtggaagaggaaacaaaagaggcaagcaccctcagtgtaagttttattgaaaaaaaaattactaagtggactcacacagttccaactcatattgttcaggaatccactgtagtctttttttattaaacactttttatattgtttagtttgaatgtgtcatat

SEQ ID NO: 439901 - DNA, 565 bp, Homo sapiens
tgtttagtagttgatgtggcttggctgtgtccccacttatatctcttcttgaattcccatgtgttgtgggagggacccagtgggaggtaattgaatcatgggggcagttctttcccatgctgttttcatgatagtgaataagtctcatgagatctgatggtttcatgagggggagcttcccttcagaagttctttttttgcctgctgccatccatgtaagatgtgacttgcttctccttgttttccataattgtgagatatttaaatatagacattgattagagtttagaaattttctattatccctttcatttattaaggtaagatatctgagacccagaaagctcatagtgtcctagattataaagtaaatttgcataagcatttttgtatatttacttttgtctaatatattattttaagcaatcattctttttttaaagggtgataaagattaaactgatttattgttttgatatgcaataattaatgtgcatttcattaggtgacagaaatgtcaagaagaataaaacaaastctctgactttaaagaaatcatgtttta

SEQ ID NO: 439902 - DNA, 489 bp, Homo sapiens
acttaaccccattgcaagtcaaggagcttctgtagtgatttttgtaatgcctgagaccctaggaatacaggagaaacctgctaccttaaacattttaaagtttctactgtattatttatctatacatcatctagtaatatttcttcattctctccctcagtcattttttggcacatgtgcaatgagtaccgaaatgtcaggtgctctgtgagaacatagcattctaatgatgaaaacaaacttaggataacaaactgatgatatttcctactaaggttcatacataaaggtccatagaaaagcatatattttaaaacatattccaagattgaatgtgttgatgtgacatcatsgaattataagattaattagtttacttcactttagaatttttaatatataccctaaatagatattaaaaattgaaaggaagtaaaaaaggtataggaacttgattgaaaggtgggtgctatggtttgaattgtgttc

SEQ ID NO: 439903 - DNA, 513 bp, Homo sapiens
ttgtgaaattagctcatttggtttttactcaatactatgtccctcaattaaactttttgtccaatatatgttcattttaaacaatgaacatatatttactctgatgccaaaagtatttaaataattttatgtattttccaaaaacttagtcagaaaatatatcaaggtataattttaataatttacatacatcacatatctagcttctataatacaaactccatattaatttctgtatatcacactattaatgattcactcaattcattctgattttttctcaagagacctttgtttaatgtcttatattaaataaaagaattttagtttgctaataacaaaatcattagaaaaacatttaaagtaataaattgatttgtattcatatagaatttaaaaaaattaaagttctatttataattatgagactatgttcaaagcagaaaataatctgttgyatatagaaacacaaacatgttttttaaaactgatttctagtgaaaatgatttgag

SEQ ID NO: 439904 - DNA, 656 bp, Homo sapiens
ttagcattctgatgaaattggcaaaaaagcttgcaatgttggttggataagcctcggtatgttcctcttctttcctagtcttccctgaatgttatttttattttacaaatattaaaacaaaamccaaagataactcttaggctttctctttatttttaatcacttgcttcttagcttctccccattcaccttgggataactcctgttctaataactgaagaaatttctcccagtctcctaaatcctctctctggttttgaagtcccaaagttgggtaggaaggtgttttggtctatctaccaaatagtgccattagtattcattataattcaatctcttgttccttcttaatccggaatgaaatactggaactttgtttgaatgagagagttaagtacaaggatttttaaagaagaggttgtgagttcaagtacagactcacgggatatgaatatatgttatcatagttagcactcccaagcccaaagtaaatgtatatttatcctttctcaaatatttggttgcactttctgaaatgtttatatagttatacctataaaaaatcagggtaacttacttgagagtaactaaaatgatttctaattatattcctgtttagcttgaatgttaaaatgtcacagtcaattctattcaag

SEQ ID NO: 439905 - DNA, 543 bp, Homo sapiens
tctttgatcaccaccattctattctctgcttctatgagtctgacatttttagattccacatataactgagataatgtggtatttgtctttctgtgcttggtttatttcacttagcataaagtcctcctgttcatcgatgttgttacaaatgacatgattctcttcttttttatggctgagtgatatactattttgtgtgtgtgtgtgtgtgtgtgtgtgtgtgtgtgtgtgtaacattttctttatccattcatccattgatggacacttagattaatgccatatcttggctactgtgaataatgttacagtaaatatgggagtgcaattatctctttgagattctgttttcaattcatttggataaatatccagaagtaggattgctaaatcatttagcagttctatttctaaattttgagwaagtcctatattgtttttcatagtgtctagttatttttcacattaagtatgcattttacaattcttatttatttcatatttttctaccacaattttagttatatgtatagtttgaaaatc

SEQ ID NO: 439906 - DNA, 585 bp, Homo sapiens
tacatttgtggattcatgagaatgataacctttttttttttttttaagtatagtaagaccaaaatccaaagacatttgtagtaatgagacctggagtcacgaaaaaatgttgaacacttttgaaagctggctggctcacacatctagaaagggaatagggcacaaaaaaaaagttaaacttgcaggtgcagataagtaggctggggaggaattttaaaatacctgctaagtgctatacaggaaaaatgtatggaacagcaggttttccacactgatgagactggcttgttttaaaaacatattggcaatcaaacatatcctaatgcaaataacattttgtttgacaaaatgtgaccagaggcttgcaggggcctaatcttgtattttctcaagatgcaacagctcagtattcacaaatccagtgtttgtagcgattttataaaacataattcctgcaaataatgagaatgagctacacgtagcattactttattccatagtaatgagtagtagccttttaatataaatatctactattgctcttggataagtattttctcrtatttattaatatatcagagacat

SEQ ID NO: 439907 - DNA, 552 bp, Homo sapiens
gattgttctgtcattttcctcatttcttccttttcctcacttatagcagaaaagtcttacccattcccccactctaagtgtcccctctgagctgagaaacttgatgatcttgtcacaggtaaacaggcaaaagaacatccctgcactttccactgtcctaggcatgcggctgaatgcagggctctgcagagaggaaccatctccacgctgttgtgcctgtagtattggggcaccaggtcctccacctacatgatgagaatagtctttataactaataatccttatatcagaataattagacaaaccttatattctgaggggtactgtcattctcttaacctaattcctggaatccagtcccttatctgtcttaatcaaattttctaaaagttccttctcacttccattgacttaatgactattgtagctttagcttccttttgcatccaagaccacagacttccacaagtctgcttgattttcttttccaaacacaaggagtcattttactcattgattgctaycaacctatgactcctgataggccttatc

SEQ ID NO: 439908 - DNA, 586 bp, Homo sapiens
tgtgcccacccaggttaagggtgggcctcccttcrccagcccactgactcaaatgttgatctcctttggcaaaaccctcacagacacactcgggatcaatactttgtatccttcagtccaatcaagttgacactcagtattaaccatcacaatgaccatgcttgaaaacaaagggaagctaagcaaaattaggtctgattttcaataattgtagaagaatgtctaggcaaagaaacagaaagccctcatagcccagggcagcctaaattccaagaaacaagtggcaaatcccaagtctggttttgcaggtgctggcgtttctatgttctgtacatttttaaactttgtctttcactgagcatccttgaagagagttccattggtttcacagtggggatgctgcctcttgactccacagaactcttagcatggaaattaaccaaacttcaaaagttctttgtgttctagaaaacaaacaaaacacactctgagggacttattatttgtaacacttaaattctaaaacacgtgcacatgcacacacacacttatacatatttcaaaatgtaatgacctgtcttaaaaa

SEQ ID NO: 439909 - DNA, 599 bp, Homo sapiens
aatgtaagtttccaactccttttggtaactaccatagagtgagatttgctggattgtatggcatgagtacatttaactttgtatgaaactactaaaccaatttacaaagtagctgtatcattttgtgttctgcccagcagtgaatgagagttcttgttgctccacatcctcatcagcatttggtgttgccagtgttctgggtattggccattttaatatatgtgtagttttatcttattgttgccttaatgtgcatttccctgatgacctatttccctgattttaaagtttgtatgaaggggaaaaacacccagaatagccaacacaatattgaaagagaagaacaaagttggatgactgacattacttgatttcaagrcttaactataaagcaacagcaaccaagacagtgtagtattgaagaaagaatagacaaatagataaatggaacagaataaaagcccagaaatagacttacacagacatagtcaattaatctttgacaaaagaccaaaggtgatacagtgaagaaaagatattcttgacatctacatgctaaaattaagatgtacctagacacagacctcacactgttcaca

SEQ ID NO: 439910 - DNA, 599 bp, Homo sapiens
aatgtaagtttccaactccttttggtaactaccatagagtgagatttgctggattgtatggcatgagtacatttaactttgtatgaaactactaaaccaatttacaaagtagctgtatcattttgtgttctgcccagcagtgaatgagagttcttgttgctccacatcctcatcagcatttggtgttgccagtgttctgggtattggccattttaatatatgtgtagttttatcttattgttgccttaatgtgcatttccctgatgacctatttccctgattttaaagtttgtatgaaggggaaaaacacccagaatagccaacacaatattgaaagagaagaacaaagttggatgactgacattacttgatttcaaggcttaactataaagcaacagcaaccaagacagtgtagtattgaagaaagaatagacaaatagataaatggaacagaataaaagcccagaaatagacttacacagacatagtcaattaatctttgacaaaagaccaarggtgatacagtgaagaaaagatattcttgacatctacatgctaaaattaagatgtacctagacacagacctcacactgttcaca

SEQ ID NO: 439911 - DNA, 611 bp, Homo sapiens
tccatttacatttagtattattactgatttggggagtactaatttataacatcttattttgtgttttgcatttattatgctttttaatttttttctatttttaattgtattgaggcttttattgtttttgtttttattttgctttttatctctccttttaactttggaagttatacattcaatgtctattcttgtggcaattgcacttaattgccttttaccatgtgtagttgatttaataatatctgaaacagtaaatattctaaacctcttattgaacarcaatattcttataatattttaattgtaatctaccactgacattttatattattgttgttcaatattttactttcatcttgtttataatgccttcaacatacttgattattattacaagtagtattcctggatcttaggaattattctttctttagattcacttacatttttacaattcctttacataccattttcttcacatactactccttccttctgaatttaatttctttttaatagaagtgtgccttttgattttttttgttttttattgagtattatctctaaaaggtaaaatttttagtgtttctttgtcttaatgtgttttc

SEQ ID NO: 439912 - DNA, 611 bp, Homo sapiens
tccatttacatttagtattattactgatttggggagtactaatttataacatcttattttgtgttttgcatttattatgctttttaatttttttctatttttaattgtattgaggcttttattgtttttgtttttattttgctttttatctctccttttaactttggaagttatacattcaatgtctattcttgtggcaattgcacttaattgccttttaccatgtgtagttgatttaataatatctgaaacagtaaatattctaaacctcttattgaacaacaatattcttatamtattttaattgtaatctaccactgacattttatattattgttgttcaatattttactttcatcttgtttataatgccttcaacatacttgattattattacaagtagtattcctggatcttaggaattattctttctttagattcacttacatttttacaattcctttacataccattttcttcacatactactccttccttctgaatttaatttctttttaatagaagtgtgccttttgattttttttgttttttattgagtattatctctaaaaggtaaaatttttagtgtttctttgtcttaatgtgttttc

SEQ ID NO: 439913 - DNA, 638 bp, Homo sapiens
tgtgtgtgtataaaagaaggaggtagtctccatttgtagaagaaaaggtagcttaatctaaaaacccaggaacattaactaataaatggttagaatgaattagagggtaaatgaagtagaaatagagtccatttgcaatatccacaagctactgaagatactaagggttaaactaagtgcaaactcataggatctatattgagaaacttgtaatgctttattgaagaatacaggaagatctaagaaatgcaaaggatagtatgctcctagttgagaggattcaataatgtgaaaatatcaaatttctttgtgatttatctataaatcaatataaattctgataaaaatagctatggtatttttggaagttgatccactgtgtaatcttgaagagaaatagaaataataaaaaacasattgaaaacaaaataagcaacaaaattaatgaaaaaacaatgaggggaaggactcaccttatcagatgtcacaatattctgttgagatataatgaaaaaggtgtgtttattggtgcagatatacacaatacagaatagagactctagaaacagacatgggcacatgttaaaatttaatataacagtgacatttcagatcattagaaaaatgtacatatgtaa

SEQ ID NO: 439914 - DNA, 589 bp, Homo sapiens
aatagagaaaaatggaaaacaaccgaaataagctattatgagtgaattatatcatacaatgtattttaccatatggcaattaaaacgaatgaaatgagagctctatgtggcaaaatggataatcatgtgaagagagcgttgagccaaaaacgtgcaagctgctaaagcaatgaaaactattagagatgtatctgaaatctagattcaatacttacattatgcccgtgttccaggtttacccatgacagttgttgtgtagtttagttgaattcaaaatatgttgcctattctgggtacatactccttcaaaaccagaaaactgagaagtaaatattagaatgtgctacatttaaatttttattaaaaattrtaataaagtcattttcactatctattgattcttccttgggtagattatttttaaaatattttcatttttaaatttttaattatttatttattattatttgtataaatttaaagggtacaagggcaattttgttacatggatatattatatagtggtgaagtctgggcttcaacacaaccaccacccaaataatgtacatcgtacccattaagtaaattt

SEQ ID NO: 439915 - DNA, 502 bp, Homo sapiens
gtgaaaccccatcactactaaaaatacaaaaattggccgaacgtggtggcgggtgcctgtaatcccagctactcgggagtctgaggcagaagaatcacttgaacccaggaagcagaggttgcagtgagccgagactgcaccattgcactccagcctgggagaccagtaagactccatctcaaaaaaataaataaataaataaaataaaataaacaagaatgacatccaagtgacacaggccatattgtgtacagcctaatagaaaaatacatggagtttgctccttttttttttttttcatgtcagaagattaaaatggaggagtgatctacttcgtgctttcgaagtcaattctggctgctttgtgtaractgtgaacagtaggcctcagggatatcaggttgctggtagtcattccagtgatccagggaagagaggaaggtagaatagtctaaagagtgacaatgacaaggtgagagctggaatatgctttcatgacttg

SEQ ID NO: 439916 - DNA, 553 bp, Homo sapiens
attaatattatgttcctattactgcagctaatcctacctctgtcactaacattcaacatttccttcctctgccatgtttttaaaatctctagatctccctatctctcagctagcatctcagctgatcttggttgcttgcttgatggaatcatcgaggccctcatccctgagagaccccttacttgccatatcctacttggcctgcagttgctatgattgcccatttgtcctgatcagtgggcataaaggcacaaagtaacagccttgtgaatcccctgcactcaatatattctcttcactctcctcgttgtacaccagctaccatagctcgtggtgatcagaattacattcagcattacaataactttcttttttggccaatttgttcccagcattaaggagccaggttactaggtggtaactgtascatcaagttcactgtaacccttgtgtcctgatagaagcatttctcatcccaccccacttccagaccaggacctcaaatatggctgacataaagtttcaaagtcaaaagcgcgaattctgcaaatgg

SEQ ID NO: 439917 - DNA, 615 bp, Homo sapiens
gctaacataatactgcatggagaaaaattgaaagcctttcctctaagatctggaccaagacaaggatgcactttcaccagttttattcaacataatactggaagtcttgcctaaagcaattaagcaagataaagaaagaaacgacatccaaattggaaggaagaagtcaaatatgctttgaatgcaatgacctgatcttgtatttagtgaaaactagagacttcaccaaaaaattggttaggactgacaaataaatttagtaaagttgcagtatatacaatcaaggctgggtgcagtggctcacatctgtaatctcagcactttgggaggccgaggcaggcagatcacttgaggccaggagtttgagaccatcctggccaacatggtgaaaccctgtctccactaaaaatagaaaaattagaggggcgtggtggcatgtgcctgtagtcccagctactcgggaggctgagacaggagaatctcttgaatgcgggaagcagaggttgcagcaagctgagattgcaccactgcactccgggctcagcaatagagtgagactgtctcaaaaaaaamaaaaaaaaaaaatcagcattcaaaaatcagcagtctttgaat

SEQ ID NO: 439918 - DNA, 609 bp, Homo sapiens
agagtgactggactctaagctgagacgtcaggggccacctttcataaaactcccctctatttgtgctattccttctttgaccctagaggctggattccctccagcttctattactggtctcagacaagattaaatgatacattttagcagtactttacaggtagacactattacatttgatacattttagatgacattcgaataatgtcagctaagctagaattagagacttagagattcaaaacactctgtatactttttcattttcattttcatttttcagaaatatcttgtggttttttaaatctaaaaactgccaagctaggtagaagggtattactacttttatatgggattcttagtcattcaaaatttgtcatatgaatatattaaagaaaaattaagtctttacatttccaagacaccaaaccctccttcagtaaacctttrgaaaaaataataaaaatgtactcatttcaaaaaatctaactttcttcagttccaacagatatccaaagaatagcaaagttgtgattgttctgattactggtaaaagacaaggattttcctcacattgccatttctagataatagaaaattgagaatata

SEQ ID NO: 439919 - DNA, 594 bp, Homo sapiens
gattattcattcctctgtgaatcaccacaaacagcacagcccttgattagytgcatcagggccacatatggctactatgtaagttgaatgtgcagtgtacctttatagaaagaaaagaagatgttatacttccacgtttttatggaagaatgtatgttttcttaaaaatttataaaactgaaaagtacaaataaagtaaaataattttaccatccagaaataaccaccgaaatgcctttgcattgtctttttagcatgctcatcagccccctgctaagcatgactattttttgaaagaatatagaataatttcctttttgaaaaacatggcttttccaattatgaatgtatctttatttcccatttcccatgctgttaaatatctttctaagcctgattttttaaagtggctgtacagtattggattaaatctctgtagcataaattaaattcacctttgtcgttagaactgtaggtttccagtattctctaccataaagtcacatacatggctgaggacatcaaaggcacatgtgccaaactcctacacaactcatggctttgtacatgatttacattactatacgttagggt

SEQ ID NO: 439920 - DNA, 594 bp, Homo sapiens
gattattcattcctctgtgaatcaccacaaacagcacagcccttgattagttgcatcagggccacatatggctactatgtaagttgaatgtgcagtgtacctttatagaaagaaaagaagatgttatacttccacgtttttatggaagaatgtatgttttcttaaaaatttataaaactgaaaagtacaaataaagtaaaataattttaccatccagaaataaccaccgaaatgcctttgcattgtctttttagcatgctcatcagccccctgctaagcatgactattttttgaaagaatatagaataatttcctttttgaaaaacatggcttttccaattatgaatgtatctttatttcccatttcccatgctgttaaatatctttctaagcctrattttttaaagtggctgtacagtattggattaaatctctgtagcataaattaaattcacctttgtcgttagaactgtaggtttccagtattctctaccataaagtcacatacatggctgaggacatcaaaggcacatgtgccaaactcctacacaactcatggctttgtacatgatttacattactatacgttagggt

SEQ ID NO: 439921 - DNA, 594 bp, Homo sapiens
gattattcattcctctgtgaatcaccacaaacagcacagcccttgattagttgcatcagggccacatatggctactatgtaagttgaatgtgcagtgtacctttatagaaagaaaagaagatgttatacttccacgtttttatggaagaatgtatgttttcttaaaaatttataaaactgaaaagtacaaataaagtaaaataattttaccatccagaaataaccaccgaaatgcctttgcattgtctttttagcatgctcatcagccccctgctaagcatgactattttttgaaagaatatagaataatttcctttttgaaaaacatggcttttccaattatgaatgtatctttatttcccatttcccatgctgttaaatatctttctaagcctgattttttaaagtggctgtacagtattggattaaatctctgtagcataaattaaattcacctttgtcgttagaactgtaggtttccagtattctctaccataaagtcacatacwtggctgaggacatcaaaggcacatgtgccaaactcctacacaactcatggctttgtacatgatttacattactatacgttagggt

SEQ ID NO: 439922 - DNA, 557 bp, Homo sapiens
ataacttgaaccataagttggggactgtcacacaataagtggtagcttctaaaattttcatgattcaacatccacatttctataacacaaggtaattggaaaacaagtcacaatgatatatgtctaccttaaataattatttrtgctatcagagaagcatagccattcatgaatgaagcatattttgaagaggttaaaaaggaaactaaaggtaacactaggcactcactttatttatcttcaattattagtcaggctttatcaaattcctgttctatcctttgctaagaacagaacagtttttcctcctctctctgttgtcaggtcacaaacaaaagtctgctattatgtgactacaaaaacatttggtttttcctttgctaaaaaaagataggctacattttctcattttatttgtctttcccggttctattcattacaaaaacaaaaacaaaacacaaaacagctgccccagaaggatgttaggtagataccgaaaaccagagatctcctcaacagtccgttgtctccagcctgcttatactgggcaaaaaata

SEQ ID NO: 439923 - DNA, 527 bp, Homo sapiens
tatgatcaggcaaattcttaccaagtaaggagtggtgattgttgcattcttttctcagataaagttaatgarggtaatgtaaacagagagtggtttgttttctgctcatttgaaaaacatattacttatcaaaatgccacacctaggtaaagaatgaaattgatggtactaaaatgctttgaaaattgtgaaaagctgtagaaattatgaattaaaacaagaatctccatctctttctcccttttcctccatgaattgaaactgccatccaaaatcaatgatttccttaggaatgctcacccatatgaaagctcaagcaaaggcacatttcctttttcaaacttatagttatctagaagtattgaaatatacctcagactttatttctaaaatggatagaatattgtccataataaaaaaagaaaagccttgccatgttataacttactaaaataaattttaacagaagttactaaggattttaaacagatgtaagttagttctaccataccctatgtttacgaata

SEQ ID NO: 439924 - DNA, 527 bp, Homo sapiens
tatgatcaggcaaattcttaccaagtaaggagtggtgattgttgcattcttttctcagataaagttaatgaaggtaatgtaaacagagagtggtttgttttctgctcatttgaaaaacatattacttatcaaaatgccacacctaggtaaagaatgaaattgatggtactaaaatgctttgaaaattgtgaaaagctgtagaaattatgaattaaaacaagaatctccatctctttctcccttttcctccatgaattgaaactgccatccaaaatcaatgatttccttaggaatgctcacccatatgaaagctcaagyaaaggcacatttcctttttcaaacttatagttatctagaagtattgaaatatacctcagactttatttctaaaatggatagaatattgtccataataaaaaaagaaaagccttgccatgttataacttactaaaataaattttaacagaagttactaaggattttaaacagatgtaagttagttctaccataccctatgtttacgaata

SEQ ID NO: 439925 - DNA, 579 bp, Homo sapiens
ttatttgtaaaagaatgaccaacaatacagacacaaaacttcagaattatatcaaattcctatatgaatgcctttttggggggkggatctaaatcagcatagcacttttgtgtgactttttcttagtgaaaatattaaaggaacttagcatttcttttcaccagtaccactgatgtctctaagcctcatctgtgagtgctccgtgattcctccatcaccttcagccacagatttaaaaaatctactagcaatggggaaacaatccagagtgacttagaaaagaaagattccttgtcgtcatggaacttttttgtgtgtcatgtgtatcaaatgcaaataattacagtcatttccctctccttaggacagagctttagttttccctgacatcctggtaagacactgtctcagtgactgatactctggaaagttcatctttaaaagagatgaacacccaatcaatgtgttgcattcagcagataccagaaatactgagataccagagtggagtgaaatcagggccttactggggagaaggggctggccatcaacattcggtgaacatagcaggcaaagtta

SEQ ID NO: 439926 - DNA, 473 bp, Homo sapiens
cgggaacaatatatatcacctatggaaaacatacactactatgcatacagtaggcattaaacaaaatcatatcatcatccataaaataagtatgtgttgtgagcatagtactgagttgaggtggtggaaatgagaggtgggtccaaaaaatgaaagtttcttctcttacaatttagttaatgagacaatatacatcaatgtacaagatttgactgacaaagtcgaatggcaatccaagataatcacaagatacagcaacaagaaacatatktttgtgaaccaaatgagtgatggtgacaataaatgtccgagaaggagagaaagccacttgggctgaggtggtctaagatgggccccagtagagtttgtatagatggagaggaggaagcagagaacacaaagacagggacatgtcaggtatgttttttttggaaagggaacaatggatggttgcagcctgaaaagtagattat

SEQ ID NO: 439927 - DNA, 473 bp, Homo sapiens
cgggaacaatatatatcacctatggaaaacatacactactatgcatacagtaggcattaaacaaaatcatatcatcatccataaaataagtatgtgttgtgagcatagtactgagttgaggtggtggaaatgagaggtgggtccaaaaaatgaaagtttcttctcttacaatttagttaatgagacaatatacatcaatgtacaagatttgactgacaaagtcgaatggcaatccaagataatcacaagatacagcaacaagaaacatattkttgtgaaccaaatgagtgatggtgacaataaatgtccgagaaggagagaaagccacttgggctgaggtggtctaagatgggccccagtagagtttgtatagatggagaggaggaagcagagaacacaaagacagggacatgtcaggtatgttttttttggaaagggaacaatggatggttgcagcctgaaaagtagattat

SEQ ID NO: 439928 - DNA, 486 bp, Homo sapiens
aatgactccggcatgtagaagtgctttctcactaatgtaactgtgagcttggcatatagctttcccttcaaggggtccttcggggacctaggttttttctgtgttgtagctctgycatcttcaacatgtggcttccaaggtcagaatgctcctttttttttttttttttttgagagatgggatctcactatgttgcccaggttggtctggaactcctgggctcaagtgatccacccacctcagactccaaaatgctggagattacaggtgtgagccacaactcctggccatcatgctcttttgcttaaagccactcaaaggagaaagggcccagaggattgagctttaaaaagtttctcagtaaggtttagaacaggatcacatgtcagcgactgacactcaagaaaatggttacatataattgcaaagaagactaggaaagcaacttaactccatacatagatagatgaaatagctttggagaga

SEQ ID NO: 439929 - DNA, 586 bp, Homo sapiens
tattcacatatttggcaatatttgtttaccatttcttcttttatctcacaccttccttttgtgatcatcgtttctgttcctaaaaaacatccttataatttctactatagtagttttatcatagatatattttcttatttttcctgtgtctaaaaagtcttgcatgtttcactgggaattctaggttaacagtcattctcctattttcttgcttctattattgcattgataagtcagcagttaatataattgctgttcttttgtaggcaatacatgttttgctctttttacaacttttacttttgcttttttgttcattttaagatgtgtccattgtccgtggtattttatagtttcattctggtgagtcaaagtgtggattcttttttatttatcatgaargggattagtagacttgtgaacctgaggattggtgtctttgattgactctaaattgcagccactctaaatattgctataccttcattttattccattatgtgtgtataaggctgtctctctgttcttaaaggcaccacatctacttaagtatttttctccattctgtctaaaaaggaaaggccat

SEQ ID NO: 439930 - DNA, 538 bp, Homo sapiens
tttcctccactgggaagtcagaatagtattctattttgtatatataccacattttccctattcattcacccattattagatattaaggttgattccatatattggctattgtgaataatgctacaatgaacatggaactaggaagcttttgagggtactgaatataaccattattttcattttggtgatagtttcacgggtgtatacatatgtcaaaacttaacaaattgtgcaatataaatgtgtaatgttcacctcatgttacttataccttaattcagccatttaagaaatctatattataagatttttgataatactttgtctatgcatatccctctttaggatgtgatctcctttgatatgaggatataactaattaatatttgacttcagtgcttgaaaataacagccatcccataaatatatgttaaacaaatgaatgacaaaatactgccctgcagaaaatrttgactaggattggcagtctaaatttttgtttctcagtgttcttaagaaagataatagtacaaaaaag

SEQ ID NO: 439931 - DNA, 479 bp, Homo sapiens
tgtatcttcacattttttgaccattcagagaggtatatccacataccaattcctcaaatttccttgtcatcagtttttcaatcatattcattccaagtctcagactatgcagccaaaccattcgccacagcccataaattgatatatggtctcacatctgaccatttcttcttctaagcaaagtgaacaattaagtgcactgcttgaagttctgcccactgggaggattctcctttacaactgtccttcagggatgtcccagaaagggatattagtgctgcagctgtccactttcagatggtgcctgcatattgtacataaccatctgaaaactagrtgagtcttcttttcctctgtcaactgattgtggtgaatgctccataaggccgtaggtgcagtctgagaaagagaaggcagtgtagcaggagtggggacagtggacattttggccacctcttcatgtaacctacttggccttc

SEQ ID NO: 439932 - DNA, 510 bp, Homo sapiens
gatttttttttttttgctttttttttttgctttttttaacatccttttttaggagtgaccttgtttcttaaatcccatttgtgtatgatagrtggagatgagggacatgtgtgtgtcactggaagtttttgagaagagatcaatggttgtcagtagacaaagagctgcaagatagatatcagaggtttacttttccttaaagcataaataccacaaccaactgcacaaagtcatttattacccatggacatcaattagaaaagttctagtgactacaagttctcaaatgctggggcccctggagccttttgtccctatcatagtgggatatagggaggcggatttagctatttaagtgacctctgaaaaattgctttaaagaaaatgaggcagctccacattcatctcctgactctcaaacaccatccaaaatagtaataatgatagtaaccttcttgctagaagtatagctctatagaattatgagatcagtgagtatcaacatttaat

SEQ ID NO: 439933 - DNA, 586 bp, Homo sapiens
agcatcaggtctgtggttaaaaaatgacctcaacagataccctgtgctggtgcacaactcatttgggtcctgtgttccaatgaaaacaccatatgaaagggctaagtcaagggcataaacagttaaattcatccataactaaacacatttgtcaatttccaagacawgataaatgtatgatctttgaaacccaacttaaccatgggaaaaatgcttctgagataacattaatgccacgaaatgataattggacctaaaatactagaaatgggtgaaaaatctgagctgtctgcaaataaacagtggctctgttttcatctttttcagaaaatgaatttaagttgaggtgtacaaacacttgagagagagactaaagtagctatctccaaagaagaaaattatcaccctgttcaagtcattgaacagccttaattgtgctctttagaccctgctcacaaatatgacccaagaatacagctggtattgtgggaattaaagaagtataactaaaattagaaatttgattagattaatttttaatctttttttcatcatatagtttggttcttgtgcagggaataatttg

SEQ ID NO: 439934 - DNA, 586 bp, Homo sapiens
agcatcaggtctgtggttaaaaaatgacctcaacagataccctgtgctggtgcacaactcatttgggtcctgtgttccaatgaaaacaccatatgaaagggctaagtcaagggcataaacagttaaattcatccataactaaacacatttgtcaatttccaagacaagataaatgtatgatctttgaaacccaacttaaccatgggaaaaatgcttctgagataacattaatgccacgaaatgataattggacctaaaatactagaaatgggtgaaaaatctgagctgtctgcaaataaacagtggctctgttttcatctttttcagaaaatgaatttaagttgaggtgtacwaacacttgagagagagactaaagtagctatctccaaagaagaaaattatcaccctgttcaagtcattgaacagccttaattgtgctctttagaccctgctcacaaatatgacccaagaatacagctggtattgtgggaattaaagaagtataactaaaattagaaatttgattagattaatttttaatctttttttcatcatatagtttggttcttgtgcagggaataatttg

SEQ ID NO: 439935 - DNA, 563 bp, Homo sapiens
ctctactctattccactggtctttgtgtctatttttatgccagtactgtgttgttttaattagtacagttttgtgttttgtagtatattttgaaacaaggtaatgtggtacctccagctttggtccttttgctcaggattgctttggctatctgggctctttttgtggacagcgttttttctatttctgtgaagaatgtgattggtattttgatagggattgcacttcagctataaatcatttcaggtactacagacattttaacaatattaattcttccaatctatgaacatgagacatctttccattttttgtgtccttgtcaattctttcatcagtgcattatagttttcattgtaaagatgtttcactcatttggttaagtttattcctaggatttattttttgtagctattgtaaaygggattgctttcttggtttcttttcagatcgttcactgttggcatatagaaatattactggatttgtattctacttttgtttcctgcttcagtaccaactttactgaattcatgtatcagttctaacagttttttggtgga

SEQ ID NO: 439936 - DNA, 582 bp, Homo sapiens
tgcttattttaccatactttattgagatgttcatttttataacatattactaatatctagcaacccattttctcctctgaatgttccatgttgatatcatataattattatttcatggatgtttttgcctcccttttatctttctcaggttataaatgctatatattcttttaagttttctttttcatgaataatttctatttccttcaatttcctttttttctatttgcctagtctctttttttcatatcagaagaatccttcaatgtgtggcaatccttggttgtcttctcacaattaagaggaactaaaatactttgaaagttctgagtaaatgaatagggtttactgacttggatctggttgaactgttttttagaaagataaaagcccattatgcaatgattggaaaaasgaaaaagaaaaagtagaaaatgtgtattatttaggagatatggaatattctttagttttctaagccatttcattgaggtataattgacatatcaaaaaactatttatatttaatgtatacaactcaatgactttagagataagtatacaccataaaaccatcacaac

SEQ ID NO: 439937 - DNA, 623 bp, Homo sapiens
caggcccattcaagaatctgtaaaatgctttttttataaaatgtgctttgaaagacttaaccgctgcaaactaataagcaattttgtttgaaaagttatgktctgaagcatcagtgtagcacactggatgaggggaaggctttggagtagtgtaccccaatggagaggagttatttattactgacattgtttggaagtgctggtacatgtccataatgaaaagtagactggctttcagttggtttaagttctctacagacattgcaaccccttattgcctgcacccagggtgaactactcccatcccctcacattctgctgcaaaagaagaactatactttgactaaattctaggcactatgagcagcatcttgaattcttaataatgatgacaagtaccaatgaaaatatggctcttatggaacttatgatcatagaaattcagcttgaaaaccagcgaattaaagctttaattcattaaaatattaaaactattgtcacctaaacaagcttcatgagaaaaaggtaaaatattctgatcgatttaatttttttaattatttaaatgtttgaaatttctgtattagggtctatgaaatggaggagatgaaaaccatatagtg

SEQ ID NO: 439938 - DNA, 624 bp, Homo sapiens
tgagggtaataaatagctattgaagcagcaggaagatcacttgagcccaggagtttgagaccagcttgggcaacatagcaagatcctgtctctattttttaaattaaaaataaaaagaagattgtacaaccagattggttggaagtagatggatttgagaaatattaaagtcaaattgaaaaaawttggtgatagattatggaagttaagaaaatgagaatctagcatgttttcaagtgtgctggtaagctaggtagatagatggcataaccattccctgagaagggaataaaactgatttaagaaggagagatgaagagttccattttggggattacagttagagggtaaacagccaggcacagtggctcatgcctataaatcccagcactttgggaggccaaggcaggcggatcacttgactccaggagtttgagagcagcctagtcaacatgatgaaaccccgtctctactaaaaatacaaaaaaatgagccaggcatggtggcaggcacctgtagtccccactacttgggaggctgaggcaggagaattgcttgaacccaggaggcagaggctgcagtgagccgagatcacaccattgcaatccagcttgagcaacagaa

SEQ ID NO: 439939 - DNA, 624 bp, Homo sapiens
tgagggtaataaatagctattgaagcagcaggaagatcacttgagcccaggagtttgagaccagcttgggcaacatagcaagatcctgtctctattttttaaattaaaaataaaaagaagattgtacaaccagattggttggaagtagatggatttgagaaatattaaagtcaaattgaaaaaatttggtgatagattatggaagttaagaaaatgagaatctagcatgttttcaagtgtgctggtaagctaggtagatagatggcataaccattccctgagaagggaataaaactgatttaagaaggagagatgaagagttccattttggggattayagttagagggtaaacagccaggcacagtggctcatgcctataaatcccagcactttgggaggccaaggcaggcggatcacttgactccaggagtttgagagcagcctagtcaacatgatgaaaccccgtctctactaaaaatacaaaaaaatgagccaggcatggtggcaggcacctgtagtccccactacttgggaggctgaggcaggagaattgcttgaacccaggaggcagaggctgcagtgagccgagatcacaccattgcaatccagcttgagcaacagaa

SEQ ID NO: 439940 - DNA, 642 bp, Homo sapiens
taatgccaatctaaattcctgggttcagctatgtctacccacttacataaagcaatagattcctatttttgtttaagctacactgaatcaacattctgtcacttgcaactcaaaacaaaacaaaacaaaacaaacaaacaaaaaaactaaaccaaaaaaaaaamaaaaaaacgactaagccttcatgggctgggaatcccaaaagtagtcagccagaagtcacttgaagcacttgcagcttttggaacaaacagagcaactagcaggactggaaagagggaattccactgggggaatattcaactcaatctttaagctttgtcttgattctaagtctatgaaaatgtacttaacattctcctagaaaggttatttcctcctcccttcttctttatgatgaaaggactttaacatcactctttcattatatgttctccaattaaggaatatttttattgagctacttagtagctttatccttgggttatgggtgaacagggaagagagttaaggagataccgttcagaattgaaagcacactagcgtagcactaatattaaagaacaaaaaataacttcaagttgcttggcaataatttcctcctcttcttcataagatgttctattagttccagttaactta

SEQ ID NO: 439941 - DNA, 593 bp, Homo sapiens
tgtgggagttgctcagcaatgagtaactcacagaataatgcagagtaaagatttttgtatatcaacttaaggatggttttggccaggcccagtggctcatgcctgtaatctcagcactttgggaggccaaggtgggtggatcacctgaggtcaggagtttgagaccagcctgtccaacatggtgaaaccctgtctctactaaaaatacaaaaacattagctgggcatggtggcgggctctgtmatcccagcgactcaggaggctgaggcaggagaatcacttgaaccaaggaggcagaagttgcagtcagccgagatcacgccattgcactccagcctgggtgacaagagtgaaactccatctcaaaaaaaaaaaaataataataataaaataatctttataccaactgtgagagtctgagtgaattcccccactaatagagtcatttgttaggtggggaacaaggatagcgcagatacattgcatttaaactaaattcaaattagcttcaaataatctgcaccagtaattagttcctagttactgtgcttgaaagtcatttttagatcaaacattctctgtctacaagcaat

SEQ ID NO: 439942 - DNA, 481 bp, Homo sapiens
gttatcagagtaagcatttttgttctcacaaggagagcaagaaagaaatctagacccataaaccaatttatactttttttctaactaggcttagaattcagtgaaagttggacccttttcttcctgtaagagataactttaaaaataagaaataaatttatttttagaaagtttcacccttgctcataagaaagggaacaaaggaggcctggcacaggtggtcaaacmagtaatcccagagctttgggaaactgaggcaggaagattgcttgaggccaggagtttgagaccagtctggtcaatatagtgcctgtagtcgtcctagctactcaggaggttgaggcaagaggatcacttgagcccaggagttccaggttacagtgagtgagctaagattgtaccactgcactccagcttggatgacagagtgagatcctgtctcatattttttaaaaaggaaaagaaaagaaaaggaccaaag

SEQ ID NO: 439943 - DNA, 573 bp, Homo sapiens
ggggttgtcagtgaaaggtattccctagctccacaaatttgctacattctagttcttaggtcccaattctttactgatcaattaattttcatattcaagagctggtaaattcaacaactattgtaaatcatcatatatgctggatattgaactattgtctcacagttccacattcactttattttttttgaaagtattttattttgttcttgtctatactgaatatttttacaagtccgattttctaaaattttacagacataaaattacttttcaataaacacaawttagaagtaacataggattagaaaaaaattacaaaaactgcctattattcactgaaagtgtatatgtaggtgattaatatgcagaatcactattacactcccaactttttgtcattccattctgataacagctaaacaaaaagcttggagtaaaatagtaatttcctacattaaacgctatacaaacactgtcaacagtgcattttatcattgtttgaatcatagctcaatttgtgaatagcaggttgctgtttgcttgttttgatttgtaattctttgacagtga

SEQ ID NO: 439944 - DNA, 505 bp, Homo sapiens
tgacaaatatctactgacctcctactatgtaccagctacaattctaagcacctagaatgtaccagcaaagaaataaaatctccctcccttgtggaactttccttctgttcctcaaattggagacaaaataataaataataaaaatgttagtgaaataaatcaccaagtattttggaaagtgataaatgctatgaaaaataatgtagagcaggtaagaaatttgmgagtacagcaacctagctgagtgcagcaagggatgagatcagagagataatggtaattggctttcactcagagtttgaacagattggtgacatgatatgagttgtattttgagagatttatttctgtaacttttttataaaatctgctttcaggcagacaaacgtgaaagtctatttccatttaaaggctattactattgtccacaggagaaatgatggctttgaccaaagtgcataggaaaggcgaaatgtggataagttttgaaagaagctccaacaag

SEQ ID NO: 439945 - DNA, 621 bp, Homo sapiens
cctttttctaccatctataccacttacaggcctcaatcaggatacagactgtgttttcctaacataaaaaggaaaatttttctgctgtcagtgctatcagctaaacatctcgcttttctcccagatacaagttgggatactgctctcccaaaaagctttctgtggccatgttactggtttatcattgtagtacaaataaaagagaattctattacttgcagttgaaatctttaaggatcagtgaaaaatttactactctctggctttttccttttgacatagagascagcaatgatcaatattctaggtttttttttcattttgagtaccagagtggtaatatcatggatatgtagcatgaatgaggaaaaaaagcatcatggtattaaaccactgagagttttaaagttatttgttagagtagagttacttataccaattgataaaccaattgacctaaatattccctatcctcatttccccatggatcattatgtatcctatgtaataggaaatattaccatgatcttactaaggactcttcagtccttactacataccatataatagttctaagtaacgcacagcccaaagagaactcagcgatacctgtgccagaag

SEQ ID NO: 439946 - DNA, 621 bp, Homo sapiens
cctttttctaccatctataccacttacaggcctcaatcaggatacagactgtgttttcctaacataaaaaggaaaatttttctgctgtcagtgctatcagctaaacatctcgcttttctcccagatacaagttgggatactgctctcccaaaaagctttctgtggccatgttactggtttatcattgtagtacaaataaaagagaattctattacttgcagttgaaatctttaaggatcagtgaaaaatttactactctctggctttttccttttgacatagagaccagmaatgatcaatattctaggtttttttttcattttgagtaccagagtggtaatatcatggatatgtagcatgaatgaggaaaaaaagcatcatggtattaaaccactgagagttttaaagttatttgttagagtagagttacttataccaattgataaaccaattgacctaaatattccctatcctcatttccccatggatcattatgtatcctatgtaataggaaatattaccatgatcttactaaggactcttcagtccttactacataccatataatagttctaagtaacgcacagcccaaagagaactcagcgatacctgtgccagaag

SEQ ID NO: 439947 - DNA, 621 bp, Homo sapiens
cctttttctaccatctataccacttacaggcctcaatcaggatacagactgtgttttcctaacataaaaaggaaaatttttctgctgtcagtgctatcagctaaacatctcgcttttctcccagatacaagttgggatactgctctcccaaaaagctttctgtggccatgttactggtttatcattgtagtacaaataaaagagaattctattacttgcagttgaaatctttaaggatcagtgaaaaatttactactctctggctttttccttttgacatagagaccagcaatgatcaatattctaggtttttttttcattttgagtaccagagtggtaatatcatggatatgtagcatgaatgaggaaaaaaagcatcatggtattaaaccactgagagttttaaagttatttgttagagtagagttacttataccaattgataaaccaattgacctaaatattccctatcctcatttccccatggatcattatgtatcctatgtaataggaaatattaccatgatcttactaaggactcttcagtccttactrcataccatataatagttctaagtaacgcacagcccaaagagaactcagcgatacctgtgccagaag

SEQ ID NO: 439948 - DNA, 621 bp, Homo sapiens
cctttttctaccatctataccacttacaggcctcaatcaggatacagactgtgttttcctaacataaaaaggaaaatttttctgctgtcagtgctatcagctaaacatctcgcttttctcccagatacaagttgggatactgctctcccaaaaagctttctgtggccatgttactggtttatcattgtagtacaaataaaagagaattctattacttgcagttgaaatctttaaggatcagtgaaaaatttactactctctggctttttccttttgacatagagaccagcaatgatcaatattctaggtttttttttcattttgagtaccagagtggtaatatcatggatatgtagcatgaatgaggaaaaaaagcatcatggtattaaaccactgagagttttaaagttatttgttagagtagagttacttataccaattgataaaccaattgacctaaatattccctatcctcatttccccatggatcattatgtatcctatgtaataggaaatattaccatgatcttactaaggactcttcagtccttactacataccatrtaatagttctaagtaacgcacagcccaaagagaactcagcgatacctgtgccagaag

SEQ ID NO: 439949 - DNA, 579 bp, Homo sapiens
ttttgttgatgttgatgctattcctttcggttagttttccttctaacagtcaggtccctcagctgcaggtctgttggagtttgctggagttccactccacaccctgtttgcctgggtataaccagcggaggctgcagaacagcaaatattgctgcctgatccttcctctggaagcttcatcccagaggggtagcctatatgaggtgtctgtgggcccctactgggaggtgtctcycaattaggctacacaggggtcagggacgcacttgaggaggaagtctgtccattctcagcactcaaatcccatgctgggagaaccactgctcccttcagagctgtcagactgggacgtttaagtctgcagaagttgtctgctgcctttctttcagctatgccctgcccacagagatggcgtctagaggcagtaggccttgttgagctgtgatgggctccacccagtttgagcttcctggatgctttgtttacctactcaagcctcagcaatggcagatgcccatcccccagccaggctgccttcttggggatcaatctcagaatgctgcgctagcactgagcaag

SEQ ID NO: 439950 - DNA, 569 bp, Homo sapiens
attattcaaacaaatatcactaataggtagttaccatgtaattccctaaggggyatacaaaatataagatccagctttgaatcaagctggaaaaggattcacacacaaattgatatgtatgtgtatatataacaaaatatatagaagacataataaatgtgaatacagaattaacaaatataaagagatttcaaaaggcaattcatgtgttagttgccaatgaaaagagacaaactctataaaatgtttgaagagatttattctgagccaaatacaagtgaccatggccagtgacacagccctcaggaggtcctgagaaccttgtgtccaaggtggtcagggtacagcttggttttatgtattttaggggggcatgagacatcaatcaaatacattgaataagtacattcgtttggttcagaaaggtgggacaactcaaagcaggggcttccagactatagataaatttaaacattttccgattgagtttatctgaagacctgggattaatggaaaagaatgttcaggttaagataaaggattgtggggaccaagttttattgtgcaaa

SEQ ID NO: 439951 - DNA, 569 bp, Homo sapiens
attattcaaacaaatatcactaataggtagttaccatgtaattccctaaggggtatacaaaatataagatccagctttgaatcaagctggaaaaggattcacacacaaattgatatgtrtgtgtatatataacaaaatatatagaagacataataaatgtgaatacagaattaacaaatataaagagatttcaaaaggcaattcatgtgttagttgccaatgaaaagagacaaactctataaaatgtttgaagagatttattctgagccaaatacaagtgaccatggccagtgacacagccctcaggaggtcctgagaaccttgtgtccaaggtggtcagggtacagcttggttttatgtattttaggggggcatgagacatcaatcaaatacattgaataagtacattcgtttggttcagaaaggtgggacaactcaaagcaggggcttccagactatagataaatttaaacattttccgattgagtttatctgaagacctgggattaatggaaaagaatgttcaggttaagataaaggattgtggggaccaagttttattgtgcaaa

SEQ ID NO: 439952 - DNA, 554 bp, Homo sapiens
ctttaaatcttgccatacttttctcaggtcttttaatgtatcatactattgtcaaatttcctttcatttcatgtcttccttcttttcttttccacttattcattatttaatatatagctacattcattaaaagaaagccaaatagaaaaatctgggtttccactatctgttagggaccttttttatccaagtaaaattccttgcaagaatgactcaggaggctgggcacagtggctcatgcctgtaatcccagaatttttccaggcaaagcaggcaggttgcctaaggtcaggaatttgagaccagtctggccagcatggtgaaactctgtctctactaaaaatacaaaaaaarttagccagtcacggtggtgtgcacctgtaatcccagctactggggaggctaaggcaggggaaatgcttgaaccgaggaggtggaggttgcagtgaactgagatcccattactgcactccagccttagattctgtcaaaaaaaagaaaaaaaaaaaaaaaaagaatgactcaagaaaatgtgcctgctaagaaattccaat

SEQ ID NO: 439953 - DNA, 554 bp, Homo sapiens
ctttaaatcttgccatacttttctcaggtcttttaatgtatcatactattgtcaaatttcctttcatttcatgtcttccttcttttcttttccacttattcattatttaatatatagctacattcattaaaagaaagccaaatagaaaaatctgggtttccactatctgttagggaccttttttatccaagtaaaattccttgcaagaatgactcaggaggctgggcacagtggctcatgcctgtaatcccagaatttttccaggcaaagcaggcaggttgcctaaggtcaggaatttgagaccagtctggccagcatggtgaaactctgtctctactaaaaatacaaaaaaaattagccagtcacrgtggtgtgcacctgtaatcccagctactggggaggctaaggcaggggaaatgcttgaaccgaggaggtggaggttgcagtgaactgagatcccattactgcactccagccttagattctgtcaaaaaaaagaaaaaaaaaaaaaaaaagaatgactcaagaaaatgtgcctgctaagaaattccaat

SEQ ID NO: 439954 - DNA, 548 bp, Homo sapiens
gcaaaattgttcagctaatcatttaygagataaagaaatggaatttttagagtctgtggctaacattgtgattcatagacaagggggtcatccattaatctaagtcataagggatggttgatttttgcagtaggctgtttcctagaacacaaaaggcaagagggagagcagggtgaggagggagcaaggtggagtgttccgtacctgttttatttttcaggaaatcatgactcagttaaagttcaacactgttggagaaaagccaataagaataaaagcacacaaaaaataagttaatgtgtacccttaactgagctcctagtcattgggtggctaaaccaagtcatttatttcagaaggtaaaccacattccacatgatcaatgcaaaagtaattgctaaatatttatcataaaattaaaatgaataaaatttttagtttagtttttcttccacagacaatttgcaaaagcataaaaacacgtcttgtctgcaatattggcatataaatcaaatgattaaggataattccttccttagaaaacacag

SEQ ID NO: 439955 - DNA, 606 bp, Homo sapiens
tttgttctttatctatatcattgttaatcagcatttcctttgaaatgtatttcttgagacataactcatgtatagtaaaatggacagatcttcaggtacagtttgagaagttttgataaatattaatacccatgtagccaatgcccatttctccctagagattcctgtcatgtgcctttctagtcaatcaccccaccaccaaaggctaccactgttctgatttctgtcaccataggttaattttgtctgctctcaaactttatgtaaataaagccatatgctagacactcctgttttggggktgggtgaagggtctggctttttcaatcagctctatgtttgagagattcttgcattttgttctatcaatggtttacttctttttactactctgtagttttcatttataacacaatttatttacatgctttctggtgagagttctctgtttgcaggtatgatgaataatgttgctagagaattcttatgcaattccttttgtggacatatgtgttcatcttttcagtgatgatggctaacggtggaagttctgggtcgtgttgtaggtaaacatttaacagtatcggaaactgtcaaatttgcaat

SEQ ID NO: 439956 - DNA, 606 bp, Homo sapiens
tttgttctttatctatatcattgttaatcagcatttcctttgaaatgtatttcttgagacataactcatgtatagtaaaatggacagatcttcaggtacagtttgagaagttttgataaatattaatacccatgtagccaatgcccatttctccctagagattcctgtcatgtgcctttctagtcaatcaccccaccaccaaaggctaccactgttctgatttctgtcaccataggttaattttgtctgctctcaaactttatgtaaataaagccatatgctagacactcctgttttgggggtgggtgaagggtctggctttttcaatcagctctatgtttgagagattcttgcattttgttctatcaatggtttacttctttttactactctgtagttttcatttataacacaatttatttacatgctttctggtgagagttctctgtttgcaggtatgatgaataatgttgctagagaattcttatgcaattccttttgtggacatatgtgttcatcttttsagtgatgatggctaacggtggaagttctgggtcgtgttgtaggtaaacatttaacagtatcggaaactgtcaaatttgcaat

SEQ ID NO: 439957 - DNA, 585 bp, Homo sapiens
aatatattcatcactgtggcattgttcttagctccatacctggaacattttaatgtttgttcacatttttcattaataaatgaattaaatgatatcccaattttcaaattttaagcaaagatcagatcagtgggagacgtatttctggacaggaagtactctttagtgcctatctatttacttcaaaaatattttaaactattttttaaaattaggtttatccatgtatttggtttaattttattaagaaggtaacttttttttcagaagatacctttttttttcagaaatgatttgttagacataagtgacaaagagaagagacaatcttaagaaagatcattgtctaccttatttgtatagctatggaaacaaatgaagacaagccaaatgagaaaaaacagaggcaaaggggtcagacacaatcgcttgtctttggcagaggctgaatgacgggctggagagtaggaaagctttatagtgcraaaaggcaagctttcaggtatggccttgataagaacaggagacggaaacactgggtagaagagggcggttccctggcaaaggccccaccttcaagcttgg

SEQ ID NO: 439958 - DNA, 616 bp, Homo sapiens
ttggtatgcacttgagcacagcatattctgatggtcagagagagctctctcagtccagaaaacagaaagtctaggagtcggaactagagcctatgatcatggaaatggtaagagccagtgaaatgtagatggggygctgacagtgtctgctagagatattcaaataaattcacattgtttattaacactcaggttacaaggaccatccacatacagatcttctcccgcctaactttccggaactcttgggcttagttggtcttcacagggtaaccatttgccagactagattttggctgcagttgctttagttatgattactctagaaaagtaggcctccacaattcaacagaaagttgctcactgctgtgttggtgactttgatattcgggttttctcaaagaaagactcagtagtctttcagtagaaaacaatagcatgctgcctggcttatcttcagacagtcccctctaagcagatggtggcttatttcacacttctgtgaataaccatattgccaaaacgttccccagtgccagggtgtttgtcttgccagagtcttccagattagccacatgtcatgccagagccagccctctctaatttccctttggcc

SEQ ID NO: 439959 - DNA, 601 bp, Homo sapiens
ttaccctattattttttagctataatggcatcattttctgaaataaactgtgtctaatacatttgaccatgtgttcattttgagaaaattcaaatttcctaatgtttccttgagacaaactgtttcttaatattttccttggttgttagatttcaaatatttttggctacctaacaataaaagtcaattccatagttttcattgtttttttaataaaagaaggttttcttgcctcttctagctgctacagtagtctcagcactcttattaagcaatgtgtgttttctgggcaccaatgataactgtctcaagtgggtgaatacagaagaaacaataattaaaatyacatttggtgtcagcatagtattatgtttttatggagatacatacttctttaaatttgaaaatcagacaatataattgcctgtctctgcaagtatataccttgttgactttatccttacattcgatttaaaatttattaaaaatacactgataaatgcaaattttttgatcatttattaattgtaattaaaatttacatgggcctatttattaaggacattgtgtaatgtttccactttgttttaaacaattacaa

SEQ ID NO: 439960 - DNA, 548 bp, Homo sapiens
tatttcctaatcaggagccccaagttttgcttctataaagtagtcttttttatatatcatcagctaaatgtttctccttcttcttcccttttttttaaaatccttcccaatatccatttttcactgctggtttgctaatatcctactgttcagtattttggtgaccaaaatctatctatattgattcccttgctgtatgctttgttccttcatgttgagtctcttttgtcctcmaagaaagaaattgtgaaggctgcagaaagaaatatgccaggatattagaaaagaagcccatacaatagggataatgggtggatgaaatagaaatagtgttgagacattgactcagctattgagaagtcggctgtgcaatgtataataagaaagggacaaggtgcattgtggttcagttccattgcctatttttaaaaaatgttttaaatacctgaattgatttagttttctatgttgagtcaaaagttttttatttcatcctttatgctttatctgctgtcttaaacatagtaacattgcaatactatatatcc

SEQ ID NO: 439961 - DNA, 484 bp, Homo sapiens
atgaatgaatgaatccattttcccatagtaaatcatgaaagaaactctgtttttatacattttgcagattcttaagggggtggtactacatatttattaaaattcaagcctacttataagatgtgttcaggcagaatcagtatctgtttgtgagctaagaaaattttttaaaaatcacaaaaagacatcttagctagaatgtaaagtgcaaaagaaccaagccaagacagctaccaaagaagaaacaaaaataaccactaatgtctgtctatattgtttggggaatctgaggttatatttggccaagcaccacacatcgacgtttattcactttttttgtgtgtgttttctttattcaccaagtgagtctggctgtgctggcatatataccccttagcttaatctgtcttactagaagmctcactaaatttgttatatgaaattgatgcaattttggtcttgaatccgtcagaacacactcatt

SEQ ID NO: 439962 - DNA, 492 bp, Homo sapiens
tccttttcccagaatattattctttaaacagcaaaatttctggtacctatttgtttgtttatgtcattctcattttaggtttaggacacttgtaaaagtagaacagctgtaggatccatattatatcaataattgatagtgctgtatgtacactgtgaaacatttttgtctgtagatggaagcacctggggaaaagaagctctgtatcaaagtaggctcattcagatctctaacagaattaacaaataaaagagagataagagactagaggaagactgattttagatwagaagatgtaacaacatatagtagctctagctggatatggtgaatttctaaatgatgccattagaattccctaaatatagctctgtatttatcatatagaaaattactccagcttaaatattttttctcaacaaaatttttcctacatttaaaaaataagttactactgcataatatagtgagtataaaacaggttacttactc

SEQ ID NO: 439963 - DNA, 587 bp, Homo sapiens
taaaattcattagggatatgggtctgtagctttctttttttgatgtgtctttgtctggttttggtattaggataatactggccttgtagaatgagtttgaaagtattccttcttcccaattttttggaatagtttgagtaagaatggtattagttcttcttaaatgtttagtaaaattcaacagtgaaaccattggaacatgggcttttctttgcgggagacttttcattatgactttgatttctttacttgttactggtctgttcaggttttggatttctttatgattcattcttagtaagttgtatgtgcctaggaattcatacatttctcccaggttttctaatttattggtatgtagttgctcataatactccccaatgattctttgaatttatttggtatcatttgtaatatatcatttttcatctttgattttatttatttgggccttctctcttttcttcttagtatggctaatactttgccaattttatcttttaaaaaaacakcttttcatttcattgatcttttgtaaatttcatttatttctgctctgatctttattatttatttgcttctactaa

SEQ ID NO: 439964 - DNA, 427 bp, Homo sapiens
attccataggttttgatatgttgcgtttccattatcatttgtttcaagaaatttttcagtttgtttcttaatttcttcattgaccccttggttattcaagagcatattctttaatttccatgtgtttgtatagtttataaaattcctcttgttatcaatttctagttttgttccattatggccagagaagatacttgatattatttcatattttttaattttgtaagacttgttttgtggtctaacatamaatctatccttgagagccaagaaaaagaatgtatatcctgaagccattggatgaaatgttctgtaaatgtctattcggtctaaagtgaagattaagtctgatgtttcttttttgattttctctctagaaaatctgtctcatgctgaaagtagggtattgaagttttcagctattatt

SEQ ID NO: 439965 - DNA, 532 bp, Homo sapiens
tgccaatcctctgtgaggacatagaaaaagcacaatctctatggagcccaaaataggtaacattaactagcactgctttwaagacatttacacaaaccaacaattcttacgacaatcctattaatatagccttttcaggatgaggaaactcagcaaagagatggtaaataactcacacatgagacagttcacagcctccactgttcatacttggttcatgtatgattcatttattggttcaataaatatttattggctgctctgtctaggtgctgttctaggcactggctgtgcagcagtgaacagacctatggcaaatccctgaacacatggagcttacgtttgagtgggaggcgactctcagaatgcaaattttatatgtagcgtgacatcaatgccttctctatcagtcccttttgcattactataaagaaatacctgagactgggcaatttataaagaaaagaggcttatttggcttatggttctgcaggctgtacaagcatggcaccccaatctgcttggcttctgg

SEQ ID NO: 439966 - DNA, 532 bp, Homo sapiens
tgccaatcctctgtgaggacatagaaaaagcacaatctctatggagcccaaaataggtaacattaactagcactgctttaaagacatttacacaaaccaacaattcttacgacaatcctattaatatagccttttcaggatgaggaaactcagcaaagagatggtaaataactcacacatgagacagttcacagcctccactgttcatacttggttcatgtatgattcatttattggttcaataaatatttattggctgctctgtctaggtgctgttctaggcwctggctgtgcagcagtgaacagacctatggcaaatccctgaacacatggagcttacgtttgagtgggaggcgactctcagaatgcaaattttatatgtagcgtgacatcaatgccttctctatcagtcccttttgcattactataaagaaatacctgagactgggcaatttataaagaaaagaggcttatttggcttatggttctgcaggctgtacaagcatggcaccccaatctgcttggcttctgg

SEQ ID NO: 439967 - DNA, 534 bp, Homo sapiens
ggtttctcgacaagcggctttgcagcagtctttccaaagtttcatccacacatcctgrcggcgagtaaccattgggaaattacatggtgactttagggccacagagaggagaatcagaagatgacaggaactcacttgggaatggagaagtgatgttatggctgccagtgtcaaagtcagacccactgtataaacacagacattcacacatatgagaaccatgggactgaacattggtaaagtccgttcctccttgggccactccatcttggaaactcaaaggaggaacactttacagtagtgttccacacactctacctctaactcccagtactgaatttagtggaagtccaaccacagttcctcccacccaaacagacagttccttgtgagtgtctcagagggacacttagacaggacagcctcctcattcactggtgaaagattttccagagccaaagctcttgcttccatggctgtcacctgtaagggttgctggtaccagctgcttttctgaagccactgcaccctccc

SEQ ID NO: 439968 - DNA, 588 bp, Homo sapiens
atcacagaatcaaaacaaagcgaattgcaaaatctcaggggagatgctgaccaaacagatagaatctgagaaatcatccctgtgcttaatacttttcttcctggtggatgaagtactcttgtctgctaaatacagggtcttaattcatgcatggtgyttagttctcctttgcaggagtcatccccaccacctcatgtcaagtcagttacagcacaactgaatatgctgcccccttcttaatgttgctgtgctctggtctggggtgtgatcccaaacatcatgatcccagcagtagctggtttacaaaccaactctgaggatgccacatccatagaaaacctgtcgttttcttctggtttccacttcaaagtgtgaactgaatctgggccaccatgtgctccctaaacttagcatttaagtagctctgatgagcagaatgttaatgtgttaaaatgagattatgttcgttcccttacaaatttaggataaagatgctaggctggccctttgaaggtaaattaactcctcagaagcacctgcttgtgtggcattaagtaatcaaacaacaaaactacacttggatgggtt

SEQ ID NO: 439969 - DNA, 528 bp, Homo sapiens
acttggcctcagcagaattccaaaaatgctgtagtggcgactccaaagcaaccctacgcaagggacttgccagtgtgtggagaggacgtcacagtggaagagatagccttagctgattacagttaaaatatttcagccttagctgattacagttaaaatattacgaacttttgcaaagttcrtaaaactcatgtgaccatgggctctggagcttagacttcattaacttcaaggtgaattttcctctgcttgtatccatttgcaaacctagtttggctctcaatcaataattgttaattgaaggaatggagaaattaatctgtaaaagacaatgcagatggatggatggacacatcaaaggcaaggctgctgccggccatgcgtgtgtgccgacggcatctccaccccagtggggccccagggacgaagccggttggccagccacaaagccctccagggagacctgtttttcagattatgacagtttttagaagtacagattatcttggctgatagtgaagatgagag

SEQ ID NO: 439970 - DNA, 572 bp, Homo sapiens
tcagtatgtgaaggagatatctgcattcccatgtttattgcagcactattcacaatagtcaagacatggaatcagcctaagtgtccatcaacagatgaatggataaagaaaatgtgctatatatatgtaatggaatattatttggccatgaaaaaggatgaaatcctgtcatttgcagcaacgtggatgaaactggaagttattaagtgaaataagccaggcacataaatacaaatactgcattttttcactcatatatggtgaaaaatatatggaggtagtaaacagaatggtagtgaccagaggctggaaaggggagaggaaagggggatgaagagaggttggttaataggtacaataacacagttaaataaaaggagtaacttctagtgttttatagtacagtasggcaactacagttaacaataacttatcataaatttcaaaatacctagaagattgggaatgttctgaatgcaaagaaaagataaatattcgaggtgacggatatcccaattaccctgatttgagcattacacattgtatgattgtatgaaaatatccatgtaccc

SEQ ID NO: 439971 - DNA, 592 bp, Homo sapiens
atattagtcacacggtcatctccaggccctcattcatacaaatccagtttctaggagtaatcactccccttctcagtgttacccaaatcctgcacacattctcagagcagctcaagtccacaaagtgtgccctgtgtattaatatcagccaacagtgcttcattcacacattgcatgactaytgatgtcttaatctgtggaggtactgagccagtgtggggcatatgattgtaatagcatgtgcaagcccctgcctgatgaagttagggatgcaaacaagtaaaggggtcacttcagtgcagtgtgaccagagatgtcgcagaagaagtaaggggaggatgcacgcatttcccagggctgctctaacaaattaccacccaccgcgtggcttacagcaacacaaatgtgttctctcaccatcctggaggagacaagtcgaaatcaaggtgtcagcagggccatgccccctctgaaggctccagggaagcatccttccttgccaatctcagcttctggtgcttcttggtttggggcttgcacagctccagtctttgtctccttctccacgtgccatttccctcttctctctgtg

SEQ ID NO: 439972 - DNA, 658 bp, Homo sapiens
cctgtaccatctatgccactttggttttcttctgtcattactgtgttgatatagggaacttggttcagggaaatgatgatgccagcagggcagattccctgagctgcccagaatcccagagggtacccctggggcaggcgggtatggtttactcatcttcaagctgcaggaagtagtggctccaggataagcacctcagccttcggagaaggacgggcttggggaagggagattttaatgtagtgtaaacaagacagaggatttcataagcttctcggaaactcctggacctgacactcatcatctgctactaaatttggccctttcatgttccttgcacaggatataatggcaaccatgacacagactctgggctgaatttagataaacaacrtggctgctgaggatttgtacctgttaaaagtctaagaaatgtcaaaggttgtagtaagtatgactcaggacaatttcatttaagttgtcaaaagtaggaaaaagtcagcagtatagctgatcactctcttttgtgcttttttgcacttgtaatttccatgactctcactaaactgcgggaggtaaaactatttttgttctctgggcttttgcgtcgtgtgtaagctgattcccaagtttgggtaatattgtggaaagcgtcagt

SEQ ID NO: 439973 - DNA, 624 bp, Homo sapiens
cccgggagactcatcctggcacagccaaacccactgtcctgctcaaagggaaaagaagcttagttgtttttgctgcatgggagaatgaggaggggtccacaataaaytttgtgtggggtgcatttttcttagttacttcaccaattaatgtccaaggaattcatgaagcagtcagtggttttccaaggacctaggcttttgctataggaaaccggtgttactccgtctggacagagtgattgtactactcactcccagattagaaatgtgcctctcacagagaagtaggaagttgggtttgatcatccatttaaaatggtgtccttgaggcatttaggcatccttgggggtctatgataattaagtcagagtcatgaagaaaaatagggagataaaaccagacagacttttaaaagttcacagcctttgaaaaataagactgattggttcaagagggaacttttagtccctcaagtgaagaaagcagaatttcacttataaagcttgaaacccatggcaaggcaatcaaaatactgatttccccaaagtataaaggctcatgtgatatttcaaaccaagtaactgcttagaggaactcaatttcagtcttgagtagttaagatt

SEQ ID NO: 439974 - DNA, 557 bp, Homo sapiens
tcaccacttccatctcactgattcttgttttttctaggctctgggaatccacctgctcttcagattgacacattctttcgttagatataaataccttcaatcagattacggtgacgtctccgggccttggagccattctctctctctaagcagactctctgcatcctgactgatttacggtttgcctcagcaatcggatttcctccagttctaagccctccagggcacatgtcaatctcctgttaggcttgcagcctgcactttccgtttgcctcccaagctttcctctgtgaaaccctgttcattcttctcatgcataatttccatttccscacagaggctgtaaactccacgaggatatagattaatctaaaatctgtctgttttcctagtgccaagtatggtgcttaggaacagcagggatttcttaaagtttgctgatattagaactttccacatcgacacgtggtcaaatagaaaactcacaactcataattgcttcagatcttataaattcaagtcttgcaattaagcataaaggtaaatagaattctaat

SEQ ID NO: 439975 - DNA, 591 bp, Homo sapiens
ttcatgttatttgcattaagatggtggaaacccaaaacaaaatgtactaagaatgctggtgcttggtgtctaggacactagagataccatgattgctgttaaagttcattattgccactgcatgcctgatgattgctgtataagcaaagtctttcaagttattaattctcgttaaaatgtttcctgattatttatttaattagacctttgacagacttaggagaacctatctttcaaataagcccagatacagctgaatcctaggacaaacagaacttaggcttaaggttgaacctctgctayatttttttttctagtaaaatacttgaaatttctttatgtgccatacctgagaatcccaacttggaataatagaaatataaaagttttttgacttgggccgctccaccatttcttctgggacagactctcagacacagagacaggctacagatgtggggcaccttctggtacactagggaagtagaaggaaatcaataccctggcagtatttcatgtacctcccacaactggtaatgacagattatttccaggagggagagttttgacttacatcacctacacctcttg

SEQ ID NO: 439976 - DNA, 563 bp, Homo sapiens
ggggcaccttctggtacactagggaagtagaaggaaatcaataccctggcagtatttcatgtacctcccacaactggtaatgacagattatttccaggagggagagttttgacttacatcacctacacctcttgtagccagcagtgagacctccactcaccactgagaacttacttgaagaagtagcatgtgcagaagatactatccatgtcttgcatcctatacatatgggatgacttagctgctcaggctaggctgtcagtcattattttccartcattttatgcaccagtccgtgctaggtttcctgagagatcagacacagttttagagcctaaatgaacttttctcctcacctttatactcaccagttggtccaggcatgaggagattacagttcctagggattattctgttggattcactttgtaatatgttacactaactaattggacagagcccaaataatcttcctctagctggggaataactgcctattactgacgttgataatcttctgccatctcccacaggcattatggccagcacacttcctgcgaatt

SEQ ID NO: 439977 - DNA, 563 bp, Homo sapiens
ggggcaccttctggtacactagggaagtagaaggaaatcaataccctggcagtatttcatgtacctcccacaactggtaatgacagattatttccaggagggagagttttgacttacatcacctacacctcttgtagccagcagtgagacctccactcaccactgagaacttacttgaagaagtagcatgtgcagaagatactatccatgtcttgcatcctatacatatgggatgacttagctgctcaggctaggctgtcagtcattattttccaatcattttatgcaccagtccrtgctaggtttcctgagagatcagacacagttttagagcctaaatgaacttttctcctcacctttatactcaccagttggtccaggcatgaggagattacagttcctagggattattctgttggattcactttgtaatatgttacactaactaattggacagagcccaaataatcttcctctagctggggaataactgcctattactgacgttgataatcttctgccatctcccacaggcattatggccagcacacttcctgcgaatt

SEQ ID NO: 439978 - DNA, 597 bp, Homo sapiens
atactatccatgtcttgcatcctatacatatgggatgacttagctgctcaggctaggctgtcagtcattattttccaatcattttatgcaccagtccgtgctaggtttcctgagagatcagacacagttttagagcctaaatgaacttttctcctcacctttatactcaccagttggtccaggcatgaggagattacagttcctagggattattctgttggattcactttgtaatatgttacactaactaattggacagagcccaaataatcttcctctagctggggaataactgcctattactgacgttgataatcttctgccatctcccacaggcattatggccagcacacttcctgygaatttgtaccaccaccccttatctcatctatgcttctgctcacagcactgcactggagccaggggatggatacctggcacttgtatgtcctatgaagaaagagaggaggatacattgcttccctatgtatccttaagggatagaccagaggaaaagttaagtaatagataaacaatcaataatacctaattggtttcccaatcaattagcacttactgtgttggatttgttcactt

SEQ ID NO: 439979 - DNA, 552 bp, Homo sapiens
ctggtaccttctaaggtctgataagatacatttactatctgttctctttgaagcctgctacctggaagtttctatataacaagaaccttggcttgcacaactccctttatcgtcacctcaagaatttctttctgctaacttcaactttaggcaaaacttaactcttaaccatttggtaatttggaaatctctgaattcacctatgatctgaaattactcccctctccctgcttaaagatgtcccacctttccagtccaaacccaygtgtacttcacatgtattgattgatatgtttccctaaaatgtataaaaccaagatgtcaccccaccaccttgggcacatgttctcaggatctcttgaggctgtgtcatgggtcatggccctcacagttggctcagaataaatatcttcaaacattttacagagtttggcttctttatggtcaacacttctgttatacctatattgatataagttaccttactttactaccccatttagtttggttagtacaggaccattggttgcatattgacacaggatatccaag

SEQ ID NO: 439980 - DNA, 550 bp, Homo sapiens
gaatcagatctttgaatttgataattttcataactggctgtattcctgaaccatgcccagttcagtcagcagaaagtttgaagtgtcagcgtacacagcccaaagtcaacagagcacttgaaaattaagagataccctggaagcaagggaaaacaggaagcataagccccatatctgcttaaatcttcagcttactgacaaatttttcaggcatgaggtggtccacagaaagctaggaaaaaaacgcaccagtgggaaggcattagaataaagtatccgtattagcagctgcatactgccagatctggagggtggttgagtggagcaagtggagtggaagactagagggtggcaacagartttgcaatttgattccacacaaattaactgtctactgaaacagaagaggataattcttaggagaacatgataaaattttgagtcactacaatatattatctgcagaatctgggttttcaaccagaaatcaagtgtcaaaaaaatagctatatgtgaaaaataaccgggaaaataaaagcagtcaatataa

SEQ ID NO: 439981 - DNA, 525 bp, Homo sapiens
atatattacctgccatttttaactgtgtatgctcattttatactcaattctgcatttttataccaaaactggagttagttgactctgttcaacaggcattgcctaaattagattgctagactaatatgcttttttaaaaaagactagtgagtactgtaagatttcagggcaaatattmtcattctgagtttaaaatatatttgatttaggatggatataaattaggtttgattccagaaataccaacaaaaaaatcccctaatttataaatatgttttaggtgtaaaaatggaatgaaagccatttttcaaaattatagatctataaagtacattgaataaagcccattttaaaataatatgtataaactaatactgacttctcttcttccccctgggacacaggaaaagaaattttagactttccttgaaagaaaatcatagaattttcactaactcaaactgaaaaaataagtctcttggatcattattaaaaatgcttaaaatccattgccacaaaatactt

SEQ ID NO: 439982 - DNA, 563 bp, Homo sapiens
ctgctctctgttatcaaacactcagctcagaaaagccactggctgatgtgcacctgtgaaattgagtcgcacccaattcaacctctctggacagaatcaaacactgagaatgatgagaaagttatgtgaatttgtaagagatacacgtatgctgttgaagtctaatagaaatattttaaccactggcctgaatccaatctgcacagtaatttaatagactatcaaccacaaatgcaatccataaggcaagtgaatgggtatgaaatgcaattggcaattttctcggaaagggattggtagaatcaaactaatctatgtgaaaaaggaagctgcctggcaatatcacatagtcagaattttgaataagaaagtgtaaccaatyatatccttataatgtattgctttggaaaaaaatttgatcaacaccatagaacctaacaaatctggaaaaaaaatattattcttagtcatcaagaattgctctttgattccagaatattttatttcattaaatgtatagaaattccattgaaacagaacttggaaccagtgttttctaagaa

SEQ ID NO: 439983 - DNA, 610 bp, Homo sapiens
ataacacaaatattactcatcagttcacgggttaaatgcagtattctctgccaaccatatttcatgcatataaatactcgctagtgtacgtttcctccaaggatgctcagaattttttttcatgtgaaatagaataatgaagagattttggttataaaagaaagctaatttttgcattaaagactagaccactaagaagactaaataaatttgaaaataactcaaaaaatccaataccatattttattcacttattgaagcaacaaacaggtattgataaattatgtgacagtattctaagtattcacatgcrgaagttaataaaagagacaatgacctctgtcctcatagagcctgcattattatgtggaagacaaatattaaactaagttacacaaagaaacatataattaaatgttatatatttacacacacattagagaaggaagatcttctttgacttctaaattatacttctaattagattttgtttatacttatttagttatacttctaaattagattttggcttgtttaaatactaagttaggttacagtttgccacacagcaactcaaggtacagaggcaacctcaagccaaagtgaaatt

SEQ ID NO: 439984 - DNA, 544 bp, Homo sapiens
cagtggtgattaaatttaagtacctgaattttggggaaaaattcaaatcacagcacccagtatctttccaccttctccaaactctgatctagatatgaacaaaacttcacrttaagttgtactcatttagacttctatgatcttgagtactgatcatctgaggtgctctgggataaacagaaagtggtactttcttattcagcagcaagaaacccctcactaagtatttttgttgaactgagtgagcctcaaactcttggccagcttctttgcaatacagaggagaaaattgatagtaatggctatggttcagtgttatgtacagctgcaatattttgactcactgtatgtatagtccataagtactaatattcatatttaactagcacttaattttatattttatagaggaaaccaattttttgaaaaactgggacctgtcattcaattttttcttttccctgtataagagaagccagagtatctatttgcttaagactaattttaacacagcatcaacaacattggtagcatgttacattta

SEQ ID NO: 439985 - DNA, 544 bp, Homo sapiens
cagtggtgattaaatttaagtacctgaattttggggaaaaattcaaatcacagcacccagtatctttccaccttctccaaactctgatctagatatgaacaaaacttcacattaagttgtactcatttagacttctatgatcttgagtactgatcatctgaggtgctctgggataaacagaaagtggtactttcttattcagcagcaagaaacccctcaytaagtatttttgttgaactgagtgagcctcaaactcttggccagcttctttgcaatacagaggagaaaattgatagtaatggctatggttcagtgttatgtacagctgcaatattttgactcactgtatgtatagtccataagtactaatattcatatttaactagcacttaattttatattttatagaggaaaccaattttttgaaaaactgggacctgtcattcaattttttcttttccctgtataagagaagccagagtatctatttgcttaagactaattttaacacagcatcaacaacattggtagcatgttacattta

SEQ ID NO: 439986 - DNA, 618 bp, Homo sapiens
aaacaaaaatttatttatactatacatttacatgaatatatccagataaatataagaaataaattttactttgtaatgatatgttttctaattttacaatttgaaattgaaataaacctctctgcattatgtttctcctgtgggaatattataattattaacaaacactttattttttgcccctatgaaaaagtattttattcttactcaactaatgtgtaaaaatgttactatcagcagggcgcagtggctcacacctataatcctagcactttgggaggctgaggcagttggatcacstgaggttgggaattcgagactggcctggccaacatggtgaaaccccatctctactaaaaagacaaaaaaaaaaattagctgggtgtggtggtgggtgcctgtaatcccagctactcaggaggctgaggcaggagaattgcttaaagctgggaggtgaaggttgcagtgagccaagaccacgccattgcactccagcctgggcaacaagaacaaaactctgtctcaaaaaaaaaaaaaaattactatcaaagaaagcctagtggtgtgttctacctccacagatattcaatggtgtggtaatatacaaaagtgtgtcat

SEQ ID NO: 439987 - DNA, 549 bp, Homo sapiens
agaagaaatttttctgtaaaaccaggaacaattggttgtcattttgtatattaccctacaatcagactctagaggactttgaggtacacagtactctcttgagataatttataccaaacacaaagggtaaatctctacagtacttactacaagcagcaaaaggaagctctagaacaaggaattaaacacagtgtttgtttccaatcgcagaagaggccatgagcaccatatgtgtgtcaggcttatcatctgaaccaaagaaaggccaatccttcacctttcttatgactcttataggctgcaatatttcacttggccataaacaacttaatatctcrcacctagtagtattcagtgacacagaaagggaaagagaaaggatgaagaaaagaggaaagagaaataatttcccaagatacaaatttaatattctttccaaagcataagagcaattaaaatatatttctctgttgtagttgtaggatggattttcctacatcattgttcagacatcctggaaataatatcagactttgtaaagaacacaga

SEQ ID NO: 439988 - DNA, 567 bp, Homo sapiens
gtgtgccaccacatttcagccacatttccaatttgtttttctttattaccataggtatttttgatgatatcatttccaggttattttttttcctctaaacgtcttgtttttaattatatttctgagatatacgagcctccttttatccatacagaattcatcttcttgttctttgtccatatttcttttgtcatgaaaataccatgttcagatatgtttgcacttaccagtgtttgggtcactttaatttacaataatatccatgaaagtctttatttatttttaatttccatcccttatcacatcattgaaccaaattttctaattctggaggctgtttctgactatgtaaccccattttgccatatctgtttcatcttgcacattattataaakgttttaaatggtctaaaacccatcctaaaacccattataaaggtttaaatggtctaaaccccatcctaatgtccatttgagaattactttttaagactactttgatgaataaatgtagttaaacagcaaatcaagacatacaaaatacaaggctcatgaattagcatttat

SEQ ID NO: 439989 - DNA, 593 bp, Homo sapiens
gaaaacattatctaaagactacagaatttattgtatgacttgatagatgccctgcatgcattctacttgctgctatgaagaatgaaaaagatctaacaacagggagtggatatacagaaaagttccagcagagtatcaagactgggaacacacagtgaatgctgtggaggaacccactgcctggcagggattttaagaagagatgaaatggtcagacaataggcaagaggttattctgggcaaacaggatcactctgaaaaacagactaaattactagaataacaaggaaagagagctgtctaaagcaaagaatttaagatttgacaaagattgagaataaggagtacatagtcttcarggaagtaatgattcagcagatgaacagagagctgcctatgaaatgttcaacaagagattggttgagagtggacagttcaaggctagagtccagtgaattatttaaaggttaaaaaaaggtacttcacagatgatttgggcttctttctcctctgagatcatagaaagtacattggaagataaaagattgtgattttcattccagtttatgccttcaataattgggtaactataa

SEQ ID NO: 439990 - DNA, 564 bp, Homo sapiens
cttgttcttatcaaggcatgctacagatatgtccatcctagagattcatccattttccctcttttgttaatrtataataatttacatatttatggggtacatgtgagtgtaacatacaaagaatgtatgatggtcaagtcagggtaattagggtattcatcaccttaactgtttattatttttatatgttggtatttcaagccttctggttactttgaaatatacacattattgttgctaagtatagtcaccctagtatgctatcaaatattagaattatttcttctatctgattgtatgtttgtacccattaaccaacctctcttctttctccctctcccacctcatcctgagataaagttttttagctcccatatgagtgagaacatgaggtatttgtctttctgtgcctggcttattgcacttaacataatcacttctggttccattcatgttgctacaaatgacaggatttcattctttgttattgccaaatagtagttcacatttttttatccattcctctgttgatgggcacatagcttgattccatatctttgctat

SEQ ID NO: 439991 - DNA, 415 bp, Homo sapiens
tgattgtctttgcatccccagcatcttgcacatggtatgacacttaatagatattaagtaaatgcttgctgaattattaaatgaaagtgataatatatcaaaagagggctacatcatgagtccatcaagaattaaaacctaacttggccaggtgcaatggcttatatctgtaatcccagcacgttgggaggccaaggcaggaggatcacttgaggccaggaatttgagaccagtctgggcaatataccaagaccccgtctttacaaaaaacaaacaaacacaaacaaaaaaccaaacccaactgttactcttttaagtgaattctatagcagttgaagacgacttttctgtcaatcacaaatgtattgatgaargacagttggtgattttcagccatggctttgggagtaatatg

SEQ ID NO: 439992 - DNA, 582 bp, Homo sapiens
ggttaaattcttctagagtcagctgatggtccttcaagaatgagtacttggcatttgttgagcctattctttttaggatttttgagttggagacttttattatagtgagaaggatttttttgaatggcattttaatgaaaggcatagtttttaatgaaaggcatagtaaaacccttaattctgagaccatcgtctctacaaagttcaactattgttaatgctcactaagggataactgataattgggactgaggccaacatattattgttagtaattattaacagtaatgagagtcttttaagctctaactagaatccagcttctgaatctctaggtggaaaaactggactttcttggmggtagatgccacatgtgtggtttaagcttaatttgagactcaagctccataaataatgaggttaggaacatcgggttttgtgaatgagcaattgggtgtcagagagatggcaagcatgtgtactttatcaatagctgagcgtaaaaaccaatgttctgccttgatagtcacaaagaaaaatgatgctacaagtgctagaatctctcatatgtttttgaagata

SEQ ID NO: 439993 - DNA, 558 bp, Homo sapiens
ttgccaaggaagaaggctttaattgggtgctggggctgaggagatgggagatccttctcaaatccatctctctgacagactaaaaccgagggcttatatagcagggcagaaatgtaacaatgtataagaaaacaggaactagagaggggcaaggaagcaatcatgatcaatgaggggcccctcaaggatctggtgtggtgatctggtgagtttcagttctttgatacttttttttgagtggactggaagtactctcctgaggacggagctcagataaaacaaatacaagttttaagctttaagacaagaaagggcaatctatgtttatacaaaagaatagtctataggactactgggttggtttcagagagaaaaaagacagcagccagaaaatyccatacatttccctgtcaggaggaaatttattactacataagaatttagaaatatcatcacctattttctgacaaagatactcaataatacaaagaaaaagtaactgaacaaaaagttaaccagaaacacagaccttgaggtacaggaagatgacaggaggga

SEQ ID NO: 439994 - DNA, 558 bp, Homo sapiens
cattgggaagacaggaaattgtgagttctgggtttctggcttctatagactcagctgagatgtattttctttttcaacccttctaaatggctgggcctgggattttcccagtcaaattcaaaagctagccatgaagaaaactaattttaagacataaacaagtattttaacataacatctaagacataaacaagtatttttaaatgtgtyttgaatgtattcgtatcacctcattaaacaatgtcagaacatggccagaagccaggagttgaaggagccgttgcttaatgagatagtaatgagcaaacatcgaagcttgcattttccttctgcttgttccaaaatgcatgacttagcgggataagatatttgagctccagctcttaaataattttaagatatttcttaggatagttgcttttccttttagtgtttgattgtgtcaagaagtaaaggttaagaaatgttattttcccctttattgaagccgtagggtgtagtggttagtagagtagtaattctgctactaaataactgtgtgaccttggacacagtgtg

SEQ ID NO: 439995 - DNA, 558 bp, Homo sapiens
cattgggaagacaggaaattgtgagttctgggtttctggcttctatagactcagctgagatgtattttctttttcaacccttctaaatggctgggcctgggattttcccagtcaaattcaaaagctagccatgaagaaaactaattttaagacataaacaagtattttaacataacatctaagacataaacaagtatttttaaatgtgtcttgaatgtattcgtatcacctcattaaacaatgtcagaacatggccagaagccaggagttgaaggagccgttgcttaatgagatagtaaygagcaaacatcgaagcttgcattttccttctgcttgttccaaaatgcatgacttagcgggataagatatttgagctccagctcttaaataattttaagatatttcttaggatagttgcttttccttttagtgtttgattgtgtcaagaagtaaaggttaagaaatgttattttcccctttattgaagccgtagggtgtagtggttagtagagtagtaattctgctactaaataactgtgtgaccttggacacagtgtg

SEQ ID NO: 439996 - DNA, 520 bp, Homo sapiens
ataggatattgaagcctaggcacattatatagacagagaatgtagttttatgttttgtactaaaaataaattattttgtgtgtttgtgtgtgtgtgtgtgtgtktttttttttcctgagggaccaacagaacagctttattcagatctttgttagcaaaaccagtattcaagttcaaggacttggtccgtgctttctgccagatgaaacccacactgtgagttctagcctaaacatttatgttgtggcccttaatctgagtgctgaagaacggagatatccatggtgaatttagcacagtaaggaccggtgctttgcctttgctgctagctcacacgggcacaacattcaatatagtttggcttcttcagagctgcatcattttctgccaaaaaataaagtcggtatacagaaatcaacaatcatgtattgcatgcactgcttggttgtagtggcttattaataagagctccgaagcatgaaatgaagcttgtgtcagtgcagtggaaaacaataatctg

SEQ ID NO: 439997 - DNA, 574 bp, Homo sapiens
aaataatgacactaattattatgcttgggctttcctcccccatcttattttctctttttgctaaaaagaaacaaaacctaaagtcataaaacaagaagcatttcttcatagcatattgtgacatgtaccagtattcttttctgtacatagaaactagaataatttatgaaaaagatgttttccaaaggtagttgttccttaatttattattcgtattcatatattaaaagaayatagtcagccttgcatatctgcaggttccacatctgcagattctatcaattatggattggaaatatttggaaaaatatttggaaaatattccaaaaaataattcaaataagaaacccagtctaagaactatttacatggtatttacattgtattaggtattataagcaatctacagatgatttaaagtacatggcaggatgtacataggttatatgcaaatactatgccatgttataccagggacttgagcatcctcagattttggtatccttgggggtcctggagccagcccccctgcagatattgaggggtgactacatattttctgtggtattggcct

SEQ ID NO: 439998 - DNA, 527 bp, Homo sapiens
aattataaagtactgttaatgtatacttttactcatccaaataaaaaatatttaataacatatatatcaaaacccttggtaaaaataaaatgctatacaatgtaaggtgttattaccatgtgcatagaggtggttcctgctttttttttttttctttttgtaraaatagggtctcaccgtgttgtccaagttgttcttgaactgctgggctcaagtgatcctcctgcctcagccttccaaagtgataggattagaggcctgagccactgtgcctggctgaagtccatgtttttttgatggagatataaaaatggactttctttttttaacagtaaatcatgtatgctactgggtaagtgaattttgagatgctagttacaactttgtaccattggtacttatcttactgccttggaactgctatattttgcatacatgcctgtccccctctgtgaattacaaattttttgaggaaggtgacaatgtcttgctcattgttagtatcattgtatggcacctagaacatg

SEQ ID NO: 439999 - DNA, 527 bp, Homo sapiens
aattataaagtactgttaatgtatacttttactcatccaaataaaaaatatttaataacatatatatcaaaacccttggtaaaaataaaatgctatacaatgtaaggtgttattaccatgtgcatagaggtggttcctgctttttttttttttctttttgtagaaatagggtctcaccgtgttgtccaagttgttcttgaactgctgggctcaagtgatcctcctgcctcagccttccaaagtgataggattaraggcctgagccactgtgcctggctgaagtccatgtttttttgatggagatataaaaatggactttctttttttaacagtaaatcatgtatgctactgggtaagtgaattttgagatgctagttacaactttgtaccattggtacttatcttactgccttggaactgctatattttgcatacatgcctgtccccctctgtgaattacaaattttttgaggaaggtgacaatgtcttgctcattgttagtatcattgtatggcacctagaacatg

SEQ ID NO: 440000 - DNA, 527 bp, Homo sapiens
aattataaagtactgttaatgtatacttttactcatccaaataaaaaatatttaataacatatatatcaaaacccttggtaaaaataaaatgctatacaatgtaaggtgttattaccatgtgcatagaggtggttcctgctttttttttttttctttttgtagaaatagggtctcaccgtgttgtccaagttgttcttgaactgctgggctcaagtgatcctcctgcctcagccttccaaagtgataggattagaggcctgagccactgtgcctggctgaagtccatgtttttttgatggagatataaaaatggactttctttttttaacagtaaatcatgtatgctactgggtaagtgaattttgagatgctagttacaactttgtaccattggtacttatcttacygccttggaactgctatattttgcatacatgcctgtccccctctgtgaattacaaattttttgaggaaggtgacaatgtcttgctcattgttagtatcattgtatggcacctagaacatg

SEQ ID NO: 440001 - DNA, 561 bp, Homo sapiens
cactgtaaatgcatttaatgatggtagatttcatgttctgtaaaaaagtttttttaaagatgaaataaacatcttcagatatatgaaagctttgagaatttattaggcactatgcttgaagctttatttgtactgttttacttaattctaatagttctataaagaagatataagctctattgtatagttgaggaaacaaagacttgaaagacagacttgcytaaggtcaaagacctagtaagcgggtaaacagtgatttaaacctaggcccccatatttctaaaacccatggcttttccactatattatttttttaaattaggttgtaaactcctaaaggctatgattactatactttctccggttttataatatccctcccttgacttctaatcacatccaatagcacatagcactcttgactgaaaatgttaagacaatttattattcctactggaaattccaaatactcagacacttttaagtaggtaaattacatataattcaccattttatatccaaaatttgattatttctccttttaaatctttttatttcaaa

SEQ ID NO: 440002 - DNA, 561 bp, Homo sapiens
cactgtaaatgcatttaatgatggtagatttcatgttctgtaaaaaagtttttttaaagatgaaataaacatcttcagatatatgaaagctttgagaatttattaggcactatgcttgaagctttatttgtactgttttacttaattctaatagttctataaagaagatataagctctattgtatagttgaggaaacaaagacttgaaagacagacttgcctaaggtcaaagacytagtaagcgggtaaacagtgatttaaacctaggcccccatatttctaaaacccatggcttttccactatattatttttttaaattaggttgtaaactcctaaaggctatgattactatactttctccggttttataatatccctcccttgacttctaatcacatccaatagcacatagcactcttgactgaaaatgttaagacaatttattattcctactggaaattccaaatactcagacacttttaagtaggtaaattacatataattcaccattttatatccaaaatttgattatttctccttttaaatctttttatttcaaa

SEQ ID NO: 440003 - DNA, 581 bp, Homo sapiens
gccccctgccaccttggccccctctggactttgggcactgacaascataggagagaagctgatggagggctgagggcagctcagtgcttgtctgcaggcgccccttggcacctacagcctggacgccatgaatggcagcaggagccagacacgttccttggaggaagggggtggcctgaaggctgggggccaggctgccagtcccatgaactggcgtgagaacttgcgatgccttttctgggcccacccatggctgtccatggaccaactagtgtgtgcacttcctcccctctgaggtgcacagccccgggctcagccagaactgagcagatgtcaggatgactggttgcagagaggagctacccactccagggcctcttctctgctgagagctgcagagacaacaggacaacctacctgcagagaggaactactcactccagggcatcctctgagctactattgctcaataaagctcctcttcatcttgcttgccctccatttgtctgtgtacctcattcttcctgggtgcaggacaagaacttgggacccactgaatgaggctaaaagagctataacac

SEQ ID NO: 440004 - DNA, 581 bp, Homo sapiens
gccccctgccaccttggccccctctggactttgggcactgacaaccataggagagaagctgatggagggctgarggcagctcagtgcttgtctgcaggcgccccttggcacctacagcctggacgccatgaatggcagcaggagccagacacgttccttggaggaagggggtggcctgaaggctgggggccaggctgccagtcccatgaactggcgtgagaacttgcgatgccttttctgggcccacccatggctgtccatggaccaactagtgtgtgcacttcctcccctctgaggtgcacagccccgggctcagccagaactgagcagatgtcaggatgactggttgcagagaggagctacccactccagggcctcttctctgctgagagctgcagagacaacaggacaacctacctgcagagaggaactactcactccagggcatcctctgagctactattgctcaataaagctcctcttcatcttgcttgccctccatttgtctgtgtacctcattcttcctgggtgcaggacaagaacttgggacccactgaatgaggctaaaagagctataacac

SEQ ID NO: 440005 - DNA, 581 bp, Homo sapiens
gccccctgccaccttggccccctctggactttgggcactgacaaccataggagagaagctgatggagggctgagggcagctcagtgcttgtctgcaggcgccccttggcacctacagcctggacgccatgaatggcagcaggagccagacacgttccttggaggaagggggtggcctgaaggctgggggccaggctgccagtcccatgaactggcgtgagaacttgcgatgccttttctgggcccacccatggctgtccatggaccaactagtgtgtgcacttcctcccctctgaggtgcacagcyccgggctcagccagaactgagcagatgtcaggatgactggttgcagagaggagctacccactccagggcctcttctctgctgagagctgcagagacaacaggacaacctacctgcagagaggaactactcactccagggcatcctctgagctactattgctcaataaagctcctcttcatcttgcttgccctccatttgtctgtgtacctcattcttcctgggtgcaggacaagaacttgggacccactgaatgaggctaaaagagctataacac

SEQ ID NO: 440006 - DNA, 499 bp, Homo sapiens
cttggctctcattctttcatgtctgctgccaggtaagacgtgcctttcaccttctgccataattgtgaggcctccccagccaggtggaaccgtgagtccattaaacctctttttctttataaattacccagtcttgggtatgtttatatcagcaacgtgaaaactgactaatacagattgcatgaaaactttttctccatctattgagatgatcatatggtttctacggtttttatttttttttctgtttatgtggtgagtcacatttattgatttctgtttgtttaaccaaccttgcattgcaggaagaaagcctagttgatygtggtcaattaactttttgatgtgctgttggattccatttgccagtattttgttgaggacttttgtgtctacattcatcacagatattggcctgaagttttttttccactgtgtctctgccagattttggtatcaggatcatgcttgttttgtaacacaagcaagggagaagccc

SEQ ID NO: 440007 - DNA, 554 bp, Homo sapiens
tactagtactgttttaaattttaggaaaaaaaagtaagctctcaattcagcctttcttattataaataaatccaatccctgccccccgcccccccccccccacaaaaaaaacactgggcaaaaaccaaaaacaaaacactgggcccctcccttcaggagttgacaggttagtggggaagacagacatgtataaataaatgtaataaagacagaattatcaaaactctggtacagatagaagccgaatactgtaagagcccamggaatcaagtctgaattgtgacttgggacagcaagggggtactacatgaaggtggaaacatttgagcgatggtagaatttttaccgatggggatgaggaagaaatttcacggaaagggaacaactggagcagaggcctggggacataaatatattcttaatgttttattcaagggataataatctctattgtaaatgacctgtggagcactgtgtggacaataagtgagaaaaggttaactgggacctgatagtatagaaacatgaaaatcagtctttcatattagggtctt

SEQ ID NO: 440008 - DNA, 577 bp, Homo sapiens
ttgtattgtgataacaacacaacagactttataaattaccctgaagctggtaatttataaagaaaagaggtttatttggctcatggttctgcaggctatacaagaaccatggcaccagcatctgcttctgatgagagcctcaggcccccttcatttgtggcagaaggcagagtgaagctggtgtatgcagaggtcacatggtgaagaagatgcmagagagagagctgggaggtgccaggctatttttaacaaccagcacttgcaggaactagcacagtgtgaactcactcattacaaagaggatggcaccaagacatttatgagggatctgctcccatgacccaaacatctcccactagaccccactcccaacactgggcttcaacattcaatatgagatttggaggggggcaaacaaatgaaactatagcaacaacatttcatatactttgtaaatttgcctaggaagataatacaatacatgctattcagttatttgcatttttatcaaatattcagcacatgcaaatctgcctcattctttctaaaggctactcagtgttacattgtataggtg

SEQ ID NO: 440009 - DNA, 199 bp, Homo sapiens
tcaatcaattccatagccaccaaaactaaattttatagccctcctattttacttttatagcagcagtgtggtggcacatatatatgtgtgtrtatgtgtgtgtgtgatttacttgaataattctctcattgtagatgattgctgtactagtggataagatgattcgtacacaaatagttgattgtgctgccgtagcaaa

SEQ ID NO: 440010 - DNA, 199 bp, Homo sapiens
tcaatcaattccatagccaccaaaactaaattttatagccctcctattttacttttatagcagcagtgtggtggcacatatatatgtgtgtgtrtgtgtgtgtgtgatttacttgaataattctctcattgtagatgattgctgtactagtggataagatgattcgtacacaaatagttgattgtgctgccgtagcaaa

SEQ ID NO: 440011 - DNA, 498 bp, Homo sapiens
ttgggtaaaagaggagttcttagctcrttcatttcttagcatttgtatttgtttcctggggatgcccccgtcaaagccccacaaaccaagtgacagaaacaacagaagtgtgttggctctcagttctggaggcagaagtcagaaatcaagggtcagcagggctggctcgctctgaggacgaatctgttcccagctgctctgttggcctcaggtgttccttggccggcagaggctcctttccctgtttttttcttcgcagtgtctaccctctgcacatgtctggatccaaatttcccctttttctgaggacagcagtcatattgcattagggcttccctaaggaccttatcacattcacaggtcacattcacaggtgcagcttttttggggacacaatccaacccataataacatggaactgggacaggaggagaagatggggcaggtgttggggcagctgtggtgaagagaagctggggggcccatcgcggacgtgtg

SEQ ID NO: 440012 - DNA, 509 bp, Homo sapiens
ttgcctgcctgcagtgagtgcaccaatagaggcaagagtttggagaagggctgattggcatgggaaggattgttgttgactattgtggattaagctgtgtcccttcaaaattcatatgttgacatcctaagcccaggtatctcagaatatgaccttatttggaaatagggctgtcgtagatataattagttaagatgagatcattatcgtggaccctaatccaatttgactggagtccttatagaaaggggatattggaacactgaaagccatgcacacaggaagaatgccatgtgaagatgaaggcagagattgggcygatgtttccacaagccaaggagccaatcctgctgacacctgcatctcaaacttctagtctccagaactgtgagacgatacatttctgttcaggccacccagtttgtagtactttgctatggcagccctggcaaactaaaatactgaccgtgattggcatgttagacaactgtgctgtggtggaaacccca

SEQ ID NO: 440013 - DNA, 540 bp, Homo sapiens
gcagtcttaatactgaagaagcaaattgaaaaaattaaacattattgaatagaagtaatgagaaggatctgaggggaaaaaattgtaggcttaattcaacatggtatgtcagcatctgtcattaatacaacaatatgatcatgttctccaatatgctgcatatacctcaagcttttcaattattcagtccctttacttctaaaaaaaacaggagactgatggagagggagaatcagagggtcgtattttctaataatagtaaaaaagatggagatagtaaattgcagctgtcatgcatataaaattatacatttgaaaacaggtaaggtatgaggtaataaatataagctagccattggtcagatttgtgtagccactggtttaaaagaataaatttaattcctsaattcattaattattaaattataattattaataaatcagcagttggtaaactacatagaaaatttaaatctgacatgacaaaactctagagtacttatatttaaattttagaatagaaactaatataagttttta

SEQ ID NO: 440014 - DNA, 608 bp, Homo sapiens
actgtcttagaaactggcaggaaggaataaagcaatagaagttgagagagagtgtgtgagatagataaagcattaaggtatgtgaaggatagaagcagaagtaccaatatcttaataggtttagatagtgaccagaaatagaaagaaaaacaagggaagaatatttgaggaaataatagatatattttcccaaacttaaagataaatgaaatacttcatcctgaaaggatctatagagcacaaatgggggagagaaaataaaaaccccacatatagaaaattataatgaatttaggagtaatataaacaaaagawaattctagaagcttcctgagaaaacatatcattgaccaaaaatctgaattatactgaaattagacttagtagcagcactggaggcaatgtgataaactgtccaaagcatttcaagtagagaactttggggctaacattttgtaacctgacaaactatggttcaaaatgagagcataatcaaaataatttcaatcccacaatcttgaaagtttttctccttaaactcagaatacagaaggaagttaccagatatgaagaacaacaaaaccagaacacactacaaaatgagaaaa

SEQ ID NO: 440015 - DNA, 568 bp, Homo sapiens
attatgcttttatttgggatactggtttctccaaaagcttaccaatccattctgaaaaccagtactgaaaatcaatcttgccaggcgcgatggctcactcctgtaatcccagcacttcgggaggccaaggcggatagatcatttgaggtcaggagaccagcctggccaacatggtgaaaccccatctctactaaaaatacaaaaattagctgggcgtggtggcaggcacctataatcccagctagtcaggaggctgaggcaggagaatctcttgaacccaggagatagaggctgcagtgagcagagatggtgccactgcactgcaacctgagtgrcagaatgagactctgtctcaaaaaaataaaaataaataaaatcaatcttttcaataacttgtaaaggagacaaacacaactacatataacaacaacaccttaaattcatgatcacgacttttaaaaccattaaatagacatttactatagaaaggtatttgtgaagattcttcttgacttaactttttttgctacaaaatatttagattaagaagttatatgacattaaacaa

SEQ ID NO: 440016 - DNA, 378 bp, Homo sapiens
tgaaattgcatgcactattaaaaatcccccctccccgcaaaaayaaaacaagaacaggtttagagagtttcactggtaaattcttcccattttttttttctgaattaacatcaattttttgtgacaaaaaaaggctgaattgttctctactttttgtttgaggccaacataacctcaattgccaactctaacaaggattatactagacagaaaagctatagatcataaacataaatagaaaaatactaaatgagaatgttaacaactcaattcaaagatacttaaagaggaaaatgattatgaccaagttgggcattccagaaatgtaaggttgaattaacacttgaaaatcgtttagtctaattcacaaaatgaaca

SEQ ID NO: 440017 - DNA, 516 bp, Homo sapiens
accatctgcattagctcttaatgagagagcctctttaaagctttgaagccagacattgacttctcctaactacttaagtccctgatagcctcttctttcaatataatgctgttttatctacattaaaaatctgttgtttagtgcagccaccttcattaatgatcttagctagatcttctggatagctttctgaaggctctacatgagcacttgctgcttcaccttgcacttttatgtcatacagatggcttctttcattaaacctcatgaaccaacctctgctagcttccaacattttttctgcagctccstcacctctctcagccttcacagaattgaagagagttagggttttgctctgtattaggctttggcgtaagggaatgttgtggctgatttgatcttctatccagaccactaaaactttctccatatcaacaataaggctgttttgctttacatgcagtcactggagaagctattttaatccttcaagaccttttcctttgcattcac

SEQ ID NO: 440018 - DNA, 566 bp, Homo sapiens
tgctccccacaatagcctcccgtgcctgacacattattccagataacacaacagagaaaaggacaggtcaaggtcttactcaaggtcaaacagctagtaaatgggagaacttggaattgaaccctactgtcccttattttaaagcccaaactctatcacactacccataytttccaaactgtctcacaaaaatcacacggtgaaaatatattgtcaaatttataaaaaagaagatacagaacaaggtattaagttgctacactttgtacagaagaagaggagggtaattgcttaggtaagtaaaaatcgattggtgtatgtttatagaagcatagactattctgcaactttttcaaagacaatgatagtgggatatggcagggctgaaggacactgagataatcttactttgcactgcattacttttgtgtttatcaaattttataccttaatagagggttgccagatttatcaactaaaaatacaggatgctagttaaatttgaatttcaggtaaatgaataattttttagtgtatgtcccatgccacacttgggacatatttat

SEQ ID NO: 440019 - DNA, 622 bp, Homo sapiens
cacaagaaggtagccacctgcgagccacagacaaaaccctcatcagaagcagaaccctaccagaccttgatcttagacctttcaacctccaataccatgaaaataaatttctatggtttacacctttctaaacaattygttatggcagcccaagctgacaaatacagaattcaaccattccgcaggccctcctccaaggactatgctatcatgtactatgcttcgcccctttcttccaaccataaccaagggaaccagggctgggctccctaattcaagggaagccaatctaagtgctgacatgaaaaacatgaatggactacagtgtctcttaagaacttaagaaatattgagagaataagtcaattaatggtagaacaagagttgagaagatagaaggtggctgagtaagggatgaagaagctaaaatggggtacacacaagccagagttatgagacagcaaaaacaagtcagttgatagagacagaatacagccgacattaagagaggcaggcattccttgggagatgcaacacagccaataagaggaaaatagagtaactggtccctacagatgcacaatcactgatctccatttttacaatgaactccattttgcca

SEQ ID NO: 440020 - DNA, 475 bp, Homo sapiens
actaaataattaataatcctacaggagagatagttacatcagaaaaacaaagggcagggaagctcctacacttgatgggtgaatataacactataaagttctgttttgctcagagcctgagaaaagccataagctgccaccaaataaaacataaatccactgttaaaacaaaggtarctgacagagtatggtggctcatacctgtaagcccagcattttgagaagccaaggtgagaggatcacttttagccaggagctcaaaaccagcctggccaacaaagtgagacctgtctctacaaaaaaaaaaaaaaaaaaattgttaaaattagccaggcgtagaggcacatgcatgtagtcccagctacttgggaggctaaggtgagaagattatctgagcccaggagattgaggctatagtgagctatcatcacgccactgaactccagcctgggcaacagaacaagaccctgttcct

SEQ ID NO: 440021 - DNA, 475 bp, Homo sapiens
actaaataattaataatcctacaggagagatagttacatcagaaaaacaaagggcagggaagctcctacacttgatgggtgaatataacactataaagttctgttttgctcagagcctgagaaaagccataagctgccaccaaataaaacataaatccactgttaaaacaaaggtaactgacagagtatggtggctcatacctgtaagcccagcattttgagaagccaaggtgagaggatcacttttagccaggagctcaaaaccagcctggccaacaaagtgagacctgtctctacaaaaaaaaaaaaaaaaaaattgttaaaattagccaggcgtagaggcacatgcatgtagtcycagctacttgggaggctaaggtgagaagattatctgagcccaggagattgaggctatagtgagctatcatcacgccactgaactccagcctgggcaacagaacaagaccctgttcct

SEQ ID NO: 440022 - DNA, 615 bp, Homo sapiens
gggaagaagcatggaagcattagacatttattattagcaacagtattagcatcagaatggctaattaatcatgtttcaattttaaaaaatgaacagcaaaaggaaaattatatatatatatatatacacacakagagagagagagatctagatatacagatggtacttataatacatcccaaaaaaccacaccaattcatcaagtattaagtgagcacttacatattcctagccatgtgtataggaagatttagcatgtgtatagaaagatttagcatgaaggtacttgcataggatccttcaattcttattcaaataaattttttatatctaattttgtatttataattttctattatttttcagacaaccaccccaaattccatatacttcaggcccccaagtctttatccacctctgtcactgaagcatatgacaaaagaagaatgaggataactatctaacttctgagctcccaatttagtggaaaacggtaagtaattatacggcaacgtgataggtaaagttccgagtacagaggaattcaatactgccaacgtgagtcagaaagaatttgtaagagatatgacacatgaatcatctcgaagtatgagc

SEQ ID NO: 440023 - DNA, 595 bp, Homo sapiens
tggtacttcccagcctccagaactatgagaaataaatgtatgtttataagggacccagtgtttgatattttgttatagcacccgaaatgaactaaaacagggrcctagcaaggtataagagaaactggacatatcttaaatatatcggaaaggagtttttaaattgtagaataatctttaatctttatgactctatcatcatggttttgttacgttagtgatatcttatgaacacagaaggatagcttctcatgaccattttctatgacagttccctgaagcaaggtatcctatggagccacctgagtacacaatataaagttactgtgaaattaacaatatagtgaattggttaacaaaggagtaatttggtgctgaaattattcaaataattgccattctgtatatgttacaattcagattatcaaacacaccaagagttggagaggggatgatctgcatcattctagatcagctctggccaatggaaatatcatgtgagccacatatgtaattttgtctgtagccacagtaaagaaaaaagcagaagtaggtgaaattaattttaataatatattttatttaacccactttc

SEQ ID NO: 440024 - DNA, 595 bp, Homo sapiens
tggtacttcccagcctccagaactatgagaaataaatgtatgtttataagggacccagtgtttgatattttgttatagcacccgaaatgaactaaaacaggggcctagcaaggtataagagaaactggacatatcttaaatatatcggaraggagtttttaaattgtagaataatctttaatctttatgactctatcatcatggttttgttacgttagtgatatcttatgaacacagaaggatagcttctcatgaccattttctatgacagttccctgaagcaaggtatcctatggagccacctgagtacacaatataaagttactgtgaaattaacaatatagtgaattggttaacaaaggagtaatttggtgctgaaattattcaaataattgccattctgtatatgttacaattcagattatcaaacacaccaagagttggagaggggatgatctgcatcattctagatcagctctggccaatggaaatatcatgtgagccacatatgtaattttgtctgtagccacagtaaagaaaaaagcagaagtaggtgaaattaattttaataatatattttatttaacccactttc

SEQ ID NO: 440025 - DNA, 615 bp, Homo sapiens
ccagcctccagaactatgagaaataaatgtatgtttataagggacccagtgtttgatattttgttatagcacccgaaatgaactaaaacaggggcctagcaaggtataagagaaactggacatatcttaaatatatcggaaaggagtttttaaattgtagaataatctttaatctttatgactctatcatcatggttttgttacgttagtgatatcttatgaacacagaaggatagcttctcatgaccattttctatgacagttccctgaagcaaggtatcctatggagccacctgagtacacaatataaagttactgtgaaattaacaatatagtgaattggttaacaaaggagtaatttggtgctgaaattattcaaataattgccattctgtatatgttacaattcagattatcaaacacaccaagagttggagaggggatgatctgcatcattctagatcagctctggccaatggaaatatcatgtgagccacatatgtaattttgyctgtagccacagtaaagaaaaaagcagaagtaggtgaaattaattttaataatatattttatttaacccactttcttcaaattattatttcaacatataatcag

SEQ ID NO: 440026 - DNA, 510 bp, Homo sapiens
aatacgagctcactgcctcagagtctcactagtttacasactaagtctctttgagaaccttgttatgagctaaactgtgtctcctaaaaattcacaggaaatcctaatccctgtacctcacaatataactgtatttggagataaaggttaaatgaggtcactaggggtgggctctaacacaatatgactggttcccttataaaaaattaggctatagacatacacagagggagggcatgtgaagaaacagggagaactcagccatctacaagccaaagagcgaggcttggtagaaaccaatcccaccaacactttgattttagacttccagcctccagaactgtgaggaaataaattcctgtggtttcagccacccactctgtgttattttgtcaaggcagccctatcaaactaatacagattttggtaccaggaaatggggtgctgctgtaacaaacaccaaaaatgtggaagtggctttggaactgggtaataggtaatggctacaaa

SEQ ID NO: 440027 - DNA, 540 bp, Homo sapiens
acgtttccaaatatacaaaatgtagccaacctgcaactcaacctgagagagacaagactatgtcagatctgggatgtaatctggagaaaataatctacctctaastgaggatagttaccttccaggcaattcattgttcctctccagcttttaaatcccttaatctcaattctagacaatggattcacttgatcatttgtcaagcaaaatctctccaccctagcagttaaaaactaaaagtggccaactagacctaaatccatgtaaagttacatatcaaggatttccaagagtctctctgaatagcttcaacttgtagaaatatactaaactctgagaccagcctctattcctcacagttaggtacatttaaatgcatctgaaaaggaaagatgtctttaagggtcaagcagagcaatgtctaggtgataggactttgaagcacactaaaaattgactaaagatccctccctttccaagccacaaccttcaggcctagtcaataaaaaggagtgtggtaaagggacaaagaaaaccaga

SEQ ID NO: 440028 - DNA, 592 bp, Homo sapiens
tagcctgtttctagctcctcagattttccttatgtgcactgccctgtggatgctttctgcatgggtagcttactgaatggcataggatgcttatgagaagcgctttaatcagaagggtgggggcagtcctctcactttctaagtaacttttcgcacatcagggtgcattcttagtctgatgatccaattaaaaagcaaaaacagtaaacatggaaaagttattagagttgcatggccccaggaagaacagatattcatttctattttgtgccacttaagattttctttctgttatcctcaatttggaagtcccacgaatttttttctgcataagaaastctttttcaaaatatccctctgatattagattataggaccaaaggatactcagaagtccaatttagaacatttaaaagaatttcttttaatattctgaataaaaatacttttttctcatattccttggactttcaaacacattcacagctgttgacctctctcttcctagagtcctccccaccccacccctcttgtaattccatgcaatcacactcttggttttgcttcttccgcttagtcaagggcggatgta

SEQ ID NO: 440029 - DNA, 443 bp, Homo sapiens
tcaataaaccattctttcattcatccctggaataatccaaatgaaatttactttgctaatattttattttcagatttttaaaaataatctcaactgaatgctagatatgttgaggccatctaaaacaacagacttaggaaaattaatacccttaaactgacctttgtttaaacatgcatcactttgaataactggaaattttaacagccttttatcaccccaaattcctttttgtgctgtttcctatagyttgtagtccagaagcaattggcttatgcaagcgttaagaaggcatatttgaggagggtggtgtgggagtggaggagacagaccgcagcataatgtctaggaattatgactaaactagagtgaagagtgtataaaataattgttttcctcctcccttttttccgtattaaaaaaaaaccactctgttttttcta

SEQ ID NO: 440030 - DNA, 462 bp, Homo sapiens
ttaccaatagtataagagatacaaaacaaataaaaacaactgaattatgtgtgaagaaaggaaagtcaactggcatggattttatcagtacatattttatcagaaaatttaaaagttgttttaaattttatttaaagttstctacataagctttattttttacgaagtactttttcctgctctaagaaaaggccttaccctgacttgatcattacacattgcatgcatctaacaaaatttcacttgtatgccataaatatgtagaactataatgaatcaaaaaataggccttatgaagttgtttttcattcttctctcttttcttttttttgtatgttttcgcaattggctttgtctcacaatggcaaaataaaatgtttgtagtatttgtgaaaaagtcaggtttctatggaatatatgtcatacacgtgcaaaaggcatcacatatttcagtgttgctgt

SEQ ID NO: 440031 - DNA, 648 bp, Homo sapiens
catggtggctcatacctataatcccagcattgtgggaggccaaggctggaggctcatgtgaggccaggagtttgagaatatcctgggcaacatagtgataccctgtctytacaaaaaataaaaaacaattatctgggtgtggtggtgcacatttgtagtcccagctactcaggggctgaggtgagatgattgcttgaactcaggaatttgaggctgcagtgagctatgattgggccactgcactccagccagagaaaaagcctttctgaaaaagaagatgaataaataaaagagaagaacaaggaggaggagaaggagaaggagaagaacaggaggaggaggaagaggaagaagaagtggcggtggaggaggaggaggacctctttttctgattgggaaatgatgacttatattttaaaattaaatgaaggacttaataaaatggcatattatgacccatagacaacttttgaaagctgagaatgaggtaaataatgacttcaaatctactagtttatgtaactcttccacaatttgactttggttaagagtgttccagtgaagcacttgaataggtttgtagaaactctcattgccacaaatggaaaaaatagtccaaatgcatattttaataacagcagttatgta

SEQ ID NO: 440032 - DNA, 648 bp, Homo sapiens
catggtggctcatacctataatcccagcattgtgggaggccaaggctggaggctcatgtgaggccaggagtttgagaatatcctgggcaacatagtgataccctgtctttacaaaaaataaaaaacaattatctgggtgtggtggtgcacatttgtagtcccagctactcaggggctgaggtgagatgattgcttgaactcaggaatttgaggctgcagtgagctatgattgggccactgcactccagccagagaaaaascctttctgaaaaagaagatgaataaataaaagagaagaacaaggaggaggagaaggagaaggagaagaacaggaggaggaggaagaggaagaagaagtggcggtggaggaggaggaggacctctttttctgattgggaaatgatgacttatattttaaaattaaatgaaggacttaataaaatggcatattatgacccatagacaacttttgaaagctgagaatgaggtaaataatgacttcaaatctactagtttatgtaactcttccacaatttgactttggttaagagtgttccagtgaagcacttgaataggtttgtagaaactctcattgccacaaatggaaaaaatagtccaaatgcatattttaataacagcagttatgta

SEQ ID NO: 440033 - DNA, 581 bp, Homo sapiens
aatattatgcactaaaaatctacatcattggaaaatacttagcaatatcaaatatgtgtaccttcttaacatataacaatatggtgtgctaattataacatatagacactgctctctaagaagcctacaatttaaacctacattatagatcttacaatggaggtaaaactgatagacaaaaatgcatgtcaaccaactgcatgacacacagatcattgtatttgtagtgtttagagtagcactcatatgtaaagtttgctgcacagtcattgccaagtccaatcttccagatatcctaaaacttacacatgtactaaattgggcttcataaattaatatacttcaatcatataattgtggcaactcatactactctttttactttaattcgttttgttggaatctctttggcttttattgacggccaacattggaaatacttttttaggaatttgatgtgttgaaagtaaggatgttgttaagartaattattatgtttcatggcgcttcagccttcagtcttcacatcaatactggcttgcttctcctgagctctttataattatttttatttagtttta

SEQ ID NO: 440034 - DNA, 575 bp, Homo sapiens
aatggaaacatattgtgaacatagaagtaaaatatttactttagtaattgaatgagtagtaacaatgatggggtaggtaagtgctcttaaaattgaatcctcattcaatatttactgccccattgacacactgcacaattgaatgatggattccaaataaggacatatatttttcaagtcttaataattttatatgatcagtttttattcttctttttattttataaattcactgaaatcttttcaacccagcgtacatagacttctttttaaaagataaaacttttaaaacaargacttaaaaaaacctgacattaaattctaaaacagtaagtaaaagagtattacatgtgcaaatttggggatttcttctgaagtaatatgttcccacttctctaacttcacagatgtagtactgtccaaaatggatggtagcataaagtacaaatttgttatttagacttagttatcaaatggatataggagaaatatattattttaaatttgaattttggcttgatgtttatccctttaacatatggctgggttaagtcattacaagaaatacaagcaat

SEQ ID NO: 440035 - DNA, 585 bp, Homo sapiens
catatggctgggttaagtcattacaagaaatacaagcaatcatttgatttggaagccatgcattttccaaatgacaaatgtcaattttctgtttagttgcttttataaatgagaagcagagtccagtctrttaaagtgactgagacacaattatccactaaatcactggcaaaatgaagcttgcattcatctcatcacaatttcatttcactatatgatggttatatttttatatactcgtgtgtctacaacctgctccatgaaaattaactattagctgtaatagagtactagatctggaattagacagatttgattttaaattttgttcttccacttatgagatatgtaatcttgagaaaattactgtatttctctggatctcagttatcttttcataaggccattatgagaaacaaatgagaaaagttatgggaaatgcctggcaactttcaatgctaaacaaatggtaattcttttcctcttactttcttaaggataaccgccacagtgaactttatcatttttaattgagacttgtcattttgtaagattacattgatgcaagtagagtgtcaggagtca

SEQ ID NO: 440036 - DNA, 587 bp, Homo sapiens
gctctttctagacttacaacaaagaatggccaccctgaagcaggacatatttttccagcatgagtgtagcccagtatgtttgattagaaaaaggcagctcccaccttcattgtcattgcaagcagtggacacaggcagcactttagaaggcacattagaggcaaaattcagcatccacagaaatcaagtgataaagatgaagcattttcagcatctcctttgagtaagttcctaagaaaagactacgtattgtctatgatgagtgatagactctgaagcaagaagtatgtgccttggtatccactgcctatgataagatggcatggagcawagcagagaactcctgggagaagagtcgcagtgggatcagagctgactcccacactgggtaagctccagctaccgaagggcagaggagagagattctaacatcagtgcctaataggtagtccttgtaattccttgactctatattcatgtagaaactctatcatcctccttaatatcatcctcgttattatcattatcattacagagtatggactcagtctcccaatcattatcaacaaatcctccagtcaccttcc

SEQ ID NO: 440037 - DNA, 579 bp, Homo sapiens
tttagcgaccacagtgggaattatctccacagccctgagagctaactcaaccgattgtctacaaccttctcacaaaagagaggccagggctcaagaacacaggaattttaactgctccaatgactaatctttaacaagtgaggtcaagttttcttcttgccttgagaatattacagaaatacatttccacatggtgatattcaatgtaccatcagttctcatttgttttaatgctataaaattaggtttggttctacaaacacggagaaccatgattgcataatagaaagagcactggctacagagttaggagacatgtgttcaaatttcagtttctctgcactctgggtgtgaatctcagcctctttgcctctgtttcctcatgtataaaatggaaatagtaatacttgctcctctccattacagtagagaggattaagcaggatcatgtatattaaagtgtctggcttaatgattcacacatagtaattgcctaataaatatttattcatttmatggaatgttcgtgcagtgtctggcatattcgagatgcacaataggatcctatccaattagttc

SEQ ID NO: 440038 - DNA, 596 bp, Homo sapiens
tgaccatctctctgtcttcacactgtccagtgggtccctactggctacagagagcttacaaattggcagccacatgtttgtttgccagtatgaagtatttttaaatgttaaatattgacaacatttaaaacttggcagcccacttaaaattctgatttctgatttctcaaaaaatcagaagatatggccattccaggtccaaattcttgcagagcattaatgtgctgatgctgagtagcagaagtataaaagagacataacttacttcctactatgccacaattccacctccactgcctggcccctacaatacttgaagttgcaacacctggtcttaaggattaaactctaaacttcacaaaaggatatccaaggttcttcactattggctactggtcagcttctacatcttcagcctctctcacttccctatttayttaatcaataaaccttccttgatccctagcatgtaccaagcagtgtgctaaatggatatggagatgaataaaatgcatgcctcagttagggccccagcagatggcacatacaaattaagacaatttgagcagggttggttgaatggtaggagaaccaca

SEQ ID NO: 440039 - DNA, 596 bp, Homo sapiens
tttatgatacagaaattgactcaggagacctcatttatatttctcaaactcctcaaggtggcattcctagcttagaaccacagtaacagctactcatcccacatamcaaagagactttggattttgtcttcagatatttcatggtactactttcctgacttcttttcaatgatgatctcagagtgataaggcctttgtgatgctacgtaagccaagtgaaatgaaatatgattactttaatcataccaattgtcttactctgtttgggctgctaacaaaaatcccatagatggggttatcaacaacagaaatttatttctcatagttctggaagatgggaagtccaagatccgtgtctggtgagggcctgcttcctggttcatagatagagcctagctctctgcgacttcttttttatggggacaaatactgttcatgggggctccgtcctatgacctaatcacttcctaaaggtcttatttcctaatgccatccctttgggggtagaattttaacatatacatttggggggcaagggaggacgcaaacattcagatcatagcaccaatattggcttgcatgtgctgttgttgtcc

SEQ ID NO: 440040 - DNA, 558 bp, Homo sapiens
actcatcccacataccaaagagactttggattttgtcttcagatatttcatggtactactttcctgacttcttttcaatgatgatctcagagtgataaggcctttgtgatgctacgtaagccaagtgaaatgaaatatgattactttaatcataccaattgtcttactctgtttgggctgctaacaaaaatcccatagatggggttatcaacaacagaaatttatttctcatagttctggaagatgggaagtccaagatccgtgtctggtgagggcctgcttcctggttcatagatagagcctagctctctgcgacttcttttttatggggacaaatactgttcatgggggctcygtcctatgacctaatcacttcctaaaggtcttatttcctaatgccatccctttgggggtagaattttaacatatacatttggggggcaagggaggacgcaaacattcagatcatagcaccaatattggcttgcatgtgctgttgttgtcctaggcaatttacatgggttaatgcaggctgtggagtcagatggtgtgggttca

SEQ ID NO: 440041 - DNA, 594 bp, Homo sapiens
aattaaaactgtgaaatttttaaagctcaagaatacacaagcacacgttccatttgttgtccgagtacaacatcatctcacatcaaacagcctccagaaaatgccactccaagctcatgagagaatgggagtgaaaaaagcaaatgacatcttagtattgtcacaaaaatagctttgacctcaaggaccccctgaaagattgttggggactcctggggtccccagaccacactttgaaacgtatgcactacacaacctccatgaccttgctatggcrtgtgccttggagtaactcctctacctttctcacaaggtattaattcagtcagtaaatactaattgaccaccgactacatctcaggcacaatgctaggcactaggatgcagcggcaatcaacaaatacgtcccggctgctgtgacacttccaggaaagtggaggagtcagatattaagccaaaataatcactccaattagtaatttaaatctattaagattattagaaaagagcaggacactaggggaccataacttaaagacatgactctgtttgagcaatcaggaaaaactttcttgaggaagtggcttatctcac

SEQ ID NO: 440042 - DNA, 607 bp, Homo sapiens
caataatgacaatattgaattagaatcggacagtgagacatactggatgaaacagctttatctgtgttgttctcagttacatgttgaaatccatgcttaaaaataggtcatgtcaaagaacagctataattgaaaatacatgttctttgaaggaggcatgggtttttgtttttgtttttgttttttgttttttgtattttttttttggtctgttttctgaatgcagaaccagaaacgcaaaaaaacagctataatttttccaagacaaaagacttagtaattcagagctttgctttattcatgttgtttatcattcaaaaccaaaycttcttgcaagatccactggggtgtttggtaaaaggcacatggagctgggagtcagaagcgccggattctcatcccagcccagccactgattcactcattgcttttgaacaagtttcctctcttgtgtgggccccagttttcacatctataagatgggcagggaggtggtggaaggttttaactatgttattatttctcaaagaatgggcacaaagcagttgcagaacccctatgagagaagactttaggaatcacaggcttaaaagaaaatcactagtaa

SEQ ID NO: 440043 - DNA, 573 bp, Homo sapiens
ccccaccagccccttcctgcttgagccagtaaagacagtccagggtgccagatgtgctggaccacccctactagaatcagcaccataatctggcttccccacagggacaccccacccgtgatcatttattgagacagtgcctatctatttcattcatgttaaataaaattgtgaaatctctccttagaatttaagaagtaattttgctcatgcttgttactttcatcacttttaattactccttcctcttcttacatccctaccaacaccaccagccatcctgtccttaggaaagcaggcatgcytacggggcacttgccacggtgccataaccatctccatgacaaccagtggtgatggccttgacatgactataaaagaatatatcctcagcttataagaaaagaactgcaaagccttaagaaaaatcccatgtctgcctttacaaaaaaggtaactgggagattaatttctaattatagatcttctttaatgatgatgatgaagttagaaaatattttcattttctttttttctttctttttgttttaatatagacagggtctcactagc

SEQ ID NO: 440044 - DNA, 573 bp, Homo sapiens
ccccaccagccccttcctgcttgagccagtaaagacagtccagggtgccagatgtgctggaccacccctactagaatcagcaccataatctggcttccccacagggacaccccacccgtgatcatttattgagacagtgcctatctatttcattcatgttaaataaaattgtgaaatctctccttagaatttaagaagtaattttgctcatgcttgttactttcatcacttttaattactccttcctcttcttacatccctaccaacaccaccagccatcctgtccttaggaaagcaggcatgccwacggggcacttgccacggtgccataaccatctccatgacaaccagtggtgatggccttgacatgactataaaagaatatatcctcagcttataagaaaagaactgcaaagccttaagaaaaatcccatgtctgcctttacaaaaaaggtaactgggagattaatttctaattatagatcttctttaatgatgatgatgaagttagaaaatattttcattttctttttttctttctttttgttttaatatagacagggtctcactagc

SEQ ID NO: 440045 - DNA, 511 bp, Homo sapiens
agaacataacagtttggaaagtttgcagcctgattttgtggtaggaaagaaaaaaccattttccggggagaaattcaagatrgctgcagaaatttgcataagatgagccaaatgttaatagccaaaacagtggggaaaatgcctccaaggcatttcagagaccttcatagcagcccctgccatcacaggcccagaggtctaggagggaaaaaatggtttcatggaccaggtccagggccctgctgctccgtacagcctcagaacatagtgccctgtatcccagccactccagttgctgctatggctaaaaggggccaatatacaggtcaggccattgctttagagggtgcaagccccaagcctttgtggcttccacttggtgttgagcctgcaggtgtgcagactgcaagagttgaggtttgggatcctctgcctagatttcacaggatgtatggaaatgcctggatatccaggcagaagtctgcagcagaggtagagcccttatggagaa

SEQ ID NO: 440046 - DNA, 513 bp, Homo sapiens
cgcccaccggggcctcccgaggcccgccggcgaccccagtccagcctcagggcccccgggagcccacggcctctagagcctggggcatcgatggtccccgcccccaggctggtcttttccagggaccctcagcccacttagctctcgtaggcctcgctgtacgcaagaccggtcttccgctcggctgcagatccctggaagcccccaggccctcaggctagaagttggacccttctaaggactctccgcccacccagccattctaggcttcactgaaccctagaatccttcagctcatcttcccccaccccccagctcacctraggtgagctcagccagtcgtctcaaactaaccccaattgcctagcaattctcttatattagttagatgatttatccccagaagcctagaatcaggtttatggggccagcctcaggcaagcatctagaagaagtttttagcaggagtcctaccctgcagtacttggggaaggcataagccaaggataaaat

SEQ ID NO: 440047 - DNA, 567 bp, Homo sapiens
  misc_feature (1)...(567): n = A,T,C or G
catgaacatagtatggatagtatgtctcttcatttattagttcttctttcatttctttcgccagcgttttgtagttttcagcaaacragctctataatgttttggtagatttgagcctaaatatttatttttagattttgagcaattataaatggaattgtacttttaattttgatgttcacatgttcattgctgttatatagaaattcagttaatttttataggtttatcttacatcctgtgaccttgctgcactcactattagttctaggtttttggctttgcttttttcttatgattccttgtgattttccacctgnacaacaatctcatccttttttctttcccatctgtatgccttttatttctttttcttgccttattgcaaaggatagaacatctagcactatgttacctgtgagagagtagaccttcttgccttattgctgatcataggtggaaaacattcagtctttcactctttttttttttttttttttttttttgagactgagtcttgctttgctgcctaaactggagtgcagtggtgcgatctcagctcactgc

SEQ ID NO: 440048 - DNA, 630 bp, Homo sapiens
tgttatttatgggtgtttatttaaatgtattgtctctttttcctcctagttgcctttttctattttcctgaatctttggtctctggctttcattatagagttttccacaaatatctggtgactcttgactgcctgtcattcatgtttaaaagtgtggtgtaagaagctgaccggggctgggcgcagtggctcacgcctgtaatctcaacactttgggaggccaaggcgggtggatcacctgaggtcaggagttcaagaccagcctggccaacatggcaaaaccctgtctctagtaaaaactaaaaatataaaaattacctgggcatggtggcccttgcctgtagtcccagctacgggggaggctgaggcagaagaatcacttgaacccaggccaagatcacaccactgcactccagcctcggcagtagagrgagacttcgtttcaaaaaaacaaaaaacaaaaacaaacaaaaaaaagcaagctctatgcacctgggtggggcccaagggtgaccaggccgagactggagatttcattagagggtttcaaatctcaaatcgtggtccctgtagaccttgtccccatgccaagtggtttccccagaaaagaattctctagtctcctgacct

SEQ ID NO: 440049 - DNA, 618 bp, Homo sapiens
tattgtcccacagcttaaatagctagaaaaacacatggaaggaaataacaaagatataatcagaaattaaaagtaagagaaaaggagggagagatgttaattaagaattgagtctttgtaaaaagcataatagataaacttctggcaaatctaatagtaaaataaaataatataaagataaggaaaatttatttgggaaaaggaaagtaagaatataggaaatttcaaaattataaaagaagatgatgtgtagctcttatgtactgccatgtgtgactgaaattgaaaatcctgatgagttagataatttctactgctatctaagaacaaatcctaaaaagcctgtatccaaggaagaaattggaaatgttgttagagaattatttacaacaaaagcactaggcccaaattgctttaaagtaacattctctcaaattaccaaggaacagttaatttttacatcgtacaractatcctaaagctttgaaaaaagattggacgcttcttcatttgttttacagagctaatttaccaaggtcagttttacaattgaccttgctaatgtaaatggtactgtttcccccacctcattttattttttaaaatggttattggtgt

SEQ ID NO: 440050 - DNA, 576 bp, Homo sapiens
gaatgacagacattagcacatcacgtagatgacttaggctcccccgtcccccacacacaaaacaaagcaaaacaaaacaaaacctctatttcagctaaaattaaaaataagcaatatatttaatcaatttacactagcaagtaaatatcacttgtaagtgtaatatgactcctccttaggaggagcaccaaagtagaaagccaaacaaaacagactaaatacaatgagattatctagagccaaactccagaaatgttcccagtggagactgtggaatagacaaaataaattttaatccatgaattgtctttatgaatcgacaaagctcagaacattatgtagaagaatttgtgaaaaataaaaaatattttttaaaacagtaaagtcccagtataaagtactccaatagacagtattctctagcctaggccgaattycctatcccaacataatgcttagcagtacagcacctgcagccctccaccttggtttgcatcctggtcttgccactctcaagttatataaccttggacatgttagttaacctctaagagcttaaattaccttgtttataaa

SEQ ID NO: 440051 - DNA, 516 bp, Homo sapiens
ctgtaggctattattgaatgcataggattgcatactaaccttattcctcaattctattctgtcacctagatatttttcttattctttcttctctcaatgaactattttatctttttttgtatgtgtttcaaacttaccttgttcatggaatgactaaaaaataggaattttatgttctttctctsggccatgccagatagcagaaatcttgcttttcatgaatatctacaccttaattgtagtgtctgactggtagcacatgcccggtatttgcctcaggtttttgtggggtttcctagttttgtttataaaacatatccggtagaggtattagcctctattactattggttgctggtaattgtgatccatattccttttgttagcttgaccacagtgctatacatgtcttgagtgtaactcctattgcattccatcagaaacaagggcagtgtgaacaagaaagccacaggttaaaataattcgtatctgctgagggcttgataccctgggagga

SEQ ID NO: 440052 - DNA, 516 bp, Homo sapiens
ctgtaggctattattgaatgcataggattgcatactaaccttattcctcaattctattctgtcacctagatatttttcttattctttcttctctcaatgaactattttatctttttttgtatgtgtttcaaacttaccttgttcatggaatgactaaaaaataggaattttatgttctttctctgggccatgccagatagcagaaatcttgcttttcatgaatatctacaccttaattgtagtgtctgaytggtagcacatgcccggtatttgcctcaggtttttgtggggtttcctagttttgtttataaaacatatccggtagaggtattagcctctattactattggttgctggtaattgtgatccatattccttttgttagcttgaccacagtgctatacatgtcttgagtgtaactcctattgcattccatcagaaacaagggcagtgtgaacaagaaagccacaggttaaaataattcgtatctgctgagggcttgataccctgggagga

SEQ ID NO: 440053 - DNA, 516 bp, Homo sapiens
ctgtaggctattattgaatgcataggattgcatactaaccttattcctcaattctattctgtcacctagatatttttcttattctttcttctctcaatgaactattttatctttttttgtatgtgtttcaaacttaccttgttcatggaatgactaaaaaataggaattttatgttctttctctgggccatgccagatagcagaaatcttgcttttcatgaatatctacaccttaattgtagtgtctgactggtagcacatgcccggtatttgcctcaggtttttgtggggtttcctagttttgtttataaaacatatccggtagaggtattagcctctattactattggttgctggtaattgtgatccatattccttttgttagcttgaccacagtgctatacatgtcttgagtgtaactcctattgcattccatcagaaacaagggcagtgtgaacaagaaagccacaggttaaaataattcrtatctgctgagggcttgataccctgggagga

SEQ ID NO: 440054 - DNA, 536 bp, Homo sapiens
ctaagtttctgttctgttacttcatctcactttatatacagatgttctctttgattttcatctctttgttccttttgctctgccatcaaaactgacagttataataagctttwatgtgacattgtatgttttgagcacctagggattatacccatttattattctgttcagcattcattagcaccatcactcttttctctatatatttgagtgtccagtgtgtataaactgtagcttggtcctaaagcaaaagataaaagtacagaaagacctagtctcttaattgtaaggtacttactttctgataaagataggaatgtcataaatataatagcattaatttttaaatagaaaaacacaagaaaagaaaaagctgatataattttgaaacaataaaaatagttttgtaacttaggctcacctgtaggacatagtaggacctctgtggcttcaattaatagtccaagaagaattgagcttgagttcccatttgctttcccacgactttattgagcaactaacttgtgtcaattagc

SEQ ID NO: 440055 - DNA, 536 bp, Homo sapiens
ctaagtttctgttctgttacttcatctcactttatatacagatgttctctttgattttcatctctttgttccttttgctctgccatcaaaactgacagttataataagcttttatrtgacattgtatgttttgagcacctagggattatacccatttattattctgttcagcattcattagcaccatcactcttttctctatatatttgagtgtccagtgtgtataaactgtagcttggtcctaaagcaaaagataaaagtacagaaagacctagtctcttaattgtaaggtacttactttctgataaagataggaatgtcataaatataatagcattaatttttaaatagaaaaacacaagaaaagaaaaagctgatataattttgaaacaataaaaatagttttgtaacttaggctcacctgtaggacatagtaggacctctgtggcttcaattaatagtccaagaagaattgagcttgagttcccatttgctttcccacgactttattgagcaactaacttgtgtcaattagc

SEQ ID NO: 440056 - DNA, 529 bp, Homo sapiens
aatgctgcccagccctgcctgtatgatgtttataacccactgacagtccatgtaaaaagggccggctcagagactatcttttcaccagaaatgtcgtcctttcagggaagagactgagaaayaataggaaccccgcaaatgaactcacctatgcagctcctcgaggtgtattccacctggcacagccatgtcaattgcccattgactaaagcccatttccggcgttctcgacccaggctctgtggctgtgggccctgggaagttgaggcttccagggggacactcagttaacatctcttaccttacatcctgactttcagccacagagtcagaaagaaggaaggcaaaacataaaagtacttccaaatgtccaaataaatctccttcctccaggttcctggggctcaagttcttctgagatactgaatcaaactagcaactaaaaactgtagatgaaagattctctaaaatttagcctttgtttaaacagaaaacgagtattcattaaaccataaccatgtgacaccac

SEQ ID NO: 440057 - DNA, 500 bp, Homo sapiens
actgctgggtcttaggggattaagaaactatagacatytgaagaaattgccactaaggaactcagctgacggtagcactgaatcagagatttgccatctgcccaccattgccagaaaataaaatgatctcccttccatgttccaaatgccacactagtaccttttattgaaataacctaactttagaatcctactagtcaggacttattaccattaacaatcaaaggaccagaaaccaatgcaagacctttcctctgagctatctggaagagtattgcctaataaaatatttatattttaattgtagagatgaggtagtgctttttttaatggctacaaattctttgacacttctctcatcaacaggtggggtctatatcctctctttatcctagattcttggagtcctgtggctgctttgaaaatacactgccagaagtaaaggcatgtgagttgtgcaataaggccaaaaagacaacagagcttccatgtggctttct

SEQ ID NO: 440058 - DNA, 545 bp, Homo sapiens
attgtttgtaatgctttggcattttttaagttcacatacatgattttcacacattcatcctagtcaccttgtgtgttgacagtcaactgcttttgccatttataaatgagtaaattaaaactcagagagtggaaaacattattcctaatttacacaacttcaagcgctggaaaaataaaagcatttatttcagttctaatgattctacatctactttccttcatcatgtataaatagaagggtagggcttttcacctggggtacaattttgggaccgtacactgctatctctgatcttgggcaagtcactaaatccaggtgaccctcaaagttctcatacattttaacaggaactaatgataacatatatgctttatatatatttgcacatatatatgcatatatacacacatatatatgcacacatatgtatacatacatatacacacacatatatayacacacacacacacacatatgccacagtcaatgtgctctatttgggccaaaacatgggctcttttttggagttatcctcctcttta

SEQ ID NO: 440059 - DNA, 564 bp, Homo sapiens
caataggccataccatatagcctaggtgtgtagtaggctacgtcatctaggtttgtgtaagttcactctatgatgctcacataatgacaaaattgcctaaggatgcatttctttgaatgtatacaacatatatctttattatacaggtcctcttctttgtcctgtcatggtgcctattggttttctttatagctattcacacaatttttgcttatgtatttgcttcttattagctccctccttcacggaggtagacactatgtttgcctggaagatttcctttctcacaactctgttgctttgagtacttgcttttccttagtgacaccacttagacttcctagactaggctaaattccctttgtatatatttccttagcaccttgtgctttccttctggaaccctcaaaatacttctaattccttgaccattgtttctctttcctaatatacttccatgagaagagggtccmagtctgtcttgtactatgtccacgctgctcaatatagtacccgacaactagaagaggctcagcaaatgttacctcctatctgtccccatgt

SEQ ID NO: 440060 - DNA, 442 bp, Homo sapiens
ctccttttgaaacatgctctttgcatggctgtgtaggggccaagggaaaatttcgacttcagcctctgaaaagtttgccgaaaatcaaccgacaaaaggcagattaataggagaaaaggcatacaaatatactaacatgcatgggagtcrtgcaagatataagagcgcaaaacaatggccgggtagttgataattttatgccatttcgagggtatagaaagaatgggggcttggagcatggcaaaacaggttatgggatggggagaaaagaagacctagctagcaaaggtagtgctgttccatagatgaaacatcacaggtagcagccctcagagaagatatatggcaaatgtttcttttaaacctttaaaggtgtcagactctcagtcaatctttcctagatctggacaagggagggcctcagagaaaacctggctgcgtc

SEQ ID NO: 440061 - DNA, 442 bp, Homo sapiens
ctccttttgaaacatgctctttgcatggctgtgtaggggccaagggaaaatttcgacttcagcctctgaaaagtttgccgaaaatcaaccgacaaaaggcagattaataggagaaaaggcatacaaatatactaacatgcatgggagtcatgcaagatataagagcgcaaaacaatggccgggtagttgataattttatgccatttcgagggtayagaaagaatgggggcttggagcatggcaaaacaggttatgggatggggagaaaagaagacctagctagcaaaggtagtgctgttccatagatgaaacatcacaggtagcagccctcagagaagatatatggcaaatgtttcttttaaacctttaaaggtgtcagactctcagtcaatctttcctagatctggacaagggagggcctcagagaaaacctggctgcgtc

SEQ ID NO: 440062 - DNA, 500 bp, Homo sapiens
actgctgggtcttaggggattaagaaactatagacatctgaagaaattgccactaaggaactcagctgacggtagcactgaatcagagatttgccatctgcccaccattgccagaaaataaaatgatctcccttccatgttccaaatgccacactagtaccttttattgaaataacctaactttagaatcctactagtcaggacttattaccattaacaatcaaaggaccagaaaccaatgcaagacctttcctctgagctatctggaagagtattgcctaataaaatatttatattttaattgtagagatgaggtagygctttttttaatggctacaaattctttgacacttctctcatcaacaggtggggtctatatcctctctttatcctagattcttggagtcctgtggctgctttgaaaatacactgccagaagtaaaggcatgtgagttgtgcaataaggccaaaaagacaacagagcttccatgtggctttct

SEQ ID NO: 440063 - DNA, 571 bp, Homo sapiens
ttcttcgtaacatgaatatgttcttttgtagctgttattcccatgaggtccaattttcctaggcaaattttatgatctcaattttgtcatgcagatgtagggtcttcccatccatgtttagtcaatatttactggacgcagtgttagtctttgtgttttattttctgttgcttatttctaccaggtaaaagttattttaagttttgcaatttccagtgttcccagtaagctgtaattcttcaaacaggtttttccccccgtaaaattaactttgttgtgtatagtttagagggattctctaaccctggctaggcatctgaatttcctgggagcttttgaaaagtacaagttttccagcttctcttcaatctcaagattctgatccaggcggaatctggatatttgaarttttaaaagctccctgcctctcaggttctgtggtagtcactggcccatcacttggtgtggttaccaccttgccttgtgttattggttcttaaactctttgggccttgctattctattttaacattccattttcccaacttaactgtgaggtcattgaagaaag

SEQ ID NO: 440064 - DNA, 481 bp, Homo sapiens
ctgtggttttcttgcacggagaagaggggaagaaagagaataaaaattttatttccaataaaacayaacaatagagctgcggcacttgtttttctagttgagactcttattggctgctttcacattctaaaaggctgggggagacctcgaaccagctcggaagcctccacaccagggctggtctggcctcggggaaatacagacagcctcatcccaaggggtctcccgaaggcctgactctgagcttgtaaaacgcaggacagaactctcaattcagctcagttcagttcaacagtcattaagaatcagaggcacatggctgtaggagctggaaggttccggtaggggtctgtgtgtcaggccctgtgcaggactttggggacttcagtaataagatggacatctcaaggaacatgttagcaggaggacctggctggtgtcatatgtcatgagtacattataattattcccaccatcacat

SEQ ID NO: 440065 - DNA, 623 bp, Homo sapiens
ccacattggatcaaaccgtgcagggcgaggtgtgagcaggggcaaagggagcctaatagttgtaagaggcaatccagcctcaactatcacccatcacgttccccatccagatttagtaaggaaggaaaaggcattaaaacgaggaaacctgaaaacctaagcctcacttgactcttactctctgaatcacagcaaagcaaggttaggggaagagcaaagttctccaaagtcacctgcactctgtttcaacactgaagtccaagccctccactatcctgaccaccggcacagggaaggctacacagggcacagccgaggccagggcagggaacctcagtccccctcatcccctctgcttctctctagtccctaaacaggtttcataaaccaatggcccggagtgggactttcgggttttataagacctttttttttcaattagtggtcatgatttgaaattttgggaggttttacataaaacttcagatttacagcttttcttaaaaaaaaaaaaatcagaagatctggccacactggggcctgtgttctgccatggcaacaatcggttgtagctgagtggcaactgctytcctgagatgggatacaggagctccccagcccca

SEQ ID NO: 440066 - DNA, 550 bp, Homo sapiens
tttcaactccctccatcaagttttataaagaaaatcagatatagtaaaaaaacaaagagtttatcaacaaatagataagagtgagacacttggaaaaaacacacaaaaagaaatcccacatggattaaatagctaaacaagaaaaaatgctaaaaaaataataaatagagcasatttttaaaaataatgttggaatgaagaggtatttaaaagcatcttcaaaaaacagaaagtaaaacaatgaccaagaaaataataccaggttctggtattattgccgggttctattccaagcactttacatgttatctcagctgattcttataacccagtgatggtactattcttactgtagtacacagacgagcttcagaggggacctttggtcacaggcccaaggcaccttccagtctccaaattctgcaccaattcccagcctatgctgctcatggcagaaggtccccactcctgtgcaactcctgaacaacaaactgaagcaaataatctgggagcagacatattctagaaaattctagaagattcccattca

SEQ ID NO: 440067 - DNA, 550 bp, Homo sapiens
tttcaactccctccatcaagttttataaagaaaatcagatatagtaaaaaaacaaagagtttatcaacaaatagataagagtgagacacttggaaaaaacacacaaaaagaaatcccacatggattaaatagctaaacaagaaaaaatgctaaaaaaataataaatagagcacatttttaaaaataatgttggaatgaagaggtatttaaaagcatcttcaaaaaacagaaagtaaaacaatgaccaagaaaataataccaggttctggtattattgccgggttctattccaagcactttacatgttatctcagctgattcttataacccagtgatggtactattcttactgtagtacacagacgagcttcagaggggacctttggtcacaggcccaaggcaccttccagtctccaaattctgcaccaattcccagcctatgctgctcatggcagaaggtycccactcctgtgcaactcctgaacaacaaactgaagcaaataatctgggagcagacatattctagaaaattctagaagattcccattca

SEQ ID NO: 440068 - DNA, 564 bp, Homo sapiens
aatacagcttaccaggagctgcagtggctggggctggtaactggtaggaacrtttaaacagtaactgacttagctgctagaagctgagtatgcactagcttgagagttaaaatctggggtccagtcttaggggagtcatcacattttcatagattttaactccaggagcttgaacaggttctcatggtggagattagacaataatcccattgtccttcagtgagatgaatgtggagttgggggtggaaaataaccatttaaaatacaccaggggaaaagtgatcattctgaaatagcatagagtgtgctgttctccagagcaaaggcctgcccttgaaagaatctaccttaccacagacttatctgacctaagggaaggacaactggacaactccagcctgtcgagccttcctatctcacataaagggagaagaaaaggctatgaaatttttctgaagatcacagcccagggatgcaggcccacttaaaaaataataataattgagattgaatcatgagagtatagactacttcctctccctaatacttaaccacatcaaaaag

SEQ ID NO: 440069 - DNA, 579 bp, Homo sapiens
taacacacttctaaataacacacaggtcaatgcagaaatctcaagagaaattaaaaactattatgaactaagcgaaaatgaaaatacaattatcaacatttatgggaagcagcaagtgcagtgattagaggaaattttatagcactgaatgcaatataaaatcaataatytgagcatctaccttagaaaactagagaaagaagaacaatataaaccaaaggcaagcagaagaaatcataaaaattagagcagaaatcaatgaaatttaaaacaggaaatgagtagagaaaattaatgaaactaatggctcattatttgaaaagatcaataaaattgataagcctctagccaggctaaccaagaccaaaaaaaaaaaaaaagaagaagaagaagaagaagaagaagacacaaattactaacatcagaaatcgaacggggtcatcactactgatctcatggacattaaaaggatgatcaaaggaatgttatatacaactccttgcccacaaatttggtaatttagataaaatggaccaattccttgaaagacacaggctaccaaaactcagataaggagaa

SEQ ID NO: 440070 - DNA, 528 bp, Homo sapiens
taagtcccctggtcccaaacattgtggagcagagacaagtcagctcctccacaccctgtccaaattcctggccaagaattcagaagcataataaaatggttattatttaaagccactatattttggggtagtttttaagacagctataaagaatgaaccagagagtctctttttttgttgttttgtatgaaatggagtttcactcttgttgcccaggctggagtgcaatggcgcagtctccattcactgcaacctctgcctcccaggttcaagtgattctcctgcctcagtctcccgaatagctgggattacaggcacccgccaccaggcccaggtaattttttttttttttttgtatttttagtacagacagggtttcaccatgttggccaggctggtctcgaactcctgacctcagatgatctgctcacctcggcctcccaaagtgccgtctcaatttaaaactgtacrttaaatatgaccttttcatgatccatgacataagtgaccccccagtagctaacatca

SEQ ID NO: 440071 - DNA, 619 bp, Homo sapiens
caacatttaaagccaaaagaattcccatcaaaatgttcatttctggcgtgtgatttgtccagagatgtggcaacgctgagccgtatccccacccagcaaccgtcagtgcagcagctgagcagcagccgccctccacacacgcggcgtgccttctctaactggacatggtccccaccacctgtcctgttggctcatctctatttatgctaaataaacatatttgttgggcctcatgggcatttgagtctgtgaacctggcagcagtgcagggggcccctgaggggtatccctggtgcatgctggagaccggagggagagaaattgttgytaagatgtgagtttccacagagctcctctgggcctggcccaggccagaagaggcaggggaagtgccatctgtcactgatccaatcctgatggggtactgctctgagcagcaccggcactgggatctccagcagagaggcatttaggacaccgagcagtaagggctgtgggagaccccccaggggtatgggagccctgagacagacaaagggattcactgggcccccggaaggttccaggcatttgacttaaacagggtattgatggatggatagggttctgctgcccagca

SEQ ID NO: 440072 - DNA, 619 bp, Homo sapiens
caacatttaaagccaaaagaattcccatcaaaatgttcatttctggcgtgtgatttgtccagagatgtggcaacgctgagccgtatccccacccagcaaccgtcagtgcagcagctgagcagcagccgccctccacacacgcggcgtgccttctctaactggacatggtccccaccacctgtcctgttggctcatctctatttatgctaaataaacatatttgttgggcctcatgggcatttgagtctgtgaacctggcagcagtgcagggggcccctgaggggtatccctggtgcatgctggagaccggagggagagaaattgttgctaagatgtgagtttccacagagctcctctgggcctggcccaggccagaagaggcaggggaagtgccatctgtcactgatccaatcctgatggggtactgctctgagcagcaccggcactgggatctccagyagagaggcatttaggacaccgagcagtaagggctgtgggagaccccccaggggtatgggagccctgagacagacaaagggattcactgggcccccggaaggttccaggcatttgacttaaacagggtattgatggatggatagggttctgctgcccagca

SEQ ID NO: 440073 - DNA, 427 bp, Homo sapiens
agtcactctctccaaggtcaccccaccagccttggaggcaggatggcataggatttgaaaatgtggatttggactcggagtatctgggttggagtcctggctgagtctttcccagctggtccctggacccagcatgcctctaagtcctcccctgcacatggggactggtgacatccccacctcttatggtagttgagaacattaaatgaaatgatgcatgctgtaccctgagccagggctggcacacgggaggtgcccagtggatgctggccacttctagattgctaggattaccttcatttgaagccctttatgytgagttgatgatactagctggcactacatagatggaaagaccctgttccaagcacaactagctcatttaatcctcacaatggctctgtgaggtgggcagtgggatctcccc

SEQ ID NO: 440074 - DNA, 543 bp, Homo sapiens
catgagccaattgagaaagaaatgaagccctatccatttcattaagagatgcattttcaataattttttacttttacatttactatttacctaaatttgtttttgatgaattgtatgctaataacaactcaatctggaaaaaaaaaatgttggagaatgtagagctttatgatcccaggaaattttttttttttttagaaatttcaatttcaatttatgtacatcttgttatggtgatgagtgtgaaacrgtgatcaataaaagactttcaagcataaaaaatatattttacattaggataaaaccctgtgggggcagtggactggaaatatgagctcaaggagaaaaaggaaagatgtaaaatttctgactgttaaagataggcttgttcatatgtttttgaagtgatgatggtggatatcaaatagtggtagtgtttggattcccttggatacattttgaaaattggttcacagttttatttccaaaatgccaccttttttttttttttacacaatatcctggaaattatatcctttgcaa

SEQ ID NO: 440075 - DNA, 333 bp, Homo sapiens
gaatattctattgccctgccactcctcccaaaaaaamtaatgtaataaaataaaagtttgaaggactggccccatgtccgacaagagtggttaaggggactctagccccccagccagactgatttttaaaataaatacttgaggagccgcttttatgtgaaatgccagtgaagcggctgtttctgcctatccttgccaaattaaaatatatatatgtatttctaaataaaagtttgaaaaactggtcctacagtaagacaagaggggttaaaggttaagggatattagcgccccccacccccatatcccccagttaggttgatttagagaagg

SEQ ID NO: 440076 - DNA, 464 bp, Homo sapiens
caagggggaggctctggagagctgtttgtagacctccagcaaccctcataatctctttgagaccagctggacactaagacctgggcccattctggcatcacaggcacatgggccacagtcagactacgtaatggagtgggatgtgggtgcagggtatcttctaaccaggcccccatctctgcaattctccatcacaaatgaaaggccacatctgatttctcttggtctcccattctcatttctctttttttgagacagggtcttgctttgtcatacagggtgtagtgtagtggtgtgatcatggctcactgaagcckcaacttcatggcctcaagttatcctcccacctcagcctcccaagtagctaggtccacatatgtatgccactacactcagctaattttttaatttttttggagagatgaagtctcattatgttcttctcggtattgacttcttttttt

SEQ ID NO: 440077 - DNA, 610 bp, Homo sapiens
atgaggaaactgaggcttaaataaataaagtaacttgctcaagggtatgccattaataagtggtagagacggcagtcaagcaagtcctggattgttggccctcaacctacaacttcagcattaatgccacattgtgtaacagacgattgatacattaaagacacattctgttgaattgatacaggaaagccctatttgaattctgtttaaatgtttattgttttctttttttaagaactaggcgattatctcttagagtccaattgcaggaggacattcatttttgctctaacctttgaaatattttttacattatgtatcttcggaaagcataaatacatttccatcaaaaaagttgggctgtgtacagattaattactcttgacactttatttagcaatctatatccaaaaccaatcactaaaatttacaggagagttttatgtagacagaattgtttagaaaaataagcttaagaatcacagataatttttagatactrgaaagccctttctcatcacggcaaagaaaatgatcattccagaaaatgtaaaatgcatgtggtaataatttcctctttggtttttggtcaagctgtatgaaagaaata

SEQ ID NO: 440078 - DNA, 633 bp, Homo sapiens
ctgtggagtctcaagtcatcatctcagatttgatgtcccacagagtgttataaagagttacattctgccatctgacatgaatgagcaaggtacttggaggattatttgaatatatcctaattcctgtcataagtgaacagaagcatcgatttttagaagtcttactgtaagtgtttacactaaaacatttcagatacccaaagttaagaatgcggaaggctattatatatgataaaatggatgctgggtaaagaattgctctcctaattggtccccaatattctcacctgctaaatgagaaggttgaattagatgatctctaaaggtctttccacattatttgtggaatgacatatctatcatttattgtatgcctactgtataccagcactattttgggactctacttttattgtttctagtagataattatcaaaatagagtgaccatgtattaactacattcctacagagacatgctatttattcattcatttattatctattgatagtttactgtatgctaggcatcaggctggacactgagtaccttgacaggcrttggggcataagttgcccagtgtcacaaagctaaagagtggtaggataggaatcaaaacctcaggtacattaa

SEQ ID NO: 440079 - DNA, 605 bp, Homo sapiens
tttttcatatatcacaaggggtgagaagcctgacataaactttctttaacacagctagagtgagatatttgaggagattatgttttctaaaacatataaagtgtttattaagactttcagaaagtgtaaaagctgctaggtaatgcacgaggcacttccttgaactgtatacttatttcttttcatttaaaagaaattctaattttgtgaactttgttcttctggaccaagctgaaggtggaagaaatgatgggggctgccccatgcagtcattcagggtctcacrgtgaaggtgatatggcatcctcacatgtagtttcacagatcctttatgtgtcaatcagtgtccagctggcgcttaagcagagagtggagaggttgtgagtacccttctagtggtggcacttccacccacatgctattggccaagattcagtcacataactatgcttacatgcaagggagaaggaggagaaaataaaatattttactagaaagccacttctctaattcagctcctcaacacagaatagacattctctggtagaacactagctgtttcttccacactcctcacgtattaagctccatccaccctgactttt

SEQ ID NO: 440080 - DNA, 588 bp, Homo sapiens
ctttatgttgcaaggattatagtagatttttcctaccttatttttcatggttcttttatttccacaaaacaaagatggttaatgccatgagctgatgctttggtcaattttctaaattcatgttatctttcttagttattaattagtttctcccagattttggcattaggcggtgtgacagccttaatttctactggctttgtgaattgtgtttttaaaatatattatcattaatatttctttgaaagattgagaaatacggcataagtaaatgctaacaagacactcctttgaatgagaaatctcatatttacatatattacaataaatgcttactagagtttgtcttrttagttgaacacaatgtatagcagtagggatttttgatttcatgtgttttaaactttactcatcagtaatattattttctattatgtgattaaaatatctgtgacaaataactgtaagcttgctttgtacatgctataaatatctagcttaaaattatttttgaagcaccacttcaactttatatgccaatcttgaagaatattgctgccaaaaattatgacgaagtaactcaaagca

SEQ ID NO: 440081 - DNA, 588 bp, Homo sapiens
ctttatgttgcaaggattatagtagatttttcctaccttatttttcatggttcttttatttccacaaaacaaagatggttaatgccatgagctgatgctttggtcaattttctaaattcatgttatctttcttagttattaattagtttctcccagattttggcattaggcggtgtgacagccttaatttctactggctttgtgaattgtgtttttaaaatatattatcattaatatttctttgaaagattgagaaatacggcataagtaaatgctaacaagacactcctttgaatgagaaatctcatatttacatatattacaataaatgcttactagagtttgtcttgttagttgaacacaatgtatagcagtagggatttttgatttcatgtgttttaaactttactcatmagtaatattattttctattatgtgattaaaatatctgtgacaaataactgtaagcttgctttgtacatgctataaatatctagcttaaaattatttttgaagcaccacttcaactttatatgccaatcttgaagaatattgctgccaaaaattatgacgaagtaactcaaagca

SEQ ID NO: 440082 - DNA, 628 bp, Homo sapiens
tataacccacatgtataatgagagactgaggctcggagaattaaagrtactttcccaatttcatggtgccaagaaaatgcagagcttggacttgaacgcagagtatctgtctctaaagctgtgctatctaatatattagccactagcttcatatagtattaaaattcattaaaattaaaaaatcagttcttcagacacactaaccacatttcaagtgctcagtaggcacctgtggctagtggttaatctgctggacagcataggtatggaacattttcatcatcatggaaagttccattgaacagtgcttctccagagtctgcacctgctggagacctgccagctgtgctaccttttgagaacttcactgtgaaaaggcccggaaattggagagggcaactttatgggaatgaagaactaggagggtaaggaaggggaagaaaagaaaagaaaaggaagagccctacattctagcccacctgggatctacactgggggcttcatttagggactagtctctagaaaaagagaataaatctgcacattagtagccagcaataaccacctgcctccatccaggctataaaggccttagggtccactctccctggagaagcaagatttcacc

SEQ ID NO: 440083 - DNA, 621 bp, Homo sapiens
tggcctgtgtctgcatccatgttgctgcaaaggacatgagttcattctttcttatggctgtttagtattccatggtatatatgtaccacattttctttactcagttcatcattgatggcacctaggttgctattgtgaatagtgctgcaatgaacatgtgagttcatgtgtctttgtgatagaatgatttattttcctttgatggaatgatttatttttgataggaagattttttttggcggggtgggggggggttgtactcactcatgggattgctgggtcaaatggaagttctcttttaagttctttgagacgtctccaaactgctttccacagtggctgaactaattcacattctcgccaacagtgtgtaagtgttcytttttctccatagtcttaccagcatctgttgtttttggactttttaatagccattctgactggaatgtgatgttacctcattgtggttttgagtgattaatcatgttgagcattctttcatataattgttggccacatgtatgttgtcttttgagaagtgtctcttcatgtgcttttcccattttttaatagaactatttgagttttgcttgttgaaacttacagattttggatataaga

SEQ ID NO: 440084 - DNA, 590 bp, Homo sapiens
ctgtttttgttagagatcattgcaggagagctagagtgagcctttggtggtgtcacagcattcagatattttatggtggcagaattattatgttggttctttctcawctgaaaaggattgtattgggtagggctttttggctttgctcctgtagtcctatgcacttctcttggcatgttttttattgggctatatggctcaacctgcaggctggtagatggaattcgcaggtaagagccaggtgcttcacaagttggtgggtgtgaacctggtttttgttcactgtgaggtgctgtctgttgttttgggtgaaggactggacattggggtgcccagtgtcttgagcttcctgttgtacagaggtggcaggacacagctgagcagagctggagcccttccctggcttcccaccaatatcccaatagtgacagaaggcaccagccttgatgagggtggctggggggagttcctggtaaaatgtgctgaagtttcggcagagggtgttgtgcagaggggggatgaagtggttgaactggcccccgcttttagataagcagcaatatggtctgtttccctgtcacattcctgtt

SEQ ID NO: 440085 - DNA, 590 bp, Homo sapiens
ctgtttttgttagagatcattgcaggagagctagagtgagcctttggtggtgtcacagcattcagatattttatggtggcagaattattatgttggttctttctcaactgaaaaggattgtattgggtagggctttttggctttgctcctgtagtcctaygcacttctcttggcatgttttttattgggctatatggctcaacctgcaggctggtagatggaattcgcaggtaagagccaggtgcttcacaagttggtgggtgtgaacctggtttttgttcactgtgaggtgctgtctgttgttttgggtgaaggactggacattggggtgcccagtgtcttgagcttcctgttgtacagaggtggcaggacacagctgagcagagctggagcccttccctggcttcccaccaatatcccaatagtgacagaaggcaccagccttgatgagggtggctggggggagttcctggtaaaatgtgctgaagtttcggcagagggtgttgtgcagaggggggatgaagtggttgaactggcccccgcttttagataagcagcaatatggtctgtttccctgtcacattcctgtt

SEQ ID NO: 440086 - DNA, 562 bp, Homo sapiens
cacaagttggtgggtgtgaacctggtttttgttcactgtgaggtgctgtctgttgttttgggtgaaggactggacattggggtgcccagtgtcttgagcttcctgttgtacagaggtggcaggacacagctgagcagagctggagcccttccctggcttcccaccaatatcccaatagtgacagaaggcaccagccttgatgagggtggctggggggagttcctggtaaaatgtgctgaagtttcggcagagggtgttgtgcagaggggggrtgaagtggttgaactggcccccgcttttagataagcagcaatatggtctgtttccctgtcacattcctgttccagggcttgtgactcctagttcagacacacactgtcatctgtctctggactgcagtgtagctgggaggtatgggcaatgcttgttttgtgaatctccatgggagtggttttagggcataaccttgtcactcaacctgacacagatagcttttagactcgcctgttctccaatgtagcaatgctactgcttctcttaaaggaggggtggaggggtgctc

SEQ ID NO: 440087 - DNA, 562 bp, Homo sapiens
cacaagttggtgggtgtgaacctggtttttgttcactgtgaggtgctgtctgttgttttgggtgaaggactggacattggggtgcccagtgtcttgagcttcctgttgtacagaggtggcaggacacagctgagcagagctggagcccttccctggcttcccaccaatatcccaatagtgacagaaggcaccagccttgatgagggtggctggggggagttcctggtaaaatgtgctgaagtttcggcagagggtgttgtgcagaggggggatgaagtggttgaactggcccccgcttttagatargcagcaatatggtctgtttccctgtcacattcctgttccagggcttgtgactcctagttcagacacacactgtcatctgtctctggactgcagtgtagctgggaggtatgggcaatgcttgttttgtgaatctccatgggagtggttttagggcataaccttgtcactcaacctgacacagatagcttttagactcgcctgttctccaatgtagcaatgctactgcttctcttaaaggaggggtggaggggtgctc

SEQ ID NO: 440088 - DNA, 562 bp, Homo sapiens
cacaagttggtgggtgtgaacctggtttttgttcactgtgaggtgctgtctgttgttttgggtgaaggactggacattggggtgcccagtgtcttgagcttcctgttgtacagaggtggcaggacacagctgagcagagctggagcccttccctggcttcccaccaatatcccaatagtgacagaaggcaccagccttgatgagggtggctggggggagttcctggtaaaatgtgctgaagtttcggcagagggtgttgtgcagaggggggatgaagtggttgaactggcccccgcttttagataagcagcaatatggtctgtttccctgtcacattcctgttccagggcttgtgactcctagttcagacacacactgtcatctgtctctggactgcagtgtagctgggaggtatgggcaatgcttgttttgtgaatctccatgggagtggttttagggcataaccttgtcactcaacctgacacagatagcttttagrctcgcctgttctccaatgtagcaatgctactgcttctcttaaaggaggggtggaggggtgctc

SEQ ID NO: 440089 - DNA, 604 bp, Homo sapiens
ttcttaacaactacactggatggctctgcttgtccagcatgatgtcaattttctgtgttcttgatctatgtaaacactcacttgrgtgtccaattgggcatagttttcacatgattactcaagccatagtgttgataagcatccattgagcttctagaacctgctcattttgattggtaaataccgacgatggtgacaagcatgtagtaactgattggaagaattttcatcttttttacatcaaacttagaatttgtactctgtccagcggtaaatatttgttacttattttgtattgcataaaataatttaagtatgtacttataagtacatacacttttgagtttgtcttagggacaagagtttgacttcaaatgcttattccccttgaaacctgttttaatcacaaagttgggtgttgctttcttaagagcaaagtcattaagtttaggaaggatgatttgagaataataaaagtggtaattatacaaacaaataaatgcaacaattaatatttcattaattattattagtgtatgccaagctagtactgctaatataaaacacaaagggctaacttttagaaaattggtagagtgtcatg

SEQ ID NO: 440090 - DNA, 604 bp, Homo sapiens
ttcttaacaactacactggatggctctgcttgtccagcatgatgtcaattttctgtgttcttgatctatgtaaacactcacttgagtgtccaattgggcatagttttcacatgattactcaagccatagtgttgataagcatccattgagcttctagaacctgctcattttgattggtaaataccgacgatggtgacaagcrtgtagtaactgattggaagaattttcatcttttttacatcaaacttagaatttgtactctgtccagcggtaaatatttgttacttattttgtattgcataaaataatttaagtatgtacttataagtacatacacttttgagtttgtcttagggacaagagtttgacttcaaatgcttattccccttgaaacctgttttaatcacaaagttgggtgttgctttcttaagagcaaagtcattaagtttaggaaggatgatttgagaataataaaagtggtaattatacaaacaaataaatgcaacaattaatatttcattaattattattagtgtatgccaagctagtactgctaatataaaacacaaagggctaacttttagaaaattggtagagtgtcatg

SEQ ID NO: 440091 - DNA, 668 bp, Homo sapiens
tattatgtgacttttataatttcttccataaatatagaattttttttcaatttctatttttttcctgaagcaattaatgtatggtctmattttcttaatgtaaaattagtttctgttctctgaagaatattcagtaatatatatatagaagtaaatgaatatcatctaataggctcaccacctaaagttaatttctgttgataccatatttccttctaggccctttcttattcatttatttgtaactatacatatatttatataaaaacagtatcattttctatatatatagatatagctatatacatagtattttgtcatgttttcaattaacactatatcatgtttgttttcttacatttgtgaattttcttttagaatatgaattttatgaatgtacagtatctaatatttaaaataagtttccaatattttactgtaataatgctttcataagcttccttgacatttgcctgtatatctgtatccttagcatcaattcttcaaaataaagtcattttatgttgaataccaaagtgtctatgcaaatttaacttttaccaaagtgtttgaaagggtgtattccactgagacatttgaaactttatatatatatatattttaatctatagcattttgaaaagcaaaccatgcttcattgtttgttt

SEQ ID NO: 440092 - DNA, 584 bp, Homo sapiens
agagggaaggctttgaaaactgcaccagtggtcacacaacaaaaagtcatcagcagtggtactgaatcacgtgtaatagccacacccaagtgtgccctcagcatcattcctcaaagaggktgagatgaatgaaagtcatacaatgttttgtttcttcctgagaacatataactcctaaggaatctgatggggattgtaccttcagaacattagtgcttagagatgtctttaaaatcttgagaaacataaataccttgtaggttggttggtttggtgtgtgtttgttaagtatctgaagaggcttaaaacaggaatataaataatatttacataaatataaataatggtaaaatttaaataaagaattaggcaggctatagaaggatagatacaggtacacttggaaagacaacagtgtggttttatgtagactggtatctttttgtccctgtagtgcccatatagtttagggccctgcacagtaaaatctatttgacagtgacaaagagtgattgaaatgagcatggcatgtgaattatgacatttgacttgagagtccagacatttaaacactgccactcaca

SEQ ID NO: 440093 - DNA, 668 bp, Homo sapiens
tattatgtgacttttataatttcttccataaatatagaattttttttcaatttctatttttttcctgaagcaattaatgtatggtctaattttcttaatgtaaaattagtttctgttctctgaagaatattcagtaatatatatatagaagtaaatgaatatcatctaataggctcaccacctaaagttaatttctgttgataccatatttccttctaggccctttcttattcatttatttgtaactatacatatatttatataaaaacagtatcattttctatatatatagatatagctatatayatagtattttgtcatgttttcaattaacactatatcatgtttgttttcttacatttgtgaattttcttttagaatatgaattttatgaatgtacagtatctaatatttaaaataagtttccaatattttactgtaataatgctttcataagcttccttgacatttgcctgtatatctgtatccttagcatcaattcttcaaaataaagtcattttatgttgaataccaaagtgtctatgcaaatttaacttttaccaaagtgtttgaaagggtgtattccactgagacatttgaaactttatatatatatatattttaatctatagcattttgaaaagcaaaccatgcttcattgtttgttt

SEQ ID NO: 440094 - DNA, 592 bp, Homo sapiens
tttttctccttctgtgaagaatgtcattggtattttttatagggattgcattgaatctgtacattgctttgggtagtatgaacattgtcttcctcaacttctctcataaaagtattatagtttcagtgtagagatatttcaccttcttggttacatttattcctaaggttttttaatgccattgtaaatgaaattgtttccttgatttatttttcatattgcttgcttttagtgtatagacatgttactaatttttgtatatttattttatatccttcaacttcactaaatttgtttattagttctaacagttttttttgatggagtgtctaggattttctctatataagattatgtcarcggtaaacagggacatcttcctttccatttgatgtcttttatttctttctgttgtctaattgctctggctagaacttctagtactatgttgaatagaattggttccagtgggcacatttgtcttgttctggatcttaaaggaaaagctttcaactttccttgttgagtatgtcagctgtgggtttttcatatatgacctttatcgtgttgaggtgcgttccttctgtaccaa

SEQ ID NO: 440095 - DNA, 489 bp, Homo sapiens
atgtgtctcatgccttttgctggcttctgtctggaagtatttccatccactgatgttatttgagaaataggccacacatatacaatgctcattttttcctactgaataacttcagggaattcaggaaacagaaatcaaggataaaatagagtattagaatctattttaaaacagcctcatgaattcaaggagcagaactgaatgtactacatttaaggtggcaccatkaagtagcagaaaatgtggggctttggaattagatgtacatgggtgaaaattccagctttgggacatctgtgtttgcagggtggtatattggatgtggttaatagatatgctatgaaaatttcactgaaaatccaaaagaatatgaaaatataataaaattaacaatggtactgacaaagaaaagaatgtagttcaaagtctggcccaaattttcactaactgcatcattgagggggaagaattaagaagcactttcctaga

SEQ ID NO: 440096 - DNA, 579 bp, Homo sapiens
atgccattccactcatcttgagtccagacagtaagacaccctttgccccatgtcccatagatggagaaatcaccccatgatcaactctctccccttctgcctgaacctctttcctggctccacaaattacatagcagtatagtcctacattgtggcatgctgctgcctttcaattgggggcaactcttggtggcctattccctgcaggcccagttggctcacttttatcttggtagtgaccactggatgtgcagaggatacaggaacctctatgggctgatctcaatcctcactctcttcctcactagagctctctatggagtcccaggacaatttagtcatgatagccctgactcattgatgtggaagccagtgacccttcaaacaggctacctgataagccaaggtctgcaytttttcaccctgtgctcacaggcgggacagcaaggtctccgacatttcggcctgaactaacctggcacctctttctaatcatagctcatcctgtaactaataagcccccacctgtgctgcaagctcagcttccttggctgttcacagtgtagtcaggagcaacca

SEQ ID NO: 440097 - DNA, 551 bp, Homo sapiens
tcatcctgtaactaataagcccccacctgtgctgcaagctcagcttccttggctgttcacagtgtagtcaggagcaaccagccaaccacagctgccacagtctaggcactttcacatagttggatccacctactgcaacagctcttccagaccgttcaatgttttggggtatccctgtacgcacgtgttgggcctcatccaccaaacacaggggctattgggccccacataaatgtgtatggccagcctggaatttcccccatggatttccccttccccaatcccatctycttggcactcatgggatttttctccaacattccagctagctcatcaattgtctggtggacccgtgtttacctcaataggaagggaaccaggttcaagaggctgaagagacgcaaagccagtgaacaaaacatagggtttatttggggagaacttacaggatagtccagtggcagcaggctaaatgggagaatcacaaccacttgtaaacaccatgccatttatataccactttcacttgttgccatcctcccagcaacctc

SEQ ID NO: 440098 - DNA, 551 bp, Homo sapiens
tcatcctgtaactaataagcccccacctgtgctgcaagctcagcttccttggctgttcacagtgtagtcaggagcaaccagccaaccacagctgccacagtctaggcactttcacatagttggatccacctactgcaacagctcttccagaccgttcaatgttttggggtatccctgtacgcacgtgttgggcctcatccaccaaacacaggggctattgggccccacataaatgtgtatggccagcctggaatttcccccatggatttccccttccccaatcccatctccttggcactcatgggatttttctccaacattccagctagctcatcaattgtctggtggacccgtgtttacctcaataggaagggaaccaggttcaagaggctgaagagacgcaaagccagtgaacaaaacatagggtttatttggggagaacttacaggatagtccagtggcagcaggctaaatgggagaatcacaaccacttgtaaacaccatgccrtttatataccactttcacttgttgccatcctcccagcaacctc

SEQ ID NO: 440099 - DNA, 602 bp, Homo sapiens
agggtcactcttctttttcactgtaaagattaaggtgcatgcatacaaacacagcttatctatacagtgtctttatttcagaaggcaaattttcatttttctgactctgaaggaaatcagaggatttgggcactcaagagtgatacatacttcaartcagcatcatgtacaggatcatgtacaggtgtgtgcaccactgggggtgctgatatcaatacccttgtaactcttaggcaaacaatggcctattttatgctttgtataaatctctcgtctagcagactagaaaccccataagaaagtcccattttacatccaaggaagaggcagttcatataatttaaatcatttgttcaaacctacataatgaaggagctcagacttaaattcagatctattgactgaaggatggtgtatgatattaaaaaatctttgaaatcatcaaggtgaattccagaatattaaaatcatgggaactctgtaagctttaagggtatgaactaaatacccttaatgggaagaacaacttcacatcagatatgtggaactcatttcctcaagattttgtgccatgtgagaagataaatctgatcaagaaagat

SEQ ID NO: 440100 - DNA, 593 bp, Homo sapiens
cacagatggatcaacctgctctagtaaatgtctttattaacagatgctaaagacaaaataccaagagagaatggaaaaatatgggagcaaatctcctagggcaatggacaaagagtgcattttctctcttaaatatattacctctatggtctcttcttcagtgcctctttctgcagccttctgcttgatcctcatattgtcttgggaggatttagttgcaaaattcatatgtaagtatttttctttgggttaagctagtacagagacatttmttaatgtccacagtgtaaggtacagcaagtgtcaaaaaatgtaatactttgccagccaaatattgttgaccatttatactgatcctatgaccccctccaaagggggcataaatgcataaatgcagagaaaagtgggttctggtagtacttgggccatagttagagaacaagctcatgactgagaactgagagacagatactaacatgcattgaatgcctaagcactattctaaggtgttttattcatataatttttcaataacaatactgtgaactaggcattttatcttcatattacatatgaggaaattgataacccag

SEQ ID NO: 440101 - DNA, 593 bp, Homo sapiens
cacagatggatcaacctgctctagtaaatgtctttattaacagatgctaaagacaaaataccaagagagaatggaaaaatatgggagcaaatctcctagggcaatggacaaagagtgcattttctctcttaaatatattacctctatggtctcttcttcagtgcctctttctgcagccttctgcttgatcctcatattgtcttgggaggatttagttgcaaaattcatatgtaagtatttttctttgggttaagctagtacagagacatttattaatgtccacagtgtaaggtacagcaagtgtcaaaaaatgtaatactttgccagccaaatattgttgaccatttatactgatcctatgaccccctccaaagggggcataaatgcataaatgcagagaaaagtgggttctggtagtacttgggccatagttagagaacaagctcatgactgagaactgagagacagatactaacrtgcattgaatgcctaagcactattctaaggtgttttattcatataatttttcaataacaatactgtgaactaggcattttatcttcatattacatatgaggaaattgataacccag

SEQ ID NO: 440102 - DNA, 575 bp, Homo sapiens
cctcttctgaaagcccactttcactcttggccctgtgatcccaccaatttttaaaggcatggtactatccttacctactgcaattcatggaaccattttaaagtcccctttctgttggttgcctctccaaatagtcacccttctcttaattgacttcctctcgtctgctccaaacttcattccttcccaagccttgcagtacgagattcaaaactccaatttttattaaccaatcccactgcctatggaacttcatgatcccttatttctggccaggcagttctggtcatggtccttctaaggcatgatgacattccagaaactattctgcgtatcattgaattcagtcctcaccatgagtgctggctggttgagcattgaacccaggcaggtaatggrctttattgtgggaatttggcaggtaatgtaaccactccatgtgtttgtctccttatttgtaaaatgaggataattctggcatctacctcattgggttattgtgaggatttaatacaggcatgtattaacagtttctagcccatagggtgtgttcggtagatgttggctgttggtat

SEQ ID NO: 440103 - DNA, 392 bp, Homo sapiens
agtgactcctgcttaagcatcaggtatattaggcacaattatttctgagtagctcaataacaataatttttttctaccaaatcccttaaaaggtacacattgattcaaaataaaattagttccaagtttaattgtctgcctctcacccccaggaagtagattcccaccgaaatgcctgaaaagatataaaaataaagaatgctttttatctacactagaaaatagaggcyaggcttggtcattcacacctgtaatcccagcactttgggaggctgaggcgggctgatcacctgaggtcaggagttcaagaccagcctggccaacatggcaaaaccccatctcaactaaacatacaaaaattagctgggcatggtggcacacacccatagtcc

SEQ ID NO: 440104 - DNA, 533 bp, Homo sapiens
ctttctcccatgccggatgttttctgccttcaaatattggactccaagttctttgacttttggactcttggacttacactagtgatttgccaggggctcttgggcctccagccacagactgaaggctgcactgtcagcttccctacttttgaggttttgggacttggactgatccactagtggcttccttgcttctcaacttgcagacagcctactatgggactttaccttgtgatcatgtgagtcaattctccttaataaactccctttcagatatacrtatatccatataccctagagaaccccgactaatacagagtggttaatggaagagtagaaagagcataatttacgtgtagcttatctacttagtggctgttgagaacgtgttcagatggagtacacctgcagcttgtttcctcactgtcacagtaaagggtcatgtgaagaattgtttcacattcctgtgttagctgtgcattgatatggcctttaaacagtgactctccattctggccaagagttcagggtac

SEQ ID NO: 440105 - DNA, 533 bp, Homo sapiens
ctttctcccatgccggatgttttctgccttcaaatattggactccaagttctttgacttttggactcttggacttacactagtgatttgccaggggctcttgggcctccagccacagactgaaggctgcactgtcagcttccctacttttgaggttttgggacttggactgatccactagtggcttccttgcttctcaacttgcagacagcctactatgggactttaccttgtgatcatgtgagtcaattctccttaataaactccctttcagatatacgtatatccatataccctagagaaccccgactaatacagagtggttaatggaagagtagaaagagcataatttacgtgtagcttatctacttagtggctgttgagaacgtgttcagatggagtacacctgcagcttgtttcctcactgtcacagtaaagggtcatgtgaagaawtgtttcacattcctgtgttagctgtgcattgatatggcctttaaacagtgactctccattctggccaagagttcagggtac

SEQ ID NO: 440106 - DNA, 521 bp, Homo sapiens
ataaaaataaaactttaagtgtagccatcaaagggcacatagaaaaccatcaaaccattaaaggaaagaaaaatacaacaaaatttgattagtcaattctaaaaaaggtatttaaaaaggggaaaacctccaagcaaacacagtaaaaagaaaataagatgctaagaataccaatgtatctycaatcacaataaatgtgaatggattaaattttcacattgagtcattcaggacataagcacgggcaaagatttcatgatgaagacaacaaaagcaaaaattgacaaattggatctaattaaactaaagagcttctgcacagcaaaataaactatcaacagagtaagcagacaacctacagaatgggaaaacatttttgcaagctatgcatctgaaaaagttctaatttccagcatctataaggaacttaaacaaatttacaagaaaaaaaacaaccccattaaaaaatgggcaaaggacatgaacagacacttctcaaaagaagacacacatgtggccaa

SEQ ID NO: 440107 - DNA, 521 bp, Homo sapiens
ataaaaataaaactttaagtgtagccatcaaagggcacatagaaaaccatcaaaccattaaaggaaagaaaaatacaacaaaatttgattagtcaattctaaaaaaggtatttaaaaaggggaaaacctccaagcaaacacagtaaaaagaaaataagatgctaagaataccaatgtatcttcaatcacaataaatgtgaatggattaaattttcacattgagtcattcaggacataagcacgggcaaagatttcatgatgaagacaacaaaagcaaaaattgacaaatyggatctaattaaactaaagagcttctgcacagcaaaataaactatcaacagagtaagcagacaacctacagaatgggaaaacatttttgcaagctatgcatctgaaaaagttctaatttccagcatctataaggaacttaaacaaatttacaagaaaaaaaacaaccccattaaaaaatgggcaaaggacatgaacagacacttctcaaaagaagacacacatgtggccaa

SEQ ID NO: 440108 - DNA, 587 bp, Homo sapiens
aactgggatggcaccacgaggtggaatcaaacagtggtggaatcagtgataggtatctgggtcctacttgggcagacatggaaaactaggtgggagtggagctcctagtgttgctggagcaacacatgtgcatagatcctgggggctgggccatatgaggcattaacccaggttataaaccacggtatatgaagaaacctagaaatcagagcatatgaaatagcaacaagcattaggtccaaggtgggtgagatgagtccataaataacaaagagattcttgagatctgtatcagtcagggtcccagcaagaaacataaatcaccctaaaattaagataaaattaagataatctgaggagagtaccagrgttggtctgtatgattgaaaaaatgtggcagaagtgatggcctgttacttctgagattaggctataaaagactgcagcttctattttgggatctctctttctctgatgatcattcttaataaactcctttattaggtgcatgaattaatgaaagataaaagataaacaggatgccgatcccctggtcctctcatcctactttccctgtctcagagtag

SEQ ID NO: 440109 - DNA, 602 bp, Homo sapiens
aaaggtgaggtttttgctcatgctaaatgtcccacacagactggcaggaggcctatgatcatcaagttatgcagaaactgaggttgatggagtctccttccccatacatacctcagtgatcaccaaaccagggcaaagagaacatggtgaacaaaatgctggctcttccagattctacctagaggtgattcagtggcttacatacatatttccttggttaacacaaatcacaagactaggcttaatttcaaatggggtggaagtataattctgtcctcagaagagacctgacatatttattttacaacttttaagattttcataatctcctatagtggtacaatgtgaggcacatgacttagcctctttctgcctcagttttcctttctttaacatgaagataacaatagtatttacctgttatggggattaaatttgatgatatatgtaaagtgctttggcatagtgcctaactcattgtgaatgctgtgtaagtattagctggtgctacttgtaaatacatagagttatttgyttggagtcatcttttcattcacattcctactatgaatcaaaacccccaaagataccacagctggcat

SEQ ID NO: 440110 - DNA, 548 bp, Homo sapiens
tctaatagagaataaatgtggtctggcatcaacaagggaatggataaaatgcagtgtaatcagaaaaatgcagtttccagcctcatcctgtgatcaaagcaaaagtctgttcttttgaatagttagttgctcagatatttgctttagcacgcccaccaggggcctcagtgatttttttttttttctttccaggaaggatggtaactagcactttgtgctgctgggagagtgtatatttacatggtgtccccagctttgtctctctaaatgcacacagcctccttctattctacctggagctgtgccaactgtaagaggcccaagccaattattgacctagaggggttagtgcccactgtgctctgccctcaactagattcccaccaggttcagctggtggctttttwaaaaaaagtatttatctctaattccttggggatgccatatttcctctttatttttctttcagtgatcttttgtaacctttctcctcccaccatttctcttgatctcaactggtcttgcttggatttcatattttgcttgag

SEQ ID NO: 440111 - DNA, 597 bp, Homo sapiens
ttagtgcagcgtattttgggaagcaatgttttaggatatttcacttgtcatattccagattctcctgaaagttccatattcttgatattttcaaatcaaatcttcttgctttgggctcaaaccataggccttctgatggctaaaaagaacatcaacttacaaaagggcagaaagcatagcctacacagtaggcttgtttgaaaattattacaatacacaatgctatatgttgctgatttgataaatgaggtgttcaaagttacttttttgagtcttcgtcttattcgcatccctatctgcatatcaaaactagaaaatacsgcaattggcaatgcttcaggacgacatcttgataggattacttgttaatcttcttttatcttttattcacataggaatcaaattttcaagtagtggttccttgtgttgttctgttgccttacagctcagctttatcctaaaatgtcaattttatagcctccctatgtaaagagggacatcattctgtgggtatgtttttgaacctctctcaatcaaattgtgagaggaagcactacctcttgtagaagcaaagaaaggcaggttaactggagaaaa

SEQ ID NO: 440112 - DNA, 590 bp, Homo sapiens
gggcaacccacagccctcggggctgctctgcctatggagtagccattcttttattcctttactttcctaataaacttgctttcactttatggacttgtcctgaattctttcttgtacaagatccaagaaccctctcttggggtgtggatcgggacctctttccggtaacagtgaaattaataatcactgggacagttctattattcttaatatggatgaaactaacattcttctttagtgttatttcccatctattgatgttctgaagacagcagggaatgattcacttaacattgtgtaacacatagaaattaattcttaaatgcaaataatcttcatagtttctttrtgtgtgttggtattatatcatttataaaacaatttccattaggttgaaaatattttgtccttagaattaatagataggaatacctaccttcattcatatgctattttcttgtgctctattctcaggagtggcatgtgtaggttaaagggcattacaaattgtccagctcttgcaattttacagctaaagtccatagtaaatggcttctaagtttctagaagtgagttcattaaacttgtga

SEQ ID NO: 440113 - DNA, 591 bp, Homo sapiens
atcagctgttatatttctcaccttaattacataagcagtaatattaaaataaatatttcccatcctaagataaaatccctgccttgactcacatttttcctttcaycctatttctctgctcccctctaaagcaaaatatctcatttatgtctttatgtcctcacttcctttcatctccacagcccatccaattagactttcatctcctgtgcttccctactccctaatactgacttttcaaggtcaccaagaatctccatgttgccagattcattgatgacttccttctcatcttgccgagctctttagaaaattttgcccagtttactatcctcttatctttgcaatattttcttctctcaggttcataagcgctgtacttattggctcttcctgcctactcacctttgctggctccttaccccgctttttggtctttaagcgttactatgccttggggttcagctcttggctctcatatttctcaaatcactctgacttcatggctgttctcatctagttccaagactttttttttttttgagacagagggagtctcactctgtcatccaggctggagtgcaatggcac

SEQ ID NO: 440114 - DNA, 608 bp, Homo sapiens
tgtctatatttcaagcttcactgaagtgatagattttgggctttgccacattgtcctctgattgcttccctctgctcctccttttcctagtgaatctttgttttactggtrgaaaaatctacatctttgtatcttggcattttactttcacattatctcatagattttatttcaagttgctataaagttatcaacttttatttttaactaatattatttttaacaattagaaaattgttgaccaggtaattccagcactttgggaagctgaagcgggaggatcacgtgagcccaggagctcgagaccagcctgggcaatgcaaggagactgtctctacaaaatataaaaatacattagccaggtttggcggtgcatgcctggggtccagctattcaggaagctgaggtgggaggatcacttgagctggagaggttgaggctgcagtgagcagtgatcgcaccactgcactccagtctgggtgacagagggagaccctatctcgaaaaaaaggaaaagaagaggattttgctggcaagatggctgaataggaatagctccgttctgcagctcccagtgagatcaatgcagaaggcaggtgatttctgca

SEQ ID NO: 440115 - DNA, 583 bp, Homo sapiens
gggttatgttacatgtcaagatgaaatcaatgggctgagaggaatttggtcttaagggctttggaatggtgtaacaatcaagtttttctttcccctgccttactgaactattatatttgcagagcaaattctccacataaaattctatgtattcttccaacctagctcctttttttccaagtcctcttagcttaatcattatatttatttttttattacaacatgaatatatgctcactttagaatgctggaaaatagaaaayaagaaagatgaaaaattgtttctaatctcaccactgtaacattttagactgtttcctaccagcttatttaggcttaaaaaataaaactgagtttattttgtatttgtaattctttctgcttttcctgctattgtagcagacattcatcatgttgttatagctatcctttaccataattttcaataattgcttaaccattctcctcttgctaggtattttatttggtgtcaattgttcatgtttataaaagattccataatttatagaactgtattcatgacactaaaatttctatattgcctgttaaaattatatgtatg

SEQ ID NO: 440116 - DNA, 583 bp, Homo sapiens
gggttatgttacatgtcaagatgaaatcaatgggctgagaggaatttggtcttaagggctttggaatggtgtaacaatcaagtttttctttcccctgccttactgaactattatatttgcagagcaaattctccacataaaattctatgtattcttccaacctagctcctttttttccaagtcctcttagcttaatcattatatttatttttttattacaacatgaatatatgctcactttagaatgctggaaaatagaaaataagaaagatgaaaaattgtttctaatctcaccactgtaacattttagactgtttcctaccagcttatttaggcttaaaaaataaaactgagtttattttgtatttgtaattctttctgcttttcctgctattgtagcagacattcatcatgttgttatagctatcctttaccataattttcaataattgcttaaccattctcctcttgctaggtattttatttggtgtcaattkttcatgtttataaaagattccataatttatagaactgtattcatgacactaaaatttctatattgcctgttaaaattatatgtatg

SEQ ID NO: 440117 - DNA, 562 bp, Homo sapiens
tttctttttcttgactggatcatgactgattaaataacatagttactgggctcctgttagatacaatacactatgttaggtactggagacacagcagtaaagaagacagacaaggttcctgtcctcaacacccctacagtttccatgtaataaacaagtaaagtgttagatatggcagagaaacatttttgggatgagagtcatgggtaggaacagaaatgttctgtgtaagaaagtgacacttcaaccaaaactaaagatcagtagaaactgttcagatgaagaaatacagagaagcatctcatcaaagagaacagtttgcccaaggactggggttgggtcagacttgagagtggcaggtgggaagacctgtagcaygcaaagcacactgctgagggctggaaaaaggggagagacaggagcaggaggtggacctctgaaggcactgacaactgtgctcgggattctggattttccccagcatttgtaaggactgttgcatcgttgaagggttgttagcaaaggaggaatatgatcacatgcttatgttctcatagtttag

SEQ ID NO: 440118 - DNA, 579 bp, Homo sapiens
attccattaagcttcagtgggagcaaaagtgtagtcacttaagtaacagcagttacttaaactgaaaatgagatcagtcaaaattacttttgaagagagcaaaaatattgtcaggtttcttgctgtggttctggatgttcagtagcaggctcatttgaaggcagaatcagccctgcagggaactcacttctaccttcagaatgtggggtttatggggaaaaatccaggttttgggggaaggtaaggaggaaacgcctcgctggatagacatttctcattgcaaatggagcatgtggtggatctgggaaatcccttggtggaaaataatcttgagaagctccaaacatggttcctggaggaggtggggggaaaggaggtcctcttctcatgaacaggcyccttgtatcccccggaaacaatggacctctgattggagcaagaggtggaggagaaaagtaagggccagttgcttcattttcagcagggagagatgaatcaggcacatttaaattaccaaggtcatctttggtatcatttctgctggattccatttctgaaagcattgacccatccacttta

SEQ ID NO: 440119 - DNA, 636 bp, Homo sapiens
atataatagttgtgcctattatagcatacatgtgatattttgatatgagcatactacatgaaatgatcagtttgkagtgactgggataccctcacattggacatttgtcatttctttgtgttgagagcattccagattgtctaagtattttgaaatatacaatatgttattattagctagagtctccttattttgctaccaaatactggatcttattccttttatccagttgtatttttgtacccattaatgaacccttttttatctattccttccaactacctttcccagccttcattcagatttcaagatctaattttcttctttagagtagaaaacatatgttatgtaaatatgtaatagaaatgacagcacttgattatttaaaggctttgttgtcactaatctctctgattatgccagatttatattactgcttttgttttaatatcttgatatacaggaccactgtcaggacatattccttggcatttccctctgtaatggccctcattcacagaccattaaacaaatgtgtgtgttgtgctaatttccaactatgtcttctttatatatgcatttcagatattaggaaatactataacagtagacttaagattcctctgtattctttgt

SEQ ID NO: 440120 - DNA, 636 bp, Homo sapiens
atataatagttgtgcctattatagcatacatgtgatattttgatatgagcatactacatgaaatgatcagtttgtagtgactgggataccctcacattggacatttgtcatttctttgtgttgagagcattccagattgtctaagtattttgaaatatacaatatgttattattagctagagtctccttattttgctaccaaatactggatcttattccttttatccagytgtatttttgtacccattaatgaacccttttttatctattccttccaactacctttcccagccttcattcagatttcaagatctaattttcttctttagagtagaaaacatatgttatgtaaatatgtaatagaaatgacagcacttgattatttaaaggctttgttgtcactaatctctctgattatgccagatttatattactgcttttgttttaatatcttgatatacaggaccactgtcaggacatattccttggcatttccctctgtaatggccctcattcacagaccattaaacaaatgtgtgtgttgtgctaatttccaactatgtcttctttatatatgcatttcagatattaggaaatactataacagtagacttaagattcctctgtattctttgt

SEQ ID NO: 440121 - DNA, 633 bp, Homo sapiens
atctgaagacaactattgcaacctcatagggttgttgtgaggattatatgagctaaatatatgaaagcttcttagagtaatgcctgacatagagtaaacactcaagttatggcttgattatgttgactttgcatgcagagaaccacgttacattgtaatctcccttatcttctcatcctcatagctaatgatcttctstttcatacacaacttcatattttcaagaaaattacattttcttcatgcatgtctcttcagacatggaagaagctaaaaaacctcttttctcaaaagtagttaaggtaaatgagatcaatggatccaactgactgccagaaatggagtagtggagcccttatatcatcaattcaagatattggacacccatccattgattttctccctgtctctattagaagtcaatagctcctcatcacacattcgacaggtgaggattcctagaagtgctgtaagtggactgaggtagtttggtgtgcctgtgtccagagcattaggtgagaattagaattgacctctgtttataccatcctctatcccacacaccttatagggactcgaaaaacatccactgatccatgaacctttcctcactgagtgccttggtaattagga

SEQ ID NO: 440122 - DNA, 603 bp, Homo sapiens
tgaaatatacaatatgttattattagctagagtctccttattttgctaccaaatactggatcttattccttttatccagttgtatttttgtacccattaatgaacccttttttatctattccttccaactacctttcccagccttcattcagatttcaagatctaattttcttctttagagtagaaaacatatgttatgtaaatatgtaatagaaatgacagcmcttgattatttaaaggctttgttgtcactaatctctctgattatgccagatttatattactgcttttgttttaatatcttgatatacaggaccactgtcaggacatattccttggcatttccctctgtaatggccctcattcacagaccattaaacaaatgtgtgtgttgtgctaatttccaactatgtcttctttatatatgcatttcagatattaggaaatactataacagtagacttaagattcctctgtattctttgtgagatagagtaaaggaaatgattcattcatcacttgactccaaagccaccactttgatttgtaaaccacaggggatttttgtattagtgtttgctcatagccagcttccagttttca

SEQ ID NO: 440123 - DNA, 433 bp, Homo sapiens
attactttgggcagtatagccatttccacaatattgactcttcctattcatgagcatggaatttttttttagaaggttttttaaattattatactttaagttctggggtacatgtgcagaatgtgcagttttgttacatagktatacacatgccatcgtggtttgctgcacccatcaactcatcatctacattaggtaattctcctaatgttatccctcccctagccccccaccccctgacagtccccagtgtgatgttcccttccctttgtccatgcgttctcattgttcaactcccacttatgagtgagaacatgtggtatttggttttcttgtgttagtttgccgagaatgatggtttccacctttatacatgttcctgcaaaggtcatgaactcatccttttttatggagagtatggaatggttttcca

SEQ ID NO: 440124 - DNA, 433 bp, Homo sapiens
attactttgggcagtatagccatttccacaatattgactcttcctattcatgagcatggaatttttttttagaaggttttttaaattattatactttaagttctggggtacatgtgcagaatgtgcagttttgttacataggtatacacatgccatcgtggtttgctgcacccatcaactcatcatctacattaggtaattctcctaatgttatccctcccytagccccccaccccctgacagtccccagtgtgatgttcccttccctttgtccatgcgttctcattgttcaactcccacttatgagtgagaacatgtggtatttggttttcttgtgttagtttgccgagaatgatggtttccacctttatacatgttcctgcaaaggtcatgaactcatccttttttatggagagtatggaatggttttcca

SEQ ID NO: 440125 - DNA, 617 bp, Homo sapiens
aaaagacatggggtagctggcaagatggctgaataggaacagctgtggtctgcagctctcagcaagatcaacacagaaagtgggtgatttctgcatttccaactgaggtacctgactcatctcacttggaatggttagacagtgggtgcagcccacagagggtgagccaaagcagkgtggggtgttgcctcacctgggaagcccaaggggttggggaactccctcccctggccaagagaagccgtgagggactgtgccttgaggaacggtgcactgtggcccagatactactcttttcccatggtcttcacaacccgcaaaccaggagattccctcaggtgcctacaccaccaggggcctgggtttcaagtacaaaacttggcagctgtatgagcagacagcgagctagctgcaggagtttcttttcatacctgactggcccctggaatgccagtaagacagaaccgctcactcccctggaaacagagctgaagccagggagccaagtggtctagctcagcaaattccacccccacggagcccatcaagctaagatccactcactaccagcacagcagtctgaagtcatgctcaaacttggtgggtggagtggcatc

SEQ ID NO: 440126 - DNA, 617 bp, Homo sapiens
aaaagacatggggtagctggcaagatggctgaataggaacagctgtggtctgcagctctcagcaagatcaacacagaaagtgggtgatttctgcatttccaactgaggtacctgactcatctcacttggaatggttagacagtgggtgcagcccacagagggtgagccaaagcagggtggggtgttgcctcacctgggaagcccaaggggttggggaactccctcccctggccaagagaagccgtgagggactgtgccttgaggaayggtgcactgtggcccagatactactcttttcccatggtcttcacaacccgcaaaccaggagattccctcaggtgcctacaccaccaggggcctgggtttcaagtacaaaacttggcagctgtatgagcagacagcgagctagctgcaggagtttcttttcatacctgactggcccctggaatgccagtaagacagaaccgctcactcccctggaaacagagctgaagccagggagccaagtggtctagctcagcaaattccacccccacggagcccatcaagctaagatccactcactaccagcacagcagtctgaagtcatgctcaaacttggtgggtggagtggcatc

SEQ ID NO: 440127 - DNA, 617 bp, Homo sapiens
aaaagacatggggtagctggcaagatggctgaataggaacagctgtggtctgcagctctcagcaagatcaacacagaaagtgggtgatttctgcatttccaactgaggtacctgactcatctcacttggaatggttagacagtgggtgcagcccacagagggtgagccaaagcagggtggggtgttgcctcacctgggaagcccaaggggttggggaactccctcccctggccaagagaagccgtgagggactgtgccttgaggaacggtgcactgtggcccagatactactcttttcccatggtcttcacaacccgcaaaccaggagattccctcaggtgcctacaccaccaggggcctgggtttcaagtacaaaacttggcagctgtatgagcagacagcgagctagctgcaggagtttcttttcatacctgactggcccctggaatgccagtaagacagaaccgctcactcccctggaaacagagctgaagccagggagccaagtggtctagctcagcaaattccacccccayggagcccatcaagctaagatccactcactaccagcacagcagtctgaagtcatgctcaaacttggtgggtggagtggcatc

SEQ ID NO: 440128 - DNA, 521 bp, Homo sapiens
tgagagtttttaacataaaggaaagccttttctgtatctattgagaaaatcctgtggtttttgtctttagttctgtttatgtgatgaatcacatttactgattttcgtatgttgagacaaccttgcatcctggggatgaaggctacttgatcatggtggattagctttttgatgtgttgctggatttggtttgcaagtctttagttgaggatttttgcatcaatgtttctcaaggatattggtctaamgttttcttgtgtgttgtctctgccaggttttggtgttaatatcatgatggcctcatagaatgaattggggagaagtccctcctcctcatttatttatttatttatttatttatttttggaatagtttctgtaggaatggtaccagactttctttgtatatctggtagagtttggctgtgaatccatcaggtcctggcctttttttagttgataggctatttattactcattcaatttcagagtcattattggtctgttcagggaatcaatttt

SEQ ID NO: 440129 - DNA, 595 bp, Homo sapiens
gaatgcctccaaaaaacaaaattcttaagtaggtctggttgtgccaagtgacattaattacacaatccatactagcactatcaactgcaaacttacctggaagaagggcttgcccccttagatactacttagaaactatttgctcctcctgtcagtgccagaagtaactgaaaatcgaatttgagaacattatggaaaatccagagaggattcagtaaaggaggggggaagttaaaccattggttctcaattttgttttmttttaaactttccccatacattctcctcaggtgtcccataacaaatccaaccttcttgtccctaactttgccaaaggagggcagggagagagagtgcatgagagagatgaaagaagaagaggtatagaggaggaagaatatagaggaaaaaaggaaagaaagagtatcagggaggtagatatctacagatttggggtcttcgagaggttaaaaaaaaaacagatgtagctagaaagagggatcaagagagcaagagatagacaaagttctcaggatttcatcagaggaacatccttgtactcacaaggctcaagagcatgagtagatttcaagtg

SEQ ID NO: 440130 - DNA, 595 bp, Homo sapiens
gaatgcctccaaaaaacaaaattcttaagtaggtctggttgtgccaagtgacattaattacacaatccatactagcactatcaactgcaaacttacctggaagaagggcttgcccccttagatactacttagaaactatttgctcctcctgtcagtgccagaagtaactgaaaatcgaatttgagaacattatggaaaatccagagaggattcagtaaaggaggggggaagttaaaccattggttctcaattttgttttcttttaaactttccccatacattctcctcaggtgtcccataacaaatccaaccttcttgtccctaacttygccaaaggagggcagggagagagagtgcatgagagagatgaaagaagaagaggtatagaggaggaagaatatagaggaaaaaaggaaagaaagagtatcagggaggtagatatctacagatttggggtcttcgagaggttaaaaaaaaaacagatgtagctagaaagagggatcaagagagcaagagatagacaaagttctcaggatttcatcagaggaacatccttgtactcacaaggctcaagagcatgagtagatttcaagtg

SEQ ID NO: 440131 - DNA, 595 bp, Homo sapiens
gaatgcctccaaaaaacaaaattcttaagtaggtctggttgtgccaagtgacattaattacacaatccatactagcactatcaactgcaaacttacctggaagaagggcttgcccccttagatactacttagaaactatttgctcctcctgtcagtgccagaagtaactgaaaatcgaatttgagaacattatggaaaatccagagaggattcagtaaaggaggggggaagttaaaccattggttctcaattttgttttcttttaaactttccccatacattctcctcaggtgtcccataacaaatccaaccttcttgtccctaactttgccaaaggagggcagggagagagagtgcatgagagagatgaaagaagaagaggtatagaggaggaagaatatagaggaaaaaaggaaagaaagagwatcagggaggtagatatctacagatttggggtcttcgagaggttaaaaaaaaaacagatgtagctagaaagagggatcaagagagcaagagatagacaaagttctcaggatttcatcagaggaacatccttgtactcacaaggctcaagagcatgagtagatttcaagtg

SEQ ID NO: 440132 - DNA, 578 bp, Homo sapiens
ttgggttattaaaagcctgacctcttatagcatgcattcttatcccattattaagctgtgtatataaaattcagtaggccttcacttttatagctttaacttctaaatttcaaattcaaaatcagcattgaagtgccagttgggtgccaggcactatgcaagtgcttttaaaggtactgccacatttgatcgacacccagattcctggccaggaatattctgattccaatctagtaagcatcctacgacaccacaaccttctatcattgccttgccatcaagtcttgcaaggattttagacagagaattggaggggaggaaatcagcaaagccagatccatgtctggtmcaccactggctttttactagaagtgtacgcctttattctttggagactccaatttctcttaacataaaactgaagcaagaatacagaattcttgatcaactcacaaaaacattatcaagcgtcttaagtacattcacccctctgaggtttcctcgatgttcaaggtttgaataaaccatgtaacctaaataaaccatcaaataaatggtgtatccttgaacaacagata

SEQ ID NO: 440133 - DNA, 509 bp, Homo sapiens
tgtattttcaactagcactcaagtattttgtgcaggttgtcagagatcacacactgagaaaaaatagattgggtccctcccttgattctgtacccatttgcttaagtgttggtataatagagcatgttgccagttgtgatggttaatgctgagtgtcaacttgattagactgaaggatacaaagtactgatcctgtgtctgtctctgagggtgttgccaaaggagattaatatttgagtcagtgggctgggaaacatagacccacccttaatctggatgggcacaatctaatcagcttccagtgcagctggaatatcagcaggcagaaaaatgtgaaaagagagactggcytagcctcccagcctacatctttctcgcatgttggatacttcctgccctcagacatcggacttcaagttcttcagttctggaacttggactggctctccttgttccttagcctgcagagggcctattgtgggaccttgtgatcatgtgagttagtactt

SEQ ID NO: 440134 - DNA, 509 bp, Homo sapiens
tgtattttcaactagcactcaagtattttgtgcaggttgtcagagatcacacactgagaaaaaatagattgggtccctcccttgattctgtacccatttgcttaagtgttggtataatagagcatgttgccagttgtgatggttaatgctgagtgtcaacttgattagactgaaggatacaaagtactgatcctgtgtctgtctctgagggtgttgccaaaggagattaatatttgagtcagtgggctgggaaacatagacccacccttaatctggatgggcacaatctaatcagcttccagtgcagctggaatatcagcaggcagaaaaatgtgaaaagagagactggcttagcctcccagcctacatctttctcgcatgttggatacttcctgccctcaracatcggacttcaagttcttcagttctggaacttggactggctctccttgttccttagcctgcagagggcctattgtgggaccttgtgatcatgtgagttagtactt

SEQ ID NO: 440135 - DNA, 411 bp, Homo sapiens
tgggctcctcctacctttaagttaacaggctaagaagggagttacagtgttgactggggtgattgacccagactatcaagatgaaattagtctactactccacaatggaggtaaggaagagtatgcatggaatacaggagatcgattagggcatctcttagtattaccatgccctgtgattcaggtcaatgggaaactacaacagatcagtccagccaggactacaaatggcccagaccctttaggaataaaggtttsggccactccaccaggaaaaaaaccacaacctgctaagatgcttgctgaaggcaaagggaatacagaatgggtagtagaagacggtagtcatcaatatcagctatgatcacatgaccagctgcagaaatgaggactgtaattgtcatgattatt

SEQ ID NO: 440136 - DNA, 534 bp, Homo sapiens
tgataattattttctctcaatgtctttaagaaatttctccctctgtctcctgattttactgttgcagttaaaaagccagttctcagtcaaattctcattttttttttttgagatagagtcttgctctgttgcccaggctggagtgcagtggcacaatcttggctcactgcaccctcaagtgattctcctctcagcctcccaagtaggtgggattacaggtgcatgccaccatgcccagctaatttttgtatttttaataragatggggtttctccatgttggccaggctggtcttgaactcctgacctcgagtgatccacctgcctcagcctcccaaagtgttgggattataggcgtgagccactgtgcctgccctaaattgtcatttatttgaaggtaatctttctggttcctatcatcctgtcagcttaaatttttttttctttggttgtgcttttgttgatggcagtgttccatgttagggtgaagggaaaagtttccctctgccctctgaagtttctctgaaataaactg

SEQ ID NO: 440137 - DNA, 534 bp, Homo sapiens
tgataattattttctctcaatgtctttaagaaatttctccctctgtctcctgattttactgttgcagttaaaaagccagttctcagtcaaattctcattttttttttttgagatagagtcttgctctgttgcccaggctggagtgcagtggcacaatcttggctcactgcaccctcaagtgattctcctctcagcctcccaagtaggtgggattacaggtgcatgccaccatgcccagctaatttttgtatttttaatagagatggggtttctccatgttggccaggctggtcttgaactcctgacctcgagtgatccacctgcctcagcctcccaaagtgttgggattataggcgtgagccactgtgcctgccctaaattgkcatttatttgaaggtaatctttctggttcctatcatcctgtcagcttaaatttttttttctttggttgtgcttttgttgatggcagtgttccatgttagggtgaagggaaaagtttccctctgccctctgaagtttctctgaaataaactg

SEQ ID NO: 440138 - DNA, 589 bp, Homo sapiens
ttttcttgtcttctgctaggtttggtgttggtttgctcttgcttttctaattctttcagttaataccttgcttttcaacctcaatctcatgcttttggcttgccgtgtcctgaatttccaattttattaagcttttccaggcctcatctttcttggcatatgcaatatttaacaccacttactccttccttttggttgtttccctgctctgatttctatgataacattttttcttggcttttcttttcttctytttttttagtgatgggggtcttgctatgttgccaaggctgcagcagtggctatttacaggaacaatcatagtgcactacagcctcaaattcctggactcatgtgatcctttggccatagcctaccaagtagctggaactatgggtgtgcactaggcatgcaccactacacctggctggcttttctaacttattcatgtcttcttcatctcagctcctttgcctgactcatggaccctagtccactgccaatggcagggttggtcagtccatgtatttgtgcaatttattagaaggcctgaacacgtgttatatttttccaaaacagattttttttt

SEQ ID NO: 440139 - DNA, 361 bp, Homo sapiens
tttttccccttttttacttataaaatctttatcttgatttttgtgatgttcataatgttttatttttttaattttgtttgggacagcgtggctccatcmgaatgagaactaatggagttctttttactggaaatcttcatcatcactatttttatggggtgattagtatacttgtatcccaattaagtcactccaaaaatggcataaagcagaagagaggcaaatgaaaagctagtactataatgctgtattgtgattccctttctatccaccatcatcaatatcttactctgtgctaggtctttcctgtcagtacacaaaccctgatgtgatctggttcctacttagctctccaacatca

SEQ ID NO: 440140 - DNA, 527 bp, Homo sapiens
ttttcagtcctttttctaaaaaaggaaataaccccaccaaaccctctggctgcaaacaatgagcttggtcctgtctcttttaatctgccagctgtcaacatctttttcagacctagaagtctttagctcatgcctccagtacaggtgactactttgtatttttccccttttttacttataaaatctttatcttgatttttgtgatgttcataatgttttatttttttaattttgtttgggacagcgtggctccatcagaatgagaactaatggagttctttttactggaaatcttcatcatcactatttttatggggtgattagtatacttgtatcccaattaagtcactccaaaaatggcataaagcagaagagaggcaaatgaaaagctagtactataatgctgtattgtgattccctttctatccaccatcatcaatatcttactctgtgctaggtctttcctgtcagtacacaaaccctgatgtgatctggttcctacytagctctccaacatcatctgtatc

SEQ ID NO: 440141 - DNA, 524 bp, Homo sapiens
ctgtcttatatgggcagggttcacggcactctgaaacaattataacagtaacatcaaaaatcactgatcacagatcaccatagcatatctcataataatgaaaatggttgaaatattttaagaattaccaaaatgtgtacaggaacatgaagtgaatacatgttccaaaatgtatataggaacatgaagtgaatacatgttgcaaaaatggtgccaatagacttgcttgatgcagaattgccaccaaccttcaattttgtttaaaaaaaaaaaaaggycctgggcacagtggttcacacctgtaatcccagcactttgggaggccaaggggggcagctcatttgaggtcaggagttcaagaccagcatggccaacatggtgaaaccccatctctactaaaaatacaaaaaattagctgggcatgatggtgcatgcctgtaatcccagccctcagaggctgaggcaggagaaatcacttgaacctggcagacagaggttgcagtgagcctagattgcaccactgc

SEQ ID NO: 440142 - DNA, 524 bp, Homo sapiens
ctgtcttatatgggcagggttcacggcactctgaaacaattataacagtaacatcaaaaatcactgatcacagatcaccatagcatatctcataataatgaaaatggttgaaatattttaagaattaccaaaatgtgtacaggaacatgaagtgaatacatgttccaaaatgtatataggaacatgaagtgaatacatgttgcaaaaatggtgccaatagacttgcttgatgcagaattgccaccaaccttcaattttgtttaaaaaaaaaaaaaggccctgggcacagyggttcacacctgtaatcccagcactttgggaggccaaggggggcagctcatttgaggtcaggagttcaagaccagcatggccaacatggtgaaaccccatctctactaaaaatacaaaaaattagctgggcatgatggtgcatgcctgtaatcccagccctcagaggctgaggcaggagaaatcacttgaacctggcagacagaggttgcagtgagcctagattgcaccactgc

SEQ ID NO: 440143 - DNA, 569 bp, Homo sapiens
acatctttatgtatgtgtatcagacacagcttgtgtcctgcctcacattctcttggcccactttttaatctagctcttgcagaagctggctctgtgtaagtgtaacctaacagcacttcactcgtctgtatcacgatctatrtaactatatatacctgctcagacattatcatggacaaaaattcatgactaatgaatttgttctccatgacaggagaacaacagataaatattctcctttccatctcctggatggacaattctaaggcatgttcacatggctgcatataagtctctagtggtatcacgcccagttgcccatagtggtagtcaactccataacatacccttgatttggctttccgtttcacccttcccaagcctctactcctgatccttaggattacttcctggagctaactatctgtatgtatcaacctgcttttttggaaagcctagattagaacagtttatcttttgaatgttgcagtacattaaattttgccttgccctcttaacatattcataaaactatatgtataaaacaatgtatttattgatatgagata

SEQ ID NO: 440144 - DNA, 600 bp, Homo sapiens
agctttggtgatttttttaatgattttctatttctgctttataagctgttttttgttttttgtattttgcatgttgctttgtargtacttgtgctacattatattaacctcaggtcttcattggaggcctcatggtagagaaagcattttcccacctgtgaccacatgctttgctttcgtcaaaggatattagcagatgttttataagtagaggtttgaaatttacttgtgtgattcgacttgctcacttgcacaccagccttttccatcaaaaggaaaagactcacatagcaacttgttcaaaggaaataacataaggaacaaatctttacccaacctgcagcttggagacaagcccagcttagatgagctaaactccaaccaacatgcagatatattagcaagaaataaatgcttatattgagaagccattggatttggagttgccacacatttttcttgtggcagtagctaacaaattcggtgccatcagatctttaggttttatctcattggacgaatataaacttccctaggacaatacatttcattaccaacaatatggcagcctctaccagacttcccacactatgcttatcc

SEQ ID NO: 440145 - DNA, 600 bp, Homo sapiens
agctttggtgatttttttaatgattttctatttctgctttataagctgttttttgttttttgtattttgcatgttgctttgtaggtacttgtgctacattatattaacctcargtcttcattggaggcctcatggtagagaaagcattttcccacctgtgaccacatgctttgctttcgtcaaaggatattagcagatgttttataagtagaggtttgaaatttacttgtgtgattcgacttgctcacttgcacaccagccttttccatcaaaaggaaaagactcacatagcaacttgttcaaaggaaataacataaggaacaaatctttacccaacctgcagcttggagacaagcccagcttagatgagctaaactccaaccaacatgcagatatattagcaagaaataaatgcttatattgagaagccattggatttggagttgccacacatttttcttgtggcagtagctaacaaattcggtgccatcagatctttaggttttatctcattggacgaatataaacttccctaggacaatacatttcattaccaacaatatggcagcctctaccagacttcccacactatgcttatcc

SEQ ID NO: 440146 - DNA, 600 bp, Homo sapiens
agctttggtgatttttttaatgattttctatttctgctttataagctgttttttgttttttgtattttgcatgttgctttgtaggtacttgtgctacattatattaacctcaggtcttcattggaggcctcatggtagagaaagcattttcccacctgtgaccacatgctttgctttcgtcaaaggatattagcagatgttttataagtagaggtttgaaatttacttgtgtgattcgacttgctcacttgcacaccagccttttccatcaaaaggaaaagactcasatagcaacttgttcaaaggaaataacataaggaacaaatctttacccaacctgcagcttggagacaagcccagcttagatgagctaaactccaaccaacatgcagatatattagcaagaaataaatgcttatattgagaagccattggatttggagttgccacacatttttcttgtggcagtagctaacaaattcggtgccatcagatctttaggttttatctcattggacgaatataaacttccctaggacaatacatttcattaccaacaatatggcagcctctaccagacttcccacactatgcttatcc

SEQ ID NO: 440147 - DNA, 508 bp, Homo sapiens
aacctacttcctatggccaagttaccacaaagctgcttcatcctcctcatctcagttcctggcacaacctccccacagggttgagctgaaatgattctccaccctcagggacytgaagccttgaaatatcagagcagttgcacccctgtcatcacagccaacacagcacctcacccactggggacctcaggccttctgcacacaagagcagttgtgacccttggagccacagctgaagtagcactcctgcttcagggacttcaggcctttgggacactggagcagtttcaccctggccctagagcagatacaatgtcttatctcccagggacctcaggtctcctgcactctggagtagtctcattcctcatctggcaggtgatgcaacacctgacctcccaaggctccaagcctttggcacaccagagcaactgcaccttccagcatcacagttgacacagtgccccacccccagggatccagagattctgcttacctgtgtaggcac

SEQ ID NO: 440148 - DNA, 592 bp, Homo sapiens
tgagtaattcctcttacacttttgttaggtaaataaaaacactatttatttctatggtaccagtgaaagattttggaggcacacagtcataaagaaagaacttasggttgaaaatagaagttctgaatttggagcttaccatgttgctatttactgactcaccatttactgattatttaacctcgggccggtcacattatctggtttttattattaaaactgggagatattttaaaatgttctactcatctcgcatattaatgtagatgaatggagatggtacatgtaaaaaaattttaaatatctgaatgctatgatacagattctattgatgatgatgatgatgatgataacaatcatttcatcaaatactcaaattgcaagatggtagaaattaatatacattatttataatagagtttttaaaaaataattgttaggcatgcaatatttatttttcattaatatataatatttgtgcatatttatggggtacatgtgatatttcatcacatgcataaaatgtgtaataatcaagtcagggtatttagaaaatcatctctatcatttatcatttctatatgttgggaac

SEQ ID NO: 440149 - DNA, 606 bp, Homo sapiens
taattatagcagtaagtaaagaaaaagttacaaaattcaacatccattcatgattttaaaaattactggccaattttgaataaaaggaaacttctttaacttgagataygaaaactgcaaaaacctacagctaatattatacttaattttgaaagacaatgtctttcttgaataagtcatgtctagacaaagatatcatctgtaaactttcctatttagacctaaaaaaagtctgaacctaaatatatatatttatatataaatgtttacatataatataaatatgtttacatataaatatgtttacatataatataaatgtttacatataaatgtttacatataaatgtttacatataatataaatgtttatatataatataaataatgtttatatatgtttatatataatataaataatgtatttatatatagaataatgtattcatatatatatgctatatatatatatttttttttaattcaaagaactccagaaataatatatggacccaactcagtctatacctttatcatctcagttttagatgtctcgttataggatatgaaaatgtcacatgtgcctcttcagcccttacagctaaa

SEQ ID NO: 440150 - DNA, 546 bp, Homo sapiens
tatagcagtaagtaaagaaaaagttacaaaattcaacatccattcatgattttaaaaattactggccaattttgaataaaaggaaacttctttaacttgagatacgaaaactgcaaaaacctacagctaatattatacttaattttgaaagacaatgtctttcttgaataagtcatgtctagacaaagatatcatctgtaaactttcctatttagacctaaaaaaagtctgaacctaaatatatatatttatatataaatgtttacatataatataaatatgtttacatataaawatgtttacatataatataaatgtttacatataaatgtttacatataaatgtttacatataatataaatgtttatatataatataaataatgtttatatatgtttatatataatataaataatgtatttatatatagaataatgtattcatatatatatgctatatatatatatttttttttaattcaaagaactccagaaataatatatggacccaactcagtctatacctttatcatctcagttttagat

SEQ ID NO: 440151 - DNA, 488 bp, Homo sapiens
atgagctcattttcattattctgctcactaataccaggtttctgaccccataaatttactgaacactatcacctaggtaatcatggtatacacttcttatttttgttaaactcagtttatctgataatgacttaccaggccctggggcttccacaaaaatttccgcataacacattttgccatttaataatgtcctrttgtttttactttattaagaaattgctaatcaaattacctaatcagatgataagttagacatttgcaataatggagcctcttcttgttctattctactttattgatgatgaaagggacccatttaatttcagaggggtttgacaaatcgatgagatgttagtggattctagtctaaaatatctcacgaattctctttacacagaatttcactttcagatgccttaatcaactattgcctatggctggtcagcagatgcctcaaaaaatgttaaaatcatcctcctaaagtc

SEQ ID NO: 440152 - DNA, 488 bp, Homo sapiens
atgagctcattttcattattctgctcactaataccaggtttctgaccccataaatttactgaacactatcacctaggtaatcatggtatacacttcttatttttgttaaactcagtttatctgataatgacttaccaggccctggggcttccacaaaaatttccgcataacacattttgccatttaataatgtcctattgtttttactttattaagaaattgctaatcaaattacctaatcagatgataagttagrcatttgcaataatggagcctcttcttgttctattctactttattgatgatgaaagggacccatttaatttcagaggggtttgacaaatcgatgagatgttagtggattctagtctaaaatatctcacgaattctctttacacagaatttcactttcagatgccttaatcaactattgcctatggctggtcagcagatgcctcaaaaaatgttaaaatcatcctcctaaagtc

SEQ ID NO: 440153 - DNA, 586 bp, Homo sapiens
tattgcatctccatcaggaaactcttttggtcaaagacttattcctggacaaaaagcttgtgattttggaagaaaacagactttgggaattaattcccaatggtgagtgggtaaacccctgcctggtagcattcagtcctcacctcagcagtgctttcacaatatccttatcttgtcccacagttcctgatggcttgtgctgtcggtgtaagttgaggcaatatttgccttggagaggaaaaatccagcttacttgtgttccctaacttgtcttttcagcattgcttcacaaccacctctgccccatgttgcagtcctcacttttacacacacaaacaccaattcatgattcttactacttccagaggcctttaccgatttctttattgatttwtttgagcattttatagttcttattaaatcctcatattcctgctcctatttggactttacatttttaaaattttattatttaatttaataacttttttataaaaatattttttaaatttgtttatgatttatgtaatgtatttattttttagattagtgaactgcagggtggaagaagcagtagccatgctac

SEQ ID NO: 440154 - DNA, 520 bp, Homo sapiens
atggaatgttgaaagtgctatctcagtaacaatttaaaggcagaaattctamacacataaggaaagttgtagtaaatctcatcaacttctaaggacaatagaatacctgcatcaaactacacttataaagatcagcccaataaccctgaaacattttttcctcctctccgattcaatcaattttatattttatattaggcctctatcaatataattatcttgctagataatgatagtaaaattaatgttagaacatagataatatgcaggtacaaaaggccacagcaactagacagtatttctatgcattaaactataagagtataaaacatgtccaaaataagaaaatgaaaatcaaataaccgagtgagaatcattcaaataatcaagtaacctctctctgaaataaaggatcataattctgatcttaaattttaattagtatctacaaatgggtttagattattggcacttattgaaatcaggaagcatattctaagtatatcttctcctgaacttt

SEQ ID NO: 440155 - DNA, 520 bp, Homo sapiens
atggaatgttgaaagtgctatctcagtaacaatttaaaggcagaaattctacacacataaggaaagttgtagtaaatctcatcaacttctaaggacaatagaatacctgcatcaaactacacttataaagatcagcccaataaccctgaaacattttttcctcctctccgattcaatcaattttatattttatattaggyctctatcaatataattatcttgctagataatgatagtaaaattaatgttagaacatagataatatgcaggtacaaaaggccacagcaactagacagtatttctatgcattaaactataagagtataaaacatgtccaaaataagaaaatgaaaatcaaataaccgagtgagaatcattcaaataatcaagtaacctctctctgaaataaaggatcataattctgatcttaaattttaattagtatctacaaatgggtttagattattggcacttattgaaatcaggaagcatattctaagtatatcttctcctgaacttt

SEQ ID NO: 440156 - DNA, 457 bp, Homo sapiens
gtatttcttacctttgttatctttgcaactcatttagtctctggagagttttatggcccttaatcctgaggacaaggatttgaattttcctcggtcctaagtacccactggaatttggggtacttaatataacactgccttggtctaagcacagatgatttaaaagtaaatcttaactagagcatccacaggaataattcatcttataatttaaagtaacaaatgttatgctactcacaaatgcttaatgccagtatgaataccatccttttcctatatcatatgttagcctcagccatgactgtgtaagaaaaactaagtagttcaatgtcaagccatagctgcctatacctaargccaaccaagccagttaaagcgttggagtgggcccttcattcaaacttgcaagcccatgattgtgctttctgacatgcatgagcagcatttttactaaagc

SEQ ID NO: 440157 - DNA, 540 bp, Homo sapiens
ggctgctgcctgtcttcactcaggtggctgtggaggtgaagccaggtgacctgctgatctgcagtgcaggagggcagatgaggctcaggatggtggggatgaagcaccccatcctgagtttccagtgcacgctgctagacagtcaatgaatggtgcacagttaacttgaaaaatgggatatcctgcccattaagatgcatgatgagcatctgagggaagtccctgcccaatccaaggtgccagctggggtgcaggtgagcagggaagaatgaaggacatagttatgcagaggacagcacaccccaccagcaatgcctgaggagactgtggagaagagagaatagaaccaagctcttcagagactgcaaagaggttttctcctcatccaattttaaatactgaccttcagctcaaccttgtggggcaggcagggcagactgtactaccccattttacwgaggggaaaagaaaactgagacccagagaagctacatgactaggaaagtgatgtgagtgagtggaagaattaagactgaaatg

SEQ ID NO: 440158 - DNA, 604 bp, Homo sapiens
cttggtgggcaaagcactggcttgatcacggcctcccttaccctccaggacacacctaacacaatctaggggtggcattctgctccatcccctccctcagcttcactcctagatcccatccctcttctcccattgaggacctcacctcaccttgggactgtctccagtgaggaactctggtgcctgtagctgttaggctggacaatcagagacaggaagtctgtggttggggggccatgcttcccaggggtggtccacyggatgtgtaaacaagattcatgaccaaggtcctgcctgaagcaaccccccacccccaaactctgtcctcatgaaaccctcagtttatttaatgtctcccctgtcaccaatgtctttctggaagcaaaggacatctggtgatgcagtgcttcacaccgtgtgtgtgctccataaatattgaatgatgacaggatatttttttcaaaaagatgaaggttccacctctcaggtctctcttttgctgtacatctttgccaagagtgggttaagacagtccatcttttagcaagaatcagggtttggagattagtgaagtgagaattggtcaggtttaatggcacagata

SEQ ID NO: 440159 - DNA, 604 bp, Homo sapiens
cttggtgggcaaagcactggcttgatcacggcctcccttaccctccaggacacacctaacacaatctaggggtggcattctgctccatcccctccctcagcttcactcctagatcccatccctcttctcccattgaggacctcacctcaccttgggactgtctccagtgaggaactctggtgcctgtagctgttaggctggacaatcagagacaggaagtctgtggttggggggccatgcttcccaggggtggtccaccggatgtgtaaacaagattcatgaccaaggtcctgcctgaagcaaccccccacccccaaactctgtcctcatgaaaccctcagtttatttaatgtctcccctgtcaccaatgtctttctggaagcaaaggacatctggtgatgcagtgcttcacaccgtgtgygtgctccataaatattgaatgatgacaggatatttttttcaaaaagatgaaggttccacctctcaggtctctcttttgctgtacatctttgccaagagtgggttaagacagtccatcttttagcaagaatcagggtttggagattagtgaagtgagaattggtcaggtttaatggcacagata

SEQ ID NO: 440160 - DNA, 545 bp, Homo sapiens
atgggattccagtgggctgaaattggttatgtcctccttcaaataattcattttctggatgaaatcatcattgygatcatcactgctatcatccattattagtcaaataatcctttctcctaaaaaatgagaaaatatatgttattggaaatttttattataatttcaagtgagaacactctcaattttctgtgcccaagatttgggagtcactttactttccatgcttgccatatttgaaaatttatgtgtgtctcctgatgagagaaataaaactcaacagcaactttactactaatgatgggagatattggtttttatttgtagccattgctctttaatggcctaagtagctttagcacttttcctagcctagacaaaggaatattgattttcttttttttttcttgctagtgaaatcctcctgttaaaggagtgattcagctaacctgagtattttggcatctttgtcccgatggctcagctgggattctatatgagtatatagaaattctaagaatgaagtgttctctttgttggcagag

SEQ ID NO: 440161 - DNA, 593 bp, Homo sapiens
ggggtagagaatggagaacacttaggttccgagaaaggacagctcagcagccacagctgtcagattgggctcaggtcctggcatggtccaggtggtggctgcatgcagtggaaactgggatgggctgcagggcccgggcttcacatagcccggattcctgggaggggagtgtggacagagagtgtgcattctggctcgtggccctggatcagsgtgacctggggaaggaggctagcccagaggagctggaagggagctcgctgcctcccgactcctgcgctgtgtgagggcgctggggctcacgtgtccccctttttaaatatttccttccacactaaatgaggaggaaaagccattttctcctagctccattagcgtctgttgaccctatttacatgctcctaacagctgactgctcctccagggctgccctagaccacaggctgttgggctggaaacttgccttagcctcataggacaaactgggagaagtcactgctgccctccagtggccatatgtgggatctcaagccctgctggggccgcttgtctgacttaaatgtttgcactggtcctgcaagaaagggtggcag

SEQ ID NO: 440162 - DNA, 566 bp, Homo sapiens
attttctgcacattttactctagatatctgaaaggacattaaagtggggaggagctgccaattggaatagaattcacctcgctgattctgcttgaattaaccattaaagatgcaggttgacaaaagaaatatatatttttaggtcattaagaaatgcctcattaattcaggggtgccccagcactgtgcttaacatttgtagcgggttgacccagactttctgaggcgtgcatagcccaccaagttttgctttgggatggggagataactggccagtcagctgtggcgccagtgccaccaacaatgttctcacctagtgaaggcatggttgaggaagaacagggaggctccctgggagggagtgtaggtagggaccatggtgaagcagtccaagctgaaagccagcacctgtcccaccctcctttgttctgctctctgcctggctgcttttgtaacacagtcccagagcctggtgttgagggcctctgctcaattgaygtctcaggatagctctaattctagatgtctcaccaaatcctgggtcttcagagactgcttgattttat

SEQ ID NO: 440163 - DNA, 607 bp, Homo sapiens
cacactgttatccttccatcttctgtgtacatatttaccttctctgtcaatagtatatcagaaacaatattttgcacacagtaagacctcaaagaattatagccatgatttctactactatttttgttctaccatctgatgtaatattgttgtttttcttaatagcactttaactgatatgcatctatttatttatttatttattttcgacgttctccactagaatacaagttatgcaracaggaagtttgttgtttgttgtttgagcttgttgtttaacattatattccagagtctagaactgtatcttttaggtaataggggctcaatcaaatcattgccctcaaaaaattaggattcggttagaatgaaagaccagaacaaagaggtataaggagactaaagtaaagaaaaaaacattttttttttcgatatttagggcagatctagatgaatccattaatcttaggccttctcagagatgtaccccttcatatttgagtaggccctaattttgtgctcatttcttggaagactaaggctccagtgtgatgagtcccacgagaggctgtaatgggagagtgggcgattccgaaggtatagaaac

SEQ ID NO: 440164 - DNA, 386 bp, Homo sapiens
tttactagaataatttcaggattttgaaattgtaaactaagtcaacacttttcttgcaacccagaacattcgaatatggacctggaacccagagattttagctagagtcccctgaaaagaggaggcttcctcctggtgggtgacactgtgaattagcaggcacctggataaattagaggacctctgggctcacaagccatcacttctgacatcctttggttttccaagcattcccagtgattcatttgtctgttcrcttgtttagcgtccagtcatatttttttcctacctcacacattttttgtacctgaattccaagctgtggtccaattctatggcacctcacccctccagtacaattattaatcagtaatttacttataatt

SEQ ID NO: 440165 - DNA, 378 bp, Homo sapiens
gatatatgtatgtgtgtgtatacatatatatgtctattcatatctgtgtgtaaatatatatgtctgtgtatctatatatacatatatatgtatatataatttttaagtttaaataaggtggtctagctctttgaaatagagcatcaatctctaaygatactacctggaaagatgctaaagaatgatatgacctagtatgtaaattacttctgaaatgagaacttgcttctgggactgctggctgttagtggcttgtaatttattaaaccttaacaaatagaattttaatatagtttggaaaataaatgagagttttaaatttatttacaagcaaaaagcttgtcatttgcaattggcaaaatcaaaaaccaaaattag

SEQ ID NO: 440166 - DNA, 581 bp, Homo sapiens
ctttactgaccacaggtcaggaaccctgtacagagactgtgtagatgaggtaagaggccagtttccccactgggcttttattgggtctgcaagtcaagattgactccttaaaggaaaacatacccttccaatcaaagccctggtaaaataaccaattattccaattgtgtcctgttgcaaaagaaaaatgtactcttattgcactgatgcaaacaactgtattgccataagttaagaatactcatagtttccagattctagaggaaccaggcaaaaagaaacaaacacactccaaattttggtcacaggagtgtataccttacttaattattaaaggccatasatagttcaaaataagatccctttatgaaaaacaaaacaaggatcggcaatattccaagcaaaagtcaaaaagatttgcttcagcttcctgagttcagttcatttagttaactcttgttttgcttgatatttgtgagcatttcagctcttcatgagtcctgcacatttttctgtattctaatgtcataatatccaaatttatcagaagcctctatttgagtgtgcctgtcgaagtccta

SEQ ID NO: 440167 - DNA, 617 bp, Homo sapiens
aaaaaaagaaaaagaaaagaaactactgaagcatgtcaaagggacataggagctaactgaaagagttgaattgccaaatttggaaagtttgaagagcaaaataaataatgtagtattagattataacctaaagcataaagtaaatatctacaagttcatattgacaaaaataaatgacggaataaatgaataaaagaaaatcgatttctcatttagaaaaaatccatatatgttatgttgrtattgccccctcaagaagatggactataactcttcaccctaaacatgagctattcatagtgactttgttccaaataagacagtatagaaagttgtgagggagattttacagtgaagaaacttaccaatatctcagtcagctgaagatgattagtatcaatggtgataactcatgttgataatatatatctatgatataatatgatgagaataatactttacctctgtgatcttcctccctccaaaacctataactccactctaatcataagaacatatcagacaaatccctgttgaagaacattatctataaacacctgacctgtattccttaaaactcaaagttctaagtcaatgaaatcagagaaagcattaca

SEQ ID NO: 440168 - DNA, 617 bp, Homo sapiens
aaaaaaagaaaaagaaaagaaactactgaagcatgtcaaagggacataggagctaactgaaagagttgaattgccaaatttggaaagtttgaagagcaaaataaataatgtagtattagattataacctaaagcataaagtaaatatctacaagttcatattgacaaaaataaatgacggaataaatgaataaaagaaaatcgatttctcatttagaaaaaatccatatatgttatgttgatattgccccctcaagaagatggactataactcttcaccctaaacatgagctattcatagtgactttgttccaaataagacagtatagaaagttgtgagggagattttacagtgaagaaacttaccaatatctcagtcagctgaagatgattagtatcaatggtgataactcatgttgataatatatatctatgatataatatgatgagaataatactttacctctgtgatcttcctccctccaaaacctakaactccactctaatcataagaacatatcagacaaatccctgttgaagaacattatctataaacacctgacctgtattccttaaaactcaaagttctaagtcaatgaaatcagagaaagcattaca

SEQ ID NO: 440169 - DNA, 570 bp, Homo sapiens
tttactactttctaagaaatgacaagacaattgaaatgaaatgatttttgaagagtgatttaaaaaattaattttggaraaaatgcatcacatatgtattttcgaattggttcaaaataagtatgttccaaatatagtcaaacatctgtcttcagtgaaatccataggtaaagcagaaaacaaactaaatacaacaatttaacataatgaacaaaaacagtgagggaaaatggtgaagaaaagaatcatgcagaccttggaacatgagaattgtatctgaggatagttttcttctaggcaccaattaataatggtcaagaacatattaaagcctcaagttggcctgaatgttagcaaaagtagttaatgtatgggtatcttgtaagaacaataagtggaagataagggtaggtagtgttgtcttctggtcagtggattgttctaaagctagttggttcacatctagttacagtggagctcagataatattcagaagcatagtaaaaagaatcacccctcgagaaacagaaaagctggcaaaatctagggaagattttgttcctcctactt

SEQ ID NO: 440170 - DNA, 642 bp, Homo sapiens
agaaacagaaaagctggcaaaatctagggaagattttgttcctcctacttgcagactggagaaagatgttgtaattaaatcataaattgggaaggaaacccaagtatargtacaagaaaaacatttggtgaagaaaagaggacggtacattttgcaaaataagcagatcactgaggagatggccccaaattcctgcatagcagatctaaaagttgcatgactactgttacttcctacctatgtgtttggataattttgtgactgttcttccaggatttgttaggattggctcaggccttggaggtcctatgttggcagatgacggttttcttaactgcaggtgagcaaactaggtgggtagggaatgctgtatctccttactccataaacaagcaaaaatctcaagactataggggtttattttagagcatgagattcatccttctacttaatttctttttactgttttaaaattgtgtttatatttttcaatatatatttcgtcttaatctttgatgaattatgtatgataaattctttctgtgatatcaggatactagatattgaatctaagctaaattaaatttaaaataattaatgaggaaatggcataaaaaactatccttcaaaaagagaataaat

SEQ ID NO: 440171 - DNA, 582 bp, Homo sapiens
gaaacctacatttctagagaatgttcatgtcaaataaagcataaaacttacctgcaaaaagcttctgatggctctatccctaaagcagcaacggcttccaaaactrtactagcagaatgcagactttgaaagctatgattctagagacacttacaaacataaaggtgacaacaatattctgtcagaaggaacaacatgatataatgaaccagaatatgttgatttaacaataaagtaggactcagtcacattagataggaccgtatgtctacactgccccatgggagaaaaataaatttgtctgagccaatgctttctagggggttggtctttttatcatggttgaagagcatgcaccccacaaaaggaaactttcagcttatcgtaaataatgtttaagatgatatgtgtatcataaagaaactagattaattaatgagagggagagaatagtactgttaattaaaagcagaaaaaggaatgtctgcccctaactaaaatgaaaagaattgtggcagactaatgattctgaaataaactaaaaactaaaaataagtaaataaataaggcattagagaactg

SEQ ID NO: 440172 - DNA, 582 bp, Homo sapiens
gaaacctacatttctagagaatgttcatgtcaaataaagcataaaacttacctgcaaaaagcttctgatggctctatccctaaagcagcaacggcttccaaaactgtactagcagaatgcagactttgaaagctatgattctagagacacttacaaacataaaggtgacaacaatattctgtcagaaggaacaacatgatataatgaaccagaatatgttgatttaacaataaagtaggactcagtcacattagataggaccgtatgtctacactgccccatgggagaaaaataaatttgtctgagccaatgctttctagggggttggtctttttatcatggttgaagagcatgcaccccacaaaaggaaactttcagcttatcgtaaataatgtttaagatgatatgtgtatcataaagaaactagattaattaatgagagggagagaatagtactgttaattaaaagcagaaaaaggaatgtctgccccyaactaaaatgaaaagaattgtggcagactaatgattctgaaataaactaaaaactaaaaataagtaaataaataaggcattagagaactg

SEQ ID NO: 440173 - DNA, 580 bp, Homo sapiens
tatttaaatatatttgcttctgcatcacagatcagtttaccrtttttaggccatttttgtgacacagaaaagaaatatctgaggctgggtagtttccaaagagaagaggttatattggctcacagttcagcaggctgtatcaccatggcaccaacgtcttctgggcttctggtaagagtctcactaagctttcattcacggcagaaggcaaagacagaagccagcacattacctggcgagatagagcaagagagtaagtggggaggtgtcatacacttttaaacaaccagatatcatgtaaactaactgaataagatctcacttatcacccaggggatggtgctaaaccactcattagggatccactccattattcaatcatctcctaccatgccccacattcaacactggaagttacacttcaacatcagatttgaaggagacaaatatccaaactatatcaactatacttgtatcagtttatgcttcataatctttttcattgttctgtttcactaatcttttgtcaaaagtacagtgtcataattactgtaatttaatagtaagaattaaagttgag

SEQ ID NO: 440174 - DNA, 562 bp, Homo sapiens
acagcatattttactttattctgactacaactcaatagcttcatgtggccaggccagtcgctaccatatttgacagttcaatccctgaggcatattaatcatactgaccttttcaaagggtccgcttatgattcttgaatttttctctgctgaagttctgttttcaacctaacttatttccgttctcatcttttttagttttactcttctgatattttggcttcaatgttttcttctttgtctggtttcttaagacagaaacttagacaatagatttaaggcttctttcttttctataaagttctacccacaaatacattgtgatatattcactttcattttcatacattcaaagatatattctgattttctctttaatttcttcttttactcgtgttatttagaactgtattttttgttttaaaatattttggctctttctagctagctctttgctgttcgtttccatttttattctgcratagtcagagaacacaagcttttaattttctcaaaatatttgataaatgtttcaaaatatggtctatctggtgaatgtttt

SEQ ID NO: 440175 - DNA, 577 bp, Homo sapiens
agtgagaagttgactttggacttttttttttttttttttttttgagacggagtctcactctgtcacccaggctggagtgcagtggcatgatcacggctcactgcaagctccacctcctgggttcatgctattctcctgcttcagtctcccaagtagctgggactacaggtgcccaccaccaygcctggctatttttttttttttttttttttttgtatttttagtagagatggggtttcaccgtgttagccaggatggtctccatctcctgacctcgtgatccacccacctcggcctcccaaagtgctgggattacaggcatgagccaccgcgcccagctgactttggacatttttattgctgttgaagagtcaatggggcacaatccagtgtaaaaaatcccagagttttatcctaactttgccattgtttttcctttatgaccttgggccaaaaccttcaccactctgagctttgatttttatatgcattatacaaaaggctaatcctgagtcattcctttgctcattctacagtcactcttatgtctttgactgtgtgcaaagcacggggctaa

SEQ ID NO: 440176 - DNA, 583 bp, Homo sapiens
ttaaacttcccagcttccaaaactgtgaggaaataaatgtccattctttataaattacctattttgtggtatcctgttatatagctgcacaaacagactgagacaggaggtatatgtcagggtgcagtagagaaccattcactgcattagggggttcccttccatggcactttttgcctgctttattaatttaatacaaagagatcaggcaccaattacaggcaagacccactmgtaatcttcagcagtgggatacagaaatgaacaagatgtatggtttctgctttcaaattgcatacagttcagttggggctaaattatagacacaaatactaatattataagttagattttactacattcaccatagaggtaggttttagaatttcaaaggagaggttcttagccaggggtgggaaattttatggaggagctggattttgacaattttatctatgctaaatgaatgccctctttccgggaactaaggaattttacctttctggggattcatggcaagaagatacaatccttgatctcagaagacattgtgatacacaatgacagataagttgataatgaa

SEQ ID NO: 440177 - DNA, 542 bp, Homo sapiens
agatttctcccaaggtcacacagtggtttactggtagaacgaccacttcccagtctatcactctgccctctaggccgagtgaatgacaccattattgttttctattatagagttcatgaaagcaacactggacttatatatacatgcatcagaataaagggattttagggtttgaaaaaagccttataaatcaccaagcctggtctgctgggtgggtgatcaattgtccaggtttgcctggaactgaggggctgttcaacacacggaacaggagagccctgggccaacagattagttggtcaccaagcctacccccaaatgacacttaaatttattctccaaccttcagcatcctaacatgaatctctttagcactagagcatttatgacattctcatttagtaaattgcattgctggaactgtcacctataactayaggtctttattctgccatgtgaggtcccactgaacaatatagagggtggctctgtagaaaactggccacagccattccaacatgggtcctctctgccgtattaga

SEQ ID NO: 440178 - DNA, 596 bp, Homo sapiens
agagagaccttgtctctaaaaaaaaataaaaaataaataaataattaaagatgaatagccctccagaaaagtaggtgacagcctgtgacaaagtctgtctggtcctggcatcaacctcccggctcctctgctgtgatctgagtttaatcttccttggttgatgagattccctgggagggcattcatgacagttgtgctcctcttggaggatctgtctttaggtacattaaggaagttcagaggaagcccctttctgcatttactattcctaagtgccctcagttttaagtctaaaacaatacattttggggcggcattttctgaattccttcaagatcaacttttttagattctgcatatgagtgagaccatgcagtatttgtatttctgtgcctggcttattttgagagaagagagacagaccctttcatgttgttttatcctcagaaaaggcaagagaagcaaaactaaaggcaggtaggctggcgcctaggaaccagacccgaaaccaagacytgaaaaccagacctgaaaccaggcctgggcctgcctgacctaagcctggtagttaaaattcgacccctgacttagcaact

SEQ ID NO: 440179 - DNA, 596 bp, Homo sapiens
agagagaccttgtctctaaaaaaaaataaaaaataaataaataattaaagatgaatagccctccagaaaagtaggtgacagcctgtgacaaagtctgtctggtcctggcatcaacctcccggctcctctgctgtgatctgagtttaatcttccttggttgatgagattccctgggagggcattcatgacagttgtgctcctcttggaggatctgtctttaggtacattaaggaagttcagaggaagcccctttctgcatttactattcctaagtgccctcagttttaagtctaaaacaatacattttggggcggcattttctgaattccttcaagatcaacttttttagattctgcatatgagtgagaccatgcagtatttgtatttctgtgcctggcttattttgagagaagagagacagaccctttcatgttgttttatcctcagaaaaggcaagagaagcaaaactaaaggcaggtaggctggcgcctaggaaccagacccgaaaccaagacctgaaaaccagacytgaaaccaggcctgggcctgcctgacctaagcctggtagttaaaattcgacccctgacttagcaact

SEQ ID NO: 440180 - DNA, 596 bp, Homo sapiens
agagagaccttgtctctaaaaaaaaataaaaaataaataaataattaaagatgaatagccctccagaaaagtaggtgacagcctgtgacaaagtctgtctggtcctggcatcaacctcccggctcctctgctgtgatctgagtttaatcttccttggttgatgagattccctgggagggcattcatgacagttgtgctcctcttggaggatctgtctttaggtacattaaggaagttcagaggaagcccctttctgcatttactattcctaagtgccctcagttttaagtctaaaacaatacattttggggcggcattttctgaattccttcaagatcaacttttttagattctgcatatgagtgagaccatgcagtatttgtatttctgtgcctggcttattttgagagaagagagacagaccctttcatgttgttttatcctcagaaaaggcaagagaagcaaaactaaaggcaggtaggctggcgcctaggaaccagacccgaaaccaagacctgaaaaccagacctgaaaccaggcctgggcctgcytgacctaagcctggtagttaaaattcgacccctgacttagcaact

SEQ ID NO: 440181 - DNA, 611 bp, Homo sapiens
aagaagttaggtagcttaatttttttgttgtggtaaaatatacacaacataaaatttaccatcttaggaatattcaagtgtccattaaggacactcattaagtataaagtggcattaaatacattcacatttttgtgcaacaattgccagcaccatatccagaactttttcatcttcccaaactggagctctgtacccattaaatactaacttcccatttctycccctttccagcctctggtggtgtaacaccattctaccttctgtctctacaaatttgactactctaaataactcctataagtgatattgtacagtatgtgtccttatatgtctgacttatttcactcagcataatgtcctcaaagttcacctagttgtagcatgtgttgagagttccttcctttttaaggcagagtaatattccattgtatggatataccacattttgtttattcattcatccattgatgaacatatggattgcttccacatcttggctattgtgaaagtgctgctatgaacgttgatgtgcaaatatttctttaaaggctctgctttcatttcttttggatatatacccagaattgggactgctggatcatataata

SEQ ID NO: 440182 - DNA, 611 bp, Homo sapiens
aagaagttaggtagcttaatttttttgttgtggtaaaatatacacaacataaaatttaccatcttaggaatattcaagtgtccattaaggacactcattaagtataaagtggcattaaatacattcacatttttgtgcaacaattgccagcaccatatccagaactttttcatcttcccaaactggagctctgtacccattaaatactaacttcccatttctccccctttccagcctctggtggtgtaacaccattctaccttctgtctctacaaatttgactactctaaataactcctataagtgatattgtacagtatgtgtccttatatgtctgacttatttcactcagcataatgtcctcaaagttcacctagttgtagcatgtgttgagagttccttcctttttaaggcagagtaatattccattgtatggatataccacattttgtttattcattcatccattgatgaacatatggattgcttccacatcttggctattgtgaaagtgctgctatgaacrttgatgtgcaaatatttctttaaaggctctgctttcatttcttttggatatatacccagaattgggactgctggatcatataata

SEQ ID NO: 440183 - DNA, 533 bp, Homo sapiens
aggtgggaggatcacgaggccaggagttcaagaccagcctgggcaacataaggagaccctgtctccacaaaaaataagtgggaaaaagattgcttccgtttcccacagtcacaaggcttgctttgtgtaccttctggaaaaggtaaccagaattgtaatgagaatataagaatgctgaatacataaatgtttggggaaaaaaaccctatgatgtttatcttagaatatagggagaaaaatataaaatgagagtaagcgtgccacagcttagtgcagtgtctaagataccaactctgtgccagctgacccgacactgtcacttaacagaattgcttcatccccatcgacattcagtttcctrtctgtatctggatattaataccccagaattattttatgataatgttagaaaagcacttaacacagtgactaacaactactaaatgctcaaataattgcattattcatgccatagagaggagtgagttttctgccagtgactgtcttcaaataagagtctgggaggtggctga

SEQ ID NO: 440184 - DNA, 533 bp, Homo sapiens
aggtgggaggatcacgaggccaggagttcaagaccagcctgggcaacataaggagaccctgtctccacaaaaaataagtgggaaaaagattgcttccgtttcccacagtcacaaggcttgctttgtgtaccttctggaaaaggtaaccagaattgtaatgagaatataagaatgctgaatacataaatgtttggggaaaaaaaccctatgatgtttatcttagaatatagggagaaaaatataaaatgagagtaagcgtgccacagcttagtgcagtgtctaagataccaactctgtgccagctgacccgacactgtcacttaacagaattgcttcatccccatcgacattcagtttcctatctgtatctggatattaataccccagaatyattttatgataatgttagaaaagcacttaacacagtgactaacaactactaaatgctcaaataattgcattattcatgccatagagaggagtgagttttctgccagtgactgtcttcaaataagagtctgggaggtggctga

SEQ ID NO: 440185 - DNA, 582 bp, Homo sapiens
ctggtgtgctggagccagctgttaaatgctcaagaaaattgctagaattttgagagccagttgttaaaccattgaaattgacttaacttgaaattggctgttgataaagtatttgcaccatggaaatcggctattactacaaatcagagctcctccccaacctcatcccacccacatagctggtttgccagaccactgctagcctccaaccatctgtgctcaggcaagggtaacttttgaccaaaagcttccagctgactgtgaccttaaatggycttattacacaaagcaatggtctctgccaacaactgcctatggttcaaggagcaaaagttgaactttacctggagctaagtgtgctgagaatctttgatcacttcttgcccccctcagctaatctgcccacagacattgcttatagtcgcagcttttcttataaagagctacaacatgcatgcgaatgtaatatgcaacttgaatttgtaaatctctttcactatgaactctcagagcattgcatgtgaattagatcaaccattgttcccaatagtggctccctgatgggaaagaagcagaaccaag

SEQ ID NO: 440186 - DNA, 584 bp, Homo sapiens
aagtgctcttccttcccatttttgtccctgcccttttaaaatctgagagcatcagagaatttcctatgcagtccctggttttattagttcccttccccttttcttccacagcagaatcacttgcaatggcagatwtagagtgacatttcagagagcatcccaactctcttgagatatcattcatctgaaagtccctgaacgtaacatctggcctatctctcctctgatcttcgggaaatctgcttctctaagcctagaatgcatgtttaactataaaactttccccattctcagttatcatgagctcaaaaactaatttgggtccaagcagccatggatttgaatcctaactccatacttattggcaatatcacctcaccaagacatttgtacctgagttttctcaaatttacaaaagggaactaactactccaaagactgtattttccaaaggtggccacatgagtaaatatatatatgtgtgtgtttcatcctataggcttctcctacaatgtgatattgaccctcctctatctaggcaagaaggatgctatgcaacttctaatactgaaccagaaaaggca

SEQ ID NO: 440187 - DNA, 582 bp, Homo sapiens
attgtgcttttctaagccctgtggtgttgaaggctttgtttggttctgtggtggattcatagctgaagtggagaatctagcaacccacttgcttttgaacaggactcagtgcattatggtgttcaatgaagctttggttcatgatcaaatgaagacttagaaaaaaataaagtataaagagtcaaggraaataattttttttttcaaatgaatgctgcagaatttttttttttttttgagacagagtcttattctgtctgccagactgaagtacaatggtacaacctcagctcactgcaacctctgcctcctaggttcaagcgattctcctgcctcagcctccctagtagctgggactacaggtgcatgccactatgccggactaatttttgtatttttagtagagatggattttcaccacattggccaggctggtcttgaactgctgagctcaagtgatccgcctgccttggcctcccaaagtgctgagattataggcatgagctaccacgcctggccggaatgctgcagaaaataattgtgatgaatggagagggaagagtgatcacaggagcctggtgg

SEQ ID NO: 440188 - DNA, 287 bp, Homo sapiens
ctaaacgccaatgtggtattaggtaattaggtttagatgargtcatgaaagtgagccccaaggtgggattagtgcccttataagaagaggaagacaaaccagagcttcctctttctgccatgtgaggatatgttgagaaggaagctgtctgctggccaggaagagagccctcaccagaaacacaatctgcccataccttgattttggacttcccagcctccagaactgtaagaaataaatatctgttgtttaagctgggcagtctatggtattttgttttagcagcc

SEQ ID NO: 440189 - DNA, 570 bp, Homo sapiens
attgcttttgcagtcttggattatttttcttctgaaatcagtaacattttgttcatacagtaagtcaggatacctataaagtaaaaggaggaaaatattgctctatgtaattttaaccacgtttgaaagcaatgtttctcaaagtgaaccctgactgcaacatcagcatcatctggaacttatgcgaaatgcagatcctcaggcctcagcccagaaccaactgagtcagaaactcaggtgggcacagcaatatgtgttttaaaacaagctcttcagatgatgcccattggctgggcacggtagctcacgcctgtaatcccagcactttgggaggccgaggcaggtggatcacgaggtcaagagattgagaccatcctggccaacatggtgaaactttgtttctattaaaagtaaaaaaattagckgggcatggtggcacgcacctgtagtcccagctacttgggaggctgaggcaggagaatcgcttgaacccaggaggcagaggttgcagtgagccaagatcgcgccactgcactccagcctggcaataatgatgcccattaaagttta

SEQ ID NO: 440190 - DNA, 570 bp, Homo sapiens
attgcttttgcagtcttggattatttttcttctgaaatcagtaacattttgttcatacagtaagtcaggatacctataaagtaaaaggaggaaaatattgctctatgtaattttaaccacgtttgaaagcaatgtttctcaaagtgaaccctgactgcaacatcagcatcatctggaacttatgcgaaatgcagatcctcaggcctcagcccagaaccaactgagtcagaaactcaggtgggcacagcaatatgtgttttaaaacaagctcttcagatgatgcccattggctgggcacggtagctcacgcctgtaatcccagcactttgggaggccgaggcaggtggatcacgaggtcaagagattgagaccatcctggccaacatggtgaaactttgtttctattaaaagtaaaaaaattagctgggcatggtggcacgcacctgtagtcccagctacttgggaggctgaggcaggagaatygcttgaacccaggaggcagaggttgcagtgagccaagatcgcgccactgcactccagcctggcaataatgatgcccattaaagttta

SEQ ID NO: 440191 - DNA, 570 bp, Homo sapiens
attgcttttgcagtcttggattatttttcttctgaaatcagtaacattttgttcatacagtaagtcaggatacctataaagtaaaaggaggaaaatattgctctatgtaattttaaccacgtttgaaagcaatgtttctcaaagtgaaccctgactgcaacatcagcatcatctggaacttatgcgaaatgcagatcctcaggcctcagcccagaaccaactgagtcagaaactcaggtgggcacagcaatatgtgttttaaaacaagctcttcagatgatgcccattggctgggcacggtagctcacgcctgtaatcccagcactttgggaggccgaggcaggtggatcacgaggtcaagagattgagaccatcctggccaacatggtgaaactttgtttctattaaaagtaaaaaaattagctgggcatggtggcacgcacctgtagtcccagctacttgggaggctgaggcaggagaatcgcttgaacccaggaggcagaggttgcagtgagccaagatcgygccactgcactccagcctggcaataatgatgcccattaaagttta

SEQ ID NO: 440192 - DNA, 615 bp, Homo sapiens
tatgaggcatggcagtaagcactttattttatattatttcactaaattctcataatcacaatccaaaatattcttatcccacttttcagatagggaaactgaaattctgcaatttaagcaatttgcccgtagtcacccaattagcatgtggcaaagtcaacatcaaaattgtttccaacaagtcaattatgctgcaaacaaaatgtctgcctacaataattgggacattttcagtgtttaagtaaaatataaactttttaatatctaagagcaaatacacataaacacatccaatagtcatttaaaaatattctagytaacaataaaatcaattattttattctatcttaataggagattaacatttatttggggcccatgatttcattactagtgagcatattggaatattcaattcaaatgagcaacaaacagtaggatcagtacacatttattttgacctccaagtcattacatacattacaacacaatatgcctatgaagaataattaacctcttcatttttttacttttagtagtttttggcactaacttaatgtttatcaagaaaaataaatataatattctatgtcactattcatttaattccacaaa

SEQ ID NO: 440193 - DNA, 531 bp, Homo sapiens
tattagaccttccctgaatctctgtgttcctcaccaaaaatatattggacaaatgattggtgaatatgaagcactttataaacctggataatactatataaatgctgtttgtatggttgagtattagataatcatattggattctctaaaactgaaaacttgacctagggatagtctttaacttagtgtatggaccctgtgctaatgtagaagacaacagtttataatgtaaayagtcacgttaaaattaatcttatccagcaagttattgttttttctattaaatattgaactcactgtttatgaagtgttgtgggtaccatctttactgtgtgaaatagaagtttaaaatacagttcttgaacccaaggcactaacagaaatttctgtaatggtggaaattttctgtgtctgtgctgttccatatggtagccactagccatagtagctattgagcaattgaagtgtccctaatatgaacagggaccacattttaaattttatttaatttaaatggatttgtacgtagtg

SEQ ID NO: 440194 - DNA, 522 bp, Homo sapiens
agcacatgtttcagagagcacggggttgggggtaaggttatagattaacagcatgccaaggcagaagaatttttcttagtacagaacaaaatggagtctcctatgtctacttctttctacacagacgcagtaacaatctgatcactttttcttttccccacatttcccccttttcttttcaacaaaaccgccgtcrtcatcatggcccgttctcgatggtcgctgtctcttctgagctgttgggtacacctgcagaaaggctgtcacttcacacttggaagattgctcagcggccaggcagaggcactcgtcacttcccagatggggtggcggccgggcagaggagctcctcacatcccagatggggcggccaggcagaggcactcctcacttcccagacagggcagccaggcagaggcactcctcacttcccagacgtggcggccaggcagaggcgctcctcacttcccagacaaggtggccgggcagaggcgctcctcacttcctagacggggcggccgg

SEQ ID NO: 440195 - DNA, 571 bp, Homo sapiens
acaactgaaacttgataagaacagtgagctttgtgttgttgtaacttaccctattcctattcttccttctcagctattcagcaccttgaaaatgaacagctcacaatcatggtgaaaaccagcagcctgtagagggaagaatggagctaagcttccttcaaagccctgttcccagaggattgttgtttttatctgttggtggttccctggaagaccacatccacaaagttgtctttatttaatctgactcagagctcattcagtgtaaacagccatatccttagggactgcattagtctttcttgcattactataaatgaatacctgatactgggtaatttataaagaaaagaggttttgcaggctgtacaagcatggcaccagcatgtcctcagcttctggtaaggcctcagggagcttacaatcatgrcagaaggcaaagggggagccagtgtgtcacatggcaagtgaagaaacaagagagggaggaggtggtgcaagaatcctttaaacaatcagttctcacatgaactaccagaatgagaactcatcattaccataggaggtcacc

SEQ ID NO: 440196 - DNA, 571 bp, Homo sapiens
acaactgaaacttgataagaacagtgagctttgtgttgttgtaacttaccctattcctattcttccttctcagctattcagcaccttgaaaatgaacagctcacaatcatggtgaaaaccagcagcctgtagagggaagaatggagctaagcttccttcaaagccctgttcccagaggattgttgtttttatctgttggtggttccctggaagaccacatccacaaagttgtctttatttaatctgactcagagctcattcagtgtaaacagccatatccttagggactgcattagtctttcttgcattactataaatgaatacctgatactgggtaatttataaagaaaagaggttttgcaggctgtacaagcatggcaccagcatgtcctcagcttctggtaaggcctcagggagcttacaatcatgacagaaggcaaagggggagccagtgtgtcacatggcaagtgaagaaacaagagagggaggaggtggtgcaagaatcctttaaacaatcagttctcacatgaactaccagartgagaactcatcattaccataggaggtcacc

SEQ ID NO: 440197 - DNA, 568 bp, Homo sapiens
tgattgagggcctaagtctatgttaaaggcagaaagaagaaaacttgatagaaaagaagcccttgtggatttcagcaaaaagacaggctgcagcatgttgttaccaagggtccttacttttttttctttgctttttatcgtagttctcraatgtgtgttggagatgtagaaagatgggattgctggctagcaaagatctgtgtaacacaagcttggtctccagtgacaggaggaactctaaatgcttccaggttagtacctgagaaaatcattgattaaatacaggaagaatgacacagcatattagaaaattcagacactctcttttctatttaagtgcactcatgatatcctagtgtcttggaactgggtgcttctgtgaatgtgaagtaccttaaatacatataaacttcctgttcaaacagtgcagtagggtggggggaagtctgaagagcttcatggaaagattcccctctttaattctaattctaatttattgccccagcccagatgattttgtgtaaaagtctttaaaactacaaaattccctaccccacaattatcacca

SEQ ID NO: 440198 - DNA, 471 bp, Homo sapiens
caaacacatgccaccacagccagctaatttttgtatttttagtagagatgtggtttcacaatgttggccaggctggtcttgaactcctgacctagtgatccgcccaccttggcactgccaaaatatggcctcaaggttcctcatgattaggcctctgactaaattccaagtgacttcctctactatttctttattacatttatacatgtaggttattctacccttccctattgtttcccatcctttcctttcatccatccatccatttaagtactcagagcccactatattgcaatgcaacatacacagtggtacataaaataaacaggasaaatacagttccagcccttgtgaaatttacactctgtagatggataaagatatggaactaattagacaactgtttaaatgcatttgatatataaaggagtctatgagaatataatgagggcttttactcctttattactt

SEQ ID NO: 440199 - DNA, 536 bp, Homo sapiens
ctttcaacaacagggaccaaaagtaaccgacaagctacctgatggcaggttgtttacaatggattcttccatcatcaggacagcaatttgacgttttcctgccccagtttcttcatcactatccatagatatactgaatgccttgtttacagtcatgatacctgatatggtttggatatgtgtgccctttaaatctcatgttgaaatgtcatttcctacctcattaatatatacatataactactatgtattcagaaaaaataaaaataaaaacagtttttttaaaaaagaaatgtggtctccrgtgttggcggtggagcctggtgggagttgtttggatcatgggagacagatccctcatgaatggtttggtgctatccccttcattagggaactgtagctctgagttcacatgagatctggttgtttagaagtgtgtggaacctcccccttttctctcttactcccactctcaccacgtaagacacctgctccatttttgccttctccatgatcgtaagctccctggggcctcc

SEQ ID NO: 440200 - DNA, 559 bp, Homo sapiens
aacctatgaggaaaaactgaatattttcagataaaaacaagaaagaagttatctgtgaaactgcttagcaatgagtggattcatcacacagagttaaaactttctattgattagtagattgggaacactctttttgtagattgtgtgaagggatttttaggagcctgacgaggcttatggggaaaaactgaatgccccagataaaaactagaaaaaaagctatctgtgaaagtgctttgtgatttgtcatttcatctcacagagttatacctttattttgattcagaagattgtaggcacttttttttgtagaatctctgaaagggatttgggggacaatttaggcctatggagaaaaaccamatatcccaaaataaaaattggaaagaagttatctgtgaaactgctttgtgatgtgtggattcatctcacataattaaacctttcttttgattcagcaggttggtaacagacattttgtaggatctgcgaagagacatttgggaacccattgaggcctatggggaaaaatggaaaatgcccagctaaaaactagaaa

SEQ ID NO: 440201 - DNA, 641 bp, Homo sapiens
tttttaatgaatataagtggtgtaattagaaggctgaaaagaatccttggaaacattagtttaatttgatagctaagaaactgaggagaagatacttattctttgtagcatattttctaaagtcatttcattgtctcaccaagaagtacttgcataaagccagttcgattctagcatctgttgaatatttaaggttgagtaaagtgggtgagtttaacagatattttcccttatttcttttaggcgaatgtggattgggaaagtcgacattaatcaactcattattcctcatagatttgtattctccagagtatccaggtccttctcacagaattaaaaagactgtacaggtatggatattagtattgttaattgatgataagctggaataatattaatacacacaaagcacatgttgtaacttttattatgcttccttagaggtaagatgcaaacttgggcttagccagtgtaagatgataaatatgacttcataaaatttaaaaaaaaaagaagtacagttaatcagaagaattatcttkactagaactttccaaatttgtcctaaggactctcctagagatggcactgtgacatagtaaccagttcccctggagttgtgctgtctagtatgatagtca

SEQ ID NO: 440202 - DNA, 514 bp, Homo sapiens
gctaggtgatgtgtggattcatgtcacagagttaaaacttccttttgactcagcagtttggaaatatttttttgtagaatctgtgaagggacattttggagtccattgatgcctgtgggaaaaaatcaaatatccccagatagaaacttgaatgaagctatctgtgaaactgatttgtgatgtgtggattcatctaacagagttaaaacttccctttgattcacaggttgaaaacactctctttgtagaatctgcaaaggaayatttcggagcccattgaagcattaagaataatccgaatatcctgagataaaaactagaaaggagctatctgtgaaactgcttggtgatgtatagattcaacccaatagttaagcctttctttttattcagcaggtggtaagcactgtttttgtagtatcttcaaagggacatttgggagcacaatgatgcctatggggaataactgaatatcccaaaataaaaattaaaaagaagctatctgtgaaactgt

SEQ ID NO: 440203 - DNA, 514 bp, Homo sapiens
gctaggtgatgtgtggattcatgtcacagagttaaaacttccttttgactcagcagtttggaaatatttttttgtagaatctgtgaagggacattttggagtccattgatgcctgtgggaaaaaatcaaatatccccagatagaaacttgaatgaagctatctgtgaaactgatttgtgatgtgtggattcatctaacagagttaaaacttccctttgattcacaggttgaaaacactctctttgtagaatctgcaaaggaacatttcggagcccattgaagcattaagaataatccgaatatcctgagataaaaactagaaaggagctatctgtgaaactgcttggtgatgtatagattcaacmcaatagttaagcctttctttttattcagcaggtggtaagcactgtttttgtagtatcttcaaagggacatttgggagcacaatgatgcctatggggaataactgaatatcccaaaataaaaattaaaaagaagctatctgtgaaactgt

SEQ ID NO: 440204 - DNA, 514 bp, Homo sapiens
gctaggtgatgtgtggattcatgtcacagagttaaaacttccttttgactcagcagtttggaaatatttttttgtagaatctgtgaagggacattttggagtccattgatgcctgtgggaaaaaatcaaatatccccagatagaaacttgaatgaagctatctgtgaaactgatttgtgatgtgtggattcatctaacagagttaaaacttccctttgattcacaggttgaaaacactctctttgtagaatctgcaaaggaacatttcggagcccattgaagcattaagaataatccgaatatcctgagataaaaactagaaaggagctatctgtgaaactgcttggtgatgtatagattcaacccaatagttaagcctttctttttattcagcaggtggtaagcactgtttttgtagtatcttcaaagggacatttgggagcacaatgatgcctatggggaataactgaatatcycaaaataaaaattaaaaagaagctatctgtgaaactgt

SEQ ID NO: 440205 - DNA, 596 bp, Homo sapiens
tttgggagcttattgaggcctatggggagaaaccaattacccccagataaaaattggatttttatgtgtggattcatctcatagatggatgtgtggattcttctcatagatgtgtggattcatctcatagagttaaaatgttcttttgattcagcaggttggaaacactgtttttgttaaatctgcaaaagtacatttgggagctcattgaggcctatggtgaaaaagaaaatgccttcaaatggaaacctaaagaaactatatgagaatctgttttgtgaagtgtggattcatgtcacagaattaaacctttcttttgattcagcactttggaaacactgtttttgtagaatctgtgaaacgacatttggaagaacattgagacctgtggtgaaaaagcatataattccatttaaaaactggaaagaatgctaactgtgaaactcctttgtgatgtgtgwgtgtatttatctcacagagttaaaccttccttttgactcagcagactggaaaatctttttgtagaatctatgaacggatatttgggagctctcagaggccgactgtaaaaaactgaatattcccagataaaaact

SEQ ID NO: 440206 - DNA, 571 bp, Homo sapiens
aatctgcaaaagtacatttgggagctcattgaggcctatggtgaaaaagaaaatgccttcaaatggaaacctaaagaaactatatgagaatctgttttgtgaagtgtggattcatgtcacagaattaaacctttcttttgattcagcactttggaaacactgtttttgtagaatctgtgaaacgacatttggaagaacattgagacctgtggtgaaaaagcatataattccatttaaaaactggaaagaatgctaactgtgaaactcctttgtgatgtgtgtgtgyatttatctcacagagttaaaccttccttttgactcagcagactggaaaatctttttgtagaatctatgaacggatatttgggagctctcagaggccgactgtaaaaaactgaatattcccagataaaaactagaaagaatctctctctgaaactgctttgtgatgtgtgtattcatctcacagagttaaacagttcttttgactcagcagtttggaaacactgtttttgtagaatctgtgaaatgacatatgggagcccattgaggcctacagtgaaaaagcgaa

SEQ ID NO: 440207 - DNA, 571 bp, Homo sapiens
aatctgcaaaagtacatttgggagctcattgaggcctatggtgaaaaagaaaatgccttcaaatggaaacctaaagaaactatatgagaatctgttttgtgaagtgtggattcatgtcacagaattaaacctttcttttgattcagcactttggaaacactgtttttgtagaatctgtgaaacgacatttggaagaacattgagacctgtggtgaaaaagcatataattccatttaaaaactggaaagaatgctaactgtgaaactcctttgtgatgtgtgtgtgtatttatctcacagagttaaaccttccttttgactcagcagactggaaartctttttgtagaatctatgaacggatatttgggagctctcagaggccgactgtaaaaaactgaatattcccagataaaaactagaaagaatctctctctgaaactgctttgtgatgtgtgtattcatctcacagagttaaacagttcttttgactcagcagtttggaaacactgtttttgtagaatctgtgaaatgacatatgggagcccattgaggcctacagtgaaaaagcgaa

SEQ ID NO: 440208 - DNA, 571 bp, Homo sapiens
aatctgcaaaagtacatttgggagctcattgaggcctatggtgaaaaagaaaatgccttcaaatggaaacctaaagaaactatatgagaatctgttttgtgaagtgtggattcatgtcacagaattaaacctttcttttgattcagcactttggaaacactgtttttgtagaatctgtgaaacgacatttggaagaacattgagacctgtggtgaaaaagcatataattccatttaaaaactggaaagaatgctaactgtgaaactcctttgtgatgtgtgtgtgtatttatctcacagagttaaaccttccttttgactcagcagactggaaaatctttttgtagaatctatgaacggatatttgggagctctcagaggccgactgtaaaaaactgaatattcccagataaaaactagaaagaatctctctctgaaactgctttgtgatgtgtgtattcatctcacagagttaaacagttcttttgactcagcartttggaaacactgtttttgtagaatctgtgaaatgacatatgggagcccattgaggcctacagtgaaaaagcgaa

SEQ ID NO: 440209 - DNA, 569 bp, Homo sapiens
ttttgattctttacagccataagtatattctttaatagtatagtcattgagaggtaacagttctagggtcattaatgaattcaagaaatattcaaaatgtttgctcaatgtattctgggacttaagagctacttctagaacctattcatgtttgactaattggcaaccacataatgccatcttatractgttttgatcttactttcaatgttagcctaatttaggtatgagactgggaaaaagctgatgtagtttggtataaatgttacaggaaaggggtctggatccaaaccccaagagaggtgtctggatcttgcacaagaaagaattgaggacgcgtccacagtgtaaagcaaaagcaagtttattaagaaagtaaagtggtgaaagaacagctactccacagacagagtagggcattcctgaaagtaaaaggaatgcgtccattgtaggtacagtacttgtatatatataatttaaaaaaatcacaggagatgtgctttgctacaagggcttgtgataaaggattgattttcataattactacattttgcaagaatcaatattat

SEQ ID NO: 440210 - DNA, 596 bp, Homo sapiens
ggtgggcggatcacgaggtsaggagtttgagccagcctgatcaacagggtgaaaccccgtctctactaaaaatacaaaaattagccaggtgtggtggtgggtacttgtaatcccagctactctggaggctgaggcaggggaatcacttgaacccaggaggcaggggttgcagtgacctgagatcgtgccattgcactccagtctgggcaacaagagcaagactctgtctcaaaaaaaaaatatataaatatatatgtatatataaaaatatataaatatttatatatatataaatatatatatgtatatatgcttattggctattcatatatcttccttggtggagtgtctgtttcagtttcgttttttccgtttttattgtattaatttttttttcttgtaagactctatattctacatacaaatcctttggaagatatatatgcgtatatatgtatatatatagtctcatagtcttaagcgtctcatttgacatggtgtttagacattatataagaactgtgtgtacagccagtttctaaataatgttcctgtcaagtacataaagtggcagccacgtggctactcaaggaaat

SEQ ID NO: 440211 - DNA, 596 bp, Homo sapiens
ggtgggcggatcacgaggtgaggagtttgagccagcctgatcaacagggtgaaaccccgtctctactaaaaatacaaaaattagccaggtgtggtggtgggtacttgtaatcccagctactctggaggctgaggcaggggaatcacttgaacccaggaggcaggggttgcagtgacctgagatcgtgccattgcactccagtctgggcaacaagagcaagactctgtctcaaaaaaaaaatatataaatatatatgtatatataaaaatatataaatatttatatatatataaatatatatatgtatatatgcttattggctattcatatatcttccttggtggagtgtctgtttcagtttcrttttttccgtttttattgtattaatttttttttcttgtaagactctatattctacatacaaatcctttggaagatatatatgcgtatatatgtatatatatagtctcatagtcttaagcgtctcatttgacatggtgtttagacattatataagaactgtgtgtacagccagtttctaaataatgttcctgtcaagtacataaagtggcagccacgtggctactcaaggaaat

SEQ ID NO: 440212 - DNA, 532 bp, Homo sapiens
catttgggagcacattgaggcctaaagtgtaaaactgaatatccccagattaaaactagaaagaagctatctgagaaactgctttgtaatgtgtgcatttatctcacagagttaaacctattttttgattcaatagtttggaaacactgtttttgcagaatctgcaaagggacacttgggagctcattgaggtcaacggtgaaaaagggataatttacagataaagagtatgaagaaactatcagagaaactgctttgtaatgtgtgcattcatctcacagagttaaacctttgttttgattcagtactttggaaacactgtttttgtagaatctgcataaggacattagggagcggtttgagtcctgtggtgaaaaagaaaatatcttcagataaacacttcaaagaagtygtctgagaaactgctttgggttgcttgcattcatctcacagagataaacctttcttttgattcagcaatttggatacactttttttgtaaaatctgtgaaaggacatttgggagagcatt

SEQ ID NO: 440213 - DNA, 558 bp, Homo sapiens
ttgtgacatgtgtatttatctcacagtgttacaccattcttttgattcaccagtttggaaacactgttttcatggaatctgtgaaaggacatttgggagcrctttgaggcttatggtgaaaaagcaaatatcttcagataaaaacttgaaagaagctatctgagaatctgctttgtgacttgtgcattcttctcacagagttaaacctctcttttgattcagcagtttggaaacactgttttctagagtctgcaaaagaacatttgggagctcattgagaccaatagtgaaaaaggaaatttccccagaaaaaaaaaactggaaagaacctatgtgagaaacagctttgttatgtgtgcattcagttctcatagttaaacgtatgttttgatgaagcagtttggtaacactgttattgtggaacgtgagaaagtacatttgggagctcattcaggccaatggtgaaaaagcaaatatctctagttaaaaaacagaaagaagttatctgagaaactgtcttgtgatgtgtgtattcatctcatagagttaaacatttct

SEQ ID NO: 440214 - DNA, 558 bp, Homo sapiens
ttgtgacatgtgtatttatctcacagtgttacaccattcttttgattcaccagtttggaaacactgttttcatggaatctgtgaaaggacatttgggagcgctttgaggcttatggtgaaaaagcaaatatcttcagataaaaacttgaaagaagctatctgagaatctgctttgtgacttgtgcattcttctcacagagttaaacctctcttttgattcagcagtttggaaacactgttttctagagtctgcaaaagaacatttgggagctcattgagaccaatagtgaaaaaggaaatttccccagaaaaaaaaaactggaaagaacctatgtgagaaacagctttgttatgtgtgcattcagttctcatagttaaacgtatgttttgaygaagcagtttggtaacactgttattgtggaacgtgagaaagtacatttgggagctcattcaggccaatggtgaaaaagcaaatatctctagttaaaaaacagaaagaagttatctgagaaactgtcttgtgatgtgtgtattcatctcatagagttaaacatttct

SEQ ID NO: 440215 - DNA, 558 bp, Homo sapiens
ttgtgacatgtgtatttatctcacagtgttacaccattcttttgattcaccagtttggaaacactgttttcatggaatctgtgaaaggacatttgggagcgctttgaggcttatggtgaaaaagcaaatatcttcagataaaaacttgaaagaagctatctgagaatctgctttgtgacttgtgcattcttctcacagagttaaacctctcttttgattcagcagtttggaaacactgttttctagagtctgcaaaagaacatttgggagctcattgagaccaatagtgaaaaaggaaatttccccagaaaaaaaaaactggaaagaacctatgtgagaaacagctttgttatgtgtgcattcagttctcatagttaaacgtatgttttgatgaagcagtttggtaacactgttattgtggaacrtgagaaagtacatttgggagctcattcaggccaatggtgaaaaagcaaatatctctagttaaaaaacagaaagaagttatctgagaaactgtcttgtgatgtgtgtattcatctcatagagttaaacatttct

SEQ ID NO: 440216 - DNA, 522 bp, Homo sapiens
acaaagattttacctgataaactgctttgtgacatgtgtattcacctcatattgttaaaactttctttggattcagcagtttggaaacacaatttttgtagaatatgtgaagggatattttggagggcattgatgcctatggtgaaaaagttaatatctccagacaaaaacaagaaataagctatgagaaactgatctgtgatgtgtgctttcatctcacagagttaaagctttcttttgatccagcattttgaaasagtgttttcatagaatctgtgaaaggactatttgggagctaatagagttcaatggtgaaaatgcagatatcaccagataaaaagtagaaggaagctatgagaaaaacatctttgttatgtgtgcattcatctcacacagtgaaacctatgttttgattcacctttttggaaacactgtttttgtaggatccatgaaggacatttgggagtgctttcagggcaatggtgaaaaagtgaatatatccaaacaaaaacaagaaagaag

SEQ ID NO: 440217 - DNA, 522 bp, Homo sapiens
acaaagattttacctgataaactgctttgtgacatgtgtattcacctcatattgttaaaactttctttggattcagcagtttggaaacacaatttttgtagaatatgtgaagggatattttggagggcattgatgcctatggtgaaaaagttaatatctccagacaaaaacaagaaataagctatgagaaactgatctgtgatgtgtgctttcatctcacagagttaaagctttcttttgatccagcattttgaaagagtgttttcatagaatctgtgaaaggactatttgggagctaatagagttcaatggtgaaaatgcagatatcaccagataaaaagtagaaggaagctatgagaaaaacatctttgttatgtgtgcattcatctcacacagtgaaacctatgttttgattcaccwttttggaaacactgtttttgtaggatccatgaaggacatttgggagtgctttcagggcaatggtgaaaaagtgaatatatccaaacaaaaacaagaaagaag

SEQ ID NO: 440218 - DNA, 533 bp, Homo sapiens
ctttgtgatgtgtgcatttatcttgttgtgggaagtcaggaaccctgaatggagggaccagctggagccatgcagaagaaagtaaattgtgaagatttcatggacaattattcagttcccaaataaaactttcataatttcttatgcttgtcttactttaatctcttaatcctgttatcttcataagctgaggatgtacatcacctcaggatcactatgataattgtgtaatctgtacaaattgactgtaaaatatgtgtgttggaagaatatgaaatcagtgcaccttgaaaaagaacagaataacagcgaattttagggaacaaggaaagaaaaccataaggtttgactacctgcatggtcaggcaaaaagagccatatttttcttcttgcagagarcctataaaaggatgtgcaagtagggaagataatgataaattcttttcctagcaaggaatattgatattaatgctctgggaaaagaattccatttctgggggaggtctataaatggccactctgggaatgtctgt

SEQ ID NO: 440219 - DNA, 578 bp, Homo sapiens
tgatctttgtgacctactccctgttcttacacccctccccttttgaaatccttaataaaacctgctggatttgtggctcaggtgggcatcaaggtcctaccaatatgtgacatcacccctgttggcccagttataaaattcctctctttgtactctttttctttatatctcagactgactgacacttatggaaaatagaaagaacctatgttgaaatagtgggggtgggttcctacgatatcatctcrcagagttacaccactcttttgattcatcagtttggaaacactgtttttgtagaatctgtgaaagaacatttgggagctcattgaggccaatggtgaaaaagcaaatatccagagacataaactagaaagaagctatgtgagaaacagctttgttatgtgtgcatgcattcagcttgcacacttaatcctatgttttcatacagcagtttggaaacactgtttttgtagaatctgagaaatgacatttggaaactcattcagaccaatggtgaaaaagtgaatatctccagttaaagaccggaaagaagttacctgaaaaactgcagtgta

SEQ ID NO: 440220 - DNA, 455 bp, Homo sapiens
atgatttaattttctataatattcagcaaggataacataaaattgaagaatgcatagaagtattcaatccctaatttcttctgtatgtttatcgactttcaaaatggaggcctactcattcctggaggatgctgatataaatgatggtgaagctgctgatggcaaggaggtaaaagatacctcagaagaaatgaggtctaaccttgtagttcctagcattttgattttargtcattttgtattgttttgtatatgttttgccaaagccagaacaagatactttatatagtctcagtgaaagcagcaacaactcatatttaataagcatttaatatgaacaggaggtggtgttgagtgctctacagacattatctcatgtattgtctcataagtaaagagtgcttttattctcatgtttttgacaagaaagttggctggcagagaggttaagtaac

SEQ ID NO: 440221 - DNA, 346 bp, Homo sapiens
ggggtacaatttctgcaatattggaaaaaatattaccctctctcccactgcatattaggaaagctatcacagagtgggtgttcacctcctgcaatatagggagtgatatcatcttctccccttctgaatakcaggaacagtatcacatgggggtgtacacttccggcgatattgggagtaatatcaacctctcggcctctgaatattaggaacaatatcacagggtgggtgtacacctcctgctctattatggggagaaatatatatctattatggggagtaatatcatcctctccctttcaggatattaataagaatatcacacggtgggtgaacacagcctgcg

SEQ ID NO: 440222 - DNA, 483 bp, Homo sapiens
tttgatcaggttagagaggaggaagctcgaatattggaaatcttgaaaagaggttacgttaatcaaaagagggttttggcctccatgtttgcaatacgttgagaaatgagtaaaaagctcatactttggtgaagtcagacacaaaagtttgtaataagaaagcaggggttgtggggtaggggagggatagcattagaagaaatacctaatgtagatgacgggttgatgggtgcagcaaaccaccatggcacatgtatacctatgtaacaaaccagcacgttttgcacatgtatcccagaactcaaagtataamtgaaaaaaaaaagaagaagaaagaaaagaaaaagtgagaatgattaacataaaagtcagatcatgattacctccaggagaaaggagaggagtgtgattagcaagagaaataaagtggacttaaaaaaaagaaagaaagaaagaaatcaggtgggagaaatcaagaatgaa

SEQ ID NO: 440223 - DNA, 483 bp, Homo sapiens
tttgatcaggttagagaggaggaagctcgaatattggaaatcttgaaaagaggttacgttaatcaaaagagggttttggcctccatgtttgcaatacgttgagaaatgagtaaaaagctcatactttggtgaagtcagacacaaaagtttgtaataagaaagcaggggttgtggggtaggggagggatagcattagaagaaatacctaatgtagatgacgggttgatgggtgcagcaaaccaccatggcacatgtatacctatgtaacaaaccagcacgttttgcacatgtatcccagaactcaaagtataacygaaaaaaaaaagaagaagaaagaaaagaaaaagtgagaatgattaacataaaagtcagatcatgattacctccaggagaaaggagaggagtgtgattagcaagagaaataaagtggacttaaaaaaaagaaagaaagaaagaaatcaggtgggagaaatcaagaatgaa

SEQ ID NO: 440224 - DNA, 564 bp, Homo sapiens
agtagtttgaatgcctttctgcacattataacaccttgaaagatttgtaaaaatattaattataggctccaccaatttatctaattggtattaggtgtggctcaggcattgccctggcttaagctctttaagccatcctaatcctaatgcagaattagggtggagaactactttttaaaattggatcatatgtatcctttcaatattgtaacaatagcacactcatccttttatttttataagagaggataacttaattttagttttcagatagcttttttttttttttttacacaacagcttttctgtcttaaaatatatttaactatagttctttagtgtgctttttatttgtctacagctattgaggagttcttggggcttaactgtatcattgttttccatataaataagtttaggaaagagacattagcattgtgattttaaggaataaaaccttcagggrcaaaatataagctacttaaagtaattagcataataatacattacatgatcaggctgacaaaagaataacattttgctcattaattcagattctcagaa

SEQ ID NO: 440225 - DNA, 526 bp, Homo sapiens
atgcttctttcttatattgcccattttatttgcgtggagagaggcaggtgaaaccacccactgaagccagtgttaactgtgatactgctaatagagcagactccatctgataaaataatacactaactctgtgtgtgtgtgtgtgtgttacatatgttcttagacccactactttccaacagagtcatgtcctaaataatgattattccaagatgtagattgatcctgaatataagtagcaataattcatccctaccattttttctctagcctyagtttaatattccagacctatctgtattttcactatgccaattataatttccaaactctgacttctcttacatactctgcagggaatcattaagtttttagaaaaagcctgttgactggtatttactctaagtgaataaaagtattaatattttgcacagatataagaaagcatgaaaatcagtcagtgatgtgaactaatgtgctgacttcacaatattctttgacatctattctaagaactgggccttat

SEQ ID NO: 440226 - DNA, 508 bp, Homo sapiens
tgagattcaattattgcaccataactagcctatttttggtgtcaaggagaagaagtgggttgcataattcaggaaggagaagaaagatacacccatgttctccccatccatatctgatgcagaagaggcctaagaaaactttcagtacttttctctcttcctttcctacattctttatctatttatcttagtttctactactattttcactgcttttctttactaatactgtttgcaaatcatttgtctcatcataatcaaaayttccataactcaactaattattgacttattgaaattcccatataccattgattattaaatttactcatatcatatgaggacagtatctaatttctcatgccagccaactgaattttcatttcaaaaaactatattttttgtataagggttaaaatagaaactcagatattatagaaagatatatatatttgggcagagatctcaaaagatgggacaggccttgtctgaaattcaaacatcagaa

SEQ ID NO: 440227 - DNA, 291 bp, Homo sapiens
gcaaatcatttgtctcatcataatcaaaacttccataactcaactaattattgacttaytgaaattcccatataccattgattattaaatttactcatatcatatgaggacagtatctaatttctcatgccagccaactgaattttcatttcaaaaaactatattttttgtataagggttaaaatagaaactcagatattatagaaagatatatatatttgggcagagatctcaaaagatgggacaggccttgtctgaaattcaaacatcagaataagcctccatatgtgc

SEQ ID NO: 440228 - DNA, 291 bp, Homo sapiens
gcaaatcatttgtctcatcataatcaaaacttccataactcaactaattattgacttattgaaattcccatataccattrattattaaatttactcatatcatatgaggacagtatctaatttctcatgccagccaactgaattttcatttcaaaaaactatattttttgtataagggttaaaatagaaactcagatattatagaaagatatatatatttgggcagagatctcaaaagatgggacaggccttgtctgaaattcaaacatcagaataagcctccatatgtgc

SEQ ID NO: 440229 - DNA, 572 bp, Homo sapiens
ctttcttcttggatttactagtgatgcttatgatgacatgatattaagtttattattcagatatactcctttagttagtttaatgttggaaaatgttggtctgcatacttacttgctttgtcaaaagtggctttaaaacagtatttcaaccaacagaacctgaaatttctgactcccaaccacttgtctctctatgtatctgtctgtctttattgtttttcaactgaattgaggtatgtttttgtgtttcttwaataaataccttgggtcatctgtcaggtggaagtttaatgttttaagaaacttgcagatttcttggttttccaacgtggtactatttgacatgcatatcagcagtttataagagttcaaattgttccatatggttatcaataccaactattgttagctttttaattttaaccattcttaaccattctcatgggagtgtagtagtatattgctgtggttttactttggattttcctaatgagacacatgcatttcatgcacttataacttacaacttcttttgaaaaatatctgctgagatctacctatttttttgaagc

SEQ ID NO: 440230 - DNA, 544 bp, Homo sapiens
acccaggtattcatttggctctcctatatttccttcatgccctagaaagctgtcttttgcaactcatccaaagtatctcccaaccgtcatatctcagtctctttatcctgttttgtttttctgtttaacatttatcacacttttcatatacttacttattgcctctcttttaatagaatatatccttaataagggcaaaggcttcactgctttactgtaccctrtatctttctcatttttagctgctttgtttactaaagcccatttcccagtagatttctaaaaagaggatcttaagagataattatttgaagctttgcatatatgaaaatgtcgtcaatctatcatccacctacacataataatgaaggcactgttttataaaatctagtgtgctgctaagaaacgataccattttttccctcttttttgtcactgtaacttttttccttcttcatttctggacactaagctcttctttgttcctgttttcctgaaactgctgggaaatgtaccttagtgtgggcctcttccctttcattat

SEQ ID NO: 440231 - DNA, 642 bp, Homo sapiens
aaacatgtggtggctgacacctgtaatcccagcactttgggagaccaaggtgagtagatcacttgaggtcaggagttcgagacaagcctggccaatatggtgaaaccctgtctctacccaaaaatacaaaaaattagcatggcatggtggcgtgtgcctgtagtctcagctacttgggagcctgaggtgggagaattgcttaaaccctggagrtggaggttgcagtgagccgagatcacaccactgtactccagcctggcaacagagtgagaccctgtctcaaaaaagaaaaaaaaaattatgtatatatacacatgtaaccaagaagaccagcatatggtaatagctggtgtaaaaaaaatggctaaacccaatagtgaaataatagctttgccactaattcaaagactaaattcagagatgtcatccatcaaaggaacactattttctgaaaatagtgataggtatattgaaaagagctctgcagttaaagacatctaggagatactgaatacaatttaataaacagaaaaaagtaatgaacaaatgatggattaaatacagaatattgaatttgccctatgtttgattcctagaaacctgctaatgaaaatgattaaaataattccagatgaattgtta

SEQ ID NO: 440232 - DNA, 649 bp, Homo sapiens
atcacaacaagttatggggggagaattgtttttataccatgcagaacactccctatccactggtgattgtcaaatattgtggtctaagaagagcaccatagacaaaaattcaaaaacacacagaagaaaagggaaaaaatactttgctactctcttgaattattcttagtgggtcttactaacaaaactacaaaaagaaatgcaaactttacatattatctcaaaatgaatctgtaaggcaaaactacagcaataacgggaatggtgctaggaaagctggtggagtgtttgtgaatgtgtgtgtgtgtttgtgtgttgtgcttgtgtacccaactaaaacacagcatcctaaatattttcaagtttaaaattctaattattcattataaaagcacaatacaataaaaaagaagcccttctttaaactctggccaaggtccctctagcagaaggattctaacaagaatgaagataraaagatgtctgtgaattctcaaaaattcacttgaaatttatgttgcatcccctcaccttgctcagtaaccatgttttgttaacactgttgagccttgttgactcctggtgactggaatatgttgttaactaaactgctggaagttctagtgcttgcagctaatgcattctcaga

SEQ ID NO: 440233 - DNA, 652 bp, Homo sapiens
ttacacattcatattacttttaataattattcatatttttcatagttttacttcctgcatctgatccatcagtgcactctggctgctgtaactctaaaacatatttaaaattaaatcacttctcacccttctattgttactactgtggtctgagctaccaggcaacagccacctagcatgatctgtcatttcaattactgtctcctaattgatcattgttcttgcataattttggtgtgttttaacagagcatccataatggtaccattagatcacatcagctccatcctcaaaatattccagtgttccctatctgctttagagtaaaggataagtctttacaatgatttacaaggcattaagcagcctctctcttatgccccattacatttctgatctcatttactaaaattatttttttcaatctctgtgctccaggcacactcmcctcttagctgtttaagcatgccagtcacactcttacctcaagactttcgcacttgttattcattctgcctagagtgttcttcctcctgataaccatttggctttctttgggttgtctctctcatatcattttctaagtttaacctccccttcttactctatttgaaaacccaccactccattactttctaattctctttatttt

SEQ ID NO: 440234 - DNA, 418 bp, Homo sapiens
tactaaaattatttttttcaatctctgtgctccaggcacactcacctcttagctgtttaagcatgccagtcacactcttacctcaagactttygcacttgttattcattctgcctagagtgttcttcctcctgataaccatttggctttctttgggttgtctctctcatatcattttctaagtttaacctccccttcttactctatttgaaaacccaccactccattactttctaattctctttatttttcttgttagcacctcttaatatgtattatttatttacccaaatagaacacaactccatgagggaaattagtttcttatgttttgttcactgttttataccagtgtttagtacagtatatgaaacatagaaagtagatgctcagtaaatattcatttaacatttttccta

SEQ ID NO: 440235 - DNA, 418 bp, Homo sapiens
tactaaaattatttttttcaatctctgtgctccaggcacactcacctcttagctgtttaagcatgccagtcacactcttacctcaagactttcgcacttgttattcattctgcctagagtgttcttcctcctgataaccatttggctttctttgggttgtctctctcatatcattttytaagtttaacctccccttcttactctatttgaaaacccaccactccattactttctaattctctttatttttcttgttagcacctcttaatatgtattatttatttacccaaatagaacacaactccatgagggaaattagtttcttatgttttgttcactgttttataccagtgtttagtacagtatatgaaacatagaaagtagatgctcagtaaatattcatttaacatttttccta

SEQ ID NO: 440236 - DNA, 418 bp, Homo sapiens
tactaaaattatttttttcaatctctgtgctccaggcacactcacctcttagctgtttaagcatgccagtcacactcttacctcaagactttcgcacttgttattcattctgcctagagtgttcttcctcctgataaccatttggctttctttgggttgtctctctcatatcattttckaagtttaacctccccttcttactctatttgaaaacccaccactccattactttctaattctctttatttttcttgttagcacctcttaatatgtattatttatttacccaaatagaacacaactccatgagggaaattagtttcttatgttttgttcactgttttataccagtgtttagtacagtatatgaaacatagaaagtagatgctcagtaaatattcatttaacatttttccta

SEQ ID NO: 440237 - DNA, 597 bp, Homo sapiens
taaggtatttttaacaaataaaatatgtatacattcaagatgtacaatgtgattatacgtatatatgtacacacacacacattgtgaaatggtaaccataatccaactaacacatcctttactacagttaccattgtgtggtgtgtgtatgtctgtgtgtgtgtgtgtgtgtgtgtgtgtgtgtgatgaaaacacgtaagatctactcttttaccaaatttcaagtaaacagtatggtaatgtactgtactgtaatatacagtatagtcaccaagctgtacatcaccggaacttatttgtcttattactgaaagtcctccataattttggtacctattaccaatgtmttcaactattttagctattgcttctaaaattttcacaaaatttattaataagatatttttactccatatcttaatttttcagtttcagatatcattcactgaactcctgctatgagaaaaatgggaatttcctttcttacaaccaaccacatcacttccagcatgccaaatgtatacaaacacagtgctcacaataaaattggtaaaatatttttactgaattggtatttattgtccatgtgcttattat

SEQ ID NO: 440238 - DNA, 366 bp, Homo sapiens
attttgtctggtataagaatagctactcctgcttttttttttttttaatttcccttggcatggaatatcttttaccatccttttattttcaatcaaatgtgtctttctaggtgaagtatatttctggtaggcaacagattgttgggacttttgttttttatgtattcagccactctatgtcttttgatgggaagagtttagttcatttacattcaaattattattgataagtaaggacttactcctgcctgtttgtttatttgttttcagattgttttgtggtcttcttttccttccttccttcctgtcctccttttagtgaargtgattttctttggttgtcttaatttctttcttttttttgta

SEQ ID NO: 440239 - DNA, 627 bp, Homo sapiens
ctttctagtttttaactagagatatttgctttttcaccataaacctcaatgtgcttcaaatgtcttttagcagattctacaaaaacagattttccaatgtgctgaataaaaacacagatttatctgtgatagctcaatgcaaacataacaaatcagttctcacatcacttctttctagtttatatctggggatattgtttttttcaccattggcctcaatgagctcccaaatgtctttttgtagtttctacaaatacagagtttccaaaacgctgaatcaaaacataggtgtwactcagttaaatgaatgcactcataacaaagcagtttcttacatagcatctctagtttttatctggggatattggctttttcacctttggcctcaatgagttgccaaatgtcctttcacctattgcacaaaaacagtgtttccaaactgctgaatcaaaagacaggcttagctctgtgagacgactgaacacatcacaaaggagtttttcactgagcttgtctttagtttctttctggagatattctcttattcaccataggcctcaatgagctcccaaatgtctcttaccagattctacaaaaacggtttccaaaccactgaaccaaaagaca

SEQ ID NO: 440240 - DNA, 627 bp, Homo sapiens
ctttctagtttttaactagagatatttgctttttcaccataaacctcaatgtgcttcaaatgtcttttagcagattctacaaaaacagattttccaatgtgctgaataaaaacacagatttatctgtgatagctcaatgcaaacataacaaatcagttctcacatcacttctttctagtttatatctggggatattgtttttttcaccattggcctcaatgagctcccaaatgtctttttgtagtttctacaaatacagagtttccaaaacgctgaatcaaaacataggtgtaactcagttaaatgaatgcactcataacaaagcagtttcttacatagcatctctagtttttatctggggatattggytttttcacctttggcctcaatgagttgccaaatgtcctttcacctattgcacaaaaacagtgtttccaaactgctgaatcaaaagacaggcttagctctgtgagacgactgaacacatcacaaaggagtttttcactgagcttgtctttagtttctttctggagatattctcttattcaccataggcctcaatgagctcccaaatgtctcttaccagattctacaaaaacggtttccaaaccactgaaccaaaagaca

SEQ ID NO: 440241 - DNA, 627 bp, Homo sapiens
ctttctagtttttaactagagatatttgctttttcaccataaacctcaatgtgcttcaaatgtcttttagcagattctacaaaaacagattttccaatgtgctgaataaaaacacagatttatctgtgatagctcaatgcaaacataacaaatcagttctcacatcacttctttctagtttatatctggggatattgtttttttcaccattggcctcaatgagctcccaaatgtctttttgtagtttctacaaatacagagtttccaaaacgctgaatcaaaacataggtgtaactcagttaaatgaatgcactcataacaaagcagtttcttacatagcatctctagtttttatctggggatattggctttttcacctttggcctcaatgagttgccaaaygtcctttcacctattgcacaaaaacagtgtttccaaactgctgaatcaaaagacaggcttagctctgtgagacgactgaacacatcacaaaggagtttttcactgagcttgtctttagtttctttctggagatattctcttattcaccataggcctcaatgagctcccaaatgtctcttaccagattctacaaaaacggtttccaaaccactgaaccaaaagaca

SEQ ID NO: 440242 - DNA, 360 bp, Homo sapiens
ttggtaaaatctgtgaaagaacatttggtagcaaattgaggcctgtggcaaataaargaatatccccagttaaaaattagaaagaagctatctgttaaatggctttgtgatgtgtggattcgtttcaaagagttaaaccattcttttcattcagcagtttgaaaacacagattttataggatctgtggagggacatttgagagctcattgagacctatggtaaagaagtgaatatccccagataaaaactagaaagaagctctctgtgaaactgctttgtgatgtttggattcatctcacagagtaaaacttatctttcattctgtctttcagattctgtgaagggacatttgggagctc

SEQ ID NO: 440243 - DNA, 411 bp, Homo sapiens
atctgttaaactgctttgtgatgtgtggattcatctcacactgtttaacatttcgttttattcagctctttggaaacactgtttttatatcctctgtgacaggatatttgggagtctcattgtggcctatgttaaataagtgaatatccccagataaaaactagaaacaagctctatgtaaaactgcattgtgatgtttggattcatctcacagagataagcctattttttgattcagcagtttggaaacactgtttttacagaatctgcaaagacacatttgggagctcattgaggccaaargtgaaaacgtgtgtatttccagataacaactcaaaggaagctatctgagaaactgctttgtgatgtgtgcattgacctcagggagttaaaactttattttgattcagc

SEQ ID NO: 440244 - DNA, 583 bp, Homo sapiens
acttttactagttgatgaagatattattaccaagtgcaatgtgagatgctttatttttcttgtttatatttttaatttgtatgggtacatagtagatgtatgtatttatgggttacatgaattattttaatacaggtatgcaatgtgtaataattacatcagggtaaatggggcatccatcacctcaagcatttgtactttgtattacaaacaatccaattatacttttagttactttaaaatgtacaattaaatttgtgttgactgtactccttttgttgtgttagcaaataaaagctcttattcattctctctatgtagtttttgcacccaataaccatccccatttgccttccacaccytcaactacccttatcagcatctagtaatgaacattctagtctctgtctccataagttcaataatttcaatttttagctcctacaaataagtgagaacatgtgaattttgtctttctgtgccgggtttatttcacataatatggttacctccagtttcatccacgttgttgcaaataacagaatctcatttttttaatggctgaataatagtctattgtgtc

SEQ ID NO: 440245 - DNA, 583 bp, Homo sapiens
acttttactagttgatgaagatattattaccaagtgcaatgtgagatgctttatttttcttgtttatatttttaatttgtatgggtacatagtagatgtatgtatttatgggttacatgaattattttaatacaggtatgcaatgtgtaataattacatcagggtaaatggggcatccatcacctcaagcatttgtactttgtattacaaacaatccaattatacttttagttactttaaaatgtacaattaaatttgtgttgactgtactccttttgttgtgttagcaaataaaagctcttattcattctctctatgtagtttttgcacccaataaccatccccatttgccttccacaccctcaactacccttatcagcatctagtaatgaacattctagtctctgtctccataagttcaataatttcaatttttagctcctacaaataagtgagaacatgtgaattttktctttctgtgccgggtttatttcacataatatggttacctccagtttcatccacgttgttgcaaataacagaatctcatttttttaatggctgaataatagtctattgtgtc

SEQ ID NO: 440246 - DNA, 477 bp, Homo sapiens
gaaagacatgaattttcatgttgaagtcacacagtaagtttataaaacaatggaaaaaattaggttcaccatagtccacatcacagtaaaaygtcagatcactggctttcagcaaaattctagggaaatgaaatgttttaggcctcaaaatggctttgggcgttttgaatagaatactgaaagcagaaagacagtgggctaatagctataaaattctgaaaaaaaaatctgtttttttccccatataaaacataagctctatcttggcagaagtaagagaagaaatgttgaagaggcagcagtggaagcatgccgaggagaaggacattatcaaatctgcaagtgaagttcagggcatgtgcagaaggaagtgaagaaatagagatgcgaatcccatctctctttgaattcaaattcttgaatcctacagccgaggaaaaaatggacctgattaaaaattccttaaggaaaattatt

SEQ ID NO: 440247 - DNA, 477 bp, Homo sapiens
gaaagacatgaattttcatgttgaagtcacacagtaagtttataaaacaatggaaaaaattaggttcaccatagtccacatcacagtaaaacgtcagatcactggctttcagcaaaattctagggaaatgaaatgttttaggcctcaaaatggctttrggcgttttgaatagaatactgaaagcagaaagacagtgggctaatagctataaaattctgaaaaaaaaatctgtttttttccccatataaaacataagctctatcttggcagaagtaagagaagaaatgttgaagaggcagcagtggaagcatgccgaggagaaggacattatcaaatctgcaagtgaagttcagggcatgtgcagaaggaagtgaagaaatagagatgcgaatcccatctctctttgaattcaaattcttgaatcctacagccgaggaaaaaatggacctgattaaaaattccttaaggaaaattatt

SEQ ID NO: 440248 - DNA, 577 bp, Homo sapiens
gaggactgacatcatataacttctatgtttttaccaaccatttatagaaccaacaaaactactgtaaattctattccacaaaaataaggaattagctcttwcatggctataaacttcaatcttcatttatgaaggggaaaaaaaacgaaagtagactggtaaaggagaagtcttgagatttaggaattaggcaaacttatcaggggagcgaatgagcattactatgtccccatatttccacataatatactgcatgctttcaaggagtaattttagatagtatttgaattattacttaaataataaagggctttctaattctcctccctagaagtaatcaatttctactgtggtagccaccaaaattacctttaatatcatttaattttgaaaattgtaaccatgatttaattaaaatatatattcattttaaaaagaaattttaaatctaccagtctgcataaaagtagggtttttttctaaatcacttaaaagctggacttcaaggcttaaaaagcctcctataattgtatttccttcagaatacccattcctcctctaattaaaaatctttaag

SEQ ID NO: 440249 - DNA, 577 bp, Homo sapiens
gaggactgacatcatataacttctatgtttttaccaaccatttatagaaccaacaaaactactgtaaattctattccacaaaaataaggaattagctcttacatggctataaacttcaatcttcatttatgaaggggaaaaaaaacgaaagtagacyggtaaaggagaagtcttgagatttaggaattaggcaaacttatcaggggagcgaatgagcattactatgtccccatatttccacataatatactgcatgctttcaaggagtaattttagatagtatttgaattattacttaaataataaagggctttctaattctcctccctagaagtaatcaatttctactgtggtagccaccaaaattacctttaatatcatttaattttgaaaattgtaaccatgatttaattaaaatatatattcattttaaaaagaaattttaaatctaccagtctgcataaaagtagggtttttttctaaatcacttaaaagctggacttcaaggcttaaaaagcctcctataattgtatttccttcagaatacccattcctcctctaattaaaaatctttaag

SEQ ID NO: 440250 - DNA, 550 bp, Homo sapiens
tccacataatatactgcatgytttcaaggagtaattttagatagtatttgaattattacttaaataataaagggctttctaattctcctccctagaagtaatcaatttctactgtggtagccaccaaaattacctttaatatcatttaattttgaaaattgtaaccatgatttaattaaaatatatattcattttaaaaagaaattttaaatctaccagtctgcataaaagtagggtttttttctaaatcacttaaaagctggacttcaaggcttaaaaagcctcctataattgtatttccttcagaatacccattcctcctctaattaaaaatctttaagtattgttgagactaaagtaattctttcagaaattttgcattttcaattttatgctgctattttgagccataatactcttctaagtattatcaaattgtattggataatctgtgttactccatgtggtactggaatatgtatagtcacactttaaataaggcacttccaaaaattaatcctactatttctagaattgttttacccttgat

SEQ ID NO: 440251 - DNA, 577 bp, Homo sapiens
gaggactgacatcatataacttctatgtttttaccaaccatttatagaaccaacaaaactactgtaaattctattccacaaaaataaggaattagctcttacatggctataaacttcaatcttcatttatgaaggggaaaaaaaacgaaagtagactggtaaaggagaagtcttgagatttaggaattaggcaaacttatcaggggagcgaatgagcattactatgtccccatatttccacataatatactgcatgctttcaaggagtaattttagatagtatttgaattattacttaaataataaagggctttctaattctcctccctagaagtaatcaatttctactgtggtagccaccaaaattacctttaatatcatttaattttgaaaattgtaaccatgatttaattaaaatatatattcattttaaaaagaaattttaaatctaccartctgcataaaagtagggtttttttctaaatcacttaaaagctggacttcaaggcttaaaaagcctcctataattgtatttccttcagaatacccattcctcctctaattaaaaatctttaag

SEQ ID NO: 440252 - DNA, 550 bp, Homo sapiens
tccacataatatactgcatgctttcaaggagtaattttagatagtatttgaattattacttaaataataaagggctttctaattctcctccctagaagtaatcaatttctactgtggtagccaccaaaattacctttaatatcatttaattttgaaaattgtaaccatgatttaattaaaatatatattcattttaaaaagaaattttaaatctaccagtctgcataaaagtagggtttttttctaaatcacttaaaagctggacttcaaggcttaaaaagcctcctataattgtatttccttcagaatacccattcctcctctaattaaaaatctttaagtattgttgagactaaagtaattctttcagaaattttgcattttcaattttatgctgctattttgagccataatactcttctaagtattatcaaattgtattggataatctgtgttactccatgtggtactggaatatgtatagtcacactttaaataaggcacttccaaaaattaatcctactrtttctagaattgttttacccttgat

SEQ ID NO: 440253 - DNA, 587 bp, Homo sapiens
aatatcacttcattataatacccatattttatttaacaatgcaaaacaccacctagccaacaatatatatttttaaaactataaaaccaaaaacccacaactataaaactccacatgtaactaagactttcagacaaataaatgtattataaagttttcctgtaattatttgtatttaaaatagttaatagggagcagctgagtcttctcttccattcaaaatgtttattttaactctaagcaattaagttggaatggtcaacaaataaagagtaaaagtaatttagaataagagtgatattttttccatgatattagggaaaattaaatgtccttgaaactaccattaaactgaatttaataacctgatatactaaacaggaaaggagaaaaaaagtggtctatattaacattactagacagctacagagtaattccactgaaattcacaattggttggggggaaattggagaactttatcataatatttgaattggttttgttaattcaaaaaagcaaaatwcaaaggtgaattttatttgtaagaatgctgtgtaatggagtcaatctggaaaatattaataaa

SEQ ID NO: 440254 - DNA, 617 bp, Homo sapiens
cttaattcaatgaaaacaaagtagaatttgtttaatagaaacttggctcattctactgycgtatgcttctagacgaatgaatgatgttcactgaaatctagaagatgactatattttgggccacttttcttttccctaagtaaagtgacctgtatagaataagaaaataaaaattataattaaaatcacaataatgctatgacagaggtcctaatttcggggaaagtttaataattttaggaatataaatttgatgatttcttttccagaaacataccattgaaagacacattaaatctctgaatatatattttcaggatatgtaagtatttcataatagtaaagcttttgttatagacagcgccctgagtaaaatgatacagtctgttaataataatttttcaaagaggattttgtcatatactgagaatgcaaagaacaagttaggattcataattcatttttgcattttttattaaatatatgccgacacattcaagaagtctcatttacttagatattaagaagtattttagagtacataagtggaagaaagacaatagcacaataatctcattcactatgatgaaatatcaagtgtacgtggcatggaaatt

SEQ ID NO: 440255 - DNA, 617 bp, Homo sapiens
cttaattcaatgaaaacaaagtagaatttgtttaatagaaacttggctcattctactgccgtatgcttctagacgaatgaatgatgttcactgaaatctagaagatgactatattttgggccacttttcttttccctaagtaaagtgacctgtatagaataagaaaataaaaattataattaaaatcacaataatgctatgacagaggtcctaatttsggggaaagtttaataattttaggaatataaatttgatgatttcttttccagaaacataccattgaaagacacattaaatctctgaatatatattttcaggatatgtaagtatttcataatagtaaagcttttgttatagacagcgccctgagtaaaatgatacagtctgttaataataatttttcaaagaggattttgtcatatactgagaatgcaaagaacaagttaggattcataattcatttttgcattttttattaaatatatgccgacacattcaagaagtctcatttacttagatattaagaagtattttagagtacataagtggaagaaagacaatagcacaataatctcattcactatgatgaaatatcaagtgtacgtggcatggaaatt

SEQ ID NO: 440256 - DNA, 617 bp, Homo sapiens
cttaattcaatgaaaacaaagtagaatttgtttaatagaaacttggctcattctactgccgtatgcttctagacgaatgaatgatgttcactgaaatctagaagatgactatattttgggccacttttcttttccctaagtaaagtgacctgtatagaataagaaaataaaaattataattaaaatcacaataatgctatgacagaggtcctaatttcggggaaagtttaataattttaggaatataaatttgatgatttcttttccagaaacataccattgaaagacacattaaatctctgaatatatattttcaggatatgtaagtatttcataatagtaaagcttttgttatagacagcgccctgagtaaaatgatacagtctgttmataataatttttcaaagaggattttgtcatatactgagaatgcaaagaacaagttaggattcataattcatttttgcattttttattaaatatatgccgacacattcaagaagtctcatttacttagatattaagaagtattttagagtacataagtggaagaaagacaatagcacaataatctcattcactatgatgaaatatcaagtgtacgtggcatggaaatt

SEQ ID NO: 440257 - DNA, 591 bp, Homo sapiens
tcacttttctggactgttcaagttcaaattaactttggggaatggaaagccagtctcactgattggagagtggaatctttcaggcagagtgagtctcatgaggtcaacctggccagcatcctgcttttgggcaggatatacataaaagacactggaaaagtgaccatcctatggcagatatccctcaaaaaggcatatttaactttaatgaaataacasttcagggctgaacttacattgaaattgacaaatgtaattttgaatctcattaaggctgtcaaatttttgagttagacataaagtaaaagaatgctgcaattcccaacttcctgttcataaagtaaaaactaaaaattgtaaatttctgatttatattttacctttttgatacaaaatgcaacgacctagctccataacacacattttaaaattttgttcctttccttcttaattgaccacctaagagtaaaattaatccttctggggttaaaagtagttcgcattaggcatgcctaataacttctttcaaacttacggttttcattaattttcaacacacttgatcattagaatcagtactcttgctttcca

SEQ ID NO: 440258 - DNA, 591 bp, Homo sapiens
tcacttttctggactgttcaagttcaaattaactttggggaatggaaagccagtctcactgattggagagtggaatctttcaggcagagtgagtctcatgaggtcaacctggccagcatcctgcttttgggcaggatatacataaaagacactggaaaagtgaccatcctatggcagatatccctcaaaaaggcatatttaactttaatgaaataacagttcagggctgaacttacattgaaattgacaaatgtaattttgaatctcattaaggctgtcaaatttttgagttagacataaagtaaaagaatgctgcaattcccaacttcctgttcataaagtaaaaactaaaaattgtaaatttctgatttatattttacctttttgatacaaaatkcaacgacctagctccataacacacattttaaaattttgttcctttccttcttaattgaccacctaagagtaaaattaatccttctggggttaaaagtagttcgcattaggcatgcctaataacttctttcaaacttacggttttcattaattttcaacacacttgatcattagaatcagtactcttgctttcca

SEQ ID NO: 440259 - DNA, 566 bp, Homo sapiens
aatgaacacgcaacttagctctgagattcttaccaaccagggcaaagagggaaacacaaaggattcaacaattgagtagattgccatctagatgaaaatattccagtttgttttaattatcaatagcagcataacaagctacccaaaacttgtggtttaaactataatgatttatattttttcagggttctgtgrgttggctgagtgattgttctgctgatcttgctcggggtcacacatgtgacttaggatcatatatgtagttgatggatcactggaggctgggatcagctggggatgtttatcatgatatcttatttcatctccatgtggtgaacttgaacttcctaacagcatggcagtctcaagttagcactgcaagagggagagttccaaaaggacattccttaatatacaagtgcttatcaagtctctgctcatttgatgtgtctcatgatgaaatcaaatcatatgaccaatttcagagtaacccaaagttggaacgccagaagtcatgggttatggggtccacagtccaccacagtttcttatgacaggctgagtta

SEQ ID NO: 440260 - DNA, 566 bp, Homo sapiens
aatgaacacgcaacttagctctgagattcttaccaaccagggcaaagagggaaacacaaaggattcaacaattgagtagattgccatctagatgaaaatattccagtttgttttaattatcaatagcagcataacaagctacccaaaacttgtggtttaaactataatgatttatattttttcagggttctgtgggttggctgagtgattgttctgctgatcttgctcggggtcacacatgtgacttaggatcatatatgtagttgatggatcactggaggctgggatcagctggggatgtttatcaygatatcttatttcatctccatgtggtgaacttgaacttcctaacagcatggcagtctcaagttagcactgcaagagggagagttccaaaaggacattccttaatatacaagtgcttatcaagtctctgctcatttgatgtgtctcatgatgaaatcaaatcatatgaccaatttcagagtaacccaaagttggaacgccagaagtcatgggttatggggtccacagtccaccacagtttcttatgacaggctgagtta

SEQ ID NO: 440261 - DNA, 566 bp, Homo sapiens
aatgaacacgcaacttagctctgagattcttaccaaccagggcaaagagggaaacacaaaggattcaacaattgagtagattgccatctagatgaaaatattccagtttgttttaattatcaatagcagcataacaagctacccaaaacttgtggtttaaactataatgatttatattttttcagggttctgtgggttggctgagtgattgttctgctgatcttgctcggggtcacacatgtgacttaggatcatatatgtagttgatggatcactggaggctgggatcagctggggatgtttatcatgatatcttatttcatctccatgtggtgaacttgaacttcctaacagcatggcagtctcaagttagcactgcaagagggagagttccaaaaggacattccttaatatacaagtgcttatcaagtctctgctcatttgatgtgtctcatgatgaaatcaaatcatatgwccaatttcagagtaacccaaagttggaacgccagaagtcatgggttatggggtccacagtccaccacagtttcttatgacaggctgagtta

SEQ ID NO: 440262 - DNA, 589 bp, Homo sapiens
tgtttcaatacatgcgtatgttgtggaatgatgaaagtagcctaagtagcatattcatcacctcaaatatttattttttctttgtkgagaacattcaaaattatttttttcttagctatttggaactacgcagtaattattcttgacaggaggattgcatgaagttggccagacagccaaaaagaatcagattatctccagaaatttctatgtacctttgggtatgactgcatcttgcggtagctaccttaaattaatgtagcacaggttttaaatgccatttagttttacctttctagttttaagttttggttatgactcattcatcctatgaccttggacctgttttctgacataattgaattctgcactttatgtttgtttcaaattaagacctctttgctacatataaagatttcctgttagggttgccctttatgtaaattttattaccactgaatgattgtttaataaaaatttcagtcacattccaaacacatcaaggagttcccagggaccagtttcatatactcaggatcccgataaatgcagtgggaaccctccttattaaagacaggctgtaaaacat

SEQ ID NO: 440263 - DNA, 589 bp, Homo sapiens
tgtttcaatacatgcgtatgttgtggaatgatgaaagtagcctaagtagcatattcatcacctcaaatatttattttttctttgtggagaacattcaaaattatttttttcttagctatttggaactacgcagtaattattcttgacaggaggattgcatgaagttggccagacagccaaaaagaatcagattatctccagaaatttctatgtacctttgggtatgactgcatcttgyggtagctaccttaaattaatgtagcacaggttttaaatgccatttagttttacctttctagttttaagttttggttatgactcattcatcctatgaccttggacctgttttctgacataattgaattctgcactttatgtttgtttcaaattaagacctctttgctacatataaagatttcctgttagggttgccctttatgtaaattttattaccactgaatgattgtttaataaaaatttcagtcacattccaaacacatcaaggagttcccagggaccagtttcatatactcaggatcccgataaatgcagtgggaaccctccttattaaagacaggctgtaaaacat

SEQ ID NO: 440264 - DNA, 581 bp, Homo sapiens
tcattttacagatggaagtactaaggaccaggctgacatccacagtgtcccacagcaagtaactgacaggactggctctaaatctttgaattatggctaatagatgggagcctgcttgaggcaaagggtcaggggatataaattgaaacccctggcatgaaattaccctgcagttcagttttgtttgatctgcatagttttttatccattaggaaaagtcacacaaatatccaaattcttctgaaaaattgcaagatttagcaayacggatcccacatttccttggcatgtgctcaccagtttgatctagtccctcccactttctgctatcatgtgctcagctgctttccttagttacctgccttgcctgatccctgtaacacttgagtttatgattctgagtgtagagagttctaacacctgctgggtctcttgggaggtttacaaagctcctttgggtctggttctgtgtcagtcagtgtaggctagttttgtttgtagtttatattaaaaatacccttgatattgtctggctgtgtccccacccaaatctcatcttgaattgtaatccccacatgttg

SEQ ID NO: 440265 - DNA, 675 bp, Homo sapiens
cttgggtcacctgtgaacaccttatctatgataaaaaagcactctgtgtctgaggaacatggaagcagcaaagtccatgtgaagttcaggatgttctgtggatatagaagcctgccatctggcctgaattcgagtcccagatttctgtgtggtactgggaaaatgctctgtatatttgagtctcagttctctcatctataacttagcrtactaatatcatctgtctttattagcatagcagcctaaactgactaagtactctaagttatagatgacagaaatttctcacagctgtggaggctggaagcctgtgatcagggtaccagcatgattgagttctagcgagggccctcttccgggttacagactgccaacttctcattgtattcctctatttcagaaaaagggtcaaaaatctccctggggtctcttttatgagggaactcatctcagtcatgaagttcccaccctcatgacctcatcacctcccaaaggctccatctcctaataccatctcatggagattagagtctcaacatatgaatttggaggagacaaggacattcagtcaattgcaccatcttctgagtttttatagataattacattaaacaaattcagagagtaggtatgaagcccaatattgtatctctatcagtagtagttgcgattttt

SEQ ID NO: 440266 - DNA, 592 bp, Homo sapiens
gaagactatcaagagctttattattttaattctcctgacactactctgcaagatagttttatttgtcgccctccccccccccgcttttttttttttttttttttttttttttggtttttgagacagagccttacttgtcgcccaggctggagtgcaatggcacaatctcggctcactgcaacctccgcctcccaggtacaagcaattctcctgcctaagcctgtcaagtagctgggactacaggtgcgtgccacccatgmctggctaattttttgtattttcactagagacagggtttccccatgttggccaggctggtctcgaactcctgacctcaagtgatccacccgccttggcctcccaaagtgctgggattacaggcatgagccaccacacctggccacttgttcgccttttatagatggggaaagtgaggcccagagaggttaagaaattgtctaaggtcaagtggacacatggtgaatcttcaatttatatcagacctaactagttctttccactataccatgttgacatggtttcactgtgttcccataaaaatttcaacttgaaatgtatctcccagaatttt

SEQ ID NO: 440267 - DNA, 592 bp, Homo sapiens
gaagactatcaagagctttattattttaattctcctgacactactctgcaagatagttttatttgtcgccctccccccccccgcttttttttttttttttttttttttttttggtttttgagacagagccttacttgtcgcccaggctggagtgcaatggcacaatctcggctcactgcaacctccgcctcccaggtacaagcaattctcctgcctaagcctgtcaagtagctgggactacaggtgcgtgccacccatgcctggctaattttttgtattttcactagagacagggtttccccatgttggccaggctggtctcgaactcctgacctcaagtgatccacccgccttggcctcccaaagtgctgggattacaggcatgagccaccacacctggccacttgttckccttttatagatggggaaagtgaggcccagagaggttaagaaattgtctaaggtcaagtggacacatggtgaatcttcaatttatatcagacctaactagttctttccactataccatgttgacatggtttcactgtgttcccataaaaatttcaacttgaaatgtatctcccagaatttt

SEQ ID NO: 440268 - DNA, 566 bp, Homo sapiens
taacaatgagaaaaagtcagattataactttctttgaacccatcggaaaactgaaggcatgaggcaaccaaggaacatgaattccaagcagasaaaagtataaggagagtcagggcacacagattgtatctcctgtggtagcacattggaggaagaggcacaggccaccatttaagtgaatataaataaatcaggtaaattttaatgaatggccaaaggccaaatagaggatagcatgtcatttttgaacagtttggggccacagacctaagtgaaaatgatactcttttagctttttcctacataccttcactgggtgcttacaaaaaccaaacaaacaagcaagcaaacaaacaacaaaaaaagaaaagaacagaagagagagagagaaagagagagattggaagaaggagagaagactgaaaaaaagctctatcagtaatgacgaaatttagtacatgatcagtgattgtggggtcacaggcgcataataacgctcatttctctggacccttctcttataggaagcagaagacttaagctacaaatacagagacagcatagat

SEQ ID NO: 440269 - DNA, 380 bp, Homo sapiens
aaatatccattcacagaatggacaacaacagtgtttccaaactactgattccaaagaaaagtttaaacctgtgagatgaatgcrcacatcataaagcagtttctcagaaagcttctttctagttttaatatgaatatatctctctttttctccataggcctcaataaactcccaaatatcccttcacagattctacaaaagtagtgtttcctaactgctgaataaaaagaaaggttgaactctgtgaggtgaatgcacacatcacagagctgtctctcagaaagtttctctccagtttttatcctgggatattctcttttttcacctttggcctcaaggagctttcaaatatgtcttcatagattctgcaaaaacacggt

SEQ ID NO: 440270 - DNA, 551 bp, Homo sapiens
aagcagttactcagatagcttccttctatgttttatcctgggatattcactcttttgtctttggcctcaaggagctccctaatgtccattcccagagtgaacaaaaatagwgtttccaaactgctgaatccaaagaaaggtttaactatttgagatgaattcacacatcacaaagcagtttctcagaatgcttctttctagtttttatttgaagatatttcctttttcatgatagtcctcaaagccctcaaaaataacccctcgtagattctaaaaaggagtttgtccaaactgctgaataaaaagacaagtttaactctgcaagttgaatgcacacatcacaaagccgtttatcagataggtatcgtctagcttttatcctggtatgttcactttttcacctttggcctcaatacactcccaaatattccttcacagattctgccaaaacagtatttccagactgctgaatgaaaagaagacttctactcagagagatgaatgcacagatcacaaagcagtttctcagataccttccttccagtttttac

SEQ ID NO: 440271 - DNA, 551 bp, Homo sapiens
aagcagttactcagatagcttccttctatgttttatcctgggatattcactcttttgtctttggcctcaaggagctccctaatgtccattcccagagtgaacaaaaatagagtttccaaactgctgaatccaaagaaaggtttaactatktgagatgaattcacacatcacaaagcagtttctcagaatgcttctttctagtttttatttgaagatatttcctttttcatgatagtcctcaaagccctcaaaaataacccctcgtagattctaaaaaggagtttgtccaaactgctgaataaaaagacaagtttaactctgcaagttgaatgcacacatcacaaagccgtttatcagataggtatcgtctagcttttatcctggtatgttcactttttcacctttggcctcaatacactcccaaatattccttcacagattctgccaaaacagtatttccagactgctgaatgaaaagaagacttctactcagagagatgaatgcacagatcacaaagcagtttctcagataccttccttccagtttttac

SEQ ID NO: 440272 - DNA, 575 bp, Homo sapiens
ttcattagagcattttagatttcatattttcagattagggatgcctgacttgtaaatacaattcaaatattacaataaaaaataaaaaataaaaaagcactcctgctcccaagcatttcagttttaaaggagatatttgacctctataaattaacaatagcaaacatttattgggagatcatgatgtgccagagtatgttcaaagtattttacattattaactcatttaattcttgggcaaccctgtggtttaggcattatttaccatattctttttacaactgaggaaagaagagaagttaagtaacttactattttatagaatgagggaaattcaagcctaaacagtaaccrtttagtgttatacaatgtattaggcacatataatattaaaatctaggtctctatgtttctaattctggcttattctctaaaatgatttgtgatgaagattcttaagaaacatttacacctgattccaacatgactggcaagacttagatcagcttaaattggcaggtttacataactgcacatgtctgttcttacagagaacagaacgacaaaaaatggaa

SEQ ID NO: 440273 - DNA, 600 bp, Homo sapiens
agcctaaacagtaaccgtttagtgttatacaatgtattaggcacatataatattaaaatctaggtctctatgtttctaattctggcttattctctaaaatgatttgtgatgaagattcttaagaaacatttacacctgattccaacatgactggcaagacttagatcagcttaaattggcaggtttacataactgcacatgtctgttcttacagagaacagaacgacaaaaaatggaacagaagaaaatcccttactaaatgtcaagaattggacttacctgtcaaaacgagcttggctgcagaggtgaaagcagaatccgggacgtactcggccagctcaccctttccrctgctcaaggtttgtttatgatgtctgtactctagcatagttggtcatattgttgtgagcagtgaagagttttactttctgcctacataggaaagagtggttaattctaagactcgtgtgtattatcaataactatgatatatccactaatccactaagtagtgaatgctttccactatgtagttaaagccatacctacatgtggtgactattcatgaatgacacaataagaatcagcaatttgactgca

SEQ ID NO: 440274 - DNA, 610 bp, Homo sapiens
cacctgccacttaccagctgaactgccttggtcaaactttccatgccattagctaccttatagagttttttttgtaaacattaagtaaattaacaaatgcaaagcatttaaatggaatatggcacatacacaaaagaaaataattatttaagtcatctctattcaaaagttcagtgtaaattttaggatatctatatttagtgatgcctacgtggtccttttgaattcccaagcaacctcagattccttcaatgttacatacagagacagttgccactaaactactgggattgrcacagaatgctattcaccatttcctaaaatagatgttggcagcaaattgttttcattgtcaggacagactaagggattatatagagatatcttggggcacaagttggccagatataaccaagtttcaacttttttgtcctttcaatttatcaattaccatctaatctatgtatctacacatctatgtatctacacataatgcctcctggtatattttccaggctcatctcataccaaaatgaagacctttaatccttaaaggagtgtccttcaaagtaggatatttgttatgtgttaaacactggtcatctttatt

SEQ ID NO: 440275 - DNA, 492 bp, Homo sapiens
tctgaagaaggatctcaatgcaaggactggaagatctgttgatcaattatgcccaagattctcagatggccccagaatgtctttataattgaaacaccctctatatccaaagaytccataagtgccattctcatcgcatcatattaagggcacatcttatcaatatgacctactcttcatgatgttaaaacttgatcacctgtggtagtgtctgccaagtttctccactgtaaagttactcattttcccttcttcccacgctgtactctttaggagttattaaacacagctcactcaggggttaggtagttcagacccacttgtttgaaaaatggggagaccatttacataaattatttgaaattattttgtaagagagacttgtcactattatttttattaaaccacttatttacatatcagtatagacacataaatattttacattttggtaatctaatgccatgtttttatttcattaaactgttccag

SEQ ID NO: 440276 - DNA, 492 bp, Homo sapiens
tctgaagaaggatctcaatgcaaggactggaagatctgttgatcaattatgcccaagattctcagatggccccagaatgtctttataattgaaacaccctctatatccaaagactccrtaagtgccattctcatcgcatcatattaagggcacatcttatcaatatgacctactcttcatgatgttaaaacttgatcacctgtggtagtgtctgccaagtttctccactgtaaagttactcattttcccttcttcccacgctgtactctttaggagttattaaacacagctcactcaggggttaggtagttcagacccacttgtttgaaaaatggggagaccatttacataaattatttgaaattattttgtaagagagacttgtcactattatttttattaaaccacttatttacatatcagtatagacacataaatattttacattttggtaatctaatgccatgtttttatttcattaaactgttccag

SEQ ID NO: 440277 - DNA, 427 bp, Homo sapiens
tcattttttttccccaaagctaccagatgactatcctaggaaactgtgataacaactcctaaagacagtaaagaaggctggccacagtggctctagactgttatcccagcactttgggaggctgaggcaagctgactgcttgggtccatgagtttgagactagcttgggcaacatgatgagaccttgtctctacaaaaaatacaaaaattagccaggcacggtggtgtgcacctgtagtcccaggtamtgaggaagctgagatgggaggactgattgggcctgggagccagaggttgcagtgagccaagattgcaccactacactccagtctgggcaacagagtgagaccctgtctcagaaaaaaaaaaaagatactaaagaacactcacttatcagaaatatataaccttgacatacttcccttaa

SEQ ID NO: 440278 - DNA, 574 bp, Homo sapiens
acatctgctgtacaacatagtgcctatagttaacaatagtgtattgtggacctaaaaaatttaagagggtagatcttatgttaagttttcttactacaaaacaaaaacaaaaatgaaaacgaagagatggaaacttttggaggaggtgatggatatgtttatcatcttaattttagtgatggtttcatgagggaatgaaattctaatttcatctaattgtatacattaaataggtgccattcttttgcatatcaattatatcgcaataaagcttttgattaaaaaaaagttagtttaaaatatgcatmattgggcacttcagtttagggctgatgagggtgtgctctgaaataaaatgtcctgagtttaagttataacctacaatttactcaccataaaatcttgcagaaaatggttaatctttttggacctcagtttattcatctttaaaatggaaatatttacagtacgtcttttatagcattcttttgtattaacaggagattgtgtttttgaagcactcagcattgtgcttagcacattataagcactcaataactgtttgctaatacca

SEQ ID NO: 440279 - DNA, 574 bp, Homo sapiens
acatctgctgtacaacatagtgcctatagttaacaatagtgtattgtggacctaaaaaatttaagagggtagatcttatgttaagttttcttactacaaaacaaaaacaaaaatgaaaacgaagagatggaaacttttggaggaggtgatggatatgtttatcatcttaattttagtgatggtttcatgagggaatgaaattctaatttcatctaattgtatacattaaataggtgccattcttttgcatatcaattatatcgcaataaagcttttgattaaaaaaaagttagtttaaaatatgcatcattgggcacttcagtttagggctgatgagggtgygctctgaaataaaatgtcctgagtttaagttataacctacaatttactcaccataaaatcttgcagaaaatggttaatctttttggacctcagtttattcatctttaaaatggaaatatttacagtacgtcttttatagcattcttttgtattaacaggagattgtgtttttgaagcactcagcattgtgcttagcacattataagcactcaataactgtttgctaatacca

SEQ ID NO: 440280 - DNA, 574 bp, Homo sapiens
acatctgctgtacaacatagtgcctatagttaacaatagtgtattgtggacctaaaaaatttaagagggtagatcttatgttaagttttcttactacaaaacaaaaacaaaaatgaaaacgaagagatggaaacttttggaggaggtgatggatatgtttatcatcttaattttagtgatggtttcatgagggaatgaaattctaatttcatctaattgtatacattaaataggtgccattcttttgcatatcaattatatcgcaataaagcttttgattaaaaaaaagttagtttaaaatatgcatcattgggcacttcagtttagggctgatgagggtgtgctctgaaataaaatgtcctgagtttaagttataacctacaatttactcaccataaaatcttgcagaaaatggttaatctttttggacctcagtttattcatctttaaaatggaaatatttacagtacgtcttttatagcattcttttgtattaacaggagattgtgtttttgaagcactcagcattgtgcttagcacattataagcrctcaataactgtttgctaatacca

SEQ ID NO: 440281 - DNA, 578 bp, Homo sapiens
cacaaacccactgctcatgagaataaacaaatactacatccacagggagtctgagcaaaaattagcatgcccccaaacaaacaaaaacaccagctgtttagaacatcataaagggggatgagagaattcaaacttaattatttcctcggttagaaaacaaaatctttaaacaaagagaacattataagtcactagcatttccaagattccacccacagtaaggccagaagatataaagccaagtcatttgctggtttttaaattactcctataaactcagaaaattacaagagagtgtaagtgagagattgtgtctagatgagcagtccccaasctttttggccccccgggactggtttcatggaagaggatttttccatggatggaattggtggggatggtttagggatgaaactgttccacctcagatcatcaggtattagtcagattcttgcaaggagtgcacagcctagatccctcgcatgcacagttcacaatagggtttgtgctcctgtgagagtctaatgctgtccctgatctgacagaaggtggagctcaggcggtaatgctcacttgct

SEQ ID NO: 440282 - DNA, 363 bp, Homo sapiens
tggtcccaggatccccagaaaggtgggaaatccatctgtacgtatccctagaaagggggctgaatccagggagccaagcaatgtcattctgcaggccccacttccacagcacctcacaagttaagactgactggtttggaattccagccagccaatggcaacaggctggaatctgcaggacacaggtctgagtttctaccatgtctgtggttcagtagactcagccattccagcttgctggctttggagaatacaaagggtctgggccagaaaaggttccccacaacacagcacaggtgccttgccagaytgtggccagactgcttctttaagcaggacccctttccatttatcctcactggg

SEQ ID NO: 440283 - DNA, 593 bp, Homo sapiens
catttgtttgtgtcatctatgatttctttcagcagtgttttgtagttttccttataggggtcttttacctccttgkttagggttttgttttcattttgtttttctgctattgtaaagggaattgaattcttgatttgattcttggctcagttgttgttgatacatagcagtgctgatttgtgtacattaattttgttatctgagactttactaaattcatttatcaaatttaagagtcttttgggtgagtctttagggttttctaagtataagatcatatcattggtgaacagcactagtttgacctccttttttccgatttggatgccctttatttctttctcttgcctgattgctctgcataggaattccagcactatgttgaatagaagtggtgaaagtgggcatccttgtcttgttccagttctcaggggaaatgctttcaagttgtcaccattcagtatgatattggctgtgggtttgtcacatatggcttttatttttttgaagtaagtcccttctatgcctagtttattgagggtttttatcaggaagggatgctggatattatcaaatgctttttctgcatccat

SEQ ID NO: 440284 - DNA, 593 bp, Homo sapiens
catttgtttgtgtcatctatgatttctttcagcagtgttttgtagttttccttataggggtcttttacctccttggttagggttttgttttcattttgtttttctgctattgtaaagggaattgaattcttgatttgattctyggctcagttgttgttgatacatagcagtgctgatttgtgtacattaattttgttatctgagactttactaaattcatttatcaaatttaagagtcttttgggtgagtctttagggttttctaagtataagatcatatcattggtgaacagcactagtttgacctccttttttccgatttggatgccctttatttctttctcttgcctgattgctctgcataggaattccagcactatgttgaatagaagtggtgaaagtgggcatccttgtcttgttccagttctcaggggaaatgctttcaagttgtcaccattcagtatgatattggctgtgggtttgtcacatatggcttttatttttttgaagtaagtcccttctatgcctagtttattgagggtttttatcaggaagggatgctggatattatcaaatgctttttctgcatccat

SEQ ID NO: 440285 - DNA, 606 bp, Homo sapiens
acaaataaccagtttcacggtaactacttaagagtttgttgtgttcccttcagtatttttcttatgcaacatacttcttttatgtagttgacagttctgcagtgcttcttattgactgatcctgggaaagttacttaacctctgagaacccaagagcatctgcttatacttctagtgtcaatacacattcattggcagctttttattatttctatttcctaggatatggcaaatcagaaatttcaacagcctaaaggaaaaattttcacactctttcaaaattaaataattcacaaataaagaaaaaaagatacagaaataaaaaacaaagcatcactttccttatctaaaaactacgggaaataataggaccaaccatatgggatggttgtaaggattcatgagaaaatgcctatcaattgcttaacccagggtctgtcagagaataagcactcaaatagctattatgttattttatatatatatatatatatatatacatatatatatatgtgtatatatatatatacatatatatatgtgtgtrtatatatatatacacatatatatatgtgtgtatatatatatatgattttatactaattg

SEQ ID NO: 440286 - DNA, 486 bp, Homo sapiens
gcaatgatatccagaaataaccactgttaataacatggtatatttccttccaaactattttctatgtatatwtgcacatgtaaataattatgtttacttacaaatattggatcatttatacagacagctttgtacattgccttttgctcttaatgtattcagaactctttatgttaatatttaaatatctataccatgattttgatggctacataatatttcataatataggtatgtcttaatgtattcaaccaaactttttaaatgtcagatttagattgtttccaaatttcttctattccaaatttcttctattacaaataaatattgtgaatatttccttaagaaagccaggcacggtggcatgtacctgtagtcccagctactgggcatcctgagacaagagaataatttgactccaggggttcaaggctagcctgggcaacaggccaacatagtgagaggaaggaagggaggaagagagga

SEQ ID NO: 440287 - DNA, 486 bp, Homo sapiens
gcaatgatatccagaaataaccactgttaataacatggtatatttccttccaaactattttctatgtatatatgcacatgtaaataattatgtttacttacaaatattggatcatttatacagacagctttgtacattgccttttgctcttaatgtattcagaactctttatgttaatatttaaatatctataccatgattttgatggctacataatatytcataatataggtatgtcttaatgtattcaaccaaactttttaaatgtcagatttagattgtttccaaatttcttctattccaaatttcttctattacaaataaatattgtgaatatttccttaagaaagccaggcacggtggcatgtacctgtagtcccagctactgggcatcctgagacaagagaataatttgactccaggggttcaaggctagcctgggcaacaggccaacatagtgagaggaaggaagggaggaagagagga

SEQ ID NO: 440288 - DNA, 486 bp, Homo sapiens
gcaatgatatccagaaataaccactgttaataacatggtatatttccttccaaactattttctatgtatatatgcacatgtaaataattatgtttacttacaaatattggatcatttatacagacagctttgtacattgccttttgctcttaatgtattcagaactctttatgttaatatttaaatatctataccatgattttgatggctacataatatttcataatataggtatgtcttaatgtattcaaccaaactttttaaatgtcagatttagattgtttccaaatttcttctattccaaatttcttctattacaaataaatattgtgaatatttccttaagaaagccaggcacggtggcatgyacctgtagtcccagctactgggcatcctgagacaagagaataatttgactccaggggttcaaggctagcctgggcaacaggccaacatagtgagaggaaggaagggaggaagagagga

SEQ ID NO: 440289 - DNA, 542 bp, Homo sapiens
tcactccttaatgagcatcatcccaacaaatctctctacacacactctcatcctgccccccctctcattgccttactcgattttttgtagcacctatcaccttttaatattctataagttccttccttattgagtttattacttatagctggactataaattccaagagagcatgacttttgtttcttttcttcataaatgtatcccaagtccatagaatagtggctggtatataacagttatttaaatgttaatttgtcaaaggaatggaagaatatttgttagaaggaggagaaagagaaagatgttcatgatacagtagaaatattattctgagaacccagagcaccaaaagagaaggcctgactgcgrtcagctgttcagattcattttagccttttctatagaggaatatatggatgaaaagcataccttaagaatctcaatataacagacattaagacagtgaaaggtgagaaatctcaagtgtttctccaccccaaagataagtccatttttcaaaaaggaaactgagtaaggga

SEQ ID NO: 440290 - DNA, 542 bp, Homo sapiens
tcactccttaatgagcatcatcccaacaaatctctctacacacactctcatcctgccccccctctcattgccttactcgattttttgtagcacctatcaccttttaatattctataagttccttccttattgagtttattacttatagctggactataaattccaagagagcatgacttttgtttcttttcttcataaatgtatcccaagtccatagaatagtggctggtatataacagttatttaaatgttaatttgtcaaaggaatggaagaatatttgttagaaggaggagaaagagaaagatgttcatgatacagtagaaatattattctgagaacccagagcaccaaaagagaaggcctgactgcgatcagctgttcagattcattttagccttttctatagaggaatatatggatgaaaagcataccttaagaatctcaatataacagacattaagacaktgaaaggtgagaaatctcaagtgtttctccaccccaaagataagtccatttttcaaaaaggaaactgagtaaggga

SEQ ID NO: 440291 - DNA, 546 bp, Homo sapiens
tgactttgtgctatgctgactctcctgatatctattatcttacagtctggcagagcttggggatcttgayatatcacagaacatcatgctggtttgttatatacgtgaccttatgctaatttgatttggtaagcaggatgtaaaaagtggcctacatgccttagtaagatatatgcatgccaaatgatgggaaataaactctgactgttcagccagcatatatgagacatgaaaagtccagaactgatgacatgagatatgtggatggaccttacagaatggccaaaatgggcgaagatatctgtgtcttatcacatggtacctactatagagggagatctcagaatttaggttgacaagatgatccattctgtggaaatcagctagcctctttccttcaatgacttgtttgatgaatttatgcacaaagtgaccatgttggcagggttgaaaattatacgtgggcttagagtgtggatttccccttaccaacgctaattttgcttactctgatgattgtctaccctaccaataaatgagaccagt

SEQ ID NO: 440292 - DNA, 546 bp, Homo sapiens
tgactttgtgctatgctgactctcctgatatctattatcttacagtctggcagagcttggggatcttgatatatcacagaacatcatgctggtttgttatatacgtgaccttatgctaatttgatttggtaagcaggatgtaaaaagtggcctacatgccttagtaagatatatgcatgccaaatgatgggaaataaactctgactgttcagccagcatatatgagacatgaaaagtccagaactgatgacatgagatatgtggatggaccttacagaatggccaaaatgggcgaagatatctgtgtcttatcacatggtacctactatagagggagatctcagaatttaggttgacaagatgatccattctgtggaaatcagctagcctctttccttcaatgacttgtttgatgaatttatgcacaaagtgaccatgttggcagggttgaaaatwatacgtgggcttagagtgtggatttccccttaccaacgctaattttgcttactctgatgattgtctaccctaccaataaatgagaccagt

SEQ ID NO: 440293 - DNA, 611 bp, Homo sapiens
tagtgtctttctcttgggagtgggttcattatcaagggagtgagttccttataaaagaacaaattcagccatctccttctttcaccctattttgcccttccatcttccaccatgggatgatggagagcaaaggccctcatcagacaacagcccctcaattttggacttcctttccgccagaactgtgagccaaataaatttatgttcattgtaaattacccatctgtagtcttccgttacagcagcacaaaatggactaagataaaccccttctagcaaaaacaagcaaataaacaaaaggccatctcggccttctggaccrcttaatctctgtgtgcattttagctaacaagtcattgaggggcatggagagcataatgttagtaggtggagattcacgtatcatctcttcctacaatgttttaatactaggaaatgctttgaagtgtcaaacagtataatataacctagagtgacaggaatcccttgcaaaccctgctgggatgctgccctaggaaaggaattatggctcaaagctactaagttattgaatgtattctgtcctcagagcacttgggtataaatcttctcccaaatagctgtatgtactg

SEQ ID NO: 440294 - DNA, 611 bp, Homo sapiens
tagtgtctttctcttgggagtgggttcattatcaagggagtgagttccttataaaagaacaaattcagccatctccttctttcaccctattttgcccttccatcttccaccatgggatgatggagagcaaaggccctcatcagacaacagcccctcaattttggacttcctttccgccagaactgtgagccaaataaatttatgttcattgtaaattacccatctgtagtcttccgttacagcagcacaaaatggactaagataaaccccttctagcaaaaacaagcaaataaacaaaaggccatctcggccttctggaccacttaatctctgtgtgcattttagctaacaagtcattgaggggmatggagagcataatgttagtaggtggagattcacgtatcatctcttcctacaatgttttaatactaggaaatgctttgaagtgtcaaacagtataatataacctagagtgacaggaatcccttgcaaaccctgctgggatgctgccctaggaaaggaattatggctcaaagctactaagttattgaatgtattctgtcctcagagcacttgggtataaatcttctcccaaatagctgtatgtactg

SEQ ID NO: 440295 - DNA, 591 bp, Homo sapiens
ataaaatgtcctggcatagagttaaagactctgtgattaaagaaattgttcatgaactagattagtgcagagcatttctcctttgtctaattaagcttcctgaatcatggaatgtaatctgtcaaaatggactcccctgtttcctaagcgattgacagtaactggatattagccgtggcccacagcatctaggaaacttccaatttattttcaagtttagacacataaaaccaaatatctttagtctcctagatagattccatatttgcccttattcaacattttgttgaattttactatgtttctaatattgtgtcatagacataccaaaataaaactaagatgggaaaacataatttaagcttgtttacaattcttctctattcttacctgggccatatgtttaccctggcctcagctctatgctaaggcatggcatttcacagttacttcacrggggtttaggattcttttgtggaatgcagcctccaaattatagcccctggaagtcaggaaagataaggatggaactcaggaagtggaaacatccctgggctattagccttctgaagcttcccaaacccctgtgac

SEQ ID NO: 440296 - DNA, 520 bp, Homo sapiens
catcatttttgcttacactagcttttgttagtttctgttgcttactatcaggaacctggatttgtgattccagaatcaatcctttgactacacttagcttcactaacatacattctgtgatacattggaattcctgagagattgtccaaggatttttttgttagcatatatattctgactggaaaattttctgtctttagacagaactgggcattgacttatctgtgtttcttgattttgagcatgacttagaaaggatgtcccctgcttcatttctcttgggacatgtaacagrctagacagaatacccagtcagcttttactcagttggccttcctaccattgtggaatttggcatttacaagtggttgatgcaatgttatttcagcatgggcccagtcaacagctcccaccacctctggagacttccatcgctagaatcttacactgcagaccctgttcattgatattcaggtgacacaagcacaagaggaatagctgacattgctgtcacttgcag

SEQ ID NO: 440297 - DNA, 345 bp, Homo sapiens
gttccattgtttttacagttaaaccacagtgccagacacacaaaattattaacctgacattgggaaaacacatcttatgagtcagacttcagcttctataattttttaactcggcagagtttytagtgtatttcttcaccagctgccggtctataacttttttaactttttagttttgccctacatataagaggttatatttcataaaataaaaaaaactttgtgtttgttaaacagcattgcttaatttacataatttcttaggcacagatgtgaaattgtgacaggagttacagaacaatttgtacaattttaaaaatttacaaaatagtaacataattttaa

SEQ ID NO: 440298 - DNA, 640 bp, Homo sapiens
caggcaatttgtagatcttgatttcttgggggttgttactgtgttcctttggtgrcattttcttccttccttccttccttcctttcttctttctttctttctttcttcctttcttcctttctttctttcttttttcctcctttctttctttcttttctttctttctttctttctttctttctttctttctttctttctttctttctttctttcaagtgtttcttatagccttgcattggtgtctgcatatttgatagagcagtcgcctcttccaaactttacagactggctttggtgggaatagattttcatctgcagctaagtgcaagactgcaagctgggtgggggtgtggcagctttgtttccagagggtgtgcaggtgtagtctccatgtatctctccccgttgaggtcagcattgacaaagactatgagggcctcgatggccaaggctgcaggtgtttgtaatggcagcaataacagtgtaggctgttggagtccccaaggggaaggttgttgtggtccttctcttttcccattcctcacaggagggagtcctatctgagggattccctcttgatgctgggtctggtgtgggcttcaggaagctgcagtggtttcaggccagggaacaggtgctc

SEQ ID NO: 440299 - DNA, 640 bp, Homo sapiens
caggcaatttgtagatcttgatttcttgggggttgttactgtgttcctttggtgacattttcttccttccttccttccttcctttcttctttctttctttctttcttcctttcttcctttctttctttcttttttcctcctttctttctttcttttctttctttctttctttctttctttctttctttctttctttctttctttctttctttcaagtgtttcttatagccttgcattggtgtctgcatatttgatagagcagtcrcctcttccaaactttacagactggctttggtgggaatagattttcatctgcagctaagtgcaagactgcaagctgggtgggggtgtggcagctttgtttccagagggtgtgcaggtgtagtctccatgtatctctccccgttgaggtcagcattgacaaagactatgagggcctcgatggccaaggctgcaggtgtttgtaatggcagcaataacagtgtaggctgttggagtccccaaggggaaggttgttgtggtccttctcttttcccattcctcacaggagggagtcctatctgagggattccctcttgatgctgggtctggtgtgggcttcaggaagctgcagtggtttcaggccagggaacaggtgctc

SEQ ID NO: 440300 - DNA, 583 bp, Homo sapiens
taccatgacaacactgatgacaatgctaaaagattttccaaatccgcagaccctcaggttgcctgagagatactgcaattccatcagttttcaccaaatcaaagctgtgctgtgttgtcggcacaaaggaggagcctgtactctcccttctccgtatcacaccttatcacctgggtaataccattcgcctttgtttccttggggaaacagcttctttacctctttcctaaaatcccatctattccaaggtacaaggccaggaaccaagacaaagttataccttattccaattaacccaattatagttatacccaatgatcccatttaaagagcaccctggcaagcaatgttcatctgaactatttcttgttccacatacaatgaatgtagaaaaatggatacctaagctattagtccaytccttatcttccatgcccagatataaaggaatctctttaatgatcatctgcaatacccaccaacaaattcataggctgagttaggaattaatgatgctccattcccttgtatctttctgaaaatcttcttcaaagatggtgagaactctctacttcaacactta

SEQ ID NO: 440301 - DNA, 647 bp, Homo sapiens
attatgaaaatcttaagactctaagccagtgaattaaataaagaggtaaaagcctgcataagaaagagaactgaccttctgagcttttgtccctcggggaatattagttttaccttttctgctaaaatgatggcagctaggctgggaacttaggctagattatttatttaatgtgacagcccctcctctcctttctctctctccaaccctttccycatgacctttccagattcttcaagtttttttttttttattaaacttcatcgaaaaatcagaattaggtgaacaggtattgaaaacttgagttaccttttgttgctctttgtttcaaaaaaacgtttaaatatttcccagatgatctttacctatggaaattaacggcagcaattgcagcctttaaaaaatgttaaatcatctcactgatgttcagaaaaaacaaaagttctgtagttccaactgcctgtgtggcaggaggaaaactgaattcttgaaaaagtcctgttgattacagctttctcttgctaaaagactgattgctcaatgggaagtggaagatcacaaatcttccgcttttggaactaaatgataatagagttttaataccctaacaaaaataaaacctcctcctgagtgagctactcaaaccc

SEQ ID NO: 440302 - DNA, 582 bp, Homo sapiens
tgatctttacctggaaataaaaatgtatgcagttgctcagtattagggcactgccctttttcttctggaggtttatcattcatgtatcccacaagactattctctttttggtattcctccttaaaaacattcacatggctgaatcaacatgatatgtaggtctcgggattctgagctctttagaaacacctgttgggagggctgaaaatgggactctgtggctacctggctgccacatatccctaattaccttgaggattttagtttatggcccaaaaaaccgtgggtgcaaataagagacttcatctatattttcacacataatttttcttatgaaagtaaattcaccctaccaaaaaaagtagaaaaattcataacctgtcaccrtaacaactgtcattagcattttatgttagctctccatatgttttataaatttgacataagcttattacctctgtatattttacattgtttttacatctattcaatcaagaattttcccaggttgcatctttaaaatcatgatttttctaagagttccgaaatatgtcgctcagctaacatgtgatgggatgttta

SEQ ID NO: 440303 - DNA, 605 bp, Homo sapiens
cacaaatacatttatcctgtcaaactgtcagtaaaaaattataagacccaatatgaatatgaacgtctacaccttcagcaaggtttgtgacatgacttctctgtcacgcttatgaccaatgcaaacaaacagtcttacgcaaatctaaaagtgggtgttagttttaactgccgattgttggacactattctagactatcgaatttgaatctctagaggtgagtctagggaatttacaagctgcccaggagacccttaaatgcattgaggtctgcgcacctttgggctagatgccagaaacgtgaaggaaactaacaatgtagatggtgattttcatattatgctgtagtctgtgttccccaagatatcccaataatcattttcatcagtgacttaaatgatgatctaaagatcgtccctttcaaattttcagatatcacagagctggcagagttaatgagtatcttggacaattgcaccaaatgcaatggattgggatcactaaatcaagacgtawtttgatagaaataaaggtaaggccactttattccagataccaactgcaaaagagacaagataatagagaaagtttgggctttagcagca

SEQ ID NO: 440304 - DNA, 584 bp, Homo sapiens
gcttcacttttagttagatagataaataatcacaacaaaaaacatagaattccattcttttttgaaatgggagaccaagtcaaaactgatttgaatatatctcttggcatccatataccaaatatgaaaaaaagggcaactacttttaagtactcattaaactcaaagacaaatacaaaatataatgggattaagataaaacaaagtattacctcasttgccgcttattttagggcctttagatttcaatatgttacactgcctaagtcctaagattttcctacttggatgtcttgagatgaacaggaaaatccaagactgtccaacttacttggactgtaaactccatgaggtccgggatcaagtcctctttgttctttttggcattgccaggtacccatctcaagttttagctgatagcaacgttcactaacttttagttaattgaatttacttttggcttagtgaatgagtcaagaatagcgtttggtttcaaattgacagcacgcatcagtgtaaaacctttattgtgaaagaacagagcctctaagcttaatgtctagactccagagcaggatttctcg

SEQ ID NO: 440305 - DNA, 584 bp, Homo sapiens
gcttcacttttagttagatagataaataatcacaacaaaaaacatagaattccattcttttttgaaatgggagaccaagtcaaaactgatttgaatatatctcttggcatccatataccaaatatgaaaaaaagggcaactacttttaagtactcattaaactcaaagacaaatacaaaatataatgggattaagataaaacaaagtattacctcagttgccgcttattttagggcctttagatttcaatatgttacactgcctaagtcctaagattttcctacttggatgtcttgagatgaacaggaaaatccaagactgtccaacttacttggactgtaaactccatgaggtccgggatcaagtcctctttgttctttttggcattgccaggtacccatctcaagttttagctgatagcaacgttcactaacttttagttaaytgaatttacttttggcttagtgaatgagtcaagaatagcgtttggtttcaaattgacagcacgcatcagtgtaaaacctttattgtgaaagaacagagcctctaagcttaatgtctagactccagagcaggatttctcg

SEQ ID NO: 440306 - DNA, 371 bp, Homo sapiens
aatataaagcttaataaaaacaaccttgcatgattcttgttacttttgaatttttttaagtacaagttttggttacagtgatttcttcttgtcacttaaaaacagtgttaaactgagcataaaggtacatttaaaagtaaaagtctaatccacctattctcaaatgggtaaagaaacatgctgtattttccaaaagaattctcaaaatcagtggattttatctgaaatagatggcctcagtccttcagtaagcaattattgagttcctacaaagttttgggtatgtgttaagtgytgtagaaaagaggtgaataatgaatggtccattatctgaagatctttaatttagtggttaataaagacacaatccc

SEQ ID NO: 440307 - DNA, 617 bp, Homo sapiens
ttaacccttacaagcactgatttttaactatgaaccaggctacctagagaaagcttacaatctttatttacccttatagctaggtatggacatgagactaagctaaggtcaatgagctccaagcttcagggaaacctcctcaaaatgtagatggaccctagagctttgtcactttcctctgagtcctggaatttaaatgtratggttggagttctagcagtcttctcttatcaggaggcaaagagccataccttagggatgttagagcagtgagctggaagcagcctctgtctttccattctgacaccatggctgccatggacaacctgcttacaatctgtttatgtgagagaagaatccatttccatcttgaatatttattttgggttttgcatgagaggcagccaaatttaatcctaactgatctaaagacaaagagaaagcacaagtacatcagtaattacaatagatataaataaaggagtaaatatatatacacattaaatacatattaaacataaacgttaaataaagacaggttggataaaaagcagtccagctgtatgctctttaaaacctaaatctaaaatataaggacactggaaatttgaaagtgt

SEQ ID NO: 440308 - DNA, 617 bp, Homo sapiens
ttaacccttacaagcactgatttttaactatgaaccaggctacctagagaaagcttacaatctttatttacccttatagctaggtatggacatgagactaagctaaggtcaatgagctccaagcttcagggaaacctcctcaaaatgtagatggaccctagagctttgtcactttcctctgagtcctggaatttaaatgtaatggttggagttctagcagtcttctcttatcaggaggcaaagagccataccttagggatgttagagcagtgagctggaagcagcctctgtctttccattctgacaccatggctgccatggacaacctgcttacaatctgtttaygtgagagaagaatccatttccatcttgaatatttattttgggttttgcatgagaggcagccaaatttaatcctaactgatctaaagacaaagagaaagcacaagtacatcagtaattacaatagatataaataaaggagtaaatatatatacacattaaatacatattaaacataaacgttaaataaagacaggttggataaaaagcagtccagctgtatgctctttaaaacctaaatctaaaatataaggacactggaaatttgaaagtgt

SEQ ID NO: 440309 - DNA, 612 bp, Homo sapiens
caagccagaaatattttgagaaaattatgcttatttatttagaactgtagatttatacacaatacattaagacataataacttttactctggaaaggcaatttttttcacaattatgactaattcttggacaccagttgaatccaggaaatggctacttgtttatcaaaggtaaaatgatgcatttcttaaaatgtggcatatctaaaatctgaagtgtaaaaatccatttctaagttgcctcaacatttctattgattgcttccccatatagaaagtacttgragtccaagagtatgcataggcatttataatttccaatcaatatttcaaacagaaggttgatgtctactttacatatatattattcaaaagtcacctaagtccaaaattcataattagaattgagttaatatataatggttacatagaacccaagaatattttacttttatagtatcatctcttttcctctaagctggctaaaggcaaaaaacaaatggaaaataatattgtcaccattatagaacattaaacaagcctaatgtaaattttataattattataacaaacattcattagcctagacttctccatataaccattaatataa

SEQ ID NO: 440310 - DNA, 617 bp, Homo sapiens
ttaacccttacaagcactgatttttaactatgaaccaggctacctagagaaagcttacaatctttatttacccttatagctaggtatggacatgagactaagctaaggtcaatgagctccaagcttcagggaaacctcctcaaaatgtagatggaccctagagctttgtcactttcctctgagtcctggaatttaaatgtaatggttggagttctagcagtcttctcttatcaggaggcaaagagccataccttagggatgttagagcagtgagctggaagcagcctctgtctttccattctgacaccatggctgccatggacaacctgcttacaatctgtttatgtgagagaagaatccatttccatcttgaatatttattttgggttttgcatsagaggcagccaaatttaatcctaactgatctaaagacaaagagaaagcacaagtacatcagtaattacaatagatataaataaaggagtaaatatatatacacattaaatacatattaaacataaacgttaaataaagacaggttggataaaaagcagtccagctgtatgctctttaaaacctaaatctaaaatataaggacactggaaatttgaaagtgt

SEQ ID NO: 440311 - DNA, 506 bp, Homo sapiens
gttttttgtttggaattttatgggctgatatgtagatatctaacattaacacaaagcagaacataagtaatttatcagtaggatactaacatgttatgttggaaagaagaaaaaagagattaaattcaattggagcaactagtcaaatcttcatgaggagatgacgcagtaagcyagaatttgaagtaaaaatagaagaaaatagtggaactctagtctaaagaacagtgtgaataaaagcatgctgcaaaaaacagcatggtgtttgaggcagtagaatgaggctggaacaaagggtaaactgagggaatggtagagcaaaagactggaaaagcatgttggagcaagatcgtgaaccacctccagtgccatgttaagcagtctgacaatagaggatcactaaagtattctgaggagggctgtagacagaatctgaggaagattatgatgacaaggtgaaaattaaattttaattaggcagaggtagggggcaaagagaacaggga

SEQ ID NO: 440312 - DNA, 275 bp, Homo sapiens
agcaacacccaaggataatattattcatgacaatgtgttttagttaattatagcgatcacatgttcctgccagtctcctgcccagtcttttccattactttagccccagtaaatgagatcacaaatctcaacgtactgggccatgcagatacttattccaagatagtgacasacctgagggggcccttttagatttaggagaggcccttggttcagatttcagtacgatgaaaacaagtaagaccgaagtctcaagccacaggagtacggagttc

SEQ ID NO: 440313 - DNA, 449 bp, Homo sapiens
gctactttttttcttcctgaaatgtgtctgttcacaagggtcataattaaatgatgttctttttacagatgaaagaggcaaaaaataaaaaaaatccaattattaatgtggtttatcaaaatcatgtttttatgaatactatttttgtttgtttatgttttagcagttagatgagtcagagcataatatagttgggggagggtatttccttgtttctgttgtctcaattgggcattatgatgaagccaattwaacataaacaaataccaagatcaggtttcaagcaaatttcatctttagaatctgaaagtggcagtaacaaagaagtctacatttttaaaaaatcaacattagcatgtatgggtaaatagcagtatggttaatcaaaggaccatttattactcaaatattcaacataatttgaaatacacaaaaattcagaacgagca

SEQ ID NO: 440314 - DNA, 438 bp, Homo sapiens
gacgtggatccagtttcattcttctacatgtggcttgtcaattattccagcactatttgctgaataagatgtcctttccccattttatgtttttgtttgctttgttgaagatcagttggctrtaagtgtttggacttatttctgggttctctattctgttccattggtttatgtgcctatttttatactagtgctatgttgttttggtgactatagccttctggtattcttagaagtggaggaatgtgattcctccagatgtggtttttgcttttgattttttgtttgtttgtttgtttgttttgcttagtcttcccttggctatgcaggcccttttttagttccatatgcaattttggatttgttgttgttgttgctgttctctgaaaaatgatagtggtattttgatgggaattgcactaaattggtagattgctt

SEQ ID NO: 440315 - DNA, 325 bp, Homo sapiens
ctcctttacttctgcagattcccaagcaatcatttagtttcatccccaatggatttgataggtgggcagcagagccattcctctttgaagctatatcctgaggtcttcactttggggaaggggagaaagcaacagctgaagataaaatggctaatgygccaagtatttcctcctcaaatttttacgtttcattctgagatacgttatattattatttccgttttatagatgagaagactgagacttaggtaatttgctcaagatctctgagaaagtcaatgacaggagccccagttcagcctacatagtctgcttacagagtttg

SEQ ID NO: 440316 - DNA, 586 bp, Homo sapiens
aattattactaaatactaatgagcataaggagggccacccaatttgttatccaaaatatcacatgctagtgaaaaaaattaaggctgttccacatatatattctctcctaattatcattcaagtcaggaatcgagagtcacaacggctccttgatccaatttagagatacacatttctacagttctctatgacagagctctcttctctctatgacacatatcagaaacctaagtccctgggatctggaggatgaagtttctttccctaaagggccttagaaatgaatctactacaagtyctcccaagaatctctgcatgttgattcactggccagcatgcacttgagctgtttctccttttcagtgaaggaaatgagactgtaaaaagccatgtgaatgatatgcatgatgctgtaatgcccacatataattcctccattatgttgtcagacccaagttatttaattaaagtcaaaaggttcattgctgacagactaagtatataagagacattttcactcttaacagtagtctgagttattgctttgctggaaaacaagaaaatgttaagccagctgatcgagtt

SEQ ID NO: 440317 - DNA, 568 bp, Homo sapiens
cttggctttcaggctttaaactgtytttggcttggaggtggcatttcaccaggtacctgcccctatctgcctaggcatttggctgcctcctgttgctatcagtatactaggtgcaggttttttagtattaaaagttaaaattatattgtgagactgctattatattggtcatttgcaatcatgctttatgcatctatttttcttaatagtttagctgacttctagagattggggatagagaagtttcctctctgtggatctaggacacagtaaagtgctggtcaataatttgaatgaatgaatgaataatgactgcttattgtgcactaagcactagaagagacacagggttaagtccatgcattaagcattgattctggtcctgtggcacttatcacccagctgggaagacaggcctcctcataaactgttctaatctagagtggcgctatgcctacagcaggactatggatagacacagacaactggaaaacaattctgagaatattgtatgatagcatactttggctaacctggcaggagaaggcattgccagggacatgtagat

SEQ ID NO: 440318 - DNA, 614 bp, Homo sapiens
gctaacctggcaggagaaggcattgccagggacatgtagatgcgtccataatttgtacgtaattaagatatctggactcctttctttggtaaaagacctgacctgaaaaaggtacacaggaatccccagggacttagcaactttgctttgggtcacactggatgctgagaaggcctttgtgtgtagggataatttcataaaatttgaatgcccccactctaactacgttcatcagctatgacctgaggtgctggagaagggaggatagatggtcttatcttttttggtacttttaatttatctgcttatcctgtattccatctggctggggctgcattggggggtatgaacaatttggaatggtgaaaaataaaacatattggaatagggagttataatcttatattgcttgtaagcttcattccctcttatgtatcataagtcttgaaaattagrgtgtagatctttaatttgtgaagcaaaacttgtacctctgtagtccaatgactactgacaaaatatatggagtcactatgtctgctggaagatagtattggttagaccaggagaaaaaaaccataatctgggacttgcgtgtcattgttatttagtag

SEQ ID NO: 440319 - DNA, 600 bp, Homo sapiens
aatcaattttcttttgcaattgtaatatgtatcatattactcagttaattttttttcccattaattggttaaataaattgcttaaacagaggccttggcaggagttgggtttaattataatttattccctgtcatatttcataaagtgtttaaagatgcttatataaacaaacataattacatgaatagtagtaattagaatccaacaaaaaattacaatagaagatctagatggggaaaattagaatgcagttttgcagaccataaacaatttgtttagctttaaatttgctggtggccaaaagttagcaaaatctaattatttacctgattctcattataygcaagagaaaaacactttttaaaggagatttatgtttatacttttctctcccttcatgctattttaataagtggacaaaaatgtggcttccagagcctgggttagtagctggagactgaggcaggaggatcacttgagcccaagagtttgagaccagcctgggcaacatagcaaacccttgcctctacaaaacaaatttagaaaaccaaccaaacaaacaaacaaaaaaccagggtggcttccagataaattgtatt

SEQ ID NO: 440320 - DNA, 607 bp, Homo sapiens
tggggaaatttattcacaggggagatgggagaaccctggacagtcaaagggggagacaaaaaaaacaaatgatgcttaaactgaactcaccctgtatcttcccagatctcttcccatgactccctcctgcaggattctctttctcaggaatggcagcaccggaaacgtgggtgtcatcccggattccccacttgcccctcatccatctgctgccacatcagtccactctatctcttaaattcatcagaaatccatcttctccacccatccatccatcaccctggttcaactcacaccactgggaacagcctccacttcgccactgggaacagccttctaaggcatctcccacatccacttacacttctctattaagaggatgggtaactatatgcatgtgtttcaaaattcaaaggacacaaaaaggcactcagtgaaaagtctccctcccactcctttcccccagacactgagatcaccttttctctggaggtgatcaatgtcamcggtttcttgtttatctctctggagacaatctacaatgttataaacaaaattttatatatatatatatatattctccatcccctttttaaaaagcaaacaa

SEQ ID NO: 440321 - DNA, 607 bp, Homo sapiens
tggggaaatttattcacaggggagatgggagaaccctggacagtcaaagggggagacaaaaaaaacaaatgatgcttaaactgaactcaccctgtatcttcccagatctcttcccatgactccctcctgcaggattctctttctcaggaatggcagcaccggaaacgtgggtgtcatcccggattccccacttgcccctcatccatctgctgccacatcagtccactctatctcttaaattcatcagaaatccatcttctccacccatccatccatcaccctggttcaactcacaccactgggaacagcctccacttcgccactgggaacagccttctaaggcatctcccacatccacttacacttctctattaagaggatgggtaactatatgcatgtgtttcaaaattcaaaggacacaaaaaggcactcagtgaaaagtctccctcccactcctttcccccagacactgagatcaccttttctctggaggtgatcaatgtcaccggtttcttgtttatctctctggagacaatctacaatgttataaacaaaattwtatatatatatatatatattctccatcccctttttaaaaagcaaacaa

SEQ ID NO: 440322 - DNA, 632 bp, Homo sapiens
ggcaggcattgctaaccaagtacagagttgtgtcttttttctctggcccacctcagactctcaaagcattcaccaaccatcagtctaaattcacccacaagattaaatatatctgtcatcccagaattataccttttttaacattccaaattggtatcatttaaaaagcttttccaggtaagcacaaggaaaacatttaaarcatcactgaagtctaaaaaaaaactacaaaactgtgaaataaaaaaaactacaaaactgtgaaaacttaattctaaaatattctcttaaattgcattgaaaatggtttaaaaaaaaaaaaaccctagtatattgtgagcactggagtactggatgagtaaatgtaaactaaggagctcatgcgttctccatgatccattcagcacacaaatgttacatgctttcaaggaaaacacagtatcacatctaagagatcagcaatgaactctctcaagaaaaagtcttatctttgctccctttcaagaaatctccctatctctcgacttcccttgcattgcagattaatttttctcaaaataaaagtaaatatcaaacactgtgaagagtcataaatcatataaaaagttattattgttctagaaatataaagc

SEQ ID NO: 440323 - DNA, 621 bp, Homo sapiens
gaactcctagctgaagactgttctaataatttcttttaagaaattacgtcttttaaaaaataagagatccgamgataaactgggtttacatttcagatgataagctgttttggctcaaaattttgttttgttaagttatgttttaccagtgcttgaacataataaacaaactactatgaaaaattaaaggctacaatatttgcaaatgctttcacttcctttttagatagtccaaagcctactgctttaaatacaattaactataacctgaaagtttagcttcagggcacattcagactgtatcttcacaatattaaaacaactgatcaatgaagtcaatgtgtttgggcggcagtagttaagtcaaatgagacgtttcatgctgttgtacacaaaataaccagctgactgaagctgtgaattagtagtttaatcttagaagtaaaattcttacgcagtcttagagaacaagtcattcttacaaattacttggcaatcacacattttaaatacagcctctcaaattgctagatttttttaatgacacacaagttacaaaataatctgtatagttttctttttattctagattctctctctagaaacatatatatcatcaag

SEQ ID NO: 440324 - DNA, 621 bp, Homo sapiens
gaactcctagctgaagactgttctaataatttcttttaagaaattacgtcttttaaaaaataagagatccgaagataaactgggtttacatttcagatgrtaagctgttttggctcaaaattttgttttgttaagttatgttttaccagtgcttgaacataataaacaaactactatgaaaaattaaaggctacaatatttgcaaatgctttcacttcctttttagatagtccaaagcctactgctttaaatacaattaactataacctgaaagtttagcttcagggcacattcagactgtatcttcacaatattaaaacaactgatcaatgaagtcaatgtgtttgggcggcagtagttaagtcaaatgagacgtttcatgctgttgtacacaaaataaccagctgactgaagctgtgaattagtagtttaatcttagaagtaaaattcttacgcagtcttagagaacaagtcattcttacaaattacttggcaatcacacattttaaatacagcctctcaaattgctagatttttttaatgacacacaagttacaaaataatctgtatagttttctttttattctagattctctctctagaaacatatatatcatcaag

SEQ ID NO: 440325 - DNA, 484 bp, Homo sapiens
cacttgagggccacagtcagctatttcttcccaacaagatacttcccccttcacctccacttccaatccacacaaagccattctccacatatygcccacacttatgggagagcaaagcatctgtgctgtggcctcaaaacctgacacattccagaccaaataaatacaccagaaaaaggatacctgactctgtaaaaaggtataaacatctagaagttatgtgtggaaataactgaaaatatttccaaataagcaacagttcaaaaagagagagcaagagagcatgagaagacacatggcctcaaatggagggaggcagaagcacactgggtgcaggaaaacagtccacaggagacccaggggactgaagagaatgcataatcagtgaacaaaaggaaaggaggctgtggggggacaccacctcagaacataccctattaacagaaaagggcaggagtctagattacaagagtaggtgatgtaa

SEQ ID NO: 440326 - DNA, 484 bp, Homo sapiens
cacttgagggccacagtcagctatttcttcccaacaagatacttcccccttcacctccacttccaatccacacaaagccattctccacatattgcccacacttatgggagagcaaagcatctgtgctgtggcctcaaaacctgacacattccagaccaaataaatacaccagaaaaaggatacctgactctgtaraaaggtataaacatctagaagttatgtgtggaaataactgaaaatatttccaaataagcaacagttcaaaaagagagagcaagagagcatgagaagacacatggcctcaaatggagggaggcagaagcacactgggtgcaggaaaacagtccacaggagacccaggggactgaagagaatgcataatcagtgaacaaaaggaaaggaggctgtggggggacaccacctcagaacataccctattaacagaaaagggcaggagtctagattacaagagtaggtgatgtaa

SEQ ID NO: 440327 - DNA, 503 bp, Homo sapiens
aggtgtatctaaccacagagaaggtggcaagggaaattaatttaaattgtgtttgaattctaatgaayagaaaacaaagttgctgacaggaaatttggggaggagagggaaacaggggaaaaaataatgagtgctgcagcatttctttaaaaaaagaaagaaaaaagaaaagtaggtaacaatgaaccaagaagttctgttatcccttatccccacttaagaattttcagggccaggtgcaatggctcacacctgtaatcccagctctttgggaggctaaggcaggaggattgtttgagcccaagagttcaagaccagcctgtaaaacacagagcggccccgtctctacaaaaaaaaaaatacaaaaattagctgggagtggtggcacatgcctgtggtcccagctacttgggaggctaaggcaggaagctcacttgagcctgggaggttaaggttgcagtgagccatgattgtgcccctgcactccagcctggcagacagag

SEQ ID NO: 440328 - DNA, 417 bp, Homo sapiens
atgtaggaaatacaatcatctcgtacaaaatgcctttgaacactatccaaagacatccagagatctttacccaccctacccccaaatgtttttctctttcctagtaaaacagtatttcgaaaaaacaaagaaaatgaaagttgcaagtgggaatgaatcaaagcccacaatccacttcaaaacccctggatgtgcacattacagaaaggggagatcagtatccagagaggcacaatgaacttcccactttaggaracccaacaccaacagcagttcccaggaaataacacgaagtagactacagctaccccatttgtctcaattttctattttcatttttgtgttcctggttttgctatttgttctccaaagtaacagacagagacaacgaggaacagagcctggcttcaagaagaa

SEQ ID NO: 440329 - DNA, 561 bp, Homo sapiens
aagccaaaatttgctgtgttttatttcaaatttttattattgaagttttcaaacatgtattatacaaacgtaaacagtataatagcccctctgtgagtctcactacctaacttcaacaattatcagcacatggtcagtcttgtttcacctctcccaaaatcccctttasctctctcctccactggataattttaaagaaaatccaaaacatgacattatttcactagtgaatacttcagtagctatcaaagacttttaagatccgacatgctcaaatctatcagggcaagaagtgaagaggcaggttatgcaatttttttttttttttttttagatgaagttttgttctttcacccaggctggagtgaagtggcacaatcttggctcactgcaacctccacctcctgggttcaagcgattcttctgcctcagtctctcgagtagctgggattataggcacccaccaccacgcctggctaatttttgtatttttagtaaagtcggggtttcacaatgttggctaggctggtcttaaactcctgacctcacgtgatccaccca

SEQ ID NO: 440330 - DNA, 623 bp, Homo sapiens
ttatcctaatgtcaaatgttctacacagtatgttatatgtggaagttcagatcatgtatcttggggatttatagagggattaaatgttcttttcaaatatttattttaaaatgagtgttagagaaacttaaaatcttatttattattgagtctggattaattgttgtctctttttgtaacagagcttgtcctcttygtaaatttgtgttacaaagtagttaagattttgtttgagcaaatccatttagcaggtgcagtactgtatatttatgaaaaaatattttttaaaacttagaaagatatcctgctgcttttaaggctcgtgttgtggcagtaacatgttatattgcagacgtgtttcagccagggccacctcagtccatgatatctgaaggagctcagtttgcctatactgggtagcattttgtcagaagactgctggctgggcagactagatttggatgtattagctagtcagcctaataaccctgtacagactgtattgattttctaggagagagtttatgaactaaataaacttggggttggtgtcttaataaactgcttctctcagtctgtcacatttagttacggagctgtgcagtttagggggaaaaaaggct

SEQ ID NO: 440331 - DNA, 623 bp, Homo sapiens
ttatcctaatgtcaaatgttctacacagtatgttatatgtggaagttcagatcatgtatcttggggatttatagagggattaaatgttcttttcaaatatttattttaaaatgagtgttagagaaacttaaaatcttatttattattgagtctggattaattgttgtctctttttgtaacagagcttgtcctctttgtaaatttgtgttacaaagtagttaagattttgtttgagcaaatccatttagcaggtgcagtactgtatatttatgaaaaaatattttttaaaacttagaaagatatcctgctgyttttaaggctcgtgttgtggcagtaacatgttatattgcagacgtgtttcagccagggccacctcagtccatgatatctgaaggagctcagtttgcctatactgggtagcattttgtcagaagactgctggctgggcagactagatttggatgtattagctagtcagcctaataaccctgtacagactgtattgattttctaggagagagtttatgaactaaataaacttggggttggtgtcttaataaactgcttctctcagtctgtcacatttagttacggagctgtgcagtttagggggaaaaaaggct

SEQ ID NO: 440332 - DNA, 541 bp, Homo sapiens
tattttcatattacagtacattttcacttaagtacatgatagctctagaaaggaagtgtggaagtgttaacatgtgaaggaacaaaatctgagtaatgctttgacatgagcatctattttgggcttcagagaaataggtggctgattgaaaaccaatgtaaagattgttgaaccactctgtaaggctgggtcatcagttctggatttactattttaaaaaacatttaattatgaaaatgagtttcctttggtttgcacgaatgtttcattgaaatgaaacttgcttcccattgtcttatattctgtaaacttgtgaaatatgtatttttaaatctctgttctgagaacaccctcttctttttttcccagaaactctagagtagtatgrcattttaaggagtagtagttgtctaaaagggccatgtggaggtaacaaaaattaaaacaagtagagtgagtctagtgggaactgtggtggaccagaaagctcatgtctcaaccacagtgaggtagctgctccttggttccagccgattgttac

SEQ ID NO: 440333 - DNA, 551 bp, Homo sapiens
aaaaaatagtcaaataatttaaataaaggtagaagcataaggattttaaaataataaaagatttctgaattctgaaaataatcccatgatttgtgtaagtaattgatgtagatgaaaagccgaattcarctataaaaagcttttcgtctcaccttaaagcggtagattcttggccctgaatctttgtgggattgctataatttaccaagcaattgattatgatgtcacaaggaggagatggaccacaagggggaaaacttccccctactaattcatgcaaggccaatattttatacctgcttcaagaaaacattatttatattgtataagatgaggtttaaaatgcctgtctatattttttgaagggtctctttaaaagaaattatctattcataattgaaattctccaggcaaatcagttatcagcattttcaacagaacaggtaattaattggtttgaatttcaaattgaaggtcatcctgttattgattttcgtgggaaaaggaaacaagaacatcctgttaaaatgatctgcaaatggggcctaggt

SEQ ID NO: 440334 - DNA, 579 bp, Homo sapiens
tacctgcttcaagaaaacattatttatattgtataagatgaggtttaaaatgcctgtctatattttttgaagggtctctttaaaagaaattatctattcataattgaaattctccaggcaaatcagttatcagcattttcaacagaacaggtaattaattggtttgaatttcaaattgaaggtcatcctgttattgattttcgtgggaaaaggaaacaagaacatcctgttaaaatgatctgcaaatggggcctaggtatatctaggctctttctagggtcttgtttaacagcatcactgaacagtgtcagaaaccaatcagaagggagccatttstgttttaaacataacaagttgttggtttgcttccaaaacttcagagaagaactcaactggagaaaagaccagagattaacagtttgtgttagagtaagtcagatatttcaaatcaagtgctggtgcagcttgtaaggaaacatctataaatgtgtcagaatgatgctggtatgccatgttcaagaagttcagcatcaacacagctgtgacttaacgctttcagaaacctttcaactgggaatt

SEQ ID NO: 440335 - DNA, 559 bp, Homo sapiens
aaacaaaaaacaacatcacattgacaacagatgcctcagagagtttagaaaaaccacaacatttttctggtatatatttatgtggggtctcagctacccaggatgataaagaagggaaaatgacaacgtgataggtagaaactaggagaactaaaatgattgcatggacacaacatctaaatggatgtagtgagctcaccatcaaataggccaatcctagtatcccaaagagtctgatctagtgggattgagaagaatcaactatacrgtgtaaaataaaaatacattatctgaccttgcctgggctatcatgaatcttagcaataaatctcaagaacaaaaccaataaccatattaaatgtgggtggttattctccattttccattataacagtaattcccaaatctgtctgtgcacgaaaactgggagaatattttaaaatataaattccttaggactaacctctgatattgaaccagaatttctagcaataaagatcataaagatagataattagtacctagatacacagacacatagatagcagaatgaaagtca

SEQ ID NO: 440336 - DNA, 559 bp, Homo sapiens
aaacaaaaaacaacatcacattgacaacagatgcctcagagagtttagaaaaaccacaacatttttctggtatatatttatgtggggtctcagctacccaggatgataaagaagggaaaatgacaacgtgataggtagaaactaggagaactaaaatgattgcatggacacaacatctaaatggatgtagtgagctcaccatcaaataggccaatcctagtatcccaaagagtctgatctagtgggattgagaagaatcaactatacagtgtaaaataaaaatacattatctgaccttgcctgggctatcatgaatcttagcaataaatctcaagaacaaaaccaataaccatattaaatgtgggtggttattctccattttccattataacagtaattcccaaatctgtctgtgcaygaaaactgggagaatattttaaaatataaattccttaggactaacctctgatattgaaccagaatttctagcaataaagatcataaagatagataattagtacctagatacacagacacatagatagcagaatgaaagtca

SEQ ID NO: 440337 - DNA, 530 bp, Homo sapiens
ttgagagtccacagcttgctgtgtgaatagtaaggcaaagtaactgcactcaccttatgttctaatgaaagtagcaatcagtgagtaaatacctatgatgtaatttcttgggggttaataagtgctatagggagaaacaaagcagaataatgggtttcagagggatgaggagaatattgtagaaaggacatttagggaaggcttctctgatttgagtgaagagtgtggcatctgcagacctaaggaagagtgttcccagaagagaaaaaaagcaagtgcattatgtcctgatttgattgaggtacagccaggtcattttggttcttatagactgagataggaagttcagagatttcaagtgtgataggaactcttccaagggttttaagtaaagaattaacatgatgtaacttacattttaaaaaaggacatcgtkttaccatattgagaatagtccggatgggaaagcaagagtgaaaacaagacaaccagttaggttattgtagtagccctggggagagagatggtcg

SEQ ID NO: 440338 - DNA, 619 bp, Homo sapiens
tgaagaaggcagcgcagcactgatacctcagaataattgagagcaactagttagtttggggcagaattaagctctggaacaaaagcaattcagtggcttttcagactcctccccaactcacctcaagtcttaaatatacctgcaaaggggtttgaaaaaacttggagattttccacaaatcctaacttcttacgatgttaaaagcactcaggagattttcacgtgtayacacatttcttttcttgtttaaccctatacagcagggaagagtgtaattttattgtccatggaacaaatgaccaattgcccccaaagcagacctgccccgggtaagagtgttgacttccttcaggctggggacactgccccaagctcatgatctacattttttttcacttcattctcacaacatccgaatcaggtaagatctagcacaacttccattttacagatgagaaaagagaggcagagagaggtggaatatctccccactgtcacccaactcatgtgggactagccaaacttctacctattaaccattgctctattaccttttcagggcaggaaaccctacttccaccagacatgtatttgtttattcactcaggcaggtggtatg

SEQ ID NO: 440339 - DNA, 619 bp, Homo sapiens
tgaagaaggcagcgcagcactgatacctcagaataattgagagcaactagttagtttggggcagaattaagctctggaacaaaagcaattcagtggcttttcagactcctccccaactcacctcaagtcttaaatatacctgcaaaggggtttgaaaaaacttggagattttccacaaatcctaacttcttacgatgttaaaagcactcaggagattttcacgtgtatacacatttcttttcttgtttaaccctatacagcagggaagagtgtaattttattgtccatggaacaaatgaccaattgcccccaaagcagacctgccccgggtaagagtgttgacttccttcaggctggggacactgccccaagctcatgatctacattttttttcacttcattctcacaacatccgmatcaggtaagatctagcacaacttccattttacagatgagaaaagagaggcagagagaggtggaatatctccccactgtcacccaactcatgtgggactagccaaacttctacctattaaccattgctctattaccttttcagggcaggaaaccctacttccaccagacatgtatttgtttattcactcaggcaggtggtatg

SEQ ID NO: 440340 - DNA, 619 bp, Homo sapiens
tgaagaaggcagcgcagcactgatacctcagaataattgagagcaactagttagtttggggcagaattaagctctggaacaaaagcaattcagtggcttttcagactcctccccaactcacctcaagtcttaaatatacctgcaaaggggtttgaaaaaacttggagattttccacaaatcctaacttcttacgatgttaaaagcactcaggagattttcacgtgtatacacatttcttttcttgtttaaccctatacagcagggaagagtgtaattttattgtccatggaacaaatgaccaattgcccccaaagcagacctgccccgggtaagagtgttgacttccttcaggctggggacactgccccaagctcatgatctacattttttttcacttcattctcacaacatccgaatcaggtaagatctagcacaacttccattttacagatgagaaaagagaggcagagagaggtggartatctccccactgtcacccaactcatgtgggactagccaaacttctacctattaaccattgctctattaccttttcagggcaggaaaccctacttccaccagacatgtatttgtttattcactcaggcaggtggtatg

SEQ ID NO: 440341 - DNA, 622 bp, Homo sapiens
aactcttgggtttttttcttaaattgtgtatgagcctaaaaagggttataattccttatgtaacaacctttacacatttgtaagaaccaaaacaagtatgtaaaatttaacgcaaacaaaatgataaaactattacaattcatttaaataatattagtaaacacaacagatgaagccatattgtcaaaactggttaccactcacaatgtcctcttgaattttsggcctaattttacatgtgtgatgtgataatttaattcactcacactttttctcaatttaaattactgtgaaaccttcactcctacaatgtgttataatgacttctgtccttcacttggtgcaaacatgccatttagatcttaggtctatctctacgcctttttcattagtccacacgacctcccaactgtaaaaagaaatacaacctcaggcacaaaatattaccggcagtactgggttatgaggtcgtgatacagatgacccataatgttcttgtacatattttttagttatcatgaaaatcaatatgcaaatgtagtaaatgctcacagaaaactagtaatccctcagaatttatctgtgtatcccagtttgggaaccactaattttggagatagtg

SEQ ID NO: 440342 - DNA, 550 bp, Homo sapiens
cagttagtgaggttgagcatctttccatatgtgccttagtctgttagagctgctataacaagtaccatcaacttggtaattcacaaataagagaaatttatttcttacagttctggaagctggaaagtccaacatcaaggcccctgcagattctgaatccactgagggcccatttcttggctcaaatgatggtgtcttcttgaggtatcctcacatgctggaaggaaagttggctctctggggtctcttttataagggygctaatcccattaatgagggatctgccctcatggtttaatctgctgccaaaatgcctaccttctaataccatcacttcagtgttaggatttcagcataagaatttaggaggaacattcagaccatagaaatatactagttggtcatttgtatgtcttctttaaataaatgtctattcaaatcttttccctttttaaattaagttaaatgctttttgttgttgattgtagaagttccttatagattctggccattaccccttattagatgtattatttgcaaatattttctt

SEQ ID NO: 440343 - DNA, 627 bp, Homo sapiens
attctttaaaatgaaattccaagcctaattgtgcaacctgattacagaataactggtacacttcatttatccatcaatattatattcaagatataagtaaaaataaactttctgtaaaccaggttgtatgttgtactcaagataacaaggtgaacctaacaaatacaattctgctctcttgtgtatttgatttttgtatgaaaaaaactaaaaatggtaatcatacttaattatcagttatggtaaatggtatgaagagaagaaggaacaaccgatgatttctctctgcagaaggtagattgaggcatgtgaggaaataaaaataagacagagacattctctttaaattgactagtatacatctattagaaaatgtccattgccagttagatatataagtttgcaatttgcaaggaatgcgattgctgggggtttatatgtgataagagaaagccaagaaatgaaggtcatggtgtcgggagagagtgtagagagagaaaaagttttaaacatgattctgarcacctttcgcttttaaagggaggggagagaaaagccgcaaaggaaacatccacagccacaaaggaatggctgtacattagaaggcaacagcagagaaagataatg

SEQ ID NO: 440344 - DNA, 627 bp, Homo sapiens
attctttaaaatgaaattccaagcctaattgtgcaacctgattacagaataactggtacacttcatttatccatcaatattatattcaagatataagtaaaaataaactttctgtaaaccaggttgtatgttgtactcaagataacaaggtgaacctaacaaatacaattctgctctcttgtgtatttgatttttgtatgaaaaaaactaaaaatggtaatcatacttaattatcagttatggtaaatggtatgaagagaagaaggaacaaccgatgatttctctctgcagaaggtagattgaggcatgtgaggaaataaaaataagacagagacattctctttaaattgactagtatacatctattagaaaatgtccattgccagttagatatataagtttgcaatttgcaaggaatgcgattgctgggggtttatatgtgataagagaaagccaagaaatgaaggtcatggtgtcgggagagagtgtagagagagaaaaagttttaaacatgattctgaasacctttcgcttttaaagggaggggagagaaaagccgcaaaggaaacatccacagccacaaaggaatggctgtacattagaaggcaacagcagagaaagataatg

SEQ ID NO: 440345 - DNA, 520 bp, Homo sapiens
aataagataagttagtgaactgaagtggagaaagaaataaaatgggattaggaaaggatgtgggttatgttttctgggcatagtttttccttttttgcaatgtatatttttctcaatagatttcatgtaattgaggtactggcaaatgacattaatatatttcatatatttattttaagtcacggcatatttaattacaatagtaatttatcagttttaattaatactactgtgactatcagtaagatgcctagttttgttaattatttagrcaggaatagataactaattcaatctttcatcaaaatattcaattaatattgataatataatggttactgcaattactggctttaattaagttacttaacttgcgccattgtcatgctagtttactacaacttgactgcatttctccggtagagccagatatgataagaaatcttttataatactccttggtaatttttccggattttatgaatattacaatcttacatgaatacaaaaataactaaat

SEQ ID NO: 440346 - DNA, 589 bp, Homo sapiens
cagtttggatgcagaaaattcaactctgaagtcttagctcttacatgctctctgggaatatttcgggccataagaaccagagctgatttatagaccagtcaatcctttcctagtagagtcctgcctatgtaatgacagagtctttctcttcagtttccatttgtctccttcactgtaatgccccatttgctcatggcaacattacaatgaaattgggccccgctttacttatgctccttgtaaaggagtatatacgttatattctagttttgtcttcttgaggatacactatcataaacatgagtgtatttgtaaaacatgttgttygccccagtaaatgtattcataaaccctatatatttctatccatttaaaattctacatagtactattcttttaatcaaatatgcaccatactttagatttccacctgtgtagcacaaatttaagaaagaacaagtcattgtcaggctacagacatgaactaaatcagagctaaaccaatgaactaaggctcagagctcagggagagcacacctggaaaggttaactaaagtaaaggaattattaaaggtgtggaaatggaaac

SEQ ID NO: 440347 - DNA, 606 bp, Homo sapiens
  misc_feature (1)...(606): n = A,T,C or G
ggaggtgtgacgctgctaccagtgtctggctggattcccaagccagtgggtcttaccctgagacaggccatggaaggtgggcctgccacttgtcactgcccagcaccctgaatgaaacccctttcctaggggtatgtayaggggtctagcgtcctgcttggctggagttatagcttcttttgtggggaagcctgggtatctaaggctccagggtacccatgcatgcctgagcagctgctctgctgaaaccctacgtagccctgcatgtcagactgaaggctctggtagagtgggttcactaggagatctcctgatctgaggattgcaaagatccgtgagagaagcatgggtccccagggctgctgacttaccacttccctgggaaggagaggctcccctggctctgtgacactccttggtgggcagtcgtcctgccttgctttgctctgttctccatgggtcaagctgttgagtcccaatgtgtgtacctggatgtttcagttgaaggtgctgtatttacttgccccttncatttctctccacgagagtggcacacactagcagcttctaggtggccgtcttggccaaccctgaaaactatntgtt

SEQ ID NO: 440348 - DNA, 606 bp, Homo sapiens
  misc_feature (1)...(606): n = A,T,C or G
ggaggtgtgacgctgctaccagtgtctggctggattcccaagccagtgggtcttaccctgagacaggccatggaaggtgggcctgccacttgtcactgcccagcaccctgaatgaaacccctttcctaggggtatgtataggggtctagcgtcctgcttggctggagttatagcttcttttgtggggaagcctgggtatctaaggctccagggtacccatgcatgcctgagcagctgctctgctgaaaccctacrtagccctgcatgtcagactgaaggctctggtagagtgggttcactaggagatctcctgatctgaggattgcaaagatccgtgagagaagcatgggtccccagggctgctgacttaccacttccctgggaaggagaggctcccctggctctgtgacactccttggtgggcagtcgtcctgccttgctttgctctgttctccatgggtcaagctgttgagtcccaatgtgtgtacctggatgtttcagttgaaggtgctgtatttacttgccccttncatttctctccacgagagtggcacacactagcagcttctaggtggccgtcttggccaaccctgaaaactatntgtt

SEQ ID NO: 440349 - DNA, 606 bp, Homo sapiens
  misc_feature (1)...(606): n = A,T,C or G
ggaggtgtgacgctgctaccagtgtctggctggattcccaagccagtgggtcttaccctgagacaggccatggaaggtgggcctgccacttgtcactgcccagcaccctgaatgaaacccctttcctaggggtatgtataggggtctagcgtcctgcttggctggagttatagcttcttttgtggggaagcctgggtatctaaggctccagggtacccatgcatgcctgagcagctgctctgctgaaaccctacgtagccctgcatgtcagactgaaggctctggtagagtgggttcactaggagatmtcctgatctgaggattgcaaagatccgtgagagaagcatgggtccccagggctgctgacttaccacttccctgggaaggagaggctcccctggctctgtgacactccttggtgggcagtcgtcctgccttgctttgctctgttctccatgggtcaagctgttgagtcccaatgtgtgtacctggatgtttcagttgaaggtgctgtatttacttgccccttncatttctctccacgagagtggcacacactagcagcttctaggtggccgtcttggccaaccctgaaaactatntgtt

SEQ ID NO: 440350 - DNA, 606 bp, Homo sapiens
  misc_feature (1)...(606): n = A,T,C or G
ggaggtgtgacgctgctaccagtgtctggctggattcccaagccagtgggtcttaccctgagacaggccatggaaggtgggcctgccacttgtcactgcccagcaccctgaatgaaacccctttcctaggggtatgtataggggtctagcgtcctgcttggctggagttatagcttcttttgtggggaagcctgggtatctaaggctccagggtacccatgcatgcctgagcagctgctctgctgaaaccctacgtagccctgcatgtcagactgaaggctctggtagagtgggttcactaggagatctcctgatctgaggattgcaaagatccgtgagagaagcatgggtccccagggctgctgacttaccacttccctgggaaggagaggctcccctggctctgtgacactcctkggtgggcagtcgtcctgccttgctttgctctgttctccatgggtcaagctgttgagtcccaatgtgtgtacctggatgtttcagttgaaggtgctgtatttacttgccccttncatttctctccacgagagtggcacacactagcagcttctaggtggccgtcttggccaaccctgaaaactatntgtt

SEQ ID NO: 440351 - DNA, 623 bp, Homo sapiens
gattaatatttattttaacatatttctctgcattaatccttagactttgtttttccattgggaggacagatctactcccttataatttttttttaaattgtctacttagaatctaaagtcagtcagttaaatttacttgtaacatctttgttgcccttgttcgtatctattccttggctgtttaacaggcccttttgcacaagccagtgatctcaaccctccgtaagggtttcaccttggattgctggcatgtttagaacaggtcatccgtccagattttacacaatgagtgtaatacaaataaaggtttgttgaaaatgattgaattaattttttaaaatttctatttttctttttaataattgacagataattgtatctattaatggcaaacatagtgatgttttaatactcacgtagtgatcagatcagggtaattagcatatccatcatctcaaacatttatcatttctttgtgttgggaacagtcctccaagtgtcctccttctagctatttacarctatataatatgttactgtaaactagatcctacagtggtataaaacagtggtccccaaacctttttggcaccagagactgggtttgcagaaggcaattttcc

SEQ ID NO: 440352 - DNA, 524 bp, Homo sapiens
tgggagttaaaaatgggatccagaaaaacagggaggaaagggggaagtgtgccaggtctcagaaccagcaaaggttgctatgtatatttcacttcagtttaggagactaactttatatggaagtatattctggaattctgagagccagaaagggaatgtgccaggtgccagaatcagctaataaacatcatatatcttctgcacttcaatctagatggtgcttcttctctctcaggtatttatacaagccaccatttcctgactgaatacaaatagcaaacttctttgaaataaggagggataatttttcaacccctccagattttttgacagaattctaggttttyagtttgcctcctttggagatgggtttctgaaagggaggacgtagttcctaagaatgttatagaaagacgaataatattctcttctctagctggatgaaggaaaatagaaaaatacctgccatattttaaatccttactctgtgaaggataccacacacagtgctttaaactatatgt

SEQ ID NO: 440353 - DNA, 586 bp, Homo sapiens
tgcagtgcccctggagaaggacacataaaaccttgtttctgccctgaatcccttggaggagatacaggaagtcgtggcacagtgccacctggagacagctaggttttgtgagatcaaggatccaaaatgaatatggtcatgcctggactctccctgcctggcaagttcagtactgcaaaggttaagtacttgaagttaaatactgctaggcacaaaaacatagtcaatagagrgaatctttcccacgtgattatacccaacgtgttggtaaagaatgcagaagttcatctgtgcccctgttcaggtgcttctatgttctgattcctctaggaagagactacactaggctcaggactctcatttgttgaaaaaagcagagcccacattatgaaacatgaagaagaaaaggcaagcagcagctttagaacttggaaggaagagagagatacttaacacattgactggaagagcggcaggtcctcaggagatggagcaatacaaatgggagcactgaatcaactacttaagattattctgatcagagagaagattaaagtggatgctgaaaccacagagtgttcccatg

SEQ ID NO: 440354 - DNA, 586 bp, Homo sapiens
tgcagtgcccctggagaaggacacataaaaccttgtttctgccctgaatcccttggaggagatacaggaagtcgtggcacagtgccacctggagacagctaggttttgtgagatcaaggatccaaaatgaatatggtcatgcctggactctccctgcctggcaagttcagtactgcaaaggttaagtacttgaagttaaatactgctaggcacaaaaacatagtcaatagagagaatctttcccacgtgattatacccaacgtgttggtaaagaatgcagaagttcatctgtgcccctgttcaggtgcttctatgttctgattcctctaggaagagactacactaggctcaggactctcatttgttgaaaaaagcagagcccacattatgaaacatgaagaagaaaaggcaagcagcagctttagaacttggaaggaagagagagatacttaacacattgactggaagagcggcaggtcctcaggagatggagcaatacmaatgggagcactgaatcaactacttaagattattctgatcagagagaagattaaagtggatgctgaaaccacagagtgttcccatg

SEQ ID NO: 440355 - DNA, 612 bp, Homo sapiens
atttatatttctctccaaacagttgtataaaagggtgtaatccaaatagtgttactgagaagacagagttagtattttaaaaatatcttaaaacagcctggcatggtggctgatgcctgtaatcccagcactttggaacactgaggcaggatgatcgcttgagcccaggagcaccagaccaggctgggcacatgttgaaaccctgtctctacaaaaaatttgaaaaattagccaagcatggtcgtgcatgcttgtggtcccagttactcaagagactgaggtaaaaggactgcttgagcccagaaggtcagrttgcagtgaaccgtgatcgcaccactgtactgcagcctaggtgacacagtaagaccctgtctcaaaaaagaaaatcttaaaacagtggatggttcctattaggcatgcaataaatgttggtgttatcatttttaatattagtattattattatcatcatccagattaaaatagaaacttttgggatcatccaattctatttctattaattccaggttcctcaagcctatcttatcattgcctgggtggatttattaactaggtagagtcttcagacaagcttaatgtctaacaccctgcc

SEQ ID NO: 440356 - DNA, 602 bp, Homo sapiens
ctgagaagggtgtgaaagtgatttgagaaatggaggctacaggaagaaataggaggaagaaagaggaacactcatggaaagccttcgtatgttccccaaaccaaaagcccttggattcaagagggcaatgtctatttgccctcttgacataaagtagtaacctctagaagagttggagcttggggtaagaactcacaaatgacaaagaaagactatctcctcctcccaaaggggtgctaactcagaaaaagcaagtggggccacagagtgaggccttatgcaggtggacagattgcttcaagggccactggaaaacttgtccctggggcataacaggaacaaaaacatatggtaagtcataagtagccgacagagccagagttccaattagtgtctgtcccagcaatgtgccagcagacaggggaagggttggaggtcatctgagctggtagggtaaaaacaaacataaatctcagaggatatccacaaggtagcccatgtttttgctcccacscaaatgcagcaagagccacaggtgcccaaataacaaggagtgtgtgtttaagaagttatgtggcatgcaaagtgaaagcaaaaagtca

SEQ ID NO: 440357 - DNA, 602 bp, Homo sapiens
ctgagaagggtgtgaaagtgatttgagaaatggaggctacaggaagaaataggaggaagaaagaggaacactcatggaaagccttcgtatgttccccaaaccaaaagcccttggattcaagagggcaatgtctatttgccctcttgacataaagtagtaacctctagaagagttggagcttggggtaagaactcacaaatgacaaagaaagactatctcctcctcccaaaggggtgctaactcagaaaaagcaagtggggccacagagtgaggccttatgcaggtggacagattgcttcaagggccactggaaaacttgtccctggggcataacaggaacaaaaacatatggtaagtcataagtagccgacagagccagagttccaattagtgtctgtcccagcaatgtgccagcagacaggggaagggttggaggtcatctgagctggtagggtaaaaacaaacataaatctcagaggatatccacaaggtagcccatgtttttgctcccacgcaaatgcagcaagagcyacaggtgcccaaataacaaggagtgtgtgtttaagaagttatgtggcatgcaaagtgaaagcaaaaagtca

SEQ ID NO: 440358 - DNA, 560 bp, Homo sapiens
atcgcagtatcttacaactggggaacatatctgaatcacgcagcaacaaattatgttattagcagaatgtatccaagtcacggcaccaaagtatgttaccagcagcaaatccacatgagtctgtagcaacctcaattcttgcctcctcagaataaacaattcaactgargggcacacggcagaatgagagactgaggcaagttttagagcaggagtaaaagtttatttaaaagctctaaagcaggaatgaaaggaaataaagtacacttagaagagggccgagaaggtgacttgagagatcaagtgcatgcctcagacccatggactggttatctggaagccctgatgcttccattttttcccttgcccaaactttctggaaggaagaaaggttaatttttgaactgaaggagttattttattctttactcctgtgtcacagccctgagtagactattatccaatatctgtaaattggtactttatacattttttgacagttctgtacttgttaaaggcagtaggacatggtccagccttcttaatgcatcatacctgaa

SEQ ID NO: 440359 - DNA, 560 bp, Homo sapiens
atcgcagtatcttacaactggggaacatatctgaatcacgcagcaacaaattatgttattagcagaatgtatccaagtcacggcaccaaagtatgttaccagcagcaaatccacatgagtctgtagcaacctcaattcttgcctcctcagaataaacaattcaactgaggggcacacggcagaatgagagactgaggcaagttttagagcaggagtaaaagtttatttaaaagctctaaagcaggaatgaaaggaaataaagtacacttagaagagggccgagaaggtgacttgagagatcaagtgcatgcctcagacccatggactggttatctggaagccctgatgcttccattttttcccttgcccaaactttctggaagraagaaaggttaatttttgaactgaaggagttattttattctttactcctgtgtcacagccctgagtagactattatccaatatctgtaaattggtactttatacattttttgacagttctgtacttgttaaaggcagtaggacatggtccagccttcttaatgcatcatacctgaa

SEQ ID NO: 440360 - DNA, 560 bp, Homo sapiens
atcgcagtatcttacaactggggaacatatctgaatcacgcagcaacaaattatgttattagcagaatgtatccaagtcacggcaccaaagtatgttaccagcagcaaatccacatgagtctgtagcaacctcaattcttgcctcctcagaataaacaattcaactgaggggcacacggcagaatgagagactgaggcaagttttagagcaggagtaaaagtttatttaaaagctctaaagcaggaatgaaaggaaataaagtacacttagaagagggccgagaaggtgacttgagagatcaagtgcatgcctcagacccatggactggttatctggaagccctgatgcttccattttttcccttgcccaaactttctggaaggaagaaaggttaatttttgaactgaaggagttattttattctttacycctgtgtcacagccctgagtagactattatccaatatctgtaaattggtactttatacattttttgacagttctgtacttgttaaaggcagtaggacatggtccagccttcttaatgcatcatacctgaa

SEQ ID NO: 440361 - DNA, 518 bp, Homo sapiens
caattgactgtttgaaggacaaaagcaatcatcttccartaatgatgtgccaaaatttctcaattgtgatgagctgactcctgccagcacatttagagggagttagggagggttaaattggaagataggtggctgtgtgcacattaggccagagggtcagattaaagatgtggtctctaacttgaggggtaaggaggtgctggggaaagaataaaaatgttgtggttcttgggattaggattgatatacccacatctgacttactaccactgttcgtagaaagcagagacatcaattaggcaaggtaaagaaaagggcccaaatatcattttccattattctgaattaattattggaacacagatacatcaggaatgagagtactgggaaaagatgagaacatcattagacttagagaacaggcaaggcaggtcaggggagacagcagggcctagggcttctaaccaaaggtcacaaataatttatctgagtgtgagagaggtcttcagagtaaaatc

SEQ ID NO: 440362 - DNA, 573 bp, Homo sapiens
aaggggtgaggaagagcagaagcaaaatggtgcaagagatgtagaacaaaggtagcaaatgggcaggagctcaaagaaaagtaatcattactggtccaaggggatgttttcagctttagtgaattcagccttactagacagttgagggtgatgaaccaaacayaagacactgtgcaccagaaaggcaaatttgtaagagcacaatattctgtctgtagaatggacaagtataattatctcaagttctccactagtagacagataaactcagaagatcagtatattgcatgttatctgttgtgatggttaacattgagtgttatcctgattgaattgaaggatgcaaagtgttgttcctaggtggtgtctgtgaagggtattgccaaaggagattaaaatttgagtcagtgaactgcgagaggcagacccacactcagtcactgtgggcaccatctaatcagctgccagcatggctagaattaagtagggaggagaagatggaagaggagacttgctgagtattctggccttcatctttctgatggatgcttcctgcctttgaaatcagactcc

SEQ ID NO: 440363 - DNA, 573 bp, Homo sapiens
aaggggtgaggaagagcagaagcaaaatggtgcaagagatgtagaacaaaggtagcaaatgggcaggagctcaaagaaaagtaatcattactggtccaaggggatgttttcagctttagtgaattcagccttactagacagttgagggtgatgaaccaaacataagacactgtgcaccagaaaggcaaatttgtaagagcacaatattctgtctgtagaatggacaagtataattatctcaagttctccactagtagacagataaactcagaagatcagtatattgcrtgttatctgttgtgatggttaacattgagtgttatcctgattgaattgaaggatgcaaagtgttgttcctaggtggtgtctgtgaagggtattgccaaaggagattaaaatttgagtcagtgaactgcgagaggcagacccacactcagtcactgtgggcaccatctaatcagctgccagcatggctagaattaagtagggaggagaagatggaagaggagacttgctgagtattctggccttcatctttctgatggatgcttcctgcctttgaaatcagactcc

SEQ ID NO: 440364 - DNA, 581 bp, Homo sapiens
agtcaaatttcataaaatatttgaagagatttattctgagccaaatatgagtgaccattgcctgtgacactkggctcaggagatcccaagaacatatacccgaggaggttggggtgcagcttggttttatatattttaaggagacatgagactttaatcaaatacatttaagaaatacattggttcagtccagaaaggtgggacaggtcgaagcatgggggcttccaggttataggtagatttaaaatttttctgactggtaattggttgaaagagttattattaatagaaaggaaagcctgggttgcaataagttgtagagaccaaaattttatgcagatgaagcttccaggtagcaggcttcagagagaatagattgtaaaagcttcttatgagacttaagttctgtgttgatgttaatgccagggagagttccaatgaagcatgtccaactgtcatgcctgaaccagtctttcaggttaaattttaagaataccctgtcagaggaggaagttcattcaggtggtttgggggccttataattttatgtttataatttacatgttatatatgctacagta

SEQ ID NO: 440365 - DNA, 581 bp, Homo sapiens
agtcaaatttcataaaatatttgaagagatttattctgagccaaatatgagtgaccattgcctgtgacacttggctcaggagatcccaagaacatatacccgaggaggttggggtgcagcttggttttatatattttaaggagacatgagactttaatcaaatacatttaagaaatacattggttcagtccagaaaggtgggacaggtcgaagcatgggggcttccaggttataggtagatttaaaatttttctgactggtaattggttgaaagagttattattaatagaaaggaaagcctgggttgcaataagttgtagagaccaaaattttatgcagatgaagcttccaggtagcaggcttcagagagaatagattgtaaawgcttcttatgagacttaagttctgtgttgatgttaatgccagggagagttccaatgaagcatgtccaactgtcatgcctgaaccagtctttcaggttaaattttaagaataccctgtcagaggaggaagttcattcaggtggtttgggggccttataattttatgtttataatttacatgttatatatgctacagta

SEQ ID NO: 440366 - DNA, 463 bp, Homo sapiens
ccaaattctaattccacttgaagagactgcagaagacccagggctctcatttgtttaaaaatctaaagctcacaacattaacttgaagaaggtactcaagagctggaacaattccagtgggagcactaagtcaactgttcagatcattgcaattaggagagaagattaaagtggttgctaagagcacagagtttcctcatggagatgtggccaacatcagtgtcttcagcatwggttaccctgataccacagcagactgagagtattgaaaggggcaagggttattccagtgtcagctgtaaaattctgtttcctccctaggactcagtaagttatcacagtgcaggaaaaattattcatagggccaatgaaatccaagacatctcatgaattctggtcacaatggagacttcgtttaaaaacaaaacaaaatgaaacaacacctgaacagaagacataaagg

SEQ ID NO: 440367 - DNA, 571 bp, Homo sapiens
aactactaaaagttgttaatttttgcaatgtatatttctgaaaagaaagtttatctattatagaaattcctgtgcccatttaagaactttgagcattttaattgtttaataatatagtttaattgcatcatgaaaataatcaataatacaatttatttggtttatttaaaaaaactgattctttctgctctctctatatatagactgattttatactaatgttgcctaaagatcaycaaattgtttgaagcctaggtttctgagggatggaaaatgatgtcacaactatttacagttcacacacacattctggggatttaatacatcctttacaagtgcaggaaaggtggaagattgatgatttgggggaattagagctaccacaccccagagggtggtatggtatgttgtctgttgtgagctgtgtgaatcagagagtttgaatttagacatatatttagaaagaggaaaagatgaaccaatcaaaaataataactataatgacttttcaagatatagacaatacagttaagatataaatggaaacaaaaaaagttaaaagtggggagat

SEQ ID NO: 440368 - DNA, 404 bp, Homo sapiens
ccgcctcccgggttaaagcgattctcttgccccagcctcccgagtagctgggattacaggcgtgtgccaccacgcccagctaattttttgtatctttagtagagacagggtttcaccatgttggacaggctggtctcgaactcctgacctcatgttccgcccacctcagcctcccaaagtgctgggattasaggcatgagccaccgcgcccagccagattattttactttttaaaatattgatgttaagttgtgaagctacatatgctgttacaagtgacaatgtatagcagtgttaacaaagcagccgtgacctcattcctggaaatctgtcaccaaggccatccaaaaagtatccattaaattacttttccagattttttcttgtcccaaaaatatgtttaa

SEQ ID NO: 440369 - DNA, 551 bp, Homo sapiens
cttttccagattttttcttgtcccaaaaatatgtttaatgaactttatctgaaggcaggatatgtcaatactattttttctcatagctaaggtttaacacgctcctgataaggttttaagatattcatataatgtatgtattttatgtatatttacttatatatttatacatatatctatgtttatacatatctatgtatgcatattgatagactgtacacatayatccatgagatgtccaataaattacttacacatggtagaggactgtatgatgctcctctttgctcccacctcaggactttagaacttgctgttcactttgtatggaatgcttttccccagataactacatgctcactctcccatctcctgtatcttcacccttgtttattctctttacagcacttctcagagctcacaggatatgtttaattatttctattgtaaactcctcagggtaagttccatgagggcaaagaccttgttcattttattcactttatatccctcgtgcttatcacaatgccatataatagaagctcactaaa

SEQ ID NO: 440370 - DNA, 589 bp, Homo sapiens
aaactgtttctgtgcaggtaaggagacatttcatttattagcttgcttaaagctatgaagaatatttcggaagagcttgcagcctctgccaacccacttayattagtttcctattgttgctgtaacaaattaccacaaacgtagtgacataaaacaacaaaaacctattatcttaaggttctgtagatgggaagctgacacaggtcccatggagctaaaagcaaagcgtcggcagggctctgtcctttctggaggatctaagggatgatccattttcttactcattcaggttggcaaaatgtaggtccctgaggttgtaggactgaagtttccatttccatgcagctgtgggctgagggtcattcccagctgcttgcattgcttggtttatgttcctttctcccgtcttccaagtcagcagcaggagaggggattgtgccaagtcctcctcatgttttgaatctttcctctttctttggtcccatctctctgacacagttggaaaagattctccatttttaaggactcatgattaggttgggccacccagatgatccaggataatctccccattttaagattcatcctc

SEQ ID NO: 440371 - DNA, 589 bp, Homo sapiens
aaactgtttctgtgcaggtaaggagacatttcatttattagcttgcttaaagctatgaagaatatttcggaagagcttgcagcctctgccaacccacttatattagtttcctattgttgctgtaacaaattaccacaaacgtagtgacataaaacaacaaaaacctattatcttaaggttctgtagatgggaagctgacacaggtcccatggagctaaaagcaaagcgtcggcagggctctgtcctttctggaggatctaagggatgatccattttcttactcattcaggttggcaaaatgtaggtccctgaggttgtaggactgawgtttccatttccatgcagctgtgggctgagggtcattcccagctgcttgcattgcttggtttatgttcctttctcccgtcttccaagtcagcagcaggagaggggattgtgccaagtcctcctcatgttttgaatctttcctctttctttggtcccatctctctgacacagttggaaaagattctccatttttaaggactcatgattaggttgggccacccagatgatccaggataatctccccattttaagattcatcctc

SEQ ID NO: 440372 - DNA, 580 bp, Homo sapiens
ttatttggggtagcaaggtgtccagccaaacaacaaccctggttctaagttttccttgcagctaggggtggtcagtgtgacacatttctggttgaggagatataaatggaagtcactagatggggattctagggaagctctctaaaagaagctgactgctgaaatgcaccttctttacctatgccctgtccctgttgcctgcctggaatacagacacgtggcaggcactgaggctgccatcttggaaatgtgggagtcaagctctaaggatggctgactggagagctggaaagagctgagttgttccgtaacagtattgtaaaactccagtaccatccttggactgtccccctctggatttcttttgtatgagagaacaatattgagggcgtgagagaagaggggttgccctgttcttaagcaactgaatttaattcctcactggtctctgtactccgacaattgattctcamtctaaagacttacaagattcataagtgtcttctagcaacaggaaataacctgtgaaaaaggaactttcttaatactaaatttagccctaataatttcaaaacagaag

SEQ ID NO: 440373 - DNA, 415 bp, Homo sapiens
acctcattttcagattgcattctcaatctgaaggactgaagaattctcagtctgaattcctaattttttaaagtaaatttatcttgtataatttcaaagtttgtcatactttagaaaatttataaacttatgaaaaataaaaaagtgttttccctctagctaaagcagaagtagctcttcaaataccccctctttctttgaagaggtgacttccacctgtatcttccatgatgtttacaagcatatatactgaaggtcattcatttgtaagttaattggcaaaaatatcttgytttcaaatactctttctttttgcattcaaagtcatttcacatctgagccaaaatgagaagattcaggacattataaaatcatcatcatgaatgcgtgatgactttatagtaaagaagacttc

SEQ ID NO: 440374 - DNA, 665 bp, Homo sapiens
aattgaaatctcttagtcccatttctaaatttctgtagaaaactatgacctattctgggtgaggggtctacccctagtcaattggctaaggccagggggaagaaacaggtcctaggatcatgtggatagtggagaaacaattctagagaaggtagaactctgataagctgaacagaacccccaagagtgtcttctagcttcattgaagaaccatacattggattttaaccggtgggccaaggccctccctgggtagagaatggtgggtgcaggggggtgggtggagacttatatttactgaagggatccttccttgaaaccatctacctagataacaagcattctctatagactgaaaataaatggtatattttgagcatatgtgttgtagaagctcttaaaattcatgcaatttaaattctttcagtatgttaccaaattagttatatgttttagtcatcatatgtcttcaatatcaatagtaaggctattcttttgtgggaggagtccctattatgcaaaataatgaaggaccctrtgtataaggttaggtatggactaaaagtctgtatgagtagtgaggattggctgggatgttcaacagaaagctctgcacatgaattttattttattagttcccttattttcttatattatcatgaacc

SEQ ID NO: 440375 - DNA, 627 bp, Homo sapiens
tgtgcaggcattttaggtgcaattagcacagtagattaaaatcattttgaagtgacctcattcactccccaaattgcttaaattgattttagaatttcctgcccatgcaartggccagatgaaacatggataactggggaactactaataggtttcagtgaggttacccttgtcaaccaagggaaagagataaaaactattatagcaagtcttttagtgcatttttttttcaaggctccagcctttttcaatgggcttttgtaggattttccataaacatgggtgcccaagattctgttgtgttttatcacaacaaaacagtcctcatctttgctaagtggcatcactaaataaaacttttaagtttctctatggaaagagaaactataaagccagtcaaaagacagatgatacactgggggaaaacatttgcaacaatgtgacagacaaaaagttaatacccttaatgttaaaaagcctcctggcaagtgtttaaaaaaaaaacaactcagtagaaaaccaggcagttcacagaaagggaaatgcagtggccaataagcttgtgaaaaagggccaccttattggttttcagagaaattcaagttaaaacatcacttaccagattga

SEQ ID NO: 440376 - DNA, 627 bp, Homo sapiens
tgtgcaggcattttaggtgcaattagcacagtagattaaaatcattttgaagtgacctcattcactccccaaattgcttaaattgattttagaatttcctgcccatgcaagtggccagatgaaacatggataactggggaactactaataggtttcagtgaggttacccwtgtcaaccaagggaaagagataaaaactattatagcaagtcttttagtgcatttttttttcaaggctccagcctttttcaatgggcttttgtaggattttccataaacatgggtgcccaagattctgttgtgttttatcacaacaaaacagtcctcatctttgctaagtggcatcactaaataaaacttttaagtttctctatggaaagagaaactataaagccagtcaaaagacagatgatacactgggggaaaacatttgcaacaatgtgacagacaaaaagttaatacccttaatgttaaaaagcctcctggcaagtgtttaaaaaaaaaacaactcagtagaaaaccaggcagttcacagaaagggaaatgcagtggccaataagcttgtgaaaaagggccaccttattggttttcagagaaattcaagttaaaacatcacttaccagattga

SEQ ID NO: 440377 - DNA, 627 bp, Homo sapiens
tgtgcaggcattttaggtgcaattagcacagtagattaaaatcattttgaagtgacctcattcactccccaaattgcttaaattgattttagaatttcctgcccatgcaagtggccagatgaaacatggataactggggaactactaataggtttcagtgaggttacccttgtcaaccaagggaaagagataaaaactattatagcaagtcttttagtgcatttttttttcaaggctccagcctttttcaatgggcttttgtaggattttccataaacatgggtgcccaagattctgttgtgttttatcacaacaaaacagtcctcatctttgctaagtggcatcactaaataaaacttttaagtttctctatggaaagagaaactataaagccagtcaaaagacagatgatacactgggggaaaacatytgcaacaatgtgacagacaaaaagttaatacccttaatgttaaaaagcctcctggcaagtgtttaaaaaaaaaacaactcagtagaaaaccaggcagttcacagaaagggaaatgcagtggccaataagcttgtgaaaaagggccaccttattggttttcagagaaattcaagttaaaacatcacttaccagattga

SEQ ID NO: 440378 - DNA, 544 bp, Homo sapiens
accagcctgtcatataagaaatgtctttcagttcttcaagctgaaagaaaaggacactaattagtaaaatgaaaacttatgaaagtgtaaaactcactggttcagagtaagtacactgtcaaaatcagtatactctagtactgtaatggtggtgtttaatttacttaaacctttagtatgaaggtttacagacaaaactattaatatctacaataatttgataagagaaatgcaatataaggagayataaattgtgacatctaaaacataaactttgttgaggggagagtaaaagtgttgagtttttcgatgtgatcaaattaaaagttcttgtcagcttaaaataacccagaaattaatccacacttgtatggtaaattgatttttgataaaggtgccaagaacatacaatggggaaagaccgtctcttcaataaatggtgttggtgaaccagatattcacatgcagaagagtgaagttaaaacgcttacctcccgtcgcacaaaaatcaactcaaaatggatgaaagtcttaaattgtacag

SEQ ID NO: 440379 - DNA, 544 bp, Homo sapiens
accagcctgtcatataagaaatgtctttcagttcttcaagctgaaagaaaaggacactaattagtaaaatgaaaacttatgaaagtgtaaaactcactggttcagagtaagtacactgtcaaaatcagtatactctagtactgtaatggtggtgtttaatttacttaaacctttagtatgaaggtttacagacaaaactattaatatctacaataatttgataagagaaatgcaatataaggagacataaattgtgacatctaaaacataaactttgttgaggggagagtaaaagtgttgagtttttcgatgtgatcaaattaaaagttcttgtcagcttaaaataacccagaaattaatccacacttgtatggtaaattgatttttgataaagktgccaagaacatacaatggggaaagaccgtctcttcaataaatggtgttggtgaaccagatattcacatgcagaagagtgaagttaaaacgcttacctcccgtcgcacaaaaatcaactcaaaatggatgaaagtcttaaattgtacag

SEQ ID NO: 440380 - DNA, 537 bp, Homo sapiens
acagtgagtattttggatttttctttttctatttcatcaagtagaagatggacctaaaatgtttggccagagagaaatagaaaagccaatcccagtttaaattgtttgaatctgattcaatcaggatctcagatcttccggttcacgatttcagcttgttttgaaagctamctgaattgaggagggggcagggcacagaatgagttttggctttaatacactaaagactaccccaataacctgaaagacccagtagaaaaccatgggctaaatgagatactgaatgaaagctgggtactgagacccccacccttccttgtttctggtgatttcatgctccaaatcttgtcatgatacactgcacacatccctctgtatagtgctttaagtggttgtgagagaggaaggggagcccatgggtcagaaaccccttgttacatggaaagagcagagaaagaagaattagagtggatgccttctctgtctgggcctagcatcacgtcatttggtcttttcccatgagcaatggaatcaagc

SEQ ID NO: 440381 - DNA, 523 bp, Homo sapiens
agttatggtcactcaacaaatatatgtgttgagaccgtgatgtgctagccctcaggttcagcatcaaatacatatcaaaaaaatagaaactctgataataagagatgtayaaacaatcacagcataatatagggagatctgattctgagctgcttgtatacagtaaggggcaaggagatgccaatagtcaatctggacacaacattcagcacgtagagttagttgctgtaaaggccaagccctagaagcatactgatctgtttttatagtggttattatgtatggatgggtgttgagtgatggctctagctgcttgccccagcagaaatcctgttgagcagctgcagtaagggttcaggagttctatgacagcagagtaaaatccatgggccagacaattggtcattgcaacaggttccatcatgaagtgacgaggcaaacatattcataggtgggcagtctagaataaggctcaacttaaaaatgccaggacaggttgccagcaggtcgcagagcccacccc

SEQ ID NO: 440382 - DNA, 605 bp, Homo sapiens
aatagtcaatctggacacaacattcagcaygtagagttagttgctgtaaaggccaagccctagaagcatactgatctgtttttatagtggttattatgtatggatgggtgttgagtgatggctctagctgcttgccccagcagaaatcctgttgagcagctgcagtaagggttcaggagttctatgacagcagagtaaaatccatgggccagacaattggtcattgcaacaggttccatcatgaagtgacgaggcaaacatattcataggtgggcagtctagaataaggctcaacttaaaaatgccaggacaggttgccagcaggtcgcagagcccaccccagggccatatgagaggctggatttgggttttggggatgagataagcaggagaaaggcagatggtcccaagtcctaggagtacaggaatgctcagcaggtgagcagatgggctttggtacagggaataaatagaaattccatcaccagaaatgagtcactgcttaggatataagtcttatgaacagggagagagtccacttttcataccgtgagtacagatcagaaacagtcaaggggatctggacactgggccctgtatgttag

SEQ ID NO: 440383 - DNA, 611 bp, Homo sapiens
aagctcttaaaaaaaggttttctcagactggttagccagatgattttaagtggctaaaggatgagcattctttatatactaatatatgtatttatttttcattgtcatattccatttatatgaagtgataccagatttttatagtgatgattgcatttcttttgaagtaattttatttgagtaacatttccctcctgtggtttcttcactcacagctgacccaccacaactctttacttgccttgttcagatggtcctaaattgtaaaccctccagtctcctttccaaagctttctctcttggccatctattcaatggtggtcttgagggaaactgttccccttgtgtgctggtgtactggagtgggtcgccaatggaaaatcagaaaaccacctgggtttcccataatgtggggctggtccagtccagagcttcctagttttccctcagtctcatgtcaccatcacagctgttgccatgtctatgcaccctgtctactcatgatgactcaatattttcttcacatagaccragttgattatttactcaataaaattattcacaaattacagctagatagggaagagtaaattctagtcttctataccatt

SEQ ID NO: 440384 - DNA, 450 bp, Homo sapiens
ccgcatgctgctacccaagccttgctgctgctgcttcatttctggagcttcactgtcgtccaactgtgcagctccttcgtgtgaccgcaccagcccgagcctgcacactgtaacacctccctccatggcatctccatgcagagatggagtgaatttaaatgactgggaaaggaccctgcagccactttcggaccccttgggtttctccttgctatctgtagaaggaagaggtggcactctgtctctcagttttgttttgttttttttgagatggagtctcgckctgtcgcccaggctggagtgcagtggtacgatctcggctcactgcaacctccgcctcccgggttcaagcaattctcctgcctcagcctcccaagtagctaggactacaggcacatgccaccatgcccagctaatttttgtattttagtagagacagggtttcaccat

SEQ ID NO: 440385 - DNA, 554 bp, Homo sapiens
tattaatcttgtcaacctaaagagcaagcagagaggtatactctctaaaagaaaatgatatttatttggtaataggcattgcagtgggaacacacatgccatagtaagctatgtgcatattcagggaagtgaaggaagacaaagattcttaaaggaaaagtgaggagggttatatasttgttttgagatgattatccttggctacaagaatcaacaacaaggatggcaccagtctgaggttggacaggcagttgctgggcagatgtcctcacagaagtctttttatgtgtatatgtgtgtgtgtgtgtaaggttacaatggcccttgtgcaaggttgcattgttttcagattcttttgtgatagttcttgttatcaggcatttgtgcatgtccctcccttcatggccttccccagctccacttgtcagggtcttaaacatcttaaaatatgactccattttgattctgataactttcacattccccccttttgaccaagatctttctccagaagcattgctgatcagtcatccttgggttttgattttccctca

SEQ ID NO: 440386 - DNA, 554 bp, Homo sapiens
tattaatcttgtcaacctaaagagcaagcagagaggtatactctctaaaagaaaatgatatttatttggtaataggcattgcagtgggaacacacatgccatagtaagctatgtgcatattcagggaagtgaaggaagacaaagattcttaaaggaaaagtgaggagggttatatagttgttttgagatgattatccttggctacaagaatcaacaacaaggatggcaccagtctgaggttggacaggcagttgctgggcagatgtcctcacagaagtctttttatgtgtatatgtgtgtgtgtgtgtaaggttacaatggcccttgtgcaaggttgcattgttttcagattcttttgtgatagttcttgttatcaggcatttgtgcatgtccctcccttcatggccttccccagctccacttgtcagggtcttaaacatcttaaaatrtgactccattttgattctgataactttcacattccccccttttgaccaagatctttctccagaagcattgctgatcagtcatccttgggttttgattttccctca

SEQ ID NO: 440387 - DNA, 554 bp, Homo sapiens
tattaatcttgtcaacctaaagagcaagcagagaggtatactctctaaaagaaaatgatatttatttggtaataggcattgcagtgggaacacacatgccatagtaagctatgtgcatattcagggaagtgaaggaagacaaagattcttaaaggaaaagtgaggagggttatatagttgttttgagatgattatccttggctacaagaatcaacaacaaggatggcaccagtctgaggttggacaggcagttgctgggcagatgtcctcacagaagtctttttatgtgtatatgtgtgtgtgtgtgtaaggttacaatggcccttgtgcaaggttgcattgttttcagattcttttgtgatagttcttgttatcaggcatttgtgcatgtccctcccttcatggccttccccagctccacttgtcagggtcttaaacatcttaaaatatgactccattttgattctgataactttcacattccccscttttgaccaagatctttctccagaagcattgctgatcagtcatccttgggttttgattttccctca

SEQ ID NO: 440388 - DNA, 554 bp, Homo sapiens
tattaatcttgtcaacctaaagagcaagcagagaggtatactctctaaaagaaaatgatatttatttggtaataggcattgcagtgggaacacacatgccatagtaagctatgtgcatattcagggaagtgaaggaagacaaagattcttaaaggaaaagtgaggagggttatatagttgttttgagatgattatccttggctacaagaatcaacaacaaggatggcaccagtctgaggttggacaggcagttgctgggcagatgtcctcacagaagtctttttatgtgtatatgtgtgtgtgtgtgtaaggttacaatggcccttgtgcaaggttgcattgttttcagattcttttgtgatagttcttgttatcaggcatttgtgcatgtccctcccttcatggccttccccagctccacttgtcagggtcttaaacatcttaaaatatgactccattttgattctgataactttcacattccccccttttgaccaagatctttctccaraagcattgctgatcagtcatccttgggttttgattttccctca

SEQ ID NO: 440389 - DNA, 579 bp, Homo sapiens
tcattttcatcaatctaaatagcagagaggtggactctaaaagaaaatgtttatttggtattaggcattgcaatgggaatacatgtgccatagtaaaccatgtgcatattcatggaggtaaaggaaaataaaggtttttaaaggaaatgtaagagaattacataattgttttgagataactattcttggctacaaggatcagtaacaaaggtagcaccagtccaaggctgatgggaagttgctgggcagatgtccttgcagaaggattttgtgtatggcctttgtgcaaagttgtgttttttcagggtcttttatgatagctctttttattaggcatttgcacatgaaaaccctcccttcatgtcctcccctggctctatttgtcaggttcttaaacataagtgactccattttgatcctgaaaastttcacaatcttatgattcttttatttagcatcttctccccaccccattcccaagtacaatgcccagaaggaatcagtgtgagcatttaaaaatcgtgttaatgaataagtagaattgacatctaatttggttttgtagtcattatagtgcct

SEQ ID NO: 440390 - DNA, 579 bp, Homo sapiens
tcattttcatcaatctaaatagcagagaggtggactctaaaagaaaatgtttatttggtattaggcattgcaatgggaatacatgtgccatagtaaaccatgtgcatattcatggaggtaaaggaaaataaaggtttttaaaggaaatgtaagagaattacataattgttttgagataactattcttggctacaaggatcagtaacaaaggtagcaccagtccaaggctgatgggaagttgctgggcagatgtccttgcagaaggattttgtgtatggcctttgtgcaaagttgtgttttttcagggtcttttatgatagctctttttattaggcatttgcacatgaaaaccctcccttcatgtcctcccctggctctatttgtcaggttcttaaacataagtgactccattttgatcctgaaaagtttcacwatcttatgattcttttatttagcatcttctccccaccccattcccaagtacaatgcccagaaggaatcagtgtgagcatttaaaaatcgtgttaatgaataagtagaattgacatctaatttggttttgtagtcattatagtgcct

SEQ ID NO: 440391 - DNA, 553 bp, Homo sapiens
aggggatttgcctcaggtctaggcacaggaatgggcccagacagttgctggtcctggagtctattctgtcctctgggcccagcagtagcttcccatccccactgccccatcttgactctcttgtttatgatgccttcatcctacttgggatgtctgtgtgtgtgtgtgtgtgtgtgtgtgtgtgtgtgttactgtttgtcttagtccattcagtgttgctataacagagtacctgaggctgggtaacttacaaagaaaagaagtttatttggctcacaattctggtggctggagagtttaagaccaggcagctgcatctggtaagggtctcatgctgcttccactcatagtggaaagtggaaagacagcgagtgtgtgcgaagagataacatggtgaaagaggaaasgagagaaaaaccaaggaagccagattctttttaacaatccactgtctaggaaactattccatccttgcaagagtgagaactcattcatcactgcaggaggacattcatctgttcataagagattcaccccccatgacccatgcacc

SEQ ID NO: 440392 - DNA, 559 bp, Homo sapiens
aaatgaaaaagcatactaaagatccttgcattgttaaaaagagaataaagacagtaaccttaggctttgtgaaattatacacacatattaaattttctagggtaatcaatagaagaataaaaatagaatatgtaacttccagactagtgcagggagaaaatgaacaagaaaaaaaatcaattaaaaaagatatgaaatcacaatcacagaagaaatttttaacataactcttaatagatcagacaaaaatcagggctataaaatttatataatacaattcacaagttaatctaacacacatatgtaaaatattggacaaaaatcagggctacaaaatttatataatgcaattcataagttaatctaacatacatatgtaaaatattgctttcaataactagagaatgcatgttgttttcaagcatacatggaacatttgcaaaaactgaccatgtattagrccataaagcaaaaacctgcaaaaaaaaaaaaaaaagatgggaggaaggaggaaggaaagaaaaaacatcctctaaccacaatgaaattaagttagaaa

SEQ ID NO: 440393 - DNA, 586 bp, Homo sapiens
agcctggccaacatagtgaaacccatccctactaaaaatacaaaaattagctgggcatggtggcaggcacttctaatcccagctactccggatgctgaggcaggagaatacttgaasttgggaggcggagtttgcagtgagccaagactgcgccactgcactccagcctgggctacaaagccagactccttctaaaaaaaaaaaaaaaaaaaagaaagaaaaaggagaatctaaatgagtacctgcaatgtgtttgcatatgtttgtgcatttatgtgactttttgtagtgcgtgtgcctgaggagtgtatgtgtatatccgtggaggggtgtgtgtgtgtgcgtgtgtgcatgtgtgcatgtgtgtgtgaagtgctccagagagacagtgcagggaggccagtctcctgtcaatggacttgtcttgggtggacaggatggaggtggggtttacataggcagggctgtactcaaaaacctctttgaagccagaccccagggcagggagagtctgttcatccaggttctcattgagaaggaggtggtgaaagagaggtaggcctcccacggatgggcacagagctcc

SEQ ID NO: 440394 - DNA, 390 bp, Homo sapiens
tacaactgtttttatgaaagaaaaaaaggcttctctacagttgcttaggcctggtgccatggcacacacctataaatcccagcgctgtgggaggccatggcaagaggatcctttgagcccaggagtttgagaccagcatggacaacaaagtgagacctcatctctacaaaaaataaaaaagaaattagctggccatggtggtgcgtgcctgtggtcctagctactcgagaggctgaggaaggaggatcacttgagccagggaggtggaggtttcactgaaccatattcacrccactccactccagcctgggcaacagagctagaccttgtctcaaaaaattaagttagttaaattaaacataaagttgcattgtatttaagaaattggga

SEQ ID NO: 440395 - DNA, 567 bp, Homo sapiens
tcactctaacacgtagaatacagcaatttgacttaataattagcctttaaatttatagtcttgtattatcactttagtagtttgaattattttgtattttaatatatttaaatgaattagtcctatagaaattgactaatttgacatgtgaaggtgtttttattctattttcagaagtttagctttaaaaaaatttctaaacttcgatatctggtgagtrtcaatgtttttatcttattaaaagctgacagaccacactatattcaactgtttttttttaacaaggatgcaaaatcagtttaaaggaaggatatctttttcaacaaatggtgctacagcaattggacattcacaggtacaaaaactaagactgacctaaatttatactttatataaaatttagctcacataaatcacaggcttaaatgtaaaatgtaatattataaaacttaaagttgtgtatggtagctcgtgcctgtaatcccagctactactcaagtggctgaggtggaagcatcacttcaatccagcagttagtggctgcagtgagcaatgatggcaccactg

SEQ ID NO: 440396 - DNA, 567 bp, Homo sapiens
tcactctaacacgtagaatacagcaatttgacttaataattagcctttaaatttatagtcttgtattatcactttagtagtttgaattattttgtattttaatatatttaaatgaattagtcctatagaaattgactaatttgacatgtgaaggtgtttttattctattttcagaagtttagctttaaaaaaatttctaaacttcgatatctggtgagtgtcaatgtttttatcttattaaaagctgacagaccacactatattcaactgtttttttttaacaaggatgcaaaatcagtttaaaggaaggatatctttttcaacaaatggtgctacagcaattggacattcacaggtacaaaaactaagactgacctaaatttatactttatataaaatttagctcacataaatcacaggcttaaatgtaaaatgtaatattataaaacttaaagttgtgyatggtagctcgtgcctgtaatcccagctactactcaagtggctgaggtggaagcatcacttcaatccagcagttagtggctgcagtgagcaatgatggcaccactg

SEQ ID NO: 440397 - DNA, 578 bp, Homo sapiens
  misc_feature (1)...(578): n = A,T,C or G
nnnnnnnnnnnnnnnnnnnnnnnnncagtaatgcctgtttctggcatataaaataatcagagaacatagaattgtacgaagttaaattattgggccatttacttaatttaaatatttttaaatgcgtgtacccattttgcttgaaggtgtgtgcaagtatgcttgtatttttttaacgataatatggtyacatgagcattaaatttattttttaaaagtttatagttaccccacacaagttcttattgattccctcattcttaacacctgcatagtatttcattttataattaatggattgtaggtttattcttttaaaatcacttgtgttgttctcattttttttttcactaaaaagtgttgcaatgcacaaaactaaaaatataaggagggtcttttctggatctctgttgaaaaactttgaataaaaattacaagttcaaatcacatgcaaaataaacattttaattaatcgggcttttatgcaagatgttagtagcagtagcagcacagttttattaagatccctgaatctctcacaaaaactgactgagcaactgggataacaaggtattaac

SEQ ID NO: 440398 - DNA, 578 bp, Homo sapiens
  misc_feature (1)...(578): n = A,T,C or G
nnnnnnnnnnnnnnnnnnnnnnnnncagtaatgcctgtttctggcatataaaataatcagagaacatagaattgtacgaagttaaattattgggccatttacttaatttaaatatttttaaatgcgtgtacccattttgcttgaaggtgtgtgcaagtatgcttgtatttttttaacgataatatggtcacatgagcattaaatttattttttaaaagtttatagttaccccacacaagttcttattgattccctcattcttaacacctgcatagtatttcattttataattaatggattgtaggtttattcttttaaaatcacttgtgttgttctcattttttttttcactaaaaagtgttgcaatgcacaaaactaaaaatataaggagggtcttttctggatctctgttgaaaaactttgaataaaaattacaagttcaaatcacatgcaaaataaacattttaattaatcgggcttttatgcaagatgttagtagcagtagcagcacarttttattaagatccctgaatctctcacaaaaactgactgagcaactgggataacaaggtattaac

SEQ ID NO: 440399 - DNA, 501 bp, Homo sapiens
atcttcaaatttggccacttccaaggcagaattaaacattccctacaggtatagcaagataaaaacacacacacacacaaaatcatatactttatgctttacttcttacttcaaacatacatccgtgattaaagaacaaaaacaactcactgaagggtgataaaataatcaaaatgtatttgcccctgaaagtggaattactacctcaaaaagaatacaactctttcattttccccaaaataatcatgtgagttcatgggcatgctcatcactgctgtctgtgtggaagagaagatcgaagagggatttactggactgaattggcctaggaagcctttgctggcatctctcagactggactgcagcccagatccttttactcagatgcatgcacttagaacatgaaaacagtaagataaacgccagtggtattattaccttatattgcaagaacattttatgacttcctaacwctgttttcaatagaaacatccccactaa

SEQ ID NO: 440400 - DNA, 605 bp, Homo sapiens
ttttttcttaaaatctcccagtgactcccaccaccctcagaataattgcaaattccttagcgtggctatgatctggtctcacccacctgcccatcctcatctctcacctctcacctgatggagcccagccttctcaggatactggatttccagtgccttggacaatagctaagtggccaataaacatttgtgaaaccaatgagcaaataaataaatgaatgagtaatggtcagaaaaagtttcactaaggggctaygtaacctggattttaaggatgagaaaagttttacttaaaagttgggggactgggtataggcatttcagaaacatgaagaaagagggtttaaaggtacaatggtacaaagttcctgcttattctggatgtgagaaagtgagccgttcaatggttctggagaaaggatgagcagaaggaagtaagactgtaagatacactgaaatcatgaaagccaaatcaaagaatttggatttttatcctataggtggttatcagagagacctcctggggagtggctccttgcctgccactgaaacctatgcttattatcatcaggcctttgctcttctagatatgcccgaaggtgcaa

SEQ ID NO: 440401 - DNA, 605 bp, Homo sapiens
ttttttcttaaaatctcccagtgactcccaccaccctcagaataattgcaaattccttagcgtggctatgatctggtctcacccacctgcccatcctcatctctcacctctcacctgatggagcccagccttctcaggatactggatttccagtgccttggacaatagctaagtggccaataaacatttgtgaaaccaatgagcaaataaataaatgaatgagtaatggtcagaaaaagtttcactaaggggctacgtaacctggattttaaggatgagaaaagttttacttaaaagttgggggactgggtataggcatttcagaaacatgaagaaagagggtttaaaggtacaatggtacaaagttcctgcttattctggatgtgagaaagtgagccgttcaatggttctggagaaaggatgagcagaaggaagtaagactgtaagatacactgaaatcatgaaagccaaatcaaagaatttggatttttatcctataggtggttatcagagagacctcctggggagtggctccttgyctgccactgaaacctatgcttattatcatcaggcctttgctcttctagatatgcccgaaggtgcaa

SEQ ID NO: 440402 - DNA, 404 bp, Homo sapiens
taataaacctacttctgtgatttcccatgtttggttctgtggcctccatgkgtctgagctgacctacactggaacctaactctcctcctggccagggtctctgagagtggctcttgtcagaaatacacaggacacaggtcaggcaacagtcaccaggcatctcctagtctcaacagatgttctgtgagagggaggcctggtcgtgggatgcacatctggccactgctggtgtaaggaagtgtcctgtgaaaggcacatgttaagcatccacaaccccctgaccagaaccccagaaaggcagggctccaattgacagtcactctccagagacaaacctcaagccctaactggaggaaaagaaaacaatgtaaaaagttgaatttatctttctttttcaatgatcc

SEQ ID NO: 440403 - DNA, 404 bp, Homo sapiens
taataaacctacttctgtgatttcccatgtttggttctgtggcctccatgggtctgagctgacctacactggaacctaactctcctcctggccagggtctctgagagtggctcttgtcagaaatacacaggacacaggtcaggcaacagtcaccaggcatctcctagtctcaacagatgttctgtgagagggaggcctggtcgtgggatgcacatctggccactgctggkgtaaggaagtgtcctgtgaaaggcacatgttaagcatccacaaccccctgaccagaaccccagaaaggcagggctccaattgacagtcactctccagagacaaacctcaagccctaactggaggaaaagaaaacaatgtaaaaagttgaatttatctttctttttcaatgatcc

SEQ ID NO: 440404 - DNA, 583 bp, Homo sapiens
atacttttttctagttttctgtgcaattctatcattgtttcatctttactcctaccagagtattttccaaaatagatatcttgtcattcttcctcttgttatcagtaaataagtgaaatgaaaagctagattatataatttatctagaacaagaaagtagaattgaatctayattcattaatgagactaaccagtcaattacacagataagcattttatatgttgaagatcatatggaaccattgtcagaaatattattatttatgtctatatggacatcacctgtacatatttacatagaaatcaatgagagctgatttttatttttattatatatattttttgagatagggtcttggttttttgcccaggctggagtgcagtggtgcaatcactgctcactgcagcctcaacctcccaagctcaagcaatccttccaccttggcctcccaaatagctaggacaacaggtgcacaccaccatgcccactttttatttttttaacttttgatagagactgggtcttgctatgttgcccaggttgcttttgaactcctgggctcaaggaatcctctcatttcag

SEQ ID NO: 440405 - DNA, 583 bp, Homo sapiens
atacttttttctagttttctgtgcaattctatcattgtttcatctttactcctaccagagtattttccaaaatagatatcttgtcattcttcctcttgttatcagtaaataagtgaaatgaaaagctagattatataatttatctagaacaagaaagtagaattgaatctatattcattaatgagactaaccagtcaattacacagataagcattttatatgttgaagatcatatggamccattgtcagaaatattattatttatgtctatatggacatcacctgtacatatttacatagaaatcaatgagagctgatttttatttttattatatatattttttgagatagggtcttggttttttgcccaggctggagtgcagtggtgcaatcactgctcactgcagcctcaacctcccaagctcaagcaatccttccaccttggcctcccaaatagctaggacaacaggtgcacaccaccatgcccactttttatttttttaacttttgatagagactgggtcttgctatgttgcccaggttgcttttgaactcctgggctcaaggaatcctctcatttcag

SEQ ID NO: 440406 - DNA, 583 bp, Homo sapiens
atacttttttctagttttctgtgcaattctatcattgtttcatctttactcctaccagagtattttccaaaatagatatcttgtcattcttcctcttgttatcagtaaataagtgaaatgaaaagctagattatataatttatctagaacaagaaagtagaattgaatctatattcattaatgagactaaccagtcaattacacagataagcattttatatgttgaagatcatatggaaccattgtcagaaatattattatttatgtctatatggacatcacctgtrcatatttacatagaaatcaatgagagctgatttttatttttattatatatattttttgagatagggtcttggttttttgcccaggctggagtgcagtggtgcaatcactgctcactgcagcctcaacctcccaagctcaagcaatccttccaccttggcctcccaaatagctaggacaacaggtgcacaccaccatgcccactttttatttttttaacttttgatagagactgggtcttgctatgttgcccaggttgcttttgaactcctgggctcaaggaatcctctcatttcag

SEQ ID NO: 440407 - DNA, 583 bp, Homo sapiens
atacttttttctagttttctgtgcaattctatcattgtttcatctttactcctaccagagtattttccaaaatagatatcttgtcattcttcctcttgttatcagtaaataagtgaaatgaaaagctagattatataatttatctagaacaagaaagtagaattgaatctatattcattaatgagactaaccagtcaattacacagataagcattttatatgttgaagatcatatggaaccattgtcagaaatattattatttatgtctatatggacatcacctgtacatatttacatagaaatcaatgagagctgatttttatttttattatatatattttttgagatagggtcttggttttttgcccaggctggagtgcagtggtgcaatcactgctcactgcagcctcaacctcccaagctcaagcaatccttccaccttggcctcccaaatagctaggacawcaggtgcacaccaccatgcccactttttatttttttaacttttgatagagactgggtcttgctatgttgcccaggttgcttttgaactcctgggctcaaggaatcctctcatttcag

SEQ ID NO: 440408 - DNA, 549 bp, Homo sapiens
atgcttacatccttcaatgtaatcaagttgacaatcagtattaactatcacaggattacagacctgagccatcacacacagtgttattgtatatttcatacaatataaaatattcctgattttcccattttatctgtgacttaataaagttttycagctatgaccccaaactggtaatacttgaaagcacattcaaatgtattttgcaacaattcataactggcaaaatgttgagccttgtggaaagagtcaccttacttccccgtcagctgtcaattccccatcattactatcacttccgggagcacattttcataaactccttttctctctatggtttctttagagttgctccatgaggttacaataagttacaactaattactgtcatgagattgggaagtcagagtggtggattcatgtacactgacacctgaagtaaaacacatgcagttaggtgtggactggagaatcacctggagatgtgctgcaggcagctgagagcatcagcacccccagccctgggcttcccagacaggactgaggatc

SEQ ID NO: 440409 - DNA, 549 bp, Homo sapiens
atgcttacatccttcaatgtaatcaagttgacaatcagtattaactatcacaggattacagacctgagccatcacacacagtgttattgtatatttcatacaatataaaatattcctgattttcccattttatctgtgacttaataaagtttttcagctatgaccccaaactggtaatacttgaaagcacattcaaatgtattttgcaacaattcrtaactggcaaaatgttgagccttgtggaaagagtcaccttacttccccgtcagctgtcaattccccatcattactatcacttccgggagcacattttcataaactccttttctctctatggtttctttagagttgctccatgaggttacaataagttacaactaattactgtcatgagattgggaagtcagagtggtggattcatgtacactgacacctgaagtaaaacacatgcagttaggtgtggactggagaatcacctggagatgtgctgcaggcagctgagagcatcagcacccccagccctgggcttcccagacaggactgaggatc

SEQ ID NO: 440410 - DNA, 549 bp, Homo sapiens
atgcttacatccttcaatgtaatcaagttgacaatcagtattaactatcacaggattacagacctgagccatcacacacagtgttattgtatatttcatacaatataaaatattcctgattttcccattttatctgtgacttaataaagtttttcagctatgaccccaaactggtaatacttgaaagcacattcaaatgtattttgcaacaattcataactggcaaaatgttgagccttgtggaaagagtcaccttacttccccgtcagctgtcaattccccatcattactatcacttccgggagcacattttcataaactccttttctctctatggtttctttagrgttgctccatgaggttacaataagttacaactaattactgtcatgagattgggaagtcagagtggtggattcatgtacactgacacctgaagtaaaacacatgcagttaggtgtggactggagaatcacctggagatgtgctgcaggcagctgagagcatcagcacccccagccctgggcttcccagacaggactgaggatc

SEQ ID NO: 440411 - DNA, 557 bp, Homo sapiens
tatgaccccaaactggtaatacttgaaagcacattcaaatgtattttgcaacaattcataactggcaaaatgttgagccttgtggaaagagtcaccttacttccccgtcagctgtcaattccccatcattactatcacttccgggagcacattttcataaactccttttctctctatggtttctttagagttgctccatgaggttacaataagttacaactaattactgtcatgagattgggaagtcagagtggtggattcatgtacactgacacctgaagtaaaacacatgcagttaggtgtggactggagaatcacctggagatgtgctgcaggcagctgagarcatcagcacccccagccctgggcttcccagacaggactgaggatcatcacacggtgttcagaacataccaccaggggcaggtgcatcctggcttctgaagtagcacctgagaatcccctgtgtctagtacctgcttcatgaataacactccataggcttcggaaagactgtggtttagactctaatttattcaacttgaataatttctccc

SEQ ID NO: 440412 - DNA, 557 bp, Homo sapiens
tatgaccccaaactggtaatacttgaaagcacattcaaatgtattttgcaacaattcataactggcaaaatgttgagccttgtggaaagagtcaccttacttccccgtcagctgtcaattccccatcattactatcacttccgggagcacattttcataaactccttttctctctatggtttctttagagttgctccatgaggttacaataagttacaactaattactgtcatgagattgggaagtcagagtggtggattcatgtacactgacacctgaagtaaaacacatgcagttaggtgtggactggagaatcacctggagatgtgctgcaggcagctgagagcatcagcacccccagccctgggcttcccagacaggactgaggatcatcacacggtgttcagaacataccaccaggggcaggtgcaycctggcttctgaagtagcacctgagaatcccctgtgtctagtacctgcttcatgaataacactccataggcttcggaaagactgtggtttagactctaatttattcaacttgaataatttctccc

SEQ ID NO: 440413 - DNA, 457 bp, Homo sapiens
gtatttgaattttttgaaaatttctgacatatactcaagtaaatatcaaatgtattgttttattcaattttttggattcaattaaaaartaatttttattcaagtttgttgttatatttacttttgaccaaatttgactttccaaacaggaaaagctaaagcatttttttcaaaggttcaagggacttaagcttactggcatcaaatgttctgtagtaaaacaggcaaataaaacctaatatttttatcaataataatttaatagttttatgtctgagaacctaagaatcaaagacatcaactccagatgatgtcaattgcataattacactggtaagatagaaaatgattatcagaatctaacaaatgatggatatggcaacctaacacctgacaaaaccattcaggatgtgttagacaaacaagaaggtactactaatgtaaagctttttctttc

SEQ ID NO: 440414 - DNA, 457 bp, Homo sapiens
gtatttgaattttttgaaaatttctgacatatactcaagtaaatatcaaatgtattgttttattcaattttttggattcaattaaaaaataatttwtattcaagtttgttgttatatttacttttgaccaaatttgactttccaaacaggaaaagctaaagcatttttttcaaaggttcaagggacttaagcttactggcatcaaatgttctgtagtaaaacaggcaaataaaacctaatatttttatcaataataatttaatagttttatgtctgagaacctaagaatcaaagacatcaactccagatgatgtcaattgcataattacactggtaagatagaaaatgattatcagaatctaacaaatgatggatatggcaacctaacacctgacaaaaccattcaggatgtgttagacaaacaagaaggtactactaatgtaaagctttttctttc

SEQ ID NO: 440415 - DNA, 457 bp, Homo sapiens
gtatttgaattttttgaaaatttctgacatatactcaagtaaatatcaaatgtattgttttattcaattttttggattcaattaaaaaataatttttattcaagtttgttgttatatttacttttgaccaaatttgactttccaaacaggaaaagctaaagcatttttttcaaaggttcaagggacttaagcttactggcatcaaatgttctgtagtaaaacaggcaaataaaacctaayatttttatcaataataatttaatagttttatgtctgagaacctaagaatcaaagacatcaactccagatgatgtcaattgcataattacactggtaagatagaaaatgattatcagaatctaacaaatgatggatatggcaacctaacacctgacaaaaccattcaggatgtgttagacaaacaagaaggtactactaatgtaaagctttttctttc

SEQ ID NO: 440416 - DNA, 564 bp, Homo sapiens
cctaacataaatgatgagttaatgggtgcagcacaccaacatggcacacgtatacatatgcaacaaacctgcacattgttcatgtgtaccctagaatttaaagtttaaaaaaaataaaaaaataaagaaagaaatagatgttctgtaaaaatatacacaatttttacagacaaatacatttataagttgtttttatcttaaaaattggggatatttcatatttataactaawtattgagccttaagttttcttggccatttctaggctaataaactaagaatcatgtaaactaagccaaagtagaatagacataaaagtcctgaacacttcaacttcctatccttcaagaagtatacctcgcaaagctcatttgagagaggaaaagctttcctccaccctcggttttacagtgctgaggcttctcatcacatttctatgacttgtagcttaaatccatgttacatggtcactggcattgttagtgcttctcttttaacactgtaggaattaatcaatttggtggcatatttaattaattctatcactagaggattgtaaaatta

SEQ ID NO: 440417 - DNA, 564 bp, Homo sapiens
cctaacataaatgatgagttaatgggtgcagcacaccaacatggcacacgtatacatatgcaacaaacctgcacattgttcatgtgtaccctagaatttaaagtttaaaaaaaataaaaaaataaagaaagaaatagatgttctgtaaaaatatacacaatttttacagacaaatacatttataagttgtttttatcttaaaaattggggatatttcatatttataactaaatattgagccttaagttttcttggccatttctaggctaataaactaagaatcatgtaaactaagccaaagtagaatagacataaaagtcctgaacacttcaacttcctatccttcaagaagtatacctcgcaaagctcatttgagagaggaaaagctttcctccaccctcggttttacagtgctgaggcttctcatcacatttctatgacttgtagcttaaatccatgtyacatggtcactggcattgttagtgcttctcttttaacactgtaggaattaatcaatttggtggcatatttaattaattctatcactagaggattgtaaaatta

SEQ ID NO: 440418 - DNA, 579 bp, Homo sapiens
tttggtggcatatttaattaattctatcactagaggattgtaaaattacatatatgaatacctcactttagaggccacttaatttttttccaaggggatatttgactatatttcacttgtgtyttatttaatgattttataatttaaaccctaaattataaatctagaatttagaaagtatatttccccactggattacatttttggaaatattactttatatgtgcacaaatattacaaaatcactgtagacacctgaaaactatattatcttttaaagacaatatttacattaaactggtataacaaaattgtttggtgcattttttccagtacattttgtgtatattacatgtttaacctttttttattcagcaaataatttttgagtatctactaagtgctagtttctgcattactaactgaatttaaagagtgaaatacagacatggtctcagacaataaaaattaacattaggtcacttatttatatatttttaaatggtaattatgaaaactttttgagatttttaactagataacattataataacgcacttgatgttgttaatagttgcc

SEQ ID NO: 440419 - DNA, 569 bp, Homo sapiens
cccatctgcactcaaaacaagaaacacttgtgtggccctggcactratgggaagagccttcacctcagaatcagaagtgagttcaagtcacttcttccatagcgtgaccttaaacaagccgctaggcctcactgggcctctgtttccccatttgaacaacagaatgagcagatcagatggtctctgaggactggtccagttccagcatggagcaattgagccctcactgcagccaggctctgtgaccagcaccacagatctcaacacagctgcaatacaggagaggatggagtctgagagagcaggcagggtgccgaggcagccctccagggatgaggcaggaccaagagcatggagtggggagaaggtagatgagagaaatggtggcagaagtgccagggcttggtgaccgattagcactagagcttaggggaagaaaggtgctgaggacacctagccttctggctcaatgctggtggtaatatccagggaaggggagctggcatgggtaggtggaatttgaatttgggcttcttgtatttgatccacttcaaggaatgaggaggatc

SEQ ID NO: 440420 - DNA, 656 bp, Homo sapiens
ctcagccgcccatcttgcctgggtagatgacttcatgaagcagagccggggcatgctgctgctctacagcctgaagaaccccagcttccctgagtacatgttcagcagcaacagcggcgtcatgtgtctcgacatccacgtggaccacccctacctggtggcagtaggccactatgacggcaacgtggccatttacaacctcaagaagccccactcccagccctccttctgcagctcagccaagtctggcaagcactcagaccctgtgtggcaggtcagcaaccaggctgggaggggtggggatgggagcagcatgtgggcctggagccactggaggagaaaaaaagcttggggaggagaggaccacaggcaaggagatgaggatggcaggtaccatcaggtcaggatctgggtgtcagaaaagggcagaaggtgaaaatcaggaggcaagagggtctccagtgagagctggggtctgctgctccagagcttccctcaggagggcccccacctgtttgctaaagatctcttagatgtggcgatcagtaactcakaagacatatctggaaggctccagggcctgacaagctccatctgagtacagtgggcccttagacaatgtgggaatgagggacactgacccccacacagtcaaa

SEQ ID NO: 440421 - DNA, 508 bp, Homo sapiens
catgagttgaattacctgtccattgtacaaaagactcatatggccaaaagaatctaagaccaactggtcagttttacagaaaataatacacaaggagtgacagacgggggaaagccatgcaatagatttatggcttcacatacctggcatcaaggaaccttgatcttaaaatcataactgcttcacaagtgctttgtttragctgcatgtgaatggaactaaattttcgatggatgatgcccaccattctttcaatctcttttggagaaatgggacgtgttctactctgttctcggagaaggttcatcacatgtgtagtaaattcattacatgcctgtaatgggaaaaaaaaatcactcctttggaaactatctactatcacacgaagacattcactcatctgaatttacacctcatttgcattcaccaatagcattatacagtgtgtagggtaaaatgaaaactaagacacttgtaaaatggtagtaatagtagttaaggcagcaag

SEQ ID NO: 440422 - DNA, 587 bp, Homo sapiens
gctattaacattgatgatggtgaatgtatattagttaatgtgttaacgacgtgttaattactgtacatgttgtgaagacccttcaggcttgttctatgatgcagcatgtcaacttgaactagaccaagtaatctgcaaagcagactgtaactcttaaaaataacacttgtaaacataaattataaattaaattatgctttttattattctttttctttctggtagaatgaataagtaattcttctgctatctgcacctgttagaacccaatactgtcagactctgttttccccaagaggattgaaagagatttgttatgcaataacttccgctttgtttacgctctggcatttagtgtatattttatatagattcatwtgttttgcagcctgaaagatctttctttttttgtttaccagcttgatttgaaatgaaagacactcacacttagtctttgtgtaagcaggtgaaaagtggccttgtttgattaggactactagttgatactaaactaatctgtatatacacatgtgattcagttatagctcttcaagtttagttggccaaatagttgaaatctcaaggga

SEQ ID NO: 440423 - DNA, 586 bp, Homo sapiens
tcatagaatgtattcatctttatttattcagaaattagctccatacctagcacataaacattcccatatcaagtctcagttcgcttgtgcttctgtaacaaaatagctgagactgataagaacagaaacttgtttctcacagtccaggatgctgaaaagttcaaaaccatgttctagcagttttggcaccaagtgaggtcccagtttctgcctctaaaatggtaacttgaatgctgtggtcttacattagctagttcccttcagcccttttgtaatgcactaatcccatctatgagtacagagtcctcatggcctaattactcctaaaggcctgacttcttaatactattgcattgaggattaagtttcaaaatggcttttagaggggagacaaacatttaagctaaagtataataatccayaatttttgaatgaatgaacaaaaagtcacttgcatttaaatgtgaaaatgtagatacttttggtgtcagttattttctgtacaattgcgattattcctcataaaaattcagagcaatcagttggctttcaattaaatttacatattagttataaacattttaaa

SEQ ID NO: 440424 - DNA, 631 bp, Homo sapiens
atttagtgaggagagcaaaaatgagtaataagaaggcaagaaaaaatatccactgtgtcactgtaacaagcactagatgatgaggtcatagaatgtattcatctttatttattcagaaattagctccatacctagcacataaacattcccatatcaagtctcagttcgcttgtgcttctgtaacaaaatagctgagactgataagaacagaaacttgtttctcacagtccaggatgctgaaaagttcaaaaccatgttctagcagttttggcaccaagtgaggtcccagtttctgcctctaaaatggtaacttgaatgctgtggtcttacattagctagttcccttcagcccttttgtaatgcactaatcccatctatgagtacagagtcctcatggcctaattactcctaaaggcctgacttcttaatactattgcattgaggattaagtttcaaaatggcttttagaggggagacaaacatttaagctaaagtataataatccataatttttgaatgaatgaacaaaaagtcacttgcatttaaatgtgaaaatgtagatactttyggtgtcagttattttctgtacaattgcgattattcctcataaaaattcagagcaatcagttgg

SEQ ID NO: 440425 - DNA, 327 bp, Homo sapiens
cataaaaatgaagatatttgataattgagacaggtatctccatgtaaataaattgtcggcatacctctctagaagtctcatctatctgcctgggcaagggagtatctaatgacagaaccaaggatctaaagaatcagattaagagatctaaataattctctgatttgcccatgcttaatgattamctgagttcgtgagattactagtaaagctttatattttgtaagatcttagattctgataagtctaatgtcacaatccaatcagtttttcctatctcaaggaatcatgtccatataatggaattaatcttgaaactctgaaaag

SEQ ID NO: 440426 - DNA, 327 bp, Homo sapiens
cataaaaatgaagatatttgataattgagacaggtatctccatgtaaataaattgtcggcatacctctctagaagtctcatctatctgcctgggcaagggagtatctaatgacagaaccaaggatctaaagaatcagattaagagatctaaataattctctgatttgcccatgcttaatgattaactgagttcgtgarattactagtaaagctttatattttgtaagatcttagattctgataagtctaatgtcacaatccaatcagtttttcctatctcaaggaatcatgtccatataatggaattaatcttgaaactctgaaaag

SEQ ID NO: 440427 - DNA, 659 bp, Homo sapiens
atatttttctgttaccattttttggttggttttccatgcagtttgtgcctacttccaggaggaagacacctacacacatttactcttctctactttctttacaaatttgaatatgaaaaagagagccaggaattgccaaaagctggttactccaagaccctaggcattctgtcaaaatctaacttggatgatcatgtaaaatactyatcattttattaatatcagtatgttcattcaaatggtaacaagattttcacttgatttctaaatcactgatcttaagtgaaaaatatcaaaatagaggacttcacaaatattatcgtttagcacatcttcactttaaacaatctaaagttaatttcaatgttgaatcaatcatactctgaccttctccataggaaaggaaaatgtaaatatcccagacagcagagagcaaactgtcataaaaataaaactgtactttcaaatagctgtagtccacagcacagctctaacccaaattgtcatttcagctgcttcacattattagaaaatacttaccttctagctttgaacatgaaagaaaagtactcttagtctatcagcttccctaactaggagattcatgtatttgttgggaaaagataaagaaactgatagtgcaatttaataaggataat

SEQ ID NO: 440428 - DNA, 659 bp, Homo sapiens
atatttttctgttaccattttttggttggttttccatgcagtttgtgcctacttccaggaggaagacacctacacacatttactcttctctactttctttacaaatttgaatatgaaaaagagagccaggaattgccaaaagctggttactccaagaccctaggcattctgtcaaaatctaacttggatgatcatgtaaaatactcatcattttattaatatcagtatgttcattcaaatggtaacaagattttcacttgatttctaaatcactgatcttaagtgaaaaatatcaaaatagaggacttcacaaatattatcrtttagcacatcttcactttaaacaatctaaagttaatttcaatgttgaatcaatcatactctgaccttctccataggaaaggaaaatgtaaatatcccagacagcagagagcaaactgtcataaaaataaaactgtactttcaaatagctgtagtccacagcacagctctaacccaaattgtcatttcagctgcttcacattattagaaaatacttaccttctagctttgaacatgaaagaaaagtactcttagtctatcagcttccctaactaggagattcatgtatttgttgggaaaagataaagaaactgatagtgcaatttaataaggataat

SEQ ID NO: 440429 - DNA, 659 bp, Homo sapiens
atatttttctgttaccattttttggttggttttccatgcagtttgtgcctacttccaggaggaagacacctacacacatttactcttctctactttctttacaaatttgaatatgaaaaagagagccaggaattgccaaaagctggttactccaagaccctaggcattctgtcaaaatctaacttggatgatcatgtaaaatactcatcattttattaatatcagtatgttcattcaaatggtaacaagattttcacttgatttctaaatcactgatcttaagtgaaaaatatcaaaatagaggacttcacaaatattatcgtttagcacatcttcactttaaacaatctaaagttaatttcaatgttgaatcaatcatactctgaccttctccataggaaaggaaaatgtaaatatcccagasagcagagagcaaactgtcataaaaataaaactgtactttcaaatagctgtagtccacagcacagctctaacccaaattgtcatttcagctgcttcacattattagaaaatacttaccttctagctttgaacatgaaagaaaagtactcttagtctatcagcttccctaactaggagattcatgtatttgttgggaaaagataaagaaactgatagtgcaatttaataaggataat

SEQ ID NO: 440430 - DNA, 659 bp, Homo sapiens
atatttttctgttaccattttttggttggttttccatgcagtttgtgcctacttccaggaggaagacacctacacacatttactcttctctactttctttacaaatttgaatatgaaaaagagagccaggaattgccaaaagctggttactccaagaccctaggcattctgtcaaaatctaacttggatgatcatgtaaaatactcatcattttattaatatcagtatgttcattcaaatggtaacaagattttcacttgatttctaaatcactgatcttaagtgaaaaatatcaaaatagaggacttcacaaatattatcgtttagcacatcttcactttaaacaatctaaagttaatttcaatgttgaatcaatcatactctgaccttctccataggaaaggaaaatgtaaatatcccagacagcagagagcaaactgtcataaaaataaaactgtactttcaaatagctgtagtccacagcacagctctaacccaaattgtcatttcagctgcttcacattattagaaaatacttaccttctagctttgaacatgaaagaaaagtactcttagtctatcagyttccctaactaggagattcatgtatttgttgggaaaagataaagaaactgatagtgcaatttaataaggataat

SEQ ID NO: 440431 - DNA, 558 bp, Homo sapiens
ttttggtttgataagctataagtagggataacagcagctacctctagtgttttttgtttttgtttttttcaaatcttaagagagataaagcttgcaaagcatctascacagagactggcccatggatgtcacatgaaaaaaaaaaaggttgttcttttgttattattattattattactgttctcataagttgaggaaacatgctttggggatactttatttgaaaagatgaacttagtctctttaaatttttaattaggcaaaacttcctggatgtttcctgaaaacttttccatcagaattaccaagcagaaaagtgaggcaatagactgtcttgacagtgtatggaaacttatttttgatagaaagaattcacgcaagaaagtcattgctatttcaagccttgcctgtttttgcaggctcatcttgactttttctgccccacctactctggtgttgtactctgatagatgctcagagctctggaagcacattatgctgttgggcaccgcctggtctctgtacatgctgttctctcatttcttctttctaagatca

SEQ ID NO: 440432 - DNA, 558 bp, Homo sapiens
ttttggtttgataagctataagtagggataacagcagctacctctagtgttttttgtttttgtttttttcaaatcttaagagagataaagcttgcaaagcatctagcacagagactggcccatggatgtcacatgaaaaaaaaaaaggttgttcttttgttattattattattattactgttctcataagttgaggaaacwtgctttggggatactttatttgaaaagatgaacttagtctctttaaatttttaattaggcaaaacttcctggatgtttcctgaaaacttttccatcagaattaccaagcagaaaagtgaggcaatagactgtcttgacagtgtatggaaacttatttttgatagaaagaattcacgcaagaaagtcattgctatttcaagccttgcctgtttttgcaggctcatcttgactttttctgccccacctactctggtgttgtactctgatagatgctcagagctctggaagcacattatgctgttgggcaccgcctggtctctgtacatgctgttctctcatttcttctttctaagatca

SEQ ID NO: 440433 - DNA, 558 bp, Homo sapiens
ttttggtttgataagctataagtagggataacagcagctacctctagtgttttttgtttttgtttttttcaaatcttaagagagataaagcttgcaaagcatctagcacagagactggcccatggatgtcacatgaaaaaaaaaaaggttgttcttttgttattattattattattactgttctcataagttgaggaaacatgctttggggatactttatttgaaaagatgaacttagtctctttaaatttttaattaggcaaaacttcctggatgtttcctgaaracttttccatcagaattaccaagcagaaaagtgaggcaatagactgtcttgacagtgtatggaaacttatttttgatagaaagaattcacgcaagaaagtcattgctatttcaagccttgcctgtttttgcaggctcatcttgactttttctgccccacctactctggtgttgtactctgatagatgctcagagctctggaagcacattatgctgttgggcaccgcctggtctctgtacatgctgttctctcatttcttctttctaagatca

SEQ ID NO: 440434 - DNA, 566 bp, Homo sapiens
gatcagtatgtaagctactgaggatacagagatgataaagacatttctctagtttgtttctcccattcgtaaacttttacccctttgtcatgcaagtcaaatgacagaatgtgagagccaaaggaattctgaaggcacaagctcaatccctccttgggtagactgaggccagcatcagaggagtagggtgattgttggatagtcacacagctggttggtggcagagcctgggcttaaattcagagaacaagttccctgcttcacatgtacttttgggcctggagagaagggttgctcaaatctgagatgtacctttattttgagggagagactgtttcttctcttctttgcctctgagtagagatttctaaggtgatgatggacaattggaaccttgaggtgacaacttctatttgtctagggtgtcagccstaagtgctacacttacttattaaaatcagggaaaaaccaacatcccttaaaatatagatgcaaacacaaatgatgctaatgagagccttgtcctccaccaaaaactaaggaaaattagttgatacagaagtctt

SEQ ID NO: 440435 - DNA, 575 bp, Homo sapiens
aatcactcatctatttgttaacrttgtcttcttcaactttaattatcttcttcattaaacaaaaatccttagttacaatataatcaaatttgtcaattttttatggtttgcgcttttggaattttagcttttgcatacctaggttacaaagacatttttccatattttctcctactaactatagttttagccttcatatttagattttcaattcttttagagtccaccttttgcatgtgatgttaggtggggattcagatatatttttctccacatggtaagtgtatcagtcagacctattcagaaaaatgcatgtcatttttagtgtttacaacaaaagaaatttaatgcagggacttcgttacgtgaatgatggtagatctggtgagttaaccaggagatgctgaggcaacccagaccttagcaacagcaagaagccactatcactcttaggcttaatagtaaagaacaggaggagccaatgttactggaacttgggactacttggtagaattggaattcatgaaggagtttttggagggaatgggaatgaacaaagggatgccactgctgcc

SEQ ID NO: 440436 - DNA, 524 bp, Homo sapiens
tgttccttgtcttgttttcacacttgactgtaagcttcttgaagagcaggtactgaatgtttaggtccctggttcctagcgtagtatctagtaaaagggaacacctggaatttgaggcaggaggcagcatgtgtatattggaaaggcatagaattcatgcccaggtgagagatgagaggctttggtaactyattttacctgtttcacccatttgctaaagagcaacaacaagaggaatcagaaatgcttccatcactcctcagttgctggaagatcttggattagtcatgctttctgcaaaacattagctatcttctcactcgaaccaaactaaaccatttagtaagaagcatctggcttagtggttaagacttaggtcttgcaggaagtgagagaggagtaggaatcctggcttttccacttagtagctgtggccctgaagtgagccagctttgctgatcttccattacatctgctttcaagtggagaagctaatctacacatcatcgttttagaattacatg

SEQ ID NO: 440437 - DNA, 558 bp, Homo sapiens
gggagaatcagactttccatgtccttacttaaacaagactaatccacatttataaatcaacatgagatagtatataattaacccctatatgggtggtagatgttaaaggagtataaagtaaataacaggctgaatagaaagaatgsgttttaataagcatgcttctaataaattagtgaaactgtctctgaatgtggtggctcatatctcatgaggctcccttatgaggacttggagtgaagtgcatgggcttggcgttggacaattctggcttctaatcccagctccaaaacttaccagccgggtggcttttggcaaaacactttacagctggaagcctcagtaaactccttagcaaaatacagattaaaatacttatttcaggattgatgggattaactaaaaccaggaagtggaaactaatatagagtgtctcataggcaattgacttttctttcattgcactcatagctctttggaattacatgtttatttgtgtatttgtgtgtttaatggttgtctcttttattctctgcctcttcagaacctcccatagta

SEQ ID NO: 440438 - DNA, 555 bp, Homo sapiens
gtcacgattcaacatcctacatcctcactagatcagcattattcaaacagcactattgacattttgggacaaagaattatttgttgtgggagaccatcctctgcattgcagacttttagtagaatctctggcctctgcccacttgatgcccatagcaaacctccaaactccracagccaaaatgcctgcagacattagcaaatatcctctagagagtaaaccatccctggttgagaaacattgccctagaaggtaagctcaaaaggaaagtgattacatctgttgtgtttgtggctatatcgccaatagctattagcacagggcctgtgtatcccatcaatctaagtgcaatgaagaaatggttggaagaattagtcaacaaaataaatacaaataaatattatcatgccctttcctttcttcctcttctttttctttcccttctttttctttccttcaacaaggaaagtaaagcagtaaaacattgatatggtttgactatgtccgcacctaaatctcatcttaaattgtagctcccataattcccatgtgtca

SEQ ID NO: 440439 - DNA, 504 bp, Homo sapiens
gatagggtaaatttttccacctgagaaacagaatgtacaaggcttgaaagacgattaaaaataataatgcctgctattgactggatgggcaaatgtagttctacttttcaaaggaagttcaaactatttctctctcagagcaatactaaacatcccttcagtaaaatactcatttcaatgagctctctctctstgtgtgtgtgtgtgtgtgtgtgtgtgcgtgcgtgcatgtgtactgcatgtgtatagcaggatggaggggaaatttatgaagaatattagagcacacagggtgactagtacagttcggtcaatctgaaaatcttatgtcccatgatgaaaagagctgtatatttttatttgcatgtacatttgttttattaacccttcttattttagtgagcacatttctgaaacatacctctgacattatcttttccatcattttacagatgagaaagtaaaggctcacagtagaataagtgacttatctacaatagccaa

SEQ ID NO: 440440 - DNA, 444 bp, Homo sapiens
ttgaaagcagacattttagaaccacaaataaatcaggattcaaaagctrgctctgcctcttaagccagtcatggaaactccctgagtctcaaattaattttcaaataagcataataatacctaactcaccaggttgtcatgacaaatgacaagataaatgatagcatgaataaaaagcatttagtgtaagatttggcataaaaatgtatataataggcactcaacaaaatgttagtttccttattgttcaattcaatctgtatttagtttcataatagaagctgtcatttattgcataactactatattccagcagaggttagcaaaccatagggtggcagcctatttttgtaaataaagttttattggaacacagccatgctcatttgtttgtgtattatctatagctgctgcctctacaatagcagagttgaatagttgtga

SEQ ID NO: 440441 - DNA, 522 bp, Homo sapiens
agatttcttaaaattctggatgaagaccaaaatagaagaggtcattgttccattgggaaatgaattcaaatttatttttgaaayaattttccagaattttacaggaatctatattgttgccacttgtccagaaccactttttattttcttttctgtctaggcaagaaatagaagagagaaagcaagtgctctgcagttttatttcaaaaattgaaaccagaccacaccagggcagtttgtggtctgaatgtatcaatggatctagtcatatttcatctgagcatttcttaggtatactaaaccacaaatatgaatctcattattgtgtctggatggaaatattttatggattaagatttgtggatttaatttggttggtaatggaacttctgttcaaggggcaggagggaggaagtcgtgaggcaccaccaatgcttaagccaaactatggaaagaaacactatttggagggtttgtacttaatgttggccagttgacttgggtctaaagtgaaattcaaaa

SEQ ID NO: 440442 - DNA, 523 bp, Homo sapiens
gtgttgttatcgattagctgtgtctgccccatgcactagaatgaagtgttttgtgccacagacttgccatgcctataccaaatgatcttctacagttgcttctaagtcctgctcaagcatgattttgatcctataatttgatgtctgtctgtgtctttggaaagtactgagaagctgggccaaatgtttcccgttaggaacacagtcttgaaagactaaaccacaggcagtctattcagtagaaagccctggctcagcagcatggacagccatcccaacagcagcactgcccctgaggaaccttggccagggtcctgacctcccagaaaagagccccacaccaggctaattcatttgcttttcttgctactgagttagaagagataggataacaggaaaaccagggctgtagccacagcctccwcattttcctaaaaattttagagtgtccctgctacttgacaaattgaaatactaagatttatacatttccatggaaaaagcaacagtgggaaagagaggg

SEQ ID NO: 440443 - DNA, 523 bp, Homo sapiens
gtgttgttatcgattagctgtgtctgccccatgcactagaatgaagtgttttgtgccacagacttgccatgcctataccaaatgatcttctacagttgcttctaagtcctgctcaagcatgattttgatcctataatttgatgtctgtctgtgtctttggaaagtactgagaagctgggccaaatgtttcccgttaggaacacagtcttgaaagactaaaccacaggcagtctattcagtagaaagccctggctcagcagcatggacagccatcccaacagcagcactgcccctgaggaaccttggccagggtcctgacctcccagaaaagagccccacaccaggctaattcatttgcttttcttgctactgagttagaagagataggataacaggaaaaccagggctgtagccacagcctcctyattttcctaaaaattttagagtgtccctgctacttgacaaattgaaatactaagatttatacatttccatggaaaaagcaacagtgggaaagagaggg

SEQ ID NO: 440444 - DNA, 588 bp, Homo sapiens
atgtagagcagatatcctcaaacattgcacagatgtttcttggatatttgtccatgttagtatttatcattcttcacaacaagtatctgtttacatgtctgctttctatacctgactgtgagctcattaagggcaagacctatccatcattggcttctgaaacaccccaccaccactaggctatcccatagcccgttyttacacttgttcaacacatctctgttgaatgcaagaataaatcatttagaaattaattctcagtcctcttggataatcactggctcccccagcatcttaactgggcaccagctaagccactgtgctgcctaaatggacaaccacttctcagttctggaattcttcaaacacctagggttaggagggtcttcgctttggcagttagagttttctcaattcttttatgacacaggttgcaccggactcactcaactatggagatcagatgtcctcaggaaaaaaaaaaaaaaaaaaaaaaaatacacacttaaggctgtttcctggctcctctctcttcctgacacattccaaaaaggaatttatggatgttgggaaggacaaagggtgagg

SEQ ID NO: 440445 - DNA, 588 bp, Homo sapiens
atgtagagcagatatcctcaaacattgcacagatgtttcttggatatttgtccatgttagtatttatcattcttcacaacaagtatctgtttacatgtctgctttctatacctgactgtgagctcattaagggcaagacctatccatcattggcttctgaaacaccccaccaccactaggctatcccatagcccgttcttacacttgttcaacacatctctgttgaatgcaagaataaatcatttagaaattaattctcagtcctcttggataatcactggctcccccagcatyttaactgggcaccagctaagccactgtgctgcctaaatggacaaccacttctcagttctggaattcttcaaacacctagggttaggagggtcttcgctttggcagttagagttttctcaattcttttatgacacaggttgcaccggactcactcaactatggagatcagatgtcctcaggaaaaaaaaaaaaaaaaaaaaaaaatacacacttaaggctgtttcctggctcctctctcttcctgacacattccaaaaaggaatttatggatgttgggaaggacaaagggtgagg

SEQ ID NO: 440446 - DNA, 588 bp, Homo sapiens
atgtagagcagatatcctcaaacattgcacagatgtttcttggatatttgtccatgttagtatttatcattcttcacaacaagtatctgtttacatgtctgctttctatacctgactgtgagctcattaagggcaagacctatccatcattggcttctgaaacaccccaccaccactaggctatcccatagcccgttcttacacttgttcaacacatctctgttgaatgcaagaataaatcatttagaaattaattctcagtcctcttggataatcactggctcccccagcatcttaactgggcaccagctaagccactgtgctgcctaaatggacaaccacttctcagttctggaattcttcaaacacctagggttaggagggtcttcgctttggcagttagagttttytcaattcttttatgacacaggttgcaccggactcactcaactatggagatcagatgtcctcaggaaaaaaaaaaaaaaaaaaaaaaaatacacacttaaggctgtttcctggctcctctctcttcctgacacattccaaaaaggaatttatggatgttgggaaggacaaagggtgagg

SEQ ID NO: 440447 - DNA, 553 bp, Homo sapiens
tttggaacctgctacattctcaaagaagacctttctattgggtaccaattccaactagaaaagtctttctcctgttgtgctgaaatttgtcttctcataaccaaccctccctccctgcatcatccccagcacataaacgcacasacacacacacacacacacacacacacacacacacacacacacacacacagaggcacttgttctgtccttaggggctacaagaggcaagccagtgcctgctttgccaggatttctacatggtaaccctgacccactcaaccttggttttctcaactacaaaataaacctgcccaggtctgtagtccttcctcctacaagatattttccagaccttttattgctgatcaattttctataaagattagaatctgtgttttctaaagagtctttgtagaataagttgctcattctgaaattataaaagtcctactatcagaacatgattcttcatgtctgacctaaatacctccaactgcaatctcaagtaagtttccctgggttcatccacaaaggagacttaaaacagcca

SEQ ID NO: 440448 - DNA, 553 bp, Homo sapiens
tttggaacctgctacattctcaaagaagacctttctattgggtaccaattccaactagaaaagtctttctcctgttgtgctgaaatttgtcttctcataaccaaccctccctccctgcatcatccccagcacataaacgcacacacacacacacacacacacacacacacacacacacacacacacacacacagaggcacttgttctgtccttaggggctacaagaggcaagccagtgcctgctttgccaggatttctacatggtaaccctgacccactcaaccttggttttctcaactacaaaataaacctgcccaggtctgtagtccttcctcctacaagatattttccagaccttttattgctgatcaattttctataaagattagaatctgtgttttctaaagagtctytgtagaataagttgctcattctgaaattataaaagtcctactatcagaacatgattcttcatgtctgacctaaatacctccaactgcaatctcaagtaagtttccctgggttcatccacaaaggagacttaaaacagcca

SEQ ID NO: 440449 - DNA, 595 bp, Homo sapiens
gtagggaaaggacttgaacccagtcttcttgatacccagcccgaatttctgccctacatttgctgatcttatccgatattaatcatcctgtcttctccagacctcgattctccaagagacttgactgctactgaggttcagtcggaaactgccctccttacctggcgacccccccgggcatcagtcaccggttacctgctggtctatgaatcagtggatggcacagtcaaggtattttaagtatataacaactcctcaatgctagttgaagcatttgcatgatcttcaaagtatggaagaattacctgatgctgtttttytaccccagtgcatctggggagctgaaaaaaaaaattagtagagactggatggcatgccagaccttctgaatcatactctccagcctctttcattttaaccagactccagttctgataggcagccaagatcaagaaccactgcttacaagacttgaggacattttaggagctggaatcttgatcctttaatattttgttgaacaaaggccaaaaggtttctctgcatgtttgccatatgtattatctcacagatggtatctttatattatatattg

SEQ ID NO: 440450 - DNA, 395 bp, Homo sapiens
ttatttcaggtccttgaagccagataccttggctaatactttcctccctaaaccatgagcctgtracatttattgaccctcttgtagtcccagcactgtgtttgacactttaaatatccaaagtatcctaagcatcatagtcacctgtgagacaaatcgaactattccatgtcatgtagaaaactaggcctcagaggggtcaggtggcttctcgcagccatgccactggggtcagaccaagattcacagccaggctgcctgattccaaaatccaagttcttttcagtgaagatatcttattcctttcaacaagccacactaactggaaaacagaacttcattcttttcacaaatgcttgtggagcacctcccgtgtggatttgtcagtgaaaaaa

SEQ ID NO: 440451 - DNA, 573 bp, Homo sapiens
tgtcttctgggttcatccgtgttgttgaaaatgacagaattttcctcttttttaaggctataaagtattccattatatatatatgtgtatatatatatatatgtatatatacacacatatggaatgtatatatttatatataaatatgatctatctatacaccacattttctttatccattcatccattgacagacacaggttacaatacattactcatgatagccaagataatatatgtaaacttctaagtaaagagaaagcagatactattataaaggagaggactttcacagctgctcttaggaagtggagagaacgttctcaagagttgtataaagcttttagggttttttgtgcccagttttattggctgttttatccctagtttagagattctgcctaaaaagtgactcctaagttagtaaaggcctaagatcgaaatcctgttcataaatcatgctaggtaacrcagttcatatatgtgacaaaagtataaccatctttttctttaaaaaataattattcttaaaactgacaacacagatgcagctagatgcagctaatttgaaat

SEQ ID NO: 440452 - DNA, 573 bp, Homo sapiens
tgtcttctgggttcatccgtgttgttgaaaatgacagaattttcctcttttttaaggctataaagtattccattatatatatatgtgtatatatatatatatgtatatatacacacatatggaatgtatatatttatatataaatatgatctatctatacaccacattttctttatccattcatccattgacagacacaggttacaatacattactcatgatagccaagataatatatgtaaacttctaagtaaagagaaagcagatactattataaaggagaggactttcacagctgctcttaggaagtggagagaacgttctcaagagttgtataaagcttttagggttttttgtgcccagttttattggctgttttatccctagtttagagattctgcctaaaaagtgactcctaagttagtaaaggcctaagatcgaaatcctgttcataaatcatgctaggtaacgcagttcatatatgtgmcaaaagtataaccatctttttctttaaaaaataattattcttaaaactgacaacacagatgcagctagatgcagctaatttgaaat

SEQ ID NO: 440453 - DNA, 553 bp, Homo sapiens
ctcagaccctgatggtccaagcaaccacaggtatttcctattatggcttcttcactcttcattgaatttcctctgaatagctttccaaaaatcacccgctayccacttttcaccctcctagttgctcccaatccttctcaaatttgatagagccatccaaatcaaagctttaaagctttaaaataactctcaccccaaattaaagaatttcagtgtcaaacctctttttcctaaatatccattcacatctggagttgttctgtttgtttgtataaagttaacctgacttgctttggttgaatttctaaatcatcttttcatctgatcttgaataatctttttcaatcccacccattatcatctgcctgtggtcgttctaatcaaagtttgcctatgtcatgttcaaagaggtatgtgcatgccatttctggtgacttggtcagaaagatctacactctttttctctctagcaggattttaaaaaataaaggtgccctgagcatgctgagaatagactctgaatcacaacccaagaattgcatgagaggaccca

SEQ ID NO: 440454 - DNA, 596 bp, Homo sapiens
gaaaagggtcacaggaatgaaattgcttgggatggagtaaccacaggtaggcaccttcaaataggaggtcaagaaagacctctctgaaaaggcaacatgatcctagaccttcaatgtggtccgtggcatagttcatgcacaaagcctggcgaggaagcagcttgctgagtaaaacggcttctgctgacatttttgtgttcatatcatctctgatttcagagctgatgcagtggtcaggttctcctgcaagcatgtgcctctaaggctctccacttctctgccttagggctttctcaagagtatgggaagcccactcagatctgagccagaaatattttcaaagtggaacgtcagctagtgagggagaagaccagtggataaatgtcccaggctcctacaggacaattcagaaggggcctcatggggatccacggttgcccagagcaggaactaattaagtatagcacatattggcttttcctccctccctgtyttaccctcactcctggtccctcacccctatatcctgggggcacctcccaagcccttgtctcaggctcttctttaggcctaacgagctgaggcagaagctcact

SEQ ID NO: 440455 - DNA, 585 bp, Homo sapiens
caccaagtgtttcaaaataactacaggaagtccaagccacagcaaaatttaaatctctatttacaaaatgaaggtattcattcccttattcattcagtcaccaaacacttctttttaaaacatttttctttatgtctcatggattagaccctaggcattagtgaattaatgcaagagcatttatctctttgtaagtttccatttagctgtaatggaaaagaagtgtctaaactagatgcagctaatttgaaattcctgtctcctttttttcttctgattaaaaaaaaaaatgcatttaccagtactgtcagaaaaaaaaaaagaaaaaagaaaaaacacctagaaaagagacgctgaaccttctccactaatcctccttatccctcaggattgccatcactgattggggttggctttgggtatggaaagaacatagaacttggagtcggargacctgattgtatctcagcttaggcacctagcagatgtatgacctaggataagtcattaacctctctggtttttttagatgtgatcggggttggaaggcaggtagcaatatctaccttactgtatcattttgaa

SEQ ID NO: 440456 - DNA, 535 bp, Homo sapiens
ttaatagtgtttacatgattagatgaaataaaattaattgttaaaattcattttagctgctcctttttcctttatttactgtggctactagaatttttttttttaatttctgtgtggcttatattatgtttctattggacagcactggtctaaactacttgctaattctgtgatcaagtcatctcaaccatcayccagcagaaagggccctaaagatggagagtaatttgatatctgatcatcaaaactgttgacaacacctagaatcttaaactgttagttctggaaggaacctgtggcagaaacttctaattgttctacaatacccattatcctcttctctcggaatcacggaaccccagtttttagctggcaacgtatatcagctaagaatatagactctatttctgtatttcctaatctaccttgcagattgggtgagcccatgtgacaaacttaaggccaagggaatgtgagctgaagtactatgtgcagcttccaggttacatatttaatcattagatattttgcttgg

SEQ ID NO: 440457 - DNA, 568 bp, Homo sapiens
aaagtttagttgcaataattatttaaaaaggggrgcagtcatatgcaaaatgaagcgatagtctctaccgagcttcaaacccatggaggcacataataaagatgagcaacggaaaactgtgtcagaggaaggctgctgactttggcaggcccccgggaaacactgaagtcttgtaacaggggtagagtgacgagtaaactataatgcaccctcctgggtctggggctgggagtttgccatccaaaggccaacactccagagagaaactcttgattaaaagagcaaaaagggtatcagttctttgacattcatagcccaggacattccttgttccaaaagctgctgtgtgtacttgtgctaatgaatggctttctctttggtacagtctccagtcataattgtgtaatttctttttttttccttctggtctagctatttgctaatttgatgttctaacaatgactcagtatctgagagaactgcccggaggagggtaattcagttctcttattatactgggtgcattttaaagaaacatttcttacatgcaagaaccacactacccata

SEQ ID NO: 440458 - DNA, 603 bp, Homo sapiens
gtaatttctttttttttccttctggtctagctatttgctaatttgatgttctaacaatgactcagtatctgagagaactgcccggaggagggtaattcagttctcttattatactgggtgcattttaaagaaacatttcttacatgcaagaaccacactacccatatccttgagggatttagagatagaaaagcaccatttccaactagcaaaagactctcagmagtaaataatctgtgttccaccagaactcatatatagggagggaagcttttagttatctccaagcactggagaagtgaattaaaaccatcaggctgattcctgaaacaaaaattcatcattcaaaaaagatgtagaatcagccaggtaaagtatgaaaggctggggggctggagatcagaaagggcaacacctgcatcattcaccatccacatggcaaaggcatgaggacaaagtcatagcccacagggaggtctctgagcatgcacagccggccactgaaaggcacatgaaaaggattcagttatggcgagatgctgactccgcgcatgatctcttgaaaaggaagcaaagaaccttggggagaaagcattgacaggg

SEQ ID NO: 440459 - DNA, 334 bp, Homo sapiens
ccgcagaccagagaccaaagaaagatcaacactgccacctattgaggatttattggagaacaggctaagttgagttttttttaaattgtgatttttaaacagattttgagatattttgagatctgcacagacctgaaatctgggttatcttccaccaggcacacggattcttagccatagaagtaaggaatcaggagcatactgagggatgcttgggaaggtatgagtracagtttaagaaacagactctgttcagcctagtaaagagcctacccaaagggacttggtctcagtttcttacttgctgtgctacaggacaaaggctgggagtgtg

SEQ ID NO: 440460 - DNA, 553 bp, Homo sapiens
ttaagttagtgcactaaaaaacaataattagccaacacctccctccttttaaagttagcccaggagattcactgggaacccattaagaaaccattattaagagtttggaaacaattacctagttacacggattcagggtaccaggaagagatataaagacataaaattaggttcaaagtgaagagtcaacctagtgtcaaaagactgtcaagcaaatgctmccatgcaaggttcttttgaaaaagagaaagatgaacaagcagccactgtgtagaattattttgtgttaaagatggctaatttttgttggaagacatcaaggaattagaagggcaggagtggggatctcagagcaatgtcctgtaagcttattatccatatgtagatgatttctcccgaaaccattccagcagaatgacttagatattattcccagctatatattcaaccccaaatctggttctcctggggttctacaagctatgtaatagcttttaataaattccttttctgtttaaatttgctagagtgccttctaatgtttacaagaaga

SEQ ID NO: 440461 - DNA, 564 bp, Homo sapiens
gcaccctaaacagcactgaagaggaaataacttaccattaaagagtaaaatacccttctccctttgatttgtattttcccccagtgaaagcaagaaggctgtgtatcagcctagtctgttttcttaaggtcgtttgaaagccccattgtgcacttgatgtggtcagggtttccagctgtcgaagcagctacataattctttgtattgcattcaagcaaccgaatgttagcagcctaccaaaacctttttgtaaatccatttatgagggatctttaattctaaacatacaaataccttcatctcatatttatataacttctttctaaaactttttatcgtctatgactttatttgattctcatagtcacactatgaaatagatagggtaagttatcatttttttttctacctatcttccctccttcttcctttcattttactttttcaaaggagggaagtaaaattcagagatgatgatatttaatctagatagagtaatatsaaagcaaagaccaaagtccagggcttttttttggtagatcacactgcccatgagtaattctt

SEQ ID NO: 440462 - DNA, 570 bp, Homo sapiens
cagttttcagaactataataatttgctatgccagaaatataaagtgtatgacaggaaatggtaagaaatgaggctagagaggtaattactcgactatgtttcaggatatatttcaagaaggggaagtctactgtgaacaaatatgaagaaaatagtattaagtacatgtgcagaaatagacttcagataggccaaaagcctgggatggcacaccasagaaactaacctttgagtccctcagtgtctcattaaacaacttacactgatgatagaatgtataaatatgttgtgatatatgcattccatgaaatattatatggtagtgaaaatgaataaactattgcaactatcaacatggatggatattaaaaacaatgggcagatcacagaagaatacatgaggtatgattccatttctttaagattcaaaaccagacaaaaccaaatatacattgtttactgatacatatacatatacgtggtaaaatcttgtaaagaaaaaaaagaaatgattgccccaaaatttagagtagagattaacttgaggaaacaaaaaagaatgagaaggac

SEQ ID NO: 440463 - DNA, 570 bp, Homo sapiens
cagttttcagaactataataatttgctatgccagaaatataaagtgtatgacaggaaatggtaagaaatgaggctagagaggtaattactcgactatgtttcaggatatatttcaagaaggggaagtctactgtgaacaaatatgaagaaaatagtattaagtacatgtgcagaaatagacttcagataggccaaaagcctgggatggcacaccagagaaactaacctttgagtccctcagtgtctcattaaacaacttacactgatgatagaatgtataaatatgttgtgayatatgcattccatgaaatattatatggtagtgaaaatgaataaactattgcaactatcaacatggatggatattaaaaacaatgggcagatcacagaagaatacatgaggtatgattccatttctttaagattcaaaaccagacaaaaccaaatatacattgtttactgatacatatacatatacgtggtaaaatcttgtaaagaaaaaaaagaaatgattgccccaaaatttagagtagagattaacttgaggaaacaaaaaagaatgagaaggac

SEQ ID NO: 440464 - DNA, 648 bp, Homo sapiens
tcagatatttttctatctatactaaataatatacaaagagagaatgacagctatagttttttttttttaacagaagaggcttaagggtagtattctagcaggggtgaaactatcattttatcttaaatgctgaactttcaagctgagtagcattcacaatgatgtcagatatttaactactgggaggattaatttccaaacgttctacttgaattccattaattagatgaaaaaaatttgagccattattagaaattaatgaatttctatttgaagcatactatgacactgatattaaattgatatcttttagctggttgcaaatttcttctactaatagagccttctcaataacagctctgcttcactttgttttcatacatgtgtaagaaaactagaaccaaaagtgtgctaaattgacttagaaaaatcattttcttttaatctcaatgagaagttatgcttcacagagtaatatgaaacataccttctataactgcatgtgataaactgtcaccttttgggacagtgttcttaattattaacttctgaagtacatccttaygttcctagatttcatgtggttagagatattattgtgacccttaagaaagataataaatgctgatgaaccttgtgttgccaccc

SEQ ID NO: 440465 - DNA, 582 bp, Homo sapiens
aactgctccctctctgagaccagttgtccctgacttctcacttctcccaggcatagcacaatgactcagggaagccattattgcactgtcactaccaagcagccatccatcactccaaaaggtttatacaagagtcctttctacataacttgacattttttgcccatatttagcaccaacagasagcagactcctggagttgagaaagaaaaggtacttgggttctgtatagctgaattgatactcttttctcagaattaaaataaaagagcagggtctagataggacccattctgtgacaatttgtccttacttttagaacctcatatggcaggtttcgaatatggaagtgagaagagttgcctagagcaaaatatggaaatcccagaaagtactcagagacagcatcaggcctcagatgcttagagggggcagaagtaacctcttccaggaggtcttggtatagttcttttacaatgtagcatggtgatgaggatctcagagactcacactgccaaggttcaactctagctatgtaacttctggtaagttacttacatttttttatgcttcaatttactg

SEQ ID NO: 440466 - DNA, 589 bp, Homo sapiens
ccgtctgctaaactagcgttgcccagtgacatctcacagccaacccaagaacatcttcagggccctggcaaggagggtaggacagagccttggggagtcgtcaccttttgaggtatctggcgtcctccccttgcatggcggcagcggcagcggcgtggagaggatggggtatcttgagaggcaggcgcggttatttccggggacggtggccaaagtaccctcacacccagaggcgatgacagtcytgaggcctgcaaggcggggcagcagcggcgctgtggttaccacggtgaagcctccagctcctcccacagcttctgtgccccaaaacactggagcggcccagacccgcccagagtcgcctaagccgggccgtcacgacgcatgcgcttgctctgcacctcttgtatgcgcaggctcagtctgaggcggtggcctcagagtttgacgcaccggggagccgagcagggaagttttggtgcagttttgagcgtccgtgtataaggagtggctccgtagtcaccgcccccttgaggatgggaatagaaagggctgtcaggtcagcttgaaaggagagaggggaatccga

SEQ ID NO: 440467 - DNA, 589 bp, Homo sapiens
ccgtctgctaaactagcgttgcccagtgacatctcacagccaacccaagaacatcttcagggccctggcaaggagggtaggacagagccttggggagtcgtcaccttttgaggtatctggcgtcctccccttgcatggcggcagcggcagcggcgtggagaggatggggtatcttgagaggcaggcgcggttatttccggggacggtggccaaagtaccctcacacccagaggcgatgacagtcctgaggcctgcaaggcggggcagcagcggcgctgtggttaccacggtgaagcctccagctcctcccacagcttctgtgccccaaaacactggagcggcccagacccgcccagagtcgcytaagccgggccgtcacgacgcatgcgcttgctctgcacctcttgtatgcgcaggctcagtctgaggcggtggcctcagagtttgacgcaccggggagccgagcagggaagttttggtgcagttttgagcgtccgtgtataaggagtggctccgtagtcaccgcccccttgaggatgggaatagaaagggctgtcaggtcagcttgaaaggagagaggggaatccga

SEQ ID NO: 440468 - DNA, 640 bp, Homo sapiens
agataagattatgtaaaaaggacactggtgaatttgaggcaatttgggaatcaaatggaattactgggattgatttaagacattaaataaataaaaaaaagaaatccataatgatactcaacaacatagaaaaacagggaaaaaagaaccccacttccactggaggcaactactgcatcagatctttactctgaaagctggtaattaaaagaaagaaggatttaatctaatgcttttggaaataaaccagatttcacctccttttaacaaggaaaagctcttcttaacagaaaatacctggtaggaatggagaaaaataatgatagttactattttgcaagcaccaataaacaatggattcaaataagccctattaatttactttaaaataatttaaagtgaggcaaagttttaccccgcatatttctttataattctaaaggaaaaraaatgttactttacaatgaggagatctagctgtcagcattttaaacagacaagcaaacagcatcattagtgagaggtgaacccagctggacttctgggtcgggtggggacttggagaacttttctgtctagctagagggttgtaaatgcaccaatcagcactctgggtctagctaaaggattgtaaatgcac

SEQ ID NO: 440469 - DNA, 590 bp, Homo sapiens
tggtaacaaacttagtggcctaaaacttaaatttattgtcttacagttctgtagatcagaagtctgcaatgaatcycactgagttaaaaatcaagataccaagagggctttacttttttctggatgctttagaatagaatcagtttccttgccattttcagctgttacaggccatccacactccttcactgatggcctctttcctccatcttcaaagccagcaacagtggcccaagttcttttcattattgccatctcacaggtccttcttctcttatcacatctctctatgaccacagccaggaaaggttttccacttttagggatgcatgtgggccccactggataattcaggataatctccccatgttaaagtaggtccttaactttaatcacatctatcaagttccttttgccatgtaggtaatatatttacaggttccagagatgggatgtgagcacctttttttgtgggggtgggtgagaagggtgggagcattattttacctgccacaatacctaccaccataatgattaatattaaattgtcagacaataccaattggtggtaagaatgtggagctactgga

SEQ ID NO: 440470 - DNA, 612 bp, Homo sapiens
gggaaaagacagcaggggcaagatcatggagaacctggtatacgagaacatggtatttgaayatttcctgcaggcatgaggacccattgaagaattttaatataggaaagttgtatgctaagatttattactttcagcaatattggtttctctatattttatccacacagcaacggaaaacagaggggttagaattacattttaaaaatactccaaatgtgttgtttatacatttcaatcctgatttgcttcaacagtacatagaaaatctttcttaccttgtgattgcctttgggatgccatcaaatggccagtggggcccaaggagcccatatccactggctatcaatgccattatcctgccacctttccaattagtttgagctcatgtagcacatcttaatacaaaggagatttcagttaaaaggaccctttaaaataattctcttcctggtggtggtaaccactgtttcaactagtatgacgtaagacaataactatgacatcactgggttgctcctaggatcaggaatggggcgtggcccactaggataatgaataatgaattcctgtgcttttttctttcaccagattctcttatagtctgaataa

SEQ ID NO: 440471 - DNA, 478 bp, Homo sapiens
ccacaatgtaggttaagcctctcaggaacatagcaaaatatggaataactgatgatgcatgagcattagcaaccagaatggacagtggctgragcagggtccaagaggccttctatgctagaccatctcaggagggactaagaggtggcagggtaaggaaaggaggacactttgaggacttagtagagctgctatgtgccaactagtaaggaagtatttttatattttatagtaggtatggccataatggtgtgtataagtaattatcagtcttttcccttttgcttcaactatgttgcccttatatgaattattttccctttctagcaagctctacatgtggctgtcactgtcttatttcctctgctcaatgtcttttccaacctttctacagatgatgattcccatctacagactcgagccttcaccaattcctgaggcagtcctgaagatggtggcagtccaatcagtaacacca

SEQ ID NO: 440472 - DNA, 478 bp, Homo sapiens
ccacaatgtaggttaagcctctcaggaacatagcaaaatatggaataactgatgatgcatgagcattagcaaccagaatggacagtggctgaagcagggtccaagaggccttctatgctagaccatctcaggagggactaagaggtggcagggtaaggaaaggaggacactttgaggacttagtagagctgctatktgccaactagtaaggaagtatttttatattttatagtaggtatggccataatggtgtgtataagtaattatcagtcttttcccttttgcttcaactatgttgcccttatatgaattattttccctttctagcaagctctacatgtggctgtcactgtcttatttcctctgctcaatgtcttttccaacctttctacagatgatgattcccatctacagactcgagccttcaccaattcctgaggcagtcctgaagatggtggcagtccaatcagtaacacca

SEQ ID NO: 440473 - DNA, 569 bp, Homo sapiens
ataagtccacatgtttacagccaattgatttytgacaaaggtgccaagaacataccctggggaaagaacaccctcttcaataaatgatgctgagaaaactggaaatacatatacagaagaatgaaactagaccccaaactcacactgtatacaaagaatcaactcaaaatggattacaggcttaaatgtaagacttgaaactataaaaccactagaagaagatataggggaaatgctctgggacattgatctagacaaagatcttagggagggctaagatctcaaaagcacaggcagtgggaaaaaaaatgacaaattagactatattaaattaaaactcttctgcacggcagagaaaacaatcaacagagtgaacaaatagcctgttgaataggagaaaatatttgcaaactattcttctgacagggggctaacatccagaatatacaagaagctcaaacaactcaacagcaaaaaacaaataatctcattaaaatgggcaaagaatctgagaagacatatctcaaaagaaaacatacaaatggccaagcagtatatgaaaaaatgct

SEQ ID NO: 440474 - DNA, 310 bp, Homo sapiens
attttcgctgttcttgtttctattctctgccatttatctctgctctagtctctattatttccttccattagcttcgtgttgaatttgtatttcttttttctagtttcttaagttgtgaagttgtataaaaatttgatatmtttttcatttttttgttgtaggcatttatagctataaattccaactgaggactgcttttgtggcatcccataagtttcggtatattgtgttttggttttcatttgttgataagtattttctaatatactttgtgatatcattttagctcattgattatttaagagtatgt

SEQ ID NO: 440475 - DNA, 570 bp, Homo sapiens
cccctgtggcccacgctatcagaatcttggttctgacccacagagctgtgtggagtcttggcagagcagctgctcaggcacgcagagagacccaggagctttagatactctggcctcaggaaccccaacaaacatgtctgcaactcaggcaaggtgggacaactgcatgcacgctaggaaggggcagaatccagggagctgagaatccagggagctgagcagataagacctactggcttggaatcccagcttggtagctaccagcaacagaatggaataggtctgagatgggacagagccccggtcgggggttgggggtgaagggcaggcaccatctctgctgtttggtcaactcagcagttccagcctttgggctttggagagtccagacagtctgaacgaggaagggtctccccascagcacaacatagcggctttgccagatcattggcagactgcttctttaagcagggacctgacccacttctcaatgggcaggatctcccagttggaccctacagccatgcctgccagcaggtattagggaaagagtgctgatctctccctggg

SEQ ID NO: 440476 - DNA, 561 bp, Homo sapiens
aaacaaactgctgcttatagtgagaggtggtagaatataatggttaaaaagaaaacatgattaaaataagatgcaactacacacctattcaaatggccaaaatccaaaacactaataatatcaaatgctggcaaggatgttgcgcaacaggaattctcattcattgggggtgggagcaaaatgatacagccactttggaagacaatttggcagtttcttacaaaactaaatatagtcttaccatataacccagcagtttcgctcctaaataattactcaaacacttagttaaattctagtcaaatacttgagttaaaaaattaaatccacataaaaacctrcacatggacatttatagcagctttattcataatggccccaaattaaaagcaaccaaaatgcccttcaatagatgaatgggcaatccagacagtgaaatactattcagcaataaaaggaatgagctattaagtcacaaaaaaatatggaggatccctaacttactaagtgaaagaagctagtctgaaaggctacatactctgatcccaactacagtcatgc

SEQ ID NO: 440477 - DNA, 613 bp, Homo sapiens
atataagccctgttctctcctctggctaaataacagggacacttagtgcagtgctcccaacttttaaaaagtgtcaaaatacccatagaaaatgataatatttttatagcctgctgaggtaaactggagcagatttagggactactcagatggggcctggaaaaaaatagtatacaaaatattaaggagaatgttacatactgaatttgtacatgaacttctaaagtaaatgatttagaaatacttaatgagaaaacttcagtgttgcttctgggaatttaggacatttatagcaggaataatgcttgaaatggcaaatgcaatttccaggtaaagttggtttttttgttttgttttgttttttgttgggtttttttttgtttgttgcttggtttttttctgagacagccgctcttgttgcccaggcgagagtgccctgacatgatctyggctcactgcaacctctgtcaaggttcaagcaattcttgtgcctcagcctcacaagtagctggaattacgggtgcacatcaccacaaccaacagatttttgtatttttagtagagacagggtttcgccatgttggccaggctggtgttgaactcctgacctcag

SEQ ID NO: 440478 - DNA, 546 bp, Homo sapiens
tcatggtcaaaatattgaaatttggggggaaaatgtgtttttttcccaaaagataacatattttcaccaaaactaatgaccatgggattccaatmcattgcaagtatttcaaaataatgatggagtgctaactagagaatgcatgtacattattagaacagctaccttgcacctactttggatactattagatgggtacatcagctgcaaatgggcagaagtttctggtacacattaaagacacagacttgggactgctacctggagtagcactttccggggtcctgtgtcatacctccctcctcactcccacatcacccctgtaaccagtcatacctgtgatacttgaatcatgaagtgctctagtatatttctggacccctgatataccaaaggcaaagcactccacagtagactgctgttgacaggcagcgagtaccagatgtcttttgtgctttctacctgcagaccggatgggattagggatagaccatcaatccccactctgcacaaatgcccctttgaggattcccagttaaggctgct

SEQ ID NO: 440479 - DNA, 546 bp, Homo sapiens
tcatggtcaaaatattgaaatttggggggaaaatgtgtttttttcccaaaagataacatattttcaccaaaactaatgaccatgggattccaatccattgcaagtatttcaaaataatgatggagtgctaactagagaatgcatgtrcattattagaacagctaccttgcacctactttggatactattagatgggtacatcagctgcaaatgggcagaagtttctggtacacattaaagacacagacttgggactgctacctggagtagcactttccggggtcctgtgtcatacctccctcctcactcccacatcacccctgtaaccagtcatacctgtgatacttgaatcatgaagtgctctagtatatttctggacccctgatataccaaaggcaaagcactccacagtagactgctgttgacaggcagcgagtaccagatgtcttttgtgctttctacctgcagaccggatgggattagggatagaccatcaatccccactctgcacaaatgcccctttgaggattcccagttaaggctgct

SEQ ID NO: 440480 - DNA, 551 bp, Homo sapiens
ctctaccaaaaagcagccagactacttctttaagctggtccatgatcctgttcctcctgactgggtgaaacctcccaaccagggtctccagccacctcctacaggtgtgttccagctggcgataggtcagtacttccctgggaaggagcttccagaggaagggcaggctgccatctttgatgtattgcagccttcactgatgatgcctccaggtatgggaaaaactgaggcaactagggtttggagcagacacccagcaaactgcagcagccctatggaagagtcagcaggctgttaaaagaaaaacaaacaaagagaaaacaacaacaacaaaaccccacaaaaaccccatctaaagatcagcaacctcaaagatcaaaggtagataagcccgccaagatgagaaagaatcaacacaaaaatgctgtaaactcaaaaagtccccattttcctccaaatgatcacaacacctctccagcaarggctgaggctgagcctttgggctgaggctgatggctgaaatgacagaattaggcttcagaaggtgggta

SEQ ID NO: 440481 - DNA, 607 bp, Homo sapiens
aataacattattgggagaatgtaagaaaccaacaacaacaaaaaaaatcataggtctgccatttattagctgtgtaagcttggggaagttcttcacctacctgtaccagtttcctcatggaaaaaatgggatgataatagaccctactttgtagagcagtcataacagttaaatgaccatggagaaagtcctaagaacagcagctgacatgttgtaaacactatatattaacatcatcatcgtcatcatcatcatcatcatcatcatcatcatcatcatcattagcgatctggaatattagattattcatatggccattgacacactgtgctggcttcttaaaaagcgtgataaggctacttttgaatctttcagacctttccagagtccctgtctcatccctttgkcatgactgcagtgaactctgtttctccttgtgctgtgccacatgtaatgctccatccatcttcagtgacatgtttacttatttacatgcctatccctcacttgtccatatctcctcctctcaaaaaaataaagcttgtcttgttctttaattttcagtcattctcctctactttcctgctcaaaattctcctggtattta

SEQ ID NO: 440482 - DNA, 441 bp, Homo sapiens
tatcaactctatgctgatggctcccaatattccatcttcagcctagtagtctcttctgaacttagatttgcatattcaattggctcctcaacattttcacttggtgtcatcccaacactcaccaakgttgagtttaagctgctctaattcttgatcttctttcaccatgaaaactgttttaccaccaacttcccccatctcaaatgatagaaactatgttctcctggtagttcaggccaaacatttgacactcatctttgacttttcctttattacaccctcccacccaatcattcagcaaatctagttggttttaattttgtatatatgcagaacccaaacacttctcactactttcggtggtacaccctggtctgagccaccatcacctctctcctgaaatgcagcaatattctaacataggggacagcaacgtttttc

SEQ ID NO: 440483 - DNA, 606 bp, Homo sapiens
gagaaaggggaatgatgatcaacctcaatgacccagctgagttgaaaatcatatatcagtatctacaggaaaattatgtcattccctccataagctcagaagcccatagsagagaatattgacaactgtgtcaatcagcttgtgaatattggcaaagcagaaagtcaagggttaagagaattaaggatactggtgaaagaaacagaaaattcccaggatgagcctaaaaagaagattctgctaatttgctctaagaattacaaaggcctaaaacataagtaccattgttttgctgcacttagactgtttggtaatggtttaccatttgatttagctctggtccctggcttgcttgtcacggattctgagtggcacgctaccctagagcatggcgagtaacatacaacagctgtaagatgccaagagcagaataggtgaaataattttccagcacgctaaatgaaactaccaaggtaaagctacaacaatgtattaaatgttttatcaaaattgttttcctctgaaatgagagctgtgacctgaaaatactattttatgatgatagcatatccatgtagtctgtcttctttacttaaattgattatt

SEQ ID NO: 440484 - DNA, 606 bp, Homo sapiens
gagaaaggggaatgatgatcaacctcaatgacccagctgagttgaaaatcatatatcagtatctacaggaaaattatgtcattccctccataagctcagaagcccatagcagagaatattgacaactgtgtcaatcagcttgtgaatattggcaaagcagaaagtcaagggttaagagaattaaggatactggtgaaagaaacagaaaattcccaggatgagcctaaaaagaagattctgctratttgctctaagaattacaaaggcctaaaacataagtaccattgttttgctgcacttagactgtttggtaatggtttaccatttgatttagctctggtccctggcttgcttgtcacggattctgagtggcacgctaccctagagcatggcgagtaacatacaacagctgtaagatgccaagagcagaataggtgaaataattttccagcacgctaaatgaaactaccaaggtaaagctacaacaatgtattaaatgttttatcaaaattgttttcctctgaaatgagagctgtgacctgaaaatactattttatgatgatagcatatccatgtagtctgtcttctttacttaaattgattatt

SEQ ID NO: 440485 - DNA, 606 bp, Homo sapiens
gagaaaggggaatgatgatcaacctcaatgacccagctgagttgaaaatcatatatcagtatctacaggaaaattatgtcattccctccataagctcagaagcccatagcagagaatattgacaactgtgtcaatcagcttgtgaatattggcaaagcagaaagtcaagggttaagagaattaaggatactggtgaaagaaacagaaaattcccaggatgagcctaaaaagaagattctgctaatttgctctaagaattacaaaggcctaaaacataagtaccattgttttgctgcacttagactgtttggtaatggtttaccatttgatttagctctggtccctggcttgcttgtcacggattctgagtggcacgctaccctagagcatggcgagtaacatacaacagctgtaagatgccaagagcagaataggtgaaataattttccagcacgctaaatgaaactaccaaggtaaagctacaacaatgtattaaatgttttatcaaaattgttttcctctgaaatkagagctgtgacctgaaaatactattttatgatgatagcatatccatgtagtctgtcttctttacttaaattgattatt

SEQ ID NO: 440486 - DNA, 596 bp, Homo sapiens
aatacacccattccaagtgggagaaattggccaaaacaaagggtttataggccctatgcaagtccaaactccaatgagacagtcattaaaccttaaagttccaaaatgatctcctttgaaaccatgtctcaaatccaggtcacactgatgcaagaggtgggttcccatagccttgggcagctccacttctgtagctttgcaggctacagcctggctgctttcatgggctggcattgagcacctgcagcttttccagatgcatggtgcaagctgtcagtggatccatcattttggggtctggaggatggtggccttcttctcacagctccactaggtagtgccccagtggggactctgtgtgggggatctgaccccacagtttccttccacactgctctagcagaggttctttacaagagctccacccctgcagcaaaattctgcatggacatccmggcatttccaaacatcctctgaaatatagacagaggttcccaaacctcaattcttgatttctatgcacctgcagacccaacaccacatgtaaactgccaatgcttggggcttacaccctctgaagcaatggcctgagatgt

SEQ ID NO: 440487 - DNA, 549 bp, Homo sapiens
gacagggtttgactgtgttagccaggccaacatctcatttttattacagggaatcaataagtcaacccaagatcccaaaaggcatgatctgtcatcaatcatttgggtatgaaacgtttatgagactctaaaagagatgtcttctttattcccaaattttatatcaacactgctaattcaccttcctctgaagcatgtaagattagttggtgataggacagtgaaatgccaagtgggagggtaagacagtgttattatatttatcatatcaaaaatggttcatcctttctgaacatmttaaaaccggcttgcaggcggcagaactcttggctgggtcatatggcttagtcgtgacttaaataacaacacagaggcatgcgagctcaatgtttgcaaggactttgccttctcatcaagctgcagttgaataactcaccccaacaaatttcctaagaaatttctgagaggcctggatgtctgggctggacagttcaatgaaatttcccatcataccctcttctgtggctggtacttcttggtagaaaagtt

SEQ ID NO: 440488 - DNA, 576 bp, Homo sapiens
agaaaaatatacagtgattcaaaaatgttatgatcagggcatgaagcaagccaaaatatgacataaatttgagcagaagaaatcaaagagaaaaatacctatttcactttaactaagagcatttttcttcagataaccccaagactgagacattggatagtattcagaaatgaacaattacataattccaaattttgattctgagagttaaaaatccaaaaaatacaacttgtattactatgactatgttccatctatggagttacatcagcattttccaacttggagacattggagccagtgtttgtaccctgaatcaccatgaatttgctgaaagggataatgagaacaagaatcagtttctatgtagcacatcattttctggaggccaccaatattatttatatcctccatacatgttaactattatacatagattgttattttaaaaatataaatcttttaaaagtttaaataaatacatagaagcttttttgctattttayatacaaattagctactgattgagaaaatacaacattaaaaggatggtccttatgttcaaaaacattgaga

SEQ ID NO: 440489 - DNA, 585 bp, Homo sapiens
aagtcacaagtctcatctggagatgagttcctccacctacaaccccataaaatcaaaacaagttatttatttccatgatacaatggggatacaggtattgggtaaacattcccattccaaaagggagaaataggccaaaggaaaggggttaaaggtccctcacaagcttgaaccccagccagcagggcagtccttaagtcttaaagctccaaaataatccttgactccatgccccgcatttgggcacactgaggtgtggacttccaaggtcttgggcagctcccctcctgggctagtccatactgaggttgtaaactgcaggtgggtctgccattcycaggtctggaggcagttgacccccttctgatagctccactaggcagtgcccccagtggggactctgtgtgggacttcaccccacatttctcctccacactagtaaaggttatctcagtgtggggggctccacctttgcaacaggcttctgcttgggtgcccaggattgcccatacattctctgaaatccagatgcttggcagcctccactactcttgcactctgtgaacccacaggcttaacaccatg

SEQ ID NO: 440490 - DNA, 539 bp, Homo sapiens
tgaatttgcctcttcctcctaaatttgtttactcgatgaactcattttaaactcagcttttaatgtcattactatgaaaatattcttaacctttcagtttctcaaataaaattaattgcttttttctttgtagcttgtcacaactcatgttgtttacgtaactgcctccctagatagactatgtatttctcaagccctttgatattttataccggtattcagtagatacatactaaattaacttgaattcagcctttcacaagtatcttttctcttctcgctgagatcaatgcacttgaccccttttatttgattattcttcttctgatgtttggatgccatttatccattaaacttargccttacatttaaccaagaaagctgtttaataaagatacaactgcttatggagcgcatttatcacagtgattcacaatttacagaatcacttttcacatatttagttaataaaagaatgatcaatctttaataaagctgggcttaaaatgacatatttttctttttttatttttattttt

SEQ ID NO: 440491 - DNA, 617 bp, Homo sapiens
ggaagaagagacaacaaaaagaagaaggaggagaaggaggtaggggacagaaagaaaggacaaaacagaatagggaaaaaagagtaagaagaacaagaaagtaagaggaagagaaaaatgatgatgatgctgatgatgacaatgacaattatgatgaggaggaggatgtttattttaatacagggatgaacactgagaaacagaaaggttgaagtgtgttttaaagcccagacaaaaccctaatcatctgcaacttaatgcaatgtgatttttccccagaaagctttggtattacacatggtgactctctcttatgcagtttgaatctggctattccaaatattactacaaaaaaattactatttagttaaggaatataamacttgggtaataatcctcatatttcaaagaaatggatgactcattaagattccagtgcaatcaaagaacctggagaaatccctggagttagttttagtcaaatatgagacacagctaaattaaatgagtaaaaaataaaataagtgattcattgagtttcttatataatcactagatgctctccttcttcaataatggcagaacaagaggaaagagccccctttttttcctgacat

SEQ ID NO: 440492 - DNA, 637 bp, Homo sapiens
gcaaaaatatttatggcttcaaacaaagrgataattttaaatattaatgtgatattcaggaaaggattgcttttggataataaatgcacttgcaaattaaatttcacttctttgttttcaacaaaattgagggaaacaatcaagttgttagctcatatagcattacaaataatttttgatgatcaatcatatagaactttggcatgcacattaataaatataagtacatgtctaggtatactgtcataaaatttccatttcccatagtataagaaatgtttatcactatctacatattaaaacaaattataatagaatttatggtgaaccctgtctcattatagtagtaagttatttatccacaaatacattgctaatcaaaaatataaagccccatctatcttattaaaaatgcatttccaggaacataccccaaaataataagcgctatctatgagaaacctacaggcaacattatactgaatgggcagaagctggaagcattccccttgaaaactggcacaagacaaggatgccctctctcacaactattgagcatgggactggaagtcctagccagagcaatcaggcaaaagaaacaaataaagcgcatccaaataggaagaaagcgagtcaa

SEQ ID NO: 440493 - DNA, 637 bp, Homo sapiens
gcaaaaatatttatggcttcaaacaaagggataattttaaatattaatgtgatattcaggaaaggattgcttttggataataaatgcacttgcaaattaaatttcacttctttgttttcaacaaaattgagggaaacaatcaagttgttagctcatatagcattacaaataatttttgatgatcaatcatrtagaactttggcatgcacattaataaatataagtacatgtctaggtatactgtcataaaatttccatttcccatagtataagaaatgtttatcactatctacatattaaaacaaattataatagaatttatggtgaaccctgtctcattatagtagtaagttatttatccacaaatacattgctaatcaaaaatataaagccccatctatcttattaaaaatgcatttccaggaacataccccaaaataataagcgctatctatgagaaacctacaggcaacattatactgaatgggcagaagctggaagcattccccttgaaaactggcacaagacaaggatgccctctctcacaactattgagcatgggactggaagtcctagccagagcaatcaggcaaaagaaacaaataaagcgcatccaaataggaagaaagcgagtcaa

SEQ ID NO: 440494 - DNA, 442 bp, Homo sapiens
ttagtgaaaccatctctacccattccctgcctcttatcttttctcaaacttcatagtgcacataagattatcatgtacaataggcccggcacggtggctcacgcctgtagtcccagcactttgggaggccaaggcaagtggatcacctgaggtcagaagttcgaaaccagcctggccaacatggtgaaaccccgtctctrctaaaaatacaaaaagctagctgggaggggtggtgtgtgcctgtaatcccagctacttgggaggctgagacaggagaatcgcttgaacctgggaggcagaggttgcagtgagccaagatcacgccactgcactccagcccgggcaacagagcgagactccatctcaaaaaataaaaaataaaaataaaaaaaaaaggaagtgtatcaagtacactagtgaggctttattacagtccccactt

SEQ ID NO: 440495 - DNA, 595 bp, Homo sapiens
aatgtcaaaaaaagtcaaattttaagataaattttattaatgaagagaaaagaatttaacaaaattcatcacctattcataatttttttaaaaaacctctcagcgaagtaaatctaaaaactcatcccttactttgataggggcatccatgaaaagcctacagttgacaagatatttaagagtaaaatattaaacgctatcttaaaaaaaaaaggccgaatccctgaattcaccactttttaaaaatcttttactgaagaaccaaaccaaaacaataaggcaaacaaaaaataagtcactcagattagaaagaattaacactgtctacattttcaaatgamatgattattgaatatgaaatcctaagaaatcaacaaaagtataaaaactactaaagaaatttagtaaagttgaaagatccaagtctaatatacaaaaataatgtatttctatacattaatagcaaatatttgaaaaaactgaatcttactgtcaggcctctgagcccaagctaagccattatattccttttgacctgcatgtgtacatccaggtggcctgaagcaactgaaaattcacaaaagaagtgaaaata

SEQ ID NO: 440496 - DNA, 556 bp, Homo sapiens
catggtgattaaacaagagccgaaggaaaaaaaactcaagagaaattcaaaaatattttaaacaaaatgaaaatagaaacacaacttttcaagacttgtgggatgcaaatcgtgaaagcagtgtttatggggaaacatatagcattgaatgcatatgttagaaaataaggaagatttaaaatcaattatctaagcttctaccttaggaaaaattttaaaagcagaaaaaattaaacttaaattaagcagaaaaatgcaataaaaattagagcaaaaattaataaaattgaaaataagacatccttagagaaaatccacaataccaaaagcttgttctttgaaaagatcaatagaattaataagtctgtagctaggtaaactaagagagatagaggacacaaattacgaatatcagatatgaaagaaaggacattgctatagattccatrgacaaaaaaataataaaataatacagcaaacaacactatgtccccaaattttacaatatacatgaaagaaaccaattcattgagagacacaatctgcccaaatttac

SEQ ID NO: 440497 - DNA, 593 bp, Homo sapiens
tgtcctgccttttaatagagtatgcatgtgcagaatctttaaaacctgtgcatacagtgtctggggtgcattctcactgcacctggcagaaagctccatctgtttcatgttgcctcaggcactgtccagttccctctaagctccccatgcatcagtctcttcttgcttgccttacagcatttcactctctcacacacatctggttttgatgattcctccatattgtcttcatctgatcatgtagcttctctacctgctaaacccctttcaatttaaaagagtctcattagagaatctaagacaatattctaaatgtgtttagcaataaggaatagaaatgagtatgcatattagcattaagaagtgatgcattagaattcttttattgcragcatcactagtgcatagagcccaaaaagctataagtcaaaacataaattgcacatacaacaaaatcctaatataaaatagcatgaaaacagatattagcctatctcgcagaagccacgttaagagactgaacagtctatgatgacaatgatagacttataaacatgagcacttgtcaccatccacagatacaaaatgcatag

SEQ ID NO: 440498 - DNA, 536 bp, Homo sapiens
ttgagtgatctatctggtttctgtgtagagattagaaggggcagaagggaaaatgcaaattaaaaatgaacggctgaattctctctgttgaaaataagagaagagtctcctcctccttttcttggagcatttactttagaaatgttattagttctctctctgtctctttaaaatacacataaatctttttaaaagctgaataagcctcttgctagctttgaaacccacaaatgtctttctcaaggatctcagagtcacctatgtgagatgtagtcatcatatatatatatatatatatatatacacatacacacacacacgcgygcacacacacacacacacacacacacagagcacccttgtcttccagtttctatggaaaagcaaagcctaacatcctcaggtgactcattccaagttgtaaaacaaactttttcatgaagatacaaaaacttcattatttctttggataaaggcaattagcttacacagatggtcaccccaattatcaaatgaatttagaatgaactatgtgt

SEQ ID NO: 440499 - DNA, 463 bp, Homo sapiens
  misc_feature (1)...(463): n = A,T,C or G
ttcttagtaaggaatagaagtgagcactgggatttaaggtacgaagggataggatgactcttactgctttgtgcaaatgcagtcaggtttatgatcaggactgcccttatctataaagctgctaattctctgagacttgaaaggaaaagataaacaccagctgccagtctctggctgcataacaagaaggcctggacaacgacaactgtttttctgaattggttttaatgatgctttgtccctgaagtcaggaagtacactgtcagtaagggactaccttttaaagttcttttgatactggacartgcccttggccacctagaacctcatgagtgcagcaccacaggtgttaaagtggtctgcttgctcccaaacatgacatcctaattcaacttctatatcatgggatcatgaggaagtgaaaagctccttacacatgatatnctatgnnnnnnnnnnnnnn

SEQ ID NO: 440500 - DNA, 431 bp, Homo sapiens
acttctctctgaagatgtgaaagagcatttacaaatccatgtcagaaaaatcttcataaaaaagaaaraaagaaaattgaaaaacactgaagtagagctaaggtttcagagttagggcagaaattatttttaaatctttccctgtggatgtgattgcacttttttcttcataattcattttccagtgttgtataactgtacttaataaccaagatcataacattcagtattggttattttgaacttcataaaattcaacaatgacattttgtaaaatgcatttattctaagatgctttagtaaatttctgatcatatcatgagtattttaaacctttgtctactttctcccttctaaacactatgacccaaataatttctttgaccataaaagaaaaattagctgataatgaaatagttggaattgttgtc

SEQ ID NO: 440501 - DNA, 577 bp, Homo sapiens
actgtacttaataaccaagatcataacattcagtattggttattttgaacttcataaaattcaacaatgacattttgtaaaatgcatttattctaagatgctttagtaaatttctgatcatatcatgagtattttaaacctttgtctactttctcccttctaaacactatgaccsaaataatttctttgaccataaaagaaaaattagctgataatgaaatagttggaattgttgtcattagagaaacagctcctgctcactctctccaaaaaccttcccagaattaaaaagcaacaatcaagaggcttccctgaaattagtaatggtcttttgattaatacaaatgttataaataagaaaaatgaaaacaaaaagcaagggaacaatgaatgatcaggaaagttattcacactaaaatctgaatatcaaaagctatttcctagccaggtaggtgtaatatgtaaaacgagactgaataaataacttttaaaaatgtgttccatttatgtaaggatcaaaagaatcccataagcctactgtaaaaaggaatgttcatatctagtattttaattccca

SEQ ID NO: 440502 - DNA, 577 bp, Homo sapiens
actgtacttaataaccaagatcataacattcagtattggttattttgaacttcataaaattcaacaatgacattttgtaaaatgcatttattctaagatgctttagtaaatttctgatcatatcatgagtattttaaacctttgtctactttctcccttctaaacactatgacccaaataatttctttgaccataaaagaaaaattagctgataatgaaatagttggaattgttgtcattagagaaacagctcctgctcactctctccaaaaaccttcccagaattaaaaagcaacaatcaagaggcttccctgaaattagtaatggtcttttgattaatacaaaygttataaataagaaaaatgaaaacaaaaagcaagggaacaatgaatgatcaggaaagttattcacactaaaatctgaatatcaaaagctatttcctagccaggtaggtgtaatatgtaaaacgagactgaataaataacttttaaaaatgtgttccatttatgtaaggatcaaaagaatcccataagcctactgtaaaaaggaatgttcatatctagtattttaattccca

SEQ ID NO: 440503 - DNA, 558 bp, Homo sapiens
ctatcttttctccagtgcatgttcttggcaactttgtcaaaaatgagttcagtcacttttcgttggatttgtttcagagtttcttaatctgttccattggcctatgtgtctgtttttatgccagtactatgctgttttggctacagtagctctgtaytataatttgaagtcaggtaatgtgattcccccaggtttgtgctttttgatcatgatagttttgactattctgagtcttttgaaatttcatataaatttcaaattttttctatttctatgaagaatgtcattggtattttcatagggattgcatttaatctggagattgctttgggttgtatggatattttaacaatattgattcttctaatccattaatgtggaagacctttccatttcttgtgtgtatgctcttcaatttctttcatcagtgttttatagtttttattgtagagatttttcacttctttgattaattcctaggtatttaattttatttgtggctattgtaaatgggatcactttgatttcttttttcagactgttcactgtcagcatatg

SEQ ID NO: 440504 - DNA, 564 bp, Homo sapiens
actgttggaaagatcaaccctagagaaagtcttgctttttttccttagttgctaaaaagcttctctagtagctaaaaactgacttactctaccaataatacctcataaagacaaatctgtacaaaagctttgtatgatcatgttcagatactgcaaactttcaggctaatgaaaaagtcaaatgtaagctctgtgaagctcaaaatcagtgacattttgaaacacaaatgttgacaattattcaaggatttgtaaatatgagacaaaagtttacatttggaattttctaattgactcaacattattttcctgataattgttttggttaaaaactgaggaaggatagagttgacaggcaaatctacttcaagaagaagaatcattctgaggtttaactrggggcttactgaaactgtttaaattatatagaagacaatatatttctcattccctctatttctctcagtattaatcaggagtcatggtgatttttcagttgttctgtacttgtattttgttaaaacaagcaatctgcgaagatgctaaaggaaatttaggactttt

SEQ ID NO: 440505 - DNA, 510 bp, Homo sapiens
aaaacagcttggtgcaaaatctgcttataaaataagtcatacttttttctctatagaatttgaacctttacacactgattcttattgtgaagattagcttttaagaattattgtatattttgatttgtagggaattctttaaataatgcagaaaataaatgccttctttgagttgtgtctttttaaaaatttattttgattttagaagcctcaaaacctatagtttaaatgatataattcaaaatacatttgtggtcaatttcatataatcaacatattttcctagttctaagtaaagtatattattggaggcataattgtaataatagcttactatatgtaacttccattatgctaagcagctaacctccacagcaatgctgggaggaattactatgaccccccgctctacaaataatgaagccaggagccsgaaggtgtgaaaccagccacattcacacagctgctaaggggcagaactgaaattggaacacaggaactgtagctatc

SEQ ID NO: 440506 - DNA, 566 bp, Homo sapiens
cataatataggccatagaaatacaaaaatgaatttgctaataggtgcaaaactagtcaatatccacaaagtggaaaktgattttaatctcaatgggtgaaatattttctctatggacaagaattatttgttttaccattagttttttatagcttacaaaattttaagactgcatccaagagaaagctcagacctttatagaattagatatccttacaaggatctgctagaaaattcttgcatttccattgacattaatctttttgaccagttcaaatgttttagaggttttcacaaggacctattcatctttaataccttttgagttagccaattaaaaactccatttatcccctttcctaatcatgtaattaggattctacctaaagtgggtgtagtatagcaaaaaagagcctttgaggtgggacaaaaatttgggttggagtcccagctctgtcattaaatggttatgtaaaattgggcaagtcttactttctttgagctgtattctttttaggctgtaaagtcaggatgataatatgtagtttaagaatgcaagattaaaaa

SEQ ID NO: 440507 - DNA, 566 bp, Homo sapiens
cataatataggccatagaaatacaaaaatgaatttgctaataggtgcaaaactagtcaatatccacaaagtggaaagtgattttaatctcartgggtgaaatattttctctatggacaagaattatttgttttaccattagttttttatagcttacaaaattttaagactgcatccaagagaaagctcagacctttatagaattagatatccttacaaggatctgctagaaaattcttgcatttccattgacattaatctttttgaccagttcaaatgttttagaggttttcacaaggacctattcatctttaataccttttgagttagccaattaaaaactccatttatcccctttcctaatcatgtaattaggattctacctaaagtgggtgtagtatagcaaaaaagagcctttgaggtgggacaaaaatttgggttggagtcccagctctgtcattaaatggttatgtaaaattgggcaagtcttactttctttgagctgtattctttttaggctgtaaagtcaggatgataatatgtagtttaagaatgcaagattaaaaa

SEQ ID NO: 440508 - DNA, 566 bp, Homo sapiens
cataatataggccatagaaatacaaaaatgaatttgctaataggtgcaaaactagtcaatatccacaaagtggaaagtgattttaatctcaatgggtgaaatattttctctatggacaagaattatttgttttaccattagttttttatagcttacaaaattttaagactgcatccaagagaaagctcagacctttatagaatyagatatccttacaaggatctgctagaaaattcttgcatttccattgacattaatctttttgaccagttcaaatgttttagaggttttcacaaggacctattcatctttaataccttttgagttagccaattaaaaactccatttatcccctttcctaatcatgtaattaggattctacctaaagtgggtgtagtatagcaaaaaagagcctttgaggtgggacaaaaatttgggttggagtcccagctctgtcattaaatggttatgtaaaattgggcaagtcttactttctttgagctgtattctttttaggctgtaaagtcaggatgataatatgtagtttaagaatgcaagattaaaaa

SEQ ID NO: 440509 - DNA, 566 bp, Homo sapiens
cataatataggccatagaaatacaaaaatgaatttgctaataggtgcaaaactagtcaatatccacaaagtggaaagtgattttaatctcaatgggtgaaatattttctctatggacaagaattatttgttttaccattagttttttatagcttacaaaattttaagactgcatccaagagaaagctcagacctttatagaattagatatccttacaagsatctgctagaaaattcttgcatttccattgacattaatctttttgaccagttcaaatgttttagaggttttcacaaggacctattcatctttaataccttttgagttagccaattaaaaactccatttatcccctttcctaatcatgtaattaggattctacctaaagtgggtgtagtatagcaaaaaagagcctttgaggtgggacaaaaatttgggttggagtcccagctctgtcattaaatggttatgtaaaattgggcaagtcttactttctttgagctgtattctttttaggctgtaaagtcaggatgataatatgtagtttaagaatgcaagattaaaaa

SEQ ID NO: 440510 - DNA, 584 bp, Homo sapiens
atattgtggttccaggtgtcattgtcttttcattctttggcatccagaaatgtagcatttgcatgacaaatgattgcattggttttggcagtaaagggccattctgctgtgggaagatatgcagaaaggaacctgcagtgaggctagtttaaggtaactcttatttggttggctagcttcttttggacttcgctgttctatctgtgaggtaaagtccctggatgtgtcagttcacattgcagctgtggcaataaatggtaagcaaagtagttgctgctactctttgagttaatctgcttttttgttagtcatctagcagatgcttctgctatataaatggaacagactctctatttgtgaaaaatgtaaagtggataagtgatgacacatcttaacattcctccagttcatttcaagtwtttatgaaaattgaaatataactccccataaaactgattaagttttgcaaatatgtaatccacccctaatacttgttttttttttcccaaaagtctgaattgtaagttgaggaataaaatatgtagttaagagaaatggtgtttataaatcaggtagacaagtag

SEQ ID NO: 440511 - DNA, 584 bp, Homo sapiens
atattgtggttccaggtgtcattgtcttttcattctttggcatccagaaatgtagcatttgcatgacaaatgattgcattggttttggcagtaaagggccattctgctgtgggaagatatgcagaaaggaacctgcagtgaggctagtttaaggtaactcttatttggttggctagcttcttttggacttcgctgttctatctgtgaggtaaagtccctggatgtgtcagttcacattgcagctgtggcaataaatggtaagcaaagtagttgctgctactctttgagttaatctgcttttttgttagtcatctagcagatgcttctgctatataaatggaacagactctctatttgtgaaaaatgtaaagtggataagtgatgacacatcttaacattcctccagttcatttcaagtatttatgaaaattgaaatataactccccataaaactgattaagttttgcaaatatgtaatccacccctaatacttgttttttttttcccaaaagtctgaattgtaagttgaggaataaaatatgtagttaagagaaatggtrtttataaatcaggtagacaagtag

SEQ ID NO: 440512 - DNA, 460 bp, Homo sapiens
tacagtttggtttcatacatttgagggagacataagacaccaatcaatacatgtaagatgtactttggtttgatatgggaatgcaggacaacttgaagccaggagttggtgggggtaggtggagtcaacgatttttctgattggcarttggttgaaagagtttatttaaaggaatggagtcaatagaagtgagtgtctgggttatgataagaggttgtagagactaaggttctcattacgcagatgaagccctcatgtagcaggcttcagagagaatagattgtaagtgtttcttatcagacttagaatctgttctatcaggtttaagatctctgttttaacattaatactgatcagctgtgtctgaatttcaatgggagaaaggtataatgagtcctgtctgaccacctattcccatcatggcctgcactagtgtttcaagtttactttagaatgctct

SEQ ID NO: 440513 - DNA, 460 bp, Homo sapiens
tacagtttggtttcatacatttgagggagacataagacaccaatcaatacatgtaagatgtactttggtttgatatgggaatgcaggacaacttgaagccaggagttggtgggggtaggtggagtcaacgatttttctgattggcaattggttgaaagagtttatttaaaggaatggagtcaatagaagtgagtgtctgggttatgataagaggttgtagagactaaggttctcattacgcagatgaagccctcatgtagcaggcttcagagagaatrgattgtaagtgtttcttatcagacttagaatctgttctatcaggtttaagatctctgttttaacattaatactgatcagctgtgtctgaatttcaatgggagaaaggtataatgagtcctgtctgaccacctattcccatcatggcctgcactagtgtttcaagtttactttagaatgctct

SEQ ID NO: 440514 - DNA, 602 bp, Homo sapiens
ctcaagctgaaatcctggttagatgatactgtttaatactcatacagttgttgacaaaaagagtcaaactctgtaaaacatttgaggagatatattctgagccaaatatgtgtaaccaatggcctattacacagccccaggagatcataagaacatgtgcccaaggtggccagtctacagcttggttttacacattttagggagacgtaagacttcaatcaatacatgtaagatgtatattggttccatctggaaaggcaggacagctcgaagcagggacttccaggtcataggcatttcaaagattttctaattggcarttggttaaaagagttatcatctaaatacttattatcagacaaaaataatctgttatatcagcctgaaggtctttgtgttgatgttaatgctggtcagttgtgcccacatttcaaaaggatagtgggtataatgaggcatgtctgactcccccttcccattatggcttgaactagttttccaggttaacaactttggaatgtctttggaccacaggaggggtccattcacatgggtgaggggcttagaattttatttttggtttacgtactcatgaaataaat

SEQ ID NO: 440515 - DNA, 610 bp, Homo sapiens
gcccacatttcaaaaggatagtgggtataatgaggcatgtctgactcccccttcccattatggcttgaactagttttccaggttaacaactttggaatgtctttggaccacaggaggggtccattcacatgggtgaggggcttagaattttatttttggtttacgtactcatgaaataaatcttactaaattctcacgaagtgcaagcatgatgttagatgctggaagtaaatttcctgtcytctaggagtgtacaaacttgttgaggagagagaagttttaaacgtatgatatagctgccaactctaatttttttattatctaaagagagattctaaaatgctcacagagcaggttaagtgcctttgagaatttatttatgtacgaacttaggtaaagtctcacagatttatatttccaacttcttttttaaagtttcaagtattcaactgtatactcaatacttccactttcatgtttcaagggcacatactatttaacatgtttaaaaactaactcattatcctctaacaaaaaaatagctcctgtttcaatgttttctatcttattaactgatcctactataaatcctgttacaagaaaacacaag

SEQ ID NO: 440516 - DNA, 645 bp, Homo sapiens
tccctcactgtactttggatatataggggatcagatagcttttctttttaattagaagttctttgattcaagaaaaaccctaacagcatctaatttggattaaaagtcttggtttttaagccttttcaaagttttagatgaggcattaagtggcttggggatggaataagtatatattttgcctgaagtatggaagttaatgttatgttagattgtattattagtttaaaattatacrtttcctcttcatacttgtcatgcttcctggtaccactgaatttgggattggccatgtggcatacatttgccaattcagtatgaacacttgggacttttgacaaatctgatccgaagatttaattgtaactgaaatggctttactggggtcctcttgctctagcactccctcatcagcacttttctgagatagaagcacctgcttcagcctagattctggattgggaatgtatataaagccaagtctcggtcaaccaaagcaaagcccaacacaaccacaattcacctgaaatccttatgtaacatatatgacaaataaatcatttttaaatattgagatttataaaaattgtttaaatgtatagtccaggaaattcagattgcagagatttttaattttaatgagat

SEQ ID NO: 440517 - DNA, 560 bp, Homo sapiens
tttgagggacaggtcattgactttttcaggtcaratggactgagattttaaattagccattcttggggttatttttgagagctattctgggacagaggcaatttactgtaattctggccacctcctggttttgcaatgaagtatttttttttcacctgtttgttggacttttcatcacactagggtttgggcacagtcaaacttataggcacatttgaaaaataagtaaagtttttgtaagttgattctactcttcctttaatgtcattgttcttccattccaccaggctccccttctctcctttctcctactgtatgtccaatactcgagatatttgtgatttcttcattcagaatgcttggactctctatcattttcagtacatatatttctgtcttcagatttttttccttctcatccatctctaagtccttcttcttagaactcaatattttcctttcttatatagaattataatgtaattagtatgtctttggaatacatagcagagtaatactttggagccagatatctgggatttcatttctgtgttagtttg

SEQ ID NO: 440518 - DNA, 560 bp, Homo sapiens
tttgagggacaggtcattgactttttcaggtcaaatggactgagattttaaattagccattcttggggttatttttgagagctattctgggacagaggcaatttactgtaattctggccacctcctggttttgcaatgaagtatttttttttcacctgtttgttggacttttcatcacrctagggtttgggcacagtcaaacttataggcacatttgaaaaataagtaaagtttttgtaagttgattctactcttcctttaatgtcattgttcttccattccaccaggctccccttctctcctttctcctactgtatgtccaatactcgagatatttgtgatttcttcattcagaatgcttggactctctatcattttcagtacatatatttctgtcttcagatttttttccttctcatccatctctaagtccttcttcttagaactcaatattttcctttcttatatagaattataatgtaattagtatgtctttggaatacatagcagagtaatactttggagccagatatctgggatttcatttctgtgttagtttg

SEQ ID NO: 440519 - DNA, 586 bp, Homo sapiens
atgaaaatcactttatttttttacccagagttatcagtccaaataaagttatatatgtaagagtcaaaagaataaatatcagctttaatctttaaaaacataatatctgtaatatctgtattaatgtgtaatgttctggtttccacatagttttcactatatatgctctttgttttcagaacgttagaactttttaacttgtactttcattctaagtcagtcaaggaattaattatgttactggagaaagagttgtagatgttagaaaaaaattagttaaacctggagttaccaggcaaccttaagtaaaatgcttaataactttgacttcaataacctcatcttaaaatgggtcaaatagtttctcctctgtctcagcatggatgattttagatttcaaagagaaaagtcgtatcttgaagatagtctgaaaatggtttacatgaatgtgcattatttgacccttactctataaattatatatatataatatatatgaatatatcatttatctactaacatgattggtgttaccatatcttagatccytaaagagtcagcttaacttggttctaaagtgaatatt

SEQ ID NO: 440520 - DNA, 586 bp, Homo sapiens
atgaaaatcactttatttttttacccagagttatcagtccaaataaagttatatatgtaagagtcaaaagaataaatatcagctttaatctttaaaaacataatatctgtaatatctgtattaatgtgtaatgttctggtttccacatagttttcactatatatgctctttgttttcagaacgttagaactttttaacttgtactttcattctaagtcagtcaaggaattaattatgttactggagaaagagttgtagatgttagaaaaaaattagttaaacctggagttaccaggcaaccttaagtaaaatgcttaataactttgacttcaataacctcatcttaaaatgggtcaaatagtttctcctctgtctcagcatggatgattttagatttcaaagagaaaagtcgtatcttgaagatagtctgaaaatggtttacatgaatgtgcattatttgacccttactctataaattatatatatataatatatatgaatatatcatttatctactaacatgattggtgttaccatatcttagatccttraagagtcagcttaacttggttctaaagtgaatatt

SEQ ID NO: 440521 - DNA, 563 bp, Homo sapiens
aatgataatcgcatttgccrtaattctgatctgcggtttcacatttttttcaaatagatacaaattttttaaataaagtgcacataaaaaatcaaatattggtgtgccctaaatatttttgtaactcagataagactaggtatctatggtgagtctctgattccacctagagtccagtctcagctcatcatcacaacacacacacaaacaaatatgtgactatatgcgttgtttgcagatagcacttttttaagaggcacagatcatttattgagcccttatgaataccaggcactgttgtgtgaacatttacacatattctttaatttttacaacaaacttatgagtggattactattattttatactatactctataatgctattttcttcctttataaggctgaataatattcttttgtacgtatgtaccacattttgtttatctgttcatcaatggacatttgggttgtttacatctattagtctttcatcactgaatgtcatgtaagctgtcatcttttcatgcatggcatttattgtctttaggtagttttcttcta

SEQ ID NO: 440522 - DNA, 563 bp, Homo sapiens
aatgataatcgcatttgccgtaattctgatctgcggtttcacatttttttcaaatagatacaaattttttaaataaagtgcacataaaaaatcaaatattggtgtgccctaaatatttttgtaactcagataagactaggtatctatggtgagtctctgattccacctagagtccagtctcagctcatcatcacaacacacacacaaacaaatatgtgactatatgcgttgtttgcagatagcacttttttaagargcacagatcatttattgagcccttatgaataccaggcactgttgtgtgaacatttacacatattctttaatttttacaacaaacttatgagtggattactattattttatactatactctataatgctattttcttcctttataaggctgaataatattcttttgtacgtatgtaccacattttgtttatctgttcatcaatggacatttgggttgtttacatctattagtctttcatcactgaatgtcatgtaagctgtcatcttttcatgcatggcatttattgtctttaggtagttttcttcta

SEQ ID NO: 440523 - DNA, 563 bp, Homo sapiens
aatgataatcgcatttgccgtaattctgatctgcggtttcacatttttttcaaatagatacaaattttttaaataaagtgcacataaaaaatcaaatattggtgtgccctaaatatttttgtaactcagataagactaggtatctatggtgagtctctgattccacctagagtccagtctcagctcatcatcacaacacacacacaaacaaatatgtgactatatgcgttgtttgcagatagcacttttttaagaggcacagatcatttattgagcccttatgaataccaggcactgttgtgtgaacatttacacatattctttaatttttacaacaaacttatgagtggattactattattttatactatactctataatgctattttcttcctttataaggctgaataatattcttttgtacgtatgyaccacattttgtttatctgttcatcaatggacatttgggttgtttacatctattagtctttcatcactgaatgtcatgtaagctgtcatcttttcatgcatggcatttattgtctttaggtagttttcttcta

SEQ ID NO: 440524 - DNA, 609 bp, Homo sapiens
gctttcattttcttttgtctcaagatattttctaatttcccttgtgatataatatttgacttattagttgtttaggagtgcgttgtttaatttccacatattcatagatacttgttttacttttgatacagatttccagtttagttycattgcgaccagaaaatatattttgtataattcaaatctttcaaaaaattggttaggacttgttttttggcctaaaatatggtctactctggagaatgttccaagtgcatgtgagaagaatgtgcattattttgtttttgattggagtgttctgtacatgattattaggtaaaattggtatatagtgttgttcaggttctctattttcttactgatcttttgttgttctatccattattgaaagtggagaggtgaagcctcttactattattgtgttgctgaatgtctctttttattctgtcaaagcttgctttatatatttaggggctctgatgcttagtgaataaatttttataatgttatatcttcttaatgagttcacccttttatcattatattagattggcacaaaagtaattgcggtttttgccattacttttaatgacaaaaactgcaattact

SEQ ID NO: 440525 - DNA, 609 bp, Homo sapiens
gctttcattttcttttgtctcaagatattttctaatttcccttgtgatataatatttgacttattagttgtttaggagtgcgttgtttaatttccacatattcatagatacttgttttacttttgatacagatttccagtttagttccattgcgaccagaaaatatattttgtataattcaaatctttcaaaaaattggttaggacttgttttttggcctaaaatatggtctactctggagaatgttccaagtgcatgtgagaagaatgtgcattattttgtttttgattggagtgttctgtacatgattattaggtaaaattggtatatartgttgttcaggttctctattttcttactgatcttttgttgttctatccattattgaaagtggagaggtgaagcctcttactattattgtgttgctgaatgtctctttttattctgtcaaagcttgctttatatatttaggggctctgatgcttagtgaataaatttttataatgttatatcttcttaatgagttcacccttttatcattatattagattggcacaaaagtaattgcggtttttgccattacttttaatgacaaaaactgcaattact

SEQ ID NO: 440526 - DNA, 543 bp, Homo sapiens
aaagtggagaggtgaagcctcttactattattgtgttgctgaatgtctctttttattctgtcaaagcttgctttatatatttaggggctctgatgcttagtgaataaatttttataatgttatatcttcttaatgagttcacccttttatcattatattagattggcacaaaagtaattgcggtttttgccattacttttaatgacaaaaactgcaattacttttgcaacaatcaaatataatgtmttttttgttgctcgtaacagtttttaactttcagtctattttatgtgacattggtataagtattcctaatcttttttggttaccatttgcgtgggatatcttttttcatcctttttctttcagcttatgtgtgtgtcctcagttaaagtgagtcttctgcagatagcacatagttgtattcccttttttacccattctgccaatctatagcttttgattgaggaatttaatcattttcacttaaagaaattattaatagagaaggatttgctaaggacattttgttatttttttgta

SEQ ID NO: 440527 - DNA, 636 bp, Homo sapiens
ttttgtataattcaaatctttcaaaaaattggttaggacttgttttttggcctaaaatatggtctactctggagaatgttccaagtgcatgtgagaagaatgtgcattattttgtttttgattggagtgttctgtacatgattattaggtaaaattggtatatagtgttgttcaggttctctattttcttactgatcttttgttgttctatccattattgaaagtggagaggtgaagcctcttactattattgtgttgctgaatgtctctttttattctgtcaaagcttgctttatatatttaggggctctgatgcttagtgaataaatttttataatgttatatcttcttaatgagttcacccttttatcattatattagattggcacaaaagtaattgcggtttttgccattacttttaatgacaaaaactgcaattacttttgcaacaatcaaatataatgtcttttttgttgctygtaacagtttttaactttcagtctattttatgtgacattggtataagtattcctaatcttttttggttaccatttgcgtgggatatcttttttcatcctttttctttcagcttatgtgtgtgtcctcagttaaagtgagtcttctgcagatagcaca

SEQ ID NO: 440528 - DNA, 514 bp, Homo sapiens
accatataatatgtttatatcagctttactaaaaaatgccaaactagttttccaaaatacttttaacactatatattcctatcatggtataagaattcccatttgccatgtccttgaccacagtaccatyatacttcttaaaaacttttgttgatctagtgaatgtgtaatcatatcttacgtagtttcagtgtggactttcctgattattaacatgttttcctaaatggtcactgagtatgaataacatttgctatgtttgtagaccaattgagttttgtctattcaagtacttgtaaaaatatcctataatttgttaatagattttgtctttctcattaatttgtatgaatttataatatattgtggaacttcgtaggttacttgtgaatattttcccatttagtgatttcttttaaattttattgcatactttaataaacacacatttttaaaaacatagctattatttctttgtgattagtgcttttgactcttgtataagaaaaccttc

SEQ ID NO: 440529 - DNA, 514 bp, Homo sapiens
accatataatatgtttatatcagctttactaaaaaatgccaaactagttttccaaaatacttttaacactatatattcctatcatggtataagaattcccatttgccatgtccttgaccacagtaccatcatacttcttaaaaacttttgttgatctagtgaatgtgtaatcatatcttacgtagtttcartgtggactttcctgattattaacatgttttcctaaatggtcactgagtatgaataacatttgctatgtttgtagaccaattgagttttgtctattcaagtacttgtaaaaatatcctataatttgttaatagattttgtctttctcattaatttgtatgaatttataatatattgtggaacttcgtaggttacttgtgaatattttcccatttagtgatttcttttaaattttattgcatactttaataaacacacatttttaaaaacatagctattatttctttgtgattagtgcttttgactcttgtataagaaaaccttc

SEQ ID NO: 440530 - DNA, 583 bp, Homo sapiens
ttagggcatacattttatatacgtcaagctaaaggactcctcagctgttgtargtcaatgtccataaagatctcacacttttatacaatgggttttctttacataaagtgtggtggctgtaagcatggactttgaagtcaaatagtccaggttagatttatatgtctaatgcttattagatctgtgacttggaacaatttaaataacttctgagtgtcagttctttcatctacagcatgcatgtaaaaatgacaccaaacacatataattgtgggggtttaaataagacagtatgtatatttaccacagtgacagggacatggtaagagctcactaatggtatatattattgatatgattattattatcatcctactcaaaaatcttaaagcaattgttatcccctacatgtaagggtgtcaactctcaaaaaatgttaacaatttatctacaatgtagaggtgatattaattgataaatataaaattcaaacataagctttctgattttatttatagcacactttacaatgtttcctgcagattctagcttgtgatggtcccaggaaagggatgaaagatcc

SEQ ID NO: 440531 - DNA, 583 bp, Homo sapiens
ttagggcatacattttatatacgtcaagctaaaggactcctcagctgttgtaggtcaatgtccataaagatctcacacttttatacaatgggttttctttacataaagtgtggtggctgtaagcatggactttgaagtcaaatagtccaggttagatttatatgtctaatgcttattagatctgtgacttggaacaatttaaataacttctgagtgtcagttctttcatctacagcatgcatgtaaaaatgacaccaaacacatataattgtgggggtttaaataagacagtatgtatatttaccacagtgacagggacatggtaagagctcactaatggtatatattattgatatgattattattatcatcctactcaaaaatcttaaagcaattgttatcccctacatgtaarggtgtcaactctcaaaaaatgttaacaatttatctacaatgtagaggtgatattaattgataaatataaaattcaaacataagctttctgattttatttatagcacactttacaatgtttcctgcagattctagcttgtgatggtcccaggaaagggatgaaagatcc

SEQ ID NO: 440532 - DNA, 552 bp, Homo sapiens
agagtttttgtaccaggactggttgcagacaataatatattctgaaggaagggaatctggggtttgttatctagctccattagctttaaagtcagtaaggataagaaaagaacaagagaacaggtgctggtggttcatggaagacagaataagttcataacttatttggaataaaacatctttcagagtataagggctactgtttcctggagtgaagcctgcctaatacagcttcytacaggtgaagactgtgtcattgccatcttatacttacagctcctagcacaaagcctgacacataatcacattgtatgtaagtatatgaatccgaagtgagtaataccttctgtctgggtcacatagtatgtaagtacattgacctgaaattagtaatacattatgtctgggtaacttaagcatcaccatgaatgaatttatatttaacctggatattgaagcacttcagttaatatttcagagaaataaagacagcatggtcagtgaaacaaaggctttaaaagacaagacatgctttggaaatagtaaatactt

SEQ ID NO: 440533 - DNA, 552 bp, Homo sapiens
agagtttttgtaccaggactggttgcagacaataatatattctgaaggaagggaatctggggtttgttatctagctccattagctttaaagtcagtaaggataagaaaagaacaagagaacaggtgctggtggttcatggaagacagaataagttcataacttatttggaataaaacatctttcagagtataagggctactgtttcctggagtgaagcctgcctaatacagcttcctacaggtgaagactgtgtcattgccatcttatacttacagctcctagcacaaagcytgacacataatcacattgtatgtaagtatatgaatccgaagtgagtaataccttctgtctgggtcacatagtatgtaagtacattgacctgaaattagtaatacattatgtctgggtaacttaagcatcaccatgaatgaatttatatttaacctggatattgaagcacttcagttaatatttcagagaaataaagacagcatggtcagtgaaacaaaggctttaaaagacaagacatgctttggaaatagtaaatactt

SEQ ID NO: 440534 - DNA, 635 bp, Homo sapiens
tcttttctaacaatattttaaaatttcatggtttttattaaaattaaaatctcattctcccaaattccattcaaaactgtttctctctctcctgtcttcacaaagttgtaaaataattgtctttaccagggattggcaaaccttctcataaagagccagcatgtcaatatattaggctttgtgaaacatgtgattgttgctgcagccacttctctctactgttgtaaggtgaaagtaagacarttgataatcaaatgagtgcagctggcttttgataaaactttatttatggatactaatgctagaacttaataaaattttcctgttttacaaggcgttattttttctttgatttgtttcaatccttaaaaatataaataccatttttactttccaagctgtgtaagaacagattccaggccagatttagcttgtacactatagttagtcaaaacctggcctatatacactctttctaactctcacctcctctaccagcgcaatctgccaacaactctcttccccctggggacactgctctaacaacctactttttgcaaattttatgatgaataatttctactcctcattttactagatcttggaacaagatttgacactacttaccacagtct

SEQ ID NO: 440535 - DNA, 487 bp, Homo sapiens
  misc_feature (1)...(487): n = A,T,C or G
ttctgaaagtgtctttgctgagatggacaaaggactgttttttcttaaagaactaactgagctggggtctnnnnnnnnnnnnnnnnnnnnnnnnnnnnnnnnnnnnnnnnnnnnnnnnnnnnnnnnnnnnnnnnnnnnnnnnnnnnnnnnnnnnnnnnnnnnnnnnnnnntgggttcaaggatcgtctagcatgagcatccccagtagctaggacgtaaaggtgtgagccaccacgcctggctgagcttggttctcttgaagcagtcacrctgtgaagattttgaaaccctttacatatgcaattattaaacacaatcaacacaggacaagctctggcttaccctccttgtcactaagccacaagaccccatggctggcaaaggaactaagggggtgtcttgtttcccactggcccgtcctaagtctggggtccttggggtacctgctgctgtgcctgctgctcctcaatgaaatgagaattggctc

SEQ ID NO: 440536 - DNA, 374 bp, Homo sapiens
atcatctgtcacttcccagagagggcaaayattcaactttgccagctgataagaggccccactgcatgttgttctggtgaatctcgggtgtttcgagagtggggtatgtacgtaagacaggactcgaagggcagggagaagatgatgactggacactagataaccctggaaaactagaagaaattaataacatgttgcacacctcaccagaactggaaggagtctgactgtgttcttatggggtgcttggactggcagggggagttcagccccagctaagaaaagcctaatattaagaggtacttgcattaaaagggtaatcaattacatgctgttcctattttgtcttttcctccatcaaacatatagaagcc

SEQ ID NO: 440537 - DNA, 374 bp, Homo sapiens
atcatctgtcacttcccagagagggcaaatattcaactttgccagctgataagaggccccactgcatgttgttctggtgaatctcgggtgtttcgagagtggggtrtgtacgtaagacaggactcgaagggcagggagaagatgatgactggacactagataaccctggaaaactagaagaaattaataacatgttgcacacctcaccagaactggaaggagtctgactgtgttcttatggggtgcttggactggcagggggagttcagccccagctaagaaaagcctaatattaagaggtacttgcattaaaagggtaatcaattacatgctgttcctattttgtcttttcctccatcaaacatatagaagcc

SEQ ID NO: 440538 - DNA, 374 bp, Homo sapiens
atcatctgtcacttcccagagagggcaaatattcaactttgccagctgataagaggccccactgcatgttgttctggtgaatctcgggtgtttcgagagtggggtatgtacgtaagacaggactcraagggcagggagaagatgatgactggacactagataaccctggaaaactagaagaaattaataacatgttgcacacctcaccagaactggaaggagtctgactgtgttcttatggggtgcttggactggcagggggagttcagccccagctaagaaaagcctaatattaagaggtacttgcattaaaagggtaatcaattacatgctgttcctattttgtcttttcctccatcaaacatatagaagcc

SEQ ID NO: 440539 - DNA, 374 bp, Homo sapiens
atcatctgtcacttcccagagagggcaaatattcaactttgccagctgataagaggccccactgcatgttgttctggtgaatctcgggtgtttcgagagtggggtatgtacgtaagacaggactcgaagggcagggagaagatgatgactggacactagataaccctggaaaactagaagaaattaataacatgttgcacacctcaccagaactggaaggagtctgactgtgttcttatggggtgcttggactggcagggggagttcagccccagctaagaaaagcctaatattaagaggtacttgcattaaaagggtaatcaattacrtgctgttcctattttgtcttttcctccatcaaacatatagaagcc

SEQ ID NO: 440540 - DNA, 586 bp, Homo sapiens
aaaaaacaagttaagttcttccaagatacaaatgaggcagagacattgggtaaatactcctattctaaaatgaagaaatcagccaaaagaaaggggccacaggatccctgaaagtctgaaaccgagaagggcagttattgaattgtaaggctccaaaataattatttttgactctgtgtcccatttccagggyacactaatgccttgggaaggttctaccttgtgactttgcatggttcagcccccacagctgctctcatgggctggcattctgtgcctctggcttttcaaggtgccaggtgcaggctgtagctagatctaccattctggggcctggaggacagtgatactcccctcacagatctactaggccatgacccagtggggagcctgcctggggactgtcaccccacatttcttttctccattgttttagtagaggatctccatgagggctccacccctgcagcatgcttctgcctgcacaccctggctttttcatacatcctttcaaataaaggtggaggctcccaagtctcaactacttgcatttggtaaacccacaggcctaacaccacatggaagc

SEQ ID NO: 440541 - DNA, 580 bp, Homo sapiens
gtgatggggggctgccttttagattttttaaatgccttcaattcctctttcccattgccttggctatcaacacttgcttttttttaggttatacaaatatctctaacaagtagttgacccatatcctgcttgagttcctctcttataaaagctttttatatttcagccacatgactaggctgcaaagttttcaagcttttacactatgcttcttttgtaagtataagttactacttattttatttttattttttttttgctagaacatgtgagcataggttgttagaagcagccaggccacatcacaactgctttgctgcttagacatttttccaacagaaaccctaaatcatcaatttcaaattcaaacttttatatatccgtagggcatgacagaaattcagccaataactttgctaagacaacatgcatgacctttgtttcagtcccaataagtttctagttttcatctgagatctcstcagcccaggcttccctgtacagatcactatcagcattttggttacaggcattcaaccagtctctaagaaaatctcaactttccctcatttttctgtct

SEQ ID NO: 440542 - DNA, 507 bp, Homo sapiens
atgacctttgtttcagtcccaataagtttctagttttcatctgagatctcgtcagcccrggcttccctgtacagatcactatcagcattttggttacaggcattcaaccagtctctaagaaaatctcaactttccctcatttttctgtcttctgaatcctacagactcttccaacttctgcctgtttatccaattacaaagctgattccacattttggggtattcttataaccattttccattccttggtgccaattttctgtattaagctatttttgcatcactatgagagtgggactggataatttattttttacaaagtaggtttaagtggcttatgattctacaggctgtagagaagacatagcactggaatatgcttctggggaggtctctggaagtttacagtcatggcagaagttgaagcagaatcttgcacatcacagggcaaaaagcaggagcaaaaaacagaggggcgagttgttacacagttttaaataaccagat

SEQ ID NO: 440543 - DNA, 540 bp, Homo sapiens
attccacattttggggtattcttataaccattttccattccttggtgccaattttctgtattaagctatttttgcatcactatgagagtgggactgkataatttattttttacaaagtaggtttaagtggcttatgattctacaggctgtagagaagacatagcactggaatatgcttctggggaggtctctggaagtttacagtcatggcagaagttgaagcagaatcttgcacatcacagggcaaaaagcaggagcaaaaaacagaggggcgagttgttacacagttttaaataaccagatcttatggaactcactcactatcatgagaatagtaacaaatgggatggtgctaagccatttatgagtaatccaccccaatggttaaatcacctttcaccaggcccatttccaacattgagaattacatttaaatatgaaatttgggaggggacacacattcaaaccctatcagaggagtctttatgctttttccaatataagattatataattggcaaaaaaaaaaaggtaatttgac

SEQ ID NO: 440544 - DNA, 540 bp, Homo sapiens
attccacattttggggtattcttataaccattttccattccttggtgccaattttctgtattaagctatttttgcatcactatgagagtgggactggataatttattttttacaaagtaggtttaagtggcttatgattctacaggctgtagagaagacatagcactggaatatgcttctggggaggtctctggaagtttacagtcatggcagaagttgaagcagaatcttgcacatcacagggcaaaaagmaggagcaaaaaacagaggggcgagttgttacacagttttaaataaccagatcttatggaactcactcactatcatgagaatagtaacaaatgggatggtgctaagccatttatgagtaatccaccccaatggttaaatcacctttcaccaggcccatttccaacattgagaattacatttaaatatgaaatttgggaggggacacacattcaaaccctatcagaggagtctttatgctttttccaatataagattatataattggcaaaaaaaaaaaggtaatttgac

SEQ ID NO: 440545 - DNA, 540 bp, Homo sapiens
attccacattttggggtattcttataaccattttccattccttggtgccaattttctgtattaagctatttttgcatcactatgagagtgggactggataatttattttttacaaagtaggtttaagtggcttatgattctacaggctgtagagaagacatagcactggaatatgcttctggggaggtctctggaagtttacagtcatggcagaagttgaagcagaatcttgcacatcacagggcaaaaagcaggagcaaaaaacagaggggcgagttgttacacagttttaaataaccagatcttatggaactcactcactatcakgagaatagtaacaaatgggatggtgctaagccatttatgagtaatccaccccaatggttaaatcacctttcaccaggcccatttccaacattgagaattacatttaaatatgaaatttgggaggggacacacattcaaaccctatcagaggagtctttatgctttttccaatataagattatataattggcaaaaaaaaaaaggtaatttgac

SEQ ID NO: 440546 - DNA, 540 bp, Homo sapiens
attccacattttggggtattcttataaccattttccattccttggtgccaattttctgtattaagctatttttgcatcactatgagagtgggactggataatttattttttacaaagtaggtttaagtggcttatgattctacaggctgtagagaagacatagcactggaatatgcttctggggaggtctctggaagtttacagtcatggcagaagttgaagcagaatcttgcacatcacagggcaaaaagcaggagcaaaaaacagaggggcgagttgttacacagttttaaataaccagatcttatggaactcactcactatcatgagaatagtaacaaatgggatggtgctaagccatttatgagtaatccaccccaatggttaaatcacctttcaccaggcccatttccaacattgagaattacatttaaatatgaratttgggaggggacacacattcaaaccctatcagaggagtctttatgctttttccaatataagattatataattggcaaaaaaaaaaaggtaatttgac

SEQ ID NO: 440547 - DNA, 520 bp, Homo sapiens
tggttttttttaatattaaagactattaaattttatcaaattatttttagcaaaattgaaatgattatatggattttgtccttgttttgttttgtttttttgagatgaagtctccctctgtcacccaggctggagggcaatggcatgatctcagctcaatgcaaactctgcctcccaggttcaagtgattcttcwtcttcagcctcctgagtagctgggatcacaggtgcccaccaccacgcctggctaatttttgtaattttagtagagacggggcttcgccatgttggccagactggttttaaactcctgacctcaggtgatttgcccacctcggcttcctaaattgctgggatttcaggtgtgagccactgtgcctggccccttcattctctttatgtgatctatcacatcgattgatttgcatgttgacccatccttgcatccctgggataaatcccacttggtcattattaattacatatttatgtattgcttaattcagtttgttaggtgtttt

SEQ ID NO: 440548 - DNA, 534 bp, Homo sapiens
aggggttctttagtcagcaggtgatgaattctgccagatctttactgacatggcagcactgagtttaatgcaaagtcctccagtcactgtgctctccctctcccaaattcacaggtttctctgtgttgtgtggctgctgctaggtgggagtgggggagtggtgttgtgagcactcccttwgcttctctggctgctgtctcagtagactccattctccccaccctccacattccactggctctgagcccagctcagaatatgacttgcctaataattgaagtccttgtggcttagacttccccttaagttctcttagagtccaatagcacgtcaactcatgatggcaagacttgcaaaaactgaagctcccaatactgggatgggaggttttcctctttgtaaggccaatacaagtgctccccccattgggagatgtcagctgagtacagtctggttctgcttttcactgtgacagggtagtactgagtttattgcaaagcctcacaaactatgttctccctctcccaaacatac

SEQ ID NO: 440549 - DNA, 534 bp, Homo sapiens
aggggttctttagtcagcaggtgatgaattctgccagatctttactgacatggcagcactgagtttaatgcaaagtcctccagtcactgtgctctccctctcccaaattcacaggtttctctgtgttgtgtggctgctgctaggtgggagtgggggagtggtgttgtgagcactcccttagcttctctggctgctgtctcagtagactccattctccccaccctccacattccactggctctgagcccagctcrgaatatgacttgcctaataattgaagtccttgtggcttagacttccccttaagttctcttagagtccaatagcacgtcaactcatgatggcaagacttgcaaaaactgaagctcccaatactgggatgggaggttttcctctttgtaaggccaatacaagtgctccccccattgggagatgtcagctgagtacagtctggttctgcttttcactgtgacagggtagtactgagtttattgcaaagcctcacaaactatgttctccctctcccaaacatac

SEQ ID NO: 440550 - DNA, 534 bp, Homo sapiens
aggggttctttagtcagcaggtgatgaattctgccagatctttactgacatggcagcactgagtttaatgcaaagtcctccagtcactgtgctctccctctcccaaattcacaggtttctctgtgttgtgtggctgctgctaggtgggagtgggggagtggtgttgtgagcactcccttagcttctctggctgctgtctcagtagactccattctccccaccctccacattccactggctctgagcccagctcagaatatgacttgcctaataattgaagtccttgtggcttagamttccccttaagttctcttagagtccaatagcacgtcaactcatgatggcaagacttgcaaaaactgaagctcccaatactgggatgggaggttttcctctttgtaaggccaatacaagtgctccccccattgggagatgtcagctgagtacagtctggttctgcttttcactgtgacagggtagtactgagtttattgcaaagcctcacaaactatgttctccctctcccaaacatac

SEQ ID NO: 440551 - DNA, 534 bp, Homo sapiens
aggggttctttagtcagcaggtgatgaattctgccagatctttactgacatggcagcactgagtttaatgcaaagtcctccagtcactgtgctctccctctcccaaattcacaggtttctctgtgttgtgtggctgctgctaggtgggagtgggggagtggtgttgtgagcactcccttagcttctctggctgctgtctcagtagactccattctccccaccctccacattccactggctctgagcccagctcagaatatgacttgcctaataattgaagtccttgtggcttagacttccccttaagttctcttagagtccaatagcacgtcaactcatgatggcaagacttgcaaaaactgaagctcccaatactgggatgggaggttttcctctttgtaaggccaatacaagtgctycccccattgggagatgtcagctgagtacagtctggttctgcttttcactgtgacagggtagtactgagtttattgcaaagcctcacaaactatgttctccctctcccaaacatac

SEQ ID NO: 440552 - DNA, 183 bp, Homo sapiens
tgattgctcacccaatttttggtccctttgacagagcttcttgaatgtagtgagttgtgaaaatttggtgtttttgtgtggtggatgagaatgtaggcttctmttctgccctcttattctgtctctgccttaaattttttagattcagggagtatatttgcaggtttattacctggatatatt

SEQ ID NO: 440553 - DNA, 516 bp, Homo sapiens
agaggtggcatccttgcttctagaccgtcttttatttgtttgtcttctccaatgtctgtttcagtcgatatgaagttaataccaggtactgtgattgctcacccaatttttggtccctttgacagagcttcttgaatgtagtgagttgtgaaaatttggtgtttttgtgtggtggatgagaatgtaggcttctcttctgccctcttattctgtctctgccttaaattttttagattcagggagtatatttgcaggtttattacmtggatatattgtgtgatgctgagcaatgtgggatattattgatcccatcaccaaggtagtgagcatatattgtgggatatatttgatcccatcacctaggcagtaagcatagcactcatagtttctcaccctctgccctcctcctttcctccttcatctagtagttctcagtgtctattgttgtcatctttatattcatgagtaccccatgtttagatcctacttataggcaagaacatgtggtatttggtt

SEQ ID NO: 440554 - DNA, 617 bp, Homo sapiens
tcccatcacctaggcagtaagcatagcactcatagtttctcaccctctgccctcctcctttcctccttcatctagtagttctcagtgtctattgttgtcatctttatattcatgagtaccccatgtttagatcctacttataggcaagaacatgtggtatttggttttctgttcctgtattaatttccctaggataatggcctccagacgtatgcatgttgctgcacaggacatgattgtattctttttaatgtgtgcatagtattttatggtgtatatgtggcacatatttctatccaatttattgattaacacataagttaattccatgccttccctattgtgaatagcaacatgacgcatatacaagtgcatttgggtttctttttgtagaatttttaattttattttggacatatactcagtaatggaattgctggttgaatggtacttctgttttaaattctttgaaaaacctccaaactgcttttcacagtggctgaactaatttacattctcaacaacagtgtataagcatttcattttctctgaagtctaacaagaatttsttatttttttactttttaatagtagccattctgactaatatgagatgg

SEQ ID NO: 440555 - DNA, 621 bp, Homo sapiens
tgtttaaaatagaaacaaacccctctgattttgaattcagcctgtttattgttatgatttgttcatatgtttctactctttagaccgtggctttcttgtagacagaagttgtatcttatacctctttttgttcagcagcggtgtgyctggcacctagttgaattgtcaggttcgttgaataagtaaagcaaaattatactagaagtaaattattaaatttatcaattttactcggaaaatatatagctaagtatgacgtatgaatcaattcactcactgattcaacaaacattttttaattgactacaatatgctatgagctaggaatatggcagtaaacaaatcacaccttgtctcaaacttcagtggatccaggagtctctagaagtttaattcttgctcaatcagcaattccttttcagtgaagacttgacaagaaggtttgagaaggcaagagtgtgtgaactcagcagatgtttgtgatgcacctactgtgtgccagacactgtagtgtcacaggttttgcctgtgtctcctaggaaaggtgaaaactaaggacaatattttaaacaagaaataatgccaagtatgccacatgatggagagggaaagcactgggtc

SEQ ID NO: 440556 - DNA, 621 bp, Homo sapiens
tgtttaaaatagaaacaaacccctctgattttgaattcagcctgtttattgttatgatttgttcatatgtttctactctttagaccgtggctttcttgtagacagaagttgtatcttatacctctttttgttcagcagcggtgtgcctggcacctagttgaattgtcaggttcgttgaataagtaaagcaaaattatactagaagtaaattattaaatttatcaattttactcggaaaatatatagctaagtatgaygtatgaatcaattcactcactgattcaacaaacattttttaattgactacaatatgctatgagctaggaatatggcagtaaacaaatcacaccttgtctcaaacttcagtggatccaggagtctctagaagtttaattcttgctcaatcagcaattccttttcagtgaagacttgacaagaaggtttgagaaggcaagagtgtgtgaactcagcagatgtttgtgatgcacctactgtgtgccagacactgtagtgtcacaggttttgcctgtgtctcctaggaaaggtgaaaactaaggacaatattttaaacaagaaataatgccaagtatgccacatgatggagagggaaagcactgggtc

SEQ ID NO: 440557 - DNA, 604 bp, Homo sapiens
tggcagaattttatttgaaaggattatttatgccatttttaattaactgatttatattatggttatttcaaacaataaaaatcaggttattgtgtcgtaagctagaaatatttasaataacacatggtcttgattatctcacatgatgaattgaagattaaagcaaaataatttagggaattctgtgacagtttctgtttcacgttgtttaataatgacttcaaactcttgtacatatatggagaactcctgactaaagagaatttttttgtccattgtgctatgtttctgtaactttttaagatctagaggaacacatatttagtctcagttggccaactaaatgttatggagtcagcttctgtgttacatgctgagcattgaagggatggtggagacaaggctgctgccctcgcagagtctgtggagaatacctgatggagtgtggcagggaacatgctggaagcatcccaggatgccaaaagtgcacacagatggaacacctgccttagaagtggggagggtcagacaaggagagttgtcaggaaaagcgaggaaaatttaatcagcaggaatagaaacacacttgagaaatccatgtgga

SEQ ID NO: 440558 - DNA, 604 bp, Homo sapiens
tggcagaattttatttgaaaggattatttatgccatttttaattaactgatttatattatggttatttcaaacaataaaaatcaggttattgtgtcgtaagctagaaatatttacaataacacatggtcttgattatctcacatgatgaattgaagattaaagcaaaataatttagggaattctgtgacagtttctgtttcacgttgtttaataatgacttcaaactcttgtacatatatggagaactcctgactaaagagaatttttttgtccattgtgctatgtttctgtaactttttaagatctagaggaacacatatttagtctcagttggccaactaaatgttatggagtcagcttctgtgttacatgctgagcattgaagggatggtggagacaaggctgctgccctcgcagagtctgtggagaatacctgatggagtgtggcagggaacatgctggaagcatcccaggatgccaaaagtgcacacagatggaacacctgccttagaagtggggagggtcagamaaggagagttgtcaggaaaagcgaggaaaatttaatcagcaggaatagaaacacacttgagaaatccatgtgga

SEQ ID NO: 440559 - DNA, 358 bp, Homo sapiens
ccgcgcctgcgccttccaggtctagtacmtgctgcagtgccccggctggagccgggctcctggtggggctgcagccaggcgaaagaggtgggatgctgccagctgccggtattgcagctgcagacccccacgaggaggtttcatctcgacataaatctttttctttcttcagctgatctgtatccttaattttagattagtggtaactccacaaatttagaggcacaaaatatggttgcccacaccttataatcgcattaccacctcccattaccaccacctttccccctcctccccaccctcaacccgtagactaggtctcgcgatgtttccaaggctggcctcaaactcctgggct

SEQ ID NO: 440560 - DNA, 358 bp, Homo sapiens
ccgcgcctgcgccttccaggtctagtacatgctgcagtgccccggctggagccgggctcctggtggggctgcagccaggcgaaagaggtgggatgctgccagctgccggtattgcagctgcagacccccacgaggaggtttcatctcgacataaatctttttctttcttcagctgatctgtatccttaattttagattagtggtaactccacaaatttagaggcacaaaatatggttgcccacaccttataatcgcattaccacctcccattaccaccacctttccccctcctccccaccctcaacccgtagactaggtctcgygatgtttccaaggctggcctcaaactcctgggct

SEQ ID NO: 440561 - DNA, 466 bp, Homo sapiens
tttgataggaagttgaattaatctacagattgctttggataatatggcacttagacaatattcttctaatccataaatatgtaatatatttacatttatttgtatcttctttattttktatcaatatattttattttttattgtaaagatctttcaccacattggttaaatttattgctaagaaatctattattttgttgctcttgtaaatgagatttttttttctattttactggtttgtcgctagcatatagaaacaaaactgatatgtgtatgctaattgtatattccgcttctttactgagtgcatttattagatacactatttatatatagatgcattaaatgcattatttaaatgtactatttatgttttttatatataacattatgtcatctacagacagtgacgttatttcttcttttcagtatggatcttttagcctttcttgcttaattatttgat

SEQ ID NO: 440562 - DNA, 466 bp, Homo sapiens
tttgataggaagttgaattaatctacagattgctttggataatatggcacttagacaatattcttctaatccataaatatgtaatatatttacatttatttgtatcttctttattttttatcaatatattttattttttattgtaaagatctttcaccacattggttaaatttattgctaagaaatctattattttgttgctcttgtaaatgagatttttttttctattttactggtttgtcgctagcatatagaaacaaaactgatatgtgtatgctaattgtatattcygcttctttactgagtgcatttattagatacactatttatatatagatgcattaaatgcattatttaaatgtactatttatgttttttatatataacattatgtcatctacagacagtgacgttatttcttcttttcagtatggatcttttagcctttcttgcttaattatttgat

SEQ ID NO: 440563 - DNA, 466 bp, Homo sapiens
tttgataggaagttgaattaatctacagattgctttggataatatggcacttagacaatattcttctaatccataaatatgtaatatatttacatttatttgtatcttctttattttttatcaatatattttattttttattgtaaagatctttcaccacattggttaaatttattgctaagaaatctattattttgttgctcttgtaaatgagatttttttttctattttactggtttgtcgctagcatatagaaacaaaactgatatgtgtatgctaattgtatattccgcttctttactgagtgcatttattagatacactatttatatatagatgcattaaatrcattatttaaatgtactatttatgttttttatatataacattatgtcatctacagacagtgacgttatttcttcttttcagtatggatcttttagcctttcttgcttaattatttgat

SEQ ID NO: 440564 - DNA, 277 bp, Homo sapiens
tttatttcctttgttctttgattcatagggatgtgaggtagaaatctctattagttaactcttgctytgtaacaagtaaccccacacctcagaggcctaagaccataggccaccatttctcactcatgagcatgggttgcttgggaggtttcagttcgaactgtggtggctgagctggatctgctccaagtgtctctgatcctcctcaggttggggcctgccagggtgccttcttctcatggcaatggcaggagtgcaaagaacaaagggaaatgtg

SEQ ID NO: 440565 - DNA, 277 bp, Homo sapiens
tttatttcctttgttctttgattcatagggatgtgaggtagaaatctctattagttaactcttgctctgtaacaagtaaccccacacctcagaggcctaagaccataggccaccatttctcactcatgagcatgkgttgcttgggaggtttcagttcgaactgtggtggctgagctggatctgctccaagtgtctctgatcctcctcaggttggggcctgccagggtgccttcttctcatggcaatggcaggagtgcaaagaacaaagggaaatgtg

SEQ ID NO: 440566 - DNA, 550 bp, Homo sapiens
aagtggaaccccctgataaaactgtcagatctcttgagatttattcactaccaggagaacagtatgggggaaccgcccccatgattccaattgtctcccaccaggtccctcccacaacacaggagaattatgggaggacaattcaggatgagatttgggtggggacaggcagccaaaccatatcatgcactttctttgtcttttaactttattcatcacctcttttgtcagatcaaagcttctacatttaatacgatcgaatttatcagtaatttcttttatgatgtctgtgttttgtgtcatattaaaaaaagtttttctctgtttagtgccataaaatctgtcctctgttttcttctaaaaattggaaatctgcttttcatattttgttttatttcctttgttctttgattcatagggatgtgaggtagaaatctctattagttaactcttgctctgtaacaagtaaccccacacctcagaggcctaagaccataggccaccatttctcactcatgagcatgggktgcttgggaggtttcagttcgaa

SEQ ID NO: 440567 - DNA, 277 bp, Homo sapiens
tttatttcctttgttctttgattcatagggatgtgaggtagaaatctctattagttaactcttgctctgtaacaagtaaccccacacctcagaggcctaagaccataggccaccatttctcactcatgagcatgggttgcttgggaggtttcagttcgaactgtggtggctgagctggatctkctccaagtgtctctgatcctcctcaggttggggcctgccagggtgccttcttctcatggcaatggcaggagtgcaaagaacaaagggaaatgtg

SEQ ID NO: 440568 - DNA, 509 bp, Homo sapiens
attcataataagaatgaatgggccaggcgcagtggctcatgtctgtactttgggagaccaaggcaggtggatcacctgaggtcaggagttcaagatcaccccagccaacactgtgaaaccctatttctactaaaaatacaaaaattagccgggcatggtggcgcatgcctgtcaccccagctactcagaaggctgaggcaggagaatcgcttgaacccgggaggcagaggttgcagtgagccaagattgcaccactgcattccagcccaggcgacagagtgagattgtctcaaaaaaaaaaaaaaaaaaaaaatcaatgtagctaaamtttaatgaagtgttaactatgggcaagatactatgctgagcccctttcatacatagtgttatttattgtttccaacaactataggaagaaggtacaaccccattttacagatgaggaaacgaaggcttagcaaagttaatagcttactttggggctcaaagctagtaagggctggtgccag

SEQ ID NO: 440569 - DNA, 582 bp, Homo sapiens
tgaacccaggaggtggaggttacagcgacccgagatcatgcactccagcctggacaacagaaggagactccatcttaaaaaaacaaaaacaacaacaaaaaacctactgatttcaagacttgacataaagctacactaaagacagtgtggtactggcataaggatagacaaaaaggtcagtggaatagaacagcaagtccagaaatggacccataaataaacagacaacttatttttgacaaaagtgcaaaggcaattaagtagagaaaaaatagtctttttgataagttgtgatagaatacttggacatccacatgcaaaaaaaaaattaactttgatctatacctcataccacatgcaaacactaactcaagatggaccactggcctaaatgtraactctaaaactatacattttctagaagaaaatgtaagagaaaacctctgattcatggaaggcaattaataaactggactttatcaaaattaaaatcttctgctttttgaaagacactgtgaagagaatctaaagataagacacagactgggagaaaatatttgcaaggcatttatttagtaaaga

SEQ ID NO: 440570 - DNA, 561 bp, Homo sapiens
acaaaacaccttttttgacctcttttgcagaaaggtttgtttttaattttttattttcagttatcacggatgcatagcagttgtacatatttatttggtacatgttgtactttgatacaagcatacaatgtgtaatgaacaaatcagggtaattgggatatacatcacctcaagcattgatcatttctttatgttagaaacatttcaattccactctttcagttactttgaaatacccaataaattattgttaaytcttgtcatcctattgtgctaccaacactaggtactccttttatttaactttatttttgtacccattaactacacctatttatccccctcttcccaatattcttcccagcctatattaatcttcattttactctctgtatctatgaattcaatttgtttttaactcccatatgtgagtgagaacatgcagtatctgtctttctgtgcctggcttattttacttaacataatgtcctccagttccatccatattgctgaaatgacaggagttcattctttttaatggctgaatagtgttccattgtg

SEQ ID NO: 440571 - DNA, 564 bp, Homo sapiens
  misc_feature (1)...(564): n = A,T,C or G
atcttatttttttctttctataacttttggggtacaaatggtttttggatacattagtgaattgtcaagtggggaagtctgagattttagtgcactcatcacccaagtagcagacattgtacccaatatatacttttttatctctcactttcatcccaccctcttcatccttctgagtctccagtgtccattataccactctatatgcttttgtgtacccatagcttagctcccacttataactgagaaagtatggtatttggctttcccattntgagttacttgtgaagacattttaaaggtagagaatcwcagaccatcaagatgcaatctaagatgtcatcaataaacctaggtatcagttgccaagtagcagcccctactgattgaggggcaaaaattgaattattgtcacctttgtaggtggaaacaaaaagacaccatgttaaatcaggatcttggcttgtcctgatttatatattagtcttgctctacataaattgatgtgttttttaaacatgacttggcagtcatcatccaacatttaggagtgatcgaatgaac

SEQ ID NO: 440572 - DNA, 564 bp, Homo sapiens
  misc_feature (1)...(564): n = A,T,C or G
atcttatttttttctttctataacttttggggtacaaatggtttttggatacattagtgaattgtcaagtggggaagtctgagattttagtgcactcatcacccaagtagcagacattgtacccaatatatacttttttatctctcactttcatcccaccctcttcatccttctgagtctccagtgtccattataccactctatatgcttttgtgtacccatagcttagctcccacttataactgagaaagtatggtatttggctttcccattntgagttacttgtgaagacattttaaaggtagagaatcacagaccatcaagatgcaatctaagatgtcatcaataaacctaggtatcagttgccaagtagcagcccctactgattgaggggcaaaaattgaattattgtcacctttgtaggtggaaacaaaaagacaccatgttaaatcaggatcttggcttgtcctgatttatatattagtcttgctctacataaattgatgtgttttttaaacatgacttggcagtcmtcatccaacatttaggagtgatcgaatgaac

SEQ ID NO: 440573 - DNA, 548 bp, Homo sapiens
tgtaaacaatgaaatgctaaacttgtttawttttatctaaacagataaaagttatctgaattattatttatagatcatttattttaggtagcatcataaataatatcctgaaagggaaggtcttaaaaacaaattaatgaaattaagcaagagaaaagtgaaagttggtgaatgttcactatagaaaaatgacttaaaactataagagataaattcaattatttgctttttcttggggcttgtgggataaaatagactaatagagatcattatgcttgctttttcaaggacaggaaacactattcagataactctgtatttttttatgttttgcatcaatgtaaaaaacagcttcaaatccccttatccctcatcatttctggacttggtctcccattcatgacttatgctttggctaaataattgtacagactttagttaggtgtctattgctttccaggttctgtagtaagcatagaccaagaacgaaaatagaagagtgcttgctctcacagatcttagattttagtagagaaaacaggcattag

SEQ ID NO: 440574 - DNA, 548 bp, Homo sapiens
tgtaaacaatgaaatgctaaacttgtttatttttatctaaacagataaaagttatctgaattattatttatagatcrtttattttaggtagcatcataaataatatcctgaaagggaaggtcttaaaaacaaattaatgaaattaagcaagagaaaagtgaaagttggtgaatgttcactatagaaaaatgacttaaaactataagagataaattcaattatttgctttttcttggggcttgtgggataaaatagactaatagagatcattatgcttgctttttcaaggacaggaaacactattcagataactctgtatttttttatgttttgcatcaatgtaaaaaacagcttcaaatccccttatccctcatcatttctggacttggtctcccattcatgacttatgctttggctaaataattgtacagactttagttaggtgtctattgctttccaggttctgtagtaagcatagaccaagaacgaaaatagaagagtgcttgctctcacagatcttagattttagtagagaaaacaggcattag

SEQ ID NO: 440575 - DNA, 486 bp, Homo sapiens
  misc_feature (1)...(486): n = A,T,C or G
nnnnnnnnnnnnnnnnnnntagtttttgcttgtggagattctacaggctcacatagctatattaccgaatctagagtggtcacctgtaggaaggctgctgaatatttgagcttcaggccccacacactgcctatgtgccaagaccacttccacttagctagaaaaaccctgcrtctatgagctttttcttgtctaaacctaaattttgtttttcagagagccaatctcagtcccctaaaagctgaaactacaccaatgttctagcaatttatgatcgacataatggtttttcctaacctttaaaaataaaatgctacaactcatagcaaaatatagttaatttctaagtaaaatagagatagaaatgtttgagaatccatttgtttcagatctcctagtatgagattttgttcttcaggtataagggatatgatgccagcttgtatatgaggatttctaaatctgggtccattacaactatctaga

SEQ ID NO: 440576 - DNA, 323 bp, Homo sapiens
ggtggtcccttacgtagcaaactgatacaacattagaagttgatatgcagtaaggttgtttttttttttaatgttcttacttagaaaactaaaaagtgaataaattctttgtccatccttatacttttctaaacatttaactgctccaggatttttttcytttttttttttttttttttttttttttgagacggagtctcactctgtctcccaggctaaagtgcagtggcacgatctcggctcactgcaacctctgtctcctgggttcaagtgattctcctgcctcagcctcctgagtagctgcgattacaggtgcgcaccac

SEQ ID NO: 440577 - DNA, 323 bp, Homo sapiens
ggtggtcccttacgtagcaaactgatacaacattagaagttgatatgcagtaaggttgtttttttttttaatgttcttacttagaaaactaaaaagtgaataaattctttgtccatccttatacttttctaaacatttaactgctccaggatttttttccttttyttttttttttttttttttttttgagacggagtctcactctgtctcccaggctaaagtgcagtggcacgatctcggctcactgcaacctctgtctcctgggttcaagtgattctcctgcctcagcctcctgagtagctgcgattacaggtgcgcaccac

SEQ ID NO: 440578 - DNA, 538 bp, Homo sapiens
agaaacggatattactaagaattcagaatagataaagctaaaatctcaagttcatgagaaaagtcaatcttgggggtagagaaagattttcaaagtatggctacaaagacaggaaccataaagaaaaggattggtagatttgaccatgtacataaaaaaaaagtctggcaataaaaacaccatcaacaatgttaaaagacaaacgacaaaataagaaacatattcacaatatatatgacggacagcgggttcatattcttaaattataaaggctaacaacatagttgctagtattgttcctggaaaattgtagatgctcaatacatagagatttaattaataaacaaacaccaacagaaaaataagctaaggtgatgaacaaytaatttatcatcattcaagagatgaattaataataacctgtaaacatatgaaaaatgttcagccttaataatgatcaaaggaatgtaagaaagagatttttcactgattggattactaaagatatagattcatatttattaacatcctaagatgt

SEQ ID NO: 440579 - DNA, 566 bp, Homo sapiens
gctgaaggaatagctacaaatctgtcttttactatactcttagtgctagtggagaaaaaaactacataattcttaatacaactctgtgaatattttggttcattttcttcaattatttttttcacatttaaagtatattcttatttcctgtatatgtatatataatatttatattaacgctrtattatattcatacttgcattactgcattgtctccataaccataatagttaatggtgtgataatattccatgtcagttgatatctgtagccaagtacctgctattggacatttgtttctctctaacaatgttatgatgaaaatatttgtgtgtatggggaatttttgtgacttttccttcacttttcataaaggaatttcagaatgaaagccacgctaattattgaaccataaaagaatccagagcccagacattcaacactatttctgtaatttctagaggtgctgtatgaagaaataaagattgattgtgatgagtccttgagttgaccttcattagctgggtaatctgccttggggaaatgccccagatccaacaacccag

SEQ ID NO: 440580 - DNA, 566 bp, Homo sapiens
gctgaaggaatagctacaaatctgtcttttactatactcttagtgctagtggagaaaaaaactacataattcttaatacaactctgtgaatattttggttcattttcttcaattatttttttcacatttaaagtatattcttatttcctgtatatgtatatataatatttatattaacgctatattatattcatacttgcattactgcattgtctccataaccataatagttaatggtgtgataatattccatgtcagttgatatctgtagccaagtacctgctattggacatttgtttctctctaacaatgttatgatgaaaatatttgtgtgtatggggaatttttgtgacttttccttcacttttcataaaggaatttcagaatgaaagccaygctaattattgaaccataaaagaatccagagcccagacattcaacactatttctgtaatttctagaggtgctgtatgaagaaataaagattgattgtgatgagtccttgagttgaccttcattagctgggtaatctgccttggggaaatgccccagatccaacaacccag

SEQ ID NO: 440581 - DNA, 454 bp, Homo sapiens
accagcctggccaacatgccaaaaccccgtctctactaaaaatgcaaaaattaggtggatgtggtggcacgctcctgtaatcccagctactcgggaggctgaagtgggagaactgcttgaacctgggaggtggaggctrtagtgagatgagatggcgctactgcactccagcctgggttgacagagtgaggctctgtttcaaaacacacacacacacacacacgaaaagaggttgaagaattaggtcagatagaccatcttaggcttgagggttaaaagagtggaaattacatatgtcaattcttaaagtatctccttaatcacatctgttaggatgggtacattaaaaacaaacaaacaaacaaacacatagaaaaaagaggatgtagagaaatgtggactcttatgcattgttggtgggaatgtaaaatggtgcagccactatggaaaacaa

SEQ ID NO: 440582 - DNA, 588 bp, Homo sapiens
ttggttccacatgaacttaaaaatagttttttctagttctgtgaagaatgttgttggtagttttgtagaaatggcattgaacctgtaaawtgctccgggcagtatggtcattttaagaatattgattcttcctattcatgaaaatggaatgtttttctatttgtttgtattatctctgacttctttgagtagtgtcttgtaattctcattgtagagaactttcacctccttagttagctttacacctagatattttattctttttgtagcaactgtgaatgatattgtggtcctgatttggctctcagcttggatgttgttggtgtataggaattctagtgttttttgtacatcaattttgcatcctggaactttgctaaagttgtttatcagattaagtagcttttgggcagagactatggggtaaaagtggaagactttactatcccactgacagtattagacagatcactgagacagaaaattaacaaagatattcaggacctgaactcaacacttgaccaaacagacctaatagacatctatagaactcttcacccccaaaaaacaggatattcattcttctca

SEQ ID NO: 440583 - DNA, 588 bp, Homo sapiens
ttggttccacatgaacttaaaaatagttttttctagttctgtgaagaatgttgttggtagttttgtagaaatggcattgaacctgtaaattgctcygggcagtatggtcattttaagaatattgattcttcctattcatgaaaatggaatgtttttctatttgtttgtattatctctgacttctttgagtagtgtcttgtaattctcattgtagagaactttcacctccttagttagctttacacctagatattttattctttttgtagcaactgtgaatgatattgtggtcctgatttggctctcagcttggatgttgttggtgtataggaattctagtgttttttgtacatcaattttgcatcctggaactttgctaaagttgtttatcagattaagtagcttttgggcagagactatggggtaaaagtggaagactttactatcccactgacagtattagacagatcactgagacagaaaattaacaaagatattcaggacctgaactcaacacttgaccaaacagacctaatagacatctatagaactcttcacccccaaaaaacaggatattcattcttctca

SEQ ID NO: 440584 - DNA, 588 bp, Homo sapiens
ttggttccacatgaacttaaaaatagttttttctagttctgtgaagaatgttgttggtagttttgtagaaatggcattgaacctgtaaattgctccgggcagtatggtcattttaagaatattgattcttcctattcatgaaaatggaatgtttttctatttgtttgtattatctctgacttctttgagtagtgtcttgtaattctcattgtagagaactttcacctccttagttagctttacacctagatattttattctttttgtagcaactgtgaatgatattgtggtcctgatttggctckcagcttggatgttgttggtgtataggaattctagtgttttttgtacatcaattttgcatcctggaactttgctaaagttgtttatcagattaagtagcttttgggcagagactatggggtaaaagtggaagactttactatcccactgacagtattagacagatcactgagacagaaaattaacaaagatattcaggacctgaactcaacacttgaccaaacagacctaatagacatctatagaactcttcacccccaaaaaacaggatattcattcttctca

SEQ ID NO: 440585 - DNA, 568 bp, Homo sapiens
tgatggatatacttttatattttttctttcctgttatgtagtgatattttrttgaaatagtagtatatattagaattcattcattttgtgtatattgctgctgtgtattaatattaaaaatgaaataattgcttttagtgcatgctatagcataaattagaaatccttcaaacttattatgtcttgtatgctttataccatgtttttcttaactgaagcatttgtttatatgcacatttcatagctacctatatagaaattaactcaaatcttgatttgtttcttactaaaatgtggtactctattttattttacaggaccctgagtatgttatgaatttttatgtataagaaaattctgttttgtttttattatggaccaatatttactgacatctatatatttgttttaatacacagtcgattctcattatttggggagttatgttcaacaaagtcggctcaacactgatattcatgaatactgaaacaatgctcctaagggaaaacagcgggtaggtgactgtgagccttgtgtcgcaacattctcagcaccagatcaattcata

SEQ ID NO: 440586 - DNA, 567 bp, Homo sapiens
gagagatgatttagggtatctggcagaagcaatttctaagcaacaaaatgttcaagaagcagcagagcataaaagtttggaaagttagcagcctgatgatgagatggaaaagaaaaccccatttctcaggagaaaatcaagctggctacagaaatttgcataagtaaaggggagccaaatattaatcaccaagaccatggggaaaatgtctccatggcatgtcagagaccttcactgcagcccctcccatcataggcctggaggcttaggagggaaaaaaatggttgtatgggtggggcccagggcccccctactctgtgcagcctccagacatggtgccctgcatcccagctgcttcagctccagccatggctaaaaggggccaatgtacagctcaggccaatgcttcagacggtgcaagccccagggcttggtggcttacatgtggtgtcgggcctgcaggtacacagaagtcaagaactgaggtttggaaacctctgtctagrtttcacaggatgtatggaaaggcctggatgtccaggcagaggtctgctacaggggcaaagc

SEQ ID NO: 440587 - DNA, 553 bp, Homo sapiens
ataaataaaacccatataaataattatgtatttgcttgggggggtgttgaacaatatattacagtaattcaaagctacataataaacatccccaacgtcacagactttggggaaaatgtttcctcaatttgggacttaccatatttacctaatatctgggctagtgagactktttgattcctaatttgcaaggtagaactgccctcagttggtataaagttcattcacagctctggttattaagcttttccatgtggaactgtgcctgtcttaggacatgaatctgttaccagccatgaagccgtactcaggaaagatcattataagtgatatcatagttctcagcttttctaaaatcatgagaatggagtttaaccgctagtgacatctgacaagtccctgctattcaacacataataggtgtgatatgtttattgatagtgcttaggagaagagaagggcatcatggattatcagaaagtcacatccctggttgaattactttttcttatacattcctagaaaaatagaatagattgacagatgttcatac

SEQ ID NO: 440588 - DNA, 595 bp, Homo sapiens
ttcttgcttgtaataaatgagtgtggtgagaatgaaaaattcatttatgtaaattgtttttctttaaaaaaaaatcttaaaaattaattgtacacaataaaaacataaacaccatatggctttactcaggtcaaaatgcarctcgttttttgttaaaccttgaaaaggaacaagtttttaaaaactggagagaaattcccaggcccagcatttatgggctctgtaaatatcatctttcagcaataaaggtgccgtatggaatagtgtatcttagaaaattttgaatacgccccaaaaattcaaaattattttctacactaaaatattagttagtcgaggatagctcactgaaatagtattctatatctaggagtattacttaaaatacataggtgagaatcattctttgttttaaatttagaaagttctaaatttagaaagttctaaatcaaaaaatgattctatattttttgattttatattctataaatgattttatgtttctatacatttagccatgaagacttggctttagtttgcttctattaaatgttgtaaagctgtaaagtccaattactgggaattttgtaagaaa

SEQ ID NO: 440589 - DNA, 595 bp, Homo sapiens
ttcttgcttgtaataaatgagtgtggtgagaatgaaaaattcatttatgtaaattgtttttctttaaaaaaaaatcttaaaaattaattgtacacaataaaaacataaacaccatatggctttactcaggtcaaaatgcagytcgttttttgttaaaccttgaaaaggaacaagtttttaaaaactggagagaaattcccaggcccagcatttatgggctctgtaaatatcatctttcagcaataaaggtgccgtatggaatagtgtatcttagaaaattttgaatacgccccaaaaattcaaaattattttctacactaaaatattagttagtcgaggatagctcactgaaatagtattctatatctaggagtattacttaaaatacataggtgagaatcattctttgttttaaatttagaaagttctaaatttagaaagttctaaatcaaaaaatgattctatattttttgattttatattctataaatgattttatgtttctatacatttagccatgaagacttggctttagtttgcttctattaaatgttgtaaagctgtaaagtccaattactgggaattttgtaagaaa

SEQ ID NO: 440590 - DNA, 607 bp, Homo sapiens
ttgggctggcactgccccatgacatttaatggaaccttccttttctttctccctcttcatatctgttttctcctcttcttccacatcttctcctccctcctgctccttttttccttcccttcctgccttctgaaacactygacctctactagatctctggggagaactgttgatactataatcctgctacataattgattaaatacaatcattaaagtgttagcaatagaaggggaactagagagcatcaactccttcagttggaaaataagaaaagtaaagctccaaaaaggaaagtctcaaattagcacaaggtcattctgggactagaatccaggtttcctgacgcccaactaatggttctttctgctccacttagaaatccctgagtaagccaaaaactacataccacacatgatattattttacccatgaagcaaaccacttaaatgccttatttgtgtcaacattgtgctgaaacctggaaattaaagcgggaatttaattttaaaagcactttatagtcctttgtttatattccttaaaattacagagttgattgtagattatccattttacagccgtagaaacaaaaacaagtcaaaga

SEQ ID NO: 440591 - DNA, 623 bp, Homo sapiens
tgtctgctgccattttcaactccctgcaattcatccttgcatgacagaaaatggattaagctctgtcctacttagattcattcaaggtatctatattacctacaggttaaaatctaattttagtaccatgatatactgtttacaatcatgaactagcccttggctatattttcttgctgtgcctttccatctacctggaactctccacttaattgatatataactgcttgcaaaaaagttatttgactctcttgtgtatttctcatgcagttttctcttcctggattgcccttgtcacctattttttctggggaaaagaattatctcatcaagaagacttgcacatatacacacgatcagtactaaagtctaatactgaagaataaactcagctctagggcccaayagtcttggtttattcacagtgatagtaagctgtgtggcactcctttaagttttctatactctctgcatctcaattttctattctgttaatatgaatgaaaagaacatcagcttcatgatataatatgcataaatgataattccttatatgttaattattgttattaaatgtgactccttcctcctttgtgtcccctccataccttctttcacagcat

SEQ ID NO: 440592 - DNA, 596 bp, Homo sapiens
ctaaagtctaatactgaagaataaactcagctctagggcccaacagtcttggtttattcacagtgatagtaagctgtgtggcactcctttaagttttctatactctctgcatctcaattttctattctgttaatatgaatgaaaagaacatcagcttcatgatataatatgcataaatgataattccttatatgttaattattgttattaaatgtgactccttcctcctttgtgtcccctccataccttctttcacagcatctgcaatatttccccacattatttactcagcctgcaagacagtagatgctccaaggacaggactcctaactctgtatctcatcagaaagacatgttcaattaacgtttgttaaagaatggagtacattagttaacagtgaaattgctaccyaaatctaactcatttgatatagacagaaggctttttccatcctgaaaggattgcctaaacttcttgcttatttcaaataatccaagttaccctgactgtccagaaagaaagaatccatcttttagtagtacgtttagcttgctttcactctgcaaatagcctatgggactacttaactaatagg

SEQ ID NO: 440593 - DNA, 540 bp, Homo sapiens
ggaacccttgtgcactgttggtgagtatatttattggtatagccattatggaaaataatacagaatcacttccttcaaaaattaataacagaactaccatatgatccagcaattctacttctgggtatatggccaaaggaaatgaaatcagtatgtcaaaaggatacctgcactcccatgtttattgcagcattattcacaatacccaaattatggaaacaacctatgtgtttatcaacaaatgaatgtataaagaaaatgtgatacatataatattcatatacrtatgaaattatataaaccttaaaaaataagaaaatcctatttgcagcaatatggatgaacccagaagacattatgctaagtgaaataagccagacacaatagaaaaacatggcgtgatctcatttgtaaatggaatctaaaaatagtcaaattcatagaagcagagattagaatggtgattatcacaggtaaggggttgaggtaaatagggagatgttgggcaaagggtaaaaagtttcccttatgtagaataaa

SEQ ID NO: 440594 - DNA, 540 bp, Homo sapiens
ggaacccttgtgcactgttggtgagtatatttattggtatagccattatggaaaataatacagaatcacttccttcaaaaattaataacagaactaccatatgatccagcaattctacttctgggtatatggccaaaggaaatgaaatcagtatgtcaaaaggatacctgcactcccatgtttattgcagcattattcacaatacccaaattatggaaacaacctatgtgtttatcaacaaatgaatgtataaagaaaatgtgatacatataatattcatatacatatgaaattatataaaccttaaaaaataagaaaatcctatttgcarcaatatggatgaacccagaagacattatgctaagtgaaataagccagacacaatagaaaaacatggcgtgatctcatttgtaaatggaatctaaaaatagtcaaattcatagaagcagagattagaatggtgattatcacaggtaaggggttgaggtaaatagggagatgttgggcaaagggtaaaaagtttcccttatgtagaataaa

SEQ ID NO: 440595 - DNA, 540 bp, Homo sapiens
ggaacccttgtgcactgttggtgagtatatttattggtatagccattatggaaaataatacagaatcacttccttcaaaaattaataacagaactaccatatgatccagcaattctacttctgggtatatggccaaaggaaatgaaatcagtatgtcaaaaggatacctgcactcccatgtttattgcagcattattcacaatacccaaattatggaaacaacctatgtgtttatcaacaaatgaatgtataaagaaaatgtgatacatataatattcatatacatatgaaattatataaaccttaaaaaataagaaaatcctatttgcagcaatatggatgaacccagaagacattatgctaagtgaaataagccagacacaatagaaaaayatggcgtgatctcatttgtaaatggaatctaaaaatagtcaaattcatagaagcagagattagaatggtgattatcacaggtaaggggttgaggtaaatagggagatgttgggcaaagggtaaaaagtttcccttatgtagaataaa

SEQ ID NO: 440596 - DNA, 540 bp, Homo sapiens
ggaacccttgtgcactgttggtgagtatatttattggtatagccattatggaaaataatacagaatcacttccttcaaaaattaataacagaactaccatatgatccagcaattctacttctgggtatatggccaaaggaaatgaaatcagtatgtcaaaaggatacctgcactcccatgtttattgcagcattattcacaatacccaaattatggaaacaacctatgtgtttatcaacaaatgaatgtataaagaaaatgtgatacatataatattcatatacatatgaaattatataaaccttaaaaaataagaaaatcctatttgcagcaatatggatgaacccagaagacattatgctaagtgaaataagccagacacaatagaaaaacatggcgtgatctcatttgtaaatggaatctaaaaatagtcaaattcatagaagcagagattagaatggtgattatcacaggtaaggggttraggtaaatagggagatgttgggcaaagggtaaaaagtttcccttatgtagaataaa

SEQ ID NO: 440597 - DNA, 595 bp, Homo sapiens
ggtgattatcacaggtaaggggttgaggtaaatagggagatgttgggcaaagggtaaaaagtttcccttatgtagaataaattctaacaatctaatgtacagcctgggtactatagataatattttattgtatacatcaaattcgctgagagcagwtattaagtgctcttatcacaaaaaactacagaaagataaatgttaattcacttgactgtactaattagttcagtctatatgtgtatattaaaacatcacactgtatactttaaattaaaaaataaaatagggatgtcaatattaagatgacccaaatgttcaaattatagacaaagactctaaatcatctacctgtaaatgtattgatttcattctctaagacttttaaaaattattgttttaatgtaaaacaagtataaataaataatgtaaaaaacaagtatgtatatgtaatacataagaggctggcctttatagattttgctttctttttcagggatggtgtcttacgtaatactaccaaataaatcaatgcttctcaaacattaatgtgcatgcagattacctggaaatattgttcaagtgtatcttgtaatcc

SEQ ID NO: 440598 - DNA, 595 bp, Homo sapiens
ggtgattatcacaggtaaggggttgaggtaaatagggagatgttgggcaaagggtaaaaagtttcccttatgtagaataaattctaacaatctaatgtacagcctgggtactatagataatattttattgtatacatcaaattcgctgagagcagatattaagtgctcttatcacaaaaaactacagaaagataaatgttaattcacttgactgtactaattagttcagtctatatgtgtatattaaaacatcacactgtatactttaaattaaaaaataaaatagggatgtcaatattaagatgacccaaatgttcaaattatagacaaagactctaaatcatctacctgtaaatgtattgatttcattctcyaagacttttaaaaattattgttttaatgtaaaacaagtataaataaataatgtaaaaaacaagtatgtatatgtaatacataagaggctggcctttatagattttgctttctttttcagggatggtgtcttacgtaatactaccaaataaatcaatgcttctcaaacattaatgtgcatgcagattacctggaaatattgttcaagtgtatcttgtaatcc

SEQ ID NO: 440599 - DNA, 636 bp, Homo sapiens
actctgtatctggcaatgggcaaatatatgaagaaaatagaaacctcaactttgttcagtattcagttgggaagaatagatagacaactaaatatcaaagagctacacatcaaagtgctgggagtataytcaggaatgctttgcttgacctaactggctgttgtccctcagaactaataatttgcaatttggaactgctcaccttggatagttagcccaactatgctgccaatattcaaacacaactgaaattcattccttagtattacattacctttatggaagttttcaaactacacactatgagtctctcttgctactttgtaatattgataccccaaatttcagttgccttggtattcacaattcatatgggctattccctttaatattcaatgctaaacacacataaatttctattaagtgaatattaatggtgatatttaatatttagttctattaaaatagcttatccccaccctatatgtagggaaaaccaaatctctcgatatttttcttacttcttctactcatttccttttgttttgctttgttttcattctttttttcattagaggtgaaaacaatatcccatttttcattcgtataaatatgaggtgtacaagtacagttttg

SEQ ID NO: 440600 - DNA, 605 bp, Homo sapiens
ttctcttcgtcccttgtgtagtagttttttaagacctgtgagttttgtactttcatgtatttttaccatggagaatactaaccttttcccatgtttagaacgccttggaacatttcttgtagagccacactagggatgacaaattccttcagtgtttgcttgtctgaaaaagactttctctttcatttatgaaagttactctgacaagatatagwatttgtgattgccagtttttttttttttctttttccttaagcaccttgaaaatagggcacaaatctcttctggtttctaaggcttctgctgagaatcacaatgtaagcctaatttggtttcctttacagggactaaatgtttttctcttgctgattttaaggtttttcttctttcactttgactttagaaagtctgatgactacatgtaatggtgaatttcatcttgcaatgtattttcctagtatttgttgggccttttgtatctagatattcaaatatcttgctagaccagtgaaatcttttgtcaattatttccttaaacaggttttctaaacattttgctttctcttctcccttgagaataccaatgattcctaagttacattgct

SEQ ID NO: 440601 - DNA, 550 bp, Homo sapiens
gaggtgattattacacattgcatacctgcattaaaatatctcatgtaacccataagtatatataactactatgtacccacaaaaattataaattaaagaaatgacatattaatttatttagaactcaggtaaaaactccctatggatactaaaacatatttgggaagttccttaccaagtttgaaggatacatttccaaaattaattatacgtaataaccttattatatggaatagtttgaacttgaatacatgagttttggttcgccatgaacataatggtaaatactaatgctcttgacttatgatgggggctatatcacaawaatccatcataaattgaaaatatttttgacttaatttttttttttttttacttacaatgtgtttaactggacatacctgttctaagttgaagagtttactaaatggcatatcacttttgcatagttgtaaagtcaagaaatgataagtcaaatgataagtcagggaccacctgaatcagttattgtgtaataggtcgttgatctctattgctcttcagatgtata

SEQ ID NO: 440602 - DNA, 563 bp, Homo sapiens
tgacttatgatgggggctatatcacaataatccatcataaattgaaaatatttttgacttaatttttttttttttttacttacaatgtgtttaactggacatacctgttctaagttgaagagtttactaaatggcatatcacttttgcatagttgtaaagtcaagaaatgataagtcaaatgataagtcagggaccacctgaatcagttattgtgtaataggtcgttgatctctattgctcttcagatgtataagtttatctccattttaaatttcacactggtctgtttttgaggtgtttacttttataattttctaccttcttcctctttttcaaaatctcaacttcacttcttaactgctgtcagtatgctagcttttagctatctttcagttcccccttcttctctctcttctttgccctctctctcttgccattattctgtaggcatcacataaacttgctactatctatttttgatactcattttagtctttttggctaacttgctgrttctgtaaattgagacttacagataatgatccctgaataaatgaagggg

SEQ ID NO: 440603 - DNA, 583 bp, Homo sapiens
ttagaatttttttttagttctgtgaacatgatattggtaacttgatagaaatagcattgaatctgtagattgatttggactgtatggccattttaatggtattgattcttcctawccataagcatgaaatatatttaacatgtgtttgtgtcatctatgatttctttcagcagtgttttgtagttttccttgtgagatctttctttgctttgttagacgtatttctaggtattgtgtgtgtgtctctctctgtctgtgtctgtggctgttgtaaatggagttgtgttcctgatttggctctcagcttgaatgttattggtgtataaaattgctagtgatttttgttcattgattttgtattctaaaacttttctgaagtcctttatcagttccaggagtcttttggtgaggtctctagccttttctgggttcaggatcatatcatcagcaaaaagagatgtttctcctctttttgctatttagatggcttttacttttttctttttcctgattgctctgggaaggtcttccaaaaccatattgagtaggcattatgagagtggacatccttgtgagaaaactg

SEQ ID NO: 440604 - DNA, 583 bp, Homo sapiens
ttagaatttttttttagttctgtgaacatgatattggtaacttgatagaaatagcattgaatctgtagattgatttggactgtatggccattttaatggtattgattcttcctaaccataagcatgaaatatatttaacatgtgtttgtgtcatctatgatttctttcagcagtgttttgtagttttccttgtgagatctttctttgctttgttagacgtatttctaggtattgtgtgtgtgtctctctstgtctgtgtctgtggctgttgtaaatggagttgtgttcctgatttggctctcagcttgaatgttattggtgtataaaattgctagtgatttttgttcattgattttgtattctaaaacttttctgaagtcctttatcagttccaggagtcttttggtgaggtctctagccttttctgggttcaggatcatatcatcagcaaaaagagatgtttctcctctttttgctatttagatggcttttacttttttctttttcctgattgctctgggaaggtcttccaaaaccatattgagtaggcattatgagagtggacatccttgtgagaaaactg

SEQ ID NO: 440605 - DNA, 530 bp, Homo sapiens
tgggtacattgctcctgtcctctggctaaaaagctgaaatttcactcagaattttagtttcctatactttcctgtagtttcgtatggctttaaccttcaggaaaaaattgcaagaaaaaagaaaaatgtaggaggaatcccccctactcctttagaacacagggcctcttggttcctctggccaaaaatgaacttggattttgttgttattgctgttttgggtgttcatgttgttccaacagcagtgcagctttgtgagtaggtaaggcttccaacagagctggcagaaagaagaatacaaaacaaacaaaaacacgtggtaaattatccctacccttttgtccacagagggcctatttcccaaagaagaatttatttcagaatttttataatttgtacctgctgtgcagttttgtatcctatgcagccctccaaaagataaagagcagagagaaaaaacaaaaacaatactgtaacctcacctccatamtggttgttctttaagttttgacttacttttcaattctttt

SEQ ID NO: 440606 - DNA, 589 bp, Homo sapiens
  misc_feature (1)...(589): n = A,T,C or G
ttttaagaattattttccagttttcttgttgttgaatactctgggttgtaataaataaggtatgaaataaaatgtattttcttctataacattagctcaagcccagcagcttaaagaaacactctaccttagtacatgtttttgaataagagatataaagaagatacataatgaaagattagtggttttacagcttggtgacccacaaaggcaaaaaagacaaaggtatgagatagggatagggtgagagaggatggcagttataaacgtcttcatctttgcacaattcttagcacatagtgtgtgcttaataaatttttattttaggagcagattaaggtatatatatggtattatgattacagattttcagataaattgaaaataggaaataagactccttatggatacttaacataagcaaaattttaaaactagcaaaatgtaagtcacttaaakgacatccacagaaaacagaagtgctgatatatacaatattcattgctcctcaaatcaaaccaaatttattaaaacaaagatgtacttatgagggggtttagccgnaccgaaggcnggcttntnccccnnn

SEQ ID NO: 440607 - DNA, 543 bp, Homo sapiens
ctgattttatgaagagactttatctcattatcctatggataagtaagggccctggtattattttctattattattcactgctgttcccctttatagtatttatctcaagtggtaattatataactacatgtttatttggccattgccactgtcctccttcatagcaggaacacaagggggasggaaaatgcatctgttgggattacgactttatacccaatgcctagctgaaagcctaccttgcagcaggtgctcagtgtttctgaggtgaatttttaaattatagttgaaagtgtcaggattctgtttaaattagacaaatcttagtctttaagagaaatgacagtttaatgacaaagaaaaattcaattgtatctaattgcccctcaaaagcaaaggttactacaaagaaccaacaaacatatgaaataggaatagtgaaaatgaatccatgttggtttccatgtatgaaccctcaaagccagagtgagagtgaagtattttattcactttgcgttttaaattttattttactgtgataac

SEQ ID NO: 440608 - DNA, 543 bp, Homo sapiens
ctgattttatgaagagactttatctcattatcctatggataagtaagggccctggtattattttctattattattcactgctgttcccctttatagtatttatctcaagtggtaattatataactacatgtttatttggccattgccactgtcctccttcatagcaggaacacaagggggacggaaaatgcatctgttgggattacgactttatacccaatgcctagctgaaagcctaccttgcagcaggtgctcagtgtttctgaggtgaatttttaaattatagttgaaagtgtcaggattctgtttaaattagacaaatcttagtctttaagagaaatgacagtttaatgacaaagaaaaattcaattstatctaattgcccctcaaaagcaaaggttactacaaagaaccaacaaacatatgaaataggaatagtgaaaatgaatccatgttggtttccatgtatgaaccctcaaagccagagtgagagtgaagtattttattcactttgcgttttaaattttattttactgtgataac

SEQ ID NO: 440609 - DNA, 543 bp, Homo sapiens
ctgattttatgaagagactttatctcattatcctatggataagtaagggccctggtattattttctattattattcactgctgttcccctttatagtatttatctcaagtggtaattatataactacatgtttatttggccattgccactgtcctccttcatagcaggaacacaagggggacggaaaatgcatctgttgggattacgactttatacccaatgcctagctgaaagcctaccttgcagcaggtgctcagtgtttctgaggtgaatttttaaattatagttgaaagtgtcaggattctgtttaaattagacaaatcttagtctttaagagaaatgacagtttaatgacaaagaaaaattcaattgtatctaattgcccctcaaaagcaaaggttactacaaagaaccaacaaacatatgaaataggaatagtgaaaatgaatccatgttggtttccatgtatgaaccctsaaagccagagtgagagtgaagtattttattcactttgcgttttaaattttattttactgtgataac

SEQ ID NO: 440610 - DNA, 564 bp, Homo sapiens
ttgtctgctgttctgaaatgcacttgtgtaaatcaggaattgcaacaagagaattgatcttggcttcataaatacttcctatgaacttttgaaacccaatttgtatctttatgtatagttgccacaaggataataactgaaaattgtttgtgaactctaaaactctagcctcctggaatttttcatccctaatttttgtttttgataagctttttatcaatatactatgtaaacagcttccatttatagatrtcttgagaggatagaaaaaagaatctaaaactttattttaaagagtttattaaaagaataaaaaattcataaaattattcttcttaaagcctccattttcctgctttgcggaatgtcacaatagtcatatatacatatggttgcatggatgggttatatatagggattggcatcctcctattaaattttaaccatgacattttttattgaatttcccaatgacctccaaataaggggctttctcaggagacaaacagggtcagatctgtactgttagctaatccaagtacatttttaataaaaggagtttta

SEQ ID NO: 440611 - DNA, 564 bp, Homo sapiens
ttgtctgctgttctgaaatgcacttgtgtaaatcaggaattgcaacaagagaattgatcttggcttcataaatacttcctatgaacttttgaaacccaatttgtatctttatgtatagttgccacaaggataataactgaaaattgtttgtgaactctaaaactctagcctcctggaatttttcatccctaatttttgtttttgataagctttttatcaatatactatgtaaacagcttccatttatagatatcttgagaggatagaaaaaagaatctaaaactttattttaamgagtttattaaaagaataaaaaattcataaaattattcttcttaaagcctccattttcctgctttgcggaatgtcacaatagtcatatatacatatggttgcatggatgggttatatatagggattggcatcctcctattaaattttaaccatgacattttttattgaatttcccaatgacctccaaataaggggctttctcaggagacaaacagggtcagatctgtactgttagctaatccaagtacatttttaataaaaggagtttta

SEQ ID NO: 440612 - DNA, 564 bp, Homo sapiens
ttgtctgctgttctgaaatgcacttgtgtaaatcaggaattgcaacaagagaattgatcttggcttcataaatacttcctatgaacttttgaaacccaatttgtatctttatgtatagttgccacaaggataataactgaaaattgtttgtgaactctaaaactctagcctcctggaatttttcatccctaatttttgtttttgataagctttttatcaatatactatgtaaacagcttccatttatagatatcttgagaggatagaaaaaagaatctaaaactttattttaaaragtttattaaaagaataaaaaattcataaaattattcttcttaaagcctccattttcctgctttgcggaatgtcacaatagtcatatatacatatggttgcatggatgggttatatatagggattggcatcctcctattaaattttaaccatgacattttttattgaatttcccaatgacctccaaataaggggctttctcaggagacaaacagggtcagatctgtactgttagctaatccaagtacatttttaataaaaggagtttta

SEQ ID NO: 440613 - DNA, 536 bp, Homo sapiens
gggctgttgaagtctccagctcttattgtattaggggtctctctctatatataacatgaataatatttgctttacatatctgggttctccagtattggatgcatatgtaagtgttgtatcatcttgctgaattggtccctttatcatataataactttgtctctttttgtagtttttttctaaaaatctattttgtgtgatgtaagtatggttacttctgctcttttttggtttccatttgtatggaatatcttcttccaaccttttatttccatctatgtatgtcttcataggtgaagcgtgtttcttataaattattgggtcttgttttttatccactgtaccactctaagtcttccaattggagagtttagtacatttacattcagtgttattattgataagttaggactaactcctgccattttattagttttctggttgttttgtkgtcttctcttctttccttcctttctgtcttcttttagtgaaggtgattttctctggtggtatgatttttttttttactttttgtg

SEQ ID NO: 440614 - DNA, 625 bp, Homo sapiens
gaaaaaaatgctttcatttgttatttaaacatccattctatatttgagcaatttccactataagagttagccattttttccttgatggtaatattaccctcaatactaagtactaaaaatattgcctaaatgctttagatcagaagatgagaaaactaattatttctaaatggcttaattttgattgtctatatgtctcactcttgttycccttccctgaacaaggaagaagaaatttatttcattcttaattcaatcacaagagcatccttgttgagccaaccagagccaattactgttgtgtgggttgtatgtgtggcagttcagtgaaaccgaagacatttgatgcagttatgatgaattttattcaatctcatgccaatgactaagagtaactgcttaatagggagagtgttttcttccaatttgagactgcggagcactctcttagcaagaaactctggcttcaatgaaagtgcacctgagcccaggcatatttgatcactctttccatgtgttaaaaagagtcctgtttctttctggaattttgattgcatctgtaaacactggcaacatttatttgcttcacatcattttctaaatctattaactgtaggaaaaggaa

SEQ ID NO: 440615 - DNA, 583 bp, Homo sapiens
gtaaccaatatacaaaaatctgtaatcactaaaaatagaaagcaatgaattaaaacatactactggaaagaatcatttaaccgcaaatgaagacagtragaaaggaagaaaggaaggctcgagttacaaaaaagccagaaaacaagctacaaaatggcagcagtttttttttatcaataagaacactgaatgtaaatggattcaattctccaattaaaaggcatagaatggctgagtgcttaaagaaacaacactcgggtatatgctgtgtacaagaaacctacttcacatatgaagacacacataaacttagagaaaagggatggaaatagatattccatgaaacagaaaccaaaaaagaccaggagaaaccatacttatgttagatacaatagactacaaatcaaagactgtaaaaggagacaaaaaagatcactatatgataataaagaggtcaatacagcaagaggatataacaattataaatgtctatgcactcaacactggacctcccaagcaaacattaatagatctaaaaggagagacaactgcaataaaataatagtaggggacttgaacagcc

SEQ ID NO: 440616 - DNA, 527 bp, Homo sapiens
atccaaattaaaaaggagtaagtaaaaatagccttgtttacagataacatgrtcttagaactaaagactccaccaaaagaaaactagttgaattgataagcaaattcagtaaagtagcagaatacaaaataaacatatcaaatcaatagcactggtgtataccaatagtgcacaatatgaaaaatgaagaaagcaaccccctttacaaaagccacaaagaatataaaattcctaagaatcaatttaagaaaagatagggatgatctatgcaggaaaaactgaaaaactggtgaaaggaattgaagaggatacacagaaatggaaaggcagtttatgctcattgattggaagaattaatattgttaaaatgacaatactatcagaagcaatttacagattcaatgcaatctatcaaaatgccaatgcaatcttcacagaaatagaaaaaagaattctaaaacttatgtggaattacaaaggattctacatagccaaagcaagtctgagcaaaaagaacaaagctggag

SEQ ID NO: 440617 - DNA, 577 bp, Homo sapiens
gatgctcactttcaccacggttattcaacaaaacactggaagtccttgccagaagaattacgaagaaataaaaggcatccaaattaaaaaggagtaagtaaaaatagccttgtttacagataacatgatcttagaactaaagactccaccaaaagaaaactagttgaattgataagcaaattcmgtaaagtagcagaatacaaaataaacatatcaaatcaatagcactggtgtataccaatagtgcacaatatgaaaaatgaagaaagcaaccccctttacaaaagccacaaagaatataaaattcctaagaatcaatttaagaaaagatagggatgatctatgcaggaaaaactgaaaaactggtgaaaggaattgaagaggatacacagaaatggaaaggcagtttatgctcattgattggaagaattaatattgttaaaatgacaatactatcagaagcaatttacagattcaatgcaatctatcaaaatgccaatgcaatcttcacagaaatagaaaaaagaattctaaaacttatgtggaattacaaaggattctacatagccaaagcaag

SEQ ID NO: 440618 - DNA, 527 bp, Homo sapiens
atccaaattaaaaaggagtaagtaaaaatagccttgtttacagataacatgatcttagaactaaagactccaccaaaagaaaactagttgaattgataagcaaattcagtaaagtagyagaatacaaaataaacatatcaaatcaatagcactggtgtataccaatagtgcacaatatgaaaaatgaagaaagcaaccccctttacaaaagccacaaagaatataaaattcctaagaatcaatttaagaaaagatagggatgatctatgcaggaaaaactgaaaaactggtgaaaggaattgaagaggatacacagaaatggaaaggcagtttatgctcattgattggaagaattaatattgttaaaatgacaatactatcagaagcaatttacagattcaatgcaatctatcaaaatgccaatgcaatcttcacagaaatagaaaaaagaattctaaaacttatgtggaattacaaaggattctacatagccaaagcaagtctgagcaaaaagaacaaagctggag

SEQ ID NO: 440619 - DNA, 527 bp, Homo sapiens
atccaaattaaaaaggagtaagtaaaaatagccttgtttacagataacatgatcttagaactaaagactccaccaaaagaaaactagttgaattgataagcaaattcagtaaagtagcagaatacaaaataaacatatcraatcaatagcactggtgtataccaatagtgcacaatatgaaaaatgaagaaagcaaccccctttacaaaagccacaaagaatataaaattcctaagaatcaatttaagaaaagatagggatgatctatgcaggaaaaactgaaaaactggtgaaaggaattgaagaggatacacagaaatggaaaggcagtttatgctcattgattggaagaattaatattgttaaaatgacaatactatcagaagcaatttacagattcaatgcaatctatcaaaatgccaatgcaatcttcacagaaatagaaaaaagaattctaaaacttatgtggaattacaaaggattctacatagccaaagcaagtctgagcaaaaagaacaaagctggag

SEQ ID NO: 440620 - DNA, 540 bp, Homo sapiens
caatagcactggtgtataccaatagtgcacaatatgaaaaatgaagaaagcaaccccctttacaaaagccacaaagaatataaaattcctaagaatcaatttaagaaaagatagggatgatctatgcaggaaaaactgaaaaactggtgaaaggaattgaagaggatacacagaaatggaaaggcagtttatgctcattgattggaagaattaatattgttaaaatgacaatactatcagaagcaatttacagattcaatgcaatctatcaaaatgccaatgcaatcttcacagaaatagaaaaaagaattctaaaacttatgtggaattacaaaggattctacatagccaaagcaagtctgagcaaaaagwacaaagctggaggcgtaacactacctgatttcaaaatttactacaaagctgtagcaatcaaaacagcattgtgctggcataaaagcaaaccaatggaacaggatagagaacccagatataaatccgtgtatttacagccagcttattttcaacaaagttcccaagagc

SEQ ID NO: 440621 - DNA, 583 bp, Homo sapiens
gttatttctcgagctaaatattttaggccgaaaaaaatgtgttggggctgggtgtggtggctcatgcctgtaatcccagcactttggaaggctgagtcaggtggatcacctgaggtcgggagtttgagaccagcctgaccaacatggagaaaccccgtttytactaaaaatataaaattagccaggtgtggtggtgcatgcctgtaatcccagcctcttgggaggctgaggcaggagaatcgcttgaacccgggaggtggaggttgtgttgagccgaaatggtgccattgcactccagcctgggcaacaagagcaaactccatctctctctctctcttttctctctctctttcacacacacacacacacacacacacacacacacacacacacacacacaaagtgttggggcatccattctgcaccttttcaattttgaccttcctggccctgcactgtactgcagttaccaaacattctggcattctattttatttgtaatttaatcaatcacaaactccatgtgacacccaagtcagacatgaattgtgcccaggaaaatgccacatagctggacatcatt

SEQ ID NO: 440622 - DNA, 607 bp, Homo sapiens
taagtggtctaaatgcccccacttgaaaggcacagagtgacaagttagattacaaaagcaaggcccatctgtctgctgtaagagacccagcttatacatgaagacacttataaggcaatacataatgacaaaagtttcaattcaacaagaagacttaactattctaaatatatatgtacacaaaattggagcacccagattaacaaaacaagtactagtagacctatgaaaagacctagacagctacacaataatagtgggggacttcaataccccgctgaaagcatttgacagatcaatgaggcagagagctaacaaagaaattctggacttagactcacttttgagcaaatgaatctaatgaatgtcgacagactactccacccatcaaatacagaatatacatttttctcatctgcacwtagaatgtactcaaatattgaccacatgcaaggccatacagcaagcctcaataaattcaaagtaatgaaaattatactaaccattctctcaaaccacagtggaataaaaaatagaaatcaataccaagacaatctctcaaaaacacacaattatatggaaattaaacaacttgctcctgaatgac

SEQ ID NO: 440623 - DNA, 583 bp, Homo sapiens
gttatttctcgagctaaatattttaggccgaaaaaaatgtgttggggctgggtgtggtggctcatgcctgtaatcccagcactttggaaggctgagtcaggtggatcacctgaggtcgggagtttgagaccagcctgaccaacatggagaaaccccgtttctactaaaaatataaaattagccaggtgtggtggtgcatgcctgtaatcccagcctcttgggaggctgaggcaggagaatcgcttgaacccgggaggtggaggttgtgttgagccgaaatggtgccattgcactccagcctgggcaacaagagcaaactccatctctctctctctcttttctctctctctttcacacacacacacacacacacacacacacacacacacacacacacacaaagtgttggggcatccattctgcaccttttcaattttgaccttcctggccctgcactgtactgcagttaccaaacattctggcattctattttatttgtaatttaatcaatcacaractccatgtgacacccaagtcagacatgaattgtgcccaggaaaatgccacatagctggacatcatt

SEQ ID NO: 440624 - DNA, 580 bp, Homo sapiens
cattctggcattctattttatttgtaatttaatcaatcacaaactccatgtgacacccaagtcagacatgaattgtgcccaggaaaatgccacatagctggacatcattgcatttagtcagatgttctttaagaatttaattcaatcatttttcccccaaaattttgatgttaggagacatggggaataaagagtcacacccatgttatagaataaagcaatggtgtatcattggtcctattataatttcaacagattctcccaaattttgtttacattagataaaattgaattggagaaatgaacatgatggtagtgtagtgtttgagcactatgcatcatatactggaaaaaaggcattaggtattttttgaaagcataccaaatataaaaaatgagtaacaacttctttaaacatatttgtcacagtaacttttttaatatgtgtatcctttatgggtattttctccaatggttatttttgattttatgtctcctactcatagctgtgtcactgttagttggaatcagyacataaatttagtgtaaatttgtgcttgtgttgacagaatacgtctgt

SEQ ID NO: 440625 - DNA, 646 bp, Homo sapiens
aaaaactaaaattagaaacctgcaatagaaagggaaaaagggtagaggaggctgcagtatcctgggaagagccagggactgaaatcagaaggaggctttgctgtaacagaactgtgagcacattgcttaacatcttaaagcctcagtattctcacctacatcaaggggatagcaatatcccctttgcagatgtttatttaagacatccttcctatgtacagacattgggcttgagatcgagtttcccacaaagatgaataagccacattcaatgccctcaaaataatttggagcctagtggaggaatgagtaacatatccatatgaaaaaattatgctcactgaatataggatcagcttttgaatttcctactcagaaacggtaaaacgtaacaatgataggcatggatttatgccagatgactttcaatccaggctcttctacttcatagttgtaaaaaatcaggcaagttatttaacctattgttggaaatgaaggaaataaaggaattgttgtgaatattaaataatacatgtaaatatggrgaacatagtaagcattcaataaaacattagctctaaagtttgctaaaggtacccctgcacttgaggctgaagatgacagtcttgaggggcctccttgtaaa

SEQ ID NO: 440626 - DNA, 551 bp, Homo sapiens
aaagagtgtggatgacttaggggtggacacacagtggatccagaggtgcttggaaggaaggctttgccctcaaactgccctctgcctgttcattcaccaacgaacaagaggcctagacctggaaaaggaaatctttatgttccacagtcaggaaaaagacaaactaccaactatcctataagacagtactaagttcaccttgaaagtattaagagaagtgaaagggaaacaaacaaaacaaaacacataaccaataggtaagtgacatggatttctaaaaatgacttttagaggcattatagcctagttaaagcacatacagtacagaatgggtcagaactgagttaaatccaagataagccacttctcagctgagagacctttcagtttatataaagcttgatgataatgaatataagttcctggtgcgtagttggactggcaataaatagtatttattaaaattatcttaatctgtatcttattttctccttccaaaaacacatttrtaatctgtcaacccaaattttattaatcaagttttaatgttt

SEQ ID NO: 440627 - DNA, 517 bp, Homo sapiens
agagctaatttactgtttgcttgagagtagtctaggatggggagcagaaaattagatacagccaattttcattatcagaaagcctaaaacattaaacttactattgacctagaagagttgtatactattaagtaataggtgacttactttaaaggaaaaaaaccctcaaagtcctacataaaaggaaataacacatcaaacatacattttcttgatcttgctatatttataaattagtttctaggggattttaagggtgtatataagatgctcaatttacaataatatgtcatgttctaactcttcattcctaatgtttctttttctttaacaaacctagagcyttaactttttattttgatgtgtttaaagggctaattttctaggaatttaatgaaatattactattgtaataattattactaattataaatattgtgataattattagtaatgtaataatactattgtaactatctgcttagataaagatgtaacttcttaagggttaaggaga

SEQ ID NO: 440628 - DNA, 592 bp, Homo sapiens
aagccactggctcatggacaatgagagtgactgctgcatcaatattaatgaacactaaatatttccttgatgattttaatactagctcattaactgaactttataatatactgggaagggcacttgaattttctttcagttcttaaatgttgaagtgtgagtctgatattaaatacccttggcacttgttataaattcctgctaaaataygacttgaaagttgtttgtaagtataaatgccatgtaaaattatttggagagattaattcatcaaataacccataaattactgtgggagattaacacatcaaaaaagtctagcaacaaaatgtgtaccttttccttggtatctgtatggacatctagtagaattgtgaaatgggccacttgtttcttaagcactctggttttcccagtctctgttcatgtttaactcttattcgaatccacataccttttctagccacttgaaattctctttgctatgtcaaaacttgctttcacatagctcacaaacttaggcagtctctgattttaattggaaagaaaacctcaagttaaataaaatgaaattaaaatcagtaggtaaatc

SEQ ID NO: 440629 - DNA, 592 bp, Homo sapiens
aagccactggctcatggacaatgagagtgactgctgcatcaatattaatgaacactaaatatttccttgatgattttaatactagctcattaactgaactttataatatactgggaagggcacttgaattttctttcagttcttaaatgttgaagtgtgagtctgatattaaatacccttggcacttgttataaattcctgctaaaatatgacttgaaagttgtttgtaagtwtaaatgccatgtaaaattatttggagagattaattcatcaaataacccataaattactgtgggagattaacacatcaaaaaagtctagcaacaaaatgtgtaccttttccttggtatctgtatggacatctagtagaattgtgaaatgggccacttgtttcttaagcactctggttttcccagtctctgttcatgtttaactcttattcgaatccacataccttttctagccacttgaaattctctttgctatgtcaaaacttgctttcacatagctcacaaacttaggcagtctctgattttaattggaaagaaaacctcaagttaaataaaatgaaattaaaatcagtaggtaaatc

SEQ ID NO: 440630 - DNA, 592 bp, Homo sapiens
aagccactggctcatggacaatgagagtgactgctgcatcaatattaatgaacactaaatatttccttgatgattttaatactagctcattaactgaactttataatatactgggaagggcacttgaattttctttcagttcttaaatgttgaagtgtgagtctgatattaaatacccttggcacttgttataaattcctgctaaaatatgacttgaaagttgtttgtaagtataaatgccatgtaaaattatttggagagattaattcatcaaataacccataaattactgtgggagattaacacatcaaaaaagtctagcaacaaaatgtgtaccttttccttggtatctgtatggacatctagtagaattgtgaaatgggccacttgtttcttaagcactctggttttcccagtctctgttcatgtttaaytcttattcgaatccacataccttttctagccacttgaaattctctttgctatgtcaaaacttgctttcacatagctcacaaacttaggcagtctctgattttaattggaaagaaaacctcaagttaaataaaatgaaattaaaatcagtaggtaaatc

SEQ ID NO: 440631 - DNA, 592 bp, Homo sapiens
aagccactggctcatggacaatgagagtgactgctgcatcaatattaatgaacactaaatatttccttgatgattttaatactagctcattaactgaactttataatatactgggaagggcacttgaattttctttcagttcttaaatgttgaagtgtgagtctgatattaaatacccttggcacttgttataaattcctgctaaaatatgacttgaaagttgtttgtaagtataaatgccatgtaaaattatttggagagattaattcatcaaataacccataaattactgtgggagattaacacatcaaaaaagtctagcaacaaaatgtgtaccttttccttggtatctgtatggacatctagtagaattgtgaaatgggccacttgtttcttaagcactctggttttcccagtctctgttcatgtttaactcttattsgaatccacataccttttctagccacttgaaattctctttgctatgtcaaaacttgctttcacatagctcacaaacttaggcagtctctgattttaattggaaagaaaacctcaagttaaataaaatgaaattaaaatcagtaggtaaatc

SEQ ID NO: 440632 - DNA, 587 bp, Homo sapiens
ctcttacacttacacagtgcctattattttatcatttacctggaacttgacagtctacaaactactttcaagtaaactattatatttratcctcataaaagctctgagattcatggtactatcacccccattttaaagataagagatctcaaacaagaaaggttaaattacttgcccaaggtaagagcaatttataattggaattgcgagagaaatgacacaaacttaagtttgtagacttcaagcccaaagcttgtttcaagatgctattgcctagtagaccatgccttttacaaacaacacttaatataacatattaaaaagtaatagggtgaggccgggcgcggtggctcatgcctgtaatcccagcactttgggaggctgaggtgggcagatcacctgaggtcaggagttcaagatgagcctggccgtcatggtgaaaccatgtctctactaaaaaatacaaaaagttagctgggtgtgatggtgggtacctgtaatctcctactcgggaggctgaggcaaggagaattgcttgaacccagagtgtggaggttgcagtgagccgagattgtaccactgcactc

SEQ ID NO: 440633 - DNA, 587 bp, Homo sapiens
ctcttacacttacacagtgcctattattttatcatttacctggaacttgacagtctacaaactactttcaagtaaactattatatttgatcctcataaaagctctgagattcatggtactatcacccccattttaaagataagagatctcaaacaagaaaggttaaattacttgcccaaggtaagagcaatttataattggaattgygagagaaatgacacaaacttaagtttgtagacttcaagcccaaagcttgtttcaagatgctattgcctagtagaccatgccttttacaaacaacacttaatataacatattaaaaagtaatagggtgaggccgggcgcggtggctcatgcctgtaatcccagcactttgggaggctgaggtgggcagatcacctgaggtcaggagttcaagatgagcctggccgtcatggtgaaaccatgtctctactaaaaaatacaaaaagttagctgggtgtgatggtgggtacctgtaatctcctactcgggaggctgaggcaaggagaattgcttgaacccagagtgtggaggttgcagtgagccgagattgtaccactgcactc

SEQ ID NO: 440634 - DNA, 456 bp, Homo sapiens
tggaatgctcttcccacagatctgtctatgactctctctctgtcacttgctctgctctaatgtctctttttcagtgaggcctttcctgatcaccctacaraaaagcacccagcaatattctctattccttttccttgccttgtcttggtagcacttgctccttgctgacatatagaaagaatatgtgtttatgcaatggtgaatgtgatgaccacagatttttccccagccctgttctaggcagagactgggaaatgggtcattcctgtcccctattccaattctctccttctataatggcttattttcctttttaatgttctaacctaatgtcgagcaatttcagttgattttttcataagctggaaggtccatgaaatctctttctatggccattattttctcaaacactgcagtgtcttttttcagtgttttccatatataatgatattccta

SEQ ID NO: 440635 - DNA, 456 bp, Homo sapiens
tggaatgctcttcccacagatctgtctatgactctctctctgtcacttgctctgctctaatgtctctttttcagtgaggcctttcctgatcaccctacagaaaagcacccagcaatattctctattccttttccttgccttgtcttggtagcacttgctccttgctgacatatagaaagaatatgtgtttatgcaatggtgaatgtgatgaccayagatttttccccagccctgttctaggcagagactgggaaatgggtcattcctgtcccctattccaattctctccttctataatggcttattttcctttttaatgttctaacctaatgtcgagcaatttcagttgattttttcataagctggaaggtccatgaaatctctttctatggccattattttctcaaacactgcagtgtcttttttcagtgttttccatatataatgatattccta

SEQ ID NO: 440636 - DNA, 456 bp, Homo sapiens
tggaatgctcttcccacagatctgtctatgactctctctctgtcacttgctctgctctaatgtctctttttcagtgaggcctttcctgatcaccctacagaaaagcacccagcaatattctctattccttttccttgccttgtcttggtagcacttgctccttgctgacatatagaaagaatatgtgtttatgcaatggtgaatgtgatgaccacagatttttccccagccctgttctaggcagagactgggaaatgggtcattcctgtcccctattccaattctcwccttctataatggcttattttcctttttaatgttctaacctaatgtcgagcaatttcagttgattttttcataagctggaaggtccatgaaatctctttctatggccattattttctcaaacactgcagtgtcttttttcagtgttttccatatataatgatattccta

SEQ ID NO: 440637 - DNA, 456 bp, Homo sapiens
tggaatgctcttcccacagatctgtctatgactctctctctgtcacttgctctgctctaatgtctctttttcagtgaggcctttcctgatcaccctacagaaaagcacccagcaatattctctattccttttccttgccttgtcttggtagcacttgctccttgctgacatatagaaagaatatgtgtttatgcaatggtgaatgtgatgaccacagatttttccccagccctgttctaggcagagactgggaaatgggtcattcctgtcccctattccaattctctccttctataatggcttattttcctttttaatgttctaacctaatgtcgagcaatttcagttgattttttcataagctggaaggtccatgaaatctctttctatggcyattattttctcaaacactgcagtgtcttttttcagtgttttccatatataatgatattccta

SEQ ID NO: 440638 - DNA, 564 bp, Homo sapiens
aatggcttattttcctttttaatgttctaacctaatgtcgagcaatttcagttgattttttcataagctggaaggtccatgaaatctctttctatggccattattttctcaaacactgcagtgtcttttttcagtgttttccatatataatgatattcctaggaatatctccttggccttcctatctaaattcacccaatgtggtgttcttcatatttcaagtaaattcaatactgccttcataattgttggcamctttaaacttttattgtccctgataggtaggtgctcatcttattggttaaatgaatgattttggcaatttcgctttttaaattatttttatttttattttgagacagggtctcagtctgttacccaggctggagtgcagtgacgtgatctcagctcactgcagcctcgacatcccaggctcaagcaatcttcccacctcagcctcccaagtagttgggattacagacatgtgccacagcactccactaatttttttctatttttgtagagacaggatcttgttatgtttcccaggctggtctgtaactc

SEQ ID NO: 440639 - DNA, 461 bp, Homo sapiens
ctgccttcataattgttggcaccwttaaacttttattgtccctgataggtaggtgctcatcttattggttaaatgaatgattttggcaatttcgctttttaaattatttttatttttattttgagacagggtctcagtctgttacccaggctggagtgcagtgacgtgatctcagctcactgcagcctcgacatcccaggctcaagcaatcttcccacctcagcctcccaagtagttgggattacagacatgtgccacagcactccactaatttttttctatttttgtagagacaggatcttgttatgtttcccaggctggtctgtaactcatacactcaagtaatcagcccatctgggtctcccaaagtgctgggattacaggcttcagccacaatgcccagcctaaaatgtctttttgatagagtgattttgaagattaagcaggctagtgggtcaagc

SEQ ID NO: 440640 - DNA, 559 bp, Homo sapiens
ttttcataagctggaaggtccatgaaatctctttctatggccattattttctcaaacactgcagtgtcttttttcagtgttttccatatataatgatattcctaggaatatctccttggccttcctatctaaattcacccaatgtggtgttcttcatatttcaagtaaattcaatactgccttcataattgttggcacctttaaamttttattgtccctgataggtaggtgctcatcttattggttaaatgaatgattttggcaatttcgctttttaaattatttttatttttattttgagacagggtctcagtctgttacccaggctggagtgcagtgacgtgatctcagctcactgcagcctcgacatcccaggctcaagcaatcttcccacctcagcctcccaagtagttgggattacagacatgtgccacagcactccactaatttttttctatttttgtagagacaggatcttgttatgtttcccaggctggtctgtaactcatacactcaagtaatcagcccatctgggtctcccaaagtgctgggattacag

SEQ ID NO: 440641 - DNA, 564 bp, Homo sapiens
aatggcttattttcctttttaatgttctaacctaatgtcgagcaatttcagttgattttttcataagctggaaggtccatgaaatctctttctatggccattattttctcaaacactgcagtgtcttttttcagtgttttccatatataatgatattcctaggaatatctccttggccttcctatctaaattcacccaatgtggtgttcttcatatttcaagtaaattcaatactgccttcataattgttggcacctttaaacttttattgtccctgataggtaggtgytcatcttattggttaaatgaatgattttggcaatttcgctttttaaattatttttatttttattttgagacagggtctcagtctgttacccaggctggagtgcagtgacgtgatctcagctcactgcagcctcgacatcccaggctcaagcaatcttcccacctcagcctcccaagtagttgggattacagacatgtgccacagcactccactaatttttttctatttttgtagagacaggatcttgttatgtttcccaggctggtctgtaactc

SEQ ID NO: 440642 - DNA, 559 bp, Homo sapiens
ttttcataagctggaaggtccatgaaatctctttctatggccattattttctcaaacactgcagtgtcttttttcagtgttttccatatataatgatattcctaggaatatctccttggccttcctatctaaattcacccaatgtggtgttcttcatatttcaagtaaattcaatactgccttcataattgttggcacctttaaacttttattgtccctgataggtaggtgctcatcttattggttaaatgaatgattttggcaatttcrctttttaaattatttttatttttattttgagacagggtctcagtctgttacccaggctggagtgcagtgacgtgatctcagctcactgcagcctcgacatcccaggctcaagcaatcttcccacctcagcctcccaagtagttgggattacagacatgtgccacagcactccactaatttttttctatttttgtagagacaggatcttgttatgtttcccaggctggtctgtaactcatacactcaagtaatcagcccatctgggtctcccaaagtgctgggattacag

SEQ ID NO: 440643 - DNA, 461 bp, Homo sapiens
ctgccttcataattgttggcacctttaaacttttattgtccctgataggtaggtgctcatcttattggttaaatgaatgattttggcaatttcgctttttaaattatttttatttttattttgagacagggtctcagtytgttacccaggctggagtgcagtgacgtgatctcagctcactgcagcctcgacatcccaggctcaagcaatcttcccacctcagcctcccaagtagttgggattacagacatgtgccacagcactccactaatttttttctatttttgtagagacaggatcttgttatgtttcccaggctggtctgtaactcatacactcaagtaatcagcccatctgggtctcccaaagtgctgggattacaggcttcagccacaatgcccagcctaaaatgtctttttgatagagtgattttgaagattaagcaggctagtgggtcaagc

SEQ ID NO: 440644 - DNA, 559 bp, Homo sapiens
ttttcataagctggaaggtccatgaaatctctttctatggccattattttctcaaacactgcagtgtcttttttcagtgttttccatatataatgatattcctaggaatatctccttggccttcctatctaaattcacccaatgtggtgttcttcatatttcaagtaaattcaatactgccttcataattgttggcacctttaaacttttattgtccctgataggtaggtgctcatcttattggttaaatgaatgattttggcaatttcgctttttaaattatttttatttttattttgagacagggtctcagtctgttacccaggctggagtgcagtgacgtgatctcagctcactgcagcctcgacatcccaggctcaagcaatcttcccacctcagcctcccaagtagttgggattacagacatgtgccacagcactccactaatttttttctatttttgkagagacaggatcttgttatgtttcccaggctggtctgtaactcatacactcaagtaatcagcccatctgggtctcccaaagtgctgggattacag

SEQ ID NO: 440645 - DNA, 461 bp, Homo sapiens
ctgccttcataattgttggcacctttaaacttttattgtccctgataggtaggtgctcatcttattggttaaatgaatgattttggcaatttcgctttttaaattatttttatttttattttgagacagggtctcagtctgttacccaggctggagtgcagtgacgtgatctcagctcactgcagcctcgacatcccaggctcaagcaatcttcccacctcagcctcccaagtagttgggattacagacatgtgccacagcactccactaatttttttctatttttgtagagacaggatcytgttatgtttcccaggctggtctgtaactcatacactcaagtaatcagcccatctgggtctcccaaagtgctgggattacaggcttcagccacaatgcccagcctaaaatgtctttttgatagagtgattttgaagattaagcaggctagtgggtcaagc

SEQ ID NO: 440646 - DNA, 332 bp, Homo sapiens
attatttaaaatttagctatattaaatgttttctgatttagtaaacatacataaggcctatttatagttgaatgscagtcttacaaaacctaaacaaccttggtttactctatctgtgggaaaagcatttttagtagaatgcttgcgcatcttcctacattcctgtaatcaaacagtatttatcatcaactatgttggtgactctcactttgacataggctgaaccagaaatcctaggaaaaactgatgacagaaagctaaggggaaggataggaagctgggaaaccctgggaaaggagggattatattacacatgttatgggaactagttt

SEQ ID NO: 440647 - DNA, 332 bp, Homo sapiens
attatttaaaatttagctatattaaatgttttctgatttagtaaacatacataaggcctatttatagttgaatgccagtcttacaaaacctaarcaaccttggtttactctatctgtgggaaaagcatttttagtagaatgcttgcgcatcttcctacattcctgtaatcaaacagtatttatcatcaactatgttggtgactctcactttgacataggctgaaccagaaatcctaggaaaaactgatgacagaaagctaaggggaaggataggaagctgggaaaccctgggaaaggagggattatattacacatgttatgggaactagttt

SEQ ID NO: 440648 - DNA, 332 bp, Homo sapiens
attatttaaaatttagctatattaaatgttttctgatttagtaaacatacataaggcctatttatagttgaatgccagtcttacaaaacctaaacaaccttggtttactctatctgtgggaaaagcatttttagtagaatgcttgcgcatcttcctacattcctgtaatcaaacagtatttatcatcaactatgttggtgactctcactttgacatasgctgaaccagaaatcctaggaaaaactgatgacagaaagctaaggggaaggataggaagctgggaaaccctgggaaaggagggattatattacacatgttatgggaactagttt

SEQ ID NO: 440649 - DNA, 574 bp, Homo sapiens
cacatctatatatgatttgtgtttgtgtgtttgtgtgtgtgtatgcatgcatgtaaataaaatatacctctaagtctttgtaaccttaagacggtggggcaaaatatttttattttctgttgttgattatttaaaatttagctatattaaatgttttctgatttagtaaacatacataaggcctatttatagttgaatgccagtcttacaaaacctaaacaaccttggtttactctatctgtgggaaaagcatttttagtagaatgcttgcgcatcttcctacattcctgtaatcaaacagtatttatcatcaactatgttggtgactctcactttgacataggctgaaccagaaatcctaggaaaaactgatgacagaaagctaaggggaaggataggaagcygggaaaccctgggaaaggagggattatattacacatgttatgggaactagtttgtatgtgcggggcacagagcatacacttagataagaagggggtcataaaaccagaaaggcaataaatagaatgttatgagcatgaactctagatgcaaactgttcaggttcaattcc

SEQ ID NO: 440650 - DNA, 558 bp, Homo sapiens
gctaggacgggagcagcaacttttcaacaccaatcgcttttttagatggcctcctttctagccttgttagttgcccaaattctgaaaaaaacaagaactaagactctagaaggagatccgagaggcagacgtgtgtctctgtgtgtstttgtgtgtgtgtgtaggtgcgtgtgcatgtagacgaaggaggaatcaggagtaatgccaagaatgagaatcaaatctgtataagcagttcagaaaaggggcatcatgagtcgctcttctcagtgctgccccaagggttccacagtttgctccttccatcattcacttgaataaaacctttcaatggtctctctatggccttcagagttaaatcaaaactattccttggaatgacttaaaacccatactacttctaaagcctcatctcttgactctctcgcaccaagctcactgagcttccagccctaccaaatttcttcagtaacaaactctcacatctcagagctttgcaaatgctgctccctctgtctgaaaagtaacctctacctcctccaatagcaaactgctact

SEQ ID NO: 440651 - DNA, 558 bp, Homo sapiens
gctaggacgggagcagcaacttttcaacaccaatcgcttttttagatggcctcctttctagccttgttagttgcccaaattctgaaaaaaacaagaactaagactctagaaggagatccgagaggcagacgtgtgtctctgtgtgtgtttgtgtgtgtgtgtaggtgcgtgtgcatgtaracgaaggaggaatcaggagtaatgccaagaatgagaatcaaatctgtataagcagttcagaaaaggggcatcatgagtcgctcttctcagtgctgccccaagggttccacagtttgctccttccatcattcacttgaataaaacctttcaatggtctctctatggccttcagagttaaatcaaaactattccttggaatgacttaaaacccatactacttctaaagcctcatctcttgactctctcgcaccaagctcactgagcttccagccctaccaaatttcttcagtaacaaactctcacatctcagagctttgcaaatgctgctccctctgtctgaaaagtaacctctacctcctccaatagcaaactgctact

SEQ ID NO: 440652 - DNA, 558 bp, Homo sapiens
gctaggacgggagcagcaacttttcaacaccaatcgcttttttagatggcctcctttctagccttgttagttgcccaaattctgaaaaaaacaagaactaagactctagaaggagatccgagaggcagacgtgtgtctctgtgtgtgtttgtgtgtgtgtgtaggtgcgtgtgcatgtagacgaaggaggaatcaggagtaatgccaagaatgagaatcaaatctgtataagcagttcagaaaaggggcatcatgagtcgctcttctcagtgctgccccaagggttccacagtttgctccttccatcattcacttgaataaaacctttcaatggtctctctatggccttcagagttaaatcaaaactattccttggaatgacttaaaacccatactacttctaaagcctcatctcttgactctctcgcaccaagctcactgagcttccagccctaccaaatttcttcaktaacaaactctcacatctcagagctttgcaaatgctgctccctctgtctgaaaagtaacctctacctcctccaatagcaaactgctact

SEQ ID NO: 440653 - DNA, 558 bp, Homo sapiens
gctaggacgggagcagcaacttttcaacaccaatcgcttttttagatggcctcctttctagccttgttagttgcccaaattctgaaaaaaacaagaactaagactctagaaggagatccgagaggcagacgtgtgtctctgtgtgtgtttgtgtgtgtgtgtaggtgcgtgtgcatgtagacgaaggaggaatcaggagtaatgccaagaatgagaatcaaatctgtataagcagttcagaaaaggggcatcatgagtcgctcttctcagtgctgccccaagggttccacagtttgctccttccatcattcacttgaataaaacctttcaatggtctctctatggccttcagagttaaatcaaaactattccttggaatgacttaaaacccatactacttctaaagcctcatctcttgactctctcgcaccaagctcactgagcttccagccctaccaaatttcttcagtaacaaactctcacatctcagagctttgcamatgctgctccctctgtctgaaaagtaacctctacctcctccaatagcaaactgctact

SEQ ID NO: 440654 - DNA, 621 bp, Homo sapiens
atctctgaggttttaccaaatttccgttatgagaaaagacatagctttacacacgaggtcataatacagtaatatttatcaacttagaaagctaaaacacattctcaaatatttcgatttgtaactggtgygatgcaatactgaaagcctaggaaagtaatttgtatgtggaaactgcctcaaagttgaaggtgggaaagttggttctacttcctatggtgtacctccttgttcactataaaacccttcggttttcttaattatcaaaaatatcttgtatatattcacagtgctaattcagtaggttagtcctgtattggctagtgtgatttttcataccaagaagcgactgtacttccaaatctcatttgcgttttttgacacaggaagagaaaacatccgagggagttaaggttttctcactttttatacaattacaaaaatttaccaattactatgggcagcaattagatagaagaagggcccaagattcataatgccctagaaaaggtagtaatgttcagtaggattaaacttactaaacttcttgactgctacataagttaccaaggattacctttgaagatttcaataagtaattgaaacaattagataatagct

SEQ ID NO: 440655 - DNA, 621 bp, Homo sapiens
atctctgaggttttaccaaatttccgttatgagaaaagacatagctttacacacgaggtcataatacagtaatatttatcaacttagaaagctaaaacacattctcaaatatttcgatttgtaactggtgcgatgcaatactgaaagcctaggaaagtaatttgtatgtggraactgcctcaaagttgaaggtgggaaagttggttctacttcctatggtgtacctccttgttcactataaaacccttcggttttcttaattatcaaaaatatcttgtatatattcacagtgctaattcagtaggttagtcctgtattggctagtgtgatttttcataccaagaagcgactgtacttccaaatctcatttgcgttttttgacacaggaagagaaaacatccgagggagttaaggttttctcactttttatacaattacaaaaatttaccaattactatgggcagcaattagatagaagaagggcccaagattcataatgccctagaaaaggtagtaatgttcagtaggattaaacttactaaacttcttgactgctacataagttaccaaggattacctttgaagatttcaataagtaattgaaacaattagataatagct

SEQ ID NO: 440656 - DNA, 610 bp, Homo sapiens
ataatgctgtttttcaacatcattatacaattaaattttaaacataattcttccaagctagcaaaagtgccttcaaatcttcccgagatatatttaaaggttacagtcagtggaaactttwgcataaaagaagactttcataaaagtacttatttccctctactgcagtgagccaaatcttgattcctgaacactcctagctgacttcatttgtgatcacttttcagcctatattcttccctgactgttagatggcactgtgccctctaacaaagtgctatgccaatttttttaggatacacatgccaatcaaatgtgagattcaatagagaacactgcaaacaccatttccttaggaggacatccattatctctggcagtaacgtgtatttaacaccaaatagatcatgagtgccaaaattaaaattatgaatcatatacaaaaacatagtatagtagatttagatgtctggctctgccagcaaaacaggttgaattctagaggcccatggaaatccattaggcatacaggtatccagctgctcaacactgtctttggaatttgaagtgattttttaaaaagtcctgttattataaaagtaagctgtgt

SEQ ID NO: 440657 - DNA, 612 bp, Homo sapiens
tgtgtctcctttcagccagtttatcagctccctgcccatctttcttaagtgaaaaaataaccaattatatatttgtcttttaaaaaatcttagctggtggtccacagctcacgtgatgctcttcaaattccttaacttaaaaataatatgcccaaatgatatggttcaaatctacttcccggcctcatttccaaacaaccataacatttcatgatttatgcctttgcacatgctgggcccttggcaagaaagccatacctcttttttccctctgtgagatgctattcattctttaagtccacatctgatgattccctactctaagatgtctgctcccgtttcccaaggtaaagggaaacatgtatttccattggttcatatagtattttatccatacrtctgtcaccctgattaattacactacacttggacttttcataatgtctctcttcgtgatagactgtgaatccctcaaggacaatgccattcattgtttttccctctgtttcttatagagaagtgcctggcacatagtaggtgctcagcccatgtctgtctcttgaaagtactggaatgcttctatccacagaaactgttttaaattatgcaggc

SEQ ID NO: 440658 - DNA, 599 bp, Homo sapiens
ggaactgccaaactattttttgtaggagctgtatcattttgcattcccaccagcaatrtataagggctttaatttttccactttcccaccaatacttgttgtcatgtctttttttattatcacaatcataatgggtaggaaaaggtatcttatactggttttgatatacattttttactggataagataacatatttcatattccctatttctatatcttctttcaagaaatgtctattcaagtcatttgcccatttttcaatagagttgtcttttcattgttgtggcattagaagagttctttattatttgtatataattcccttatcaaagacataatttaaaaatattttcttccattccatttcccccttaggactcataattttgctgtggcttaaagattataaaacagattaggaaatgaaaaagtaagaagctgctctaggacgggttaaacaatgtcagcatgaatgcaagaatactaaactcaaaatataatttccttccctcacacaatagtcaagctctggagcctttgtttcacagttaatgaaaaataacatgttttcagactgtggatacatgaatactaaaaa

SEQ ID NO: 440659 - DNA, 606 bp, Homo sapiens
ttatcaggtccttaggatgcaggttcccacatcagcatagcttgagtactcccttcccttgaaagtaagtgtgaaaaccacgttttcccctacaaagcctcattatgcgacctgattctcccttagcatgtgggaagcaattaaaatcctatagacctgggctgggtgctgtggctcatgcctgtaatcccagcactttgggaggctgaggtgtgtggatcacttgaggccaggagttcaagaccagcctggccaaagtggtgaaaamccatctctacgaaaaatacaaaaatgagctggacatgttggcacacacctgtattcccagctaccccagaggctgaggcaggagaatggcttgagcctgggaggcggaggctgcagtgacctgagatcacgccactgcactcccgcctgggcgacagagcaaaactccatctcaaaaaagaaaaaaaccctatagacctgaccattcagctgcagagaaagcaggaaaaccatttaagagctctactaccttagagttagaaattagagaaaactaaggatagaggcacaaacacacgctgagaggtgagaatatcacctgcatgaaggcaaggtggg

SEQ ID NO: 440660 - DNA, 508 bp, Homo sapiens
aattataacatgtgaatatgctgtctcttccactaggttggccactccttgaattttaggactgtgtcttacttgtcttcatattttctttttttcccagaatagtatcttgaggatacattaggcctatggtaaattttatttaacaaaattgaattaaagggagataactggaggtatggtatcatctattaaagtaaaggagtgtgtatgtgttttattcctaactcaaaagagagaattggttctgaatgcaagagcttttcctcatgttaccaataataaatctgatatcctcaaacytaagagtttccttctaggctttctgttcactggaattggaaattggactagttatgtctttctatttaaatatacatgtaactgtaaaataaatatacaggaatctgtagtgtccacatttacaaaaattaaccaagaattttatgccctattgtataataatgaaatgtagatttcccattgggaaacaactcctcaattcaag

SEQ ID NO: 440661 - DNA, 508 bp, Homo sapiens
aattataacatgtgaatatgctgtctcttccactaggttggccactccttgaattttaggactgtgtcttacttgtcttcatattttctttttttcccagaatagtatcttgaggatacattaggcctatggtaaattttatttaacaaaattgaattaaagggagataactggaggtatggtatcatctattaaagtaaaggagtgtgtatgtgttttattcctaactcaaaagagagaattggttctgaatgcaagagcttttcctcatgttaccaataataaatctgatatcctcaaacctaagagtttccttctaggctttctgttcaytggaattggaaattggactagttatgtctttctatttaaatatacatgtaactgtaaaataaatatacaggaatctgtagtgtccacatttacaaaaattaaccaagaattttatgccctattgtataataatgaaatgtagatttcccattgggaaacaactcctcaattcaag

SEQ ID NO: 440662 - DNA, 508 bp, Homo sapiens
aattataacatgtgaatatgctgtctcttccactaggttggccactccttgaattttaggactgtgtcttacttgtcttcatattttctttttttcccagaatagtatcttgaggatacattaggcctatggtaaattttatttaacaaaattgaattaaagggagataactggaggtatggtatcatctattaaagtaaaggagtgtgtatgtgttttattcctaactcaaaagagagaattggttctgaatgcaagagcttttcctcatgttaccaataataaatctgatatcctcaaacctaagagtttccttctaggctttctgttcactggaattggaaattggactagttatgtctttctatttaaatatacatgtaacygtaaaataaatatacaggaatctgtagtgtccacatttacaaaaattaaccaagaattttatgccctattgtataataatgaaatgtagatttcccattgggaaacaactcctcaattcaag

SEQ ID NO: 440663 - DNA, 605 bp, Homo sapiens
acatatccaatactgacagtaattgtgtaaagtacatgttaacagccttaccttccagactagcacagctgccactgaccattccaccatgggttatttaaaccaatcttctatctgaatagcgaaaacatattttattgccttaatcaaaactgagattggtttctttgggtaagttatacaaaaagagcaaattaagactcaaattctggaaatttgtctgctaggagaagtattatgtctgctaagactggggaaagtggctattgattgtttaaaaaatagacaggtacctagaatggtagttaaattttttttttttgctttatttttctgtaactgaatgaaagtagtaacctctccaagggattttggtgacctgtaagattgggattttgtaatatgagattcaaagttttacccagtcaccgaatcatctgtcactcagcaggtggatatgaggaggaaacagctgcccttttccccgaacaattactgcctttctatgattctatgtgaaatttgttaacattttagattcattctaccccttmggagagtattacaaatgataatgctactaccattgaaaataattaagtgca

SEQ ID NO: 440664 - DNA, 574 bp, Homo sapiens
aacagtgaacttttattgtgataactggcttggctggaaattcccatttgttactcacagttttcacgtttctttttccagagtaatttcccttgagacttttctttttttttgatagytaccatttgtgtatgtgtgtgtgatactaatatgtgcagtgctatatcctgcctttcattttgttcttctttatgtttttcttattttcttcacttaacgagtttatgtaatatttcacgaaaatgatataactcatcctggctaaacactcaataataggctttctaatcaggatcaatattataatttatgttttactttgaatagagtgtgtttttgtatgattcaagcatttacttgcagaaggctcctagagaaattgaagttgtccgtacctgtatattttgccaaaaccacaagtatcactcatttatttggaagatattgattgtatgccaggcacagttataggctacggaaataggtaaagaagacactcaggtgcttgcctttgcataacttttattctagtgtaaaagacagaaagataataaatatatatacaatataggta

SEQ ID NO: 440665 - DNA, 543 bp, Homo sapiens
tatgtggctacaaactgctgtgataaaactttcaactggctaatttttatggagaaaatcttgggtcataagattcactctctctctctccttttttaatttatatttttcattctctatagccacttcctgtctcccatcaaagattttaatatatttttgttttttctgtaaggcagtaaagacatcataattcccataaacttacatttaagaaggaattcctgtcataccaatagacaggtaaagargacactcaggtgcttgcctttgcataaattttattctaatggaaaggagacaaagttaataaatacatatacaatataggtagtgacaattactaagacaaaaactgtataactaatatgattaaacagcaaattgtttcttaattttgatgctgattatcgaaggcaagtaaatttaactcgttttattagtctgataaaactactaaatagagtcacagcttcagagatctgacttggtctggtcgcacctctgtctggctgggtatccttaaactaattattaatctct

SEQ ID NO: 440666 - DNA, 549 bp, Homo sapiens
tttctcctatctctagtctcatcagatcactgtgacacaatttgaaaagttaactctagttcttatctccacatgtttacatctttgaatgtaaatttttgacaggcattcaaaaaacattaactagtgactaaaaggggagtggagagaatatatatgtatctactagttaacaaaacaaattccttgttagrctcagttctttcagtttgtaagagctaccaaagaatccttcatctttttcattcagagttttatccccctttgtgttcacagctgagtatcttagagctattaagctgagaatgctctgcagaggagcaaagatacctaaagggaaatgacagttggtgctggggatataaacgtcatttgaatacacctcctctccctctacattttgtatttcttacctctgaatttcatttgaatgcttttctatataaagacatcaagatggtgactcagttgccttaagtatctgataacacaatattcaatacaaaatggtattatcaatggaaagttttgtgtcatgtataatgataa

SEQ ID NO: 440667 - DNA, 544 bp, Homo sapiens
catgttgggttaatttttttattttttctagagacgggtttttctatattgctcaggctggtggtcccagagagtgttaacatttttactggactgctctaaaaataaaagttaagtttttccacttctgacagatcataacaggctatcattgcacactatattataatcctagtggatgataacattactaatgctagagctcttgggggtgtaaatgtcgctaaagatggatttgtaacctgcatgtcttcctacaataggttctcataaagatgcatcttttcctttgcagctgcagttgcgatttgtaaggcttgtttttgtctacagttctactcttgaacctcataatctacccaaagtatttgtttaaaatgagatgtcccatttctgcttactgcacagcactgtaatctgccagacgtggtgasagcccaggattctgtggctgtgctccattttctgaggtagtttgtataaacctcctgtggtcactgcacttaacctcatcctgtaacagctgtttgggcagcctgttgtc

SEQ ID NO: 440668 - DNA, 615 bp, Homo sapiens
  misc_feature (1)...(615): n = A,T,C or G
gttctgtcttaaaccaaactcagtgtttggctaaaytggcatgtaaaccagttctttctgacacctacagtgaattaccataaacctcatggaggaggtagccttgaacagactcactgagagtggaactttagcctgtaatttttattttcagtcatctgtcgcaagataggcaaacttctaagaaacgtcccttgtattattatgtcaatcttaccagtggtttttaattnttttccagggccttgaatctctcgtattttctttttttctcctgcttccttaaataaaatncaaattccccagagaattttgtaaaattcccaatcttactgcagcttnctcttctgtctgtctggncctctctgttcatatgcactgcttagttttcagacctgacaactttttgtctggtagcaaaaaaatgcatgatcaatagtaaaattgtagaaagagtggatcaaggaaaccaggcacccagagataaatggctggatgtctagaaggaagcttgctggatcaaagggtatccaagttttcacagcctttacatcatcaaattgccctgcagaatggctctattaatttgcactctgccaacatagttaatgggct

SEQ ID NO: 440669 - DNA, 615 bp, Homo sapiens
  misc_feature (1)...(615): n = A,T,C or G
gttctgtcttaaaccaaactcagtgtttggctaaattggcatgtaaaccagttctttctgacacctrcagtgaattaccataaacctcatggaggaggtagccttgaacagactcactgagagtggaactttagcctgtaatttttattttcagtcatctgtcgcaagataggcaaacttctaagaaacgtcccttgtattattatgtcaatcttaccagtggtttttaattnttttccagggccttgaatctctcgtattttctttttttctcctgcttccttaaataaaatncaaattccccagagaattttgtaaaattcccaatcttactgcagcttnctcttctgtctgtctggncctctctgttcatatgcactgcttagttttcagacctgacaactttttgtctggtagcaaaaaaatgcatgatcaatagtaaaattgtagaaagagtggatcaaggaaaccaggcacccagagataaatggctggatgtctagaaggaagcttgctggatcaaagggtatccaagttttcacagcctttacatcatcaaattgccctgcagaatggctctattaatttgcactctgccaacatagttaatgggct

SEQ ID NO: 440670 - DNA, 615 bp, Homo sapiens
  misc_feature (1)...(615): n = A,T,C or G
gttctgtcttaaaccaaactcagtgtttggctaaattggcatgtaaaccagttctttctgacacctacagtgaattaccataaacctcatggaggaggtagccttgaacagactcactgagagtggaactttagyctgtaatttttattttcagtcatctgtcgcaagataggcaaacttctaagaaacgtcccttgtattattatgtcaatcttaccagtggtttttaattnttttccagggccttgaatctctcgtattttctttttttctcctgcttccttaaataaaatncaaattccccagagaattttgtaaaattcccaatcttactgcagcttnctcttctgtctgtctggncctctctgttcatatgcactgcttagttttcagacctgacaactttttgtctggtagcaaaaaaatgcatgatcaatagtaaaattgtagaaagagtggatcaaggaaaccaggcacccagagataaatggctggatgtctagaaggaagcttgctggatcaaagggtatccaagttttcacagcctttacatcatcaaattgccctgcagaatggctctattaatttgcactctgccaacatagttaatgggct

SEQ ID NO: 440671 - DNA, 615 bp, Homo sapiens
  misc_feature (1)...(615): n = A,T,C or G
gttctgtcttaaaccaaactcagtgtttggctaaattggcatgtaaaccagttctttctgacacctacagtgaattaccataaacctcatggaggaggtagccttgaacagactcactgagagtggaactttagcctgtaatttttattttcagtcatctgtcgcaagataggcaaacttctaagaaacgtcccttgtattattaygtcaatcttaccagtggtttttaattnttttccagggccttgaatctctcgtattttctttttttctcctgcttccttaaataaaatncaaattccccagagaattttgtaaaattcccaatcttactgcagcttnctcttctgtctgtctggncctctctgttcatatgcactgcttagttttcagacctgacaactttttgtctggtagcaaaaaaatgcatgatcaatagtaaaattgtagaaagagtggatcaaggaaaccaggcacccagagataaatggctggatgtctagaaggaagcttgctggatcaaagggtatccaagttttcacagcctttacatcatcaaattgccctgcagaatggctctattaatttgcactctgccaacatagttaatgggct

SEQ ID NO: 440672 - DNA, 520 bp, Homo sapiens
cagaaattaagaggatatttcacttccttgtactggtaatggtgacttacaataagtaaaaccagtagtctctacaagggaaaaatactataaacttgtaaattcttcttggactaaaaagtggaactcactgaagatgtgctttaacacctgacttccaatctgttttgatacatgagagacgttggaaaaaagacaaaatgtgtctgacatcaaaatttactctatagtgaagtgttattgtgaaatcccagtgcgacgtttagtctggtgtcatgcaaatatttttggaaaagacgatgagcacagatcaaacaggttattttaaggacaactgattatcctctatgaagtcattacagttgaataaactcgaactgtgatattttgatctgtgttgtattaccttaaagagctaaggggagtataattaataggmtaagatcaaagctaggaactttacaaataatttcttatttaatcctcacaacaccctcttgagacaggtgttagtcacccc

SEQ ID NO: 440673 - DNA, 608 bp, Homo sapiens
tcgacaaataatataatccgtcctactcctaagagaggaaaacttgtattagtgaaacttctaccaggtatcactttcacctcagttaatccacaaaaattgagtcagcaacattttgtgatcaaccttatcaaaaatagttgattgatgaaatgtcattaaaagaacagcagttatccatcattcagtaaaaattcatcaatcactcatacaccaaactcaattccatcttatacaaagcacatacagtacactgaaaactgtcaacttctgatgatctaaaaacgtctcttccataaccatgtgatcacactgaaataaagaatacagaaaattcatagatggtcagttaaaaaaaaaaagcttcagtgaagcaataaacttttcttaaaaytgccaaaataataacatacactacatgatataacactcatttaactgacataatctgttgaggcattttgttaatcaaatactttgttttatatatacttataaatgtcataccagaattacacattttctaatgaaatgaaaaagcatagcagaatcttatgcataagttgattttcatcattgtcttgagttcaatattacaacatgtgtaa

SEQ ID NO: 440674 - DNA, 562 bp, Homo sapiens
ccacctccgcctcccaaagtgttgggattacaggcatgagccaccgcactggccccctattttaagacccttaatttaatcacatctgtaaaccccctttgtaagcttagtacagatgactgaggaaaggttccgaagggatagaactttccagacatgggggacagagtatgtaaacactgacggacctggcagaaatcatgaaaggactgagaaaggagaaygggggaagtatgaaggatgaaggggagattggccaaatgtctctgtaggtgtggaatctctaggtcatctagaccggaaacttccattctatttagactccagaggtcttctgaaatcctgtatatgcacatttttcctatactgagtcagccaaatatgtttgttagtaattaccactattaggaatctaaaagtccctaggcacatgtagttttatggaaccaagtcctgctgttttctgtgtaactgagtttgccaagacatagctggaggagcaattttctcatatatacaagcgaacacaaattaatttctgttacatacgtagattgttgtc

SEQ ID NO: 440675 - DNA, 579 bp, Homo sapiens
ggaacacagcttttttgctattcaaagtagaagtaaatatagagaatgctgtgtgtgtgtgtgtgtgtgtgtgtgtgtgtgygcgcctgtgcatgtgtatgcatttctttttaaaatttatttagtccttatgttaataatatgcctggcacttaagaatcctaagtaatttgtttggtaaagtcagaaagaagagcagtcagagaggtgttcataatgaaagctacaaaaatcagcttttgacttgttggataggctcccatccctgattcaaaaatacctggaccacatatcaaggccatccaattcatagagcgttggtgatgggcctgacttaaagtctgaaaattacatctgtaaaactgtgttctctataaaaatatgcacatttgccaaagtgaagaaaggaaaaaaattccattaaatgtaggttcaataaatgtattagaaaacatttaattaactatctctctgttaaaacacatctcgtgactgctgttcccactctcattggtgtttatctgctggtaaagtgctcccccatatttctatttgctgtgtggtgcagtgcgaccacac

SEQ ID NO: 440676 - DNA, 526 bp, Homo sapiens
ggaaaaacattacagctgtgccagtttctgttccaagagaaaaatacattggtgtattctctaaaggaggaaattccgacctcaaatatgttcagatagctgtgacagataataccctgatcaggtactaagtcatatctttcacatttcccttgctagttatactcagcgtgtggttggaaatggaatcaaagcccagtctggaaatcctgaagtcaaagtcaaaggaattgatcctgtgataaatcagattattgataaactgaagcatgttgttcaggtaagtcctgatcctatatttattagtatactcagtcataaataataagtggttactttctgttatatttgataaatttgttaatcctgtcagataatcctacctaaaatattktaacacactttttgtatcaggacatttggaaatatttagtttcatgatttttggatgcagtcaatatgcagtgatattttaatactggacaatctgtatctgtgaaaagcaagcctcagcctcagcatttca

SEQ ID NO: 440677 - DNA, 542 bp, Homo sapiens
atcaaaatttagatttttatagaggagagcagaaagttatgtcttgcacaggtgtcactgaaacattcacctttaatgcctaagaatatgctctttcataaactgctctcctggagatgaagagaaatgttttactttgccaaacttttgactactgataatgtacacgtgccctggcagggatggctattgtactgtcaatatcaagggatggctaacagcacctccacaatgtcagctatgaaaggattcagaaaatagccttccgtaagtgagaatttattaatttaggagtagggccatggaagacgtcgacataggaataggtttcagatcctagtctrtagatttagatgatcacttcttagtgtttgtataaaatttactttattttttattatagtagatattaaatttactttccacctttgtgctatgaaaaatgccatctctcaccatagggacgtacctatattaaagaatatggaagtaagtcagccataatagcaaaaattgcctgcatacactcacccaaaaaggcc

SEQ ID NO: 440678 - DNA, 588 bp, Homo sapiens
tagcaatgcagtagtgatcaaaacagatttagttagttatcttttggttcaggagaaagtgttggatgcacgctcaataactttcaatggtcatctaatttagcaattagtttgtctgagtaaattcaatggaaggctgctttctggaatgggtggtataatgcactgacttcactattagacatttcatttaaaaaaatcaattgtccgcataaaacaaccatttcaatcagtgtacaatcaactggaaaggaaagtttgagaacttttttttttaaagtaatgggattgggattggccattggtaatttctgtttgattaaagtatgtaattgttttgtgttggataaaaatttgacttttcatttatgtggatgctgctgattttacatgttatcatttccattaagacttgagctgtttwtctgccgggtttactgttcttaaaatgttgaaagaccattaaaatgtaaaacttttatattttttatttaggtgactaggacaaattctggtaatttataggctaaaacttttatatatttctgcttgaaatattttgaaatatggtttttttcacaaaagagg

SEQ ID NO: 440679 - DNA, 589 bp, Homo sapiens
gttttaaaattaacaaagatcaaagtaaactacagtgttagaagtaagagcagaattagcttagagggaggggtagggatccaaagagaacacaaagtgggggctttttcaagtccttgccatgttctagttcatgacttaagtggcagttacacaactatattttgtgrcaattaatttagctatattttagtttattgtactttttgctatgtgttatatttaattttttttgcttttaaaaacttacttctgtaggatttgcagaaataaatatttataaaagtctcattctactatatctgatgactataatgtaataggtttctttgtgccttatgagtatgttctgttctgcacaaatagattctcttgcattgtagcaactagaatatggccaccttgcccttaagtcttagctatagcctgggctagagagaagatgtttgcaaccagaccttgaaccctgttggagtcctagtggagataactgatctaacactttcctgcagggaaaagtgagaacgtggagagcagcctccaaatagaccagcaagcattagactacacagacacataaaccacatca

SEQ ID NO: 440680 - DNA, 595 bp, Homo sapiens
tatttgcaatatatatttttaaattttgcatctgttttcataggttggttgtttattattgtttttagtaatatatttgctaatttttgcaaacaaggataatttgactactttatttccaatttgcatgtccctttatttctttcttttgactgattgctccaactaggatttgcttaggacttctagtactatgttgaatagcaatgatgaaagtgggcatccttttctagttccaggtcttagaggaaaggctttcagtttcccccatttagtatgatactaactgagggtctgttctatatggcttttattatgttgaggtatgttctttctatacagttttttgaagattatgatcatgtatgaatgttgaattttatcaaatgcttttttagcaccaattgaaatgatcatgcggtttttgtccttcattctattgatatgatgcatcgcattaattgatttgcatatgtttaactatccttgcatccttgggataaatcccacttggtcatgatgaatgatctttctaatgtgttgttgaatgcagtttgctagtatgttgytgagcatttttgcgtcaatgttcacc

SEQ ID NO: 440681 - DNA, 391 bp, Homo sapiens
agtaacttctgcttttgtagttacctttaaaacacgttaggtacttttaaacaggaattaatactttatgggaacactagattgaggtacgcttaaratgatatatttttgttttaatcaagagaataaaaaataagaactgagattttagaaaagttcagattgtattggatttataatttcaaagagagatactacttaataggatgttttgtggtaataaatgtgtttatatttcatttcttcatgttattgaacatttttttcctccaataacatttctgtttgttctccatttctgttttataggattgaaactgccatttctgaaatatttccttctttattgtttcttgcaactttttctcttcttgaatcatattatttagaa

SEQ ID NO: 440682 - DNA, 460 bp, Homo sapiens
tttgtaattatactttaacaatactattgtggtaaataatcataaaatatgaaaaataaatcttccaattaactgaatcgattgtccccttgcaggattttggcttcacagtttcctaatgcttgaaacattaatgttgattatttttctaatatgtacccatatgcctttgtgtacatttttattggaaggacaaatcagtaatggatataccgtctctttgtatttgggtaaaggcaacctgatactgatgattttcttgattatattcttattctcttaaaatctttatgtcttctaataatgttaacagagaagaagaaaagtcttatctaagcctaacattttagttttaaggaagttttttttctttatttgtaaaattcaggagtttggctagttgctatttaaatatggastacctttccttgtttcttccccctccccgactagaatctgg

SEQ ID NO: 440683 - DNA, 622 bp, Homo sapiens
catttgctatagccactctactgtgtaatcgtgcagaagaacttatccttgctgtctaaatataactttgtacctgttgatcaatctctcccagctcccagctcccctgactcttcaagcctcgagtaaccactattcaactctctacaactgtgaaaccaagttttttagattccacatatgaaaacaaattatctgatttaaaaatgggcaaaagacctaaawagacatttatccaataaacacatgtaaatggccaacagatatatgacaaaatactcaatattaccaataatcagaaaaatttgaatcaaaattaaaatgagatatcacctcaccccagttaaaataactattatcaaaatgacaaataataatgtatgctggtgaggatgtggagaagagacctcactgttggtgggaacgtaaattaataaaaccattatggaaaacaggatggatcttcctcaaaaaattaaaaaacagaattaccatatgatccaacaatctcattactcggtatacatccagtggaaagaaaattaatatgttgaagagacatctgcactcccattgcagtgctattcaccatagccaagataaagaatcagcctaactacac

SEQ ID NO: 440684 - DNA, 554 bp, Homo sapiens
ttacacagcgtaaactacataaatcttaaacataaggcttgttgaattttcacatatgtatgaattttcacatatttttaccatgtcacaccaccacatcaaaacatagagcatttccagcatttttaaatgctccttttgctccccctagacagtacacctgtaaggaagactgctaatctctaccatcaaaatctagtttttcctttttacacttaatatacgtagaataaaataccactagaattctggagtgtctggctttttccctcaatcccatgtttatggtattcatctgtsatatcatgtaaacatgtttttcattcattttcattgctgtcatatctattatttgaatgtatctcaatttattcatcttatgaataaataacactgaaattaatttccattttttgctatcaagaaacatcatctagtcactgcagtatctacaacccacaatatttattgttttgttactcataataattccattgaaaccattttctgactcatattgtgatttcctccttgtccatgagttacatatacga

SEQ ID NO: 440685 - DNA, 588 bp, Homo sapiens
ctaaagtttgttgttctttttgcacttttattattgtgtgytagttgtaacagacattatattaatttttatcagataaaaacaaaaggcaaaactgtcagttttttaaaagatttatttaaattatgattactctatttattaacttatttaggtttagttgaatatcacttattgtgatatatcagcttaagtataaaatgaggttacaactagctgaaacatatcaaatctataaaggtcataagttcattgtctttttcaaagtaaaaagttctctattttaataagcattataagatctattaattgtgttattcctggaaaatcaaaatattatcagactcctttatagtagcctgatcttaaaggcagcagaatgttagagatgatgagcatttacccaaacacatacagcaattctgccagctaactcctaaaactgaccctaccaaattttctaggctatgctctctacaacttcatgaagaccttaaagctcatatttagaaattttgttgataaaaataactatactctatgattataactgttcaattatgtcaagtacacataatgatgctgcaa

SEQ ID NO: 440686 - DNA, 499 bp, Homo sapiens
agttcatgtgcttgattttcagcaatgttaatactgggattataagaaagggcttttcttcagggcacacctaaaatctatgaaagaaaaataaacattggggcccccaaatcacaagctaaagggaaaagtcaagttgggaactgcttagggcaaacctgcctctcattctattcaaagtcacctctctgctaagataaatgcatatcttattatgcatttggagagtctaatcaggaattcaaaagaatgcaatcatttgtcttatctacctgtgacttggaagcccctcaccactttgagttgtcctgcctttctggactgaaccaatgtttatcttayatatgttgattgatgtctcatgtttctgtaatatgtataaaaccaaactgtgctctgacaaccttgggcacatgtcaggacctcctgaggctatgtcatgggcacacatcctcaaccttggcaaaataaacatttctaaattaactgagacctgtct

SEQ ID NO: 440687 - DNA, 584 bp, Homo sapiens
atcaaagagaaaaaacataacattaaaaagcaatttcagagaagaaagatgaggtttaaaactcattgtattcatagttattgacaccaatatttagcaacaatgtcattttattcagtgtataagctgtcaactaaatgatgaaaasatgtgattaaatctggaaaatgtgaaaccaggcaaatatataaacatattaagtcaataagaagaagtacacttatgtgaatttttttaaacaaaaacacagtatttttattcagtgcaacctcattttaattgcaattcaaagtatctcctttacaatactgtagcttcatattctaatataggatgtgccaaaaagttttcattttattagactttggatttatatttaggtcaaggcgaaattttatattgttggccaaccacttaaaacttctatatagtttttgtaaaatcctttattattttaatagaaattgggaaaacgtcctaaattagacatctgctcctttaacattcattctgacagtggatttgtttttaaggaagaaaaaagttaaaagttaagatagtgattctttatttcatataaaaca

SEQ ID NO: 440688 - DNA, 527 bp, Homo sapiens
gcttttttgggtgacatccaatagaatattgaatataattcagaaaatattatttattattatgttttgagaaaatattatttttttaaaattttctttcctagtaaaaccctactcttaagagactttgtgaaacccctctcatgatttgaktccctctgtttttaaaaggaaaaaagacataaatggtagttatatggaccttgcttctcatacagtagaatctcctctatctgaaataatcaaaattatcacagtgacagagtctaattctatttacttcttattataaacattaggggcaggcttactctgttgcctcagagcaatacacagaactgacttcatcttctatatccaaaaccattacaaagaaaaggttcaattagatatatttttttcttatatgaggcataataatatgcatgcattaaaggagcaaatactctcattaagttacgcagactaaaccataacacttgcctctactctattcccttgttataacttaaccaaattataacatg

SEQ ID NO: 440689 - DNA, 609 bp, Homo sapiens
agacattcacggaagctggcgtgcctggtagtaaaatagagaaatttaatacagaaaactagtgacaaagttgatgggaagctaaaggaaaataggatggtgagttacctctgagatctgcggtatcaaaaagccactggtactcctagaactaaaggatcagaaaaagttttgtgatacgttcagagctagagagctagggtgtccagctaaggctggaatcatggaggaaatgtagtaacttattagaaatgctactcaaaatasggaagaggaagataaatactttctcttctcctttcttcctactctatactgctagtctctactactatacaaacgcaagaggaagcctctgggaaaagacatctggaaaatgtagtttgtaagatgcagccttctgtatcagagaggagagaatgaaaggatgatgaataaatcttaaagaaaaaagaaaaatgtgcatcattttatttctgttagtggctaaattattcagaaaaatttgccaaataattttaaatgctgtaaaatatttttaaaaatgtaaagcacatctatataagattgaagacacaaatcagggtacaattaaagataaatagaaac

SEQ ID NO: 440690 - DNA, 519 bp, Homo sapiens
tccatacaatctgtgtgattgagctcatccggattagcagtactgcagatttctggcgaattgaaacacaaatgccctctaagaaatatacctttgtcccaaacctaaaaacttcccaaataatttttcaaagacaatgatccaacagggtaaaatcaaatcaaacatatgtttccaaataacttgttattatacttccagagagtcttgtttatatgtggcctctcaaattgccatttaaagtttagaataagcctgttaagtttcatcaataaaagattcaaatgcaagaagtacatttgtgagttgatcatgaggaaaagaggcaaaggagcaagcaaggtgaggctgggaatgaaaataggccaggcatggtggctcacacctgtaatcttagtgtgttgggaggctgaggcaggaggagcacttgaggccaggagttttggsgccagcctgggaaacatagtgtgattccatctctgtaaaaaagaaaaaaaaaattaaacaggcacagtggca

SEQ ID NO: 440691 - DNA, 554 bp, Homo sapiens
ctgcgggaggccagttatggcaccctaaaatatacatttgaagcttatttacagcacattatattgagaaactacagacacaggagtagctctgaaaagctgtcctttcacaaagagaatgaacttgtgtaaagaaaatctaggtaagtaaccgtatctgtatcagaaagaagkttgctccagacaacttttattaccggatagactttttatctgtataacaagattaactttattccccatacatttcctctccttcttgaccccataacttgtctccactctgacccctcagaagcccaaatccccttttccttcctgcaacttaggatactacataagcttcaatcatctggttgttctttgagtctcatattctgtgggactatcaggggtacttaggaaattaattgtgggttttctcctgttgatctgtcttatgtcaatttaatttgtagatcagccaaagaacctaggaggttggaggaaagaaatttttctcttgcctacaccatcatcctctagaattgattccactcacgaagactgaaatg

SEQ ID NO: 440692 - DNA, 606 bp, Homo sapiens
tctatattctgtaattgatttaatggattaaatggtagttctattttaagttctttgagattctccaactgcttgaaagagtggtttaagtgatttatattctcacaaacagtgtgtaagcactcacttctctctacagtcttgccaacatactatatttttctattttttagtaatacccattctgactggtgtgagatgatatctcattgtagttttgattcacatttctctaatgttcagtgatgttgaacattttttaatacatttgttggccatgtgtatgttttcttttgagaagtatctgttcgtgtcctttgctcacactttttaatggggctatttgtttcttgcttgttaaactccttrtagactctggatattaggcctttgttggattcatagtttgtgaataatttattccattctgtatgttgtctgtttgttcatactttcttttgctgtgcagatgctctttaatttaattagatcccacttgtcaatttttgtttttgttgcaattgcctttgagaacttagccagaacggtgtttcctaggttttcttcttggatttttatagttttagatcttacatttaagtcttt

SEQ ID NO: 440693 - DNA, 641 bp, Homo sapiens
ggattttgctctagtaagttgtgattctctgtatctgtctgtttttccaacttgtggcaggcagcagtttggtctgtgacctcaattttctgatggatcagaaagcattgttcattttaagtgtgttgagctttttcatgttgtgttgacagaataacttccaatctccttacatgccagaccaaaaactgaaagatgaactgggctttttattacatttcttcctaatccaagttgtttccccttaactaattacttcatacttaggagaaatccagattctatgtagttccttcacccaacacatagcacaatctcatgacacatcttttcactggttctgttttctctttcttttggaagcctctaggttccccccaaatttctatataactgtgtcagagataagaatttccttttagggactttttggcttttcctcataaactttaaaagaatcctcctcaagctctatacttttcaaaaagggcttatatacactcaaacacaaaaaatctgtgggatgatcatttccatgaagcccaaatagcttccaataaaacatattcaacttgtggcagctctccctgctatggggtgggttctattgcctcrctactcttattacgtcttaacaagtg

SEQ ID NO: 440694 - DNA, 615 bp, Homo sapiens
ttgtttaaatctacacactttgctattttggtgtctaaacaaagcctttgtttctaagtagttgtagatgtgattaacacattttttaaaatattcacagggaaggattatgatagtgaagttttttaaaaattctactttattttataaacagatttttatgatgcccacacttcatggcaagtataaagatttttttaaaagctaagtaatgtaaaattaatttcaggtgtttgaaaacatacctttcttaagataataaacaaaataaattaaagaatgatttatgtaatgatataagaatgtttgggaccattaaaattaaaatgacgtgtttttcatttgtttgtttatgtattttttycccataaaactaagtttagttggataaatttttcctactgattgctattttgaattgaaacaaattttaaataagtgaatagattttacagatatttatttacttgacggttagttacaaaaaataattttctttcaagtacattatccattaatcaccaacataaatgtacattacttaatccatagtcttaattctagactaagcattaacattaatatcaatgttctagagaccaggtacattatttg

SEQ ID NO: 440695 - DNA, 443 bp, Homo sapiens
agacccatatcagacttttgacctatagaacataagataataaatttaaattgatttatgctacttaattagcraaactttgttacagcaatcaaataaactactacaaactactttgagacttttataatgtaatcatcataatacatttaatatttcatgtgtttttctcttaagtctcagaaaagaagaatatatacattattgggcaactatattactcaggctgatgaatatctctgatattatagaaatttttaaagttactttgaattttacttccagctatagtatactagcacaccaatgttcctgctgaaacatctagaagagctgaacaaattacaaaataaagtatctgtaggcactgcagatctgctaagccagatggaccttggagagccaatatcctagagggaaaagaaagtcaacaagcaagccaa

SEQ ID NO: 440696 - DNA, 443 bp, Homo sapiens
agacccatatcagacttttgacctatagaacataagataataaatttaaattgatttatgctacttaattagcaaaactttgttacagcaatcaaataaactactacaaactactttgagacttttataatgtaatcatcataatacatttaatatttcatgtgtttttctcttaagtctcagaaaagaagaatatatacattattgggcaactatattactcaggctgatgaatatcwctgatattatagaaatttttaaagttactttgaattttacttccagctatagtatactagcacaccaatgttcctgctgaaacatctagaagagctgaacaaattacaaaataaagtatctgtaggcactgcagatctgctaagccagatggaccttggagagccaatatcctagagggaaaagaaagtcaacaagcaagccaa

SEQ ID NO: 440697 - DNA, 307 bp, Homo sapiens
aaataatagcatattttatcaaattattttcaatattatatactatgtctcttttaccctgttaacagtgcaaattatatgaaattgttgaatttttagatcctaaatcaacttttattcttacaatcaaccataaagtgagtattacattaccatttttatccattgtctagattcagaatactgagatttctttactgtttttgcacctatgcttatcagaagtaatagccagtgatattcctctgtatgtccctgactkgttttagcaaaaagggaatgatgatcttttaaaaatatttagtat

SEQ ID NO: 440698 - DNA, 331 bp, Homo sapiens
ataggctatcttcaaattgtttaagagatgtaacaataaagagctttgtaaggtatttttagcaaaaatcacatttttaaagtaaaattattyataaatcaactaatatatataattgatctgcctcaatttcagattcatttggaactttctgatacagacaattgaaagttctgattcaatcccattattttggtacagaacatttatttaattataaacaaaatctgtgagatgagctgtctaatgcatattgaatctcactttatctttatttctattcattgagtttcagacattgaatcaaaaaaagattgtaataccaacaaaa

SEQ ID NO: 440699 - DNA, 577 bp, Homo sapiens
tcaaattgaactcatagcttttaatatcttttagcatattattgctagatgacatttattctaaaaacacttgactcttgagtgacatagagttaarggcagcaacccctgtgcagtcaaaagtctgtgtgtaggttttgattcccccagaacttaactactaacagtctactgttgaccatgagccttacctctaacacaaacagtcaattaacacatattttgtattttatgtggattacgtaccatattcttacaataaagtaagcaggataaaataaaatattattaagaaaattgaaaatgtgtttactattcattaagtggttgtgggttatcataaaggtcttcatcctcattgtcttcaagttgagtaggctaaggagaagaaagaccctagtcttgggtctcaggtatggcagaagtggaagaaaatccacctgtcagtgtacccatgcagtgaacacgtgttgttcaatggtcagctgtataggcatatgaattagaattaattctaaaagtgaactcaatgtaccaacaagtggcgaagttttatatctaacagattttataagtt

SEQ ID NO: 440700 - DNA, 577 bp, Homo sapiens
tcaaattgaactcatagcttttaatatcttttagcatattattgctagatgacatttattctaaaaacacttgactcttgagtgacatagagttaagggcagcaacccctgtgcagtcaaaagtctgtgtgtaggttttgattcccccagaacttaactactaacagtctactgttgaccatgagccttacctctaacacaaacagtcaattaacacatattttgtattttatgtggattacgtaccatattcttacaataaagtaagcaggataaaataaaatattattaagaaaattgaaaatgtgtttactattcattaagtggttgtgggttatcataaaggtcttcatcctcattgtcttcaagttgagtaggctaaggagaagaaagaccctagtcttgggtctcargtatggcagaagtggaagaaaatccacctgtcagtgtacccatgcagtgaacacgtgttgttcaatggtcagctgtataggcatatgaattagaattaattctaaaagtgaactcaatgtaccaacaagtggcgaagttttatatctaacagattttataagtt

SEQ ID NO: 440701 - DNA, 382 bp, Homo sapiens
tggcaacccatttctctgggagccctctctgcagcagagagctcttctttttcttgcacctattaaacttcagttcttaacttcactctgtgtgtcgatattcttgttctctatggccgtgagaccataaacctcgggtgatactccagacaatgatgctgtttcattgtggaggcccattggggatccaaggtagattcattggaaggttgagtatagaaggggacccccgatccttattttcctttgggrgctttctgctctcaattttaaaatcaaacttaaaactgagtgtctgatggccagttaaagaaaccatttgtgtggccagtgttcttaagattcagatgacaggcttgctggggagaacttagcaaatcct

SEQ ID NO: 440702 - DNA, 561 bp, Homo sapiens
ttttgcagttcaggaaaataatcctattaggcaagatcagcaaatgccatagtaaccaggaatatagctcargggattggcatttttgtgattttctaggaacagaggatttcctccctgccccccaacagtttacatctctctctctatccttggtctggagagcacatggagagcacattgtatttctttcttttttttttttttagacggagtctcgctctgtcacccaggctggagtgtagtggtgcaatcttggctcactgcaggctccacctcccaggttcaagctattctcctgcctcagccttcctactagcttagactataggagtgcacgaccacacccagctaatttttgtattttgagtagagatggtgtttcaccatgttggccaggctggtctcaaactcctgacctcaagtgatccgcccacctcggcctctcaaagtgctgggattacaacgtgtgccaatgtgcctggccagaaagcacatggtatttcaagacttacagtaccatctagtggaatagggatcctctctatgatgcattttgtt

SEQ ID NO: 440703 - DNA, 584 bp, Homo sapiens
tgttacttaaagccaacaaattcctggttcatttcataaggcttaaaaaggtgaatgaatgtttaaaattatatgctgcaccttttcctaatgctgctttgtagactaagtagaaacattttctgtaattatttcagggcaaaataatttaagaggattaggaggttagataaaattaaacgtattctgaaataccctctctgaaataaactaattgcctttatgtgtcaagtattataaatgaaagctattaaaggcttaagccccttctttcatttgctttaaatgagcttaaccatctatatgcaaaaccttccattgacttcccagaatacttaggaaaaaagaactcaaatatttcattatgactatcaagattytaaataaatatcactaccattcttgctttgtttgcaacattctccctactctcttacatcaccctggtgtaaatagacttcaatttttctgtgccttgaattttcacaattaatgttgccttaggacccttgaatttttgttttataaacctagaattatcttctcaaaagaattccatgtaccttgctcctttatatatgaca

SEQ ID NO: 440704 - DNA, 576 bp, Homo sapiens
atagtcacattaagaatacaaaaattatctcattttagtattgtttactctgcacatacacatagaacagattaaggacaattatatcaaaaaaattacagatattgatgcaggtatttmcagatcatgtaatagcaagaattttaaataagtcattttcaattttattttattctactttatttttaaaaaacttttggtgtttttaaaaaatttcttagagatgaaagataaactctttttttgttttctttttctttcttatattttttttgagacagggtctggctggctatgtcactcgggctggagtgcagtggggtgatctcagctctccgcaacctctggctccctggctcaagagattcttgtgccctcagccacccaaatagctgggactacagggacttgccaccacgtctggctaatttttgtattttttatagagacaagttttcaccatgctgcccaagctactattgaattcctgagctcaagcaatccacccacttcagccttccaaggatttttaattgatatgtgatagttgaatatattttgcaagtacatgtgtta

SEQ ID NO: 440705 - DNA, 576 bp, Homo sapiens
atagtcacattaagaatacaaaaattatctcattttagtattgtttactctgcacatacacatagaacagattaaggacaattatatcaaaaaaattacagatattgatgcaggtatttacagatcatgtaatagcaagaattttaaataagtcattttcaattttattttattctactttatttttaaaaaacttttggtgtttttaaaaaatttcttagagatgaaagataaactctttttttgttttctttttctttcttatattttttttgagacagggtctggctggctatgtcactcgggctggagtgcagtggggtgatctcagctctccgcaacctctggctccctggctcaagagattcttgtgccctcagccacccaaatagctgggactacagggacttgccaccacgtctggctaatttttgtattttttrtagagacaagttttcaccatgctgcccaagctactattgaattcctgagctcaagcaatccacccacttcagccttccaaggatttttaattgatatgtgatagttgaatatattttgcaagtacatgtgtta

SEQ ID NO: 440706 - DNA, 492 bp, Homo sapiens
tggagatatctcatatgcctcctatctccacatatgcatagccttcctcactrtcaacatcccacaacacatttgttacaattgatgaacctacaagacacccaggtccatactttacatgagattgcacttttaatactgtacattcaattctgtagttcatattagcgttcattcttggtgttgtacattctacaggatgtcattcatggtcaggtaaattcatattttaatgtcatgaatctaccattatatagtagtactatactgagtagtttcactgccctaaaagtcctccgtgctccactcctgtgtttcccttagtttagctgggactttcccacatgaatccacacagttttatccagtaaagtgcgtgatgagaggtcttggggcttaaaaggtctttttaaaatgtaaattgggacatttcactgaactgttaaaaagccagatacatggcttctatttgcacttagaacaaaatacaaa

SEQ ID NO: 440707 - DNA, 599 bp, Homo sapiens
tattttgatttttgagcttgattattttcggggaaaatccaattatgtcttaaacttaatggagtgaaaatatccaataagaaaaaaatgtatttgatatctttcattttatattcagaacccagactatgtcctatcgatatctttttttacatcagagtaatttccttctttcaaagcatttgtgccatacaaattgtttattcacaaactaatgtcatgtccagctacccgaaatggtttgtaatttaattaaggaaaatataattaaagacacaaataacataggatttatatcaagcagtaaatgtagatttgctgtcacttgggttttacactttttcatagtktatgtcttggcattaatgaatcaccttatattaaacagaattgggagcgataataggactgcactcataagacagaagactgaaagcaatttgatgaggatcttatccttctttcctttttatggaattccagaaaaaacctctatcactggattatagttgatttcaaaagtttcttttacagtcattttccttatatccatggccaattaccaaactaaaaatggctccctctgttctatatgaaag

SEQ ID NO: 440708 - DNA, 599 bp, Homo sapiens
tattttgatttttgagcttgattattttcggggaaaatccaattatgtcttaaacttaatggagtgaaaatatccaataagaaaaaaatgtatttgatatctttcattttatattcagaacccagactatgtcctatcgatatctttttttacatcagagtaatttccttctttcaaagcatttgtgccatacaaattgtttattcacaaactaatgtcatgtccagctacccgaaatggtttgtaatttaattaaggaaaatataattaaagacacaaataacataggatttatatcaagcagtaaatgtagatttgctgtcacttgggttttacactttttcatagtttatgtcttggcattaatgaatcaccttatattaaacagaattgggagcgataataggactgcrctcataagacagaagactgaaagcaatttgatgaggatcttatccttctttcctttttatggaattccagaaaaaacctctatcactggattatagttgatttcaaaagtttcttttacagtcattttccttatatccatggccaattaccaaactaaaaatggctccctctgttctatatgaaag

SEQ ID NO: 440709 - DNA, 583 bp, Homo sapiens
gggattagagacaaaaatctttcagaatatacagccttttgtcaaattgatttctgtgagattacaaacaaataccagtgagacaatttgcataaggtatactgacatayctgatttaactagggtatctgtttcacaacaattaattatagattcttggagaactaaaaacagtttcacttcctaaagtgataaaaatatcctacagaaaatgatatctgttattaaaacaaggatgataatgtaaagaatgaaatacattttacatcaagtagtaaaaaataacccaaaaaaactgttgctatggcagatgctgaaggagataacacaccctggatccataagcaccacattttctgaaatatttacaaaattttaatactttttttgtacaaaagtgcatcttttcccaggattaagttaaaaccaatttgctctaagagtctaaacaaggaaaatagttaaatgattcaaaacccactgtaaagaatacaccttggtgagtgttctgttttctacacaaataagtcttgtgacattcaaatacagggcacacaatatgtagctaatttccaaataagtt

SEQ ID NO: 440710 - DNA, 583 bp, Homo sapiens
gggattagagacaaaaatctttcagaatatacagccttttgtcaaattgatttctgtgagattacaaacaaataccagtgagacaatttgcataaggtatactgacatacctgatttaactagggtatctgtttcacaacaattaattatagattcttggagaactaaaaacagtttcacttcctaaagtgataaaaatatcctacrgaaaatgatatctgttattaaaacaaggatgataatgtaaagaatgaaatacattttacatcaagtagtaaaaaataacccaaaaaaactgttgctatggcagatgctgaaggagataacacaccctggatccataagcaccacattttctgaaatatttacaaaattttaatactttttttgtacaaaagtgcatcttttcccaggattaagttaaaaccaatttgctctaagagtctaaacaaggaaaatagttaaatgattcaaaacccactgtaaagaatacaccttggtgagtgttctgttttctacacaaataagtcttgtgacattcaaatacagggcacacaatatgtagctaatttccaaataagtt

SEQ ID NO: 440711 - DNA, 594 bp, Homo sapiens
tattatctcatttttctttacagtattcctaacagcagattacgtatcttttctattcagtggtagagatagaagagatggtctccactggatattaaaaactttgcagcagaggagaagatggtgtcaaatttactctttagggcctaggtccatagactataaatgtatcttcaatactatactaggttagcacaagtttttccagttgtttctgtctctggggtgctgcgtggtcttagcatctggacacccttctctactaggcttgcttgattgggttgyaagaagaggatacttgctatatttattacatttattttctatttaagacagagacactgaaacagagaagggaaaaattatttgtctaagagcaaagcattactcattattgaatctagttccacaacagcaaactattgatttctacctatgctatgtgctttggtgtttttgtcacttatttttttttcctttcacattattatttttattgtcttttacaatggtccttaacttcaagataagtttaaatggatgtcaaagaaaagaccaatttgaaaaagtgtgtaagtagtaaaatgactgatt

SEQ ID NO: 440712 - DNA, 579 bp, Homo sapiens
gacagcaataggccttatgttttatttttgcatcctttgaaagttatactgttaccttttttctcacagcatttaaatccttgggagaatttttcaacaatacattacaatgatttagaaactgaaataacttcgtatcatccaaggccttaaactgagaggggagtattaattgctttgttatgtgtttagagctgaccttctctcccccataatttattaaaatgatagaactactattgattctttcactaaaatggagataaatcctggcaagggagagcagtttatattctgacccagagtaaccagaataatattagcagatgataaagtaatagatttgtaaaatggaaatattgcactattgctttcatactgtatttgaaagacaatggtcatgtgattgccccagagacagtgtttatagaaatatattctttcagaaaatggaaggtgatgctcctgatataactttatgctagactttaatttgtggttaaaacctcaagtttccagrgggaacagttacttctagagatatttatagataggcactttgaataatctaccaagctc

SEQ ID NO: 440713 - DNA, 591 bp, Homo sapiens
tttaccaccacacagaacagatattaagagaatcaagctaaataaagaatcctgtgcagatttactcttcccaactactcatggcttacaatccattcttgctaatttggttacccttattataactaaaggattgtcttttctgtctgggctcaacagattgggctattcctcactgtccccacaatataaytgggggagacaatgttttatccccccaattatacacttattccaccaaaaatatgccaggttcttttggatgtgttatcatctgggttctctcaaggtaatattcttctgggaagatccagaggctccaggcataatatcagtctataggctgtgctatgtagtagctgaaccgaaacaacataagactgtggcatttctattgatctgttctgtgccattatgtctgtgggccatgactctgtgagaacggttgcatgggcagaggcaaagccatcaccaacatgacactccgacaccactttgagagccaaagcagtccctggatgccagagagcaatatcaagcagagaagaagaggaatatgctttggaccccttcatttaatctgtaacttca

SEQ ID NO: 440714 - DNA, 535 bp, Homo sapiens
tatatatacaattattggaagactgtaactaactcatcatttcattagggaagctattgctcttttggtcactttttaagaatttgtgactaggaaacagaaaaacttttttccaatctcttttgcctgtaaatgcagaaaaaaaaattctgaaattagaggcaacgtgtgaatgtgtgtctgtgtgtagatttcctttcagatttttctgccacagaaataataaatatatatatataaataatatatatattattttttatatagctgtggtcaatattagaccaaaaagaaaataatcaaaaatgaattgtaaggaaagctgcctcaaaatctgcattttttacatagaaataagaaagccaaccctcaaaaactgaacattagatgattatgtattaaactatttgcataatgctcttagatttttgtcmtttaaaaaatgagaaaaagtaccctctgagaagggtaggttaataaatcatctctcctaattatagtatataaaaagacaataaattaatgttttcaatga

SEQ ID NO: 440715 - DNA, 579 bp, Homo sapiens
ggcaaagcatcttccacacaacaggaattctcccggataaccatttaaacctggagcatggaatttctattcacctttgtgaatatgcagaaaatatgagagcatattctgtgtatgtcataatgtttagttttgtgtaatttagcgttaggcatcagttagatattcagttggaagttgggtggatctgcaacttaggagagaagtttgaattggatgtgtagatttgaggagttgtcaaagtacaagaggggatgtgtgaggcatgtgtaaggatgagagggatgcataaggcatgtgtaaggatgagatctccmagaaacagtgtgcagactgagggaaaatagaggcaagatgtaaagaaatgccagcaaagagtgaggaaaagagaaaccaagaaagcagtgttgcttgagctgagattgcgaggaagttccaaggcaagtgattggtgagccatgccatcccaacttaggaccaggggtcacatgtttgggagacatcacatgtgataaggattaatttaacacttacaaagtcaatgtgatcattatgaaggcaacttcattttagtggtgg

SEQ ID NO: 440716 - DNA, 579 bp, Homo sapiens
ggcaaagcatcttccacacaacaggaattctcccggataaccatttaaacctggagcatggaatttctattcacctttgtgaatatgcagaaaatatgagagcatattctgtgtatgtcataatgtttagttttgtgtaatttagcgttaggcatcagttagatattcagttggaagttgggtggatctgcaacttaggagagaagtttgaattggatgtgtagatttgaggagttgtcaaagtacaagaggggatgtgtgaggcatgtgtaaggatgagagggatgcataaggcatgtgtaaggatgagatctcccagaaacagtgtgcagactgagggaaaatagaggcaagatgtaaagaaatgccagcaaagagtgaggaaaagagaaaccaagaaagcagtgttgcttgagctgagattgcgaggaagttccaaggcaagtgattggtgagccatgccaycccaacttaggaccaggggtcacatgtttgggagacatcacatgtgataaggattaatttaacacttacaaagtcaatgtgatcattatgaaggcaacttcattttagtggtgg

SEQ ID NO: 440717 - DNA, 605 bp, Homo sapiens
  misc_feature (1)...(605): n = A,T,C or G
taccatggagaacttgtctccaaataagcttgctattgtagtcaccaaaatgaccaactattttcgttctatcttccataataaaaatggaaaatttctttatgtctgtaaagcaatacatctaattaacataagaaaatttataaagagcatgtcaacacatgaaaaatgatttaatcaaaccaagcataaatattgagtgcatatatcatggcaagaagctagagtaggataggcttaaagacgacttctttgaaaaaactatttttgaactagaawcaatgtacaaaaacatgaagtacagaattagtaagatgtgtttcattggcacttgggcggctgagggtacagcagagagatttttccagagaattttgagttaacaaggctgaggcccacatcttgactctgctgtttaggctgatcacataattaatttggccttcaactataaaaaacagaagtaacaataatgtccaccttagacaggcattttgaaaaacgaaatgaatttgtttatgtgaaggtatatgataaattataattcaccncagcaagaattctagttattattacctgcatgaataaataactacctagacacc

SEQ ID NO: 440718 - DNA, 592 bp, Homo sapiens
  misc_feature (1)...(592): n = A,T,C or G
ccagagaattttgagttaacaaggctgaggcccacatcttgactctgctgtttaggctgatcacataattaatttggccttcaactataaaaaacagaagtaacaataatgtccaccttagacaggcattttgaaaaacgaaatgaatttgtttatgtgaaggtatatgataaattataattcaccncagcaagaattctagttattaytacctgcatgaataaataactacctagacacctatgtaaacacaaagtacgaacagctgaggctgagtatatttctaagaaaaaatcacttgtacttacagtgcttgtgataagctaaaaaagctgagtttatgggcatcggcatacagggttcagcacccttaaatatctgaaggtaaatgattcaggggactggtaatgtggacactgtcaggtctgtacctgtgctttggcactaggagtctagaaaatgccaaaatcatcactttgatacatttattagtagaaatctcttcatttatttatttaaattgaaataagtaagttgtaaaacaaatggtgatttctccaaaagaagttaagctatcactaataaatggaaa

SEQ ID NO: 440719 - DNA, 592 bp, Homo sapiens
  misc_feature (1)...(592): n = A,T,C or G
ccagagaattttgagttaacaaggctgaggcccacatcttgactctgctgtttaggctgatcacataattaatttggccttcaactataaaaaacagaagtaacaataatgtccaccttagacaggcattttgaaaaacgaaatgaatttgtttatgtgaaggtatatgataaattataattcaccncagcaagaattctagttattatyacctgcatgaataaataactacctagacacctatgtaaacacaaagtacgaacagctgaggctgagtatatttctaagaaaaaatcacttgtacttacagtgcttgtgataagctaaaaaagctgagtttatgggcatcggcatacagggttcagcacccttaaatatctgaaggtaaatgattcaggggactggtaatgtggacactgtcaggtctgtacctgtgctttggcactaggagtctagaaaatgccaaaatcatcactttgatacatttattagtagaaatctcttcatttatttatttaaattgaaataagtaagttgtaaaacaaatggtgatttctccaaaagaagttaagctatcactaataaatggaaa

SEQ ID NO: 440720 - DNA, 657 bp, Homo sapiens
attgaaacctaggcacattctcaatgtcaataaaaataaggatttaataaaagagacctgttaaatgcttcaactccttaaaatagatcagatatacatagaatatttcaatgatctcatatcttactattatactgagaattaaaccattacaaagatattgacactttgggccttcaaaacaataatattctctcaagccaaggttttaggttctgatttaacaagttgattattggtctgaaaacaagacctggtttcaccccagggtgattcaatttcaggtctacactggttggtctggctcttcttttagtaaaagttcaagagcggttttgtgaggcttcctgaagctaytccttttcttgtgccttcacttccttactccataatccgttaggttttgaccacggataccgtagacagctattcatttcattataccttattaatacctcatcataattagtggactcatatagagatgtcctctcctaagatggcatagtcaatgctcttttgtagatatttggttaaatttgtagatatttggttaaactactgtattgcaatccaccactaaacactgtttctgtctgattatttcatgtgatcatctctgctgaccactttctggtttataatacagttcttggt

SEQ ID NO: 440721 - DNA, 616 bp, Homo sapiens
gtctttaaaacttaaatcattggagtaacatcatataaagatgtttcaaggaacatctcaatgatattcagacagtaagaggaaataggacttaaacggagttattagtgggaggtattccctaagggaaaagagaatccctgaataaaaaagggtgaggtgtagtactttcctagttcagttctaaactacagaaatctaaactggattgcacatctgtgagtcatataygttaaactaaattatactcagtgctttttttttttgataagcaaagataggtgcccataattcaaattttaaaaaaaaatgaagagatccagaattagagaaaaagggcagtcaaaggcaaaatgaagagaatttgtgaaattatctacatctggaaaaccctaaagttaggatatgaaggataaaaagaccaaataaaatggaaatgttggatggagtaacctgaaagctatgggaaagatgaaaatgcattttgattgttctcataaaagatggaaagctgggaatctggaataggtaaggctacaaaaatacatcagttacagacaattcacagagtagaaattctttttcagtatataaaaaagattgtcccacatacata

SEQ ID NO: 440722 - DNA, 548 bp, Homo sapiens
  misc_feature (1)...(548): n = A,T,C or G
tccatttggtgtcacctagaaccattctaaaattgatcactgctttgcacaagctcatccaggatctgtcagggcatgtctgtgccttggcatcacacacagtagaacaggattctggagtgaagaggaaattaagaagcagagaatgaagagaagggtagctgactatgttataatcatttcttgaggaacaaaataagactaaatcaaactatgggatttgttctcagtttatttttaataattaaacttctatgctagaaaatgtcaaaatgaaaaattaacaaaatcatatgatgaactctatataaccatcacctggctccatcaaatgttaaaactccrccattctttcatcttctatacttctaggcactttctgatgatttatttgtaatgtgagagtttaaaatctgtttttatgcttacacaaagctaattcttactaagggagtataactatataagtgatattattcagcattagctttttgctggctaatattaacttgatggttttggtannnnnnnnnnnnnnnnnnnnnnnn

SEQ ID NO: 440723 - DNA, 503 bp, Homo sapiens
gttttgaatcaaattctaccacaaactgtgtgactttgggcaagataacttaatggccttaaatcttaatttcctcacctgtaaaatagaaaatacaatatctaatctctcaggtatattgtgaaaaatacatataattataaaataactagcacagaatctagcatataataatttctcaggaaacagggctttccttttcagccttttttttttttttttttttgagatggagtcttgctctgttgcccaggctggagtgcagtggtgtgatctcagctcactgcaacctatgcctcccyggttcaagcgattctccttcctcagcctcccgagtagtggggactgcaggcacatgtgccaccttgcctggctaatgttttgtatttttagtagaggcggagtttcaatgttggccagggtggtctcaaactcctgacctcgttatctgcctgcttcggcatcccaaagtgctgggattacaggcgtaagccaccacactg

SEQ ID NO: 440724 - DNA, 440 bp, Homo sapiens
caaatggaagaaacaaagttatatgccactattttgacatagtaggaatatgtgcatttgaatttataatattttgacgaaaactcaaaaaactattaccaatataaacaaattgcattcataaagtagtttttaaacattttattttgaagtaattttaaacatatagaatatttgcaaaaaataatactgagagttcatatacactcttcacccatyttctcctaatgttaaaaatattcacaatcatgatgcaatgataaagaccaggaaattaacttattaactcaatgacgagtttatttgatttttaccagtttgtccaccaatgacctttctaatgttccaggatcccattcagaagcccatgttacatttagttctaatttctccttagtttctagcaatttgtgaagtttcttattctttccttatccccc

SEQ ID NO: 440725 - DNA, 440 bp, Homo sapiens
caaatggaagaaacaaagttatatgccactattttgacatagtaggaatatgtgcatttgaatttataatattttgacgaaaactcaaaaaactattaccaatataaacaaattgcattcataaagtagtttttaaacattttattttgaagtaattttaaacatatagaatatttgcaaaaaataatactgagagttcatatacactcttcacccatcttctcctaatgttaaaaatattcacaatcatgatgcaatgataaagaccaggaaattaacttattaactcaatgacgagtttatttgatttttaccagtttgtccaccaatgacctttytaatgttccaggatcccattcagaagcccatgttacatttagttctaatttctccttagtttctagcaatttgtgaagtttcttattctttccttatccccc

SEQ ID NO: 440726 - DNA, 563 bp, Homo sapiens
aggccatggggcctaatgccatgaggcctgaggcacccctagagcctgagccatcaccatttaaggaaragcatcccccctttcctaatggggcatggtacacaaatgggtctagctagaatgctactgctgtctggactgctgttgccgttcaacttaatactgacaccatatggtttgaaaccaggtgtagacagaggagctaataagctaaactcagggcagtgtaaatggtaatcaccaaagaggtaatctgcaccaatatggtaatctgcactgactgctggacactttattgaagctaatgtatgtcacaggcctgtgtgcacagaacctatgtataaggcctgtgtcaagcctatacctatgtatctggcctgtgtgtgtgtatgtatcatgccaggcttatgtgtatgtatcaggccaggcttatgtgttaagcctatgtgtatgtatcagacctgtgcacccaaaggctatatgttaggcttatgtgtcaagcctatgtgtatgtattgagcctgtgtgcccaaagcttatgtgttggacatgtgtgtccagag

SEQ ID NO: 440727 - DNA, 574 bp, Homo sapiens
atataaatatttgatgaatataattagaaagatagatatgcttctatatttatttataagcatttttacatttgcctaaagagacaaaaatgataatgttagcgatggctgtggataacattattcagagacacagtatagtttatgataaaaattttactgctcctggaaaatagtttcttcaataattaaactgccccagaatttagtggcataaggcaagcatgttattaggctcagagggtctgtgagtgaggcactcaccactaaggacataacttgccctttctccttatggctgagaccttagctgtgaagactcraaaactgaataacttcatgtatgggacttggactcatctggaggtttcttcaatcacatttcagacaggtgatctcaaatgatagaaacaacggggctcatttaagattgtcatcaggacacctgaacatggcttgacttctttacactcattattgtagcaaaactttccagatctgatctcaagcagttaggtagatggaatatgttctagtgttggatagcacagtaaggtgactatagttagcaata

SEQ ID NO: 440728 - DNA, 569 bp, Homo sapiens
cgtgatgtttaaccaggtatctgccaagcatttttcacataagaaaaattctatgattttttttttgttttattggcttgctgtctaagtcattgttgatgttgacaacaaagagcggttaagcccartggggtagtccaggtctcctaaaaagcagatgtcaagttgggattagatattaaaaatattaggagaaaggctggcctggcatggtagctcacgcctgtaatcccagcactttgggaggccgaggcgggtggatcacgaggtcaggagatcgagaccatcctggccaacaggctgaaaccccatctctactaaaaaaaaaatacaaaaaaattaaatgggggtggaggcacatgcctgtagtctcagctactcaggcggctgaggcaggagaattgcttgaatccaggaggcagaggatgcagtgagccaagatcgcccctggcgacagagcgagactttgtttaaaaaaaaatatatatatatatatatattttttttttttttgtttaaaaaaatatatatatatatatgagagagaaaaaggcttctgaagtgaagtg

SEQ ID NO: 440729 - DNA, 517 bp, Homo sapiens
cttgcatgccctaatacattctatggtgatggctattataaatgttgaaactcatgaagaaaaggatagatgtagagaagctaaaggaaattttctgtatgattatttctccagacagactctcatgataagatcctagtacttataacatatcaagaagacaaatctttggagaggtttaaagagaaaattttaaatccccataattatctcctattagaaaacatactgggagaaattacaatgtcaagcaagagactaatctttggcacccttaaattggctgctgtgttgcactggaggatctcaggtggagccttgaaaacattttatacaaaattgccaccactgcaaggacaaattgcccaacaaattttgttgataaacatttatgctaaaacttctaaatctgtttcgggtgtatctgttaccatgataatcctgataaattyttaaggtgtgacatacagaagcctaaacctcagaaccatttcaaatgtctccaaatagattttta

SEQ ID NO: 440730 - DNA, 595 bp, Homo sapiens
gtttttgaaagtgcacaccactggggagtaagataagcttsatgagactactgccatttcagccccacagaagatagtgaacctgatgatacacccagcacatcacttctacaaccagcatttgagaaagccatcacacaaactctataatcatggaactgattctgactcttcaccactgaaagcacccagagctgaaactagatgaaaataaactataagcattaaagtcacatctgcagggaggataaatatttttttctaaaaaaccagttgaataaaaaataaatttaaaaatacttagaagaatcagcctgcccaaatgagaaggagccagaaaaataattctgtcaatgtgaagaagcagggttctataacacctcctaaagatcacagtaactctctagtagtggattcaaactgaggtgatatccttgaaataacagataaggaatttaaaaggttgattattaagttactcaaggagatacaagagaatagtgaagaccaacataaagaaatttacacaaaagcaattcaggatataaatgcaaaattttataaagagatagatattttaaagaaaaaccaatca

SEQ ID NO: 440731 - DNA, 593 bp, Homo sapiens
gagttaatgtagaaagcagaggttagggaagtgattatatggtcaattttagaaagattcagcttgaaatgtttagagaatttttttttcaaatcttttctgttggaataatgtcaggtttgcagaaaagtcacaggatattacaaagttttcatatacctttcactcagcttcccctaatataaacatattttattaattgtatatattttccattactttggaaacaaagtaccacaaatttaatggcttataccaacacaaatttattaacttatagttcacatgtccaaaatsggtctcactaggccgacatcacattattaccagagttactaacctttctggaggctctaggggataatccaaattcttgttttgccagcttatggacaaccaccttccattcttggtttgtggccccctttcatcttcaaagcgagcaagggccagttgcattactctcatcaacagtttctcatatcacattaatctaacatagtgtattttaccttctttttccacatttgcggaacatgaaattacattgggcccaactgggtaaaccaagatcatctaccaatttaatgcca

SEQ ID NO: 440732 - DNA, 571 bp, Homo sapiens
gcgctctttctgttatcttcctctggttaaagataaggggcaagagtttacattaaggcattgagaaaggagatagtgtcttgaccagtgcctctgaaacaatagagtgtatttaaatcaccccagattattacagagcaaattctgattaaatggattggaatggaacttgagagttctcatttcttagaagtgaagaagccactgatgcaggtgggcaagaccttactttgagtagcaaaagactcaagtctctatcatatatccaactatgrctccaggagttgttctattaaatattgcattttacttacagatatggcaatctgcctcattgaaaataaaaatattctctgttttccctctaggtctctatttctagggagtctcggtatggtaaccatatatcttggttttattagaatagtatatgccagttgagccaccttaattactaatagtgccctcatcatacttgaaagcacctgagttgggctggtatatcatattgctatcttagacctaggcctttttatgctacagagtcccctcatcacaaatttgtaattgc

SEQ ID NO: 440733 - DNA, 537 bp, Homo sapiens
agtttttgtaaatattcagaaacagatttaagctttgtatagaaaaataagtgaatgagactgtcagcatttaaaaaataaataataaaatktatattagaaatatgttaaataaaatagcataacattgatgcaagaatttatagacagctcaatagactagaatacaaagacaaggctaaacttttcaataattttgttttcataaaagtgacattcaaatccaaggttattgaaataaagattcaataaatggtctaaagaaaaacattgttgaattttcttttaaaagttgatttatcttaaagtaattcataccttaatattgaattatttaaagacctaaaagtaaaagttatatcttgagaaagatgaggaaaatgactattgctgttgggaagaatttttatttcaaagcataaaacagaggaaatgatgatggaacgatttttttcacgtaggcaggaatcatttttatccttcaaacactgttgaacaaaatgttaagtgtgccctgaaaacagaggagaaactaca

SEQ ID NO: 440734 - DNA, 537 bp, Homo sapiens
agtttttgtaaatattcagaaacagatttaagctttgtatagaaaaataagtgaatgagactgtcagcatttaaaaaataaataataaaatgtatattagaaatatgttaaataaaatagcataacattgatgcaagaatttatagacagctcaatagactagaatacaaagacaaggctaaacttttcaataattttgttttcataaaagtgacattcaaatccaaggttattgaaataaagattcaataaatggtctaaagaaaaacattgttgaattttcttttaaaagttgatttatcttaawgtaattcataccttaatattgaattatttaaagacctaaaagtaaaagttatatcttgagaaagatgaggaaaatgactattgctgttgggaagaatttttatttcaaagcataaaacagaggaaatgatgatggaacgatttttttcacgtaggcaggaatcatttttatccttcaaacactgttgaacaaaatgttaagtgtgccctgaaaacagaggagaaactaca

SEQ ID NO: 440735 - DNA, 556 bp, Homo sapiens
aatcttgtgaactctaaaaatattaaactgttttattttacataccagatattaacaacctacatttgcattgccttaatcagggaaggggagatataaatagttgttttattactgttattctagagcatatgccattaggatttggtacccaaaaagattatacacgtagagcagaaatattcaacattttagaaaccyttattttcatttttattttacttttttctttttgccttttattttacaaatacatattacttcatttgatacaagagatattgtttcatttgatatgagatgtcactgaaattgaaagcaataaaatccaacaaactgttaattgcactgatttgctattgattaacatatttatcaaattatattgttgatgaaaacctggacagcagtcttgagatttaaacgttttgtaaattttctttatgtcatagtcatattttatttttatagagccagctgcatactgtttactacctaagctgaacacttcaactattacgtttctgcatactttactgattgaagtgaatatatt

SEQ ID NO: 440736 - DNA, 493 bp, Homo sapiens
ttacaaatacatattacttcatttgatacaagagatattgtttcatttgatatgagatgtcactgaaattgaaagcaataaaatccaacaaactgttaattgcactgatttgctattgattaacatatttatcaaattatattgttgatgaaaacctggacagcagtcttgagatttaaacgttttgtaaattttctttatgtcatagtcatattttatttttatagagccagctgcatactgtttactacctaagctgaacacttcaactattacktttctgcatactttactgattgaagtgaatatattagtagttaaatttgcatatatactgattgccctgaatattgtgcaagtgtgttgttaactacaaaaaaaaattgtctaagtagttacttttattaaggagatttaaagcaataacaaaattaacctagttgtgaagatctggtgagattccttgttgccattttcttaatctgctacttat

SEQ ID NO: 440737 - DNA, 585 bp, Homo sapiens
agcatatgccattaggatttggtacccaaaaagattatacacgtagagcagaaatattcaacattttagaaacccttattttcatttttattttacttttttctttttgccttttattttacaaatacatattacttcatttgatacaagagatattgtttcatttgatatgagatgtcactgaaattgaaagcaataaaatccaacaaactgttaattgcactgatttgctattgattaacatatttatcaaattatattgttgatgaaaacctggacagcagtcttgagatttaaacgttttgtaaattttctttatgtcatagtcatattttatttttatagagccagctgcatactgtttactacctaagctgaacacttcaactattacgtttctgcatactttactgattgaagtgaatatattagtagttaaatttgcatatatactgattgccctgaatattgtgcaagtgtgttgttaactacaaaaaaaaattgtctaagtagttacttttattaaggagatttaaagcaataacaaaattaacctagttrtgaagatctggtgagattccttgt

SEQ ID NO: 440738 - DNA, 597 bp, Homo sapiens
ttgatctcataattgcacattttttcctttcctgtgtatattatacgttttagtggtcattcatatgaatttgattggcaattcttttcaagtattaatacatgctcataaaaagaacattttggaaatatttaaatatttacaaataataaaattgggagtatttgacaaattgtrcagcataacaaacaccaaagtactaaattttaaattctgcttttctagtttctgaagcattttgtagtctgttgtgtttcagcagcttatgggcatttctctaagattttcaaaaataaatcaaaggcaagatgagctgtactcattacttatacataataaataacattttcttgatatgaaagttcttcatggcttagctataatttataaaccttaaagtcaaataaacttccacatcttgtcaggttcctttgcctcgtcatgttttctcctttaaaaacattttgctattaaaaatgctaatcaattaaatgtatgatgtataagtgtgcatgtgtgtatatatggagttcattcacagcagactataattagtgattattgacatattatttgtatctatctcgagtcaaaaat

SEQ ID NO: 440739 - DNA, 597 bp, Homo sapiens
ttgatctcataattgcacattttttcctttcctgtgtatattatacgttttagtggtcattcatatgaatttgattggcaattcttttcaagtattaatacatgctcataaaaagaacattttggaaatatttaaatatttacaaataataaaattgggagtatttgacaaattgtacagcataacaaacaccaaagtactaaattttaaattctgcttttctagtttctgaagcattttgtagtctgttgtgtttcagcagcttatgggcatttctctaagattttcaaaaataaatcaaaggcaagatgagctgtactcattacttatacataataaataacattttcttgatatgaaagttcttcatggcttarctataatttataaaccttaaagtcaaataaacttccacatcttgtcaggttcctttgcctcgtcatgttttctcctttaaaaacattttgctattaaaaatgctaatcaattaaatgtatgatgtataagtgtgcatgtgtgtatatatggagttcattcacagcagactataattagtgattattgacatattatttgtatctatctcgagtcaaaaat

SEQ ID NO: 440740 - DNA, 597 bp, Homo sapiens
ttgatctcataattgcacattttttcctttcctgtgtatattatacgttttagtggtcattcatatgaatttgattggcaattcttttcaagtattaatacatgctcataaaaagaacattttggaaatatttaaatatttacaaataataaaattgggagtatttgacaaattgtacagcataacaaacaccaaagtactaaattttaaattctgcttttctagtttctgaagcattttgtagtctgttgtgtttcagcagcttatgggcatttctctaagattttcaaaaataaatcaaaggcaagatgagctgtactcattacttatacataataaataacattttcttgatatgaaagttcttcatggcttagctataatttataaaccttaaagtcaaataaacttccacatcttgtcaggttcctttgcctcgtcatgttttctcctttaaaaayattttgctattaaaaatgctaatcaattaaatgtatgatgtataagtgtgcatgtgtgtatatatggagttcattcacagcagactataattagtgattattgacatattatttgtatctatctcgagtcaaaaat

SEQ ID NO: 440741 - DNA, 508 bp, Homo sapiens
ggtgtcttaaactacagaatattttttcttgcaattctggaagctagacgtctacaatcaaaatgccaacagggtgggtttctgctgaggcctccttttggcttgaagatgattgtcttctccctatgtcctcacatgatctttcctytgtgcccacacatccatggtgtctcttcctcgtcatattagaacagtcattctaattagggcccatcccaatagctttgttttaagttaatgatctctttaaagggcaaatcagtcaaattctaaggtactagaggttacggcttcaacatatgagctttcagggatacaattcagtccataacccttacattttaagcaaacacttcaaagttaaataagaatgattatcagaaatcaaacataaatttttgaaataaacaaataggtacattgactcaataattatttcagaacctatttctactgagtttgatattaatcttgcagaaaaaatgaaacaaatggggtattaatttca

SEQ ID NO: 440742 - DNA, 557 bp, Homo sapiens
agcctgacacccttattatctcccgactgtgactttcacagagaatgcagattccctgggactcacctgaccaggattctatcttagagaggttctcttgagactccttctcttggaaaaaaaggtagatttgaggacagcatgtctttaattctataaaatccttatgaatctctagcactacttttatccttcagtctccagatatttattcatgtttaaattgtgtttgtgggtatatgcatgtcaatggcctgatatttttgcactgagtcctgccraaagctatttcttacctctgattttaaagagggccttctcacccatctccctcagcttttgcatctcatctaaattgcacgccacagcaaagcactatttcaccttcgtgtacctcttgacagccccagtgtagacaaaagctcatgtctactgacttttaccttctgtgaattacttttcaccttctgggtcaataatgaaagggagccacgctgaacaacagggattctattttgggtcattatgcaaaattctctatatctatgtttagtttg

SEQ ID NO: 440743 - DNA, 608 bp, Homo sapiens
aggtgcttcaataccaggctaattgagttaggtttgcatacgtgcaggcaggggcagaaggtaacaatgttacaacatgttttcttaaatactatgataataccatagattcctggaatttaagagactataaaagaatggaagaaaatgtgaaatgggctgaatcacagattgacaaggtgtcatcctaagatatccacatttaaataatgtactggaattgggtttagttttcctttgacacttctacattatttttaattktgtcattgagaaataaagtccaatttgacttatctttaactttataaaatggccaaaatgctggctaaacatatattttaaaatgtgtttgttgaaatgtccaatgctgtgagcagaagatcttattcagtgcccctctacagagtttaaaattgtaactggaaaatagtttttaggttggcaaattgagatcaaaacttcatgtcttcaacagaaccaatgtgaacagtaactgacagctctttccgcttccatatttagtttttaaattgtggaaaaatacacataacacaatttaacaacttaagtgttcttaagtatacaggtcagtcatttccgcttcc

SEQ ID NO: 440744 - DNA, 547 bp, Homo sapiens
ttgccactgaaaactctttaccagaagcctctgtcccggagtctttatttcctctgcgctgcattgctgtctgaattcagtaattcaataatgaggtcaacttattttctgtgctcwtttttcttactttctgtcatattgctattttacttcttttactaagtaatttacttaggaatttacttgtttaaagccttggtctagttgcagaaatgccataggtattctttgagaggacagaaaggtattaatgtgttcacatgaagaaattgcaattttataatgtttttgtagggtattttatgaaatatatttcaaatttatcaatatatctttcttcttatttctctttgcatagtcaaagaaagcctagaaattctaaatcataattaggacatactagaggaaaaaaaatattttcatgctcaggaagaagaagtcagaaaacttccctctttctagttcaggaagaagagaagattttaacactggtgggaggaagacaaatcataagccagcatactaagagttggaccatgaccacaac

SEQ ID NO: 440745 - DNA, 547 bp, Homo sapiens
ttgccactgaaaactctttaccagaagcctctgtcccggagtctttatttcctctgcgctgcattgctgtctgaattcagtaattcaataatgaggtcaacttattttctgtgctcatttttcttactttctgtcatattgctattttacttcttttactaagtaatttacttaggaatttacttgtttaaagccttggtctagttgcagaaatgccataggtattctttgagaggacagaaaggtattaatgtgttcacatgaagaaattgcaattttataatgtttttgtagggtattttatgaaatatatttcaaatttatcaatatatctttcttcttatttctctttgcatagtcaaagaaagcctagaaattctaaatcataattaggacatactagaggaaaawaaatattttcatgctcaggaagaagaagtcagaaaacttccctctttctagttcaggaagaagagaagattttaacactggtgggaggaagacaaatcataagccagcatactaagagttggaccatgaccacaac

SEQ ID NO: 440746 - DNA, 402 bp, Homo sapiens
gtgtttctcttctgcagaggtagctggccccagactgcaaacattcaagagaaattctacaatcttatggtccacatgaacaaggtgggagaaataccacagcactgggaggggcaagttaaaatacagccttgcctgaagtggcattcttttatccacagctgctgtgtggcatttagaattttcagaagtttctgtttccaagtagagatcccaataggttgggaagaaggtttgggtctgctcacagtctcagttctctagtagaaaaccaaggctagaagaaacaacaaacaatgaaaacaaacaaacacagttgyatgcataatgctatattagagattagggttgaatggccaaggcaatggatttgcacagaaaataacacagggtcaatgtaaa

SEQ ID NO: 440747 - DNA, 450 bp, Homo sapiens
aatcagtgagttttcttcatctggaagcataaaagggctaacttacatgtttctggtaagatcaacttattttgcccctcccttttgttatttacaccaacttgatccatttaaattgtgtggtattaattaaatggcttgtgataacatttttgattacatctaaaatcctatgtttctttaagtaggattccttgtctgcaccttcttgtttcacttgtctctgacaatgcaactaaaatagctttcttttatgttgtcctgcattgctagggttctaaatcacatactttatatttttaaattctcctggaaatcgtatgtatagcttgatgtmcaataatgatgctagatttatctgggtatttttgccttttacatcacatggcattattaattttgatggccactctgtttagaaaatgaaacctaaaacatcatgtctattac

SEQ ID NO: 440748 - DNA, 537 bp, Homo sapiens
caagataatagaaacaactaacacattggagctccattatgtcaggcagcagacttttcagtggraagcttataggacaggagatagtagcatgacgtattttaaggactgaaggaaaaaatcttttatcttagaatagtatatccagttaaattatccttcaaacataaaggagagataaagactttcccagacaaaaaaaaaaagaaaactgaggaattttatcaacactagacctgtcctacaagaaatcttgaagggattacttcaatcagaaagaaaatgatgttaatgagtaataagaaatactcattattatgatacaaaactcactggtaatagtaagtaagtacacagaagaatagaatgtggtgtgtaagaaagccagtaaaaataatgagccagtaaaaataatcactacaacaacttttcaagacaggcaatacaataagatataggtaaaaacaaaacattaaaaagcaggggggatgaagttaagatgtagagttattttaggttcctttttgtttctctgtt

SEQ ID NO: 440749 - DNA, 628 bp, Homo sapiens
ctatagaatctaaaaaatagcttcaaaagggcaaatctaagagttattagccttaaagaggagataaagagatagttagaaattatactcaaagagataataacagagaactccccaaacctagagaaagataacaacatccaagtacaagaaggtaatagaacaccaagaagatttaacccaaataagactgcctcaaggtatttaataatcaaactctcaaagatcaagaataaagaaagattctaaaagcagcaagataatagaaacaactaacacattggagctccattatgtcaggcagcagacttttcagtggaaagcttataggacaggagatagtagcatgacrtattttaaggactgaaggaaaaaatcttttatcttagaatagtatatccagttaaattatccttcaaacataaaggagagataaagactttcccagacaaaaaaaaaaagaaaactgaggaattttatcaacactagacctgtcctacaagaaatcttgaagggattacttcaatcagaaagaaaatgatgttaatgagtaataagaaatactcattattatgatacaaaactcactggtaatagtaagtaagtacacagaagaatagaatgtggt

SEQ ID NO: 440750 - DNA, 537 bp, Homo sapiens
caagataatagaaacaactaacacattggagctccattatgtcaggcagcagacttttcagtggaaagcttataggacaggagatagtagcatgacgtattttaaggactgaaggaaaaaatcttttatcttagaatagtatatccagttaaattatccttcaaacataaaggagagataaagactttcccagacaaaaaaaaaaagaaaactgaggaattttatcaacactagacctgtcctacaagaaatcttgaagggattacttcaatcagaaagaaaatgatgttaatgagtaataagaaatactcattattatgatacaaaactcactggtaatagtaagtaagtacacakaagaatagaatgtggtgtgtaagaaagccagtaaaaataatgagccagtaaaaataatcactacaacaacttttcaagacaggcaatacaataagatataggtaaaaacaaaacattaaaaagcaggggggatgaagttaagatgtagagttattttaggttcctttttgtttctctgtt

SEQ ID NO: 440751 - DNA, 562 bp, Homo sapiens
attgcttcatgataaaaacctttaagaagaactgggtagagaagggacatacctcaacataaaagccatgtataacagacccaaaatgtatgcttgtactaaaacatctcatgtaccccataaatatatacaacttgtatgtacccataaaaattaaaaactaaaatgtgtgtgtgtgtgtgtgtgtgtgtgtgtrtatatatatatatagagagagagagagagagagagagagaaagggaggacagaatattcaaagcctgcaattcattttcagtgattagttgactctactcttattaagaggaacacacacaatagtcccccaccgttttctcctcgactgtgccgcaaaaatgaatacaacaaccataacatgatgaatttttaaatacatctcttgctcctaaaaaaaaaaaaatgtagctggcctgtcaaaatagttgctgccttccaaatttccagattacaggtgttcccttaatgacttaaatgattgtctttctgccaagatgacaaaggtgggacaattgatgtaactattatccatcttgtaaagagt

SEQ ID NO: 440752 - DNA, 489 bp, Homo sapiens
gtgaaagaaatggtatctagaaaaaattatactgtattcctgttattttgaggaaaacagtttttttaaaaaatgtagaaacataattatttaatttcctttgagttatttatttatcccctttgtccaattttctccttrgcaattttttagcaatcacttttttaatttttagaagggctttatattttatagatgatatctactggactacagtatgagacagaaatagtttttccccttttactatttgtcttttgaatttctaaaagtcactatttatggagtcaaatttattattcttttcttatttgtatttgaggataaataaggtcttccctggacaggctaaactgctttaaaatgagtgtgggcaacaagctaagtagaaaacacataaattaaaatcgccctgttcaacatttaggaaaccatcttctggagaatcacatcttacagggatagattattctcacttaaataagttcc

SEQ ID NO: 440753 - DNA, 435 bp, Homo sapiens
agaataaacaaatacaagattgataaaattgactatatggatgctaatataaggcacatgttgaaaatgatgaagccttcattagtgagtgtctgaatgactgcatggataggagccactctgctgatctgttcacctctttagtctgtgtaatcaggaaatttctcctgggagccaagcattctatatttttgtctttattttttgttgtagttagcaacgaatgyagggcaatagccctccagtactaattaccctattaagggtttctaaaaataccctctgcagtagcaagataagggtatactgaccataattctttaaacttgtataaagctggtgttcttagatggttaattgcatgcaagcattctctaaggcctcattttataaaatgcctgctgtattgcaattgctggagttcatatcatgcat

SEQ ID NO: 440754 - DNA, 572 bp, Homo sapiens
gagtgggtctgaattagaagaggtctgtcttcgtatagtgaatcctccacgccttctctgagacaaggaagtgattaataaacttaaaagttggtttccctttctgctagctcctgctgggcaactgtaaactatgacactatttatgtcaacaaagtataatcagcaaagggctaatccacatgctattacccagagttagctgtaacagatcaatttctatgtatagttttgaaaacttgtcaatatacagcagccacagaacccctgagcttaaccagatgtaagaatctggctggcgctgtcagtccctgaggaagccttggccaagcttgcaaaatctttgaccttattctcaccctccaacaacaggagcaataatccaaagtgttttgtctttcttgtattgtagctcatttttttttcctacagaggtgaaatttccattttgtaatttttctttctgcactttttctatcaattyttttttcttggaacttggtgaatagaagaaaatgctttttatttaattcttgagcaaaagtaggataggaagataagatgtcatcttg

SEQ ID NO: 440755 - DNA, 628 bp, Homo sapiens
cctccctccctccctctctctttctttcttkcttgcttgcttgcttgcttgctttcttgctttcttgctcttgctctctcacccaggctagagtgcagtggcacaatcatagctcactgcagcctccacctcctgggttcaagtgattctcctgcctcagcctccggagtagctgggattacaggcattcaccacacctggacaacttttgaatttttagtagagaaggtgtttcactatatttgccaggctggtcttgaactactgacctcaagtgatccactcaccttggcctcccaaattgttgggattatagcatgagccaccacacctggccgagagtggtgatctttaatgtccacttggtggaagaaagaaaatggaagcaagaactgagtgggaggaaacgaaaccgttaaacctcttgctttagctccttgagagacaagatggacaggcagagatgttgtagtggactcaccgctacttcctgagtgtggaaacagaaaagaacacagcctaagtgaaggacatccttcccctctcatactgcatctttggtgagtggtctctgaggtttggccacaggactctttccttacttttagaggcaatcccatcatcaagt

SEQ ID NO: 440756 - DNA, 628 bp, Homo sapiens
cctccctccctccctctctctttctttctttcttgcttgcttgcttgcttgctttcttgctttcttgctcttgctctctcacccaggctagagtgcagtggcacaatcatagctcactgcagcctccacctcctgggttcaagtgattctcctgcctcagcctccggagtagctgggattacaggcattcaccacacctggacaacttttgaatttttagtagagaaggtgtttcactatatttgccaggctggtcttgaactactgacctcaagtgatccactcaccttggcctcccaaattgttgggattatagcatgagccaccacacctggccgagagtggtgatctttaatgtccacttggtggaagaaagaaaatggaagcragaactgagtgggaggaaacgaaaccgttaaacctcttgctttagctccttgagagacaagatggacaggcagagatgttgtagtggactcaccgctacttcctgagtgtggaaacagaaaagaacacagcctaagtgaaggacatccttcccctctcatactgcatctttggtgagtggtctctgaggtttggccacaggactctttccttacttttagaggcaatcccatcatcaagt

SEQ ID NO: 440757 - DNA, 308 bp, Homo sapiens
taggccctgtcttgacaactcatgagcaagtgattttgaggaattccttctagaaaaaccactaagggagtcagtggaaagggagggggaaagaaggcaatttctgttgtgagctcaggtgaattcccagccccaccttactccacagagagttctgaagtacaacttatacctcagagtttgcctcaccttaaaacaaggggcagtgattatcttgtttcacttaagatacrttctggagaaggtgtaattttctgggtaccttcattttctgtaaatgtaggtggctcctatcaaacacacccatg

SEQ ID NO: 440758 - DNA, 552 bp, Homo sapiens
cacaactacttatacatgctgcatacttccacctccacagtagaccttgtactttattaatatataaggtttttatgttcccagtacagataaagcacttcacatttttttccaagggtcatataacattttgttttctctgtgaaacagtccctcacccctgaagttgaagtacaatgatattttcttcctctaccctgcaattttaccttgtttaacagcattaaattttaccctgtgtagttcttctttcttcrttgattcttatcattttctttcttgagagcaggaaccgtgaagttttttgtttctttgttggatcactcacttgctttggtgagtgctggtaaatatcagtgagttaatgaataaattaatgaatgatcctccaagtagtctagatatacaaaatatgagaaagatatgaaatttttaatagtagagctaataataaagttcttgaattaaggggaaagtagttttgaaataaaaattgtaaagataaatagaccattatccattttggttaccttatgttgcagattttaaaat

SEQ ID NO: 440759 - DNA, 499 bp, Homo sapiens
ctcttgagaagaagtaataaaaatagtctcactaggtcatttttcctgaatttgtgcctgatcatctagaaaagaagcagtaataaaagacaaattgaaagtaaagataatgctttattcaatttccatggtgcaatgaacactccaaatattcattgcagccagggtggtgaattgggaagtaacactgagtggcttctttgggttggcaaaagctatgcatttaggacccaccaaattgcctactggtgtccttggtagagaatgaatgactttggcgtttttctgtgcaagtcacacagtggacactggcagcagtagtagcagtgggatctttgacagtcataagggccatgatggtcatttctgactttgagagtgactaaagacatcatgagctagttagtagaggataatgatgagcatmcgaagagtagatggggaattttcccttctgctccccatccctggccatcccatcccatcccatcagatggca

SEQ ID NO: 440760 - DNA, 499 bp, Homo sapiens
ctcttgagaagaagtaataaaaatagtctcactaggtcatttttcctgaatttgtgcctgatcatctagaaaagaagcagtaataaaagacaaattgaaagtaaagataatgctttattcaatttccatggtgcaatgaacactccaaatattcattgcagccagggtggtgaattgggaagtaacactgagtggcttctttgggttggcaaaagctatgcatttaggacccaccaaattgcctactggtgtccttggtagagaatgaatgactttggcgtttttctgtgcaagtcacacagtggacactggcagcagtagtagcagtgggatctttgacagtcataagggccatgatggtcatttctgactttgagagtgactaaagacatcatgagctagttagtagaggataatgatgagcatccgaagagtagatrgggaattttcccttctgctccccatccctggccatcccatcccatcccatcagatggca

SEQ ID NO: 440761 - DNA, 401 bp, Homo sapiens
cgttttctttttctatttgtccattgatggacactgagtttgatcccatgtcttggttgctgcgagaagagatcccatcagtactcgactaccgccactattgtctagaagcttctccctcactctctcaacgaggtgcaaaagctgccatggaggcttcaactgatacaaccagcttattctgggactgtgtatctctaatatatcaaragtataaatctcttaatttaatagaatataagaaaatacctattttggtaggtacacttttaatatttaacattttcatattcttctatacagaatcatacacattcatacacacaaattaaagatatttggaaatctatttttttatgtttcctaagtaatagagaatattccttatcaccaaatggttt

SEQ ID NO: 440762 - DNA, 602 bp, Homo sapiens
aattttcttggagcattgatcggctccttaatagaaatctggaaatggttataaaaagtttatgggaatcttactttatgattgaactgattaaaatttgaaagacytgtttataagattttactaaaattagctttaatgtcagtaatatacaagacaaaggtaaaatgtggtttttttcttttgaacaatattttcatgtacaggataataagatatttttgactacattttgagtaatactacagaagaaaaaaatagagagaaggagagacagatagagttggcctcatgctgtttttatcaggtcttattgtttaggaaactggtctcctctctgtcaaagagagtaaacactttgaatgataatttttcctagatgaatgactattttatagtaacttgtgatcctattttgtgatattgagtgtcttagacctttgatattttacaaactttctaataacaaaatttcaagttctaaattcagtcccctttgatcttaaatcaacatttttggatattaagtttcctgaagtccaagaaagatatattaggcttattaggtttatttgttatattagaattatacaggaagaatt

SEQ ID NO: 440763 - DNA, 513 bp, Homo sapiens
gagaaaaattgtattttacaagaaaactacagtattagattaatctttgattcctgggtggccacatggtcacctatggaatggagctgtccatgatgtccctcctcagcatgaagcagccagaaaagatcaatgaccagattccccaaataataaaaaactcttgggctggtttcaattccccctttctatttatcaataaaaatcaatattgatttatcaatattatcaatattgatgaatacaaaggrgggacttaaattggcccaagagtcccatagacagtgtctgtttttttaaaataaacatagaaattggccctttttgtcttaaagcttgaagcttacatttgttttatctgagttccttcctcaggaagagacccccaggcctctcaaaaagtatcaaagaactgaatttcaccagattatcacatccagacattgagactccagacccctcattcattgtgactgactgcttccttacccctcctgagttcctgttttctca

SEQ ID NO: 440764 - DNA, 547 bp, Homo sapiens
tacaacagaacaatataaaataggcatagctgtcagaaaacctaaaaattataagtgaaaagactaatatgtactttactcatgaaatatgtagatgtggtatttattggataaaatcattatttttaatagtggttttcaaaatgggaagaagtttgaaaactcatacatagcctgtgtccaaatttaatattggttaagccttttaaagtatacataacagtttagttacctaaaaccccagtttcttcatttataaattaaagtcattgtcaagaatcaaatgatgtaataaatgacaagaacaataatcattaacatataatttgggatcaaacaaataaagaaacaaataataaaataacttatagccctagaatacagrctatttttaacctttatgttctatactaagttttaaaaattgaattatcatatttgtcatactttatggtattaactttatattttagtgttttcaatattttattctatgttttatataccacttcttagttcaacttttgataatttaaatataagttgt

SEQ ID NO: 440765 - DNA, 630 bp, Homo sapiens
caacattactaatcatcagggtaatgcaaattaaaactacaatgacatgttaccttatacctgttggaattgctattgtgaaaaagacaaataagtgttggtgacaatttgggtaaaaaggaacacttgcactctgttgatataaattagtatagtcattatgcaaaaaggatgggaatttctcaaaatattaaaagcagaattacaatataattcatcaaccccacttcttggcatatatccaaaagaaatgaaagcagtcttttcaagagatgtctgcacttccatttttattgcagcrttattcacaatatccaagttacggtatcagcacaaatatccatcaatggatgaatggataaataacatatggtacatatacactatggaatatattcagccataaaaaaatgattttttaaaattttagacaacatgaatgaacctagagaacactacattaagagaaataatccagtcacagcaaggcaaataccacataatctcagtcatatatggaatctaaaaaattgatctcatagaagtagagaatagaatggtggttactagatgctgggtcagtagtggggaagaggttgagaaaatgttggaaaaagattacaaaatttg

SEQ ID NO: 440766 - DNA, 585 bp, Homo sapiens
acatatgttcagctattatgcagcacaatacatttagattggatattcattatcaaagagatttactgtatctttttgaagttactgaaattaaaccaaaattgttcttatccttgtctcagattataaattgtcaactgtggcaaagagataatattaatatgtgtaaaacaaagcaatgattttaaaaaatatgttctagctgtggtcttttagtaatattaatatttaatatcattaattacgctgaatcttctttttagtatgtgataaattttaaaataaaattattgaaacattgcttaaaaattaagatgacttgagatgatttctagcaatgctgtatgagggttaatgtgatatttagtagcaaatatgatattcaaaagcatggaattttaaatgaaaaaaatttagtacaacaacttttcaacaatctcccaatgtccaacrcgtggatatattcatgtttagttattgtattatcactaccaaacattttttgagatatttcattgccatacatgtttcaattcaggcaaaactcaagtctgcattctttccttttaaatgtattcctattta

SEQ ID NO: 440767 - DNA, 576 bp, Homo sapiens
agccacaaaacttcattatatatagaaatgattaaatactaactacatattaagagaaatacaatttacacttaatagcattttaaaaaattatttcctttgtttaattaaaatctgaatcacgttttttatactcaactctcctcctggtaayagtttttctgtgtgagcatggaaacacttgtttgatcagaaaaatagtatacacacacacacacacacacacacgcacatattatcatggtattcaatattaaacttatattcaaatttatacaaaataattattacgaaaatactggaaaaagtataggaaatgaatagtgggtaagaaaatgaaggtatggagttaacagaaaaagaaggaaaatacaatcattcccaagtatatttaggttagagattgtttggaaattggaaaacagtatttttttcttccctagaagtgtatcttgtggtgagaaatataaataatgcaaggattagagttaaatggatggaataatttcccagcagtgttgagagaagtttgaatctatgacactgatgaaaatgtctgcttcagcaaagagaaag

SEQ ID NO: 440768 - DNA, 583 bp, Homo sapiens
ctctatcaccagactggagtgcagtggcgtgatctcagctcacagcaacctccacctcccgggttcaagggattttcctacctcagccttcggagtagctgggactacaagcacaygccaccacgccgaggtaatttgcgtattttcagtagagacagggtttcaccatattggccaggatggtctcgatctcttgaccttgtgatctgcccacctcgggttcccaaagtgctgtgattacaggcatgagccactgtgcttggccaagaaacttaatttttaatatgtcaactctactaaaatgtatatacactcaataaaattccaacagagatctaagagaaacttttgacaaattaagcctactctataatttttataatagcataaagttaagtaagtaaatctattataattctaaaaatgaagagcaaatatatatgtgtatacatatatatttatacacatatatacacatatgtatgtatacacatatatacacatatgtgtacatgtatatgtacatatactgtgtactgaacactgttgaacattatatacatattaacccatgtatgggtta

SEQ ID NO: 440769 - DNA, 583 bp, Homo sapiens
ctctatcaccagactggagtgcagtggcgtgatctcagctcacagcaacctccacctcccgggttcaagggattttcctacctcagccttcggagtagctgggactacaagcacacgccaccacgccgaggtaatttgcgtattttcagtagagacagggtttcaccatattggccaggatggtctcgatctcttgaccttgtgatctgcccacctcgggttcccaaagtgctgtgattacaggcatgagccactgtgcttggccargaaacttaatttttaatatgtcaactctactaaaatgtatatacactcaataaaattccaacagagatctaagagaaacttttgacaaattaagcctactctataatttttataatagcataaagttaagtaagtaaatctattataattctaaaaatgaagagcaaatatatatgtgtatacatatatatttatacacatatatacacatatgtatgtatacacatatatacacatatgtgtacatgtatatgtacatatactgtgtactgaacactgttgaacattatatacatattaacccatgtatgggtta

SEQ ID NO: 440770 - DNA, 604 bp, Homo sapiens
ttatttatttgtttctagtttaattgggtttctctatagactgtctttttttttttttttttttgagacggagtcttgctgtttcactcaggctggagagcagtggcgcaatctcgactcactgcaacctccgccacccgggttcacgccattctcctgcctcagcctcccaagtggctgggactacaggcacccgccaccacgcccggctaattttttgyatttttagtagagacggggtttcaccgtgttagccaggatggtctcgatctcctgaccttgtgatcctcccgccttggcctcccaaagtgctgggattacaggcatgagccaccacgcccggtccccagattgtctttaaatgtaacattgaaatgtatacttttcacttttatgtttgtatctgttgccaaaaaaagtcttcattttaatgcagtctgattttcagtcttttctaatattatagtcatatttttctttagttcctttccttttttcatttatgtctgctttttaaaatatatctagaattaaataatgtgaatgatgtaatgagtaccaagtctacatttttctacaaattaaccattgagctagtcacttt

SEQ ID NO: 440771 - DNA, 604 bp, Homo sapiens
ttatttatttgtttctagtttaattgggtttctctatagactgtctttttttttttttttttttgagacggagtcttgctgtttcactcaggctggagagcagtggcgcaatctcgactcactgcaacctccgccacccgggttcacgccattctcctgcctcagcctcccaagtggctgggactacaggcacccgccaccacgcccggctaattttttgtatttttagtagagacggggtttcaccgtgttagccaggatggtctcgatctcctgaccttgtgatcctcccgccttggcctcccaaagtgctgggattacaggcatgagccaccacgcccggtccccagattgtctttaaatgtaacattgaaatgtatacttttcacttttatgtttgtatctgttgccaaaaaaagtcttcattttaatgcagtctgattttcagtcttttctaatattatagtcatatttttctttagttcctttccttttttcatttatgtctgctttttaaaatatatctagaattaaataatgtraatgatgtaatgagtaccaagtctacatttttctacaaattaaccattgagctagtcacttt

SEQ ID NO: 440772 - DNA, 635 bp, Homo sapiens
ctgatggttttataaatgatagtttttcctgggctctcatacatttctgtctcctgcttccatgtgaagaaggttcttgcttccccttcaccttctgccatgactgtaagtttcctgaggcctccccagtcatgtggaactgtgagtcaattaaacatcttcgctttataagtaacccagtctcgggtatatctttatagcagtgtgaaaatggagtaatacactactttattgtattatgattatgtgttttaataatatatttattttcttctatttattatctatttaccatgtagcattagttatgttaattttatatcagtatttaaatattgttaactttataacatagtatttaagttctaggacatcaagaagagtagagcttacccagagactttttatcttcttctggggaaagggttagtgcatttttggttgractcaagacagccgtatcatgttaggtgaaagtatgaccttgttatttattgtatttacttcaatgtgtattggtgtcaagttggcaaggggtgaagttgagatacttaattttagggatcagcttaactgggccacagtgcttagatatgtttccatgaattattctggatgttgctgtgagggtattt

SEQ ID NO: 440773 - DNA, 610 bp, Homo sapiens
gtttgatttatgaatcctagactgcaaagataggtctaagaggacaaatacatttggaggaatttatacacataattagtagttgaaacaatgtaagtcaatgaaatcacccaaaggggtagtgtatggggacagaaaagcaatgtgtaaggaatcaaattttagtatgggtacgagatccttaggagacacacacacacacagaggcagattgagagagagagagagagagagagagagatcaggaactttcaaaactggaaaagagtaagaaagagttttctccattaggaaagctggggaagtggaaaatttaaaggaaaagggattttttcaacagggttattgcctttacctctggtctgccagggctcttgcatgtagtaaatagtaagcacttagtgcaaagttgatagaatgaatgaaaagaagagaaatggcaaaagtmaattaaaattcaaggtaaaaatttcaaatataaggaccactgaatttagtaactgaaagagaaagagtttaagctttcacaaatagcatggtcaatgccacagaaaatctaagaattatgagagtttatttatcttgtcttcactctatctactttatgact

SEQ ID NO: 440774 - DNA, 610 bp, Homo sapiens
gtttgatttatgaatcctagactgcaaagataggtctaagaggacaaatacatttggaggaatttatacacataattagtagttgaaacaatgtaagtcaatgaaatcacccaaaggggtagtgtatggggacagaaaagcaatgtgtaaggaatcaaattttagtatgggtacgagatccttaggagacacacacacacacagaggcagattgagagagagagagagagagagagagagatcaggaactttcaaaactggaaaagagtaagaaagagttttctccattaggaaagctggggaagtggaaaatttaaaggaaaagggattttttcaacagggttattgcctttacctctggtctgccagggctcttgcatgtagtaaatagtaagcacttagtgcaaagttgatagaatgaatgaaaagaagagaaatggcaaaagtcaattaaaattcaaggtaaaaatttcaaatataaggaccactgaatttagtaactgaaagagaaagagtttaagctttcacaaatarcatggtcaatgccacagaaaatctaagaattatgagagtttatttatcttgtcttcactctatctactttatgact

SEQ ID NO: 440775 - DNA, 578 bp, Homo sapiens
aatgtagttattcatttgtaaatgctgatttctttggggcattgtccccataaacttttttttaagtgtcaatgatttcatcgttcttccacacaagcttcaccataaatttgatatttgctcttgcttcagttttagcataaaccacattgccaataagggctctttccaaactgatgtcttatgcttcttaatgcctcaagttagatcttattcagaaatgttataacaggtaggtactacttgttttggcacaaatgttttttttgaaatctatgcatagtttttttcataatatgcattttccatgaactttgtgaagacctcctgtatatgtggtccacccttsactaaaatatcattatgaggcacaggactgtatatgtctgtatgtataggagtttctttcaatataaattgatatcaatctctatttacacatataactatatctatatataatgagtaacttgtacaagttaataagagaaaggcaggtattagcaggacctgtgaaaattttttcacgaaagggacatttcaattttaaacaatgcttaagtctactcatctattcc

SEQ ID NO: 440776 - DNA, 512 bp, Homo sapiens
aagcaggccaacatatgaaaccccaagtcaaaagatcaaactatgagcttctctttcaaaaagcccacttggccctcttccaagtgtactttactgtcttttcattcctgccctaaaggttattaataaactttcacttctgctctaaaacttgcctcagtctcttctgccttatgccactcagttgaattctttcttctgaggaagcaagaattgaggttgctacagacccatatgtattcaccaccagtaacacactagccaaggaatgcctgagactaccagggctaggagaaacgcatggaacagattctttcttacaagcctcagaagaaactgatcctactgacaccttaattttgacttctagcatccagaattgtgagagggtaaatacctgttgtttgagcytctggattttgttactttgttacagtggtcagaggaagccaatacacctggaaactgttgctttgcatgtattatatgttttgtgaaaggaagataaatct

SEQ ID NO: 440777 - DNA, 612 bp, Homo sapiens
tgctttggggttcatattcaaataaccattgcccagaccaatgtcatggagtgttccccctatgtttcttctagtagtttcacaatttcagrtcttatattttagcccttaatctatcttgagtttagttttgtatatggtttgagataacagcctagttttattcttctgcatgtggatagcttcttgccctaaaccatttattgaagtgactggcctatcctcattatgtgttcttggcacatttgccaaaaaataaattgaccataaatgggtgaatttatttcaggaccctctattctatgccactggtctgtgtatctgtttctatgttagtaccttgctgtttttattactatagctttttagtatattttgaagtcaggtagatacatattctagaataattcatatatgaggcagcaaaacaaattataacaaattttaaaagattaaaatcatatcaggaatcttttccgaccacaatgttatgaaactagaactcaataacagataaattttagaaaattcaataacatgctcccgagcaattaatgggtcaatgaagaaattaaaggggatatttaaaagtatcttgagataaacagaaat

SEQ ID NO: 440778 - DNA, 612 bp, Homo sapiens
tgctttggggttcatattcaaataaccattgcccagaccaatgtcatggagtgttccccctatgtttcttctagtagtttcacaatttcagatcttatattttagcccttaatctatcttgagtttagttttgtatatggtttgagataacagcctagtttyattcttctgcatgtggatagcttcttgccctaaaccatttattgaagtgactggcctatcctcattatgtgttcttggcacatttgccaaaaaataaattgaccataaatgggtgaatttatttcaggaccctctattctatgccactggtctgtgtatctgtttctatgttagtaccttgctgtttttattactatagctttttagtatattttgaagtcaggtagatacatattctagaataattcatatatgaggcagcaaaacaaattataacaaattttaaaagattaaaatcatatcaggaatcttttccgaccacaatgttatgaaactagaactcaataacagataaattttagaaaattcaataacatgctcccgagcaattaatgggtcaatgaagaaattaaaggggatatttaaaagtatcttgagataaacagaaat

SEQ ID NO: 440779 - DNA, 515 bp, Homo sapiens
ttctttcattggttttagggtttctggagttggcttcttaatatgattagacctgaaaatgctaaggactctacttctaatagtatggggaacactggtagtccgtggcagaaatcatttagagagttatgcaaaataaatgcatttggcactcctgattcaccactcatgagaggaaaggagtttagtgactctatacataatacctttgaccatatgtggagaacaaaggaacataatgaagctagttgattgctcctaagttcagtggacaaagtgaygaaagaaaatgatgaactcagggattctaactccccacttcagaaacagatactgagcctcaaacctgctaagattgccctgagtaagagttttatcttctgtagagaaagagctgaaattgtggaaaaacagacacaaactcttattatgtgagtggctaacctgcaacaaaagatgcatgcacagcctcgccaggtgtctactgttaaagtgagggcattgattggaaaaga

SEQ ID NO: 440780 - DNA, 635 bp, Homo sapiens
agtgaggggtctcagtcgctgactggagggggcggatcacgatccagcaaggcctctgagtgccagacagtgtgctaagccctctgtacagttaggagatccctgtggaaggtgatatcacccccatttttatgttcaaggaaaagcagtcccagaaaggactcgggtttgagtcccgcggcagtaagtgctggaggtaattcgagcgcgttttggcttcctggctgttctgtgctctgtcctgtagcctccataaatacaggtagttggtgrcctaaagattgtaatctttagcatttttacaagccaaacatctgtgaaaaccacagtagtatcattataaaaatcccatgtaagtataaatagtatagtaaaattaaataacagcaactcctcttatttgaatatagcagtatttttaggccaagggttgttttggtcaaacatgatccctatatctgggaaaacctggtatttttgggacatagtttcccttattcttgctgcaagaatgactttttctggattaaaaaatagactatgggactactaccttgtttttctgtttacagaagtaggctgacttacggatgtgggggaattattcatttacgattatttcatgaagccattca

SEQ ID NO: 440781 - DNA, 635 bp, Homo sapiens
agtgaggggtctcagtcgctgactggagggggcggatcacgatccagcaaggcctctgagtgccagacagtgtgctaagccctctgtacagttaggagatccctgtggaaggtgatatcacccccatttttatgttcaaggaaaagcagtcccagaaaggactcgggtttgagtcccgcggcagtaagtgctggaggtaattcgagcgcgttttggcttcctggctgttctgtgctctgtcctgtagcctccataaatacaggtagttggtgacctaaagattgtaatctttagcatttttacaagccaaacatctgtgaaaaccacagtagtatcattataaaaatcccatgtaagtataaatagtatagtaaaattaaataacagcaactcctcttatttgaatatagcagtatttttaggccaagggttgttttggtcaaacatratccctatatctgggaaaacctggtatttttgggacatagtttcccttattcttgctgcaagaatgactttttctggattaaaaaatagactatgggactactaccttgtttttctgtttacagaagtaggctgacttacggatgtgggggaattattcatttacgattatttcatgaagccattca

SEQ ID NO: 440782 - DNA, 635 bp, Homo sapiens
agtgaggggtctcagtcgctgactggagggggcggatcacgatccagcaaggcctctgagtgccagacagtgtgctaagccctctgtacagttaggagatccctgtggaaggtgatatcacccccatttttatgttcaaggaaaagcagtcccagaaaggactcgggtttgagtcccgcggcagtaagtgctggaggtaattcgagcgcgttttggcttcctggctgttctgtgctctgtcctgtagcctccataaatacaggtagttggtgacctaaagattgtaatctttagcatttttacaagccaaacatctgtgaaaaccacagtagtatcattataaaaatcccatgtaagtataaatagtatagtaaaattaaataacagcaactcctcttatttgaatatagcagtatttttaggccaagggttgttttggtcaaacatgatccctatatctgggaaaacctggtatttttgggacatagtttcccttattcttgctgcaagaatgactttttctggattaaaaaatagactatgggactactaccttgtttttctgtttacagaagtaggctgacttayggatgtgggggaattattcatttacgattatttcatgaagccattca

SEQ ID NO: 440783 - DNA, 576 bp, Homo sapiens
aaagatattgtcatattaaattttatatacacatacatgtgtacgaagcaaaatgacatagaaaatagatgagtaaattcttaaatgtaagacaaaaaataaaatgaaccccaaagtgcaatattaatatcatacaaagtggaacttgagagaaaataaggaatgagcgagggctactttatattaattttctaaagtataatttattatgagaatgtagtagccagagatgtttaaaaaccaaataacagcatcaaaagacataaaagttgttataaatgcaataagaaactggcaaagcacagtcttaacaggctacttaacaatatctctactttttatgttatgtacataaactttacagagaactgaataattaatatgttttrtttactcagtatttctttaaagaaaatgtcttcaaatgtgcatcgtatagttaaacattgattatagcttctgtgtcaaaaaaaagctcaatacaaagcattcccataagccatattttgacaataaacaatagaatttaagtaataaaaagtttaacaccaaatctaaaaccatgtggaaactaaa

SEQ ID NO: 440784 - DNA, 638 bp, Homo sapiens
atagaatttaagtaataaaaagtttaacaccaaatctaaaaccatgtggaaactaaaaatactccctgaataatccatgagctgttaactcaaagaaaatgatagagaaaattaaaactgaataaagagattgtttagaagatgccataatatatggaatgtaacccacattgtgctaggagaaaactttgtaagttttcaaggtttttataagaaagttgcaaatgaaatatccatgttactgcagaagcaaaaaataatttaaaaagccccaacaaaagcatgagtaagaaaacgaagatatagtagaaattaatgacttagaacctgaaaaactataacaaatatagtaattcaaacctttattcttygatattaaatactactgatgacaaatctttggaaggctaagagaaaagcagagaacatacaaatattcagcattagaattcaggacactggaagaggcatagtggtgagagcagtcccttagccaaggcacactgggttgacttcaccggtactcagctgtgtatccaggaacgctgtccagccttcttgtctcatgccttggattcccacggctcatagtgctgttaaaaaaattacattgagttaccatttgtgatatggtttgg

SEQ ID NO: 440785 - DNA, 638 bp, Homo sapiens
atagaatttaagtaataaaaagtttaacaccaaatctaaaaccatgtggaaactaaaaatactccctgaataatccatgagctgttaactcaaagaaaatgatagagaaaattaaaactgaataaagagattgtttagaagatgccataatatatggaatgtaacccacattgtgctaggagaaaactttgtaagttttcaaggtttttataagaaagttgcaaatgaaatatccatgttactgcagaagcaaaaaataatttaaaaagccccaacaaaagcatgagtaagaaaacgaagatatagtagaaattaatgacttagaacctgaaaaactataacaaatatagtaattcaaacctttattctttgatattaaatactactgatgacaaatctttggaaggctaagagaaaagcagagaacatacaaatattcagcattagaattcaggacactggaagaggcatagtggtgagrgcagtcccttagccaaggcacactgggttgacttcaccggtactcagctgtgtatccaggaacgctgtccagccttcttgtctcatgccttggattcccacggctcatagtgctgttaaaaaaattacattgagttaccatttgtgatatggtttgg

SEQ ID NO: 440786 - DNA, 590 bp, Homo sapiens
gaagaggaaattgcttcatccttgaccctgtctcccccagtaaaggtggttcattaggtgtctggcgccagatagggtggggccagattgaggatgctcaccctatcacttttccccactcatctctaactccttgaccagtgactatgacctctccatgcactcatgtgwatatggaggttttccattggaaaatgaggcatatattacagaaacacccatcacatatctgtatccctttggtgagaggtgcaggggcacgtggagtactccttcctgctgctaagttcatttttgtgtggctttcaccgtttgttccctgttgaagccttctccaagcttcgggtgttcacaagtctccaagggctctgtgagattagaacttccttcctctttcagctgataattacagctctgtggttctcccttgtaggtctttccttgagctccaaaacagagttttcctgcagtggagcttctattcggataattagggcactcagttgtattggaggagggttgaattaactacctctgtctcctgtgctacttggttctgggcttctacacatcacagctacctggaggat

SEQ ID NO: 440787 - DNA, 513 bp, Homo sapiens
ctggcaagagggatcatctgcccacgaaacaccttgggccaacaagggcaattcttgtcagggaaatccttaagtcagagagaacactgtcagaaagccaagcttcctgctgtttgaggaagacagctgagcctgtaaggagactgacagtgtctctgagtaagagcctcacactacctagagcaatgcaaaactcaacgtggccaactccatctggtcatttagatttcagcttaaatggtaactcttaagtcactggctctcctgtcaccatatttagcttctctgcatgctttctgccctcccgccgctccatttatttakctgcatggcaagcaaccgtcctcctttcccctcaagaatggaaactccatgcaagccgggcatcagctgccttgtcttgagctgtatgtgaagccccccagaataatgccaggctcatagtaaccatagcagcatacccaaactctgcagctttcttcctgccattttgctaatcaatcctgctcattg

SEQ ID NO: 440788 - DNA, 563 bp, Homo sapiens
gtaattaaggtaaaaagaggtcattggtgtgggaccctgacccaataagactggtgtgtgtccttttgtaagaaaaggaaaggacaccaggagctatcatgcatggagaaaaggctacatgaagacacagtgagaaggctgcaggtgggaagaaaggttgcatcagaacctgagcctgctggcatcctgatctctaacttccagcctccagagctgtgaggtaatgcatttctgttgctgaagccctcatctgcagtgttttgttatggcagccggggctcacttgtgcagaggtggacgtgccactcactcccgtggccagtgcatgaccattctgctccactttccccagatcaccatcctggggcttatttgtccttctggaattattacaccagagactatcgcaarcgtagtataatgactggctggcacatgcaaataactttgtattatgataaaatatacataacataaaatgtaccattttagctattttggactgcatagttcagtggcattaagcactttcatcttgtcatactaccatcaccgccatctat

SEQ ID NO: 440789 - DNA, 468 bp, Homo sapiens
gacaattttactctcacaactggggggtgccactgacatctagtagggagagcccagggatgcggctaaacaccctgcaatgcacaggacagccctacagcagaaaattatccagcccaaagtgtcaatcacccaaggttgagaaatcttgatctataatgtccgtatttaacatgggattggcccattttaaaatggtggctcacgcctgtaatctcagcattttgaaaggccaacatgtggawcacttgagtcaggagttcaagaccagcctggccaacatggtgaaaccccgtctctacaaaaaaaatacaaaaattagccaggagtggttaatcccagctacttgggaggctgaggcacgagaattgcttgaacctgggaggcggaggttgcagtgagctgagatcatgccactgcactccagcctgggcaacagagtgaggctcagtctcaaaaaaaaaaaaa

SEQ ID NO: 440790 - DNA, 597 bp, Homo sapiens
aatcatgcctgaccaactctcttgttgttcacagaataattctgtcaagtctttataaagttcatcatttttttaaaggagaaatttctgctctttttaattgtatgaagaaaggtcctaaatgcaatgtggtttcctgaaggaagygcattcactgataacctagtcaaatctgaataaagtctgtaggtaagttaaaaataacatagtgtgttagtgtctggattttaataaatgtaccatggttgcataagatgttcatgttagaagacctctctgtgctcgccttgccatgtttttgtaaatctaaaatttttccaaaatttttaaataggctttaaagaaaaactcctcagcaaatagatatttgcaataaacatgcacagtgtgaaataagtcggtctctaatcatagcaatcatgtggctatgggagtcattcttttattcaataaacatttattaagaaattgcaacaatgataacaaaaaactacttcacaaatatatggataaaaatcagcttgcttccctaatgttggcaattttatcccagccatatgttagaaactataaaaacattgctgatacagttaataa

SEQ ID NO: 440791 - DNA, 515 bp, Homo sapiens
gctattgatcccatctagtgatttttagaatttcagatattgtatttttagatttaaaatatccatttggttcttttttttaaattttctactgtttgctgaaacctttaatttgttgagactttctatttcttcatttgtttcaagagtgtttgtaaatgtttgttgaagcatttttatgatcactgctttaacacccttgtcagataattctcatgtctgtgttattttggtgttggtctctgttagttgtcttttcttgttccatttgagattttcctagttcttgatatgacaagtgatttttgatggaaacctgggcagtttgtgtgtcatattgtaagactctgcattttacctgcatcttgccatttagtaggtttctctgaygctgggtgagggcaggtgccatcgtgtcactgtcacgctgggagtggaagtccagcttccctctctgccctcattgatactggcacggtggggctcctctgcacggctggcagcaggtggagcag

SEQ ID NO: 440792 - DNA, 515 bp, Homo sapiens
gctattgatcccatctagtgatttttagaatttcagatattgtatttttagatttaaaatatccatttggttcttttttttaaattttctactgtttgctgaaacctttaatttgttgagactttctatttcttcatttgtttcaagagtgtttgtaaatgtttgttgaagcatttttatgatcactgctttaacacccttgtcagataattctcatgtctgtgttattttggtgttggtctctgttagttgtcttttcttgttccatttgagattttcctagttcttgatatgacaagtgatttttgatggaaacctgggcagtttgtgtgtcatattgtaagactctgcattttacctgcatcttgccatttagtaggtttctctgacgctgggtgagggcaggtgccatcgtgtcactgtcaygctgggagtggaagtccagcttccctctctgccctcattgatactggcacggtggggctcctctgcacggctggcagcaggtggagcag

SEQ ID NO: 440793 - DNA, 515 bp, Homo sapiens
gctattgatcccatctagtgatttttagaatttcagatattgtatttttagatttaaaatatccatttggttcttttttttaaattttctactgtttgctgaaacctttaatttgttgagactttctatttcttcatttgtttcaagagtgtttgtaaatgtttgttgaagcatttttatgatcactgctttaacacccttgtcagataattctcatgtctgtgttattttggtgttggtctctgttagttgtcttttcttgttccatttgagattttcctagttcttgatatgacaagtgatttttgatggaaacctgggcagtttgtgtgtcatattgtaagactctgcattttacctgcatcttgccatttagtaggtttctctgacgctgggtgagggcaggtgccatcgtgtcactgtcacgctgggartggaagtccagcttccctctctgccctcattgatactggcacggtggggctcctctgcacggctggcagcaggtggagcag

SEQ ID NO: 440794 - DNA, 552 bp, Homo sapiens
ctgtgtgctcacttcccctttacccaccctctgaaggtttggtccaaaatcaactgataaaaggcagattgatcagagaaaaggcacgtgcagttcatgactgggcctgggggaaattgcagtgatttcccaaatgtgttgcacagtgcagaggctgatgtgtccttttccacaggggagtggggggttggcgagggtgggaagttcttctgagggacaataaatcatcagggaaaagtgaatggccccgggaggtggaggcaggaaggtgggggatggagctgcacgagaataaaggtcgcctcactatgcagatcaagtcccccaaaacctcccttgaagttgctcttggaagaacagatgagaagtccaggtgtggggaacccctgttccctcccttcccagatggttgagctttcgtggccattgatgagattcccagggtgggagatgtaagacaactgcattgaagctgctttggtaggcagacaaggaattccagagagagcccctctcagcacctggkggggctggcgtccaggccagggggcc

SEQ ID NO: 440795 - DNA, 615 bp, Homo sapiens
ctttccttcctttttcttgtcttcttatggagtatgtctgctgagaggatcaggttacatggaatcagattaattgtagatttctacatgtgatamaatccagtatattggccacgattggctatgaaaccagtagcacaaaatggcggagtttcccaggatggccaagactggcctggaaaatctgggcaagtgtgttctctgagaccaattccatatattcaggctccgttttgtattagtttcttgaattcaaataaagaatccaatgttgctttaagaaataattttggcaaaatcaaatacaaaatacattgtatgaggatggagtcacatcacagtgaaagaaaaaaatacttgattacatagaattattaattggaaaactaggagaaaagtgttgatcatgagttcgatgtaaaactgtgctagaaatgtttatcaagacctactatttgtaaaacacattgctatggagttaggcctctgttagcagagtttaaattcagtttttctttcaaagaatatcattagctggcaggacaaacagggaaacagggttaaagaaactttaaagatgtttcctagccatgttcccatcaatacgtttgctca

SEQ ID NO: 440796 - DNA, 469 bp, Homo sapiens
gctatgaaaccagtagcacaaaatggcrgagtttcccaggatggccaagactggcctggaaaatctgggcaagtgtgttctctgagaccaattccatatattcaggctccgttttgtattagtttcttgaattcaaataaagaatccaatgttgctttaagaaataattttggcaaaatcaaatacaaaatacattgtatgaggatggagtcacatcacagtgaaagaaaaaaatacttgattacatagaattattaattggaaaactaggagaaaagtgttgatcatgagttcgatgtaaaactgtgctagaaatgtttatcaagacctactatttgtaaaacacattgctatggagttaggcctctgttagcagagtttaaattcagtttttctttcaaagaatatcattagctggcaggacaaacagggaaacagggttaaagaaactttaaagatgtttcctagc

SEQ ID NO: 440797 - DNA, 615 bp, Homo sapiens
ctttccttcctttttcttgtcttcttatggagtatgtctgctgagaggatcaggttacatggaatcagattaattgtagatttctacatgtgatacaatccagtatattggccacgattggctatgaaaccagtagcacaaaatggcggagtttcccaggatggccaagactggcctggaaaatctgggcaagtgtgttctctgagaccaattccatatattcaggctccrttttgtattagtttcttgaattcaaataaagaatccaatgttgctttaagaaataattttggcaaaatcaaatacaaaatacattgtatgaggatggagtcacatcacagtgaaagaaaaaaatacttgattacatagaattattaattggaaaactaggagaaaagtgttgatcatgagttcgatgtaaaactgtgctagaaatgtttatcaagacctactatttgtaaaacacattgctatggagttaggcctctgttagcagagtttaaattcagtttttctttcaaagaatatcattagctggcaggacaaacagggaaacagggttaaagaaactttaaagatgtttcctagccatgttcccatcaatacgtttgctca

SEQ ID NO: 440798 - DNA, 532 bp, Homo sapiens
gaaaatgactatattcacacatggctctaacagttgtatatattgaatagtctgaaaaaatatattttttctggtacttgaccatttcagttactcaccactgttaccaacaggcctgggtaacagcctcttctgagtggacttctaagactgtggtcatggaaatgcagctcagggaccactgtgtgacaagcagagtggaagcgggaggtgtgggcaccattcgccctggtggtttgctccatgaaagggggatagtgctggctcatgacaaagaaragaaaactggtgcgacaccccatggttaacgtgacggcacgtggctaatgaacacttaatgatccctcgcctgcacgtttctgtcacccatttgagaatgtcacttgttttatacttagccctacagtgcgggattagcttcttgctaaagtgaattagtcaaggttctttagaaatcagaacaaaagtgctagaagatgtgtacagatatgaagagactgaacatgtacacactggttcagataatgtataa

SEQ ID NO: 440799 - DNA, 508 bp, Homo sapiens
aggtaagcattgactgtttcttcaggatgggcccaggtaagcatggactattccttgaggatggagccaggtaatcactgaccattccttcagaatacagccagttaagcatggactgtttcttcaggatgggcccaggtaagcatggaccattccttcaggatggagccaggtaagtgttgaccattccttcagaatacagccaggtaagcatggactgtttcttcaggatgggcccaggtaagyatgaaccagtccttcaggatggagccaggtaagggtggaccattccttcagaatacagccaggtaagcatggacagtttcctcaagatgggcccaggtaagcatggaccaatccttcaagatggagtcacgtaagtgtggaccattccttcaggatggaatcaggtaagcagggaccattccttcagaatacagccaggtaagcatgcactgtttcttcaggatgggcccagttaagcatggaccattccttcaggatggag

SEQ ID NO: 440800 - DNA, 508 bp, Homo sapiens
aggtaagcattgactgtttcttcaggatgggcccaggtaagcatggactattccttgaggatggagccaggtaatcactgaccattccttcagaatacagccagttaagcatggactgtttcttcaggatgggcccaggtaagcatggaccattccttcaggatggagccaggtaagtgttgaccattccttcagaatacagccaggtaagcatggactgtttcttcaggatgggcccaggtaagcatgaaccagtccttcaggatggagccaggtaagggtggaccattccttcagaatacagccaggtaagcatggacagtttcctcaagatgggcccaggtaagcatggaccaatccttcaagatggagtcasgtaagtgtggaccattccttcaggatggaatcaggtaagcagggaccattccttcagaatacagccaggtaagcatgcactgtttcttcaggatgggcccagttaagcatggaccattccttcaggatggag

SEQ ID NO: 440801 - DNA, 420 bp, Homo sapiens
ggtggagtcaggtaagtgtggaccattccttcaggatggagcaaggtaagcatggactgtttcttcaggatgggcccaggkaagcatggaccattcctgcaggatggagccaggtaagtgtggaccatttcttcagaatacagccaggtaaacatggagtgtttcttcaggatgggcccaggtaagcatggaccattccttcaggatgcagtcaggtatttgtggaccattccttcagaatggagcaaggtaagcatggactgtttcttcaggatgggcccaggtaagcatggaccattccttcaggttggagccagggaaatgtggaccattccttcagaatacagccaggtaagcatggactgtttcttcaggatgggcccaggtaaacatggaccataccttcaggatggagacagg

SEQ ID NO: 440802 - DNA, 420 bp, Homo sapiens
ggtggagtcaggtaagtgtggaccattccttcaggatggagcaaggtaagcatggactgtttcttcaggatgggcccaggtaagcatggaccattcctgcaggatggagccaggtaagtgtggaccatttcttcagaatacagccaggtaaacatggagtgtttcttcaggatgggcccaggtaagcatggaccattccttcaggatgcagtcaggtatttgtggaccattccttcagaatggagcaaggtaagcatggastgtttcttcaggatgggcccaggtaagcatggaccattccttcaggttggagccagggaaatgtggaccattccttcagaatacagccaggtaagcatggactgtttcttcaggatgggcccaggtaaacatggaccataccttcaggatggagacagg

SEQ ID NO: 440803 - DNA, 420 bp, Homo sapiens
ggtggagtcaggtaagtgtggaccattccttcaggatggagcaaggtaagcatggactgtttcttcaggatgggcccaggtaagcatggaccattcctgcaggatggagccaggtaagtgtggaccatttcttcagaatacagccaggtaaacatggagtgtttcttcaggatgggcccaggtaagcatggaccattccttcaggatgcagtcaggtatttgtggaccattccttcagaatggagcaaggtaagcatggactgtttcttcaggatgggcccaggtaagcatggaccattccttcaggttggagccagggaartgtggaccattccttcagaatacagccaggtaagcatggactgtttcttcaggatgggcccaggtaaacatggaccataccttcaggatggagacagg

SEQ ID NO: 440804 - DNA, 420 bp, Homo sapiens
ggtggagtcaggtaagtgtggaccattccttcaggatggagcaaggtaagcatggactgtttcttcaggatgggcccaggtaagcatggaccattcctgcaggatggagccaggtaagtgtggaccatttcttcagaatacagccaggtaaacatggagtgtttcttcaggatgggcccaggtaagcatggaccattccttcaggatgcagtcaggtatttgtggaccattccttcagaatggagcaaggtaagcatggactgtttcttcaggatgggcccaggtaagcatggaccattccttcaggttggagccagggaaatgtggaccattccttcagaatacagccaggtaagcatgkactgtttcttcaggatgggcccaggtaaacatggaccataccttcaggatggagacagg

SEQ ID NO: 440805 - DNA, 491 bp, Homo sapiens
tcaggatgggcccaggtcagcatggaccattccttcagggtggagtcaggtaaatgtggaccattccttcaggatggagcaaggtaagcatggactgtttcttcaggatgggcccaggtaagcatggaccattccttcacgatggagccagctaagtgtggaccatttcttcagaataccgccargttagcatggattgtttcttcaggatgggcccaggtaagcatggaccattccttcaggatggagtcaggtaattgtggaccattccttcagaatgcagcaaggtaatcatggactgtttcttcaggatgggcccaggtaagcatggaccattccttcaggttggagccaggtaagtgtggaccattccttcagaatacagcctggtaagcttggactgtttcttcaggatgggcccaggtaagcatggaccattccttcaggatggagtcacataagtgtggaccattccttcaggatggaatgag

SEQ ID NO: 440806 - DNA, 491 bp, Homo sapiens
tcaggatgggcccaggtcagcatggaccattccttcagggtggagtcaggtaaatgtggaccattccttcaggatggagcaaggtaagcatggactgtttcttcaggatgggcccaggtaagcatggaccattccttcacgatggagccagctaagtgtggaccatttcttcagaataccgccaagtwagcatggattgtttcttcaggatgggcccaggtaagcatggaccattccttcaggatggagtcaggtaattgtggaccattccttcagaatgcagcaaggtaatcatggactgtttcttcaggatgggcccaggtaagcatggaccattccttcaggttggagccaggtaagtgtggaccattccttcagaatacagcctggtaagcttggactgtttcttcaggatgggcccaggtaagcatggaccattccttcaggatggagtcacataagtgtggaccattccttcaggatggaatgag

SEQ ID NO: 440807 - DNA, 607 bp, Homo sapiens
ccattccttcataatgcggccaggtaagcatggaccattccttcaggatggagcctgccaagtgtggaccattccttcaggatgcagccaggtaagcatcagccattccttcataatgcagccaggtaagcatcagccattccttcataatgcagtcaggtaagcatggaccattccttcaggatggagcctgccaagtgtggaccgttccttcaggatrccgccaggtaagcatcagccattccttcataatgcggccaggtaagcatggaccattccttcaggatgccgccaggtaagcctgaaccattccttcagaatgcatccaggtaagcatggaccagtttttaagtatacagtcagttaagtatgacacataccctcaggatacagccaggtaagcatgaaccattccttcaggatgccaccaggtaagcatgaaccattccatcaggatggagccagataagtatgaaccattccatcaggatgcagcaaggtaaacatggactaatctgtcaggatgcagtcgggtaagcatgaaccatttcttaatagtggagtcaggtaagcacataccattcctttagaatgcagccagttaagc

SEQ ID NO: 440808 - DNA, 525 bp, Homo sapiens
gggcccatcctgaagaaacactccatgcttacctgrctgtattctgaaggaatggtccacacttacctggctctatcctgaaggaatggtccatgcttacctgggcccatcctgaagaaacagtccatgcttacctggctgtattctgaaggaatggtccacacttacctggctccatcctgaaggaatggtccatgcttacctgggcccatcctgaagaaagagtccatgcttaccttgctccattctgaaggaatggtccatacttacctgaatccatcctgaaggaatggtccatgctaacatgggcccatcctgaagaaacagtccatgcttacctggctgtattctgaaggaatggtccacacttactggctccatcctgaaggaatggtccatgcttacctgggcccatcctgaagaaacagtccatgcttacctggctgtattctgaaggaatgatccacactttcctgtctccatcctgaaggtatggtccatgtttacctgggcccatcctgaaga

SEQ ID NO: 440809 - DNA, 525 bp, Homo sapiens
gggcccatcctgaagaaacactccatgcttacctgactgtattctgaaggaatggtccacacttacctggctcyatcctgaaggaatggtccatgcttacctgggcccatcctgaagaaacagtccatgcttacctggctgtattctgaaggaatggtccacacttacctggctccatcctgaaggaatggtccatgcttacctgggcccatcctgaagaaagagtccatgcttaccttgctccattctgaaggaatggtccatacttacctgaatccatcctgaaggaatggtccatgctaacatgggcccatcctgaagaaacagtccatgcttacctggctgtattctgaaggaatggtccacacttactggctccatcctgaaggaatggtccatgcttacctgggcccatcctgaagaaacagtccatgcttacctggctgtattctgaaggaatgatccacactttcctgtctccatcctgaaggtatggtccatgtttacctgggcccatcctgaaga

SEQ ID NO: 440810 - DNA, 525 bp, Homo sapiens
gggcccatcctgaagaaacactccatgcttacctgactgtattctgaaggaatggtccacacttacctggctctatyctgaaggaatggtccatgcttacctgggcccatcctgaagaaacagtccatgcttacctggctgtattctgaaggaatggtccacacttacctggctccatcctgaaggaatggtccatgcttacctgggcccatcctgaagaaagagtccatgcttaccttgctccattctgaaggaatggtccatacttacctgaatccatcctgaaggaatggtccatgctaacatgggcccatcctgaagaaacagtccatgcttacctggctgtattctgaaggaatggtccacacttactggctccatcctgaaggaatggtccatgcttacctgggcccatcctgaagaaacagtccatgcttacctggctgtattctgaaggaatgatccacactttcctgtctccatcctgaaggtatggtccatgtttacctgggcccatcctgaaga

SEQ ID NO: 440811 - DNA, 525 bp, Homo sapiens
gggcccatcctgaagaaacactccatgcttacctgactgtattctgaaggaatggtccacacttacctggctctatcctgaaggaatggtccatgcttacctgggcccatcctgaagaaacagtccatgsttacctggctgtattctgaaggaatggtccacacttacctggctccatcctgaaggaatggtccatgcttacctgggcccatcctgaagaaagagtccatgcttaccttgctccattctgaaggaatggtccatacttacctgaatccatcctgaaggaatggtccatgctaacatgggcccatcctgaagaaacagtccatgcttacctggctgtattctgaaggaatggtccacacttactggctccatcctgaaggaatggtccatgcttacctgggcccatcctgaagaaacagtccatgcttacctggctgtattctgaaggaatgatccacactttcctgtctccatcctgaaggtatggtccatgtttacctgggcccatcctgaaga

SEQ ID NO: 440812 - DNA, 506 bp, Homo sapiens
catcctgaaggaatggtccatgcttacctgggcccatcttgaggcaacagtccatgcttacctggctgtattctgaagaaatggtccacacttacctggctccatcctgcaggactggtccatgcttacctgggcccatcctgaagaracagtccatgcttacctggctgtattctgaaggaatggtccacacttacctggctccatcctgaaggaatggtccatgcttacctgggcccatcctgaagaaacagtccatgcttaccttgctccatcctgaaggattggtccctgcttacctgattccatcctgaaggaatggcccacacttatgtgactccatcctgaaggaatggtccatgcttacctgggcccatcctgaagaaacagtccatgcttacctggctgtattctgaaggaatggtccacaattacgtgactccatcctgaaggaatggtccatgcttacctgggcccatcctgaagaaacactccatgcttacctg

SEQ ID NO: 440813 - DNA, 634 bp, Homo sapiens
tttaccactttattaaaattataatttggtataattattataatttggataatatctgaatgatacctctgatatatctgagttatgatctggaytgaagtagacttaacaacaatcaatttcagtaaatatagccaagtgaccatgtagtgttacaagttccaaaatttccaccccaagaatgacacggccacagacgtgggatgtgtggcctctgctcaggacagaggggacccggtggggcaccgctgagagctctgaactgagagagacagaaaccagttaccactcattcagaccactgacttgggcagttgactgaatctctcagggcctgtttccctgtattgacaataataacctaccatggagatgaggatgaaactttacctaccgcaaacctctatggaaatacgggttgttaatattaaccaccatcagtgagcccatggctatggccacagcctagagaggctgaaacggttaactgtgactagacaccggaggttggagacttacttgctttatgactgggttgactcgtaaatgccacgtagacttgcaaaggaagcggtaaagagctgtacccccgctctggggggtttatcatcagaaggagagagacccgagggag

SEQ ID NO: 440814 - DNA, 470 bp, Homo sapiens
gactcactttcaagcctgcttttcaagccagactggcaggctggtcagttacaaactttgctgtgggtccctgaaaccaatactggatgaaatttttctgtcttgttttgtgtccttaagagcttaaccttgtgatcatgtgcagttactttcccttggtttcaccatctagaagacaggaattaggggattcatgtcctagttagccctaaacattttcttaagcagttaaaagcctttgcgagcttgaaactggttctctagactccttctggaaagagcaatagaaactgctcaatgctgtaactcagtagctaagactttgctttttgacaatggtggcctgggttctastcttggtttctgtaatgattcctttctgatttcttatttatgtaattttgccatttattgaggttttttccctcatagatagcttctgatttcctctcttgaattttcctttctct

SEQ ID NO: 440815 - DNA, 544 bp, Homo sapiens
agatgtaacgagtctctgagaaaaaaagagagagaaaaatcttatgtggtgaagatacactagcagtaaatgaattttattataagattttatagatgagctttagtatcaagagtgtagcaatgcagtactggagtttgattttctctgtctgctaaaaggccaaagttttgttgaattattgggctggttttttttttttttttttttttttgagactgagttttgctcttgttgcctaggctggagtgcaatggcgtgatcttggctcactgcaacctccacttcctgggtccaagtgattctcctgcctcagcctcccaagtagctggggttacaggcatgcaccaccatgtctggctaattttgtagagatggggtttcaccatgttggtcagactgatcttgaaatactgacatcagattatccgcccatgttggcctcccaaagtgctgggattacaggcatgagccaccacgccaggcctggtctgttcttaataagagattgtaagaggtrcttgtttcttacctgttgagtagt

SEQ ID NO: 440816 - DNA, 650 bp, Homo sapiens
tgctgtcctatcacttctcactgaccagaatgtccgcaggctggctacactgaatgacaagggaggctggaaactatgcccacaagtcctgcattaacctggaaattctttccctgtgaaagaggaaaatgaatgcgaagagacagatatcagtctccaaaaggacttatgtggcttaccattttacttagaatgtcaaacattcaaattagaatgcagccttcagtagttaaatttgaataagctagtcccattagaaggctgtatgttttkctactgatatcgaaaattttacaaactatttgtcctttggtagtcaacttcacttttgaaacaggcaaaagtaattagatattgagtctggtgaaaatgtaagtgatcaagccatatgattcgctgtatatcaaaatttcaaaatgcaattttttttagaatttagtgcgcactgccaaatctcattggaaaatgagattttattagtggagacaaataattttggaaagactttgtcattctagctgttcagtttatgaaacgagtaggacaaaccatagctgatttacctacttgttcttttagcattggttataccttcaaatttatatgtcttgagatacactattcagattattctttagaaagcaatcata

SEQ ID NO: 440817 - DNA, 650 bp, Homo sapiens
tgctgtcctatcacttctcactgaccagaatgtccgcaggctggctacactgaatgacaagggaggctggaaactatgcccacaagtcctgcattaacctggaaattctttccctgtgaaagaggaaaatgaatgcgaagagacagatatcagtctccaaaaggacttatgtggcttaccattttacttagaatgtcaaacattcaaattagaatgcagccttcagtagttaaatttgaataagctagtcccattagaaggctgtatgttttgctactgatatcgaaaattttacaaactatttgtcctttggtagtcaacttcacttttgaaacaggcaaaagtaattagatattgagtctggtgaaaatgtaagtgatcaagccatatgattcgctgtatatcaaaatttcaaaatgcaattttttttagaatttagtgcgcactgccaaatctcattggaaaatgagattttattagtggagacaaataattttggaaagactttgtcattctagctgttcagtttatgaaacgagtaggacaaaccatagctgatttacctayttgttcttttagcattggttataccttcaaatttatatgtcttgagatacactattcagattattctttagaaagcaatcata

SEQ ID NO: 440818 - DNA, 566 bp, Homo sapiens
ttagccacaatatgaagattatgtttggcaataatgacataagtaaattgggaccaaaagcaatattcttcagtgatatatcaaatgctgcttaatagtgtttgtacttactacttgttccttctgcttataagtttctttccccagaatgtcttaatgctagctgagtgttcatacttatgtctcagcttagtcgtctactcaagagatgccatctctcttggtgcaaaacctaaaacagcacctgggtcatagaggatctctaagtacttattaaagaaagaaatgagaaaagataaaaagaataacagcttacattctacaagtgtgtttagaatatttgagactggggaagagtagaggtgcagagaaagtttagtcaaaatacttactagtaaggcctggcatggtggctyatgcctgtagtctcaactatttgggaggccgaggcaggtagattgcttgagcccaggtgtttgagaccagcctgagcaacatggcaagaccctgtctttacaaaaaatacaaaaaaatttatccagatgtggtggcaagttcctgtaagc

SEQ ID NO: 440819 - DNA, 465 bp, Homo sapiens
ttaaaattcagccaggcgatgctcgtctatttataaatggccttcgtgttgatatggatgtttatgacgcttttaggtaagtattaaattattgctgtaaatgaactatggtttatataaaaataaacattgtcttgaatttagtgtaagtcaaaatatgaagatcactttaaagataaatacatgtttttgattgtacaaaacagctttcttctaccaaaatgggcaagcccaaagtgtcttagaatatcagaactgggagaaacagtcaagatatttgtttggatgagggttagacctataattactttgttattctaaactgtctyttattgaagagtagattgatgatttgcagagaagttatttggaactggactgaacaaccagataccagataaggactgaagtcaacatggggtatttccccagaagacagaaattgacaagaggaatttaaaatgc

SEQ ID NO: 440820 - DNA, 383 bp, Homo sapiens
agggcagttctgatggtatttaagacccagccagataattcaagataatttcctcgtctcagggtctttgatcacatctggagaaccttaccttctgaagtaaccttcacagggtcccgggattggggcatagacatatctttgggagccactgtcagcctgtcctaacacatgtaagattcatctctgataaaggcattcarccacaagtgcagtgtggtttggtcttttaataaaatcctttaagtaatactgtaatgaattcggagctccatccggagatgccaggaggtgtcctcatttgaatgtaaagctcctccccatagcatcagttgtcacccctccttttggcttttcccatttcctctgcagatacggacaaa

SEQ ID NO: 440821 - DNA, 620 bp, Homo sapiens
  misc_feature (1)...(620): n = A,T,C or G
gaattaattaaaggaaagcttgtttttttctttcttcaagtaaaaaaatacttgaacttttataccagtagttaaaaaaaatctgtttacatttgttggtactcagtcttttcacagtttagataaaatgaccatataattcatcatctaacccagaacactttttaagaaataaaaaatacacaagtgatagttactctgggacagtaagtgcaaagtagaactgcaatgaacaaatgtaaatgaaagtttaagagcattactaccatatgcatgcaatacatacatatcctaagtatgatttctgtaaacagcatatattttgacaaactgtgcaagatcaccatatgtgtgtataatatatatgtaatatatgattatccatatcataaagacaatacatcattataaaaktatgagataatgctgataatgaggttctaagaaagaaaatatttgcattgtaaatccaaatgtcatgagtaatagaaaaaatactaatataaatttccccaaagtgtagaaatgaacccaaaaaaaataaaaacagggtaaggaaattgtgttcaagatagggagaaagtgagaaatcaactatgtaacagtnnnnnnnnnnnnnn

SEQ ID NO: 440822 - DNA, 620 bp, Homo sapiens
  misc_feature (1)...(620): n = A,T,C or G
gaattaattaaaggaaagcttgtttttttctttcttcaagtaaaaaaatacttgaacttttataccagtagttaaaaaaaatctgtttacatttgttggtactcagtcttttcacagtttagataaaatgaccatataattcatcatctaacccagaacactttttaagaaataaaaaatacacaagtgatagttactctgggacagtaagtgcaaagtagaactgcaatgaacaaatgtaaatgaaagtttaagagcattactaccatatgcatgcaatacatacatatcctaagtatgatttctgtaaacagcatatattttgacaaactgtgcaagatcaccatatgtgtgtataatatatatgtaatatatgattatccatatcataaagacaatacatcattataaaagtatgagataatgctgataatgaggttctaagaaagaaaatatttgcawtgtaaatccaaatgtcatgagtaatagaaaaaatactaatataaatttccccaaagtgtagaaatgaacccaaaaaaaataaaaacagggtaaggaaattgtgttcaagatagggagaaagtgagaaatcaactatgtaacagtnnnnnnnnnnnnnn

SEQ ID NO: 440823 - DNA, 383 bp, Homo sapiens
agggcagttctgatggtatttaagacccagccagataattcaagataatttcctcgtctcagggtctttgatcacatctggagaaccttaccttctgaagtaaccttcacagggtcccgggattggggcatagacatatctttgggagccactgtcagcctgtcctaacacatgtaagattcatctctgataaaggcattcaaccacaagtgcagtgtggtttggtcttttaataaaatcctttaagtaatactgtaatgaattcggagctccatcyggagatgccaggaggtgtcctcatttgaatgtaaagctcctccccatagcatcagttgtcacccctccttttggcttttcccatttcctctgcagatacggacaaa

SEQ ID NO: 440824 - DNA, 577 bp, Homo sapiens
  misc_feature (1)...(577): n = A,T,C or G
tttatcctataagggaaatgtgtatttttcttctggctacttttgagaattattctttgtctttgattttcagcagttttgccttgatgtggctattatagatttcattgaatctgtcctctatggatttcactaaattcctttattnctatgcagtgattattagattgggtaattcttcactgttacttcttcaaaatattgcytctgtctcgcatttcctttcctcctttctgagactccaattacatctgtctgagatgtttgtatcttattttctttctttgtctctctctttctccctcctcctgcttctctctctccctctcctctttcatcttttctttctatttatgctgcagtctagacattgtgtactgctttatcttctatactactaatcagatcttctgctgtgaccaatctgttgttgaatatgccagtgagctattaattttagttactgtgattttcagtttgggaatttctgttcatgtatcctagtgaaactccttatcttgctgcctattttcctggaaatattaattacagttattttaaagatttttcgttaact

SEQ ID NO: 440825 - DNA, 577 bp, Homo sapiens
  misc_feature (1)...(577): n = A,T,C or G
tttatcctataagggaaatgtgtatttttcttctggctacttttgagaattattctttgtctttgattttcagcagttttgccttgatgtggctattatagatttcattgaatctgtcctctatggatttcactaaattcctttattnctatgcagtgattattagattgggtaattcttcactgttacttcttcaaaatattgcttctgtctcgcatttcctttcctcctttctgagactccaattacatctgtctgagatgtttgtatcttattttctttctttgtctctctctttctccctcctcctgcttctctctctccctctcctctttcatcttttctttctatttatgctgcagtctagacattgtgtactgctttatcttctatactactaatcagatcttctgctgtgaccaatctgttgttgaatatgccagtgagctattaattttagttaytgtgattttcagtttgggaatttctgttcatgtatcctagtgaaactccttatcttgctgcctattttcctggaaatattaattacagttattttaaagatttttcgttaact

SEQ ID NO: 440826 - DNA, 577 bp, Homo sapiens
  misc_feature (1)...(577): n = A,T,C or G
tttatcctataagggaaatgtgtatttttcttctggctacttttgagaattattctttgtctttgattttcagcagttttgccttgatgtggctattatagatttcattgaatctgtcctctatggatttcactaaattcctttattnctatgcagtgattattagattgggtaattcttcactgttacttcttcaaaatattgcttctgtctcgcatttcctttcctcctttctgagactccaattacatctgtctgagatgtttgtatcttattttctttctttgtctctctctttctccctcctcctgcttctctctctccctctcctctttcatcttttctttctatttatgctgcagtctagacattgtgtactgctttatcttctatactactaatcagatcttctgctgtgaccaatctgttgttgaatatgccagtgagctattaattttagttactgygattttcagtttgggaatttctgttcatgtatcctagtgaaactccttatcttgctgcctattttcctggaaatattaattacagttattttaaagatttttcgttaact

SEQ ID NO: 440827 - DNA, 569 bp, Homo sapiens
aagatcctcccactgaagaagcaaaatttcaagtcttggtccttagaagtaatgctaaaaggtaaactctcttcccacttgtccacaaaagtcatacttttagcattttaaaacacttgcaagagcaaagaaaagttctcccagctggtcaggtgcagtggctcatgcttgtaatcccagcccttagggaggctgaygcgggcagatcacttgggcccaagagttcgagaccaggctgggcagcatggcaagactggtcgcacttgcttatattcccagctacttggaagggggaggtgggaggatcgcttgagcttgggagatggaggctgcagtgagcagtgcttgtgtcactgcaccccagcctgggcaacacagcaagaccccatttcaagaaaaaaacagttctacctagccataatcaatgcaaatattcccctacaatatatatttgaataatacactaaaataaaataattccagtaacacatttaatataatcttttctcagccccctgttggaaaaaatcctttgtatgaaattcaattatataaataggaaatgtagt

SEQ ID NO: 440828 - DNA, 569 bp, Homo sapiens
aagatcctcccactgaagaagcaaaatttcaagtcttggtccttagaagtaatgctaaaaggtaaactctcttcccacttgtccacaaaagtcatacttttagcattttaaaacacttgcaagagcaaagaaaagttctcccagctggtcaggtgcagtggctcatgcttgtaatcccagcccttagggaggctgatgcgggcagatcacttgggcccaagagttcgagaccagsctgggcagcatggcaagactggtcgcacttgcttatattcccagctacttggaagggggaggtgggaggatcgcttgagcttgggagatggaggctgcagtgagcagtgcttgtgtcactgcaccccagcctgggcaacacagcaagaccccatttcaagaaaaaaacagttctacctagccataatcaatgcaaatattcccctacaatatatatttgaataatacactaaaataaaataattccagtaacacatttaatataatcttttctcagccccctgttggaaaaaatcctttgtatgaaattcaattatataaataggaaatgtagt

SEQ ID NO: 440829 - DNA, 569 bp, Homo sapiens
aagatcctcccactgaagaagcaaaatttcaagtcttggtccttagaagtaatgctaaaaggtaaactctcttcccacttgtccacaaaagtcatacttttagcattttaaaacacttgcaagagcaaagaaaagttctcccagctggtcaggtgcagtggctcatgcttgtaatcccagcccttagggaggctgatgcgggcagatcacttgggcccaagagttcgagaccaggctgggcagcatggcaagactggtcgcacttgcttatattcccagctacttggaagggggaggtgggaggatcgcttgagctygggagatggaggctgcagtgagcagtgcttgtgtcactgcaccccagcctgggcaacacagcaagaccccatttcaagaaaaaaacagttctacctagccataatcaatgcaaatattcccctacaatatatatttgaataatacactaaaataaaataattccagtaacacatttaatataatcttttctcagccccctgttggaaaaaatcctttgtatgaaattcaattatataaataggaaatgtagt

SEQ ID NO: 440830 - DNA, 569 bp, Homo sapiens
aagatcctcccactgaagaagcaaaatttcaagtcttggtccttagaagtaatgctaaaaggtaaactctcttcccacttgtccacaaaagtcatacttttagcattttaaaacacttgcaagagcaaagaaaagttctcccagctggtcaggtgcagtggctcatgcttgtaatcccagcccttagggaggctgatgcgggcagatcacttgggcccaagagttcgagaccaggctgggcagcatggcaagactggtcgcacttgcttatattcccagctacttggaagggggaggtgggaggatcgcttgagcttgggagrtggaggctgcagtgagcagtgcttgtgtcactgcaccccagcctgggcaacacagcaagaccccatttcaagaaaaaaacagttctacctagccataatcaatgcaaatattcccctacaatatatatttgaataatacactaaaataaaataattccagtaacacatttaatataatcttttctcagccccctgttggaaaaaatcctttgtatgaaattcaattatataaataggaaatgtagt

SEQ ID NO: 440831 - DNA, 458 bp, Homo sapiens
tagaggcccaatagcaacctgtcctctgggattccgtcttccaagttggagcaactgggagaacaacaggggccactggaactgtccaacagagtcctgcagctgcaggacagccatggggtagatggaggacagtcagaattctctgctgctttcatttcccacagagctgttgtccccgtcttcctccccacagtcagtgctgtgggctcactttgcaaaccacacaaggaccggcctgtgagaaacttccagtagaaaatsctgccaccctgagaaaccaggactttccagaatctttctgtccacatgtcacctacttataaactgagggaggcagtgctggattctgtggtgaggcagggttggggggaagggtttttaacttggaagatctaaataaaccagagttcaagacctgtcacaattccaagtatgatgtaaatcactcatccccc

SEQ ID NO: 440832 - DNA, 458 bp, Homo sapiens
tagaggcccaatagcaacctgtcctctgggattccgtcttccaagttggagcaactgggagaacaacaggggccactggaactgtccaacagagtcctgcagctgcaggacagccatggggtagatggaggacagtcagaattctctgctgctttcatttcccacagagctgttgtccccgtcttcctccccacagtcagtgctgtgggctcactttgcaaaccacacaaggaccggcctgtgagaaacttccagtagaaaatgctgccaccctgagaaaccaggastttccagaatctttctgtccacatgtcacctacttataaactgagggaggcagtgctggattctgtggtgaggcagggttggggggaagggtttttaacttggaagatctaaataaaccagagttcaagacctgtcacaattccaagtatgatgtaaatcactcatccccc

SEQ ID NO: 440833 - DNA, 574 bp, Homo sapiens
atggctttttcttagaacgtattatacatgattacaagtgtaaaaatatggtgaaataattttgtttgcttttcaaatgatttttgttgctaaaaactaaaattaaaaatagrgaacaagtatcctaaatgtttttgaaactattatcatagcaattctcagactatcaagactatgaactattttccatgatagcacactaatcataacaatcataaccatttgtatgtgcatatccaatatctaatattcagggataaggtaatatggatcacccagtttaatgctcacagattcttatgtgaaaaaatatatatttggtcatagttaaaatggacaaaataagtgaatctgtctgatggtcagatagtaaatatgtcaaacaaacaaatgattacaattttcagttagaataacaaaagcacttagatcactgatttaataatagtgattccctagctaattttttcatctgtgcaggttgattatcagggatgaaaaagtgtgaaaacattccaattaagtaaattgctctgcagttggtgggaagtactaagtaattacttgtggtgag

SEQ ID NO: 440834 - DNA, 545 bp, Homo sapiens
ggctttttcttagaacgtattatacatgattacaagtgtaaaaatatggtgaaataattttgtttgcttttcaaatgatttttgttgctaaaaactaaaattaaaaatagggaacaagtatcctaaatgtttttgaaactattatcatagcaattctcagactatcaagactatgaactattttccatgatagcacactaatcataacaatcataaccatttgtatgtgcatatcyaatatctaatattcagggataaggtaatatggatcacccagtttaatgctcacagattcttatgtgaaaaaatatatatttggtcatagttaaaatggacaaaataagtgaatctgtctgatggtcagatagtaaatatgtcaaacaaacaaatgattacaattttcagttagaataacaaaagcacttagatcactgatttaataatagtgattccctagctaattttttcatctgtgcaggttgattatcagggatgaaaaagtgtgaaaacattccaattaagtaaattgctctgcagttggtggg

SEQ ID NO: 440835 - DNA, 574 bp, Homo sapiens
atggctttttcttagaacgtattatacatgattacaagtgtaaaaatatggtgaaataattttgtttgcttttcaaatgatttttgttgctaaaaactaaaattaaaaatagggaacaagtatcctaaatgtttttgaaactattatcatagcaattctcagactatcaagactatgaactattttccatgatagcacactaatcataacaatcataaccatttgtatgtgcatatccaatatctaatattcagggataaggtaatatggatcacccagtttaatgctcacagattcttatgtgaaaaaatatatatttggtcatagttaaaatggacaaaataagtgaatctgtctgatggtcagatagtaaatatgtcaaacaaacaaatgattacaattttcagttagaataacaaaagcacttagatcactgayttaataatagtgattccctagctaattttttcatctgtgcaggttgattatcagggatgaaaaagtgtgaaaacattccaattaagtaaattgctctgcagttggtgggaagtactaagtaattacttgtggtgag

SEQ ID NO: 440836 - DNA, 574 bp, Homo sapiens
atggctttttcttagaacgtattatacatgattacaagtgtaaaaatatggtgaaataattttgtttgcttttcaaatgatttttgttgctaaaaactaaaattaaaaatagggaacaagtatcctaaatgtttttgaaactattatcatagcaattctcagactatcaagactatgaactattttccatgatagcacactaatcataacaatcataaccatttgtatgtgcatatccaatatctaatattcagggataaggtaatatggatcacccagtttaatgctcacagattcttatgtgaaaaaatatatatttggtcatagttaaaatggacaaaataagtgaatctgtctgatggtcagatagtaaatatgtcaaacaaacaaatgattacaattttcagttagaataacaaaagcacttagatcactgatttaataatagtgattccctagstaattttttcatctgtgcaggttgattatcagggatgaaaaagtgtgaaaacattccaattaagtaaattgctctgcagttggtgggaagtactaagtaattacttgtggtgag

SEQ ID NO: 440837 - DNA, 404 bp, Homo sapiens
aactgcttagaccagcacacttctctgatttgtcaatgtcactgatttaaaaatgaaagttaataccttttaagatatctgtacaattctagggcagctgtttcagaaggtcaaatractcacagccaatggggaactagagagatatctgaggatttggctggtaaaccagactttcactgacagggtcccctttggggctgtggtagaggttctcttaaaagacagagcagcttaaagaaatcactgaggattttcactattacaacaacaaaatgatactgaagtgctatattgattttaaatttgacaaaacgacagaatccctgacaaaacagaaccattactgtggaataaatcagttagattctggatcagccccattattattcatatcatcacaa

SEQ ID NO: 440838 - DNA, 543 bp, Homo sapiens
ccaactcccaaactcgctagtccctggtaacaactattccaccttctgcttctatgggctcaacatttttagactccacatataagctggatcctgtagtattggtctttctgtgcctgacttattacaccgaacataatgtcctccaggttcatctatgttctcacaaataaataggatttcttttattttatggccaaatagcattccattgtgtatgtacaccacattttccttatccattcatccacagatggacacttcagttgattccaaatcttggctattatgaataatactgcaatgaacatggttgtacagatatctaaaagacatacggatttaatttcctttggatacatacacaatagtgggattgctgaatcatttggtaattctatttttgattttttgaggaacctccctactgctttccataatggatatacaaatttacattgccaccaacagtatacagggatcctcttttcttcayatcttcatcgacacttgttatcttttgtctttttgataataaccatt

SEQ ID NO: 440839 - DNA, 586 bp, Homo sapiens
actggcaagcaatggggaaataagtctaggagaatcagatatagtaaaaggtagaaactaaattaaattaaaaatgcatgatgtaacagcttgttccattacttgagttggaccatacttttaattctgagaatcttctcagtcaaagaaaggtggaaaaacaaccccttgccaggctgtcaatgytacatttaaggtatttaaagattttttaacaatcactgggatgatgcaatcatgggattgtacatggtaagatttttgaagaggtaatgggatatcagctagaaactagaggacctttaagatctcttacaatgactgtgattttctttggtggtggtgatgatgattgtaaagtgaataagtgtaaaagtattaatgtattgagtacttatgtcagccctctgctattgctttgcatatattaactcatttaaccctaaagaagctccaggaagaaagtactcttattatcttcattgcagagttgaggacagaaagaggttaagtaacttggcccccagctagtttgtgggaagatgaggagttgagctaaggaggttggctccacagccttggctcc

SEQ ID NO: 440840 - DNA, 586 bp, Homo sapiens
actggcaagcaatggggaaataagtctaggagaatcagatatagtaaaaggtagaaactaaattaaattaaaaatgcatgatgtaacagcttgttccattacttgagttggaccatacttttaattctgagaatcttctcagtcaaagaaaggtggaaaaacaaccccttgccaggctgtcaatgctacatttaaggtatttaaagattttttaacaatcactgggatgatgcaatcatgggattgtacatggyaagatttttgaagaggtaatgggatatcagctagaaactagaggacctttaagatctcttacaatgactgtgattttctttggtggtggtgatgatgattgtaaagtgaataagtgtaaaagtattaatgtattgagtacttatgtcagccctctgctattgctttgcatatattaactcatttaaccctaaagaagctccaggaagaaagtactcttattatcttcattgcagagttgaggacagaaagaggttaagtaacttggcccccagctagtttgtgggaagatgaggagttgagctaaggaggttggctccacagccttggctcc

SEQ ID NO: 440841 - DNA, 526 bp, Homo sapiens
tttaaaatatctgctttgataattccaacattcctgccatacttgactctgcttatgatgcttgttcatacttttcaaactgtttttttctttgcatttcagtctatcttggaattttttttgttgaaaagtgaacacaatgtactaagtaaaagcagctatagtaaataggcctttagtaatgtagtgatagagtgtaaggggaaggggagcattctatagtcctatgattagggctcagtcttttggtgagactgtgccccttgactgtgaacttcatcagtgcttctcagttcctccccgactttagatgagacataatggctgaagggaggaygaagttgtatatttccctttttccatgtggaaatctaaaagggattgtagttgagtgtttctcttcccccacatgaaaggccagaaggagatggagttatttattcccttttgtgcatgtggaaggctacagccagttgagtattttccttctgtcacatatagtaggctctgataaaaccccagcaga

SEQ ID NO: 440842 - DNA, 562 bp, Homo sapiens
tatgtaatctttttcagtatattctcagggtgtgtttgaggaaagcttttttttttttttggccattgtccaagggtttagaactgaatgggaatgtctgtaaatggatctgatggaggttggaatgtgtatcagcttttaatcatcactgtaacaaatcactaaaatattctctttattatctctcactttagaagtgtgggagggctggactgatgactctgcttatagtcytacaaggacaaaatcaaggtgctcttgggctccttatgaaggccctagggcagaatgtgtgtccaagcacatacaggttagagcagaattcaacttcttgtagttgtaggagtgaggtcccaattcatcactggctggtagttggggcctctcagcaatgtcaggctgcctgcattgctcttcatagagcccagttcattttctaaaccagcaatggtgcagagagacattctcctgcttctagtttctctggcttcccctcacccacacctctcttctgtgtctcttctgcctccaaccagagttaaatctcttaagtgctcatgtg

SEQ ID NO: 440843 - DNA, 577 bp, Homo sapiens
tacttggatcttaattttgaggttattatagatatatagtttaaattaaatataacctgaaaaataaggtagctgcatagagaaatgccattttatagtaattcataactaagttgactaatagtaataggtatggtatgtctgtcccggtactatgaaactgtttatgccttctaataggtcagtttattataatagatcatcttttccaccttgraaagaagtaaacagtcagtgttaggtttaggaaatccacaaatgcagaaataccaaagtagcaagcattgttattaaatgtactcatttgaatatatttcatttgaaatttcatctggtatattacacttgttgtttgactatgcagattcctgggggattttttttcttgtcttggtgcaatcttaaccaacatagcattatttaggatcacttttgagaagttaacaagatatacaccaatagatttatttaataacaagaaaagtcagatgctcacatattaataatatcctgatattttttaagtcattaaatgctttttgcaacccattgcccatatgtatttaagctacactgt

SEQ ID NO: 440844 - DNA, 577 bp, Homo sapiens
tacttggatcttaattttgaggttattatagatatatagtttaaattaaatataacctgaaaaataaggtagctgcatagagaaatgccattttatagtaattcataactaagttgactaatagtaataggtatggtatgtctgtcccggtactatgaaactgtttatgccttctaataggtcagtttattataatagatcatcttttccaccttggaaagaagtaaacagtcagtgttaggtttaggaaatccacaaatgcagaaataccaargtagcaagcattgttattaaatgtactcatttgaatatatttcatttgaaatttcatctggtatattacacttgttgtttgactatgcagattcctgggggattttttttcttgtcttggtgcaatcttaaccaacatagcattatttaggatcacttttgagaagttaacaagatatacaccaatagatttatttaataacaagaaaagtcagatgctcacatattaataatatcctgatattttttaagtcattaaatgctttttgcaacccattgcccatatgtatttaagctacactgt

SEQ ID NO: 440845 - DNA, 521 bp, Homo sapiens
agggagttctcttgggcctcttttataagggcactaattccattcattagggctccaccctcctgacttaattaccctccaaagcctcctgacaccatgactttggggtcaggatttcaacatatgaatctggggtggggaagcaaacattcaatactttgcaccagtgtaacaccaattatactggattcatttaatatgyttgtctcctattaattaatatttgtttacattgtcaatgttttgaaagtacttcataatcaggatatttcctatcacgctttctccatgtaaaaaaatatttatccatctatctataaactgagctgtgtactaataatgattcaatagtatagatttagatgtagacttaaatatataagtaatattttatgtaagccaatgacttcagacagtacgatttgttttgtttttatgagctaactgttagaagtataaatggatttatttgttgtagagatatgactatgatattgtttgaaagtttccacttatttact

SEQ ID NO: 440846 - DNA, 521 bp, Homo sapiens
agggagttctcttgggcctcttttataagggcactaattccattcattagggctccaccctcctgacttaattaccctccaaagcctcctgacaccatgactttggggtcaggatttcaacatatgaatctggggtggggaagcaaacattcaatactttgcaccagtgtaacaccaattatactggattcatttaatatgtttgtctcctattaattaatatttgtttacattgtcaatgttttgaaagtacttcataatcaggatatttcctatcacgctttctccatgtaaaaaaatatttatccatctatctataaactgagctgtgtactaataatgattcaatagtatagatttagatgtrgacttaaatatataagtaatattttatgtaagccaatgacttcagacagtacgatttgttttgtttttatgagctaactgttagaagtataaatggatttatttgttgtagagatatgactatgatattgtttgaaagtttccacttatttact

SEQ ID NO: 440847 - DNA, 521 bp, Homo sapiens
agggagttctcttgggcctcttttataagggcactaattccattcattagggctccaccctcctgacttaattaccctccaaagcctcctgacaccatgactttggggtcaggatttcaacatatgaatctggggtggggaagcaaacattcaatactttgcaccagtgtaacaccaattatactggattcatttaatatgtttgtctcctattaattaatatttgtttacattgtcaatgttttgaaagtacttcataatcaggatatttcctatcacgctttctccatgtaaaaaaatatttatccatctatctataaactgagctgtgtactaataatgattcaatagtatagatttagatgtagacttaaatatataagtaatattttatgtaagccaatgacttcagacagtacgatttgttttgtttttatgagctaactgttagaagtataaatggatttatytgttgtagagatatgactatgatattgtttgaaagtttccacttatttact

SEQ ID NO: 440848 - DNA, 565 bp, Homo sapiens
tgacttcagacagtacgatttgttttgtttttatgagctaactgttagaagtataaatggatttatttgttgtagagatatgactatgatattgtttgaaagtttccacttatttactacatgtagctcaaatatatttttcttttaatgttaaatgaaaatatgaagttatttaaacagcaagtaaactttctgcagatacttatttttgtattgggaagaaaaaytgattaaatgtttcatgttttttataaactcaaaaggtattaatttcatggctagagataaattatttcttagtatcaacttggtttaaatttgactagagactcaaaatgcaaagcaataaagataaaaagtggttccactgccagtgtcattcagttgccttctcttacctccaaaataataggtgtcacctgaatcaatgagcacagccaccaggggctgaacagctgtgtcatcgtccaccaccacattcatatggctccacttggcagagaaggacacagagtgccactgcccatcgtttaatccagcacctggaggaaatacaatcagtcag

SEQ ID NO: 440849 - DNA, 565 bp, Homo sapiens
tgacttcagacagtacgatttgttttgtttttatgagctaactgttagaagtataaatggatttatttgttgtagagatatgactatgatattgtttgaaagtttccacttatttactacatgtagctcaaatatatttttcttttaatgttaaatgaaaatatgaagttatttaaacagcaagtaaactttctgcagatacttatttttgtattgggaagaaaaactgattaaatgtttcatgttttttayaaactcaaaaggtattaatttcatggctagagataaattatttcttagtatcaacttggtttaaatttgactagagactcaaaatgcaaagcaataaagataaaaagtggttccactgccagtgtcattcagttgccttctcttacctccaaaataataggtgtcacctgaatcaatgagcacagccaccaggggctgaacagctgtgtcatcgtccaccaccacattcatatggctccacttggcagagaaggacacagagtgccactgcccatcgtttaatccagcacctggaggaaatacaatcagtcag

SEQ ID NO: 440850 - DNA, 577 bp, Homo sapiens
  misc_feature (1)...(577): n = A,T,C or G
nnnnnnnnnnnnnnnnnnnnnnnnnnnnnntattgctggggaaaaccccccagctgtgcggatggggtccccatgcatggtctccatcctggggtctgtgtgctactttttacaatggtccttggccttgaatgaatatggcaatcatcaggtggattctttaacatactgcttagttcctactctcttgaggtttggatttaagtggtctgggcagtggtctgggcaggtgtttccagtgtagaaatgtactattactagggactcttgttgttccctgtcaaaatctttttccattccacatcctctactacacacacataaacatttcctaccttaattccacttttcccttatcayttttttgtttgtttgtttgtttttgagacaggctcttgctttgtcacccaggctggagtgcactggctcgatcacagctcattgcagcctcgatcttccagactcaagcaatcttccttagttttccgagtagttgggactacaggcacacaccactacaactaggtaatttttgtatttttttgtagagacaggggtctcactgtgttgcccaggc

SEQ ID NO: 440851 - DNA, 457 bp, Homo sapiens
cgggatgatgtattccagtgctgaaaggaaaaaaacaaaacataacaaaaactgtcaaccaagaatacacagcaaagctcttctacagaaggaaaagagaaaaggacttttgcagagacacacacacacaaagtcaagagttcattactctcagaagtgtcttacaagaaatgctaaaggaagttcttcrggctgaaagaaaaggatgttaattagtaacacaaaaatataagaaagtttgaaactcactagtaaaagtaagtacaaaaagtttaagtcaaaagtaagtacaaaagtaagtcaaattttaaaactgtggtggtagtgtttaagtaacatttattacagtggttaaaacaaactattaaaaatagttaaagctgcaataattcattaagggttacacaatataaaaagcatcaaaaacaaagtgtgggtgggtaaaaatgttgaattt

SEQ ID NO: 440852 - DNA, 457 bp, Homo sapiens
cgggatgatgtattccagtgctgaaaggaaaaaaacaaaacataacaaaaactgtcaaccaagaatacacagcaaagctcttctacagaaggaaaagagaaaaggacttttgcagagacacacacacacaaagtcaagagttcattactctcagaagtgtcttacaagaaatgctaaaggaagttcttcaggctgaaagaaaaggatgttaattagtaacacaraaatataagaaagtttgaaactcactagtaaaagtaagtacaaaaagtttaagtcaaaagtaagtacaaaagtaagtcaaattttaaaactgtggtggtagtgtttaagtaacatttattacagtggttaaaacaaactattaaaaatagttaaagctgcaataattcattaagggttacacaatataaaaagcatcaaaaacaaagtgtgggtgggtaaaaatgttgaattt

SEQ ID NO: 440853 - DNA, 457 bp, Homo sapiens
cgggatgatgtattccagtgctgaaaggaaaaaaacaaaacataacaaaaactgtcaaccaagaatacacagcaaagctcttctacagaaggaaaagagaaaaggacttttgcagagacacacacacacaaagtcaagagttcattactctcagaagtgtcttacaagaaatgctaaaggaagttcttcaggctgaaagaaaaggatgttaattagtaacacaaaaayataagaaagtttgaaactcactagtaaaagtaagtacaaaaagtttaagtcaaaagtaagtacaaaagtaagtcaaattttaaaactgtggtggtagtgtttaagtaacatttattacagtggttaaaacaaactattaaaaatagttaaagctgcaataattcattaagggttacacaatataaaaagcatcaaaaacaaagtgtgggtgggtaaaaatgttgaattt

SEQ ID NO: 440854 - DNA, 457 bp, Homo sapiens
cgggatgatgtattccagtgctgaaaggaaaaaaacaaaacataacaaaaactgtcaaccaagaatacacagcaaagctcttctacagaaggaaaagagaaaaggacttttgcagagacacacacacacaaagtcaagagttcattactctcagaagtgtcttacaagaaatgctaaaggaagttcttcaggctgaaagaaaaggatgttaattagtaacacaaaaatataagaaagtttgaaactcamtagtaaaagtaagtacaaaaagtttaagtcaaaagtaagtacaaaagtaagtcaaattttaaaactgtggtggtagtgtttaagtaacatttattacagtggttaaaacaaactattaaaaatagttaaagctgcaataattcattaagggttacacaatataaaaagcatcaaaaacaaagtgtgggtgggtaaaaatgttgaattt

SEQ ID NO: 440855 - DNA, 563 bp, Homo sapiens
ttaaccacttactagatgcatagtttgcaaatattttctcccatttaaatgattgtttcttcattctgttgaatgcttcctctgctgtgcagaagctttttagtttgatgtaatcccatttgtctatttttttgcttttgttgccagtgcttttgagatcacaatcattgcccagaccaatgtcatggaggttttcccttataatttctttcttttcttttctctttttaggcagcatcacatgagctagcccctgtattttcttctagttttgcagtttcatgtctaatgtttaagtctctaatccatttggaattgatttttgtatgtgagattgctwtttgtaagtgagataacaatctaatttcattcttctgcatgtggacatgtggtttttgcagcaccacttattgaagagactgtcctttccccattgtgtgtttttggcatctttgttgaaaatcaaatgactgtaaatgttggatttatttctgggctctctattctgttggtctatgcatctgttcttatgccagtaccatgctgttttacttacaatagct

SEQ ID NO: 440856 - DNA, 412 bp, Homo sapiens
gaacacaagtgcctcagttaagagacaggagaattgtgaaagaagcatcaacaaaaaaagaggcaaaaggatacaaggaggaaagcctaagatttgagccctatagacctgggtttgaatctgcactccacttcttactagccatggcaactaggatcagtctgttttctcatctgcaaattgaraataacaagaatctaaggctttgcagtgttgtccttagaattagaaataatgtttgtgatatacctggcagatagttgatatttaatattcttaaaacagaaataagctgaataggtatgaaaattcaagtcagtaactcagaagaggatgatctgctccttcaatacccatcatgatgctacttgaccttccccgtcaagtatccactgagctcaggatgccctga

SEQ ID NO: 440857 - DNA, 572 bp, Homo sapiens
tattttcattcatttgcatatatgtccaatggccttgccctctctccttcaattatattcaactggcaaactccaatgctgagtaaaatcaaaacaatttaatcccacttaaaattatggccactccttaggcagscccttagttactttgcaatattacatttccctaaaaattccttatgccactttccctgtccactctttcaaacttcctcctctctcctcaaaccctccaaacttcctggctctcagctgacaaccttcttttataacagtagcagataacagacacatgctgaatatatcagtcgtcctaccacttacctatctacttccctcaggattctatggatgacctttccaccctcctagctaaagtgaaaccttccctttgtgcactaaatccaagtgctatcattgactcaaggacattgtcctgcaattgtcccctcactcttctgcaccttgaatgtttgttctctttacgaaatcatttctggcaattagtgaacatgatgcattcagatccatcttaaaaaacatccttgacccaatccccccctacaaccacc

SEQ ID NO: 440858 - DNA, 433 bp, Homo sapiens
ccattattttcattcatttgcatatatgtccaatggccttgccctctctccttcaattatattcaactggcaaactccaatgctgagtaaaatcaaaacaatttaatcccacttaaaattatggccactccttaggcagccccttagttactttgcaatattacatttccctaaaaattccttatgccactttccctgtccactctttcaaacttcytcctctctcctcaaaccctccaaacttcctggctctcagctgacaaccttcttttataacagtagcagataacagacacatgctgaatatatcagtcgtcctaccacttacctatctacttccctcaggattctatggatgacctttccaccctcctagctaaagtgaaaccttccctttgtgcactaaatccaagtgctatcattgactcaagga

SEQ ID NO: 440859 - DNA, 662 bp, Homo sapiens
tgcacacacacacacacacaccactctttccccattacccagctttacttttctgtgtagcctctcaccccctggtgttttcaagttgtctgtgggtctcctgcactagactataaactccatgacagcaaggacttctgctcacctgtcacctacactggtggctggtacttagcaggtgctcagtgaatgaatgaatgaatcaatggggagtgaatgaatctatgtagctgcatttttagggaataccccacttyccagacaagctgcagaatctgaaggtaaacattggcaggggttctcagcaatggattcagaaacttagcccagcagcctcattgaaaacattgaaacactgaaaaagccaacaaggcccatagctcttggtgtcactaacagagcagttggtcagattttgagtgagcattttttaaagaaacatctgagcagttttaaaatgcaaaatattgagtgtctatttgggcactttgagttttttgtttgaccaaagtgtgttaaaattaaggtattaaaataaatatttgtttattggttgtgaattattgcaatccaaactcacctttccaaactgcaccttctgaagctttagttagcacgtatctaaacaccattaccaggctccaccagcccctctgctcctc

SEQ ID NO: 440860 - DNA, 564 bp, Homo sapiens
gggaaatcattttggaaggatattagcaaagtagcaactgtgaaattttggccaccgtattacatgatcatgaactgtagcgaggacattgcttttcctttaattttataagatacttcctctgatcagtaaacttagtgcttattaaagtacagtatgtcagccaagtgaacataccctgcttactggtatcaaacttaggtatatttttcacagcatctcactactaaaggtactttgttttgaaaaggatatattttgaaaggattaagttcctagaattttgatatctcattaaatgaaaagatggttcttcatatgctaggatatttctcactccgagttgaatctggttttctcattatttgagtagttatcacagttgtcaccagagagaacattctggaaagcacttgattaatgtgacttgatacwttttaattttgagctttctttgttccttttgcctttctcccaccggtatctagcatataactattgccaatagaagtaataagctccagtttagtactgtatattcaaagataatatattttacacagg

SEQ ID NO: 440861 - DNA, 518 bp, Homo sapiens
cgtcctgcatcttcttgaacccttgaccctaaccatcctggacaggtgagctcttaaaagtgagtcctgcctttgaagctgyaggttaagaggtaatacgatccccatcgctagttccttctgggctctagacctcagacattattttcaattcatcatttagtgtagcttccttctggcttcaggccaggccacatattttcttggtcttttcagattttacaatcacactgtctccaccagctccagaaatagatctccagaggcagaaaaaagaaaattaccaagtcatttctcaaatgccttttctccggctagacaacatcaatcttggcatggaggcttctttcctcaattgcttggctggcagggagaaaggataatggaggggctgctgtgttgactcagtgaggagagggaggccatgggtcaagacagacgctgcttcgggtgttctctcttcacacattttgagaggtttccaaggcccaagactcctagaaaatcaaatgagagcc

SEQ ID NO: 440862 - DNA, 457 bp, Homo sapiens
aattttgttcgaagatttcacaatgccacttgaggtaaggagggagacctgaggacagtatcacattaggtagraggatgggaggataggaaaggctaccctttttggggatagcccaaaaaatgatatgtaaggcacctcacatgccacagctacacttctcacatcaattctgccaagagaggacttcatcattgcacctgagcaaatcatggctcagcatgagaaagtaatttgcctaaatagaagcaggtgtcaaaccctcatcattgtgcctcacatcacctctttccattacacactttcattcactcttcatgatccacaatcatagaaataattgttgtccacagagtgctcaaaatgactgaagacatactcactactgatgttcacatttgtcactgaagatcattcttggatctcttttcatgttaaacttaacctggtacacatc

SEQ ID NO: 440863 - DNA, 457 bp, Homo sapiens
aattttgttcgaagatttcacaatgccacttgaggtaaggagggagacctgaggacagtatcacattaggtagaaggatgggaggataggaaaggctaccctttttggggatagcccaaaaaatgatatgtaaggcacctcacatgccacagctacacttctcacatcaattctgccaagagaggacttcatcattgcacctgagcaaatcatggctcagcatgagaaagtaatttgcctaaatagaagcaggtgtcaaaccctcatcattgtgcctcacatcacctctttccattacacactttcattcactcttcatgatccacaatcatagaaataattgttgtccacagagtgctcaaaatgactgaagacatactcactactgatrttcacatttgtcactgaagatcattcttggatctcttttcatgttaaacttaacctggtacacatc

SEQ ID NO: 440864 - DNA, 595 bp, Homo sapiens
tttgaggcattggggtccacggagtccaccagagccacaccaacattgggatttgtggccagatagttaaggcaataaatagtgacatttccccggacttgttatctgaatatgtggtcaacaaattcaacaaatattttgtcaattatacgctatgacaaagtcttcgccctcatgcagcctgctgtgttctcgtagtggacacacastgaactaatattagaaatagtgtcttgtggtgatgagattagggtggtagtcagctactttacaggatggtcataaaaatatctctgtgtggaggtgatatgtgagcagagacctacattgaatgagggagggaaccatgtaagtatttgaaggaaggttttccaggaaaatgaacggcaagtgcaaagactcagaagggagaacaagtttagcaagctcacagaagaccaggaaagccaacgcaccaggtagacagagtgaggggaacaaagacagaaaatgaggtaggggaggttgccagccactgaggactgtcttaataatctgtgtcctccaagcccagcagaggcttgtccctgaaaccctgtgatctgttaggcagtca

SEQ ID NO: 440865 - DNA, 595 bp, Homo sapiens
tttgaggcattggggtccacggagtccaccagagccacaccaacattgggatttgtggccagatagttaaggcaataaatagtgacatttccccggacttgttatctgaatatgtggtcaacaaattcaacaaatattttgtcaattatacgctatgacaaagtcttcgccctcatgcagcctgctgtgttctcgtagtggacacacagtgaactaatattagaaatagtgtcwtgtggtgatgagattagggtggtagtcagctactttacaggatggtcataaaaatatctctgtgtggaggtgatatgtgagcagagacctacattgaatgagggagggaaccatgtaagtatttgaaggaaggttttccaggaaaatgaacggcaagtgcaaagactcagaagggagaacaagtttagcaagctcacagaagaccaggaaagccaacgcaccaggtagacagagtgaggggaacaaagacagaaaatgaggtaggggaggttgccagccactgaggactgtcttaataatctgtgtcctccaagcccagcagaggcttgtccctgaaaccctgtgatctgttaggcagtca

SEQ ID NO: 440866 - DNA, 595 bp, Homo sapiens
tttgaggcattggggtccacggagtccaccagagccacaccaacattgggatttgtggccagatagttaaggcaataaatagtgacatttccccggacttgttatctgaatatgtggtcaacaaattcaacaaatattttgtcaattatacgctatgacaaagtcttcgccctcatgcagcctgctgtgttctcgtagtggacacacagtgaactaatattagaaatagtgtcttgtggtgatgagattagggtggtagtcagctactttacaggatggtcataaaaatatctctgtgtggaggtgatatgtgagcagagacctacattgaatgagggagggaaccatgtaagtatttgaaggaaggttttccaggaaaatgaacggcaagtgcaaagactcagaagggagaacaagtttagcaagctcacagaagaccaggaaagccaacgcaccaggtagacagagtgaggggaacaaagacagaaratgaggtaggggaggttgccagccactgaggactgtcttaataatctgtgtcctccaagcccagcagaggcttgtccctgaaaccctgtgatctgttaggcagtca

SEQ ID NO: 440867 - DNA, 600 bp, Homo sapiens
tctaatactacccttcaagggcagcagtaaggaggtttcatatacaaaagaaaatatctccttaccatatcatgattggagtctcagttgcacatcacttgcattgttgtatagtcatagtatgtgtgctaagtaaatgcttttggagaaagtcaatgggaagaataaatattactagaattatacacaaaaaatcacccaaaatatccttctyttataacctgaaaataatgctaagtgattcaattgtgcacattggaaaacaaatcctaaaagagaaaaatatcattaatcattatagttaaagttctttttccaaatccaactatgtatttggattcactatttatagcaaataggaagttcactatttataattatggtaaaattctttgcaaagggcctggttttgtaatacaagtacttcttaaatggtcagttttgacttttgttagtttatttatcttaggggcctaagacaggctacccatgttggtatcagctatgtaaagacacggggagctcttttccccaggagaaatctctggtaatttttactgctcctgtgcaattcatcttcaacaattttttccccaagtc

SEQ ID NO: 440868 - DNA, 578 bp, Homo sapiens
gctaaatgtcaactaaaaacagaacctttatctggtgaccccattatgaaatgtcaaaaaagtgatttccaaattgaaatttccttacccaagatttgctttctttaaacttgcgtctaaataccttcatttgacatgaggaaaaatatagtcaaatccattgtttgtttcttttctagccaaattgattcaaatgctcactcatctggaaaacaaatccattttgctttatatagcagaacaccttgaattttaacaggtgtttattgttattgttgttggcttttgtctgctaacttggtttttacccagtgattgatcacctgggtaggtgaatgcaatctgaaagtataggtctggagaacaaaaaagaaaaagtaaaaagcccaccatgatagcttattttttgacatttcaagggataacctctagttacaaagctttttatttccccctaatctcccaaaatacctaatcacctccttttatgtagattctgwgtttccctctgaatttagctgtaggtgatccctccttttttcagcaaggaaaactcactaactaacagtgtgcaggac

SEQ ID NO: 440869 - DNA, 617 bp, Homo sapiens
caccacgcccagccaaaatcttcctatttaagacttttacattaagttggttctttttcatcccagsggcctatgatttaatctaggacagcttcaccatctgagtaggttattaaaatatctttattacattacagtagtaactgatctccattattaaagggttctaagcaaatttttctgtcttcctgatgaatatttctgaagcaaatatctgatcaaatcccatccttgattaaaatattttagcatttccttgcttactcgaatacgaaaagtaactttaatcctgtaagttattttccatattgacctagttatgaagatggtgtatctgttttttctagtactcctattctcttaaataaacagatttatcctcttgatcccaatttaattaatatttattgggaataatttttttatttgtactgagaaagaccagatttgtttcacatcacacatactcttactagacttcatattcaatatggttgctttcttatcctagtagaaatctttcatttaaaactagacaccctgtcccatttatctttttattcctggagcctagatgtttgtttggcacataatgaatgccccacatattcttgcat

SEQ ID NO: 440870 - DNA, 617 bp, Homo sapiens
caccacgcccagccaaaatcttcctatttaagacttttacattaagttggttctttttcatcccaggkgcctatgatttaatctaggacagcttcaccatctgagtaggttattaaaatatctttattacattacagtagtaactgatctccattattaaagggttctaagcaaatttttctgtcttcctgatgaatatttctgaagcaaatatctgatcaaatcccatccttgattaaaatattttagcatttccttgcttactcgaatacgaaaagtaactttaatcctgtaagttattttccatattgacctagttatgaagatggtgtatctgttttttctagtactcctattctcttaaataaacagatttatcctcttgatcccaatttaattaatatttattgggaataatttttttatttgtactgagaaagaccagatttgtttcacatcacacatactcttactagacttcatattcaatatggttgctttcttatcctagtagaaatctttcatttaaaactagacaccctgtcccatttatctttttattcctggagcctagatgtttgtttggcacataatgaatgccccacatattcttgcat

SEQ ID NO: 440871 - DNA, 504 bp, Homo sapiens
tatgttatttctggttttgtttttatgtgcctgtgtaccaatgactctgaagatggttttattgtaggaatttatccaatttcaaattgcttagtgattcattttatctattttctctattgtatctcctattgmtgatgaaaatatctatatgtttgaattactaacacattttgcaatttttttattattttgtttgggaagcatgcaatttagtctattgataatactctgatatggtttctctgtgtccccacccaaatctcatcttgaattgtagttccgataatccccacagcttgtgggaggggtacctggtgggaggaaattgaatcatggaggcagttacccacatgctgcttttctcataatagtgactgagttatcgtgagatctgattgttttataaggggcttttctcccttttgctcagcacttctccttcgtgccatcatgtgaagaaggatgtgtttgcttccccttcaaccatgattgtaagtttcc

SEQ ID NO: 440872 - DNA, 504 bp, Homo sapiens
tatgttatttctggttttgtttttatgtgcctgtgtaccaatgactctgaagatggttttattgtaggaatttatccaatttcaaattgcttagtgattcattttatctattttctctattgtatctcctattgatgatgaaaatatctatatgtttgaattactaacacattttgcaatttttttattattttgtttgggaagcatgcaatttagtctattgataatactctgatatggtttctctgtgtccccacccaaatctcatcttgaattgtagttccgataatccccacagctygtgggaggggtacctggtgggaggaaattgaatcatggaggcagttacccacatgctgcttttctcataatagtgactgagttatcgtgagatctgattgttttataaggggcttttctcccttttgctcagcacttctccttcgtgccatcatgtgaagaaggatgtgtttgcttccccttcaaccatgattgtaagtttcc

SEQ ID NO: 440873 - DNA, 536 bp, Homo sapiens
aataattgatgaagaaaaagagcaactgagatggttagacagtcaaagagttctcaaaaatatctgaaagtacagaatgttgattaacatacaaatgacttcatattctccattgaatagcccaaatcctggtgacctttgagattttgttttgttctttctttggaatattgcagaaaatattgtaagaaaaataaagaacagatatctgagaaatatgctctaagaatatagtgatcaaattcaaaaartagactggaaagaaaagtgttagtttttcagtgatccatttcttccctaaatagtaggagcacattttaaaagaaacaaggcaggagaccaggtctaattttttttttgtgtgtgtgtgtgcaaagatgctaacagttggcctccttataagtattatttgatattgttaggaggtaaatctatatttatgtcttttataaagtatatatattatatcttggaaagatgctcctgagtttagctttgtttatggtaaataaacctactatctacagatttattag

SEQ ID NO: 440874 - DNA, 536 bp, Homo sapiens
aataattgatgaagaaaaagagcaactgagatggttagacagtcaaagagttctcaaaaatatctgaaagtacagaatgttgattaacatacaaatgacttcatattctccattgaatagcccaaatcctggtgacctttgagattttgttttgttctttctttggaatattgcagaaaatattgtaagaaaaataaagaacagatatctgagaaatatgctctaagaatatagtgatcaaattcaaaaagtagactggaaagaaaagtgttagtttttcagtgatccatttcttccctaaatagtaggagcacattttaaaagaaacaaggcaggagaccaggtctaattttttttttgtgtgtgtgtgtgcaaagatgctaacagttggcctccttataagtattatttgatattgttaggaggtaaatctatatttatgtcttttataaagtatatatattatatcttggaaagatgctcctgagtttagctttgtttatggtaartaaacctactatctacagatttattag

SEQ ID NO: 440875 - DNA, 593 bp, Homo sapiens
tttggtttaatttaattattctactaccatccattatcctggaaaattctcaagaagcgaaagaacaattatgaaggaagatgaggcaaggaaacatgagaacatagcacctttactttccacctgttttatcttctggatatgaactttgggacatgcctgacctagggaaaaattcaagaggttaaagattatatctagaatggtcatgctcatatgtgttcatagttagctgtgacccaaaagctatagaaactcaagtcttataattattaaagcaacaatgttaatgtttcagaatgtgtttamcttctttctttagaacatgtagttattatcttttgttttcacattttgcacagaagtccaaattcccaggaaaaataataaagtaataattaatattctgttgcacacttatgcagtgatatttttcattataaaataagcctaatctggtcatcacaccttttccaagttatccaatttctaagctcctttttatagaaaatctcaaaaatgtgcttatgcttgtgttttgtacttcctcagcccacttctggcttatatccaatccaatcaggcttttatgt

SEQ ID NO: 440876 - DNA, 661 bp, Homo sapiens
acatacaaaattaggctcgagagtatgggcttgttttctaaattctagttttttacctgtgtttaattgrttggcaatatttttcagcttttgaatctacatatttgcatgcaagatgagaaaatattgacctcattattattatttaaaataatattttaaaacaatggtttataatgtatgcttattattatatcattgcaaaatttataatatattatacatgtatttttacagtgctatttaagaaaacttaggttaataatatatacttagaaattaaataatatttttcttgatgagctgaaagttcttttctattgttatttctgagtgctatattttattacatactatatcacttgatattcttacatggaatatcaacatagtatagttagaaatataaaggatattattggtacctgcttatggttttcagcttcagtatgtaattcagcttaaatatctggtgaaaatatatttcataattgaaggtgaaataaagacattctcagaaaaagggaaaatgagagaatctgttacccacaaatgtgttttacaaccaatgctaaaggaagttcatcagaatgaaggaaaattataccaaagggaaactcaaatctttaagtttgaagaaagagcaacattatatgattaa

SEQ ID NO: 440877 - DNA, 505 bp, Homo sapiens
agcaaacttctacctggacatccagacctttccctacatcctctgaaatctatgtggaggttctcaaacctcaattcttgacttctgggcacctaaaggcccaacatcatgtgaaagccatgaaggcttggagcttacactgtctgaagtaacttcctgagctgtatgttggcccattttagccactgctgaagaagctgaagcagctggaacacagggcaccatgtcctaaggctgcacagarcaggggcccctgggtccacccacaaaaccatttttctctcctacacctccaggcttgtgaaggcaggggctgccatcatggtctctggcatgccctagaggtatttccccactgtcttggtaaataacatttatctcctcgttatttatgcaaatttctgcagtggacttgaatttcttttctgaaaatggggttttcttttctgtcacatcatcaggctgaaaattttataaattattatgctctgcttcctcttgactg

SEQ ID NO: 440878 - DNA, 480 bp, Homo sapiens
cctggtgccagccatggaagctgcctgtggtacacctggtccagctgcaacctcgcagggaaccaaagcttatgctggtggctggagctgtttgcmctgacaagtgcagcctgctaggctgaggggcagaatgagtccaatgggcctgagtaaaactcaggcaaaggcaccaccccagccacagaggtttccagctggaaaagccacacctcaaagattctgtgacaatatcactggtttaaatttccattaattcatttctcaaatcttccctgagtatctacttgtttcaggcaagtttttagacattgggctttaaggagtatctttcctaaggggggatacacagttgtataaataggtaggtagataaactggcagatattgaaagaggctagaaaaaagtagatgattaaataatgacaagataactaattttaaaagcgcataaagcagaattttatttttctagagatgagg

SEQ ID NO: 440879 - DNA, 516 bp, Homo sapiens
ataaactggcagatattgaaagaggctagaaaaaagtagatgattaaataatgacaagataactaattttaaaagcgcataaagcakaattttatttttctagagatgaggtctcactatgttattgcacaggtcgaagtgcaatggctattcccagctatcgccttagtgtactacaacctcaaattcttggactcaagctctcctcctgacaaggcagaatttttaagagcacacgaattaggctgaaatatactctactaaaataaccaggaagtatacaatgttagacagaaaagcttatatactacataattttatttatataaatttgaaaaacaaaaaaaaatctattaagatggtagtctgaataatggttatgtttgtggagtaatgtctgagggggacataaagtagtttcaatgatattaataatttaatattctgtaaattatggttgcacagatgtgcacttttatgaaaattatttgagtagtacttaagccttttcttatg

SEQ ID NO: 440880 - DNA, 516 bp, Homo sapiens
ataaactggcagatattgaaagaggctagaaaaaagtagatgattaaataatgacaagataactaattttaaaagcgcataaagcagwattttatttttctagagatgaggtctcactatgttattgcacaggtcgaagtgcaatggctattcccagctatcgccttagtgtactacaacctcaaattcttggactcaagctctcctcctgacaaggcagaatttttaagagcacacgaattaggctgaaatatactctactaaaataaccaggaagtatacaatgttagacagaaaagcttatatactacataattttatttatataaatttgaaaaacaaaaaaaaatctattaagatggtagtctgaataatggttatgtttgtggagtaatgtctgagggggacataaagtagtttcaatgatattaataatttaatattctgtaaattatggttgcacagatgtgcacttttatgaaaattatttgagtagtacttaagccttttcttatg

SEQ ID NO: 440881 - DNA, 516 bp, Homo sapiens
ataaactggcagatattgaaagaggctagaaaaaagtagatgattaaataatgacaagataactaattttaaaagcgcataaagcagaattttatttttctagagatgaggtctcactatgttattgcacaggtcgaagtgcaatggctattcccagctatcgccttagtgtactacaacctcaaattcttggactcaagctctcctcctgacaaggcagaatttttaagagcacacsaattaggctgaaatatactctactaaaataaccaggaagtatacaatgttagacagaaaagcttatatactacataattttatttatataaatttgaaaaacaaaaaaaaatctattaagatggtagtctgaataatggttatgtttgtggagtaatgtctgagggggacataaagtagtttcaatgatattaataatttaatattctgtaaattatggttgcacagatgtgcacttttatgaaaattatttgagtagtacttaagccttttcttatg

SEQ ID NO: 440882 - DNA, 602 bp, Homo sapiens
aatttggggaaagagttgactaggtatgtaaatagcttgtgcaaaagtcctaagaaagagacaagatttatgtcttctaggaaaataacagaggccagtgtgacttaagcatagtgatcagagggtggaatatctggagttgtcttcagagaagaggtgggggccagataagtgtagaaacataggagcaacagtagataattaaaatttaatttyaaatgtgaaaggaaaacaatcaagacttctgaacatcagagaaaagaataattgagcaatgagaagatatcttggtgtggagaaagataagaacgtacattattagtttggtatgggatcatcaattaaaaatgtttaggagacatacaacatggaagccttggataagcggtaatcctgacatattttctaaagaaagcagtgaagttcctttttctagccattatggatcctttggaatggactttctaaaactaaaaacaactaaaaaattgaattacacaaagaaaaaataaactgtcaggcattagacaatgtgcatcccatgatggcaattcctgacagaatgggattaaatcagtcggttattactattgctatgtatt

SEQ ID NO: 440883 - DNA, 534 bp, Homo sapiens
tcttggtgtggagaaagataagaacgtacattattagtttggtatgggatcatcaattaaaaatgtttaggagacatacaacatggaagccttggataagcggtaatcctgacatattttctaaagaaagcagtgaagttcctttttctagccattatggatcctttggaatggactttctaaaactaaaaacaactaaaaaattgaattacacaaagaaaaaataaactgtcaggcattagacaatgtgcatcccatgatggcaattcctgacagaatgggattaaatcagtcggttattactattgctatgtatttctgcctgggatcgctttccaggaaaaaataaatgtataccatactggtcataataagtcaaagcgataggtcagaattagggaagactgagatattaggaattagtgggcaaagtactttaaaaaggatatyatacagagaaggtaatccagaaatttgcacaagaatctccataaatctttggttgaactctaacccaagcataacttgaatgaa

SEQ ID NO: 440884 - DNA, 492 bp, Homo sapiens
gtagataaatatatccatagaatcagttccgggaaacacagaggtgatttaaaaaattacaaaatactttcgagcaattgtaaatatgctcaaatatttacaggaaaaactgaccacaagtagcagaaaaaaatgacaatacacaaaagaacagaaagggacttctgaagcttaaaaacataataattatggtgaaaattaactggctgtgcaaaacaacaaattgaacattgcagaagaaaaaccaggaaacttaaaagagtagctgtctacactgaaactgagaagaaaaataaaaggctgaaaaacttgaacatagctaaagaaaacaatgatacaatatcaaacagttgatatctatgtaattgtagtcttacaaaaggtggttagaaagacatrtgacatacatgaatacaaagataaaaactgcttatttatcttcataaaaagttcaagaaaatatgtttgctagattttgatactagggagtat

SEQ ID NO: 440885 - DNA, 571 bp, Homo sapiens
cagaaaaatttgcagagtatccatctgatgagagattaataataaggctatgtaagtaactcagttcagtaggaagaaaagcaaatattccrattttaaaatgagcaaaagacttgaatagacattttccaaaagaagacatacaaatggccaacaagtatatataaaaatactcaatatcactaatcatcaggtaaaggaaaatcaatagaatgactattatcaaaaagataaaaaataacaaatgctggtgaggatgtggagaaagaaacattcctacattgttggtggaaatgtaaagtagtaaaatcattatagaaaacagcatggtgttccctacaaaaactaaaaatagagcaattgtatgatctagtaatcccactgctgggtatatattcaaaggaaaggaaatcaatatatcaaagagacatcagcactcccatgtttattgcagcattattcacaattgccaagatatgaatcaaactaagtgtccatcaatagattaattggtagaaaatgtgatatagatacacaatagaacattactcaaacataaactaggaatgaa

SEQ ID NO: 440886 - DNA, 571 bp, Homo sapiens
cagaaaaatttgcagagtatccatctgatgagagattaataataaggctatgtaagtaactcagttcagtaggaagaaaagcaaatattccaattttaaaatgagcaaaagacttgaayagacattttccaaaagaagacatacaaatggccaacaagtatatataaaaatactcaatatcactaatcatcaggtaaaggaaaatcaatagaatgactattatcaaaaagataaaaaataacaaatgctggtgaggatgtggagaaagaaacattcctacattgttggtggaaatgtaaagtagtaaaatcattatagaaaacagcatggtgttccctacaaaaactaaaaatagagcaattgtatgatctagtaatcccactgctgggtatatattcaaaggaaaggaaatcaatatatcaaagagacatcagcactcccatgtttattgcagcattattcacaattgccaagatatgaatcaaactaagtgtccatcaatagattaattggtagaaaatgtgatatagatacacaatagaacattactcaaacataaactaggaatgaa

SEQ ID NO: 440887 - DNA, 571 bp, Homo sapiens
cagaaaaatttgcagagtatccatctgatgagagattaataataaggctatgtaagtaactcagttcagtaggaagaaaagcaaatattccaattttaaaatgagcaaaagacttgaatagacattttccaaaagaagacatacaaatggccaacaagtatatataaaaatactcartatcactaatcatcaggtaaaggaaaatcaatagaatgactattatcaaaaagataaaaaataacaaatgctggtgaggatgtggagaaagaaacattcctacattgttggtggaaatgtaaagtagtaaaatcattatagaaaacagcatggtgttccctacaaaaactaaaaatagagcaattgtatgatctagtaatcccactgctgggtatatattcaaaggaaaggaaatcaatatatcaaagagacatcagcactcccatgtttattgcagcattattcacaattgccaagatatgaatcaaactaagtgtccatcaatagattaattggtagaaaatgtgatatagatacacaatagaacattactcaaacataaactaggaatgaa

SEQ ID NO: 440888 - DNA, 476 bp, Homo sapiens
tgttcttattttagatattttatttcttgattcacctcaaagacaatatggggtatgctgtgtgaaaatttttttacattagctttcattcaaataactcataatttaagccaatatcagaaattaatttatttaatattttcacaaatgtatgctactaattttatcatacaagaaattatgataaaatgtgtcaaatatatcagggcaatatattttaattttttcatttcattttatttttaatatctatgttcaaaattttactcgcatttttaaatcccccggctagtcttaatttatgccagattaaatatgactttatttcatttatatataaattatataaatgcataatttaatatccattataatatttggcatttctatttattattttttctaaatcagtatttacatatgaatatgaagttacatttacayattttaaatatttgtgttattcctggtataaa

SEQ ID NO: 440889 - DNA, 561 bp, Homo sapiens
ttagttcttcttctatttcttttttttatgctcaaagatccctgtcaaatgttacattcaccttccaattcagatcacctgcggccaagagtgtgtagggcttcaggaccctggttatcccctatagttttatacaaaattgcttttttttttaaccacaaaataggaatgtgaatgtaagctctgtaatttttgttgtgcttaaacactgaaagataagattacagtgcttgaggagattttgtgtcttttaaccagtcactgtcaaaatgaaatctcacagtgtatagcctcaagaaaataaaatttctatcatggaaartagatacttcactatatgcaatgacaagaaggcctaccatggggaaggtgtgagccatgcagactttcagagaatgcaagttaataaaatctgtattttctcaccttgagtcatgtaatttttctagagatagatgagttgaataaagttttggacaaacttctgaggccagctcatttgtgtggagaattgccctcatcatactctagagctcatggtagagggactgaattgtgctc

SEQ ID NO: 440890 - DNA, 561 bp, Homo sapiens
ttagttcttcttctatttcttttttttatgctcaaagatccctgtcaaatgttacattcaccttccaattcagatcacctgcggccaagagtgtgtagggcttcaggaccctggttatcccctatagttttatacaaaattgcttttttttttaaccacaaaataggaatgtgaatgtaagctctgtaatttttgttgtgcttaaacactgaaagataagattacagtgcttgaggagattttgtgtcttttaaccagtcactgtcaaaatgaaatctcacagtgtatagcctcaagaaaataaaatttctatcatggaaaatagatacttcactatatgcaatgacaagaaggccyaccatggggaaggtgtgagccatgcagactttcagagaatgcaagttaataaaatctgtattttctcaccttgagtcatgtaatttttctagagatagatgagttgaataaagttttggacaaacttctgaggccagctcatttgtgtggagaattgccctcatcatactctagagctcatggtagagggactgaattgtgctc

SEQ ID NO: 440891 - DNA, 580 bp, Homo sapiens
attataaactaatcacaagagtgatgctccgtcatattaacagtcccacccaaggccaggggcatatacacagcatgtgcacctggggagggatcatgggcggtggctcacacctgtaatcccggcactttgggaggtcaaggcaagcagatcacctgagttcaggagttcaagaccaacctggtcaacatggtgaaaccccatctctactaaaaaaaaaaaaatacaaaatattagctgggcatggtggcaggtgcctgtaatcccarcattcgggaggctgaggcaggagaatcgcttgaatccagaaggcagaggttgcagtgaggtgagattgcgccattgcacacatcttcccacctcaaaaaaagaattctgtccactaaatctcataacaagctcttgttcatgtaaatttgaccgtttccttcaacctggcagtagtctttcttcaggggatacattttatttgcattaggtgcttctcttgttatatacaaaatatctagaacataaaaacaaagcaaagcaaagaaaatgagagtgcaattcataatcaatggacaaaaatccccaacaa

SEQ ID NO: 440892 - DNA, 531 bp, Homo sapiens
aagtccacagtccagagtctcatctgagacaacgcaagtcccttccacctatgagcctgcaaaatcaaaagcaagctagtttcttcctagattcaatggggtacaggtattaggtagatacagccattccaaatgggagaaactggccaaaacaaaggggttacaggggcttcttcttcctcaagtgaactggaggcagttggagcactcagcaatttcattaacattttaaatacacaaatggcagatatactcactcaattgtcttctgatgtaaactggtgtgagagcaagtccctgggaaagctggttacagttgggaatgttcttgacccctggggatggccaaatggrtaggtggaggccattagggaaagcacagagtagtcacccaggagagaggaataaactatttcctgaagaagaaagaagagctcagaattgcagtgggtcacaagctgtgtatgagacatagtggggtggtttctccattgctggaaaatctaattttcatagagttgattttggtca

SEQ ID NO: 440893 - DNA, 625 bp, Homo sapiens
cagcagcggcattagattctcataggagcagaaaccgtattttgaaatgttcaggggagggatgtaggttgtgtgctccttatgagaatccgactaacgcctgatgatctgaggtrgaatagttccatctgtggaacgttgtcttccacaaaaccggtccccggtgccaaaaaggttagggactgctgccatagagaaatgaaggcatatggccacacacatacttgtacacaaatgttcatagcagcattatttcctataacccaaaatgtgggaaagaataaatatccatcaacacaggaatgtataaacaggtatgtcatgtgtatatatgaataataaaatatcaatcataagaaggaacaaagtactgatgcttcttataatatagattaactttgagaacaatgtgcttaacggagaaagtcagtcacaaaggaccacataatgtatgatcctatttgcatgaaatgttcagaataggcaaattcttagagataggaagcagatggctgctttgctaggactggtggggtgaggttgagaaaaaaggaggcgactgctggtgagtatatgttttcttttaggggtgatgaaaatgttctaaaattgactgcagtgataa

SEQ ID NO: 440894 - DNA, 623 bp, Homo sapiens
ccatttattgaaaaaactgttctttccctgtggaattgtcttggcactattgtcaaaatcaattgaccttaaatatgagaatttctttctgggctctcaattttatttcattgatctatatgtagaagtctatgcaagatccacattgtcttgggtactgtaactttacagtatgttttaaattgggaagtgtgagtcctccaactttgttctttctttcaagatcatttggctattctggattactttaaatttcyatactaattttaggatctgtttgccaatttctgcaaagaatccactgggaagttgattagagtagcattgaatatatatatcagtactaagtcttctgacccatgaatgagaaatgtttttcatttatttgaaacttctttaatttcataaactctttgtagtttttaagatttaagttttgtacttccttgttaaatttaggcttcagtgctttattttttatgcaacttcaaatggaactattttgttaattgcatttatatggttcattgccagtgtatagaaataaaattaatttttctatatgatgttggaccttgcaacatgtctgaactcatttattagctctaatctgtgagataatg

SEQ ID NO: 440895 - DNA, 623 bp, Homo sapiens
ccatttattgaaaaaactgttctttccctgtggaattgtcttggcactattgtcaaaatcaattgaccttaaatatgagaatttctttctgggctctcaattttatttcattgatctatatgtagaagtctatgcaagatccacattgtcttgggtactgtaactttacagtatgttttaaattgggaagtgtgagtcctccaactttgttctttctttcaagatcatttggctattctggattactttaaatttctatactaattttaggatctgtttgccaatttctgcaaagaatccactgggaagttgattagagtagcattgaatatatatatcagtaytaagtcttctgacccatgaatgagaaatgtttttcatttatttgaaacttctttaatttcataaactctttgtagtttttaagatttaagttttgtacttccttgttaaatttaggcttcagtgctttattttttatgcaacttcaaatggaactattttgttaattgcatttatatggttcattgccagtgtatagaaataaaattaatttttctatatgatgttggaccttgcaacatgtctgaactcatttattagctctaatctgtgagataatg

SEQ ID NO: 440896 - DNA, 623 bp, Homo sapiens
ccatttattgaaaaaactgttctttccctgtggaattgtcttggcactattgtcaaaatcaattgaccttaaatatgagaatttctttctgggctctcaattttatttcattgatctatatgtagaagtctatgcaagatccacattgtcttgggtactgtaactttacagtatgttttaaattgggaagtgtgagtcctccaactttgttctttctttcaagatcatttggctattctggattactttaaatttctatactaattttaggatctgtttgccaatttctgcaaagaatccactgggaagttgattagagtagcattgaatatatatatcagtactaagtcttctgacccatgaatgagaaatgtttttcatttatttgaaacttctttaatttcataaactctttgtagtttttaagatttaagttttgtacttccttgttaaatttargcttcagtgctttattttttatgcaacttcaaatggaactattttgttaattgcatttatatggttcattgccagtgtatagaaataaaattaatttttctatatgatgttggaccttgcaacatgtctgaactcatttattagctctaatctgtgagataatg

SEQ ID NO: 440897 - DNA, 582 bp, Homo sapiens
gatccatgctctgcagtgctttaaaatcttttaggaagattataatatgcagcaaagtttggcagaagttagcttctgccaaatctgttgattttcattaaaatactgtgtttagtgttggtattcaaaactattttttacctgatagtcactgtgtttagttatacttatatatataactcattctacaaaaatcagatcttcatggtggacatgacagaatgtctgacatgtagcagaaaatcaatgcattttatttacctagaagctttccttcctgtttgctgtactttaaaaacattcatttaaatgttctaataatagtacaaggtcttttatggataagttaaaaataagtggtcctagatayggctcttgacattctttctttaaaaaaaaatgctacatagtaatatgtggactacactcccaaagaagtattagtcagctttcgggggtcaaagatctctttgaggattcaaaaagccatgaactctagaaaattgtgtttatggttcctgagacccatacatttatagatcacctcaaaatccatgaacaatgattaaggaattctatact

SEQ ID NO: 440898 - DNA, 617 bp, Homo sapiens
ctgatatttgaatggtccattggacatggaacttgtaatattttttgtacagttattttgattgctgtcatattactcctgtaaagaggattttcctctgcttctgccagtcagccataggcagcaaccatgcagatcacwttagtttcaagtactgagctgatttgaggctgagctaaaagcctggtggcagcctatcaattcttgtttaggtttatgcctaaattgcagccctattgtagttcagtctaaaacaagaaagttcatcaagaaccttttaaagactcctttgatcctagcccttcatccctcagtatgttaaactattaagttatccctcagtctctcagcattgcagtttctctgatatccctctgttcagtttgcagaggtaatggagatccaacttcatggtttacctttcctgggattttgtctttttccttgtcaattcctacaaattcttggtcataatttttaaacattatacatttgaaaatttttaaaaaacagcatttttccagcacagtagttcatccaatttaaataatctatcaccactgagaagtagagcccttaatattatagaaatttactttaattacataatgacataa

SEQ ID NO: 440899 - DNA, 556 bp, Homo sapiens
gtcatcatgaccataatcccactctatgatatatttgtatttgaatccaataggagcataagtgtgcrttttataaagtcatgcttaaccttcttttttaaaaaaaaatatatcttggaaagagaaagtccatatattatatcttgagtgaaggagctttgattccatcaatattttggattttagttcagcttggtgcccttggggtttttataccttgaaagtatgcaccataaaaatactcagggtgggtgaaaaatgtcttgtttttaatatgagaacagagtggtcatggtagtggaagtaaaaacgtaggctaacctgctcacagaaatgcacaggtcagccctagaaaagtgaacatgtgtaagttgaagagatagaattgtattcccttacatctttccagtacaatgtacaccttagaaatatcttgtgcaccccaaggagtacacgtacctcatttgtttatttttattttattttattttattatactttaagttctagggtacgggtacacaacgtgcaggtttgttacatatgtatacatgtg

SEQ ID NO: 440900 - DNA, 556 bp, Homo sapiens
gtcatcatgaccataatcccactctatgatatatttgtatttgaatccaataggagcataagtgtgcattttataaagtcatgcttaaccttcttttttwaaaaaaaatatatcttggaaagagaaagtccatatattatatcttgagtgaaggagctttgattccatcaatattttggattttagttcagcttggtgcccttggggtttttataccttgaaagtatgcaccataaaaatactcagggtgggtgaaaaatgtcttgtttttaatatgagaacagagtggtcatggtagtggaagtaaaaacgtaggctaacctgctcacagaaatgcacaggtcagccctagaaaagtgaacatgtgtaagttgaagagatagaattgtattcccttacatctttccagtacaatgtacaccttagaaatatcttgtgcaccccaaggagtacacgtacctcatttgtttatttttattttattttattttattatactttaagttctagggtacgggtacacaacgtgcaggtttgttacatatgtatacatgtg

SEQ ID NO: 440901 - DNA, 592 bp, Homo sapiens
tagtgtcctctgcaaaattatatcttgaaatcctatccctcaaggtgataatattaggatgtggggcctytggggagatgattggtcataagggctgaactctcataaatgcaattggtacatcaacagaaaaggtccaagggagcttgtttgcctcttccatcacgtgaagacacagcaagaaggtgtcatctatgataaagcaggcccttcccagacactgaatctgctgatgccttgatcttagaatttccagcctccacaactctaagaaatacattgctgatgtctattagatatgcagtgtatggtattttggtatagcagtgcaaatggactaaatgggattcccatcccaatctgagcatgagaaagactcctgggacatacacctggagatgcttatcttcttcgaggccttcagggagtatcatcatcacatactcggctcatgtttaatcaacaaccaaacttctgggaagagaagaaaaaggtttaccatctctttgtagaaccccagtcttgtagcttcatatcctaaatgtattttgtaagtgaataacctgagtacaggttattgttctacctagcg

SEQ ID NO: 440902 - DNA, 613 bp, Homo sapiens
atggaggaaacatctcttactagtcatattttatttcttatttctcttttttaaagaaaggaacttcatgagataaaagtaacactatttatttttaagaagcctccataagtgcaataattttaccatcagtataaatagcacaattttcgattcatttccaaatctgaagaaggttcatgtgttttggggaatggacttgatctccagcatgagaaatgcctgtaacattaataaaaagatgtatttcctgaataacttcttgtggcaggatttcctttacaaaaacatctcattcacattaaaaacattaatagcraggaaagctaaactaaattaaactaaaagataaaagcccctttttactgacaccttgtgctagaaaagttgccaaaatgtatgctaatcatgccaatgttgttaggtcagctggcccaaaaataaatgttccattcattaaaacccctaatatccatttaacagtttgtgaaccaatgagttctctttgcccaatttaatgaagaaaagaatgctgtgatctttgcactgccaaattcactcttaccctacagagaaaattgttcattaatttaaattgggaagtttaaaacca

SEQ ID NO: 440903 - DNA, 585 bp, Homo sapiens
gcattaattttcaagaagatatttatataaattagtcatwaaacaaatattggataaagctttaataatttaaaaagtgtttaaagacttcattctgttaggtgggctgttttcatgttttgtccctgctaggtaccaattatattaacaattttcctcacctactccattaatagatatataaaagtatctgaaagggatattaaaatagtgttaattagaaattaataaaaaattactttctactaattagtattaataagaaattattaaacccagaatgctgaatggggattatatgcattatctaagaaacatatgttgctaaatatattttagcagtttctgatgtgcgcttctatccctgaaaggaagtgagataggtcacacaacatgactaagataaatagcgccatgatgtctttcttcaatttacaccatgtctacatagatcagaattcttctgcatggcaatacacagtaactggataaataacttcttaaaatcaaagttgaaaaggatcactcccgaaggcctatttaatatcctctttctcctgccgcaataccttccttaggtggtgc

SEQ ID NO: 440904 - DNA, 585 bp, Homo sapiens
gcattaattttcaagaagatatttatataaattagtcattaaacaaatattggataaagctttaataatttaaaaagtgtttaaagacttcattctgttaggtgggctgttttcatgttttgtccctgctaggtaccaattatattaacaattttcctcacctactccattaatagatatataaaagtatctgaaagggatattaaaatagtgttaattagaaattaataaaaaattactttctactaattagtattaataagaaattattaaacccaraatgctgaatggggattatatgcattatctaagaaacatatgttgctaaatatattttagcagtttctgatgtgcgcttctatccctgaaaggaagtgagataggtcacacaacatgactaagataaatagcgccatgatgtctttcttcaatttacaccatgtctacatagatcagaattcttctgcatggcaatacacagtaactggataaataacttcttaaaatcaaagttgaaaaggatcactcccgaaggcctatttaatatcctctttctcctgccgcaataccttccttaggtggtgc

SEQ ID NO: 440905 - DNA, 585 bp, Homo sapiens
gcattaattttcaagaagatatttatataaattagtcattaaacaaatattggataaagctttaataatttaaaaagtgtttaaagacttcattctgttaggtgggctgttttcatgttttgtccctgctaggtaccaattatattaacaattttcctcacctactccattaatagatatataaaagtatctgaaagggatattaaaatagtgttaattagaaattaataaaaaattactttctactaattagtattaataagaaattattaaacccagaatgctgaatggggattatatgcattatctaaraaacatatgttgctaaatatattttagcagtttctgatgtgcgcttctatccctgaaaggaagtgagataggtcacacaacatgactaagataaatagcgccatgatgtctttcttcaatttacaccatgtctacatagatcagaattcttctgcatggcaatacacagtaactggataaataacttcttaaaatcaaagttgaaaaggatcactcccgaaggcctatttaatatcctctttctcctgccgcaataccttccttaggtggtgc

SEQ ID NO: 440906 - DNA, 545 bp, Homo sapiens
ggattaatattatcttatctcataacaaaccattctgaaaactagtaaagataaaatttcatttaattattaattgtatagacagcctgaatttaataatgattctgagctcctcacatttctgaaggcactttattcttcgagccatggcattgccacaaacaatgacgaagtcaataaatgagaaggtaaagttacatgccactgaaatcataattaggctctgacccggttttgatagcaattaagttctactcttctatttacttcttctaaataatgcagacatgcctttctcttcttttcataaatattctttaatatttactattaaatgacrtcctataccacatggccctaatccaggggtatcactaatgagaacttaatagttcttaacagttttctattcgccagttccaatgtcaacaacctgccctgggaggttaaactgaatacaaataaaatgacccttgccttttctttccaaataatgcactgaagctgttccttttaccctggggggttgaggagcaggaaaatgt

SEQ ID NO: 440907 - DNA, 598 bp, Homo sapiens
gcaaatgaaagtaaagaaatctcaaacaagatatcaagggtctagaaagatgaagaaataactaatgaacatttcagctgatctaagagaggcacctcgtcttgtgatgaagacagtggctaaataattggctattcagctgaggaaacactgacatcattataccagcaacataacaatgttgatcaattgctaccatgctttgagtaaccttaaggtaaaaaaaaaaaaaaaaaaagagagagagagagagatttttaaatgtatctgcttttaaaacaaggaaaattgctgaggggaaggaaaaagataacagctaaaaatgctcctattcaatgtttaaaaagaatttctgtawtcagctttcccaaagcctacttagttatacgttgacaaagagtataaaatatcaaagccaaaatcaacatgatataaactgttatgggatactacaaattcgtaattttactggcacacaaagacatcaataggatttgattgaacagtgtatatagggacaccagcaatcataaataaaccaatagattttatgtttctacaggtaagtcatttaaagccccaccttgtggtgcattca

SEQ ID NO: 440908 - DNA, 477 bp, Homo sapiens
aattcagctctgctgaatcaagcaagtgcagaggattgattgtagtcagttatcaaaacagcagttatgtcacaccatgaaagatggcagcccatgctaatcccattagcgataaaggtcagattttgtattttcagacccacttgtgtatctagtaataatgccgttgtcagtatcattcatgaaaacggagaaaactagaaattgtattgagttaatgccatagaagtagcattatcaaagtaaaaaatacaaatttaagaaataattctgtatatgtatttaaaacaaatgaatatattgtgaaacaagatgtccagtaaatacagagaaaaaacaaactttataattttcaatgatcatgtttgcwtgttatcagcctagcatttaacaccagtgaacgttttcatttaaaacaaagcaatacaaaacaaagaactctcagagtcacgagacataacttaaccccttattaat

SEQ ID NO: 440909 - DNA, 573 bp, Homo sapiens
gtgaggtaaagcaggcgtgggcacggtctcacccaggaagcgcaaggggtcaggggagtaccctttcctagtcaagggaagccagtgacagactgtagctgaaaaaacggggcacctcggcccaaatactgcacttttcccaaggtcttagcaaccggaaaacaaggagattctatcctgtgcttggatcagtgggtcccatgcccacggagccttgctcactgctagtgcagcagactgagatcaaacagtgaggtggcagcctggctaggggaggggcatccgtcattgctgaggcttgagtaagttaaacaaagtggctgggaagctcgaactgggcagagcccaccacagctcagggaggcctaccgcctctagactccacmtctgtgggcagggcatagctgaacaaaaggtagcagacaacttctgcagacttaaacatccctgtctgacaacactgaagagagcactggttctcccagcatggcatttgagctctgagaatggacagactgcctcctcaagtgggtccctgacctccgtgtagcctaactgggagacacctcccag

SEQ ID NO: 440910 - DNA, 594 bp, Homo sapiens
agaataatcaagaaaagctttatgagactagcagaaagatggaaggaataaatttggttctaatatgtgaataaatatttatataaaattcacacagattatagaaaaggcaggctcaagtgtgaatacaaaggacatgattgatatgaaaatgagaatggggagatawttgttaaaggaattttttttaaaagtggagaaaaacaagtttgtcattagataatttggaatcactatatagagagggaaaaagatgtcagtcaaaatatttttaaatgcaaaaagaaaaaaaaagagaaggaccaggcttacatttaataaggtaattgaaggtaaactcaggataactgaatgttaggatctcagtaaatcataaaatgttacaattccaagggaacttgggatcattttcttactccttacagttttagggtccaatactctgaagcttcaatgaagataaacactattatcatcaatgattcgtttactaaatatatttactattagtctgtgcgtattacaagcaaatcattgtgctgtacacagggataaaatttttctccatcaaaattattctccagcttgggagaa

SEQ ID NO: 440911 - DNA, 594 bp, Homo sapiens
agaataatcaagaaaagctttatgagactagcagaaagatggaaggaataaatttggttctaatatgtgaataaatatttatataaaattcacacagattatagaaaaggcaggctcaagtgtgaatacaaaggacatgattgatatgaaaatgagaatggggagatatttgttaaaggaattttttttaaaagtggagaaaaacaagtttgtcattagataatttggaatcactatatagagagggaaaaagatgtcagtcaaaatatttttaaatkcaaaaagaaaaaaaaagagaaggaccaggcttacatttaataaggtaattgaaggtaaactcaggataactgaatgttaggatctcagtaaatcataaaatgttacaattccaagggaacttgggatcattttcttactccttacagttttagggtccaatactctgaagcttcaatgaagataaacactattatcatcaatgattcgtttactaaatatatttactattagtctgtgcgtattacaagcaaatcattgtgctgtacacagggataaaatttttctccatcaaaattattctccagcttgggagaa

SEQ ID NO: 440912 - DNA, 510 bp, Homo sapiens
  misc_feature (1)...(510): n = A,T,C or G
ttttcactcaactttttattttcaaggtctttcatagtttttaaacttattagtggagttttcagtgtgtttctttatcctaagaaactaactttataaccctttccccatataactaaatataccttatgtatttattttaggaggttttattattatgtaggtatgctaaggtgaatagattagaagaaaattgcaactgaaaagatagtttcttagtcatatactatggtctgaatatttgtgcccctcaattaataacttgaaattttaactctccgggtgatgktattaggagttggtaccattacccgtggcaaatattcaagttactggtggcaaatatgtacaggtccacagcaaccttaattcttgcctccttagaagaacgaatttgactgaggggtataaggcagaaaaagagactgaggcaagttttagagcaggagtggaagttttatttaaaaagctttggaatanaaaaaaaaggaagggatacttnaagagacc

SEQ ID NO: 440913 - DNA, 557 bp, Homo sapiens
tctgtggaacaggatgctgtgctatcttatcagtgtagctccaaatatgttttgcatcaagrgttactggattaggtaactcttgggaatctgacagttaggccaggtccctgtatctttttgggatacacttcccattcacagtccttaaggccatccaagatggtttgtaaggcagtctcaaatctgtaagagactctgagattagcatattatctttaatataatgaaacagggagactaaggcaggtgggttgtgcaggtacctttgtggtagcacatggaaagtccattgttgaccctcctaagtgataacaaactgatcttatgaatcttctgctaaaggagtactggaaaaggcattagccaagtcaattacagcatgtgcatttctcagcttaaggactacttgttctagtaggtgaacaatattgagtacagctgcacatatagggggccccactttatttagctcatggtagtctactatcattttctaggtgccatctggcttcttcacaggccatacagggctattacagaggctcttggccagg

SEQ ID NO: 440914 - DNA, 586 bp, Homo sapiens
tacagtcttataagccttatgtcaaactctgataacttaaaatctccagcagaggcaaatataaaacttatctaatggtaaacctagacaaaaatgtayactgacatttctgaagaaatttctatttttattttaccaataattttaaagtcaacttatttattaaagattactaaattcacataaacttgaaaagcatttggacttaatttgagtactcgtttacttacagccatttagtagcatgctagacagacacaacatgtaacataatacatgtccatacacataagactatctaaacatgaatacacatacacataaagatccaatagctgttgctccaataggtaaacccatgagagctgtagatcaaaattttggataaagcagtttctataggtgtttgtttttcaaagaaatcatttttaccctttttttccatttcaaatgagttttcaatgtttatttaccttttagctagaactgactgaactatatgaaaaaaaactccaagtaacgtttgattagtaagttttatctcaacatcagtagcttaataacaacagattcaaagcaagcaaaa

SEQ ID NO: 440915 - DNA, 586 bp, Homo sapiens
tacagtcttataagccttatgtcaaactctgataacttaaaatctccagcagaggcaaatataaaacttatctaatggtaaacctagacaaaaatgtacrctgacatttctgaagaaatttctatttttattttaccaataattttaaagtcaacttatttattaaagattactaaattcacataaacttgaaaagcatttggacttaatttgagtactcgtttacttacagccatttagtagcatgctagacagacacaacatgtaacataatacatgtccatacacataagactatctaaacatgaatacacatacacataaagatccaatagctgttgctccaataggtaaacccatgagagctgtagatcaaaattttggataaagcagtttctataggtgtttgtttttcaaagaaatcatttttaccctttttttccatttcaaatgagttttcaatgtttatttaccttttagctagaactgactgaactatatgaaaaaaaactccaagtaacgtttgattagtaagttttatctcaacatcagtagcttaataacaacagattcaaagcaagcaaaa

SEQ ID NO: 440916 - DNA, 586 bp, Homo sapiens
tacagtcttataagccttatgtcaaactctgataacttaaaatctccagcagaggcaaatataaaacttatctaatggtaaacctagacaaaaatgtacactgacatttctgaagaaatttctatttttattttaccaataattttaaagtcaacttatttattaaagattactaaattcacataaacttgaaaagcatttggacttaatttgagtactcgtttacttayagccatttagtagcatgctagacagacacaacatgtaacataatacatgtccatacacataagactatctaaacatgaatacacatacacataaagatccaatagctgttgctccaataggtaaacccatgagagctgtagatcaaaattttggataaagcagtttctataggtgtttgtttttcaaagaaatcatttttaccctttttttccatttcaaatgagttttcaatgtttatttaccttttagctagaactgactgaactatatgaaaaaaaactccaagtaacgtttgattagtaagttttatctcaacatcagtagcttaataacaacagattcaaagcaagcaaaa

SEQ ID NO: 440917 - DNA, 586 bp, Homo sapiens
tacagtcttataagccttatgtcaaactctgataacttaaaatctccagcagaggcaaatataaaacttatctaatggtaaacctagacaaaaatgtacactgacatttctgaagaaatttctatttttattttaccaataattttaaagtcaacttatttattaaagattactaaattcacataaacttgaaaagcatttggacttaatttgagtactcgtttacttacagccatttagtagcatgctagacagacacaacatgtaacataatacatgtccatacacataagactatctaaacatgaatacacatacacataaagatccaatagctgttgctccaataggtaaacccatgagagctgtagatcaaaattttggataaagcagtttctataggtgtttgtttttcaaagaaatcatttttaccctttttttccatttcaaatgagttttcaawgtttatttaccttttagctagaactgactgaactatatgaaaaaaaactccaagtaacgtttgattagtaagttttatctcaacatcagtagcttaataacaacagattcaaagcaagcaaaa

SEQ ID NO: 440918 - DNA, 555 bp, Homo sapiens
gacttaggtagagattcagatcacattatgaacaactttatggcaaaatcatacatatttatatggattaaataaattcttagaaagagaaaacttaccaaacctgaatggaaaaaatatacataacataaaacaacatgtactcattggaaaattgaatgaatgtattaaaatattaagacaaagcgaactccaggccaaatggtttctatgaaaagttttacaaaacattaaataataaagcatttctaagtttgcaaacttttctggaggaattagggaaaaaaataattctaaatttattttaggagactgacaaaaattgtatttcaaaaatctaacaaccatatagcaatagtaaattataggtcaaacacttttataaatataggtgtatacatcctaaataaaatattaaaggagtgaattcaactatatataaaggtaccttatggaaatatcatttamcattgaataattaatgacatgaataatgaacaagttggttcatctaagaaatgcaagaaaactttctcaataagatgaagggtatct

SEQ ID NO: 440919 - DNA, 614 bp, Homo sapiens
tcaaagcaatctgtatcccccaaaagttaaccaacatttctatataagtrtaatctttaagataccacataaaaatgttgaaagaaaggcacgttggaaagggccacatcccaggatcacttaattttaacttcatgtgtagtactttgtcctgcataccataaaaatacagcaaaggggaaaagaaggattagagaaataaaatgtgtggattacctaattgtgtcaggcatcatttctaatttagtgatcaactattggtttatgcaagaaaccaccaaaacaatctattttcaaatattatgaaggtttttcctcaatggtaagataaatggaagttttaactattcttgatgcaattcctattcccaggacagtattttgagactttgtgaaagagggagcaacaagagagtcacctggattgctctggacatgacccactttttatttgttttcctctctttaatgagagtaataatctaaccttgactgtctgggtaagaactttgtcaagaacagtaataaaatggcaaagtgttaatcactgtatctttttataattgaaatttattaacactgttgaaatctctttattcattctacttacacaa

SEQ ID NO: 440920 - DNA, 614 bp, Homo sapiens
tcaaagcaatctgtatcccccaaaagttaaccaacatttctatataagtataatctttaagataccacataaaaatgttgaaagaaaggcacgttggaaagggccacatcccaggatcacttaattttaacttcatgtgtagtactttgtcctgcataccataaaaatacagcaaaggggaaaagaaggattagagaaataaaatgtgtggattacctaattgtgtcaggcatcatttctaatttagtgatcaactattggtttatgcaagaaaccaccaaaacaatctattttcaaatattatgaaggtttttcctcaatggtaagataaatggaagttttaactattcttgatgcaattcctattcccaggacagtattttgagactttgtgaaagagggagcaacaagagagtcayctggattgctctggacatgacccactttttatttgttttcctctctttaatgagagtaataatctaaccttgactgtctgggtaagaactttgtcaagaacagtaataaaatggcaaagtgttaatcactgtatctttttataattgaaatttattaacactgttgaaatctctttattcattctacttacacaa

SEQ ID NO: 440921 - DNA, 523 bp, Homo sapiens
gcaagcgaaactactagaactccttccacctaggaaaatagcagaaacaatcactcatccctgaagggatgatagggatttgtgccaccatcaataatttaaaagatgttgagttgataattcttaccacatccccattcaccgcccttatttgaactgygcaagaaagacagaatgacagtgtattaacataaatgtaaccaggtgtttatttcagttaaacctgctgtataagatgtagcttcactgtttcagtaaattaatagatcatcttgtatctggtatgcagctactgatatgacaaatgcctttttttccattcctgtcaataagaaccatcataaggatgttgctttcaactgacatgaccagaaaaatgccttcactgtgaggtatatcatctctccagcccagtgccatcaagttagttcataaggatgtcgattgccttttttccccataagatatcacactggtctgttacattgatggcttcatgctggttagacctagtgaacaagaa

SEQ ID NO: 440922 - DNA, 597 bp, Homo sapiens
aggcattgtgctaaggaccttaatgtttaacatctcacaaagtgggtcctctgatgagcattgcattttagataagggaactcaagctttaggaagcttatggatgagtagtattccattgtgtatacrtgccacatttttttcaagggaacagaaaggaaaaaataataaaacaccacgtgtgtaagtgttcccttttctctgtaggttaaagatacatgaaaccaatttcagtctctctctcaagcatatacacacccacacagacttttcctcttcttaaatcagagactggagggctacatttttcttaatgatcttcctctgctagccccaaggactaaggctatttatttatttttagttttattttattttaattgacatgtaataagtgtacatatttatggagtacaatctaatgttttaatacatgtatacattgtaccatgatctaatcagggtaattacattattacctcaaagatatcatttatttgaggtgagaacattcaaaattatatcttctagttattttgaaatatacaataccacattattaactacagtcaccttactgtgaaatagagtaccaga

SEQ ID NO: 440923 - DNA, 514 bp, Homo sapiens
cagttttactgatattaatcctgacatactcataggaaccacttaataatgataaatgttatttttcagagttacatggaaattaaggatttaatatctagactttctttcttttctttttctttttctttttgttttcttttcagacagggtcttgcttggtcacacagactagagtgcactggtgcagttatagctcactgcaacctccactttccaggtccaagcaattctcccagctcagcctcccaagtagctaggattacaggcgtgcactaccacacctggctamttttccctttttttttttttttttgtagagacagggttttgccatgttcccctggtggatctcaaactcctgggctcaagaggtctgccagctccagcctcccaaagtgctgggattacaggccaccatgctcagcctagacgatttcattttctctcattttctaaagatgtatatattttttttcaaagaaaatgggcagattctgataacagagaaatc

SEQ ID NO: 440924 - DNA, 576 bp, Homo sapiens
actttctttcttttctttttctttttctttttgttttcttttcagacagggtcttgcttggtcacacagactagagtgcactggtgcagttatagctcactgcaacctccactttccaggtccaagcaattctcccagctcagcctcccaagtagctaggattacaggcgtgcactaccacacctggctacttttccctttttttttttttttttgtagagacagggttttgccatgttcccctggtggatctcaaactcctgggctcaagaggtctgccagctccagcctcccaaagtgctgggattacaggccaccatgctcagcctagacgatttcattttctctcattttctaaagatgtatatattttttttcaaagaaaatgggcagattctgataacagagaaatctaaatagcaaatatttcaattattaggaactacttagtaccagaaactgaatgtgccttctraaatcagttgttttatagacatatggagctgcgagtgcagaggatgctgtggaatgccgcttacacccttccttctggatggaggcactcatttctcccag

SEQ ID NO: 440925 - DNA, 590 bp, Homo sapiens
agtatatattcttataccaacataattccaaaattaacattacataattacaaaatatatttgacagttcattttattttgaatgcaattatttgaatgtagtttttcagtagccaatgaagctcatgactggttgcacttattaaattataaaatgccttattcgcttcatgtcctttcattgatttatgatttcttttcctttaaaaagatttttatggcacagtggggtaaakatagacatttatgaaattttatttctggggattttcttattcagagcttgtttgatgtttgacatgaagttaaatacaacacacaacatgatttcttgccttattctatatcctcacgtgacattctgtaggctttattgtgaactgaaatcaatgtattgagtatagaatatcaactttagctgaaaaagtagatgttgaaaacaaaatttatgagcactgttcttctctgtgttatttgatcgttacaagttgtcatagttagtatgaacaataaacattgattttaccaagtcgatagatctaaatgtaatacgagatcatctatgtagtttattggattaaaaagtaaag

SEQ ID NO: 440926 - DNA, 546 bp, Homo sapiens
aaaattaagaatattgtgttctatgtgactgaaaatattattgttagaaaaaaatatgcagatgttcttaactacttataattggtaagataatcatcttttgcttatctgtattttgtttatattctaaaaaaagtttatatatatttatatatatcttttaaaattcaaagttaagttaaaagtaagctaaagaaaatcattcttcccaataagaaagacatttatatcatttgacaataaaattccactaataaaaatcatctcaagatgaattaaaagaagagctattcactaagatttatgtgaaatgacaaagtggttatgttcacattagtgaagaccaaaaataacctgattatgttagaaagtatttttaaataatatatggtaaaacctttcaaaacattactcttaaatatatattttaggaaaatgtaaatggaatgaaaaaatgaagagaagattgaaaacaagasagtaaaatgatacgtataacacctaaaggttttctttttaagtcaatatactgtaagaagaaacaat

SEQ ID NO: 440927 - DNA, 546 bp, Homo sapiens
aaaattaagaatattgtgttctatgtgactgaaaatattattgttagaaaaaaatatgcagatgttcttaactacttataattggtaagataatcatcttttgcttatctgtattttgtttatattctaaaaaaagtttatatatatttatatatatcttttaaaattcaaagttaagttaaaagtaagctaaagaaaatcattcttcccaataagaaagacatttatatcatttgacaataaaattccactaataaaaatcatctcaagatgaattaaaagaagagctattcactaagatttatgtgaaatgacaaagtggttatgttcacattagtgaagaccaaaaataacctgattatgttagaaagtatttttaaataatatatggtaaaacctttcaaaacattactcttaaatatatattttaggaaaatgtaaatggaatgaaaaaatgaagagaagattgaaaacaagacagtaaaatgatacgtataacacctaaaggttttstttttaagtcaatatactgtaagaagaaacaat

SEQ ID NO: 440928 - DNA, 615 bp, Homo sapiens
tctactgggtgtcactctgttacattatgaggctttattattggcaagcaaactgactaggagctagtaaggccaggcttattggctgtaaaagtatacatcccaaaggaagacttaactgctctcaagtccttaatggatcacctgttggttacatttccaatttagtcccgttgtgagaactctaagagagtactcaagcgactgaagctgataacaacaaatcaggtaaccacaacccttcctccttgaaattaaaaacagcctagcaggcaaatatgttgctaaatacttttaagtaggtaggcatctcttactaattgtgaattaacatctgtattagtctccaaataaactaatcaatatgtgcttttttttttcttaaggctttcaatcccactytaatttcaacagattggaataaatgatactacagctccctgtcctgcaaaaatgttagcctgaagtttcaatgacttcttgcttgctcttccttccttggatcttaggaaatgtcctttcattgtttcattgttttcactgcccatcccacaggcctcagcttcaaccccacttcctgcatgaataaaactcaactgttaccatccacaggca

SEQ ID NO: 440929 - DNA, 574 bp, Homo sapiens
atttgtgacccaggccctcctctggtgaggtgaagggtccaacccaagactgtgagaaagcaacaagaattacagcttcctactttgagtaagacacttgtatacagctttcatgtaataactcatttaagcctcacaatcactcagtgaggtacctattattactatcctcattttacacatggagaaagaaagatcttcgtgtgttaagcatgttgccaaaagttgctcagtaaggaytgataaacatgggggccacaagtgaaacccctgcagtcagaatacagtgaacacagcccacaccttgatacatgaatccttactatcagtcaatggttaactgaatcctatcactgcccttgccatatttttcaggagaggacattaagtgtatatgatggcttcttctaaaagtggggtgtgtgggatgaggagtgggacacaattgtgaatgcagtgtaagagcaaggggatactatttttttttctgaaaaaagcatgtactatttgaatctatttttgtgaaattatatacatatttttgtgtaagtatgtataaaatataaggtttgtg

SEQ ID NO: 440930 - DNA, 574 bp, Homo sapiens
atttgtgacccaggccctcctctggtgaggtgaagggtccaacccaagactgtgagaaagcaacaagaattacagcttcctactttgagtaagacacttgtatacagctttcatgtaataactcatttaagcctcacaatcactcagtgaggtacctattattactatcctcattttacacatggagaaagaaagatcttcgtgtgttaagcatgttgccaaaagttgctcagtaaggattgataaacatgggggccacaagtgaaacccctgcagtcagaatacagtgaacacagcccacaccttgatacatgaatccttactatcagtcaatggttaactgaatcctatcactgcccttgccatatttttcaggagaggacattaagtgtatatsatggcttcttctaaaagtggggtgtgtgggatgaggagtgggacacaattgtgaatgcagtgtaagagcaaggggatactatttttttttctgaaaaaagcatgtactatttgaatctatttttgtgaaattatatacatatttttgtgtaagtatgtataaaatataaggtttgtg

SEQ ID NO: 440931 - DNA, 561 bp, Homo sapiens
tggggtactcatgacataaagatggtaacaacagacaccaggaactactaggggaggcggggagggaaacaagtgttgacaaagtaattatcggacactatggtcagtacctggataatggaatcatttgtacctcaaacttcagcatcatgcaatatacacatacaacaaacatgcacatgtactgcctgaacctaaaatagaagttgaaaaaatatgtattttagttttgataaatagtgtcaaggagtatacttttaatcaccgtttgtgcacataaattgtttgtayccaaatactcactgcaacattactttgttaaacaaaataataatattatgaataattaaccaatacatttggtaacatacacataatacaaacaaaaaagatcctatagaagataatagggagacctgctgaactgattgccttgagttagttagagggttgaatgtggttaaaagcagtggcttggtattcaataagataatcaatatttcacttatgttaagtgggaaaggcagagtatattggggcagactcctgcatgtagttagt

SEQ ID NO: 440932 - DNA, 561 bp, Homo sapiens
tggggtactcatgacataaagatggtaacaacagacaccaggaactactaggggaggcggggagggaaacaagtgttgacaaagtaattatcggacactatggtcagtacctggataatggaatcatttgtacctcaaacttcagcatcatgcaatatacacatacaacaaacatgcacatgtactgcctgaacctaaaatagaagttgaaaaaatatgtattttagttttgataaatagtgtcaaggagtatacttttaatcaccgtttgtgcacataaattgtttgtacccaaatactcactgcaacattactttgttraacaaaataataatattatgaataattaaccaatacatttggtaacatacacataatacaaacaaaaaagatcctatagaagataatagggagacctgctgaactgattgccttgagttagttagagggttgaatgtggttaaaagcagtggcttggtattcaataagataatcaatatttcacttatgttaagtgggaaaggcagagtatattggggcagactcctgcatgtagttagt

SEQ ID NO: 440933 - DNA, 648 bp, Homo sapiens
catcttgtcccaccaggaggtcttcaggggcaatatcaaacatggagctgtcatctcctataacaatacctttttctggaatacctcctgaaggatctgcctgagcttcagtttacttttttaaaaatataagtagaaggaatacactctaaaataaaagttaaaagtatagtgttataaatacataagccagtaacagtcatttaatatcattaagaagtgttatgtactgtacataattatacgtgctatactttcatatgactgtcagtgcagtaggtctgtttacacctgcaacaccacaaacatgtgagtaatgtgttgtggtacaaagttacaatgyccacaatatcactagctgataaaaaatgttcatctctattataatcttatgggatcatcatatacaaagtcggctgttgaccaaaatgtcattaggcagtgcaagactataatgtatatttacctataaaataaaatctattatgaggaaatggctatggagtataatgagtctcaagataggtagtcagcaagcgagagacacaggtgagctgacattttaggtctagtttgaaggctattgtttacatacccagaaagagccaatgtttcagtttaagttccaaagcaggaaaacttatcaat

SEQ ID NO: 440934 - DNA, 648 bp, Homo sapiens
catcttgtcccaccaggaggtcttcaggggcaatatcaaacatggagctgtcatctcctataacaatacctttttctggaatacctcctgaaggatctgcctgagcttcagtttacttttttaaaaatataagtagaaggaatacactctaaaataaaagttaaaagtatagtgttataaatacataagccagtaacagtcatttaatatcattaagaagtgttatgtactgtacataattatacgtgctatactttcatatgactgtcagtgcagtaggtctgtttacacctgcaacaccacaaacatgtgagtaatgtgttgtggtacaaagttacaatgcccacaatatcactagctgataaaaaatgttcatctctattataatcttatgggatcatcatatacaaagtcggctgttgaccaaaatgtcattaggcagtgcaagactataatgtatatttacctataaaataaaatctattatgaggaaatggctatggagtataatgagtctcaagataggtagtcagcaagygagagacacaggtgagctgacattttaggtctagtttgaaggctattgtttacatacccagaaagagccaatgtttcagtttaagttccaaagcaggaaaacttatcaat

SEQ ID NO: 440935 - DNA, 599 bp, Homo sapiens
tcatatcagcaacaatttaaacagttgttattctcagtgttgaaaaaatgtgaagaaacctcatatacttctcttcaaagtgaatgtagcttcattattttcagaggcccaatcagctatcagggtagagcacccacacttgtcttcacacactactgtttggcccagaaattctactttaggaatttatcctaggcatacacgcccatgaatctgcaacctttaagtataagaatgtttactgcattgttatttgtgatagcaaaaacctgaaaacacccaattaccaatggcaaaaatagtaaataagtaatggtatatccataatgatatgcagccatgcagccatgcaaaataattgaactgatttgaaatgaagttcaagatatattgataaatgtaaaaatcartttgcagcactctatgtaaagtactatctcatttgtgtttttaagtgtgtggaggttttctacatatattaatataggtctatagataactatgcagggatacgcttatgtacctagacatttctggaaggatttgaaaaagactgtgtgtgtgtatgtgtgtgtgcataaacatatgtttagtgaagg

SEQ ID NO: 440936 - DNA, 339 bp, Homo sapiens
gcatacacgcccatgaatctgcaacctttaagtataagaatgtttactgcattgttatttgtgatagcaaaaacctgaaaacacccaattaccaatggcaaaaatagtaaataagtaatggtatatccataatgatatgcagccatgcagccatgcaaaataattgaactgatttgaaatgaagttcaagatatattgataaatgtaaaaatcaatttgcagcactctatgtaaagtactatctcatttgtgtttttaagtgtgtggaggttttctacmtatattaatataggtctatagataactatgcagggatacgcttatgtacctagacatttc

SEQ ID NO: 440937 - DNA, 549 bp, Homo sapiens
  misc_feature (1)...(549): n = A,T,C or G
tatttggtgtgctatattaagtagtggttaccaacagtctctgcagcaggaatgcttgggtttaattttttttagagccacnncntattttttttttgtaaggggcnnaaacncngnngctnagcttgcnaannaataaaaatntattaaaaggcccccacaaattaatatatatgtaaagttcttaaaatgctcccaataagtgctaacatattaatgttatctgttactactatttttaaataggctagttttaccaaacctatcaagaaaggccaaggctactacgtatcatgagaagggactgaatgcattgtctgggctcctagaggcccacttaaccctttcatcccttccgtatattaaggtaccttaatatttcaaagccttaggatttttgtgtgtttggcttktttttttatgagaaaaagtttatttctctcttatacaaaagaagtccagaggcaggcagtccaggtatactcaagagctttcttaaaaaatgagttaatcagaaaaaaaagcaaaagccattcataaaattaactc

SEQ ID NO: 440938 - DNA, 565 bp, Homo sapiens
tctccagcctcagctacctgagtaactgggattacaggtgctcacacccacgcctggctaattgttgtgtttttagtagagacagggtttcaccatgttggccaggctgctgtaaaactcctgacctcaggtgatctgcccacctcagcctcccaaagtgctaggattacaggcacgagctaccgcacctggccaattgaaatattttaatatacacatttatgtagcaatttttttcactgctayacatttttcttagatcattcgaagagtgttttattaagtagaacttagtggaacaacaattatacacatttaaattactgatatactatacaaaattcccttaaaaaatatatgagagaagtggaaactgccatttttaatgttaccaacctgacaaaaattttaacttattctattatttaataatctaatctatattttctattttttaaattaatctggaagcacttaatatatattatatttttccattttaacaaatgttatattctttttgctttgtctgttatgttggcattaaaaatttttaagatttatt

SEQ ID NO: 440939 - DNA, 410 bp, Homo sapiens
tgattgttgcattttcagggtactgattggtgcattttacaatccccttgctagctacagagtgctgattggtgcgtttttacagagcactaattggtgcattttataatcctcttgtaagacagaaaagttctccaagtccccactcgacccagcaagtccagctggcttcacatctcaacgtgacttggctgccgttaaaggcattcagttttataaaggaagcagagcatacaagtttggaaaatttgcagcctgattatgtgatagaaaagaaaatcccattytctgtggagaaattcaagctggctacagaaatttgcataagtagcaaggagcctaatgttaatccccgagaccatgggcaaaatgtctccaggccacgttagagaccttcatgccatcccctc

SEQ ID NO: 440940 - DNA, 595 bp, Homo sapiens
ttactatgttttttaacatgcttatattgctttttccaaagttgaagtgtaatattaatcatataagcaacttgttagtaatccagattccccgtcctccacccaggaacttctgatttggtaagtttggggtatggccagggagtctcactttggagaacacatccaagttattatcaaccaagtttgagaaacatggctaccacaagatttaataaaggataataccatttttatggtcttatttgaataaaattacaaactactcaaggaatgcagcaaagacagggtgttcagaaaacattctacatgccctcactttctctcagcctccctttaagtaagrtgaaggccaacaggttgcaacaagtgccatggatcaccgccaggtcaccacattgaaacaggtaggcaacttcttcattgctcttttccctttctgagatgagccttgagggctctggcaacctggctcttgagtaattatagagagtagagcaccaacctcaccctctttcccctgcacccatagtgttcatgtagcataagcaagaaataaatctttattgcaattcgtcaccaccataactgttac

SEQ ID NO: 440941 - DNA, 638 bp, Homo sapiens
cacggtggctcacgagcacaatcccagcactttgggaggtggatcacttgaggtcagggattcaagaccagcctggccaaaatggtgaatacctgtctgtactaaaaatacaaaaattagccgggcatggtggtgggtgcctgtattctcagctacttggaaggctaaggcaggagaatcgcttgaaaccaggaggcggaggttgcagcgagccaagattgcttcactgcactccagcctgggygacagagtgaggctctctcaaaaaataatactcctaataaataaaaaagaaaaggaaaaaagaaaggtaatacagcacattaccatagcagaacacttgtcactattaagcttgtatcatctttgaccaccattctctcatgtgtacattcttgtctccttgcatgtactacagatgagtttactaagtctccaagaagtgcagtaaatcttttcagctaccttgctgcaaatcaggatccaatgatagtctgctcactgcagagactgtgctctatatttcctccattgaacccaacccttgctcccataggagagaaggtgcttttcatttccactcatctcagatgggtcatgagctatgtcaaagagcctaacagcctgctgctattgca

SEQ ID NO: 440942 - DNA, 555 bp, Homo sapiens
ttgcagcgagccaagattgcttcactgcactccagcctgggtgacagagtgaggctctctcaaaaaataatactcctaataaataaaaaagaaaaggaaaaaagaaaggtaatacagcacattaccatagcagaacacttgtcactattaagcttgtatcatctttgaccaccattctctcatgtgtacattcttgtctccttgcatgtactacagatgagtttactaagtctccaagaagtgcagtaaatcttttcagctaccttgctgcaaatcargatccaatgatagtctgctcactgcagagactgtgctctatatttcctccattgaacccaacccttgctcccataggagagaaggtgcttttcatttccactcatctcagatgggtcatgagctatgtcaaagagcctaacagcctgctgctattgcatcattttgaaggaaaaataaatagaagcagcacctgtcaagtcccttctaaagatccagtgtaaattaaggcaatctcctggaagatcctctttaatgagttcaaaggagctgtgcaat

SEQ ID NO: 440943 - DNA, 574 bp, Homo sapiens
gatccagtgtaaattaaggcaatctcctggaagatcctctttaatgagttcaaaggagctgtgcaataatggttagatatatattattccttagcatctctcaccctcagyccaaatctagagacaactctaaagaagaacagaagagtttcccagaggtgaattctaaaatgtaaattgtatgcaaagactacaaaatgtgaacagattggacaaacagattgactctcaaggacaaagcttgaatttatatatccttccagaatcataggtccatgatttttttaaaaaactaagcttaactaaatcttaattttctgcaagtgtttttatgtcaggttttactacattcagaagggacaataaagaatttaacactttaatcactgcaactcaacaagaagtaccataaacatgttaatccataatttactgaccttctgcgagaagctaaaatttttttccatacctacctcaacaggcccttaaaacatgtacatggaagaaaaatcaggaattgaaaaataacattgatagccaggaaaattggttcataagtaattcaaaagctcta

SEQ ID NO: 440944 - DNA, 480 bp, Homo sapiens
ccaaatctgggtcagtggtgtgccttgcattctttcatcccacataattctgctccctacaaaggattgtgcatttgattactttcacaggcttcaaacacytagactatctagtactgctggagagtatctttccatttccagactcttatgcagtcttgctatttgcctcatctttggtgagcccttgaggtgcacactcatggttctgtgaggtatcctgggtgatgggatgctgatggaggctttcaaatgctgattaattagaccttcataatttaggcatttcattggctcagagaaagaaggtcagcccctaaaggaggctcctaaagacaggcactgaaagccctcgcttctctggacaacatcttattatatttctcatggcatgttggttgttatggtgatagcaaaggagaggaggctgagcatgtatggttcaatggaggttttgctttaaggagagggaagtagtag

SEQ ID NO: 440945 - DNA, 408 bp, Homo sapiens
gactgctgaattagtctgttttcacactgctgatagagacataaccaagactgggccatttacaaaagaaggaagtttaatgcactcacagttccatgtggctgggaggcctcacaatcatgrcagaaggtgaaaggcacatctcacatggtggcagacaagagaagagggcttgtgcagggaacctcccatttttaaaatcatcagatctcatgagacttattcactatcatgagaacattatgggaaggacccccccctcatgacccaccccagaatggtggatccactgtcagcttgcaccatgtgcctggaaaagatgcagatactcaatgccagtctgtgaaagcagccagaagggagtctgtaccctgcaaagccacaggggtggaggtacctcccaccaga

SEQ ID NO: 440946 - DNA, 408 bp, Homo sapiens
gactgctgaattagtctgttttcacactgctgatagagacataaccaagactgggccatttacaaaagaaggaagtttaatgcactcacagttccatgtggctgggaggcctcacaatcatggcagaaggtgaaaggcacatctcacatggtggcagacaagagaagagggcttgtgcagggaacctcccatttttaaaatcatcagatctcatgagacttattcactatcatgagaacattatgggaaggacccccmcctcatgacccaccccagaatggtggatccactgtcagcttgcaccatgtgcctggaaaagatgcagatactcaatgccagtctgtgaaagcagccagaagggagtctgtaccctgcaaagccacaggggtggaggtacctcccaccaga

SEQ ID NO: 440947 - DNA, 592 bp, Homo sapiens
tggactcataaatagtggacacctgggggaaaagagttctaggccaagagaacagaaactacaaaggctctgaggcagaagcgtgcttgacattgtactcctgtgtactggtgttgtgccttctataacagctaaacaagaaaacccccaaaaggatcacagggcagcaaagctaccaatggtagagttgtgtatctgagactcagaaaatatactccttgataatgtacaagggaaataggaggaaatttcaagataagtcaaaggtttcttatgtcatrgtagcccagggtacaaaagtacaagctgatgttaattaacatcaagaaatactcctagaaaagaaacataccaaaaccttgccacacacagaggtgttcaagaataaacgtatacttgtaatgataaaactgggctcgcctaatgatttggcgggattcatttgtgagacacataaaaaatgtcacatgaatgttattaacagggttctgccacatgcacacccctctgcatttatagtagtgaatcagaacacttggaatcatgcatcatcctacacttctggatattcccatccactagattcttatca

SEQ ID NO: 440948 - DNA, 582 bp, Homo sapiens
caggtcactcctgtgtaaaacatgctgagaaactcacactaaagcaaagtgggtaattttaataggtaagtattccaccaccgaattgaaaaccttagtccaacgtggaggtaagacaccagaagcaggaagagtgtaactaaattggagtaaactgtattttgtagaagttcaggatttaacttactgcgaagatagtatgttaatcctatttcttgcaggtttatgttctgccacagagttgggctaggaacagtgccctgatctattttgaggtgtccttaatgttctcattggtctcaaatcagtggttcagcgattattttctacttctagatccacaggatttgggggtttattcgtttgctccctctggrggttatctgtctggcttgtagtgcttcattttcatggttttgatatctggacgctaggatgctgggtacctacttatctagcagtcctggacacagcataggacaagggaaagaatgacaaacaactgactacaaacattaggtgcagtgtcatcctaagaatttttcataagcaacttgatagttttcattgcgttgtcttcta

SEQ ID NO: 440949 - DNA, 575 bp, Homo sapiens
atttagttctttattcattattatctttccacccagtttcttcttgtctatcagaccttctatctgggatcatttcttttttgcctgacatatatcctttarttttcctttactgagtgtgtgtgtgtatgtgtgaaagagagaagagggagagagagagatttttgtttgtgacaatccttttaatttaatttaatttgctgaaaggaagtatcaaaaatatcatttcattgtcttctgaattttattattatcattgagaataaagcagtcaagctcatttttttctttgtcagggaatctatctttccaaactctggttccttctaagatcttttgaagatactctctttctccttgaagatattatctctgtctattctgaatttttgatctgatgtttttgggtatgaattttaacatctcttatttggcattagataggctacattgaggactagcatttttcaggaattctggaaacttctatttacaatccttttgaatattttctcattaattttatgatcttctggaactccaattccatgtctggtagactttctatgtttttc

SEQ ID NO: 440950 - DNA, 564 bp, Homo sapiens
attttagtctttattaactggaactagatttgtggtctttcacttgccagttctcccacatcatcaggcaaatacatggctaaacagattagttttgcacggtgccctaaaaactagtctacttgggtttttgttgagttcaggggggaaatgaattttctatgcctctgtggagaatattctgcctccaggcttctggaattcagacmtggggttggttaacagaagtacattggttgatttcatctattagacagctacacagaagaggcataatttttaaggttactagaatctgactctgagtttttcagattaaaaaaaaaacaaaccttaaagacaccaagatattctttgctggatcaggaatgcaggttttgtttcatttttcttatccttcgtgatcataaatgtacacctaggcctttaccaacttgttttaaataagattttaatataaaacggcacccaggagaaatagcttacagaagctgagttatttatttgtgtcaagcagatttcaattatgtagactgagatttttcctgagtttttttttgtaat

SEQ ID NO: 440951 - DNA, 593 bp, Homo sapiens
aattccaaaaagctaatactgaaacagtccctcccttagtctctccctgttatgagctgaattgtgtctccctgctccctccaccaaattcatatgttgaattcctaactcccagtacctcagaatgtgaccgtatttgaagatagggtctttaaagatgtaattaaggtaaacgtaaaatgaggtcttatggctgattgtctttatgcaaagaggatattaggactcagacacacacagttggaagaccatgtgaagacacaagagagaagacagccatctgtaagctaacgagagaggstgcaaaagaaaccaaacctacaaacactttgactttgaacttctggcctccagaaccataagaaaataaatttctgtggtttaaactacctagtctgtggtattttgttatggcagtcctactaaacgaatgtacttcctttacctgaattataagctgactttcccaatacacctccacatttctgtcatgtaccagcattctctcaggcataactatctgggagtctttttttctagtactctcactcttctcatcattaattgttttgctttttttaaaaaaattaccc

SEQ ID NO: 440952 - DNA, 593 bp, Homo sapiens
aattccaaaaagctaatactgaaacagtccctcccttagtctctccctgttatgagctgaattgtgtctccctgctccctccaccaaattcatatgttgaattcctaactcccagtacctcagaatgtgaccgtatttgaagatagggtctttaaagatgtaattaaggtaaacgtaaaatgaggtcttatggctgattgtctttatgcaaagaggatattaggactcagacacacacagttggaagaccatgtgaagacacaagagagaagacagccatctgtaagctaacgagagagggtgcaaaagaaaccaaacctacaaacactttgactttgaacttctggcctccagaaccataagaaaataaatttctgtggtttaaactacctagtctgtggtattttgttatggcagtcctactaaacgaatrtacttcctttacctgaattataagctgactttcccaatacacctccacatttctgtcatgtaccagcattctctcaggcataactatctgggagtctttttttctagtactctcactcttctcatcattaattgttttgctttttttaaaaaaattaccc

SEQ ID NO: 440953 - DNA, 483 bp, Homo sapiens
tggtattatttgttgagtttggccttcttgatgcttcccatattgtcttttattgccaygaatcctgtcttcccaagtgcctgacaaactcgtttggggcctaaattataggtaatatattctttctgactcttaaagtacctagtcatcatttaatactgatttttttttaaaagctaactcctaaaatcacagtagttgaaaagccttttaagtagggtgattatttaattaactttgcatgacatggttctagctcacccttgtaatctcggcatcattattatagtatatttcttactctcaaaagtgtgcttatttggacaacagattatatggtcactctccccataagtatcctggcttaaacagaaccacagaagtttgtttcatgaagataaaaagaacatagagcaaacttttttctgtgggaaagaagaacatgaaagagagagagttgagtctctacttgggagaatattt

SEQ ID NO: 440954 - DNA, 595 bp, Homo sapiens
ttttctgtgggaaagaagaacatgaaagagagagrgttgagtctctacttgggagaatatttcatctagcagagattgtaaagtctgtgggtaaaatttattgtacttaaatgtttgcatgtcagataagacaaaccagctgcacttcactacaattgccaagtttggtctttgcatttaacttttggcagatgtgcttgtacgctattcaggtcaaaaagctattaatcaaactgttaaaatgtgttgttaaaagttgaagatgtagtctatgttctgatcttaaacagtttttatttgtttttattactcaagtaatacatagttactcaatacatactcaacatacatacttttattgtctagttaaaattatatcaaaatatatagactgaaaaatgtctctctccatcatcactcacccctcatttacctaatctcacttttccatatgtaaaccaattttaaccagaaacaacgcaaaataaatattgagtatgaatgaattgtaaatatcaagacgttccataaaagtaacaaattactaacttttaataaatagtccaacttttctggaagaaaatttgtcaaaata

SEQ ID NO: 440955 - DNA, 446 bp, Homo sapiens
catttaagcccccttagggcatttcacactgcactgtgtaatagataaagaatcacactagaggagacataattcattaattctcttttgaaaagcgcttggtgctatcagtgaaatgaatataaattatgccattcctatacttaagggcttaaaaaagtctagtagkgtcttattcatatttgtatctgccataatagccttgaagtttttttatgatcattctaactagatgttctctttcctgcctttacaagttcacgaatttctgtattatgcttatgatttaaatgggacattgctgtatattgtggttatttgtgtttacattcttatcaactttatcactccctccccaaccagtgtaaaaatggagaaggcaggttgtggcaatgacctaacattgatcattggaaataggatggaaatatagggatgcaagtaaa

SEQ ID NO: 440956 - DNA, 575 bp, Homo sapiens
acaatggaaattcttctgacttcttcatggaagtcttctttaatgtgtcactttacccaatttgaaagggaacctatgtttgtgtgtcctggattatcagagaagcagtacttgaaaatagaatagatatattgaatagcagtataccagtatgtgtctcttgaagaaatctatatatatgaaagttccaagtgacagtgttaatgaacttttaggtacagtatcatataaacacataatttcttcttttagacaggatttaccactgattttattgaagtagcttgcttatttacaaacttayaccagttatataaaatcgatatacttgagaaattgggtgaattcatgtaacttttgaatatatagcttatttttttcgcttttgaaaatgtaggatttattgtaataatgacaactaaggtttcatgattgtactaacatacaaatgaccaaagaagttgcctttctaaattggtaccaaggaaacttgacttccactgcctgctctaaaacatattttggtttcttgccaccactacttaccactctatttactgtgtactttaaggctt

SEQ ID NO: 440957 - DNA, 687 bp, Homo sapiens
ctatattcattaagctactatagtatgggacacctgaaggcagaatatggcttatagaaggagactaaactctgtagaagagtagaaagttcaaagacaagcatactatgcctttggttagcagagaaagtagatgatttaattctcaaacatttgttatgaatttagaaagagctttcctttcttttttgagagatcatggtaaattgktgccattaagagctcccagatcctcaaaggtcaaagctaaggaaatttaataagggcgaggcctaggagtcttgaaattattcaagtttatctctatttcatcttgtctgtaatttgtatatggaaaacaatttggaatgttgggcatgtttttctctttctagatgtttctcatgattttccttctgtgcctttgcccattgcttgcgaaagcagagaaagtgttctctattttggaaatctgcagacatttctttccaatttcctccatcctatctaggcaggaatctattttctgtctggcaacatgcttctcctgtccagtgtttgaagaatatgttttctctctgtgaattctctcctcttgccatgtggaaataatgctgtatttggcatcaaaattctatttgccttctgcccattctgctttctgaactgtgcacagaggaatctaaatatttccgtagaagaaagaga

SEQ ID NO: 440958 - DNA, 687 bp, Homo sapiens
ctatattcattaagctactatagtatgggacacctgaaggcagaatatggcttatagaaggagactaaactctgtagaagagtagaaagttcaaagacaagcatactatgcctttggttagcagagaaagtagatgatttaattctcaaacatttgttatgaatttagaaagagctttcctttcttttttgagagatcatggtaaattgtwgccattaagagctcccagatcctcaaaggtcaaagctaaggaaatttaataagggcgaggcctaggagtcttgaaattattcaagtttatctctatttcatcttgtctgtaatttgtatatggaaaacaatttggaatgttgggcatgtttttctctttctagatgtttctcatgattttccttctgtgcctttgcccattgcttgcgaaagcagagaaagtgttctctattttggaaatctgcagacatttctttccaatttcctccatcctatctaggcaggaatctattttctgtctggcaacatgcttctcctgtccagtgtttgaagaatatgttttctctctgtgaattctctcctcttgccatgtggaaataatgctgtatttggcatcaaaattctatttgccttctgcccattctgctttctgaactgtgcacagaggaatctaaatatttccgtagaagaaagaga

SEQ ID NO: 440959 - DNA, 575 bp, Homo sapiens
gaaaagttagcaattctgtggcatggggctgcctttcagagagaaggagattgttagcagaaggtatctgagcagagactagaatggtattggcttcctccttgtcttactcctctcctacctagctcactcactagctactatctttttctcttttttttaatatatattgtactttaagttctgggatacatgtgcagaacatgcaagtttgttacacaagtatacatgtgccatgctggtttgccacacccatcaacccrtcatctacattaggtatttttttcctaatgctatcccttcccagccccccaccccccaacaggcaccagtgtgtgatgttcccctccctgtgtccatgtgttctcattgttcagcttccacttatgagtgaggacatgtggtgtttggtttctagcttcatccatgctcctgcaaaggacataaactcatcctttttatggctgtataatattccatggtgtatatgtgccacattttctttatccagtctatcattgatgggcatttgggttggttccaagtctttgctattgtgaatagtgtcgcgataa

SEQ ID NO: 440960 - DNA, 575 bp, Homo sapiens
gaaaagttagcaattctgtggcatggggctgcctttcagagagaaggagattgttagcagaaggtatctgagcagagactagaatggtattggcttcctccttgtcttactcctctcctacctagctcactcactagctactatctttttctcttttttttaatatatattgtactttaagttctgggatacatgtgcagaacatgcaagtttgttacacaagtatacatgtgccatgctggtttgccacacccatcaacccgtcatctacattaggtatttttttcctaatgctatcccttcccagccccccaccccccaacaggcaccagtgtgtgatgttcccctccctgtgtccatgtgttctcattgttcagcttccacttatgagtgaggayatgtggtgtttggtttctagcttcatccatgctcctgcaaaggacataaactcatcctttttatggctgtataatattccatggtgtatatgtgccacattttctttatccagtctatcattgatgggcatttgggttggttccaagtctttgctattgtgaatagtgtcgcgataa

SEQ ID NO: 440961 - DNA, 584 bp, Homo sapiens
aaatgaaaccaacagacaaggcatattgttgataggaaaattcccatttacaatatcaacaaaaaatattcctatcaatctccttcgaagactaaagtgaagattgactctattgacatattatttatccaatcccatgcattattataaaagtgaatgcaaaatagaaatatcagaaaggagttaaaaatgtcactttcaagtacaatatgattgtttctctggaatccaagagaatcaagttaataggaaaatttaatattacaacattatcaattctcctataatcatcctcaatcattacacagtttaataaaaatttcaaaaatataatttaaaatatatttcatgtcagtagccagtggggaacaaggactagagttacaagtgtttgtatctgatgagaagacactgggaggtgaaaasagtgagtgatatgacaaggtcctaagtagaccagaggtgaaaggatcctgagtatagttagaaaaacaaatattatcctataggaagaatatcttttttctatgcagaagaagagatgatgtaaaatgtaggtgacactatgggatttattgacaaaa

SEQ ID NO: 440962 - DNA, 579 bp, Homo sapiens
atactgagtcagagtggggaaaagtatctttaatttttctcctttcctctagtaagaaggcctcaccagagatgtctaaagatgatctctgtccaaggccttagacaaagagacctaggaatatgacccctgggctaggaatgtaaatttgtggaaaagcatgacttgagatcttagtcctaaactgcaactctcttcgggactgcaatgcgctagctgagcatcaagtcaggagtgggaagggaagcaatcttcccaygaagtctgccaggtgaaatctttgtaattacctatggatgggcctggaaaatcacacatccatgtttaagcaggagctgtacccagtcagaccacaattttatccctgacattgttaggttttctggtctagtacagtgcatagatgtgaatgtacacacaaactcatatgcacacacatgtatctaaacaagcatccattcatcaacattctatgatgaatatcagtggcaggaaatgccatttttatgcttactcatttatatactctaatgttatctactggacaaatatcattaagtaatattaaactaataaaag

SEQ ID NO: 440963 - DNA, 618 bp, Homo sapiens
tacccagtcagaccacaattttatccctgacattgttaggttttctggtctagtacagtgcatagatgtgaatgtacacacaaactcatatgcacacacatgtatctaaacaagcatccattcatcaacattctatgatgaatatcagtggcaggaaatgccatttttatgcttactcatttatayactctaatgttatctactggacaaatatcattaagtaatattaaactaataaaaggagagatgtgaaataaaaagaaatagagcaaatacaaagaaattatctaaagtaatcataacataaattcattttataactccagagaagacaataaaatcatttgctatctgaaattaaatgtaatgaatttacttaataagaagttgtctatgaaaatttagaataatcaaagaaatatgcttccttataaaacaagcccttttgttaaagaaagcacaagtgctatttgtctcaatgttcttgaataaagaacaatgattttcaataatcttcatattttaagtttgctaatggaaacacatttaagaacataaagtgcatttcaaagtacatacactctacttaaattctttttttcctaatactttaacttc

SEQ ID NO: 440964 - DNA, 618 bp, Homo sapiens
tacccagtcagaccacaattttatccctgacattgttaggttttctggtctagtacagtgcatagatgtgaatgtacacacaaactcatatgcacacacatgtatctaaacaagcatccattcatcaacattctatgatgaatatcagtggcaggaaatgccatttttatgcttactcatttatatactctaatgttatctactggacwaatatcattaagtaatattaaactaataaaaggagagatgtgaaataaaaagaaatagagcaaatacaaagaaattatctaaagtaatcataacataaattcattttataactccagagaagacaataaaatcatttgctatctgaaattaaatgtaatgaatttacttaataagaagttgtctatgaaaatttagaataatcaaagaaatatgcttccttataaaacaagcccttttgttaaagaaagcacaagtgctatttgtctcaatgttcttgaataaagaacaatgattttcaataatcttcatattttaagtttgctaatggaaacacatttaagaacataaagtgcatttcaaagtacatacactctacttaaattctttttttcctaatactttaacttc

SEQ ID NO: 440965 - DNA, 618 bp, Homo sapiens
tacccagtcagaccacaattttatccctgacattgttaggttttctggtctagtacagtgcatagatgtgaatgtacacacaaactcatatgcacacacatgtatctaaacaagcatccattcatcaacattctatgatgaatatcagtggcaggaaatgccatttttatgcttactcatttatatactctaatgttatctactggacaaatatcattaagtaatattaaactaataaaaggagagatgtgaaataaaaagaaatagagcaaayacaaagaaattatctaaagtaatcataacataaattcattttataactccagagaagacaataaaatcatttgctatctgaaattaaatgtaatgaatttacttaataagaagttgtctatgaaaatttagaataatcaaagaaatatgcttccttataaaacaagcccttttgttaaagaaagcacaagtgctatttgtctcaatgttcttgaataaagaacaatgattttcaataatcttcatattttaagtttgctaatggaaacacatttaagaacataaagtgcatttcaaagtacatacactctacttaaattctttttttcctaatactttaacttc

SEQ ID NO: 440966 - DNA, 588 bp, Homo sapiens
caatgaatacatgaatttctatttcacataaatgaaatttggctgactggctttgattgtggctgctactgcctgtccctggaayttgatagaaacctccatgactctccctttgttttccaaataggcctttcaacttttaattatttctcccatgtttacttttctaaaacatttgagatcacatcttatcatttgtaattcattatcccacttggtagatgaagttgctattaaatactggattgtagacaagagaactctatgggaatgtggggatttagaaataattcagataaggcagaaaactataaataccttgttaatataccaggataataaattagctaaccatggcacccagaggtgaagaaaatattttaattattaactgtgatcattgggaagcaagggtccattgagttaagcctttgcagagtatagtgaaggaggatctaagcggctggtttgggcagtgttttccaggcagaagaaaacccaaacccacacatgcacacacacacacacattaataaattacaaaatcgttagctaaaattaggaactaaacaaggttattccatgaca

SEQ ID NO: 440967 - DNA, 619 bp, Homo sapiens
ttatcctcaattgattcagaaaagattcccattaccaaagatctgatgcattctttcagtggggcaaagtttctacctttgtggaaacacttttggcacatttctgggtgctgaagaggctagtgagagttgcactaattaaaatggacttgtgatgatgatttaagcatttttgatgattatgtgatcatgtcttccctttgaattaaatagattggcaattcatgaaactgatatcttctgttaaaaatctaacaatcaatcaatcaattcataactggcaagtcaaaattaagattgagccaatgtgtggagaattgtgatttcctcctccaaccatctcctgtattttttccaattagagacccaaaccttgcagaatgaaatatgttagattgtagtcatctgtcaatagactcrctgtttctttttatgtgatcccctgccagtatcacctttcacatctgcctcttccattgggaagactaatagacatagccaataaaatacaaacagaagtgatcattgtcatttgcaggtaaaagttttaaaaggcatttatgataatggttctttttcctggctacaaaaaagtagcatgttcctaaaatgggttttt

SEQ ID NO: 440968 - DNA, 619 bp, Homo sapiens
ttatcctcaattgattcagaaaagattcccattaccaaagatctgatgcattctttcagtggggcaaagtttctacctttgtggaaacacttttggcacatttctgggtgctgaagaggctagtgagagttgcactaattaaaatggacttgtgatgatgatttaagcatttttgatgattatgtgatcatgtcttccctttgaattaaatagattggcaattcatgaaactgatatcttctgttaaaaatctaacaatcaatcaatcaattcataactggcaagtcaaaattaagattgagccaatgtgtggagaattgtgatttcctcctccaaccatctcctgtattttttccaattagagacccaaaccttgcagaatgaaatatgttagattgtagtcatctgtcaatagactcgctgtttctttttatgtgatcccctgccagtatcacctttcacatctgcctcttccattgggaagactaatagacatagccaataaaatacaaacagaagtgatcattgtcatttgcaggtaaaagttttaaaaggcatttatgataatggttctttttcctggctacaaaaaagtagcaygttcctaaaatgggttttt

SEQ ID NO: 440969 - DNA, 505 bp, Homo sapiens
aacatagttagacttacattttgtagttgtcatttcatttgtatattaagaatgggtcagcgagaggcaagaaagtagattgttaaacacattagtgttcctaaccaatcccagttccaattcctacacaattggagtcacatgcctgagaaatgatgtggggtaaagagaagcggatagagttatgaagagatgttaaagatgagcattagagaggcacggcagtagattggctaagaagagaaaggacaaagcrggtaaaaactaaaactcaggttcctggattaaaaacttgagggatggatgtcctctcatgcacatgcatacatgtgtgcatacacatacaactacacacacacacacacacacacacatctgtctgtttcttactgctagagatttccattttattaccttgagttcaactctctattttttacattttatgaattactcttatattcttctgaatttatagtgtcacacgagcccacaggttgaaatc

SEQ ID NO: 440970 - DNA, 577 bp, Homo sapiens
tgtttaaccgatatcaaatattttatctaacatgctaatgagaaaactgttgattgttgaatgaaayacatttagcataaggatatttaacatctcaatataaattatgctctctcttataaagctcgttgactaacttcaaatggtgcttgtttgatagaatttgttacttcaacaaagagttgaacttaacgtaactgacatatatataatgaacatttcacatcaaaagtttataccaaagtttatgaagtgtattgtctctaaaagaaattgggattactattggagggaataaacccatattcgtgattatgctattaaaatgcagagtatcgttttaatgccatgatccaatttatttaaataaaattttactggaattttagcaagcttaaagctcttagaaaacatcacatttaaactaattttaaaaagtaaaattattccttagctgtcatacccagtagtagaatttcatagagccaatacatattagagaactgagatttaattataacttttaaactgcaagaagctcatcatttgcaaatgggaaattgatgaatatattgtg

SEQ ID NO: 440971 - DNA, 628 bp, Homo sapiens
ttttattttgtgatcagcacagcatagaacagtgacaaacaaatatatgtattcaaaactttgttgagttaaacaatgaagtgataaaaaatattattttgaaagtatgcagcctttccacttactatagtagatttaatttttgtgtgctcttgagtgtttcgcatgtattaaaccaactaatatatgttaaaaagcatgtgatattgtctaaagcctagatatgatctttgcgttttaacagcaatctctgtagacagtcaaatgacagacagtgaaagctgaaaactgatcctacagacaagtttagggcttcctgtggcttatatctagtctactgcaggttttattcatgttcttgtgatgtcagctctgtgatccaaaagaaacttattttktcaaactttgaaacagttaaagataatattaaggtgatttggaggaggagtagtcaattcttagagatcacattgcatttgttatttactcatgaaaacggatcctatgccatttgcatatgatttgctgagatctgcaagtggaaaagccgtggtgactgtttgacaaattagccaatctagagcatttcttaaaacgatgtgtatagtctaataatcttatacttgtt

SEQ ID NO: 440972 - DNA, 628 bp, Homo sapiens
ttttattttgtgatcagcacagcatagaacagtgacaaacaaatatatgtattcaaaactttgttgagttaaacaatgaagtgataaaaaatattattttgaaagtatgcagcctttccacttactatagtagatttaatttttgtgtgctcttgagtgtttcgcatgtattaaaccaactaatatatgttaaaaagcatgtgatattgtctaaagcctagatatgatctttgcgttttaacagcaatctctgtagacagtcaaatgacagacagtgaaagctgaaaactgatcctacagacaagtttagggcttcctgtggcttatatctagtctactgcaggttttattcatgttcttgtgatgtcagctctgtgatccaaaagaaacttattttgtcaaactttgaaacagttaaagataatattaaggtgatttggaggaggagtagtcaattcttagagatcacattgcatttgttatttactyatgaaaacggatcctatgccatttgcatatgatttgctgagatctgcaagtggaaaagccgtggtgactgtttgacaaattagccaatctagagcatttcttaaaacgatgtgtatagtctaataatcttatacttgtt

SEQ ID NO: 440973 - DNA, 628 bp, Homo sapiens
ttttattttgtgatcagcacagcatagaacagtgacaaacaaatatatgtattcaaaactttgttgagttaaacaatgaagtgataaaaaatattattttgaaagtatgcagcctttccacttactatagtagatttaatttttgtgtgctcttgagtgtttcgcatgtattaaaccaactaatatatgttaaaaagcatgtgatattgtctaaagcctagatatgatctttgcgttttaacagcaatctctgtagacagtcaaatgacagacagtgaaagctgaaaactgatcctacagacaagtttagggcttcctgtggcttatatctagtctactgcaggttttattcatgttcttgtgatgtcagctctgtgatccaaaagaaacttattttgtcaaactttgaaacagttaaagataatattaaggtgatttggaggaggagtagtcaattcttagagatcacattgcatttgttatttactcatgaaaacggatcctatgccatttgcatatgatttgctgagatctgcaagtggaaaagccgtggtgactgtttgacaaattagccaatctagagcatttyttaaaacgatgtgtatagtctaataatcttatacttgtt

SEQ ID NO: 440974 - DNA, 569 bp, Homo sapiens
ttatttattttagtgatcatagaatttagactgtcatgaaagccgaataatgtggcatattttttaatctctaataaaaatactttgactgaaatgcatttgttagcccattgcccttcattaatacagaaaatcttgttttccataaaataatattgtcaatgtcatcattcctaaaatttttcctattctctttatgtggaccaatgggaagaatttcacaaagtatatcagcataacaaataatgaatatttggactcatttctgtaattggaccggcgttggcatacataataatttatgtgattttttaacctaaaactaygggtctaaatgtgtaatttgacagctctgaaagggtaatttcgctagtaatctcttaaatttatcttatttctttagttactattgtccttttgtccaaatagaccaaaatggagtggtagataggtaggtatgttggtagctatctgccctttcctgacttttctaaactgaattattttgcttgcctgcttcaatatttcccacttgatacttttagacatatttagttctatataattaa

SEQ ID NO: 440975 - DNA, 646 bp, Homo sapiens
aagtaattgttcctgatgtttaaacaattttatgctgtgttttatagmattcaaacatgagttctgggaaaataaaacaggactggtgagaggaatcatggtgccgatagacaggagtaaactgattcaagttattgggcaaagatgccctcgatgctagagatttggatttgatagacatagtaataaaaatagaaatacagtggtataaaatctacctaaaaggggcaaaatcaagattgctgactagttgctggtagtgtgtgtcttctccacagagaagagccagaagagtaagcagatacattttgaaaaaatcttctagaagagaaagcttggcttcacgggaaaagggacagaaaacatcagaataaggaaggagagttcaaggcaccttacccagccaggaaaatgctgagagctgggagaagcttctggacatggggaaacagaaagaaagaaatccctagaggtcaaaaactggcttttatcatcttgtatacgggagaaacccttagacaaaccaagcttgctaaagattgcacagagacattgctccaggttgggaacccacacagaatcccacaggcatctgagcctggagcagcctcagctgggacccatcttgagaacttagtactgggga

SEQ ID NO: 440976 - DNA, 646 bp, Homo sapiens
aagtaattgttcctgatgtttaaacaattttatgctgtgttttatagcattcaaacatgagttctgggaaaataaaacaggactggtgagaggaatcatggtgccgatagacaggagtaaactgattcaagttattgggcaaagatgccctcgatgctagagatttggatttgatagacatagtaataaaaatagaaatacagtggtataaaatctacctaaaaggggcaaaatcaagattgctgactagttgctggtagtgtgtgtcttctccacagagaagagccagaagagtaagcagatacattttgaaaaaatcttctagaagagaaagcttggmttcacgggaaaagggacagaaaacatcagaataaggaaggagagttcaaggcaccttacccagccaggaaaatgctgagagctgggagaagcttctggacatggggaaacagaaagaaagaaatccctagaggtcaaaaactggcttttatcatcttgtatacgggagaaacccttagacaaaccaagcttgctaaagattgcacagagacattgctccaggttgggaacccacacagaatcccacaggcatctgagcctggagcagcctcagctgggacccatcttgagaacttagtactgggga

SEQ ID NO: 440977 - DNA, 580 bp, Homo sapiens
agcaaccatgctacccacagtttcttccatatactgcttgcctaggtggtgcctcaccctctctagccgcaggctcaaggcatcatttgagagattaatgctaatctgaactctgccttggactcagttcaggttgacatgactgcagcaattgcccagccaaggactgagagggaaaccaggctactacacacatatctaggacaatactcactgccctgcaatggkctgctgtgagactgagatgtgatcagatcacaatacccacaatgtcttgcctacactgcctgcctaagcagcatccctccccagctggttgcaggcccaaggtgtgattttgagagtttaattctgagctgcaccccacccttggcctgagtttgggctgatgtggatgcagatgccagccagccaaggaggggcagggaacctcggtgtttccatgcatacctagggcaatatctaatgccctggtagggtctgctgtgagaccaagactagaacagactgcactccccgcagtttcctgaccaagttgcttacctgagaggggtgccaccctttctggtcataaacccaa

SEQ ID NO: 440978 - DNA, 580 bp, Homo sapiens
agcaaccatgctacccacagtttcttccatatactgcttgcctaggtggtgcctcaccctctctagccgcaggctcaaggcatcatttgagagattaatgctaatctgaactctgccttggactcagttcaggttgacatgactgcagcaattgcccagccaaggactgagagggaaaccaggctactacacacatatctaggacaatactcactgccctgcaatgggctgctgtgagactgagatgtgatcagatcacaatmcccacaatgtcttgcctacactgcctgcctaagcagcatccctccccagctggttgcaggcccaaggtgtgattttgagagtttaattctgagctgcaccccacccttggcctgagtttgggctgatgtggatgcagatgccagccagccaaggaggggcagggaacctcggtgtttccatgcatacctagggcaatatctaatgccctggtagggtctgctgtgagaccaagactagaacagactgcactccccgcagtttcctgaccaagttgcttacctgagaggggtgccaccctttctggtcataaacccaa

SEQ ID NO: 440979 - DNA, 614 bp, Homo sapiens
tctgccttggactcagttcaggttgacatgactgcagcaattgcccagccaaggactgagagggaaaccaggctactacacacatatctaggacaatactcactgccctgcaatgggctgctgtgagactgagatgtgatcagatcacaatacccacaatgtcttgcctacactgcctgcctaagcagcatccctccccagctggttgcaggcccaaggtgtgattttgagagtttaattctgagctgcaccccacccttggcctgagtttgggctgatgtggatgcagatgccagccagccaaggaggggcagggaacctcggtgtttccatgcatacctagggcaatatctaatgccctggtagggtctgctgtgagaccaagactagaacagactgcactccccgcagtttcctgaccaagttgctyacctgagaggggtgccaccctttctggtcataaacccaaagtaggcattattttgagagtttggagccattgtttggctacgtgccagtggtgaacacagcaagtcatttagttttgggccagagatgggaatacttgctctggaatgggagaaaggcacccacatctggaattaagtggagag

SEQ ID NO: 440980 - DNA, 518 bp, Homo sapiens
aatccagggaactccagtgagaaactatagaagatgaccatctgtgtattagcttattcttctgttactataaaggaatacctgagacttggttatttataaagaaartatgtttgcttggctcacggttctgcaggctgaacagcaagcatggctccagtattttctcagcttctggtgaggcctcaggatggttgtaatcatggcagaaggtaatgggtagccagcatgtcaaatggcgagagcaggagcaagagagagaggaagaggctgccatacacttttaaacaaccaaatcttacacagactaactaatcaccaagtcattcatgagagatctgaacccatgatgaaaacacctcctaccaggccccatctcaaacacagggggttacatttcaacatgagatttggaggaaacaaatatccaagccatatcattccttaaagtgcatagttatcagaatattcaaggtcaatatgaaagaaaaaaaatcttaaaggcatctagcgaaaag

SEQ ID NO: 440981 - DNA, 632 bp, Homo sapiens
ggattgcttgagctcagaagtttgagatcagcctctgcaacatggcgaaacttcatctgcatggaaaatacaaaaaatttctgggcatggtggcatgtgccagtagtctcagctacttggggggctgaggagggaggatggcttgagcccaggaggttaagactgcagtgagctgagatttgcaccacttcactcaagcctgagtgacaaagtgaaagcctgtcaaaaaaaaaaaaaagaaagaaagaaaaagaaatgttagtcaatagtttcatatgctaccaaactaagcttcctaaacgaaagagaaataaagtrctttccagacaagcaatctctaagggaatttgtcaccattatactggccttacgagagatgctaaagggagttctaaacatggaaacaaaagaatggcattgctatcataatagcacatgcaagcacatagctcacagaatccataaaacaacaatacaatcaagactgcaaagcaactagctaataacactataacaggaacaaattctcacatagcaatatttatttgaaacatatagtctaaattcttcacctaaaagacatagagtgccaaattagattaaaaaatggccatccttcttctgtcctttaa

SEQ ID NO: 440982 - DNA, 615 bp, Homo sapiens
atttgtcaccattatactggccttacgagagatgctaaagggagttctaaacatggaaacaaaagaatggcattgctatcataatagcacatgcaagcacatagctcacagaatccataaaacaacaatacaatcaagactgcaaagcaactagctaataacactataacaggaacaaattctcacatagcaatatttatttgaaacatatagtctaaattcttcacctaaaagacatagagtgccaaattagattaaaaaatggccatccttcttctgtcctttaaaagacccatctcacatgtgatgacacccacaggatcaaagtaaagaaagggaaaaagttatatcgtgggaatgaaaaacaaagaaaagtgcaggggtcactagttttgtatcrgataaagtatacagtaaaccaataatagtaaaaaagaacccaaaaaagggtatgacattgataaagtattcaattcaacaagaagacttgactattctaagtatgtatgcacccaacattggagcacccagatttataaaacaattacttctaggtttaagcaaagactgacagccacacagtaatagtgcaggacttcaacactgcactgacac

SEQ ID NO: 440983 - DNA, 442 bp, Homo sapiens
tgattctatacctaaaacacccaaaaattgtacacaaaagacctgatatatgacttcagcaaagtctcgagatacaaaatcgttgtacaatatcagtagtatttctatacccaataacattygagctaagaaccaaattgagaacacaatctcatttaaaatagccataaaattaaaacgtctgtgaatacatctagcatagatgatgaaaggcgtctataagacaagctttcgacactgttgcaaaaaatcacagatgacacaaacaaatagaaaagctttccatgctcatgcattggaagaatcaatattgttaaaatgtccatactgctcaaagcaatctacagattcaatgctattcctactaccaacctaattctttacaaaattagacaaaaatattctaaagattgtatggaaccaagacagagctgaaatacac

SEQ ID NO: 440984 - DNA, 606 bp, Homo sapiens
tactgggtatatactcaaaggaaaacaattttttctaccataaagacacctgtaattgaatgtttactgcagctctattcacaataacaaagacatggaattgacctaggtgcccatcattggtaggctggataaagaaaatgtggtacatatgcattgtgaaatactacacagccatgaaaaataatgaaatcattttctttgcaggaacatggatgcagctagaggccataatcctaagcaaatcaatgcagaaacagaaaaccaaatactgtatgttctcacttgtatgttggagataaacactgggtacaaatggacacaaaaatgggaacattagacagtgaggattccaagaaaagggaggaagggaataaggggtkaaaaactacctacgggatactatgtttgctactcaagctgggcgactggatccttagaagcccaaaccgcatcatcatgcaatatacttatgtaacaatgctgcacatgtacaccctgaatctaaaatttaaaaattaaagcaaaaagtaaactacttaatacagaatctccaatttgtgttaaaaagaagaaaagattgtttcatttttgttttattttgat

SEQ ID NO: 440985 - DNA, 568 bp, Homo sapiens
gctattgtaaatgaaattgttttcttgattactttttcagatagatctctgttggcatatagaaacactastgatgtttatatgttatttgtatcttgtaattttactaagatgttatttgtatcttaaaattttacaaattttcagttctaaaagttttttggcagagtcttcaggtttttctaaatataagatcaagtcttctgcaaaaaaaaataataataatttgacttcctgctttccaatttggatgtcctttatttctttctcttgcctaattgctttggctaggattcccagtactctgttgaatacatatggtgaaagtgggcttccttatcttattacagatctttgtagaaaggctttcaatgtttactctttctgtatgattttaactgtgagcttgtaatatatggccttgattgtgttgagatatgttccttctatacccaatttgttgaaggtttttatcataaagggatgttgaattttatcaagtgctttttcagcatttataaaaattatcacatggattttgtccttgattctgttgacataatgtatt

SEQ ID NO: 440986 - DNA, 386 bp, Homo sapiens
gtttggaaaataaattacgtggttcaagtccatttcttactttctgtttatcagtttcaatcaagtcttattttgtagtctaacatctgaagatccattccaaatggattatttcwtctgctagtaatattaatcaagtcctgcatttcctttgtaaaatattttttatctgaattagggagtgtatttctacccttgcattatgttgagtcctgtccataattattagtgtggaagcaatgtgggttgatgaagatcatcacaaaatctctttccttgatgtcagacctttgcagagtcttcaggcacaaagaagctgatctctaacagatggttgggagttcattctgttctcctggatagttaagggtaaactacggaattta

SEQ ID NO: 440987 - DNA, 582 bp, Homo sapiens
caagtgtttcatttaacctctgcatatgacctgctttttactggcaagaattacatttctgtaagggaaaaactgtaaaaatctattttgatgtttatttatattgacctatgaagtaaaaaatatcaagtattactgttcttctaaaatagacatgctacaaaaatgcttttctgtgccttggatgtaaaagaaatgtcctatgatcaaacataagttattttgataaaacaaaattgaagctgtcacagtaagttttgaaatatagtccatgccattaatagttaaacgcatgcaatttaaaaataaaatgtactttctaatttattactggagatattaattcaaacctaycaggaagatatccttattccacgaaaagaggacattcctattttgaagatagtctttttggtagaattttaaatttaatttgaaataacactgattcaaaataaaacagagtgactattggatatcagaggtgaagttcagaaataacagctattttgcttccccctcatcctcctatggtatcgtcccccagaatgtattgagtcatctgtcagatagcagataatc

SEQ ID NO: 440988 - DNA, 585 bp, Homo sapiens
cttcagatgttaataaaaatataagaaattttaacagcattatgtctcttgctatttcactaggttaattttaaatttgaggaatagcttaaaatccaaatcttattttatgcagattatttactatcttagtattcttagtttagacttcttttagataatatttattattttggtatgggaatcataaaaattgaacataaaatttatttgaattaccagacccaycttcataaattgtgtatctgttgtgcagtctctaagaaaaataaaactatatcacctggcatttcttagcaacgccatggttaatggacctggtgaataatttttgtcatggattcacagaaaaaaataagcaggttagtacatcgttgattttagatattatgccatagatggcattggttgggttaatgaccaacttaaatgactgcaaacttttgtaaagacttttatttttactttttattttatgaaaatgacatttaacctgctatagtgaattatagcattaatgcagggattcctcagatctatgctgacaaaagttaatctccaccaccttcccaaaacaaaaagaaa

SEQ ID NO: 440989 - DNA, 585 bp, Homo sapiens
cttcagatgttaataaaaatataagaaattttaacagcattatgtctcttgctatttcactaggttaattttaaatttgaggaatagcttaaaatccaaatcttattttatgcagattatttactatcttagtattcttagtttagacttcttttagataatatttattattttggtatgggaatcataaaaattgaacataaaatttatttgaattaccagacccatcttcataaattgtgtatctgttgtgcagtctctaagaaaaataaaactatatcacctggcatttcttagcaacgccatggttaatggacctggtgaataatttttgtcatggattcacagaaaaaaataagcaggttagtacatcgttgattttagatattatgccatagatggcaytggttgggttaatgaccaacttaaatgactgcaaacttttgtaaagacttttatttttactttttattttatgaaaatgacatttaacctgctatagtgaattatagcattaatgcagggattcctcagatctatgctgacaaaagttaatctccaccaccttcccaaaacaaaaagaaa

SEQ ID NO: 440990 - DNA, 545 bp, Homo sapiens
atccaattgtgcaaatattcagaatttttattagggtgccaagtataataaactatatgtctacattctttgatctgtttctgagaagatggtttaaaaaaatggactgtcactaaatatttcagtttatctccatggatctcaatgaaatcaaatcatgtaataaaggctgaaacttcatcttgcagcgtaatattctcctgtcacattttattaaaatgacaaggtttaaaccataattcttctgtgcaggtttgtttctcattattcacagttattcttttgtccttaagatttctagtttagaaatactattcaaaatttaagacaataagtaaagctctcacaattacagaaaggtagattttgtttgctactgaataatttatatttataggaaaaaccttccctttctcccaaatactgattgtgtgtgtgtgtgtgtatatatatatatgtgtgtgtacatacatatagtatacttagaaacaacgcaaaatcttactatttgaatgttatrttacatgataaacatgaatatttaa

SEQ ID NO: 440991 - DNA, 589 bp, Homo sapiens
tttaaacatctcatattagattctctcaagaatttgcatgatggttaagttttttctctagttatttaggagttagcagccacatcttcgtaaaaatttaaatgaatcarcttgtctccataaaaataaataaactagttattagttttactacgagagcattatttatatacataatcagagaaaattttgagcatgaatttcttacaaaaataattcaaatgtattaaagcaaaccttgtcaaggaagcacagtgaggggtgactagcctgacctaattatgaaattttttgtgtgttatgatggagtctcactctgtcaccaggctggagtacagtggcgtgatctcggctcaccgcaacttccacctcctgggttccagtgattctcctgtctcagcctcccaaatagatgagactacagtcatgcaccaccacgctcaggtaatttttgtattttaacagagatggggtttcaccatgttggtcaggctggtctcgaactcctaacctcataatccacccacctcggccttccaaagtgctgggattacaggcttgagccaccgcacccaccctataaaaattt

SEQ ID NO: 440992 - DNA, 589 bp, Homo sapiens
tttaaacatctcatattagattctctcaagaatttgcatgatggttaagttttttctctagttatttaggagttagcagccacatcttcgtaaaaatttaaatgaatcagcttgtctccataaaaataaataaactagttattagttttactacgagagcattatttatatacataatcagagaaaattttgagcatgaatttcttacaaaaataawtcaaatgtattaaagcaaaccttgtcaaggaagcacagtgaggggtgactagcctgacctaattatgaaattttttgtgtgttatgatggagtctcactctgtcaccaggctggagtacagtggcgtgatctcggctcaccgcaacttccacctcctgggttccagtgattctcctgtctcagcctcccaaatagatgagactacagtcatgcaccaccacgctcaggtaatttttgtattttaacagagatggggtttcaccatgttggtcaggctggtctcgaactcctaacctcataatccacccacctcggccttccaaagtgctgggattacaggcttgagccaccgcacccaccctataaaaattt

SEQ ID NO: 440993 - DNA, 589 bp, Homo sapiens
tttaaacatctcatattagattctctcaagaatttgcatgatggttaagttttttctctagttatttaggagttagcagccacatcttcgtaaaaatttaaatgaatcagcttgtctccataaaaataaataaactagttattagttttactacgagagcattatttatatacataatcagagaaaattttgagcatgaatttcttacaaaaataattcaaatgtattaaagcaaaccttgtcaaggaagcacagtgaggggtgactagcctgacctaattatgaaattttttgtgtgttatgatggagtctcactctgtcaccaggctggagtacagtggcgtgatctcggctcaccgcaacttccacctcctgggttccagtgattctcctgtctcagcctcccaaatagatgagactacagtcatgcaccaccacgctcaggtaatttttgtattttaayagagatggggtttcaccatgttggtcaggctggtctcgaactcctaacctcataatccacccacctcggccttccaaagtgctgggattacaggcttgagccaccgcacccaccctataaaaattt

SEQ ID NO: 440994 - DNA, 589 bp, Homo sapiens
tttaaacatctcatattagattctctcaagaatttgcatgatggttaagttttttctctagttatttaggagttagcagccacatcttcgtaaaaatttaaatgaatcagcttgtctccataaaaataaataaactagttattagttttactacgagagcattatttatatacataatcagagaaaattttgagcatgaatttcttacaaaaataattcaaatgtattaaagcaaaccttgtcaaggaagcacagtgaggggtgactagcctgacctaattatgaaattttttgtgtgttatgatggagtctcactctgtcaccaggctggagtacagtggcgtgatctcggctcaccgcaacttccacctcctgggttccagtgattctcctgtctcagcctcccaaatagatgagactacagtcatgcaccaccacgctcaggtaatttttgtattttaacagagatggggtttcacyatgttggtcaggctggtctcgaactcctaacctcataatccacccacctcggccttccaaagtgctgggattacaggcttgagccaccgcacccaccctataaaaattt

SEQ ID NO: 440995 - DNA, 447 bp, Homo sapiens
ttgattctaaaaatatgtaagctatatgtaatgtagatttatctttccttctccctcaatattttcactttcacttacattcattttcctccctcaacctctggatcctgaaaatcattgatctttattctgtcactgtaattttgcctctgttacggtgtcatagaaatggaatcatacacaacattgtcttttctgtctgtctcctttcatttagcctatttttttagattaacccatatatctgatttaaaatatttcattctggggcattccaaaatagtttattcagtcaccattagacacacatctatttttatttttaggttattaaaaaattactgtggacattcaagtatattttgtgtgtctatmtgcagtatatgagagttctcatttctcaactcaacatcatcgccaatgcatgatattgttatttgaaatgta

SEQ ID NO: 440996 - DNA, 595 bp, Homo sapiens
agttcctgctactcaggagtcagaggtggaggattgcttgagtctgggaggtggaggctgtaagtagctgtgatcacaccactgcgcttcagcctgggcaacagaacaagaacctgtctcaaaaaattaaaattaaaaatgaaaacaaataaaaataaaaattatttagcataatataagctatttgcattttcatataagttataaatttagtgttcaattttatcaaacaaaatattgggattccagttgggagtgcattaaatctagtgtcattaggggaacaattgacattttaatatctggaggctcctcacagatgaacatagtgtgtatctccattcattyaggttttctgaatatattttagaaacattttggttgtataggtgttacacatacattaccaaagttttccctcaatattttatatttctgatagtcttgtaaatagtgctattctcaactacaaatttccccttgtttgttgaaagtacatagaagtaaagtttttaataaataatacattaatcttgcattctgtagaagttaaactcacttcttaattctaacagaatgtttgtaaagtatttat

SEQ ID NO: 440997 - DNA, 576 bp, Homo sapiens
ctattattattttgcttcttgattgtatgcacactattaagactctcattagcttactgatgagttggataaacagggggaaaaatctgtagattgcttttttttccactttacttttatgtcatgattttcagcataattggttggccaatacagaaatgttcacatggcaaatgcagcttctttggtttgtcagtgsccttgcctaatcagtcatacctagtaatggaaagagcacacatttctcatggccttgatgcatgatttttcaggaagactctgagtgtgcgcaaggtaagccaccctaaaatgtgtaccctatgtccacttggagtctcaatgaactgccatgcagtgtgggttcactagcatcctgagttcaaagggtactggaaatggtgcccttggggcagcatataaccaaaacatgcatattctatcactctctgctcacaggcatgttctttgatcaaatcagagtttgcttacaaagcacaagtttaaagatacaatgaagaatttcaagatggtgacatgagaggatgcaaccaagtatgggatctctacaaatgttga

SEQ ID NO: 440998 - DNA, 576 bp, Homo sapiens
ctattattattttgcttcttgattgtatgcacactattaagactctcattagcttactgatgagttggataaacagggggaaaaatctgtagattgcttttttttccactttacttttatgtcatgattttcagcataattggttggccaatacagaaatgttcacatggcaaatgcagcttctttggtttgtcagtgcccttgcctaatcagtcatacctagtaatggaaagagcacacawttctcatggccttgatgcatgatttttcaggaagactctgagtgtgcgcaaggtaagccaccctaaaatgtgtaccctatgtccacttggagtctcaatgaactgccatgcagtgtgggttcactagcatcctgagttcaaagggtactggaaatggtgcccttggggcagcatataaccaaaacatgcatattctatcactctctgctcacaggcatgttctttgatcaaatcagagtttgcttacaaagcacaagtttaaagatacaatgaagaatttcaagatggtgacatgagaggatgcaaccaagtatgggatctctacaaatgttga

SEQ ID NO: 440999 - DNA, 642 bp, Homo sapiens
gttcaacaccagttttaaatgcagaggtaacagcatttaactccaatgtgggatcaccaaaaatacaaagatcataatatgtggatcatacttattttattcttaactgaaaaatggaaacactgaaaaaatctaattcaactattattattttgcttcttgattgtatgcacactattaagactctcattagcttactgatgagttggataaacagggggaaaaatctgtagattgcttttttttccactttacttttatgtcatgattttcagcataattggttggccaatacagaaatgttcacatggcaaatgcagcttctttggtttgtcagtgcccttgcctaatcagtcatacctagtaatggaaagagcacacatttctcatggccttgatgcatgatttttcaggaagactctgagtgtgcgcaaggtaagccaccctaaaatgtgtaccctatgtccacttggagtctcaatgaactgccatgcagtgtgggttcactagcatcctgagttcaaagggtactggaaatggtgcccttggggcagcawataaccaaaacatgcatattctatcactctctgctcacaggcatgttctttgatcaaatcagagtttgcttacaaagcacaagtt

SEQ ID NO: 441000 - DNA, 549 bp, Homo sapiens
ctagttatatttactctgtaatatattcacattttttatacattttccatggaattttctcatttaagtatctccagggaattaccrtcttttacaggctcaactagttgcagttattttattattattattatcatgacatgttattattacaactattgacattttcaaatattagatagtgagtcactaaagccatcccttttgtatgacacctattcctgtgtccattttgagtctcagtgaattgcccatcattatttatagagtacatgttttctaacagtgttaccagagtcaatcttacattctctttgtaacctaggaacataaaagaatcaatgacatccaaagtgtccctttgagggacaagagtttaaaggacatactgaaaatgctagagtggtgatcacgggaatctaaaagtaataaaattgcatagaactaaatacacacatacatacaaatgaatgcatgtaaaactgatgaaatctgaaattagtgaattgtatcaatgtcaatttcttgggagtgatattctacaaaata

SEQ ID NO: 441001 - DNA, 592 bp, Homo sapiens
cttattgaggaacattattcctctatgcgtgtgtgtgtgtgtttgtgtatgggtgtgtgtataaattatctatcaggtgtgagagtaaatccaattcttgtttctccatcttgactgaaagtggaaataactggttaattttgtttaatgtttgaaaatttttgtaaaggtagaattcacaggattgaaggtcaaagaacaagtaaaggaagagggaacagggaccttatagagtcttaagactagtaagcattccacaatcttgtggagacaaagtttatctcttcattatgttgttgtagtattgaattctaggaattggcttagctttaatgatatgtacgaatgagtattatatccttttatcagaaagagcaagaaatatgaaaggaaaaatggaaaatgaaggaaaagtaagggaaggaaagataagagagttgcggataacagaagataggacccacaacacaagctcacacaaggactcaaaaaatggarcagaattaatacttcaaaaggaaattcaagtactgctacaagaaaaaaaatctgtataaggaaccaaaaaattccagaaaaatttaccatatcc

SEQ ID NO: 441002 - DNA, 496 bp, Homo sapiens
cctaatagttggaagtgcatgtgataattgttagtcccactcctgtcctcattttataaattcccctgacaacagccttgcttaagattatcacctaacttctgtttgatttcttccagtgatagagaagtttctgttcaatttaggcctcttgggtcatgttaccaactgtttttaccctaatacagattcctacatatcaaagggttttgtgggttggaccaaggagcaagaaggctttaccttaaaaggtcaggaatgtaaattgcccaaggtgaactctgatttaaaagaaaagggcaccattgttccagtgggattgtgattatgatagttaatagaaaacattgtcagccatgttggctctggggatgaagaagaagagggtgttttccaagactgggattgatgttagtatcctgtgagtgtwaagtgttccaatatctggcctgttttcaggagagctgaggcaactgaggcagcttactgagccaaa

SEQ ID NO: 441003 - DNA, 513 bp, Homo sapiens
caagaggctattgacagagtccatgtaatagataatgaaagcttataataggatagtggtagtggagatggaaagaaaatgatggattagctggctttaaaaaatatatccattgacctaatctaatgtaagcaaaaaatgagactatatcaggatattaagtaccttatagaatttctagcagggtcaaagcaccaagatggaatgccccacagctagaagcaacacaacaaagagaaaagtctaacacaatacaagactgactgttctactggaaacctccaaggccytcatgatgctaaggaccagacagtgtaactactgccttagctgccccagaagagtcatcatctccacaatagtgtttgctgcatgatctgagcccctcctatgtggctgccacctctcattgtttgtattcaccttggaaaattcacgtgaatacatctgcctcacagaatccaaggctaatgagaaatcttagctaccaaaaaaaaaaaaaaaaagggaatg

SEQ ID NO: 441004 - DNA, 534 bp, Homo sapiens
ctgtgtgaactgcagaaataatacgtgagtaccctggaaacctgcagtttattatttctgtcttacacttaaaacacatggtggccacagtagttggaaacaaataagaggtgatctggtgctgggaaagtgagtaaccatgtaattagcaaagctaatgttgtgcagtttccataaataacatgctgtttacttttgttattaagagacttttaatattaaaaagtgtggggggtgtctaaggtagacaagaaagatgatwtcaggcacctggcaaaggagggaaaaaacttactctgagaaactatctcttcattgtttaatgttctttacatccttaaaaataatcccctcagttttccttgcagcttgagaacttgattatttgttgcattggttatgagagtggtagagtgagacttccacctgaaaatttgcctacagagaagacagcttgttattattatccaagacagggagtctcctcatcaagattccaccccatggggtctgagccatggcagaagaggatta

SEQ ID NO: 441005 - DNA, 582 bp, Homo sapiens
ccagtatcaaaagttattataattgaattgctcaaacttaaagggcaactgttaaaaggtttgcttccaagggaaatcagcctttaaaaggtaatttaaagtcaaaacaaaggtcagactggcagaggtacacatatccacttagggacagatggattgaatctgcacttgcattggtagccaattargtaagtgaaaacttctgctttgagtattttagctttaaaaacttgatataacagaagtttgattatagtaactgaaattggaagtggaattacagtgctgtattataactggaaactggaaattggtatggctctttgttcctctctagagttttagtctccagtttggtggtgggtagctagtgaagtttgaatatactgtattaccaaaaaaccgttataggctgggtgtggtggctcatgcctataattctagctctttgggaggccaaggtgggagaatcacttgagcctaggagttcaagaccagcttaggcaacatattgagatcccatctctattataaaaaaagaaaagaaaagaaattaaattaaaaaatcagttatgtaaaaat

SEQ ID NO: 441006 - DNA, 532 bp, Homo sapiens
gtgactcttctttcacgtaaatatattttttgaaaaagaaaaaaaaaagaagcaatagcaacaactctgagacactttgggtgaggaaaaaagtgtgaaaaataaatttttccagtatcagtgaagtacagcatggtcatagtccagtgggcttcagtaataagtctccctragagcatataatcactttgtgaggtgaattgtgacctccaaaaagacatgtttaaagttctaatctttaatatatctgagtgtaaccttataaggaaatagggtctttgcagatgtaattaagatatacatgactatgaggtcatactggagcaagctggtttcttgatccaacatgactggtgtctttataagagaagagccatgaatatgtccagaagtgagggaagagtatgttaaaacacccgaggtaagagatcagacaggatagtcctgctgtaaaattgtattatttcacactttttttatcacttatattttgtagtttccttccaattcctgttgacttcatgaaaataaa

SEQ ID NO: 441007 - DNA, 532 bp, Homo sapiens
gtgactcttctttcacgtaaatatattttttgaaaaagaaaaaaaaaagaagcaatagcaacaactctgagacactttgggtgaggaaaaaagtgtgaaaaataaatttttccagtatcagtgaagtacagcatggtcatagtccagtgggcttcagtaataagtctccctamgagcatataatcactttgtgaggtgaattgtgacctccaaaaagacatgtttaaagttctaatctttaatatatctgagtgtaaccttataaggaaatagggtctttgcagatgtaattaagatatacatgactatgaggtcatactggagcaagctggtttcttgatccaacatgactggtgtctttataagagaagagccatgaatatgtccagaagtgagggaagagtatgttaaaacacccgaggtaagagatcagacaggatagtcctgctgtaaaattgtattatttcacactttttttatcacttatattttgtagtttccttccaattcctgttgacttcatgaaaataaa

SEQ ID NO: 441008 - DNA, 532 bp, Homo sapiens
gtgactcttctttcacgtaaatatattttttgaaaaagaaaaaaaaaagaagcaatagcaacaactctgagacactttgggtgaggaaaaaagtgtgaaaaataaatttttccagtatcagtgaagtacagcatggtcatagtccagtgggcttcagtaataagtctccctaagagcatataatcactttgtgaggtgaattgtgayctccaaaaagacatgtttaaagttctaatctttaatatatctgagtgtaaccttataaggaaatagggtctttgcagatgtaattaagatatacatgactatgaggtcatactggagcaagctggtttcttgatccaacatgactggtgtctttataagagaagagccatgaatatgtccagaagtgagggaagagtatgttaaaacacccgaggtaagagatcagacaggatagtcctgctgtaaaattgtattatttcacactttttttatcacttatattttgtagtttccttccaattcctgttgacttcatgaaaataaa

SEQ ID NO: 441009 - DNA, 576 bp, Homo sapiens
atgaataaatggttaaaaccttgccaaacttgtttcactggtgtatatctttccttctggcakatcactgcagacatcagaacctcacactccaaaatacttcaccatccacctctcagaggtaaagggtattagctcctatgaaaatacaaccaaattaccatgaattgcctacaaaagtaaacagtggtgcaatgatataatcaagcaaaatatctattctcaaatttcatagttggctgcacaatttcctttaccttttaattttttaatccattttcattccttgagtttttctgttataggtctttatttagtcttccccaatctaaataatttccattacttctctgtgttcttcataacattaaaggcaaagagtccaggccagttaccttgaagagcatcttagagtgtcttgttttgggaattaaattttctttttttctatattctggtcaataatttctgcaaagatactgcattgctgatgttgcttaattcctgctgtacagtattcatgtcaggctgcccatattggtgatggcaaatttgagcactgagttaaggaagaga

SEQ ID NO: 441010 - DNA, 576 bp, Homo sapiens
atgaataaatggttaaaaccttgccaaacttgtttcactggtgtatatctttccttctggcagatcactgcagacatcagaacctcacactccaaaatacttcaccatccacctctcagaggtaaagggtattagctcctatgaaaatacaaccaaattaccatgaattgcctacaaaagtaaacagtggtgcaatgatataatcaagcaaaatatctattctcaaatttcatagttggctgcacaatttcctttaccttttaattttttaatccattttcattccttgmgtttttctgttataggtctttatttagtcttccccaatctaaataatttccattacttctctgtgttcttcataacattaaaggcaaagagtccaggccagttaccttgaagagcatcttagagtgtcttgttttgggaattaaattttctttttttctatattctggtcaataatttctgcaaagatactgcattgctgatgttgcttaattcctgctgtacagtattcatgtcaggctgcccatattggtgatggcaaatttgagcactgagttaaggaagaga

SEQ ID NO: 441011 - DNA, 648 bp, Homo sapiens
ctgtatactttcattgtacttggtatattccaactctattttgttggagtttccataattttacctgtaatttgttctggaatcctttttaaagttttgatccaaaagcagtaaagctctaacrtggcctctgtgtgtcttttcagatattcactcttgaaatattctcagaaacagaaaaggtaaaagccctggatccctgaagcctaccttttcaaaggcaggcaagtactgagttttagctttctacatgatggaagcaagggtctcctgtttttcctcaggggatttgaagggggccacaattatcatcatcgtcaggtccagggtgccatcaacttacatgttgatcctgacaaaacaaccatttgaccctcaggtggagagcttttgagtacagggttcttaatccaacacttctctagtacaaatagatgcaggaaaaaataatttttatttttcctcttaagcttccactctcatgaatgatttctagctccagaaccagccaagtgcccaggatatagtagagtctctggaaatacttattgaataaaaggatgtatgaaagaattcatgaatgcccttaagttgaaatctgccgtaaacaaataattgattattatggctttaaaaactaaactcaat

SEQ ID NO: 441012 - DNA, 397 bp, Homo sapiens
actatgttatagtataagcgcttctgattctcaaagtttagggtgttgactgggtgtagtggctcacgcctgtaatcgcagcactttgggaggctgaggtgggcggatcacttgaggtcaggagtttgagacgagcctggctaacatggcggggattaggcgggtgcaggggtgtggggattcttaaaggattcttcagtgagatgggaagaattaaaccaattagctctgacacatatgagtttcattctatcctcttaaccaaagtcaccktcatgacctacttgataagagtttctgaaggctaactggtgtggcctttgctgatgcaaattaagctgtgtttcaggaacatgatgaacagccgatcaatgttagcagtcatgctatgtgtttg

SEQ ID NO: 441013 - DNA, 397 bp, Homo sapiens
actatgttatagtataagcgcttctgattctcaaagtttagggtgttgactgggtgtagtggctcacgcctgtaatcgcagcactttgggaggctgaggtgggcggatcacttgaggtcaggagtttgagacgagcctggctaacatggcggggattaggcgggtgcaggggtgtggggattcttaaaggattcttcagtgagatgggaagaattaaaccaattagctctgacacatatgagtttcattctatcctcttaaccaaagtcaccttcatgacctacttgataagagtttctgaaggctaactggtgtggcctttgctgatgcaaattaagctgtgtktcaggaacatgatgaacagccgatcaatgttagcagtcatgctatgtgtttg

SEQ ID NO: 441014 - DNA, 541 bp, Homo sapiens
ctgcattgcagctggtcttctccctgcccatttgtttccctctctcccttccataggtgttgatcccaagaatactccttaataaacttcctgcacagcaatcttcacctagtctgcttcctggggaacccaaactgggttacacgttctgcccaaaggcagccattgctaacagggatgcatatgttattcctggcttcctttttttttttttwaaaaagacgtatctagaatgttttaaattaatttttctctatattctgtacactgctttgttgctacgcttttaacctgttacacatagatctctgacctgcagaatctttagcagcattcaatgtctactagatgagctgttccaaataattattattaaccttacaagtgcagtgagacacacttaactagttacagcaactttttttctcttttaatgtataaagatttacttcatccttttaaatggctgtagtgttttcactgtatggatgcatcattacttaataacaggtaatgaatatttaagttgtatgatgttttt

SEQ ID NO: 441015 - DNA, 578 bp, Homo sapiens
gtggcatttttgaagagtaatggtcaattattttgtggaatgtacctcaatttgggtctatctgatgttttctcatgactcgattgacgacatacattttttgcaaaatgtcacagcagttgttccagtctyagctgatcatttccacccataatttcatatccgagacatggtatgtcttattaattttgatcttaaccttaatcccttgattaaagtagcgtctgccaggttcatcaaccgtaatattactatttatccctttggaattcataaatatcttgtggaagatactttgtgactataaaaatagtcagtttcaaaataagcttctgctcactaactttagcatccattatggatcttgcctgcagcaaatattactgtagtgtttgtctaatagtgactttctatttccctcattccatctacatttaataattcgaattcttctgtaaagaaaagctgtctcttctcctttatttatccttccattcattcaattattttcttagtacagatttatagatattttattctaaaggttacaatctaataccatcgatatctattttatt

SEQ ID NO: 441016 - DNA, 571 bp, Homo sapiens
tgtatcataggatctgtcaggctrtatggcccaagtggcagggctgcttacatcctatactttcctactctgggccccactccaagctggaagtctctcatgccttccactataggaactaacattgtgatcccttttttcaccatgggagacgtaagatgcaatactttgccctattctttggatgggatatttcaacatatccttggccactgaatccctaaacattttactaagatggcgggcccctgaatgttcatggaggttatctcatactctctggaatgcgtgtgacttaccaaggcttccaattcttggatttcttgtcatccagccccattctcacgataccactgataaaatgaatcaaaggccaggacattcaaacagtccagatctctttggactatattgtaacagagggtgggtaggacaaagaactaacaggtctgggacacactgcaaatttacactgttaaccatttcagttaaaatttacactattaaccatttcatgtgagtgcaaatggtttctcatcctcttttctgcaaaggatgtgaaaaaacgtat

SEQ ID NO: 441017 - DNA, 546 bp, Homo sapiens
acatcttttctaaagttgttggtctgcaaactactggaactggtggccaatggttcagctagcacattaaatctaaatcttgcattagggaactsatatcaataaatttgacttgctccaacattatgttcaccctcctgggtctagcatcattgcaatttatttctaaatctcccccctgacttctgccaatgtaaactaaaaaatcttgaaattcttttcatatttaagctatatctttcctagactgcaatcttttgacttgtcttgagatgtacgtgggaatctactctagacatatctgggggcaataatgggtggaggaggtcttaaggagtactggcattccctctcaaggcagctacctcagatgagatgattacaagtgttcaagcaagggaagttcgtttttctcaaaaggaaaagaaaggttgcatcttttggcaaaagagattcagggggtttggggtgtattagtctgttctcacactgttaaaaagatacctgagtctgggtaatttataaaggaaagaggtttaatgtact

SEQ ID NO: 441018 - DNA, 541 bp, Homo sapiens
catttccctattaggaatagtaattcaatggagtttggaactggtataatatttataatggaaaatacagcagtcagagatggcaaaggaatctgtaaataagtatagaaaaatgctaaaaaaaagttttaaacaaaaataagggaaactctaattatagaccttgagtttttcagttcttaatgtgatattcatctgtttggctttcaggcgtrcttggcttggttgctggaggtctggtgctgttgcttccagaaactaaagggaaagctttgcctgagaccatcgaggaagccgaaaatatgcaaaggtaggcagttgaaagttctaaatgaattgttctataaaggttttaagacaaccctatagccatttggaaagaattaaattgactttatacttcacaccatacactgagataaattcaaactaaatcaaagacttgaaagcatcaaaaaaattagtaaaattacaaagacattatacgagaatttctttaaactttcacgtggagaaggtctttctaaatatgacccaaaaa

SEQ ID NO: 441019 - DNA, 622 bp, Homo sapiens
atggcactattattttgttaaaaactacagatgacatcaaaagctatttgtgaagcctgattccaataaatataatagaaaaaaagacaaaaaatggagcttgcttttattgaaagcaaagcaaaataggggaattaagttacctgaaaatactgagagagccagttgcctagtttaatttaaaatgactgcttggacaatgggaagatattctgtgtgaacagatgggtaggtagagtctaatttgaagggtctaaagtggtcagatatttacaggaaatgtggcagctcatgggcttcacaccacaaactctccgaggctctctcacatggccaatctcattgcttcctacagagatgaggaaactgaggcmccaagcagagaaggtttttccccaggccacacagtgaataacttagcagggttagccctaaaagatgggtctcctgacctggtccagcacctgctccacccgaccacctcctcttattccaaataagagcaaatgcagcagccttcagcagtcactcctaatccccttttattaaacagacagcagggagatgctaaatggcccaacctcctggtgcctgcattgtatcacgtccacacacctatctg

SEQ ID NO: 441020 - DNA, 546 bp, Homo sapiens
ataggttgcccaacatcatagtaagtaggaaggtcatgatgaaacccaggttgccaattgttttcctctattccatatactgggacaactttccaaatccctaaactgaataaacctaagtctcccaaatctgatgtgtggaagctgtcttcccagggtgctccaaacagargcccccataggatagtaacatgtgtggcaccaaagacaattttcacaaagcctaaaagcactgttgaaaaagaaagggggtatatactgaacactgaattttgttttcaaagtgaaaaagtgaaaacattcttgggtggataattggttgaaattgttagtgcaaaggccgcagctcacatggtgatgtaagacctagttaggaccatagggtattcagcacaggatggcctggatgaattactctttccctgaatacctgccacagtgtgggactgagaaagtacttgaaccctggggtgaatggggcttatcatgctgaaaacttacacatagtgtgctgatgaaaagtgctacctggacctggagtcacag

SEQ ID NO: 441021 - DNA, 597 bp, Homo sapiens
catgctaatgcattataattagtgtataatgagtagtgaggatgaccagaggtcacttccatcgccatcttggttttggtgggtttgggccagcttctttaccacttcctgttttatcaccaaggtctttgtgaccctgtgtcttttgctgacctcctatcatcctgtgactaagaatgcctaacctcctgggaatgcagcccagtaggtctcmgccccattttacccagcccctgtccaagacagagtcactctggttcaaacaactttgacaacttcatgtttctctaagtactatttaacaaatagtactttattgacccttgttcctgcctgacaccttcctgcaggaaagataaaggattataactacatttcaatatttaaagtaaactcaaagacaattctaattttattcttgaaagtaatttcatattcttccctcactaacctttagtatgagtggctagtggaaagaaaacctaatagtttttcattttaacttctttctctttcttttccacacaataatggtgtgctaattgtggtcttgaaatagccataaaacgataatcaaagaagactgaaagtcaacac

SEQ ID NO: 441022 - DNA, 597 bp, Homo sapiens
catgctaatgcattataattagtgtataatgagtagtgaggatgaccagaggtcacttccatcgccatcttggttttggtgggtttgggccagcttctttaccacttcctgttttatcaccaaggtctttgtgaccctgtgtcttttgctgacctcctatcatcctgtgactaagaatgcctaacctcctgggaatgcagcccagtaggtctcagccccattttacccagcccctrtccaagacagagtcactctggttcaaacaactttgacaacttcatgtttctctaagtactatttaacaaatagtactttattgacccttgttcctgcctgacaccttcctgcaggaaagataaaggattataactacatttcaatatttaaagtaaactcaaagacaattctaattttattcttgaaagtaatttcatattcttccctcactaacctttagtatgagtggctagtggaaagaaaacctaatagtttttcattttaacttctttctctttcttttccacacaataatggtgtgctaattgtggtcttgaaatagccataaaacgataatcaaagaagactgaaagtcaacac

SEQ ID NO: 441023 - DNA, 597 bp, Homo sapiens
catgctaatgcattataattagtgtataatgagtagtgaggatgaccagaggtcacttccatcgccatcttggttttggtgggtttgggccagcttctttaccacttcctgttttatcaccaaggtctttgtgaccctgtgtcttttgctgacctcctatcatcctgtgactaagaatgcctaacctcctgggaatgcagcccagtaggtctcagccccattttacccagcccctgtccaagacrgagtcactctggttcaaacaactttgacaacttcatgtttctctaagtactatttaacaaatagtactttattgacccttgttcctgcctgacaccttcctgcaggaaagataaaggattataactacatttcaatatttaaagtaaactcaaagacaattctaattttattcttgaaagtaatttcatattcttccctcactaacctttagtatgagtggctagtggaaagaaaacctaatagtttttcattttaacttctttctctttcttttccacacaataatggtgtgctaattgtggtcttgaaatagccataaaacgataatcaaagaagactgaaagtcaacac

SEQ ID NO: 441024 - DNA, 597 bp, Homo sapiens
catgctaatgcattataattagtgtataatgagtagtgaggatgaccagaggtcacttccatcgccatcttggttttggtgggtttgggccagcttctttaccacttcctgttttatcaccaaggtctttgtgaccctgtgtcttttgctgacctcctatcatcctgtgactaagaatgcctaacctcctgggaatgcagcccagtaggtctcagccccattttacccagcccctgtccaagacagagtcactctggttcaaacaactttgacaacttcatgtttctctaagtactatttaacaaatagtactttattgacccttgttcctgcctgacaccttcctgcaggaaagataaaggattataactacatttcaatatttaaagtaaactcaaagacaattctaattttattcttgaaagtaatttcatattcttccctcactaacctttagtatgagtrgctagtggaaagaaaacctaatagtttttcattttaacttctttctctttcttttccacacaataatggtgtgctaattgtggtcttgaaatagccataaaacgataatcaaagaagactgaaagtcaacac

SEQ ID NO: 441025 - DNA, 594 bp, Homo sapiens
gctttagtagcttatatacatctgcttgacaatttaccacattttaatccctctttttaygtgtactcattgggttttccacctgatttccagtgcagcatggcacagagcagacagcatggcacagagcaggcagcatttgatgacagatgaactaaacagggcatctcagagccacacagagcttaagagcacagatagccctttcctccagtgccttgattaatcctcactcagcctctcccatgttagagttgaggaaagcgaggcttagagaggttaagtacatcattacactcatatacactttccagaatttcttaattctgagatagattttcattttttaaaacatttataaaatcaggatgcagtttacaatcaatatgtacacgtaatgtagaattatttcctgagaagctattattaaattggcggtgctctagaatcagaccctagtgaacccaggagaaggctgtctgacttctaagtgtgtgtgtgtgtctcccataccaccacacagcctcttggggcatatgtcttttttcttcctttcagtctgctttttcattaatcgaatccacacttatgact

SEQ ID NO: 441026 - DNA, 420 bp, Homo sapiens
cagggattttgcagacacaactggttttaatgctaactcaaattcttagaccaaatctctttgagctccattttcttatcggaaaaacagctttccttgatttctctaggagaatagcttggatctccgaaattcaagcaattctcctttgtggtcttacaaaatttggtcaatatttctgtatatcactaatcatattgctttttcctatttctgcatctgtattctaaagagcaaggattcttctattatctctccatacttactaaagagtaaaatgactggcatttagaaggtacttaacaaacatttgttgaataaatgaagatatgaatgtgtagactsaatcactctatgaagaaagcaaagggtattattattattattattattattatttttgagatggagtcttgctct

SEQ ID NO: 441027 - DNA, 618 bp, Homo sapiens
ctactatggactaagtgttttacatgcattcagttaagacaayaaccctgcaagataggtattattacctctatttacagaaaagacaactgaggtcagaaggggctgatgacttccctaacttcacagcttgtaaaagggacaggtggcctggggactggggttggtttggttccaaagcccatgctgtttccactgagtcttgctgccacccccagctgaagcagggacatttggtctctctagagagaaaggcaacagcttccactgagccgtgggccccgtaaccttatccagtagaaggaagcaccacagtgtctagcagtacaacctttggccatttggctttgagtccttactcccctactagctgtgcgacctcagcaagtcctgcaacctctctgagctttagtattctcacttataaaatgaacatgacaactgattcaaatagttgttttaaggattaaagtgtaatggaaaaaagtatctggcagatcacctggccaagtgtgagtattagtaagtggtgattattatacctgtaactgtaaatgcaacttaaaaccacagatcaatgggagaaactatgacctcaaagatgttatttaacagacg

SEQ ID NO: 441028 - DNA, 561 bp, Homo sapiens
cttttgcacttactggcatgtttcaatcttctcttccaactagacttccatagtccatttcccctatgccaggactaargctgactatacaacctttgccctttaaaatgcatttagttgggaaactatcatttgtgtagttctaccttatcaggcagcaactttatagatgaagagcaatagatccatgcttgccaccataagtacaatgtttcagataccctttcagctaattaagaaatgatgtttctagggcagtctgactggaagattaggcacagatgctcacacctgagcaagcagctgaacaagctgtccagagcccattcttctggcagaggaaaatttcatcccctacagaggaacagccagcatgaatgccaacatgatgaaggggggctgagctctataggcccacctgacactaacactcccagctccctgtcccaccttagagttttagttctgtttttttgtctatattccccaaagccactagaatagacactccattagtgtaagtacgtttacattttgttctctactgcctggaacagaggc

SEQ ID NO: 441029 - DNA, 574 bp, Homo sapiens
tgcctgatagatcttactatattgcttttatctgggcaaaccacatatggatgatgagaagggcagcgcagttgcaggctttccttgatcctgccctggtacccatcccaagatcctttcctactcagctgtgaaggcctgggcggggcggggggggggggcgggggtgaggccacagcrgactgcaatgacaacagccggcagacctaacatctcttgtctgtgccttagtgccttgctgaagtttcccgctttcaggctctattttacttttctatcactaccttatgagcataatctttatggggatcctgcagcttctagagaaaccaaaacacctgacttaagcaaaaaggacacagtaaatgtggattaagaaatatctagagttttactgaatgtctatttaaaaaaaaatcgctagcattctttttcctagccagttaaaaaataattgtgggtgactcaggactgcaagatattacaggagcttatgatggtctcctgagattttataattgtctttcataaacctgagacataaatatactcaatgcttaaagcaaagtggcat

SEQ ID NO: 441030 - DNA, 574 bp, Homo sapiens
tgcctgatagatcttactatattgcttttatctgggcaaaccacatatggatgatgagaagggcagcgcagttgcaggctttccttgatcctgccctggtacccatcccaagatcctttcctactcagctgtgaaggcctgggcggggcggggggggggggcgggggtgaggccacagcggactgcaatgacaacagccggcagacctaacatctcttgtctgtgccttagtgccttgctgaagtttcccgctttcaggctctattttacttttcyatcactaccttatgagcataatctttatggggatcctgcagcttctagagaaaccaaaacacctgacttaagcaaaaaggacacagtaaatgtggattaagaaatatctagagttttactgaatgtctatttaaaaaaaaatcgctagcattctttttcctagccagttaaaaaataattgtgggtgactcaggactgcaagatattacaggagcttatgatggtctcctgagattttataattgtctttcataaacctgagacataaatatactcaatgcttaaagcaaagtggcat

SEQ ID NO: 441031 - DNA, 574 bp, Homo sapiens
tgcctgatagatcttactatattgcttttatctgggcaaaccacatatggatgatgagaagggcagcgcagttgcaggctttccttgatcctgccctggtacccatcccaagatcctttcctactcagctgtgaaggcctgggcggggcggggggggggggcgggggtgaggccacagcggactgcaatgacaacagccggcagacctaacatctcttgtctgtgccttagtgccttgctgaagtttcccgctttcaggctctattttacttttctatcactaccttatgagcataatctttatggggatcctgcagctkctagagaaaccaaaacacctgacttaagcaaaaaggacacagtaaatgtggattaagaaatatctagagttttactgaatgtctatttaaaaaaaaatcgctagcattctttttcctagccagttaaaaaataattgtgggtgactcaggactgcaagatattacaggagcttatgatggtctcctgagattttataattgtctttcataaacctgagacataaatatactcaatgcttaaagcaaagtggcat

SEQ ID NO: 441032 - DNA, 418 bp, Homo sapiens
aaacaagttctcattttatagaagataaacttcagccacagaagaggttggctgtacatctttagtgctggccagaatggccatgatgatgaaggtgatgaggataatgcaaaacagctattccatgagtacttgactcaaaggttatcaactgatgtgcacaacatccctaatggtagatactattgttatcctcaattcacagacytggtcatcgagcctcaggagggtcaactggcttgctgaagaacacacagtatgtggtggagccaatatttgaagcctgcctcttctcttagctaccatcttcaggtggcagtgcaaaggccctcatagtcaacccatccaaatgtaagcttggggctttcctgcctaacttggagctccttcttgttccctggagctgggttctcaatgt

SEQ ID NO: 441033 - DNA, 615 bp, Homo sapiens
taaaactatggtgcttaactgtgtccacctatgatccaaattttaaaagcttgataacackgtagtaaaggcatggtagataagcactttcactcttccttggggaagtctgaaatgatgcaatctgtaagaaaggctctgcaattttatttctaagtatgtacagatattcttgcatttgtgtgaaatcatgtacatgtgaaggtgttttttccaaaattgtataattgacaaagtctgataataatttaaatgcctatcaatggaaaacaaatgaaattggttacagtaaaattgctactatgggaggcagctgagatctagaattgttttcaaaatataattttaagtgtaaaagtcaatgtcctgcaacacacacatacacatacatatatgcagaatgtgttgatatcgtatacagtatcctagaaaaatacagaaaatgctggcaatgctggttgcctctggagtaagagatgggaatgttaagaaatcccacttttcattgtaaactctgttgtatctttttaaatttgaacctgttaagaaattttaatcaatttttttaaaacagaaaattaaatagtagagagtaattaatctgattaatattgt

SEQ ID NO: 441034 - DNA, 632 bp, Homo sapiens
gactgtgctgtggtttcacttctgatttataatataattatcctgcctctggaaaactgtcctgacagaaactgggtgatcccctaggctttctgtcctcctcttttgcccagttttctcccgcaaccaattctaggctgaaaatagttttattttttttaaagtctctttcaaggttaatatttactgtcatttcaactcctttgattttccctgcaggcaggcacattctgagatccaaagacaaaacttgaacagatgtggaattaaaggatgtcctcggactagccatcactggtgaggagagggaccatcacctcttcttgacataagacctcctgtccctcccactgaggacattatcctggggttgcagcctctctacctcacagaatgttctccagaccaggaggacttccaaatggcttgttccaattaaaccagaacgcaattccctgacatatgaatcctgyagggaagaattttaaaacagagatggggttgtcaaaatatgctgaaagggatactagggtgtcaggaatgagtaagaattagtagcgatggacacagagaatctaaacccctgggcacaaataatttatactctcactagcagtgtgttgttcacccct

SEQ ID NO: 441035 - DNA, 554 bp, Homo sapiens
acacacactcctggctttctgtatttgccagtcacaacacttcaccatctggtgacccccactctcaggcaatctatcctggacgcccccagagtcacccccaggcccttgcacagacaggcctccaggattacaaacttctctggtcataggaagctagggaagccttcaactcccctaagtgggcctctccctccagccasagtgagcctgggactctgggctgacctggctcatagctccaaagtgttcacaagggtgagggatgcatagtgcttccacagtgctcctgggcatcaaggcctccaggaactcacaggaaacatttcagcagcagccagggatcgtccactaggcaccctcccacagcacagatcttccaggactcacccagaggcatccagctacgaagcggtggagatgggattcaaagccaaggctctagggtgggctggggtcacggagccagggagtaaacctggaagccgcctcccaaaggtgccacatactgctctctctttctcctccaggaagtccataggactgtcttcatg

SEQ ID NO: 441036 - DNA, 554 bp, Homo sapiens
acacacactcctggctttctgtatttgccagtcacaacacttcaccatctggtgacccccactctcaggcaatctatcctggacgcccccagagtcacccccaggcccttgcacagacaggcctccaggattacaaacttctctggtcataggaagctagggaagccttcaactcccctaagtgggcctctccctccagccagagtgagcctgggactctgggctgacctggctcatagctccaaagtgttcacaagggtgagggatgcatagtgcttccacagtgctcctgggcatcaaggcctccaggaactcacaggaaacatttcagcagcagccagggatcgtccactaggcaccctcccacagcacagatcttccaggactcacccagaggcatccagctacgaagcrgtggagatgggattcaaagccaaggctctagggtgggctggggtcacggagccagggagtaaacctggaagccgcctcccaaaggtgccacatactgctctctctttctcctccaggaagtccataggactgtcttcatg

SEQ ID NO: 441037 - DNA, 563 bp, Homo sapiens
cagccaccctctgtcccgcagtgtcccaggcagaggccctctcccttcccagaaggcactgggaggaggaaatctaccacccagcacatggcaagacccagggcctggccaggcagcgcacacaataagctgggcctgagccaggaggcaggcggggtgttgggggagacaggctgaacggccaggccactgcaacagtgagagacccggggagcccctctgctatctcagccargaggaaggagagaccaaggcacagagccttaaaaaagacatcctctcccggcctcccatcccaaagccctggcccctaggccagtctagacagaaccaggaaagccaaaaacaaaaggcacctagtatgtaagttcatggggagaacgcaggcaggtgtgggaagctcccacctccaaccccgggccttggctactgggacagtgcgggctccagcagcttcaggacaccacccaccaggtgcaggctgccagtgactagcacatggatggcagcagcctcacggagtatgctggccccactgtgagccacagggtgggtgaggaggc

SEQ ID NO: 441038 - DNA, 589 bp, Homo sapiens
cctacctctccttgactgtacttaggttccagctgcactgaatggcttgtggttcaacaaacacatacaccaatttttgcaaacgtgccccgtgattcttactctgctacccttactctttgctcatgatgtaccctatgcctgtaatggacctctatgccataatgcttaatttttttttttaatagagacaaggtctcactctgttgcctagtctggaattcagtggcacaatcgcagctcactgcagcatcaaactcctgggctcaaatgattctcccaccttagcctcccaagtagctgggactataggcatgtgccrccatgcctggctaattatttcattttttatagagacagggtctcactatgttgctcaggctggtctcaaactcctggcttaatcaatcctcctgccttggcctcctaaagtgctaggattgatccatttgtgagctaccatgcctgatacaggagtgagccaccatgcctggccttaaatttcttttaagacatttcaaatcttatttctaccaggaagtagtccctgaacaatctcccaaccacagcaccaccaccaccatgttca

SEQ ID NO: 441039 - DNA, 243 bp, Homo sapiens
ggtgcgtgcctgtggccccaactactcaagaggctgatgtgggaagatcacatgaggccaggagttccaggctgcagggagcttgatcacatcattgtacactccagctgaggtgacagtgcaagatcctgtctctgaaaartaataataataaatgcagaagagagagaaaataatgaatgctgttgggtggagtgaggcctgggacagtagaagacagtgtgaaatggagggacctagttg

SEQ ID NO: 441040 - DNA, 531 bp, Homo sapiens
ggtcttgaactcctaatttcaagcaattcacatgccttggtcttccaaagtgtgaggattacaggtgtgagccaccacacccggcctaaacataacttttatatgtactaggaaatgaaaaacaatcatgtgaatcactttattgcaatattctttttattctgggaccgaacctgcaatatccccacagtatgcctttcaggatctggaaagaaacaatcaacacattatctttcaatgtcccattattgatcacttcatgaagatattaaaaatagagtgtttttgaaaaattaattgcataagcgactggagaaatcctacaatgttargtttggaaagaatgttagaggcaagttcatccgctcaaacaaattatatgatccacccaggataacttgtttagtgacagggctggaactagaacctaagatcctatgtctgtttgatcctcagtacaggctctttttactatacaagatgcctaactttttcttgcccttccacttccatcctcttcttggaggttgc

SEQ ID NO: 441041 - DNA, 585 bp, Homo sapiens
cacttctactcaggacataatctttgctaaaggtaaccaaaagcagatgaaacacyaatggtgacatccaactgctccctgaaggggctcccagggcctcttaacagggatgcccctctgcttagctgcttgcctccaggaggctagagttcatctctaaaggtgttccaagctttcctgcaccccagatcccagaacctgacaccaagttctaagaaggaaaaattccgctatcacacaggccatcctgtcctgacctggagtgacctcttcctgggatgcttgccattgtggaatatccacttcagagaaaacccccctcacggccacagggggatagcctttcctcgtggaccccatcaggagccttccatagactccataccatagtacctgctgggttattgcaaccaccctgcttgtagaacctgggagtctgtccaggtcaggctgggccaagtccatgccagttcctgtgcacatttcttcctccagagcaaggagttgctcattcctaacccttcctgtgatgtcgcagctctggatttcctaaaaacgcctgctcaaacaagggcacacacagct

SEQ ID NO: 441042 - DNA, 585 bp, Homo sapiens
cacttctactcaggacataatctttgctaaaggtaaccaaaagcagatgaaacaccaatggtgacatccaactgctccctgaaggggctcccagggccycttaacagggatgcccctctgcttagctgcttgcctccaggaggctagagttcatctctaaaggtgttccaagctttcctgcaccccagatcccagaacctgacaccaagttctaagaaggaaaaattccgctatcacacaggccatcctgtcctgacctggagtgacctcttcctgggatgcttgccattgtggaatatccacttcagagaaaacccccctcacggccacagggggatagcctttcctcgtggaccccatcaggagccttccatagactccataccatagtacctgctgggttattgcaaccaccctgcttgtagaacctgggagtctgtccaggtcaggctgggccaagtccatgccagttcctgtgcacatttcttcctccagagcaaggagttgctcattcctaacccttcctgtgatgtcgcagctctggatttcctaaaaacgcctgctcaaacaagggcacacacagct

SEQ ID NO: 441043 - DNA, 584 bp, Homo sapiens
tgatttgaagtctttgtgtattgtctgacatatgtgtcttctcacagtttctatagcttgcttttcccctgtgtatgggttacatcattctgattattttcatgtctcataatttttktcaaaaagtagatgatttagataatatatcatagcaagtttagatatggattcctcccagggtttgctgtttgcttgtttacttgtttaacaacttggctagacaattttagtcaaaatatttcccccatagtgtgaagtctctgatgtaacttatcagagggttcagccttgggcataagtacagtcactctgggatgacaatggatttagcagagttgtctctgtcttcatcaaatctctctgttaagccatctgcctcagttggtatcacatccagctgttaggctccacaagttgccagctgctgttctattgttttcagcaataccctgaagcataagttgctccagtctttttagaggtagcttttgaggcctatctttaaggtttttttcagactccaggagggcccttctaggtgtctctttccctccttctgtctggtaaactaaatgggttacagt

SEQ ID NO: 441044 - DNA, 596 bp, Homo sapiens
aaaatctctgttgtgtttgagagcacacttaggcttgaatttcccttcactctgttctaaatgaagtcaattttggaggkgggggaaaggtcagcttgagtgctgtctgttcttacggtcttcctgtcctctggacagaatctctgagtcgttgctttagagctagggttggaggacagtggcccacttctcctgcagtaacactcctgttttgtgagaaggtactgtatgggtgtggtagtttctgttctcagcttgcttctcctgccacggaacttcctggatgagtaagctgaagcaagggtgattggtgccccagtattcaatacctgtcatggatagggtaaaacctctggcttgtgtaaaggggtcagtggaagaaagaagcgcttgacctctcagctgtttttgcctgaaatttagctttcacagtgtggacctggtggtgaggggatgagaaattttggtggcctgcccctcatggggtgggggaggacgtactattacttgattggacactggaggagccctatcttcttagccacttcctagagtggagcttccatgatagatgaagtaggaaagtgggaaggaga

SEQ ID NO: 441045 - DNA, 592 bp, Homo sapiens
gctggttccgcggcctcgatgcttctgaggtccctcctcgacccctcggtctccgccagatcctttctttctctgcttctccgagtctctggggctcggacttgccccctccgcctctctccaactggctctccgacgtctcggacgaagttgcaaagaacttcctctccggcagcgcggggtcctggcgggtttggagatgcttccgcccctgacgctggggccgcgactccggagtccccgggagcgtgcagccctccaacactgagacccgctgccttcaaagttcccgcggcccccgctgctcgcccatcgctgggaccaggaacggggacaccagcgacggactcttcctcgccggggtgtctacctcgtgccaaccaactcttcgagccccgccgccctccctcgtgggtctgattccactgtctttccgctgcctcttccgggacggccgccgtgcctgccccaggcgtggagtgaggaacagaggagagagcagagggtcccwgccaccaaggccgccggggctgccggggctgagatggagccgcagtcggctctgactgcctgcgttgccgccgccgccgcc

SEQ ID NO: 441046 - DNA, 601 bp, Homo sapiens
ctgtcacaccactcaggttgtggtaggataaaaggtgaaaatcaaggctctgaaacttggtaccagcccctcagatgcctaactgacccttccatatagccacatatccttattcctgtgctcaattgctcagtcttcagaaggagcagtgaccctcttagctattctcgatcccactcctgcttaccttatataaatcagtgctttttaaaaaaagcatcctcccttttcctaatatcctcagcttttctccttttctccacccatactccgagaccctacggtatcaaattttctcctatgtattggacattcttagatctgccctctttgcaaatstcttggcatgatgctcctgccctgagttatttccgtttctctcctttcactaggaaattctctagacccatgatctatagcacatcatcatttccattttctccttaactcctgcagtcaaatcccacagaattcatgcctctatctaaatttctgactttaagatcaccactgcttacttttcagtgcatactttaatcgtttttgttagcttgaagttctcacttacccagtttgaattgtacaacttgaatcagatctt

SEQ ID NO: 441047 - DNA, 612 bp, Homo sapiens
ctttctccctgggtccctgccgctctgtctccsgcaagtgatgagcaattttgcggagtggcagaacagagacaaaggtagctgtgggcttcacggtaatttcaaaggaagtgccctacttcgttgcccatttcgaagtcctctctacctctgcgttggacgatttctccacttcctggtgtgcacctgcgtgtgtgcgtgcctgtgtgtgtgtgtgtgtgtgtgtgcgcgcgcgcgcgtgctggggtgtgtgcacactatgccgagagtcgggcaaatttcgagtgaagggagaccgagtcccgcaggttctcttgctcctgcagtctgcggaggaaaaactcctttctggcacggcggcaggaatccatctaccgacgttaggaaaggacagggtgtgctttcgtcccagcttagttttctatggagaaacaggcagcagaggagagtgggccagagggccacattttgcccacgaccagccaggtttgagttggttcctcctaggcctcacggtctgattttctcctcctctttgtgtacccgacgggtgttgctgtgagctcaggaccatcccggcgggctgcggatgggatcatcgtgtgtgtatgg

SEQ ID NO: 441048 - DNA, 590 bp, Homo sapiens
ggtccctgccgctctgtctccggcaagtgatgagcaattttgcggagtggcagaacagagacaaaggtagctgtgggcttcacggtaatttcaaaggaagtgccctacttcgttgcccatttcgaagtcctctctacctctgcgttggacgatttctccacttcctggtgtgcacctgcgtgtgtgcgtgcctgtgtgtgtgtgtgtgtgtgtgtgcgcgcscgcgcgtgctggggtgtgtgcacactatgccgagagtcgggcaaatttcgagtgaagggagaccgagtcccgcaggttctcttgctcctgcagtctgcggaggaaaaactcctttctggcacggcggcaggaatccatctaccgacgttaggaaaggacagggtgtgctttcgtcccagcttagttttctatggagaaacaggcagcagaggagagtgggccagagggccacattttgcccacgaccagccaggtttgagttggttcctcctaggcctcacggtctgattttctcctcctctttgtgtacccgacgggtgttgctgtgagctcaggaccatcccggcgggctgcggatgggatcatcg

SEQ ID NO: 441049 - DNA, 612 bp, Homo sapiens
ctttctccctgggtccctgccgctctgtctccggcaagtgatgagcaattttgcggagtggcagaacagagacaaaggtagctgtgggcttcacggtaatttcaaaggaagtgccctacttcgttgcccatttcgaagtcctctctacctctgcgttggacgatttctccacttcctggtgtgcacctgcgtgtgtgcgtgcctgtgtgtgtgtgtgtgtgtgtgtgcgcgcgcgcgcgtgctggggtgtgtgcacacyatgccgagagtcgggcaaatttcgagtgaagggagaccgagtcccgcaggttctcttgctcctgcagtctgcggaggaaaaactcctttctggcacggcggcaggaatccatctaccgacgttaggaaaggacagggtgtgctttcgtcccagcttagttttctatggagaaacaggcagcagaggagagtgggccagagggccacattttgcccacgaccagccaggtttgagttggttcctcctaggcctcacggtctgattttctcctcctctttgtgtacccgacgggtgttgctgtgagctcaggaccatcccggcgggctgcggatgggatcatcgtgtgtgtatgg

SEQ ID NO: 441050 - DNA, 590 bp, Homo sapiens
ggtccctgccgctctgtctccggcaagtgatgagcaattttgcggagtggcagaacagagacaaaggtagctgtgggcttcacggtaatttcaaaggaagtgccctacttcgttgcccatttcgaagtcctctctacctctgcgttggacgatttctccacttcctggtgtgcacctgcgtgtgtgcgtgcctgtgtgtgtgtgtgtgtgtgtgtgcgcgcgcgcgcgtgctggggtgtgtgcacactatgccgagagtcgggcaaatttcgagtgaagggagaccgagtcccgcaggttctcttgctcctgcagtctgcggaggaaaaactcctttctggcacggcggcaggaatccatctaccgacgttaggaaaggacagggtgtgctttcgtcccagcttagttttctatggagaaacaggcagcagaggagagtgggccagagggccacattttgcccacgaccagccaggtttgagttggttcctcctaggcctcacggtctgattttctcctccyctttgtgtacccgacgggtgttgctgtgagctcaggaccatcccggcgggctgcggatgggatcatcg

SEQ ID NO: 441051 - DNA, 419 bp, Homo sapiens
gcttcagtgttcatcatactcattatttagctcaaaatggtagacctgaatttatacttagtattgagttacaatttaagtttcctacagagatgcttttggatatttataattaaaagcaattcaatttatcataaatgagrttgaaaactggtgagagctttaaggcacttaaattgctttacaaagattgagggcaaatttttgtccagggatgttttccccacccatctgctgcttaggttcacacaaaacatctaattgaaacacattttcaacgttccatacttagagacaaaaagctaaaaatctgatcctatgtattcaacctcttatgatctgaacaatggttaacaatcttcctgagaaataggttctaagagtaatggaaaacactttaaaaaaaacaaaaaaacaaa

SEQ ID NO: 441052 - DNA, 571 bp, Homo sapiens
taaaaaatcaatcaggccaacgcggtggcgcacgtctgtaatcccagcactttgggaggtagaggcgggtgggtcacctgaggtcaggagttcgataccagccttgccaacatggcaaaaccccatctctactaaaaatacaaaaattagccgggcatggtggcacatgcctgtaatcccagctactggggaggctgaggcaggagaattgcttgaaccagggaggtggaggttgcagtgagccaagatcgtgccactgcactccagcctgggtgacagagtgagactccatctcaaaaaaaaaaaaaaaaaatcttaatcaraagctgtgtgtggtggttcacacctgtaattccagcactttgggaggccgagtttggaggactgcttgaggccaacagtttgagaccagcctgggtaacacagtgagaccctgtctctaatttaaaaaaaaaatcttagtcagaaattgtatagctattttatcatgaaaccttaatatcataaaggttatatttacagaaatatgctcaatttcctcatcaaaaaaaatctaaaaatattttacttg

SEQ ID NO: 441053 - DNA, 556 bp, Homo sapiens
caggaattccttatacatcctagatattaatcccttcctggtctcagacattgcagatatcttctgaatctgttatttacttatttatttacaattttttttttaagagttggggttttgctctgtcacccagactggagtgcagtggtatgatcatgactcattgtggcctcgcaatcctgggcttaagcgatcctcccacctcagcctcctgagtagttgggactacaggtatgcaccaccagacttggctaattttattttattttttagagatggragtcttaatatgttgctcaggccaatcttgaactcctggcctcaagcaatctttccacctcagcctcctgcatctattatatatatgttcactttgctcatgctgtattttgttgcaacataaaactatttttcccattgttttgtgcagtctctcaccagcactcttctttttctgtaactgtgttaatgccctttgttcttccatatgttaggtatgctggtatagttgaactctgctgactctcctcagtaaacagtctctttttatgacacc

SEQ ID NO: 441054 - DNA, 535 bp, Homo sapiens
aataataataataataataataataataataatattgactatattgattatgctatttccatccccatttctcactcccctccctccatctgagatttgttgctgtgggtttcattcaaaacatttgttgagccctgattctatgctggattctaatacagaaagcgaggagagggcagatagaaagatgaagaggccaggccyggtgcctcacgcctgtaatcccagcagtttgggaagccgaggcgggcggatcacttgagctcaggagttcaagaccagcctgagtaacatgacaaacacctgtctctacaaacaaacacagaaattagctggtgtggtgcacctgtagtcccggctacttgggaggctgaggagggaagactgcttgagcccgggaggcagaggttgctgtgagcagtgatcgcgcccctgcactccagcctggacaaaagacaaagaccctgtctctaaaacgaaaacaaaaaataaaaaagaaagatgaataagaaaacacttctccttttaaagtttg

SEQ ID NO: 441055 - DNA, 608 bp, Homo sapiens
cctgcatcgcacttattacctctataaagtgtgtgtgcatgtgtttaattgtccaacttctcccgctaagatgtaagctccttgaggacagagattgtacttagctcgccgctttggaccyagctcccagcaccatcctgacggtcagtgggcactcagtaaatactgaatgaatggatgttgagtgaatgatgacaacctgactctccagactgtgcatgtgagtgcagaggagggactactttgcaaatgtacttcactctgagaggcctcagatgctctgtaatcagtgctgactcactccaccgacgagaagaccccagttgggtagtcagcttccttcaccatgaccttggcctctgtgactgttttaagtactaagcctgaaacaaagcataggtcccagacgagctgatgagttcccaagagaaggtcttgcatatcccaccggttcaatacatgtttgaacaaaagtgctaaaggaaaagggggaggacatggctatggaaaaacagaccttatacggtatgtgctagtttagttttctttgcaagagagttgggacagaggatttctcagagtcaaaggaaatactttcgatgacctcc

SEQ ID NO: 441056 - DNA, 608 bp, Homo sapiens
cctgcatcgcacttattacctctataaagtgtgtgtgcatgtgtttaattgtccaacttctcccgctaagatgtaagctccttgaggacagagattgtacttagctcgccgctttggacctagctcccagcaccatcctgacggtcagtgggcactcagtaaatactgaatgaatggatgttgagtgaatgatgacaacctgactctccagactgtgcatgtgagtgcagaggagggactactttgcaaatgtacttcactctgagaggcctcagatgctctgtaatcagtgctgactcactccaccgacgagaagaccccagttgggtagtcagcttccttcaccatgaccttggcctytgtgactgttttaagtactaagcctgaaacaaagcataggtcccagacgagctgatgagttcccaagagaaggtcttgcatatcccaccggttcaatacatgtttgaacaaaagtgctaaaggaaaagggggaggacatggctatggaaaaacagaccttatacggtatgtgctagtttagttttctttgcaagagagttgggacagaggatttctcagagtcaaaggaaatactttcgatgacctcc

SEQ ID NO: 441057 - DNA, 562 bp, Homo sapiens
ggtggtctctagaatataagggtagtctctagttgtctgttccctgagcagataggtaagtggcccaagctggaaaagctcaataaaggaggtggttggggtacagggctctggattggctggggtacagggctctgaactggttggtttgcatatgaaagtcattcattatctctatgaatcagctagcctgagaggggaagtccctttagtgccagcaagacccttgctgtccaagtaccaggataaaatatatgcttaatacaccagctggccatcagcctcaactgcccgacatgtgagtgagcaaggctttgagttgactccagcctcagtcactgtaatctgactacagccacttgagaggccctgagtgagaamtgtcaaattgaactatgtctgcctcccaaacccaggatagacaacaacaacaacgataatgataaacggtcacttttggtgctttatgccagcagtgggtggcttgttatgcagcaatgggtaagtggaacaccttcggtttaaggaattgacattgcataaatcacctttacgtgctaat

SEQ ID NO: 441058 - DNA, 330 bp, Homo sapiens
tgggaagctgctgatcagtttcaggtgttttgtatctattaggagactgctgttccctggcaccagctgtgaatgattaytactttaaggaaacagttaacaaccgcctgaccatcacctgattggcgcccaacactcctagtgcgtgtgtgtgtgtgtgtctgtgtgtggggagccctctcctgccctgctcatacctaattagctacccactgttgtaacactttctggtttgatatctgtgtgacttttgccatttattgattctctttccctccatgaacaacttctgacttcctgtcttgaattttcctttctctgagcacttgg

SEQ ID NO: 441059 - DNA, 600 bp, Homo sapiens
caaaccaaccaatcatggcatgaggtgttactgggcatcagctatagaaaagcaggggtataatcatattaagattactgacaagcgcagaaggactaatgggcaatggttacagcctgtaaaagacaccagtaaaaacaaactgggaagcagtcaaggtggtaaagaaaatgaagggctcaaaggatgaggaggtcaaagaacagttatagtaggagtaagatacttgagtttaagacatcaaaaagtagggcaacttgaataggacttctgcttatactcaagaagaaataacatggaccacttttctgcctgacacacaygaaaaagcaagcaaaaaaatcatcaataccttatagtacactagacatcagacaatgataatcagagacaagaaacaaatgaggtaagccctatgattgccccaccttaatgacttaagagactttccagggccatgacacggggggaggaaatgcaagtggagaccactggactcttattaagaggtggagctgagaagtagtggagattaagtgaactagaattggcaggacaaaggatagaagactgcacagagaaagaaccctagggaatgtg

SEQ ID NO: 441060 - DNA, 422 bp, Homo sapiens
gtaaccaacttatcctaggttcccgagagcatttcttgattctactttacgtgatagtttatctacctttgtattcttgaagttttttctttaaactcttatttaagtgttacggtatattattatttttaaaataataactgttaaaatatatttactattttccataaatattaaaaaatccaattaatatagttctcggacacagggacgcaaatattgaatatactataccaactttaattatgcataaaggtgcrtttatgttattttctgaagagtatttttaattttcctccaactatgcaaacacaaatatttttgaagatggttccacaatggagagaaagacatttttatttgagtgattccccaataaattatgttctcaaatgacttatcataaatcattacttactgtt

SEQ ID NO: 441061 - DNA, 539 bp, Homo sapiens
cacaaaaaaaaagaaaactacaaaccaatatcccttatgattattaatgcaaacatacttaacaaagtactagcaagccaatttttagcaatatatgtaaggattatacactgtgaccaaatgagatttagtatgttgatttagcatactaaaatcaaccaatgtaatacatcatattaatagaatcaaagataaaaaccatatgatcatctcaatagacaaagaaaaagcatttgacaaatccaacagcyttttataattagaatactcaaccacctaggaaaagaagggaagttctttactgtgataagggacatctctggaaaacccacagctaatgtcatacttaatgtcacaagactggatgttttctccctaagatcaggaacaaaacaaggatatctgctctcatcaattcttttcaacattatactggaggttcttcctggtcaacaggttaagaaaaagaaattgaagtaatctatcttggaaaaaaaagagataaaattatatttgcagatgacatcatcttgtatata

SEQ ID NO: 441062 - DNA, 539 bp, Homo sapiens
cacaaaaaaaaagaaaactacaaaccaatatcccttatgattattaatgcaaacatacttaacaaagtactagcaagccaatttttagcaatatatgtaaggattatacactgtgaccaaatgagatttagtatgttgatttagcatactaaaatcaaccaatgtaatacatcatattaatagaatcaaagataaaaaccatatgatcatctcaatagacaaagaaaaagcatttgacaaatccaacagccttttataattagaatactcaaccacctaggaaaagaagggaagttctttactgtgataagggacatctctggaaaacccacagctaatgtcatacttaatgtcacaagactggatgttttctccctaagatcaggaacaaaacaaggatatctgctctcatcamttcttttcaacattatactggaggttcttcctggtcaacaggttaagaaaaagaaattgaagtaatctatcttggaaaaaaaagagataaaattatatttgcagatgacatcatcttgtatata

SEQ ID NO: 441063 - DNA, 548 bp, Homo sapiens
catttatttctgcgatatttaatttcttaacaaaaataaaacatgaaacataacaaaatctgaaacaaatatggcaaaaagttaagaactgacacaattgggtggtaggtacacaggtattagttttatcttctatattttgatgtatgcttgaggtatataaatttttcaaaataaagaataagatatataaagtgtttaacctaattcctgacatagaaaacacttaataaatcttaataaatcttggctcattatcttttgtttttttctaaacatgagaaaaaaaaaamcaaatcattggctaacccaatgtatatattataagcattttaccaacatgggaaggattaactcttgaaatgcaaaattttaaatgatatgttcacatggttccaggagaactgcaatatgaattaggtaaaatgaaaaggcaatcttccatagtacctcttggtgaacaaaataataaatgcatctagtagcctacataatttcaaaaactgatttatcctagactactaacaatagtttatactttaaaaaga

SEQ ID NO: 441064 - DNA, 592 bp, Homo sapiens
gtggcacctgctgtaaccatttgtattcaaagaagtagagaaagggggcaaacccatacttgcatgtgccacatctatagagtcaggaaaaaaaatctcaaagaatataaattaaagtgttaacagtagttactttttggtagtagaattgacaatggtttctttttcctctttttcattttgtataccttttttgtcattgttatatgtctaataatattttagtaattgcatatagttttaaaaaagaaaaagtagatacctgtttctgtcttctgcataaaagatccactagttataggctgtaggaagaatattcatatcaagtatgatgttctggaaactggtgtraaaaaaaaatctggcttaactttgcaaagcttatttcatcaaattgcaaacaaactaaacagggatgatttgtaaagaaaatatttaattggctcatggttctgcaggctgtacaagcatgcctccagcatctgctcctggtgagggcctcaggaagctcgcaatcatggcagaaggtgaaaagggagcaagcacgtcacatggtgagaacgagagcaagagagagaggagggggaggtcc

SEQ ID NO: 441065 - DNA, 592 bp, Homo sapiens
gtggcacctgctgtaaccatttgtattcaaagaagtagagaaagggggcaaacccatacttgcatgtgccacatctatagagtcaggaaaaaaaatctcaaagaatataaattaaagtgttaacagtagttactttttggtagtagaattgacaatggtttctttttcctctttttcattttgtataccttttttgtcattgttatatgtctaataatattttagtaattgcatatagttttaaaaaagaaaaagtagatacctgtttctgtcttctgcataaaagatccactagttataggctgtaggaagaatattcatatcaagtatgatgttctggaaactggtgtaaaaaaaaaatctggcttaactttgcaaagcttatttcatcaaattgcaaacaaactaaacagggatgatttgtaaagaaaatatttaattggctcatggttctgcaggctgtacaagcatgcctccagcrtctgctcctggtgagggcctcaggaagctcgcaatcatggcagaaggtgaaaagggagcaagcacgtcacatggtgagaacgagagcaagagagagaggagggggaggtcc

SEQ ID NO: 441066 - DNA, 545 bp, Homo sapiens
gtgtaaaaaaaaaatctggcttaactttgcaaagcttatttcatcaaattgcaaacaaactaaacagggatgatttgtaaagaaaatatttaattggctcatggttctgcaggctgtacaagcatgcctccagcatctgctcctggtgagggcctcaggaagctcgcaatcatggcagaaggtgaaaagggagcaagcacgtcacatggtgagaacgagagcaagagagagaggagggggaggtcccagamtcttctaaacaaccagatcttacatgaactgagcaagaacttggttatcaccaatggatggtactaaaccattaatgagggacccacctccatgatctagtcatctcccaccagctcccaccatctccaacattgggaatcacatttcagcatgagatttggaggagacaaacatccaaaccatattattctgcccctaactccccaaatctcatgtacttctcacattttaatacaaccatgccttcccagtagtcccccaaagtcttaacttgtccattattgactcaaaag

SEQ ID NO: 441067 - DNA, 545 bp, Homo sapiens
gtgtaaaaaaaaaatctggcttaactttgcaaagcttatttcatcaaattgcaaacaaactaaacagggatgatttgtaaagaaaatatttaattggctcatggttctgcaggctgtacaagcatgcctccagcatctgctcctggtgagggcctcaggaagctcgcaatcatggcagaaggtgaaaagggagcaagcacgtcacatggtgagaacgagagcaagagagagaggagggggaggtcccagactcttctaaacaaccagatcttacatgaactgagcaagaacttgsttatcaccaatggatggtactaaaccattaatgagggacccacctccatgatctagtcatctcccaccagctcccaccatctccaacattgggaatcacatttcagcatgagatttggaggagacaaacatccaaaccatattattctgcccctaactccccaaatctcatgtacttctcacattttaatacaaccatgccttcccagtagtcccccaaagtcttaacttgtccattattgactcaaaag

SEQ ID NO: 441068 - DNA, 545 bp, Homo sapiens
gtgtaaaaaaaaaatctggcttaactttgcaaagcttatttcatcaaattgcaaacaaactaaacagggatgatttgtaaagaaaatatttaattggctcatggttctgcaggctgtacaagcatgcctccagcatctgctcctggtgagggcctcaggaagctcgcaatcatggcagaaggtgaaaagggagcaagcacgtcacatggtgagaacgagagcaagagagagaggagggggaggtcccagactcttctaaacaaccagatcttacatgaactgagcaagaacttggttatcaccaatggatggtactaaaccattaatgagggacccacctccatgatctagtcatctcccaccagctcccaccatctccaacattgggaatcacatttcagcatgagatttggaggagacaaacatcyaaaccatattattctgcccctaactccccaaatctcatgtacttctcacattttaatacaaccatgccttcccagtagtcccccaaagtcttaacttgtccattattgactcaaaag

SEQ ID NO: 441069 - DNA, 540 bp, Homo sapiens
tatcaaaatgtgcatagtaatcagaaaaaatgcaaattaaaatcacaatgagttcctacagcaaacccaccaaaatggctcaaattaagaagactgaccctaccaagtgaaaatgtggagtaaacaaaatactcatatgttgcttgtgggaggctaagttggtacaacttggaaaaaatattgggcaatattttctaaagctgaacatatgaatgctcatgacccagcaagtccattttaaagtatatatctgtggtaggcagacaaatggttctcaatgattttaacatcctaaccccagcacttgtgaatatgtcaccttacatggcaaaatggactttgcagacgtgattaggtcraggatcatgagatggagagattatcctggatgatcctcctggacactaaatgtgatcacgaaggtccttataagggaaagaagaaggcaggagagtcagtgtgagagaaggccatgtgacagtggaagcagggtttggagtgatgccattgttttctggaatgggccacgagtcaaggaat

SEQ ID NO: 441070 - DNA, 554 bp, Homo sapiens
agaacttcactcactaatcacgagaacagccgggggaacccctgccccatgatcaaatcacctccctccctcaacacatgggaattacaattcaagatgagatgtggttggggacacagagctaaatcatatcagatgggtagtttgcagatattttctctcattctgtgggttgttctctcttcattttgttgagtgcttcctttgctgtgcagaagctttttaacttgatgtgatcccatctgtccatttttgctttggttgcctgcccttgttgggtagtactcaagaaatttgtgcccatatcaaggtcttggagagtttccccagtgttttcttgtcgtagtttcatagtttgaggtcttaagatttaagtctttaacycattttgattttatttttgtatatggtgagagataggaatctaatttcattcttctgcatgtggatatccagttttcccagcactatttatggaagagactgtcatttccacagtgtatattcttgtgtacctttgtcgaaaataagtttacttgtacgtgtgtggattt

SEQ ID NO: 441071 - DNA, 527 bp, Homo sapiens
cctgtgaatccgcatataatcgcacatctggccatttctccttccttgcaatgtgcacaaccaggtgcactgattgaagttctgcccactgggatattccccttcaccactgtgcttcagggatgtcctagaaagaggccgtactgctacagctgtccactttcgggtggtgcctgcatatcgtgaagaaccatctgtgaaccaggccctaatgttctcttcctctgtccactgatcatagggaastccccatgaggccattggtgcaggctagggaagagaaggcagggtggcaggagtggagaccatgggcatttgagccacttcctcatgtaacctacttgtgccttcaggacctgcttaaacctgatcatgtataaagcacttccatttgatgatggaatgctgctgtgcatgaaccactttatggctagatgggtcagaaagcacccagttcatgataggaagttcaggtcgcatggcgacttgccctgtagtcaaatgttcagtttccaccaaagcccagt

SEQ ID NO: 441072 - DNA, 562 bp, Homo sapiens
atgtcactgcccatgagaaagagacagagaaagaaaagatgcctggtttatgttctcactttcagttctaatttccttgagccyggctgttcttgtttcttgtgaattctctctttctgtgtgtgtgtttaaatgttaaatatttaaattttaaactttaatcctttttagtatatgaccagaaagcctgcaattagaatagaaattggtaccaggagtggggtttcaagtgacagagccttaaaatatgggacagttatggtatcactgggagaagatataatctaaaataaattacaagatgagaattttgcaggctgtgatttttggtgaaaaactagttaagtgtcacctgcaatcccttgagacccaggacataaccatacaaaaggtggagctctgggaggcttgatgactgaatgtcagaataaggaagcagattatttattgcttagaatcttagattaaggccagcagcaaagagacacgtttctatccagaatgcctgtctatcagcaaataagaaaagcaaggtgattatgtaatcctggggcaggaagcc

SEQ ID NO: 441073 - DNA, 562 bp, Homo sapiens
atgtcactgcccatgagaaagagacagagaaagaaaagatgcctggtttatgttctcactttcagttctaatttccttgagcccggctgttcttgtttcttgtgaattctctctttctgtgtgtgtgtttaaatgttaaatatttaaattttaaactttaatcctttttagtatatgaccagaaagcctgcaattagaatagaaattggtaccaggagtggggtttcaagtgacagagccttaaaatatgggacagttatggtatcaytgggagaagatataatctaaaataaattacaagatgagaattttgcaggctgtgatttttggtgaaaaactagttaagtgtcacctgcaatcccttgagacccaggacataaccatacaaaaggtggagctctgggaggcttgatgactgaatgtcagaataaggaagcagattatttattgcttagaatcttagattaaggccagcagcaaagagacacgtttctatccagaatgcctgtctatcagcaaataagaaaagcaaggtgattatgtaatcctggggcaggaagcc

SEQ ID NO: 441074 - DNA, 579 bp, Homo sapiens
ggggaaaaagattgtggagctgggaggcaggaggtgggaggcatgcaagaacttcacctcaagggttagcaaacacctactctctattcatgtgcaatggccttgagtggagctctcaactgataagtgggggtttgtttgtgtgtgcgagtgtgtggtttgtgtgtttgtgtgtccatgcacccacacacgtaggcacaaatcttggctatcaactcaaatgcaggaactggattgatttttataactttgctcttaaggtttctcacccccyaatatttgctcaggcctcttttgagactacatgttaaataaggcataggctgcctcacagtggctttatttgcttgttgtgggtggtggtggggccggggagctcattaggattcttaaaagtttaggaaggagcaaaggccaagttagaagaggatacctgcctcctgactccttggggggctctctttttggcctgccctacctactgaggactcattggaggagccctcacagggaacttttcttaaattgacaccctctgtttatttttgaacccctaattaccctttaaacttgctgtgg

SEQ ID NO: 441075 - DNA, 613 bp, Homo sapiens
ctgctgccagcctatggagtgtgtaaattcaaaaaggatactccttgtgtggacacagcttcaccagcacatgggttggtgggagctgttgcctttgtgcaaagaaaaggcattccttcctgcaggactggaattcagccccacttgcctccttggctgggcacctttgcacagtgtataaactcgtgtccttacatagtggtcttctagtcaaattctttctagtcatcatctgtaaacataaaatacctatagagtaaagctctaaaaccwgccagggccaaaggtgtatgttgaatggggttgtgccagaagttctaggatgtatttctagatttccaaagcgagaagatgagattcactcctgaagtaattcttgctaccaaaaggagccagtttccagcccagcccaccagcagaggcaattgagcagaggcagcagatgctgatgatggaggagatcagcacattccaagtagagaaaggagccatttatgggttataagtaactgacagcaggcattttgcagagcacttggacgaggcaacctccctagacagcaattgatgtggcctttgttatttaaaaatctgaactttgataaattacagt

SEQ ID NO: 441076 - DNA, 605 bp, Homo sapiens
tgcagcagcaaacagtccgaggattttggtggctttagacaaccaaagtttatgccttgttcatgtttcatgtgctttgcagctggactggggactctgctccaccttgttacctggggacccaagccaacagaggctgcatttagacacgggccccacagttaaacatcaggaggaagaggaagtggcaaatcacgcactgtttataaaaacttccacgcagaagtgacacatgtcacttccactcccattagaacaagacacgyggtaactcctaatatcaagggagaaggggcaaagtaatcctaccgagtgcccagaaggagagctggacatatgtaatgaacagcacgaatgacgacacacagcagagtccctttgcttgggcattgttttcccagtcaggtatgggagatgggggaggcagcccaaaaggagacctgactaacacctacacaggaggtgggtgctgggctgtttgcaaccagctggaattaatcagggaaggtttcaaggagctggggctcaagttggcttttaagagaagggagcacaggtttggcacagagaactggagaggacacatctggagcccttcggtctgg

SEQ ID NO: 441077 - DNA, 600 bp, Homo sapiens
caattcctgcttgcaaaggagaggagggaaaaaccactaagtgtctcaaagcaaagagaaggtktgctgaccacagaggaggagaggggcatgtcttccttctcacctggagttcctaaaacctgggccgcagggtgagaacaactgctgtaaagatctaccaggtaaagcttcaagatcttcccgtagagctcaatctcctgcaccaggagccaccctcctgggagtgccttgctctcctttctctgacctctgcggtgctggtactcggcgcctccagagaacctccaggcaggtgctgcctgattgactccatgctctggaagtcctcttccttgaaccagtggcctcactccctcccattcgccggggagcagctgactactcctgctgcctccttcatgttcttccagggcattgctacctctcttgctgctcccacccaagtgaagacaaaatcctcttcttcatttctcctcggatgccatggcaggctggcaattgaaaaagaaccttaagaatgactgaggaaggaattacctttcatataaatagtttttggatatccaagaatcgtcacactctagacagaaagagcag

SEQ ID NO: 441078 - DNA, 383 bp, Homo sapiens
ggtggttgtgatgtcaacttcccacattccagtggctctgtcattctgtcactttgtcacctgtgtcactamcagatcccccagagcatccttccccttcataaactctcacaggatttccataaagattagaagatcatgacttagaagggtatttataatgacatagcttgggaattgaaattagggtttctggaggaatccaaaacatgactgggcatctaaagtcacagatgttagatcaacacaggcactgatcggggtttctgcaggcattatcaataagatgggaaccaataatctaagcacacatgggccaatactgagggctcagtgtatttgattcagataccaaagtgcctaaaatattgatcaaccatgtg

SEQ ID NO: 441079 - DNA, 657 bp, Homo sapiens
tctttatatcattctgcagcctggcctccctccaggttgaaggtgatggacaggtttcaccactctagttggtcaacttcactctaaccccttcctgactcacacacaggcatcttaagcagcaaaccctttagggccccatttcaccagggacacacagctcctgcctggcacagaggattctggtagctcaactattcctgtgatgcttttctgacctaggcacaggagctgagtgaggcatcctactgttttgtgaccttagtcaaacttctgctcygaatctcaatttttccactttcaaaatgagtttgttctcattattaggccaaaagattcactttcaagggcatgaaatggaaagttatgtgtctttcggggatgtccaggctgggttatatgtttgaagatagagtcacttcccatgaaggggtggtatttctggggtgttctcttgggccacaagcccttcctctctcagaatatattttttaactccatcctatgtggaaataaactctgtctttggtggagggagtttgactttaggccaagtagagtcaagtagaaggcttctaggagtcctctgctgctgccacttgctgcccagcctctatgcccgaggctgcagttagagaagttctcaggaatgccatg

SEQ ID NO: 441080 - DNA, 589 bp, Homo sapiens
gcttttctgacctaggcacaggagctgagtgaggcatcctactgttttgtgaccttagtcaaacttctgctctgaatctcaatttttccactttcaaaatgagtttgttctcattattaggccraaagattcactttcaagggcatgaaatggaaagttatgtgtctttcggggatgtccaggctgggttatatgtttgaagatagagtcacttcccatgaaggggtggtatttctggggtgttctcttgggccacaagcccttcctctctcagaatatattttttaactccatcctatgtggaaataaactctgtctttggtggagggagtttgactttaggccaagtagagtcaagtagaaggcttctaggagtcctctgctgctgccacttgctgcccagcctctatgcccgaggctgcagttagagaagttctcaggaatgccatgctcataagaactccaaagcacggcccactctaggcaaggaaacaagattgaatctacacaatataaaaataagtattgctttttataatgacaaaccaaactactttcttaagtacttttttaaatgcatgaaggtata

SEQ ID NO: 441081 - DNA, 617 bp, Homo sapiens
ggttggctaataacttattatatggacatcattcatttacactctcttttttacaatctaatccaaaaagaaggaattataaagacaatactcagtggggctaattttgagaagtgtcctgattccccatagttttcctgacaggcacatttctcttagccccaagtaaatctatttaaagcactaattttgtcatgttcctggatcatgcctaaaaagacagagggaggactcacaaggcacccttggtttctgcagtgctatcccctcctcatgacctctctgttccctgagcccacccagggacctcacattctttttcccatagaacagggactgtgccattttctggggcagaggaagcacagcccactctgccctgaagaactaatcaagcatccttactttggcgctgatgcccttgtgctctgctgctgacttcatctggggggaatctgcctcttcccagcccgtgacagtcagtctggggcagcagactcagatcaaggaagtcacaccggtcttatgggttagcaggggctcagtatctgccagatctgcctcccgccctctgactcayggcataataagagccttaaggagaagatggtatgtgt

SEQ ID NO: 441082 - DNA, 544 bp, Homo sapiens
agttttgtaatttgctctatacccttaggacaatttgcaaaggatgattgcaaacttttttttcaagtcttaattattttgctaggagaagggtccaaggagttcttcatgccactgttctgaaagtcctccctaaagggatttttatttaatttgtcttaggttttccataaggctttttagaaaatactctgaattgagattttatgtatttatagatttcttttataatttagtctttaaaagtttttttaacatagagttgtgaacacctaagctgtggacacagtttttttgtattatttatttattttattctttttttttttatactttaagttctcagggtacatgtgcacaatgtgcaggtttgttacatatgtatatatgtgccatgtcggtgtgctgcacccattaactcatcatttacattaggtatatctcctaatgctttcctccccaayttccccaacccaaaaaagggccggtgtgtgatgttcccctttctgctgtggacacaggttaaattattttcccctaaatc

SEQ ID NO: 441083 - DNA, 586 bp, Homo sapiens
attcttcttgagtcttcaactgagtactaacaggcacattcatgtgaagaaatcatatgagacaggagaaagaattacttcaaagaattaagaaggaaaatcactggagcccacaggggccagaaatactttctgtttctactagccagactggaaaaatgtgtaattcacatggcttcagataggatactcagaagggttatgcttcagtagtgggtacaatttagttttagattaaatgtttttctggtcttaaaaaagatctgaaggaatcaaactgctgccaagtaacttaactgtatctcaatacagagcttaagtatatttatagggacataaatatatttagcacccagaaagacaaaattcacaatgtctgacttccaattaaaaattgccaggcatgcaagaaatagtaaaatgtcatcaataatgatagaaaaataaaagcaacgcagaaaagacacaggatttgtagacaagagcattgaaacaatgattataaattcattctatatgtttaataagctagataaaatattgcacacattcagwaaatatatgaaatatatatattttaaaatta

SEQ ID NO: 441084 - DNA, 628 bp, Homo sapiens
tttaactgttaaaataatccaagaggatagtagtcatatacgaagatcctttagatataatgtgtaggaccagcattaatttaatcaaccaagtctcctctcattgaattgttaattcataattacaaagatgacattacagtaaattaagaaatactgtaatttcattctctccaaaaagtatacattgaagtttggtgaatactgttatattttcaactartaaatcaatgtgccaattctgggtcttaggcatattgtatatactggaatgatattcactttaattaaatttgttttgagatgtagaatgtaatacagatcctacgtgtttttaaaagttcacatcaatttcaagcttttaaaaatgtatgtacacaagaaagcttcttttgcaatttatatgtttacaaatgttgccattagctaagctatattttggaatgtgatcaaacaatattgaatgtcaagtcttaacagcagggctggtctaaggaattccctctaagctaaatctgatcctttcatatgtggctactgctcttttaaactactgtatccctaaagggctaaaaggaagaaaatcctaacttaataagtgaaggcagcaaggcatagtatttgaatg

SEQ ID NO: 441085 - DNA, 603 bp, Homo sapiens
atttcattagtggaaactgcaggcaagcctctttgagaagaggcatttcaccttggtgtggtggttcaatgcatgcccagatgtaaggcacctccaaagttccaatgacctagtgcaggtgtgtttttgatggccctggctgtatcatgctggcaattcagtggtaagccttgttctctagtcacaaataagggttgcagccattgtaaggaacagtaaaaaccagttatgaccacaccactgcattagtggaagctaccaacatggcggtttgaaaggtgacattttaccctttgggatattttctgctcaatggtgagacatagggcatgtcctgggccctaggtatgtgcaatgtggggtctcctttttgcctgactgcactgcattgcaggagtcagtggtaaaccctgctaaaggactcagtcagtgcacggattgaaaacaaaccaaaagacagctcagtttctccccaaaaagatgccacacactgccattttggattggaatcraggttctgcattcacaacacaaagtgccaatcactataccaccgtggcacgccataaacttgctggcagatgctgagttttctttaacact

SEQ ID NO: 441086 - DNA, 625 bp, Homo sapiens
ggacatgatataacacaggacaggacagagtcaagaactgtttaaggcaggacacttggtmgtgaaaagtcccttactgtgctgaccctgagatgccaaagtcacattgttcagtggcccctaacttggcctttggggttcaccattgcctcccctgcagtttcagcattcagtgtggggaccatcactggctgatacttgggtactctgggtttttggcatttcgttgtggtgagagttccactgtcactgttggcctctccctggatgctctggggttttcagcattgacattccctataggattgtggattagagctccttccctggaggagtgtggatgtcatcttctccgcccttaaattaaaagattaagattttccataacagccagttgtgggccccctcctacgtgactttgctcaagcccatattgaactcttggtcagagggaccaggggttcctggacccctggcccaagtgacaactacccatagtggcagacaagcagcagccacccaaacattttgcccaaatatttttcctcagtctctgtggctgctgggtagattttctggcacctcagtctggacaacgctgttcatgctttcccttcctcccttc

SEQ ID NO: 441087 - DNA, 625 bp, Homo sapiens
ggacatgatataacacaggacaggacagagtcaagaactgtttaaggcaggacacttggtcgtgaaaagtcccttactgtgctgaccctgagatgccaaagtcacattgttcagtggcccctaacttggcctttggggttcaccattgcctcccctgcagtttcagcattcagtgtggggaccatcactggctgatacttgggtactctgggtttttggcatttcgttgtggtgagagttccactgtcactgttggcctctccctggatgctctggggttttcagcattgacattccctataggattgtggattagagctccttccctggaggagtgtggatgtcatcttctccgcccttaaattaaaagattamgattttccataacagccagttgtgggccccctcctacgtgactttgctcaagcccatattgaactcttggtcagagggaccaggggttcctggacccctggcccaagtgacaactacccatagtggcagacaagcagcagccacccaaacattttgcccaaatatttttcctcagtctctgtggctgctgggtagattttctggcacctcagtctggacaacgctgttcatgctttcccttcctcccttc

SEQ ID NO: 441088 - DNA, 551 bp, Homo sapiens
aggacagagtcaagaactgtttaaggcaggacacttggtcgtgaaaagtcccttactgtgctgaccctgagatgccaaagtcacattgttcagtggcccctaacttggcctttggggttcaccattgcctcccctgcagtttcagcattcagtgtggggaccatcactggctgatacttgggtactctgggtttttggcatttcgttgtggtgagagttccactgtcactgttggcctctccctggatgctctggggttttcagcattgacattccctataggattgtggattagagctccttccctggaggagtgtggatgtcatcttctccgcccttaaattaaaagattaarattttccataacagccagttgtgggccccctcctacgtgactttgctcaagcccatattgaactcttggtcagagggaccaggggttcctggacccctggcccaagtgacaactacccatagtggcagacaagcagcagccacccaaacattttgcccaaatatttttcctcagtctctgtggctgctgggtagat

SEQ ID NO: 441089 - DNA, 551 bp, Homo sapiens
aggacagagtcaagaactgtttaaggcaggacacttggtcgtgaaaagtcccttactgtgctgaccctgagatgccaaagtcacattgttcagtggcccctaacttggcctttggggttcaccattgcctcccctgcagtttcagcattcagtgtggggaccatcactggctgatacttgggtactctgggtttttggcatttcgttgtggtgagagttccactgtcactgttggcctctccctggatgctctggggttttcagcattgacattccctataggattgtggattagagctccttccctggaggagtgtggatgtcatcttctccgcccttaaattaaaagattaagattttccataacagccagttgtgggccccctcctacgtgactttgctcaagcccatattgaactcttggtcasagggaccaggggttcctggacccctggcccaagtgacaactacccatagtggcagacaagcagcagccacccaaacattttgcccaaatatttttcctcagtctctgtggctgctgggtagat

SEQ ID NO: 441090 - DNA, 538 bp, Homo sapiens
aggctgcagttccatttggagcacctcaagagaaggccacaggctgggaagggacacttctcctagctctaagttcatgtctttacacagataaagaaaagwcgttccttccatcaaatattacttctcaagtagacccgtctgcttgtgacatggtagttcctggaagaactgcaaatgttctcccagtccaggttattttgaaacccagtgttaattatctatgggaaaaaaaatatccttttaagtgtggtggcccatgcttttaatctctgcactttcggaggccaaggtgggcatatcactggaagctaggagtttgagaccagcctggccaacaaggcaaaaccccatctctactaaaaacacaaaaattagctaggtatggtggtgtacatctgtaatcccaactactcagaaggctgtggcaggagaattgcttgaacccggaaggcagaggtagcagtgagccttgcgccgccgcactccagcctggataacagagcaagactctgactcaaaaaaaaaaaaaagaaaa

SEQ ID NO: 441091 - DNA, 538 bp, Homo sapiens
aggctgcagttccatttggagcacctcaagagaaggccacaggctgggaagggacacttctcctagctctaagttcatgtctttacacagataaagaaaagacrttccttccatcaaatattacttctcaagtagacccgtctgcttgtgacatggtagttcctggaagaactgcaaatgttctcccagtccaggttattttgaaacccagtgttaattatctatgggaaaaaaaatatccttttaagtgtggtggcccatgcttttaatctctgcactttcggaggccaaggtgggcatatcactggaagctaggagtttgagaccagcctggccaacaaggcaaaaccccatctctactaaaaacacaaaaattagctaggtatggtggtgtacatctgtaatcccaactactcagaaggctgtggcaggagaattgcttgaacccggaaggcagaggtagcagtgagccttgcgccgccgcactccagcctggataacagagcaagactctgactcaaaaaaaaaaaaaagaaaa

SEQ ID NO: 441092 - DNA, 538 bp, Homo sapiens
aggctgcagttccatttggagcacctcaagagaaggccacaggctgggaagggacacttctcctagctctaagttcatgtctttacacagataaagaaaagacgttccttccatcaaatattacttctcaagtagacccgtctgcttgtgacatggtagttcctggaagaactgcaaatgttctcccagtccaggttattttgaaacccagtgttaattatctatgggraaaaaaatatccttttaagtgtggtggcccatgcttttaatctctgcactttcggaggccaaggtgggcatatcactggaagctaggagtttgagaccagcctggccaacaaggcaaaaccccatctctactaaaaacacaaaaattagctaggtatggtggtgtacatctgtaatcccaactactcagaaggctgtggcaggagaattgcttgaacccggaaggcagaggtagcagtgagccttgcgccgccgcactccagcctggataacagagcaagactctgactcaaaaaaaaaaaaaagaaaa

SEQ ID NO: 441093 - DNA, 538 bp, Homo sapiens
aggctgcagttccatttggagcacctcaagagaaggccacaggctgggaagggacacttctcctagctctaagttcatgtctttacacagataaagaaaagacgttccttccatcaaatattacttctcaagtagacccgtctgcttgtgacatggtagttcctggaagaactgcaaatgttctcccagtccaggttattttgaaacccagtgttaattatctatgggaaaaaaaatatccttttaagtgtggtggcccatgcttttaatctctgcactttcggaggccaaggtgggcatatcactggaagctaggagtttgagaccagcctggccaacaaggcaaaaccccatctctactaaaaacacaaaaattagctaggtatggtggtgtacatctgtaatcccaactactcagaaggctgtggcaggagaattgcttgaacccggaaggcagaggtagcagtgagccttgcgccrccgcactccagcctggataacagagcaagactctgactcaaaaaaaaaaaaaagaaaa

SEQ ID NO: 441094 - DNA, 580 bp, Homo sapiens
ggtttaccttctcagaattctgctcaaaaagcagaattagctgctctaatcaggaccttccaactgtgaaaagacttaagcctgggttggatggctcacgcctgtaatcccagcactttggcaggccgaggtgggtggatcatctgatgttgggagttcgagaccagcctggccaacatggcgaaaccctgtctctactaaaaatacaaaaattatccgggtatggtggtgggcacctgtaatcccagctacacgggagggtggggcacaagaatcacttgaaactgagaggcagagtttgcagtgagccaagatcatgccactgcactccagcctgggcgacagagcaagactcygtttcaaaaaagaaaaaaaaaaccctcaagagtcaatgtgtttactgactctaagtatggtttccgggtgcttcaggctcatgcaaccatagggaaggaaaggggactatcaagagccaagggatcccccatacaactttactcagatcttggaacttttagatgccatccaattcccaaagaaataacaagtattcactgcaggggacaccagaagggagaca

SEQ ID NO: 441095 - DNA, 496 bp, Homo sapiens
tgccaccttacaggggactacaatatttgctagtatttataaacactttcaccaggtggatagaagctttccccacaaggacaagaaaagtattggaagtgtctaaattcttacttaaagaaatcatcccaagatttggattaccaaaatgtttgcaaggggataactgacctcccttcccagctaaggtgacccagtgaggtaatgcctcagccttaagcattacctatcttcactcttcatggagatctcaatcttcagataacatagaaagccagttgtgacattagcaaaactctttcaggagacctcagaggcctgagttttcctcctactcatagcccttttgcatatgaggatggctccaaagagaactttaaagcttagtccatttgaaatgacttatggaaggcctccgccttttttttaacttgatcaacaccacagtttaattgtaaacrtgtcatatgtgtcaatgatcaaattgacaacactt

SEQ ID NO: 441096 - DNA, 524 bp, Homo sapiens
gaccagttcatttggttacagttttaaactagcaaaccattgccctataagaggagctaaactaaactgttaacactacacaaacttcccaagaaaggtaacttgaaaagtctaaaaagtgattccaattattctaattaacatttgagatgctaaaagaatcaatgactcaagaaacactttgaagtaattccatttttctttatcattttctaaaaatgtattcacataaatttaagatccagattgcttaagagtatgtcttcaaagtaggttaatcactaaagcattctgatccaaagacatagtcttaatgcttctaatatgtaattctaacctaaaatcacaatccttggtttgaaaacatcaaaggtaagaaacaaaaaaataaatcaggrtgaaaatgtgcagcagctatagctacaagagtggaaaataaattctactttttccataaagactctgtgaaaatataaagcccaaagtcagtgacaacagaagtccacatataaatggtgtttaaa

SEQ ID NO: 441097 - DNA, 454 bp, Homo sapiens
tatccaatgttgaagcaccttcctggaatgagtgaacaaagttaaggacttgcagagagagttttctactggaatgtaagaggtttttgaaggctctcttttctgcaaaggccatgtgtagcaattttyctatatactttccggtttaattcggaactgaacagtggaattccaaagcacagctcgagaggaacccaatctgcttctgttgtggcaccagaggtttgctttgttgctgaatctatagttgcttcttcaatgaccatttcaaatgactctgtactcccatttaacatctgagccagaagccaaatcaggttttcctctctcatcagaagcatcactgagttttctatttgcaagttggctggaagcattcaacatggtgacatatccgcagagatgttgtaagtccactctgttccttagtatctgcaatgctttatgaacaccc

SEQ ID NO: 441098 - DNA, 454 bp, Homo sapiens
tatccaatgttgaagcaccttcctggaatgagtgaacaaagttaaggacttgcagagagagttttctactggaatgtaagaggtttttgaaggctctcttttctgcaaaggccatgtgtagcaatttttctatawactttccggtttaattcggaactgaacagtggaattccaaagcacagctcgagaggaacccaatctgcttctgttgtggcaccagaggtttgctttgttgctgaatctatagttgcttcttcaatgaccatttcaaatgactctgtactcccatttaacatctgagccagaagccaaatcaggttttcctctctcatcagaagcatcactgagttttctatttgcaagttggctggaagcattcaacatggtgacatatccgcagagatgttgtaagtccactctgttccttagtatctgcaatgctttatgaacaccc

SEQ ID NO: 441099 - DNA, 533 bp, Homo sapiens
gataaacagtctacagcagtgttattctaacttaatcttgattccaagtccttgccattttcctctagctgctgttgactccagttatatataggttgggggaaaggggattatttatggatctaggcatcactgtctcttggkcagttatcacatttgcagactgaagggatgtgatttctacaatcaaactatccatttggaatacaaatctggagtggctataaaatttgcttctcagagatggagctttcagatttggactttcaattgttctgttgttttagtttttctcatcaactggggaactgtttgtgactaagctttgttaaaagtagagaagaactttccatagttccaacattagttgctacttgaaacaaacaaaaacacacacacacatacaacgaaacaataatctttggtgaggtcttgctgatacctaactgaggctagagtgagagctaagtggtgatacaggccaggtgcaaactgagtgcagctaagtggataatctctggtagtgaactaca

SEQ ID NO: 441100 - DNA, 533 bp, Homo sapiens
gataaacagtctacagcagtgttattctaacttaatcttgattccaagtccttgccattttcctctagctgctgttgactccagttatatataggttgggggaaaggggattatttatggatctaggcatcactgtctcttgggcagttatcacatttgcagactgaagggatgtgatttctayaatcaaactatccatttggaatacaaatctggagtggctataaaatttgcttctcagagatggagctttcagatttggactttcaattgttctgttgttttagtttttctcatcaactggggaactgtttgtgactaagctttgttaaaagtagagaagaactttccatagttccaacattagttgctacttgaaacaaacaaaaacacacacacacatacaacgaaacaataatctttggtgaggtcttgctgatacctaactgaggctagagtgagagctaagtggtgatacaggccaggtgcaaactgagtgcagctaagtggataatctctggtagtgaactaca

SEQ ID NO: 441101 - DNA, 589 bp, Homo sapiens
  misc_feature (1)...(589): n = A,T,C or G
aactagctggcctgtggtgtaggacacaggacccagccccaccttatggctctaaagcccttgctcaaagccactgcagatgagttagctaggtctctaccacctcccataatactcctctgnagagaaataaaggtctttcacaccctgcccaggaaagggatttgcttagcctcaaatgtgcacattcagaaatagcttgtcataagaaagagaggatagtttgcagagaaataacccttstaagtccacatcctattccttttaaataagagagtggtgccaagggaagagcccttagaatgtcaaagccaacagggtgctcagataccacccaagtacagttccatctttggccataaggagacaatggtgtcaagaggctaaggccatatgatctgtaggtgaaaaacctgggatgagaatcaaggcctcaaaccttttccactacatcacagatttaggagcagttagacggaaggcttcaatctggagaacactaacaggttttagagattattgggtcatggtggctgggacagaaataaggattcacagaaagatgtttatagtcaatgttcttttacag

SEQ ID NO: 441102 - DNA, 612 bp, Homo sapiens
ggcacttgtgttagttaaaacccttaccaggctttataatatgacagaatggtttaaagctactgagtagacctatcctatttcccaccattttctttgtttctctttcaccataggcttctttcccatgagaaagtaaagattttagtctctcttttcacagtccgaagtaaatcactatctttctcaaytggacttccaaggcaaagatttctctccatttacctatctggatttttacaaagttggcctctggattcccttttcccaaagctaattcaccacaaacgcacccctcaagtcaaggagctgggctttcatacacctgcacctgtcaatcatgggtaaatactttgcaggcagggttgcatgtgggattgacataaactgccaggtattgccagctctgagcctcaggcaagcttgtgactaagtgactccagtagtctgaggacagtccttactcagaagggtctttggaagcaaaagcaaacataggcatgagagggtaaaaaaaaaaaatcccatgtgattttggcttatacctaacagaacttgtgcaagaatggatattaaggtgggtattgtacacaacagagcttagtaaatacc

SEQ ID NO: 441103 - DNA, 612 bp, Homo sapiens
ggcacttgtgttagttaaaacccttaccaggctttataatatgacagaatggtttaaagctactgagtagacctatcctatttcccaccattttctttgtttctctttcaccataggcttctttcccatgagaaagtaaagattttagtctctcttttcacagtccgaagtaaatcactatctttctcaattggacttccaaggcaaagatttctctccatttacctatctggatttttacaaagttggcctctggattcccttttcccaaagctaattcaccacaaacgcacccctcaagtcaaggagctgggctttcatacacctgcacctgtcaatcatgggtaaatactttgcaggcagggttgcatgtgggattgacataaactrccaggtattgccagctctgagcctcaggcaagcttgtgactaagtgactccagtagtctgaggacagtccttactcagaagggtctttggaagcaaaagcaaacataggcatgagagggtaaaaaaaaaaaatcccatgtgattttggcttatacctaacagaacttgtgcaagaatggatattaaggtgggtattgtacacaacagagcttagtaaatacc

SEQ ID NO: 441104 - DNA, 555 bp, Homo sapiens
ggttttgagcagctctggcctccccgtcctcttttatttctacagtggagtgtggcaagagaagrgacccatctgagagtgacttcatattgtggcctttcaccacttacctctggaaatttgattcaggcaagtcgggggagtctccggtattcttctctgagaactctgttttcattatacagctggacaatggaatctatgatttgcctgtagaggttagaggtgcatcctgttccaggaaataattacaatttatgcaagttatacacgtttgcttaagagaatgctttctgcacatttcatgttcttcctctctatcttagcctagggagaaaaccgtggagggctggaacgttagtgtgatggggtggaagcttaattttcacatgattctcaacaaatgccagcacatcacatgtattatcatgtccaatggctgcaatatgaaggaggcttttccaaaatagttactgctttggtatgggaagggacctgcttatggttattctggcccagcacaatgttatgaaatgatggcctctgtgtgagaac

SEQ ID NO: 441105 - DNA, 555 bp, Homo sapiens
ggttttgagcagctctggcctccccgtcctcttttatttctacagtggagtgtggcaagagaagagacccatctgagagtgacttcatattgtrgcctttcaccacttacctctggaaatttgattcaggcaagtcgggggagtctccggtattcttctctgagaactctgttttcattatacagctggacaatggaatctatgatttgcctgtagaggttagaggtgcatcctgttccaggaaataattacaatttatgcaagttatacacgtttgcttaagagaatgctttctgcacatttcatgttcttcctctctatcttagcctagggagaaaaccgtggagggctggaacgttagtgtgatggggtggaagcttaattttcacatgattctcaacaaatgccagcacatcacatgtattatcatgtccaatggctgcaatatgaaggaggcttttccaaaatagttactgctttggtatgggaagggacctgcttatggttattctggcccagcacaatgttatgaaatgatggcctctgtgtgagaac

SEQ ID NO: 441106 - DNA, 555 bp, Homo sapiens
ggttttgagcagctctggcctccccgtcctcttttatttctacagtggagtgtggcaagagaagagacccatctgagagtgacttcatattgtggcctttcaccacttacctctggaaatttgattcaggcaagtcgggggagtctccggtattcttctctgagaactctgttttcattwtacagctggacaatggaatctatgatttgcctgtagaggttagaggtgcatcctgttccaggaaataattacaatttatgcaagttatacacgtttgcttaagagaatgctttctgcacatttcatgttcttcctctctatcttagcctagggagaaaaccgtggagggctggaacgttagtgtgatggggtggaagcttaattttcacatgattctcaacaaatgccagcacatcacatgtattatcatgtccaatggctgcaatatgaaggaggcttttccaaaatagttactgctttggtatgggaagggacctgcttatggttattctggcccagcacaatgttatgaaatgatggcctctgtgtgagaac

SEQ ID NO: 441107 - DNA, 555 bp, Homo sapiens
ggttttgagcagctctggcctccccgtcctcttttatttctacagtggagtgtggcaagagaagagacccatctgagagtgacttcatattgtggcctttcaccacttacctctggaaatttgattcaggcaagtcgggggagtctccggtattcttctctgagaactctgttttcattatacagctggacaatggaatctatgatttgcctgtagaggttagaggtgcatcctgttccaggaaataattacaatttaygcaagttatacacgtttgcttaagagaatgctttctgcacatttcatgttcttcctctctatcttagcctagggagaaaaccgtggagggctggaacgttagtgtgatggggtggaagcttaattttcacatgattctcaacaaatgccagcacatcacatgtattatcatgtccaatggctgcaatatgaaggaggcttttccaaaatagttactgctttggtatgggaagggacctgcttatggttattctggcccagcacaatgttatgaaatgatggcctctgtgtgagaac

SEQ ID NO: 441108 - DNA, 355 bp, Homo sapiens
ttaacagatggtaaagaccttcttctgcaccttactgtgaaattggaaagagaaataaggatgcctttgtcagaagatggtatgactaattaaagccacaaacttacacccatcactgacagaatgacaagcctaatatggtttatattactgtgaaagctcaatgagtgaattaatataatctctttttattgcatagaagagtatayaaagcatatagtctcctaacaatccaaacttttgcccccaaagtaaagtcaaacattcaagtaagggagaggagatataggtcaaggttttaatctatacacacaccagagaggctaccaacctaaagggctcttatatacctaaa

SEQ ID NO: 441109 - DNA, 290 bp, Homo sapiens
tttgtcagaagatggtatgactaattaaagccacaaacttacacccatcactgacagaatgacaagcctaatatggtttatattactgtgaaagctcaatgagtgaattaatataatctctttttattgcatagaagagtatacaaagcatatagtctcctaacaatccaaacttttgcccccaaagtaaagtcaaacattcaagtaagggagaggagatataggtcaaggttttaatctatacacacaccagagaggctaccaamctaaagggctcttatatacctaaa

SEQ ID NO: 441110 - DNA, 290 bp, Homo sapiens
tttgtcagaagatggtatgactaattaaagccacaaacttacacccatcactgacagaatgacaagcctaatatggtttatattactgtgaaagctcaatgagtgaattaatataatctctttttattgcatagaagagtatacaaagcatatagtctcctaacaatccaaacttttgcccccaaagtaaagtcaaacattcaagtaagggagaggagatataggtcaaggttttaatctatacacacaccagagaggctaccaaccyaaagggctcttatatacctaaa

SEQ ID NO: 441111 - DNA, 633 bp, Homo sapiens
ggagtagtggcatgcatctgtgttctcagctactcaggaggctgaggtgggagggtcatttgaccctgggttttaggttgtggtgagccaagatcatgccactgcactctagcctgggtgacagaacaagagaccctgtctcaaaaaatatatatatttcaggaaagatgagatgtcccattttaaagaagaagatctgttaaacagatttgtacatgcgcggcagtagtggcagagagtctgccataatctcttcactctctccattctggcctgctttgagtataccggcttgcagatgccggtctggaccagagggactgaggtgaggacaggaacagagcaaattacctgacccaccagggacctgtacttgagagttgatcccagagctgtgttcagcctaatcasttttttaaagtgaatgtttagggcctgcctgcagagaataacatctctcagtttagacagaggtggtgagcatgtagaatgtaggagctactgagagattgatggagctttatttttcttatcaaaggagcacttactggctatttccacagccaaggggccttcctgtgcatcaaagaggaaggcattgctgctgggaagctggtgggagtcatggcagct

SEQ ID NO: 441112 - DNA, 555 bp, Homo sapiens
tagggcctgcctgcagagaataacatctctcagtttagacagaggtggtgagcatgtagaatgtaggagctactgagagattgatggagctttatttttcttatcaaaggagcacttactggctatttccacagccraggggccttcctgtgcatcaaagaggaaggcattgctgctgggaagctggtgggagtcatggcagctggaatgagtcaaatactgttcatctagtgagtcctccaggacttcatccatttcttcctcctggacttccctcttgagccaggtgaagtaggcaagacaagggattaaaccaaggcagcctggaaccacatagctagttctgatctgaagctcatggaagaggcaccaaaaccaaagggaccatcacatcaaagaggaagtatacagtccacttttgactgggagtaaagtgtgcctagagttagtatagaagtgaaaaaagcaagtgatcagtgcattgacctcataacacacagataaggcagcagactcaacaactactctacaatacgctcagggcacacaggacac

SEQ ID NO: 441113 - DNA, 526 bp, Homo sapiens
caaaccaaaattacaaagactagtcagaaattaagcaggtcccatttcacacattgcacacatgggccctatatgatcagggacataacaccttacatatatgttcagaatrctctgtgagaattattgcaggaggcctcaggtggtgtctttagagaagtggcctggcaggcttgcctgagcccactggacagggtgttcctgatatggtgaatcatcaccagacgtcagctgcctgaagcagagcaaaaagtttaaaatgccttttgttccccagctcaaagaatacttgcctggctgccctttggacttctccagttgtaaccttccttcctgctacaggctggttgccagaccacgactgtttgtcccattgctactcacacacagaacctgctccagtctctgagaggacaaatagccctgtcctacctctactccaaaaccagaggactgcccaggtgccttcaagtctgtccctgttgtgcttcctcagatgttgttgggggtaattctttttttttct

SEQ ID NO: 441114 - DNA, 526 bp, Homo sapiens
caaaccaaaattacaaagactagtcagaaattaagcaggtcccatttcacacattgcacacatgggccctatatgatcagggacataacaccttacatatatgttcagaatgctctgtgagawttattgcaggaggcctcaggtggtgtctttagagaagtggcctggcaggcttgcctgagcccactggacagggtgttcctgatatggtgaatcatcaccagacgtcagctgcctgaagcagagcaaaaagtttaaaatgccttttgttccccagctcaaagaatacttgcctggctgccctttggacttctccagttgtaaccttccttcctgctacaggctggttgccagaccacgactgtttgtcccattgctactcacacacagaacctgctccagtctctgagaggacaaatagccctgtcctacctctactccaaaaccagaggactgcccaggtgccttcaagtctgtccctgttgtgcttcctcagatgttgttgggggtaattctttttttttct

SEQ ID NO: 441115 - DNA, 526 bp, Homo sapiens
caaaccaaaattacaaagactagtcagaaattaagcaggtcccatttcacacattgcacacatgggccctatatgatcagggacataacaccttacatatatgttcagaatgctctgtgagaattattgcaggaggcctcaggtggtgtctttagagaagtggcctggcaggcttgcctgagcccactggacagggtgttcctgatrtggtgaatcatcaccagacgtcagctgcctgaagcagagcaaaaagtttaaaatgccttttgttccccagctcaaagaatacttgcctggctgccctttggacttctccagttgtaaccttccttcctgctacaggctggttgccagaccacgactgtttgtcccattgctactcacacacagaacctgctccagtctctgagaggacaaatagccctgtcctacctctactccaaaaccagaggactgcccaggtgccttcaagtctgtccctgttgtgcttcctcagatgttgttgggggtaattctttttttttct

SEQ ID NO: 441116 - DNA, 493 bp, Homo sapiens
cttacatatatgttcagaatgctctgtgagaattattgcaggaggcctcaggtggtgtctttagagaagtggcctggcaggcttgcctgagcccactggacagggtgttcctgatatggtgaatcatcaccagacgtcagctgcctgaagcagagcaaaaagtttaaaatgccttttgttccccagctcaaagaatacttgcctggctgccctttggacttctccmgttgtaaccttccttcctgctacaggctggttgccagaccacgactgtttgtcccattgctactcacacacagaacctgctccagtctctgagaggacaaatagccctgtcctacctctactccaaaaccagaggactgcccaggtgccttcaagtctgtccctgttgtgcttcctcagatgttgttgggggtaattctttttttttcttctcagtttgttagtgagcattggggttgattctgtgaaaaatattccagtataaatc

SEQ ID NO: 441117 - DNA, 493 bp, Homo sapiens
cttacatatatgttcagaatgctctgtgagaattattgcaggaggcctcaggtggtgtctttagagaagtggcctggcaggcttgcctgagcccactggacagggtgttcctgatatggtgaatcatcaccagacgtcagctgcctgaagcagagcaaaaagtttaaaatgccttttgttccccagctcaaagaatacttgcctggctgccctttggacttctccagttgtaaccttccttcctgctacaggctggttgccagaccacgactgtttgtcccattgctactcacacacagaacctgctccagtctctgagaggacaaatagccctgtcctacctctactccaaaaccagaggactgcccaggtgccttcaagtctgtccctgttstgcttcctcagatgttgttgggggtaattctttttttttcttctcagtttgttagtgagcattggggttgattctgtgaaaaatattccagtataaatc

SEQ ID NO: 441118 - DNA, 493 bp, Homo sapiens
cttacatatatgttcagaatgctctgtgagaattattgcaggaggcctcaggtggtgtctttagagaagtggcctggcaggcttgcctgagcccactggacagggtgttcctgatatggtgaatcatcaccagacgtcagctgcctgaagcagagcaaaaagtttaaaatgccttttgttccccagctcaaagaatacttgcctggctgccctttggacttctccagttgtaaccttccttcctgctacaggctggttgccagaccacgactgtttgtcccattgctactcacacacagaacctgctccagtctctgagaggacaaatagccctgtcctacctctactccaaaaccagaggactgcccaggtgccttcaagtctgtccctgttgtrcttcctcagatgttgttgggggtaattctttttttttcttctcagtttgttagtgagcattggggttgattctgtgaaaaatattccagtataaatc

SEQ ID NO: 441119 - DNA, 552 bp, Homo sapiens
tattgggacccaaaaataaaaaaataaataaccctgaaagagaaatacactcatgaacattaagatactacttcaactgatctgtacagcagctrtggaattatgatttgacccactttacaaatggggaaacagaaattcaagaaggatcaatcacttgcacaaagttagtaaatacagtgctgagactagagcctaggtaatgctgattcttagcccatgggtcttcccattctaacaagctgccttctgtcatactgttctttctgaccacaaagatggaatggagacttctgcttctggccaatttggagtaatggggacctgatttgtcctccaccttaaacaactgagaaactggaaaaagtattttaaactctaccttcaacattggatatagtgcagtactataataaataaaagaggtgagccctatgattgctccagtttgctgcctgagattgtcaactgtagagcagggagggaggacccaggcagagcctggtagtaagtttgaagaagtcagggtggctagacatcacaggacagact

SEQ ID NO: 441120 - DNA, 552 bp, Homo sapiens
tattgggacccaaaaataaaaaaataaataaccctgaaagagaaatacactcatgaacattaagatactacttcaactgatctgtacagcagctgtggaattatgatttgacccactttacaaatggggaaacagaaattcaagaaggatcaatcacttgcacaaagttagtaaatacagtgctgagactagagcctaggtaatgctgattcttagcccatgggtcttcccattctaacaagctgccttctgtcatactgttctttctgaccacaaagatggaatggagacttctgcttctggccaatttggagtaatggrgacctgatttgtcctccaccttaaacaactgagaaactggaaaaagtattttaaactctaccttcaacattggatatagtgcagtactataataaataaaagaggtgagccctatgattgctccagtttgctgcctgagattgtcaactgtagagcagggagggaggacccaggcagagcctggtagtaagtttgaagaagtcagggtggctagacatcacaggacagact

SEQ ID NO: 441121 - DNA, 552 bp, Homo sapiens
tattgggacccaaaaataaaaaaataaataaccctgaaagagaaatacactcatgaacattaagatactacttcaactgatctgtacagcagctgtggaattatgatttgacccactttacaaatggggaaacagaaattcaagaaggatcaatcacttgcacaaagttagtaaatacagtgctgagactagagcctaggtaatgctgattcttagcccatgggtcttcccattctaacaagctgccttctgtcatactgttctttctgaccacaaagatggaatggagacttctgcttctggccaatttggagtaatggggacctgatttgtcctccaccttaaacaactgagaaactggaaaaagtattttaaactctaccttcaacattggatatagtgcagtactataataaataaaagaggtgagccctatrattgctccagtttgctgcctgagattgtcaactgtagagcagggagggaggacccaggcagagcctggtagtaagtttgaagaagtcagggtggctagacatcacaggacagact

SEQ ID NO: 441122 - DNA, 561 bp, Homo sapiens
tccttgtaccatttgctcacagaatctctgtctctggtagtaggcaatgtcagtgttcctgagaaggccctcaaaagacttgactgtgttcttcacatgctgggtgaaaaggtagcagacacctctcccttcctgtgtcttctgtygtaagtgggtcagttcttcagcctgagcctgaattaagggatcatgtatcctaaggtgggaaagaagagtaaaatgtatgagggaatgtagtgaataataggttatagaagtttcagaggagagatctcttagaatccctgtaaggaactcccaagttgaattctttttttctttttttttgagacagggtctcactctgttgcccaagctggagtgcagtgatgtgatctcggttcactgcaacctccacctctgcctccacctcccaggttcaagcaattctcttgcctcagccttccaagtagctgggactacagatgcccaccaccatgccaggataatttatatattttttgtagagatggggttttgctatgttggccaggctagtcttgaactcctgacctgaaatga

SEQ ID NO: 441123 - DNA, 653 bp, Homo sapiens
gtggtggtgtgcacctatactctcaactgctggggaggctgacctaggaggatcacttgaacctgggaggtkgaggttgcagtgagctgagatcacaccactgcactctagcctgggcaacagggtaagactccatctcaaaaaaagaaaaaaagtaaagttctgagtagtaatttcattactctgtggggatttattttttttctaattattgtttaaatatttctcatggtgatatggtttggctctgtgtccccactcaaatctcatgttggattgtaatccaaccagggacctgctggatagtgactggtcatggtggtggatttcccccttgctgttctcatgatagtgagtgagttctcatgaggtctggtcgtttgaaagtgtagcacctccctctttgctctctctctctctcctgctctggccatgtgaagaccatgcctccttcccctttgacttctgcaatgattgtaagttttctgatgcctgcccagaagcagaagcctgtacagcccacagaaccatgagccaattaaacctcttttctttataaatcaccaatctcagatatatgtttatagcagtgtcagagtggactaatacacatgggttccaatgtagagtgtgagctctgtgagtctaaagat

SEQ ID NO: 441124 - DNA, 653 bp, Homo sapiens
gtggtggtgtgcacctatactctcaactgctggggaggctgacctaggaggatcacttgaacctgggaggtggaggttgcagtgagctgagatcacaccactgcactctagcctgggcaacagggtaagactccatctcaaaaaaagaaaaaaagtaaagttctgagtagtaatttcattactctgtggggatttattttttttctaattattgtttaaatatttctcatggtgatatggtttggctctgtgtccccactcaaatctcatgtyggattgtaatccaaccagggacctgctggatagtgactggtcatggtggtggatttcccccttgctgttctcatgatagtgagtgagttctcatgaggtctggtcgtttgaaagtgtagcacctccctctttgctctctctctctctcctgctctggccatgtgaagaccatgcctccttcccctttgacttctgcaatgattgtaagttttctgatgcctgcccagaagcagaagcctgtacagcccacagaaccatgagccaattaaacctcttttctttataaatcaccaatctcagatatatgtttatagcagtgtcagagtggactaatacacatgggttccaatgtagagtgtgagctctgtgagtctaaagat

SEQ ID NO: 441125 - DNA, 613 bp, Homo sapiens
gtgagtgagttctcatgaggtctggtcgtttgaaagtgtagcacctccctctttgctctctctctctctcctgctctggccatgtgaagaccatgcctccttcccctttgacttctgcaatgattgtaagttttctgakgcctgcccagaagcagaagcctgtacagcccacagaaccatgagccaattaaacctcttttctttataaatcaccaatctcagatatatgtttatagcagtgtcagagtggactaatacacatgggttccaatgtagagtgtgagctctgtgagtctaaagatagtgctacctattacccaacttacagcacccggtagtatgtacacatacaagtagttattcagttaatgtttagaaccatgtaatcccagagctagactgaacatttacagtcatctaacccatctaatgcttgaattttctccccaccagtcttctaagtagttatctgcaggtcctctttcaaactctattccttagagttactagaaagtgtcaggggaagtaaagacacatactggggagaaacaggggctccagacctatcccgccttcaatcaaatatctctgctttggtgagttttacaaattt

SEQ ID NO: 441126 - DNA, 613 bp, Homo sapiens
gtgagtgagttctcatgaggtctggtcgtttgaaagtgtagcacctccctctttgctctctctctctctcctgctctggccatgtgaagaccatgcctccttcccctttgacttctgcaatgattgtaagttttctgatgcctgcccagaagcagaagcctgtacagcccacagaaccatgagccaattaaacctcttttctttataaatcaccaatctcagatatatgtttatagcagtgtcagagtggactaatacacatgggttccaatgtagagtgtgagctctgtgagtctaaagatagtgctacctattacccaacttacagcacccggtagtatgtacmcatacaagtagttattcagttaatgtttagaaccatgtaatcccagagctagactgaacatttacagtcatctaacccatctaatgcttgaattttctccccaccagtcttctaagtagttatctgcaggtcctctttcaaactctattccttagagttactagaaagtgtcaggggaagtaaagacacatactggggagaaacaggggctccagacctatcccgccttcaatcaaatatctctgctttggtgagttttacaaattt

SEQ ID NO: 441127 - DNA, 613 bp, Homo sapiens
gtgagtgagttctcatgaggtctggtcgtttgaaagtgtagcacctccctctttgctctctctctctctcctgctctggccatgtgaagaccatgcctccttcccctttgacttctgcaatgattgtaagttttctgatgcctgcccagaagcagaagcctgtacagcccacagaaccatgagccaattaaacctcttttctttataaatcaccaatctcagatatatgtttatagcagtgtcagagtggactaatacacatgggttccaatgtagagtgtgagctctgtgagtctaaagatagtgctacctattacccaacttacagcacccggtagtatgtacacatacaagtagttattcagttaatgtttagaaccatgtaatcccagagctagactgaacatttacagtcatctaacccatctaatgcttgaattttctccccaccagtcttctaagtagttatctgcaggtcctctttcaaactctattycttagagttactagaaagtgtcaggggaagtaaagacacatactggggagaaacaggggctccagacctatcccgccttcaatcaaatatctctgctttggtgagttttacaaattt

SEQ ID NO: 441128 - DNA, 613 bp, Homo sapiens
gtgagtgagttctcatgaggtctggtcgtttgaaagtgtagcacctccctctttgctctctctctctctcctgctctggccatgtgaagaccatgcctccttcccctttgacttctgcaatgattgtaagttttctgatgcctgcccagaagcagaagcctgtacagcccacagaaccatgagccaattaaacctcttttctttataaatcaccaatctcagatatatgtttatagcagtgtcagagtggactaatacacatgggttccaatgtagagtgtgagctctgtgagtctaaagatagtgctacctattacccaacttacagcacccggtagtatgtacacatacaagtagttattcagttaatgtttagaaccatgtaatcccagagctagactgaacatttacagtcatctaacccatctaatgcttgaattttctccccaccagtcttctaagtagttatctgcaggtcctctttcaaactctattccttagagttactagaaagtgtcaggggaagtaaagacacatactggggagaaacaggggctccagacctatcccrccttcaatcaaatatctctgctttggtgagttttacaaattt

SEQ ID NO: 441129 - DNA, 397 bp, Homo sapiens
gttcacatctccacatatctgtgactcagttgagaatagstagttttaagttccttcaaggcagatagggtatactattacttctatcacccctgatgctgttggcacagtgctttgcaaatgggcgctcttaaaaaagtttaaatcgaatcctgagatgttttaaccaacagtgatgttacatgtttgtagaatctgatattcattgctgagaggggaaagacagtttcacgcctaaaccgaggttttagtctctattcctcactacactcgccctgcaaactttacacctttgtgcctcagtttttctgtccttggcaaattgagagtaaaaggcccacttctacctttctgggagtgtagttagcataaaattaattttgatagagaataaagt

SEQ ID NO: 441130 - DNA, 397 bp, Homo sapiens
gttcacatctccacatatctgtgactcagttgagaatagctagttttaagttccttcaaggcagatagggtatactattacttctwtcacccctgatgctgttggcacagtgctttgcaaatgggcgctcttaaaaaagtttaaatcgaatcctgagatgttttaaccaacagtgatgttacatgtttgtagaatctgatattcattgctgagaggggaaagacagtttcacgcctaaaccgaggttttagtctctattcctcactacactcgccctgcaaactttacacctttgtgcctcagtttttctgtccttggcaaattgagagtaaaaggcccacttctacctttctgggagtgtagttagcataaaattaattttgatagagaataaagt

SEQ ID NO: 441131 - DNA, 397 bp, Homo sapiens
gttcacatctccacatatctgtgactcagttgagaatagctagttttaagttccttcaaggcagatagggtatactattacttctatcayccctgatgctgttggcacagtgctttgcaaatgggcgctcttaaaaaagtttaaatcgaatcctgagatgttttaaccaacagtgatgttacatgtttgtagaatctgatattcattgctgagaggggaaagacagtttcacgcctaaaccgaggttttagtctctattcctcactacactcgccctgcaaactttacacctttgtgcctcagtttttctgtccttggcaaattgagagtaaaaggcccacttctacctttctgggagtgtagttagcataaaattaattttgatagagaataaagt

SEQ ID NO: 441132 - DNA, 397 bp, Homo sapiens
gttcacatctccacatatctgtgactcagttgagaatagctagttttaagttccttcaaggcagatagggtatactattacttctatcacccctgatgctgttggcacagtgctttgcaaatgggcgctcttaaaaaagtttaaatcgaatcctgagatgttttaaccaacagtgatgttacatgtttgtagaatctgatattcattgctgagaggggaaagacagtttcacgcctaaaccraggttttagtctctattcctcactacactcgccctgcaaactttacacctttgtgcctcagtttttctgtccttggcaaattgagagtaaaaggcccacttctacctttctgggagtgtagttagcataaaattaattttgatagagaataaagt

SEQ ID NO: 441133 - DNA, 568 bp, Homo sapiens
ataaaaccttcattatcacattattctcaatccagcattttctcagcccctgattttcatgttagttcagcattcttacatctttacagattttcatctaagactacatttctactgttttatataatcagcccccctaagatcaacatgtccacattttttggcaaagacaaagcctactgatttcaggatcattattttcctttttcaaaagcacaaacccaaactgagaaataaatcaagagaaattctccttttttctatgctaatttagaagtggagtctttatttcttttcaaacccaaagagaatcagacatacaatatgaatttatytactttcgcttgctcagactgagaggaaagattaatattttcaggctgttagtcaaaactgttcattcaaatattatttaataaaatccaagaaccagctaaaaagtcgcttaagctaagaaaccttcaccagcctcatgggaaattgtgtacagttttctactagaatagcctataaatgcttactgaaaatgtctaagttcatatcttggtaactaacattttaattcaat

SEQ ID NO: 441134 - DNA, 528 bp, Homo sapiens
agagcctagtaatgagtatctggtaccccagtatcctctcccacagaatctgtacagctctccgtttatgacagtttaaacttaatttaaattatcaaacagacactttcctcaaacatataaatgatgaggcagttcattcaggctgtatgtataaagttgttccagccacctttttctaacggcttctctatatcttttacatggagacaatgagagatttgcttaggacaatttgactgtaatttagaagtaggaaatgggaagtatttgtatcttctttgcctaactcacattagttactcaagtaagcatttcttccgttattgcattttcctgattacaagttttatgttttctctaaaacacatatcaaaagaaatgtcctaagcactatgcagggggaagccatgacatttatccaccactgtcagcaaaaacatgaacttagccctcaacagaatatttcacttcattctagtgtyacctctgcgtcacctgcactggagtcaccacttgcctgttggg

SEQ ID NO: 441135 - DNA, 556 bp, Homo sapiens
tgggctccccttgctctctccttggctttggtaaccactggccccagggactcagcctgctttcctatcyatcccctcagtagctgtcaccatgcaggttaccccttctgtttcttctaccactaactccatgtctgactgcaagtgaaaggaacagaagcccaaacctttgggttttaaggagtttattgctaatctgtaaacagaaagagacaggagataagcatgacaaaatatagggaagaaatgacttttgcctaacttttccaaattgtgtacaattgaagcctctgctttatagctcttagcacacctctcaaataagaaggcagtactgggaaggctctgaacctgtggcagaaccactgatagctgtggagctattccaaggagtctgggaatcagggggattatcaagatcattgttagaataaattaatcttactgtatatatagcagaagttttcaagcatatgtaaatgctactaataaccaaataattacaccttgtttttctttaaactgtaactctcaagtatgtctctacataattttt

SEQ ID NO: 441136 - DNA, 556 bp, Homo sapiens
tgggctccccttgctctctccttggctttggtaaccactggccccagggactcagcctgctttcctatccatcccctcagtagctgtcaccatgcaggttaccccttctgtttcttctaccactaactccatgtctgactgcaagtgaaaggaacagaagcccaaacctttgggttttaaggagtttattgctaatctgtaaacagaaagagacaggagataagcatgacaaaatatagggaagaaatgacttttgcctaacttttccaaattgtgtacaattgaagcytctgctttatagctcttagcacacctctcaaataagaaggcagtactgggaaggctctgaacctgtggcagaaccactgatagctgtggagctattccaaggagtctgggaatcagggggattatcaagatcattgttagaataaattaatcttactgtatatatagcagaagttttcaagcatatgtaaatgctactaataaccaaataattacaccttgtttttctttaaactgtaactctcaagtatgtctctacataattttt

SEQ ID NO: 441137 - DNA, 556 bp, Homo sapiens
tgggctccccttgctctctccttggctttggtaaccactggccccagggactcagcctgctttcctatccatcccctcagtagctgtcaccatgcaggttaccccttctgtttcttctaccactaactccatgtctgactgcaagtgaaaggaacagaagcccaaacctttgggttttaaggagtttattgctaatctgtaaacagaaagagacaggagataagcatgacaaaatatagggaagaaatgacttttgcctaacttttccaaattgtgtacaattgaagcctctgctttatagctcttagcacacctctcaaataagaaggcagtactgggaaggctctgaacctgtggcagaaccacygatagctgtggagctattccaaggagtctgggaatcagggggattatcaagatcattgttagaataaattaatcttactgtatatatagcagaagttttcaagcatatgtaaatgctactaataaccaaataattacaccttgtttttctttaaactgtaactctcaagtatgtctctacataattttt

SEQ ID NO: 441138 - DNA, 556 bp, Homo sapiens
tgggctccccttgctctctccttggctttggtaaccactggccccagggactcagcctgctttcctatccatcccctcagtagctgtcaccatgcaggttaccccttctgtttcttctaccactaactccatgtctgactgcaagtgaaaggaacagaagcccaaacctttgggttttaaggagtttattgctaatctgtaaacagaaagagacaggagataagcatgacaaaatatagggaagaaatgacttttgcctaacttttccaaattgtgtacaattgaagcctctgctttatagctcttagcacacctctcaaataagaaggcagtactgggaaggctctgaacctgtggcagaaccactgatagctgtggagctattccaaggagtctgggaatcaggggrattatcaagatcattgttagaataaattaatcttactgtatatatagcagaagttttcaagcatatgtaaatgctactaataaccaaataattacaccttgtttttctttaaactgtaactctcaagtatgtctctacataattttt

SEQ ID NO: 441139 - DNA, 584 bp, Homo sapiens
ggcctgacacagaactcagagccagaaagaaatgatcgccccagctacgtgctcttgaggagtaccgctgtgggttgaatggggaggaccaaggcggctgaggtggctaagctttgctcctgctccccacatcctgctggcagcccccaaaagtgcctgagtgcacctcttgtccttgcacccttgaagcaccaaacagaacagagcacacactgtctcgagctgggtgggggccgggtgctgctgggctgcacaggcggcttctccaaggctttctgtgacaattgcccagagcgaccacacggaccaaaatttgcccagaaattcttcagcgcagtgaaagcctgcaagcactgggtggtaaatgacaggactggagaccacagaaagccacaggaaaattcttgtcagggccagcagcagacacgaggagtgagaggctgtgaatggctgcctggttgggagggatgagcaaagccaccggagctcagcgaggtggtatggaaagcaaayggagaaacgatggaacaatgcctggaatccccacatggtggctggcagggaaaggggaactgtgcaaccag

SEQ ID NO: 441140 - DNA, 619 bp, Homo sapiens
ttaattattgccagcacttagcacccttcttcagcaagagacctaaattgttacatttcataaaatttgaaaagtaaaggtaaatgctaaggaactcaatgattgaagagaggcaaatacacttaaatttaaagaagaaactttatccataagcctaatcttaattccctaaaaagttgtagaacagattataaaacagtttgtgaacactcaggaaaacatacagtaatcattaggacccaacatgggatcactgactactaaacaaatatttaatgaacagagagagagattcttgcatggagagagattcaagctccctacatggagcttgagatttcctacacyaacatataaacaatatttcttccagtgggaactaggtcacaatacactgtggctaccatctattgtctttaagaaaggtactgccaaatctgtatgccccttcccagataaatgggtgtatctgtaggagacaaagtaggagaacatgtaatgtttacaaacctcctatttaagtcctctatttagaattcatgattgcttgcttttaaatgattctatttaaaagtcaaagagaattatattacttagtatccaaaacaaggcaaaaaaa

SEQ ID NO: 441141 - DNA, 544 bp, Homo sapiens
attcgcaacatcaatgctttacctagttaaataaaaaagtacttgcaaagaatgtaacaaccctggtgattctctaaataaccctggttattcttcctgccttcttgtttactcttgtgggtcaatttcttcagtgactactgcccacaagttcacctaggacccccatcccatggactgaaacctttactaaagatgctgggaaagcaatgttgaaaatataaaaaagtatcaggaaaataaactggagtttgtctgtggcttgaaacaaaaagaagagtggaacatattgactgacattggcatgggatccatgcttgtttttattttaatactctaattaacacagttggtgtctgactggcaaaattctcctgtcactggagtgaaagtaaaatggatcactttcaccaccactctcattgacaaaaatactcaagggagataattcagtacaaattgctccttagccaatcatgtctgaatactattaagcatctacagttggtctcatagacygtaagcaagacataatctcctcttt

SEQ ID NO: 441142 - DNA, 603 bp, Homo sapiens
ataggaaggggggccttagagcaggaagccgtttactatctctgttgttgtaggcatgacttgttaaacctcttcatttctgcttcgttttaaaattcctgagaatatacctactgtacagggttgtcatcagattaaatgaggtgatagaactgggtacagtggtgcaggcttatagtcccagctatttgaggcaggaggatcccttgmgctcagaggttcgaatccttcctcctcaatatagccagactatctccaaaaaggaaaaaaaattaaaaaagattagatgaggtgttataaatgcaattgctgtgcaattataacaatatcaagtattattattataaatgggttactcagtctttattaatgcttccttctttacttgaaacagctggtgaaaacaaaatgggccattatttggcgaagggatgggttcctatcactttgtgttagtgatgaatgattagtgattagactatgaatcctcagctgtgtaaacaatgaaacaaatattgttggattttttttaaccagctctgtgaaggttagtaactggatcctttgatttcctaactagtgttggacttcaatttgctaaaa

SEQ ID NO: 441143 - DNA, 523 bp, Homo sapiens
tgcgatttaaatctgatgattttagaattacttgatatggcttcagtaatcacacagcatgtgctactgtaagatataggctaaacatacacatccatggkttgaaaaaggtattaagaaaaatttgtgggcataagatgccaaattaatgggaaatgaaatatagctgatatggatacacaactttgagattagcatcatggtggataagttttattctcttccaattacatcttggattcattttcagataattgatggctgtgtggattattttattattcaagatagcatttcttttatgaaaaatgtttaattttttcccagtagttaataattatatcttacttatttggttctttgcttggtttgctactatcaccaatagcaggaaattacagtggtgaagaaaatgatgaaaaagataatgaaatgaatgtaacaataaaaaaaaaaaaaacgctgtcctcttgctcccttttgaactggctgttttctatgatctctatcctgggatctctct

SEQ ID NO: 441144 - DNA, 612 bp, Homo sapiens
cctaagccttaatgtcaacattcatccacacatcagcaattaaaataaccaggtgtcctataaaggtcataatgtccaaattaaattttactcaggtaaaaacagtatgacctatgaaattcttcctgcaatgcatcactattctgtttgatcctgtcgtacaaatcaatgtctcttacagcagtattataacactgtagaccccacaggcaatatgccgtcagtttaataggatcactgaaaaactaaagcagctgtgaaagattgctctaagtatagcaatcatgtgcttgtcattttgttcagtggaggaaaaatccaaatttgggtaggcattggtatttaagaaaaccactgctaaatcttttctcataagtaccttagggacaataagatttgacatatagcatgtaaacaaaagtacacagcagctgttagtttagttttgtttggataaaaatacactgatataaatcaagcaacacaggagacagtgtgttctccgtcattcaatcttccctgcagaccatgcttttgaatggtgtctgatggttgctgtgggaccaggagctttccaactattkcgtaaagctggataaggaacattaaaat

SEQ ID NO: 441145 - DNA, 619 bp, Homo sapiens
ttaattattgccagcacttagcacccttcttcagcaagagacctaaattgttacatttcataaaatttgaaaagtaaaggtaaatgctaaggaactcaatgattgargagaggcaaatacacttaaatttaaagaagaaactttatccataagcctaatcttaattccctaaaaagttgtagaacagattataaaacagtttgtgaacactcaggaaaacatacagtaatcattaggacccaacatgggatcactgactactaaacaaatatttaatgaacagagagagagattcttgcatggagagagattcaagctccctacatggagcttgagatttcctacaccaacatataaacaatatttcttccagtgggaactaggtcacaatacactgtggctaccatctattgtctttaagaaaggtactgccaaatctgtatgccccttcccagataaatgggtgtatctgtaggagacaaagtaggagaacatgtaatgtttacaaacctcctatttaagtcctctatttagaattcatgattgcttgcttttaaatgattctatttaaaagtcaaagagaattatattacttagtatccaaaacaaggcaaaaaaa

SEQ ID NO: 441146 - DNA, 577 bp, Homo sapiens
attaagaagaaggcagaaagggcagacttgttagcttgtcttaaaaaagctactaaatgagtaataatttgccactgccttatttattacaaaacagaaatgtctcatgacttttttatgtataccatactttaatagatttcatacaccagaattcaggtcatgaatgactgacagaatattttgttgggcagtcctgatttaaaactaagactagcttctggttaaatgaatatgttcagtttttgaattttaatagtaattcgaattcagtaaatgctatcactgtttaccccttctaaagctatgattagacttcattaataattttcaccttttcacaaagatggtgaatgccatcttaaaacttactggtgatyggttttatatttagatgtatgtaactggttatgtgaatatatttaaatactggggaaattccttcactgtctcagaaccaagcaagattcacctgtgttttgtgttcatttgcctcttaaaggcaagggttgaagataaataaggtagcaacgtctactttatatttttggccctaactatgccaatctaattagaa

SEQ ID NO: 441147 - DNA, 669 bp, Homo sapiens
tacagcatgatatgggaatgtgagttaaaggctttgaactctcaatatctagggtgtaggtcaaaatcaaggccttttataaaaggacccccaagtggccttagtctgctccgttccaaaagttgtattttaaaatatgttcgtgacccagggctagtcttaactttaagctgccataacttatttaaagaaagttcatagaaaagttcagggaaagggtgacaacattttgattggcacaatagatgggatgtttgtaattttaatcaaatgtaaattgaagacatacttcaaatgatatgtcagactagtgttactgagttaaaatctaatgacaaccactgtcattattagttaaatatagccatcatgcctatagcaataaatgatgacacttaagaacatgcagaaacaaagagcgcaagtatttagagaaaagggagtgactagaaactcagttgaatgcaggaatgtgacctggatttaatctatttaccaaacatagaagcaattgtattttgggtagatgatataattgaatatagcagtatgttttcttactgtcggagcatttgtattttataaactcatcttgcattcatgaaatgawgtgcttattcatatttaatgtcattatctatacctacttgacagtcagagtgttgtgtt

SEQ ID NO: 441148 - DNA, 530 bp, Homo sapiens
aaatctcttaatatatgtgaagtcttggccaacatacagcaaccaaggagtcaaaagtcatgtatgagtccttagggataatctttaagcaggctcttgccactgtcatgattggaatagcaaaggaaaagcacctgaccttctaaacaaagaagaaacaaatcagtaaagcttagatattgggacttaataacaaaagataaccttaagtagctctcgggatataccaggactttatttgtgttatctcatttaatcctcatgataatatcttgaggtagactggtagtattaatattctcattttttaagatgagaaaatcaaagtgtaggaagctttagtaactcattcaagtctccccwgttaatcagagatgggatgtgaatgcatgctatcaattacttctgcttatcagtggtcaatgatattttctatcaggattagcctacatccaataaattttgaaagatgaaggaaaagatgagcagaaaaaaaatgcaggagttccttattttttaacaaagtgaag

SEQ ID NO: 441149 - DNA, 536 bp, Homo sapiens
accatagccattgtgctccatctagtgggaaggcatgtaggttttcctgcaatggcttacttttcaagcaatagacaaggtccttcatggtctgatacttgcttacttactgtccttatctcatgtcctgctctccttccacccttttccctccaatctccacacaaggaactcatcccattctcgagcaggtcatgcttcaagttcctcactccatctaggtctyagcacaacctgttatgagatactgtctcatagaacagagtcaaccaccaagccctttcagccttcaggtcttagcttagttgtgacttccttcagaaggattcccaaaacacccccacaccccaaatctgagaggataacaagaatctacctcagaggagttttgtgggcactaagtgaaattatgcatgtaaaacatggagcataacaccgagtacataaatgtttaaaacctgccagctctcatgatcatcctgagtcccctccatgaaaccaatacccccttaacaaagcctttccccaccctacag

SEQ ID NO: 441150 - DNA, 536 bp, Homo sapiens
accatagccattgtgctccatctagtgggaaggcatgtaggttttcctgcaatggcttacttttcaagcaatagacaaggtccttcatggtctgatacttgcttacttactgtccttatctcatgtcctgctctccttccacccttttccctccaatctccacacaaggaactcatcccattctcgagcaggtcatgcttcaagttcctcactccatctaggtcttagcacaacctgttatgagatactgtctcatagaacagagtcaaccaccaagccctttcagccttcaggtcttagcttagttgtgacttccttcagaaggattcccaaaacacccccacaccccaaatctgagaggataacaagaatctacctcagaggagttttgtgggcactaagtgaaattatgcatgtaaaacatggagcataacacckagtacataaatgtttaaaacctgccagctctcatgatcatcctgagtcccctccatgaaaccaatacccccttaacaaagcctttccccaccctacag

SEQ ID NO: 441151 - DNA, 285 bp, Homo sapiens
tagtcccacacaaaattggctcaggtccccaaggacttttcagcttacttgaagggacartggaattaatctacaaattacaaaaggttttggttatctcttgctgtgcggtgaacctctcagggttctgcaggttgactgggctcagtgggcggttcttctgcaggtcttgctcagagtatctcatgtggctgcaatcataaggtgcctggtgctggatttatctgcaggctggacttggatgctggcatgagggagcctcagtggtcactctttgtggtcctt

SEQ ID NO: 441152 - DNA, 285 bp, Homo sapiens
tagtcccacacaaaattggctcaggtccccaaggacttttcagcttacttgaagggacaawggaattaatctacaaattacaaaaggttttggttatctcttgctgtgcggtgaacctctcagggttctgcaggttgactgggctcagtgggcggttcttctgcaggtcttgctcagagtatctcatgtggctgcaatcataaggtgcctggtgctggatttatctgcaggctggacttggatgctggcatgagggagcctcagtggtcactctttgtggtcctt

SEQ ID NO: 441153 - DNA, 626 bp, Homo sapiens
gttagaatgtgtcctatagctgtttggaaggcagaatcataagcaatgagcttgcacatttagctgagcagacttccaatcaaagcattcaagactcagcttggtttctttttcctgcttatagkaaatgcaagaggaaagagataaattgagggtataataaaaaatataaagaatttaaaagtacaaaaaatagataaactgagggaagaactgttgtgctaaaaggaaccaagacttgaggatttgggaaattctcagactatttagattggaaaaaaccaaaatgctaaaaccaggagattcactgttaggaaagcgtgttctgtagagaatgccaagggtgtggcatgtcttgcaaatttccctgctgccaaagagattacacatgggactcacgaatctcctcaatcatctcacagaagtgaggaagagagaagaaattaccaaggaaagatctgtggagaaacttcatctaatgccatgaattccatcatacatgcagaaattccacaaggattttagaatgttctaccagcataaacactgccagcttggactagaaagtttagggaccagacaaaatccctcccaaaattttagaagcaggaaataggctgataaaa

SEQ ID NO: 441154 - DNA, 626 bp, Homo sapiens
gttagaatgtgtcctatagctgtttggaaggcagaatcataagcaatgagcttgcacatttagctgagcagacttccaatcaaagcattcaagactcagcttggtttctttttcctgcttataggaaatgcaagaggaaagagataaattgagggtataataaaaaatataaagaatttaaaagtacaaaaaatagataaactgagggaagaactgttgtgctaaaaggaaccaagacttgakgatttgggaaattctcagactatttagattggaaaaaaccaaaatgctaaaaccaggagattcactgttaggaaagcgtgttctgtagagaatgccaagggtgtggcatgtcttgcaaatttccctgctgccaaagagattacacatgggactcacgaatctcctcaatcatctcacagaagtgaggaagagagaagaaattaccaaggaaagatctgtggagaaacttcatctaatgccatgaattccatcatacatgcagaaattccacaaggattttagaatgttctaccagcataaacactgccagcttggactagaaagtttagggaccagacaaaatccctcccaaaattttagaagcaggaaataggctgataaaa

SEQ ID NO: 441155 - DNA, 626 bp, Homo sapiens
gttagaatgtgtcctatagctgtttggaaggcagaatcataagcaatgagcttgcacatttagctgagcagacttccaatcaaagcattcaagactcagcttggtttctttttcctgcttataggaaatgcaagaggaaagagataaattgagggtataataaaaaatataaagaatttaaaagtacaaaaaatagataaactgagggaagaactgttgtgctaaaaggaaccaagacttgaggatttgggaaattctcagactatttagattggaaaaaaccaaaatgctaaaaccaggagattcactgttaggaaagcgtgttctgtagagaatgccaagggtgtggcatgtcttgcaaatttccctrctgccaaagagattacacatgggactcacgaatctcctcaatcatctcacagaagtgaggaagagagaagaaattaccaaggaaagatctgtggagaaacttcatctaatgccatgaattccatcatacatgcagaaattccacaaggattttagaatgttctaccagcataaacactgccagcttggactagaaagtttagggaccagacaaaatccctcccaaaattttagaagcaggaaataggctgataaaa

SEQ ID NO: 441156 - DNA, 448 bp, Homo sapiens
gaaatggaagatttacaaccaataccagagaaatcattcaaagctactatgaacacctttatgcacataaactagaaaacctagaggagatggatagattcctggaaatatacaacacgcctagattaaaccaggaggaaataaaaactctgaacagaccaataacaagtagcaagattgaaacagaaattaaaaaattgccaataaaaaaagcccaggaccagatggattcacagytgaattttatcagacattcaaagaagaacagataccaatcctactgaaagtattccaaaagagagagaaagagggaatcctccctaaatcattctatgaggttagtatcaccctaataccaaaaacaggaaaggacataacaaaaaaaggaaactacagactggaatacctgatgaacatagatgcaaaaatccttaacaaaatactagct

SEQ ID NO: 441157 - DNA, 557 bp, Homo sapiens
aatggtgctgggaaaactggatatccataggcagaataatgaaactgggtccttacctctcaccatatacaaaatgcactccgaatgggtgcattcaacattataaaattactagaagaaaactcaggataaatgcttcagaacattggtctagacaatgattttatggctaagacttcgaaagcacaggcaaaaacccccaaatagaccattgagactacagyggaataaaaacctgcaaacaaagaaaacaaccaacagagcaaagaggcaatctgaagaacaggtataagtattttcgaatgagtcatccaacaagggactaacatccaggatatacaagaatctcaaacagcagtaaaaaacaaataatctaattaaagattaaatcaaggatctgaagagacatttgtcaaaagaacatgtacaaatggctaacaaatgggtgaaaaaatatccaacatcactaattatcaggaaaatgcaaatcaaaaccactatgtgataccatctcacatgtgtcagaatggctatcactgaaaagtaaaaaataacag

SEQ ID NO: 441158 - DNA, 618 bp, Homo sapiens
aagcctctccttaggatgaggccatcatgagagtcactgcttgaccactgcacacagatggagttgaatttaaaacatgactttatccagtggccaaaaatgccaccaccaccactccccccacaactatatggacacacaccaatggttttaaaatattctmtacttgccaagatacatatggttggattttaaatatatatacacatacagatatgtatacgcacacatatttgagaatgactgaaagaaaatacctgagaattccttttccttcgagccagtgctatctccttttgtttgcaaaggtgattggtcagaatttcatcttgtaatattctggcgttctgttcccgagaaagttgcctctgggtgtcatttagctcttgtacaacctagaaatacattagatttttggtctaataaacattgaaaaagaagtctaaaacattaagagcagaacctttaaaaaaactatttaataagtagcctattaaaacataaaaacctttttccttgaagaattacacagctttaatggtataagtaacagctaaattcatcagagtaaaaacatttttttaaatacaagcagatatagtatggtgaggtaaaatt

SEQ ID NO: 441159 - DNA, 618 bp, Homo sapiens
aagcctctccttaggatgaggccatcatgagagtcactgcttgaccactgcacacagatggagttgaatttaaaacatgactttatccagtggccaaaaatgccaccaccaccactccccccacaactatatggacacacaccaatggttttaaaatattctctacttgccaagatacatatggttggattttaaatatatatacacatacagatatgtatacgcacacatatttgagaatgacygaaagaaaatacctgagaattccttttccttcgagccagtgctatctccttttgtttgcaaaggtgattggtcagaatttcatcttgtaatattctggcgttctgttcccgagaaagttgcctctgggtgtcatttagctcttgtacaacctagaaatacattagatttttggtctaataaacattgaaaaagaagtctaaaacattaagagcagaacctttaaaaaaactatttaataagtagcctattaaaacataaaaacctttttccttgaagaattacacagctttaatggtataagtaacagctaaattcatcagagtaaaaacatttttttaaatacaagcagatatagtatggtgaggtaaaatt

SEQ ID NO: 441160 - DNA, 499 bp, Homo sapiens
aaaatgttctggaaactctcagcaatagaatcaaacaagcagaagaaagaatttcagagctcgaagacaaagttattgaattaacccaatccaacaaagaccacraaaaaagaataagaaaaaatgaacaaagcctccaagaagtttgggattatgttaagtgaccaaacctaagaatgattggtgttcctgaggaagaagagaaatctacaagtttggaaaacatattttgggaaataatcagggaacacttccccagccttgctagagacctagatattcaaataaaataagctaaaaggacatctgggaaattcatcataaaaagatcatcacctaggcacactgtcatcaggttatctaaagtcaagatgaaggaaataatcctaagagctgtgaggcaaaagcaccaggtaacctataaagaaaaatctatcagattaacagatttctcaccagaaactctataagctagcagtgattggggccctatcttcag

SEQ ID NO: 441161 - DNA, 605 bp, Homo sapiens
aaactctataagctagcagtgattggggccctatcttcagcttccttaaacaaaacaattatcagccaagaattttgtataaggtggaccagatggctctcaccttcccatgtctaaggtggaccagatggctattaccttgccgtgtctaagttggatcagatggctctcgccttgcagcttcataaatgaagggaagatgtagtctttttcagacaaacaaatgctgagaaaattcaccactaccaacccagcactacaagaactgtaaaaggagctctaaattttgaaacaaatcctggaaacacataaaaacagaaactctttaaagcataaatctcccagaacaaggtcgactagatggctctcaccttgccatgtctaaggtcgaccagatggctctcgccttgccatgcytaaggttgaccagctggctcttgccttgtcatggctgaggttgaccagatggctcttgccttgccatgcctaaaattgaccagatggctctcaccttgctatgcctaaggtcgaccagatggctctcaccttgccatgtctaaggttgaccagatggcttttgtgtgcctatgtctaaggtcaaccag

SEQ ID NO: 441162 - DNA, 584 bp, Homo sapiens
ggatatagcaaaggaggtgctaagaggaaagtttatagcctaaatgcctacatcagaaagtctgaaaaagcacaaatataccatcgaacatcacacctcaaggaactagagaaataagaacaaatcgaagtcaaacccagtagaagaaaggaaataaccaagatcagagcagaactaaatgaaattgaaacaaacaaacaaacaaaaatcagaaagataaatgaaacagaaagctgatwgtttgaaaagataaacaaaattcatagaccattagcaagattaataaagaaaagaagagagaaattccaaataagctcaattagaaaagaaatgagagatattacaaacaacaccacagaaatacaaaagatcattcaaggctactatgaacacctttatgcacataaaccagaaagtaaagaagatggatatattcctggatagacaaaaccctcctggcttaaataagaaagaaatagataacctgaacaggccaataacaagcagcaatattaaaatagtaataaaaaaattaccaacaaaaatgtccaggaccagatagatttacagttgaattctaccag

SEQ ID NO: 441163 - DNA, 476 bp, Homo sapiens
ctggtcgacctagacatggcacggcaaggatgatctggttgaccttagacatagcaaggcgagagtcatctggtcaaccttagacatagggagatgagagccatctggtcgaccttagacatgggaatgtgacagccatctggttgaccttagacacagcaaggcaagagccatctggttgaccttagatatgggaaggtgacagccatctggtccaccatagacatgggaaggcgagagccatctcatcgatcttagacatgggaatgcaacagccatcttgtcaaccttagacatggcaaggtgagagccatctggtccaccttagacatggcaaggggagagccatctggttaaccttagacttagaaaggcgagagccatctgatcgaccttactcagaataaggcaacgtcatctgkttgaccttagacataggaaggcaagggccatctggttgccttagacatggcaag

SEQ ID NO: 441164 - DNA, 619 bp, Homo sapiens
gtcaacattttacagcattcttcaaaggaaatcatgattcccagaatagaagaatataggaaagtgtccaatgccccaattttaagctctgccagccacttctttagtgagactccaaataagtcctagacctgcacatcaacccataacactgggttgatgatatctaacagttgcacagttttacaagatgctaagcattttcctaagaaagcaccctcacatgaacataaaaacaccttaaaatataaaatactatacacatataaaacattgctattattgcatctatacagaattttctccaatttgaattgttttagggagatgaccaattaactggcctgagttccacaaatgatttgcctgtctgtaaatcatgttgttttaggtcagtagttcttaatctcggcttatctgtccctcttcaaacaggggagttaaatatttaaycggggagctttaaaaacctctgatgactggctctcctactctctcctgcccccatattccaagaatattggactggggatttcaaaagctcttctgtggggatctaacatgcagccagtgtggagaactactgtgttaggtgagggtaagacttgcctttgtaagc

SEQ ID NO: 441165 - DNA, 619 bp, Homo sapiens
gtcaacattttacagcattcttcaaaggaaatcatgattcccagaatagaagaatataggaaagtgtccaatgccccaattttaagctctgccagccacttctttagtgagactccaaataagtcctagacctgcacatcaacccataacactgggttgatgatatctaacagttgcacagttttacaagatgctaagcattttcctaagaaagcaccctcacatgaacataaaaacaccttaaaatataaaatactatacacatataaaacattgctattattgcatctatacagaattttctccaatttgaattgttttagggagatgaccaattaactggcctgagttccacaaatgatttgcctgtctgtaaatcatgttgttttaggtcagtagttcttaatctcggcttatctgtccctcttcaaacaggggagttaaatatttaaccggggagctttaaaaacctctgatgactggctctcctactctctcctgcccccatattccaagaatattggactggggatttcaaaasctcttctgtggggatctaacatgcagccagtgtggagaactactgtgttaggtgagggtaagacttgcctttgtaagc

SEQ ID NO: 441166 - DNA, 487 bp, Homo sapiens
tcccccaaaataccacctattctaatttatattattctaaatatttttctcttatttttctattttattgagtggatttcctatcaattgccataaatttttaatggaataagataaagtataaataaaaacttaaaaaaaagtggctacctttggatttaaagtgaaaaatgtgatacraccaggatagtatatcacatggagatctaacactatgactaacaaacctattgggtgatgtgaattaacaatctggttcagaggaaatcaagtatttaagctgaggtctgcttatacacatggttaaacttatttgtcatgaacctgccattagtaaatacatgttaatttcatgcaattaaaaagaaacccagaaaccattagcattttgattaatacatgattaataaaagtttgttgaacatacaatcttaaatcattataaattctttttgaaaggtaggctgggtgcagtggctcacacctg

SEQ ID NO: 441167 - DNA, 533 bp, Homo sapiens
aaggggatcaatgaaggaaacaatcttattatagaaactaaatttttgtaaattatataatatgaagtccttaacgtgtatgtattcacacaagtcatggcttcctgtaggatctagtcccagcactgaaggtgtcaggtgaaaggaatgacacactactaaattaacattcaagaagaatttaccaatttcatttacccacagcgtatgagaatccctttttcctcacatttgtcaacactggttatcattttttaataaaatattgatacaattgaaaaaatggtacctctttttttctgcatttttatgrtcaacaggcaaggctgaatatcccttgtaaaagtgtaaaatttgtcaatcatgaatatttgcccaaatttggattacttttatagtacagtggaaatgatctactgttaaatattgctgtaggcttacctatcacactcttcctgctctgtcctaggaatttgctgaccatcagtttttccattctctccttgttgaattaacccattatcaatacggtc

SEQ ID NO: 441168 - DNA, 529 bp, Homo sapiens
tacctctttttttctgcatttttatggtcaacaggcaaggctgaatatcccttgtaaaagtgtaaaatttgtcaatcatgaatatttgcccaaatttggattacttttatagtacagtggaaatgatctactgttaaatattgctgtaggcttacctatcacactcttcctgctctgtcctaggaatttgctgaccatcagtttttccattctctccttgttgaattaacccattatcaatacggtcatctgtggagacatcatgtrggtttcttgatgcttctgtttcattccttgcatgtgtcttcctttctccctctgcctttagtgaaagtttcatagataggatacttgttatcattttattcattgaaaaattgttctgttttcattgattttatcgcttcacagtttaactttcacaattttagtcattaaaatattttgtacttatgttatcattatataaaggattatatatagaattataagatataagtagcataattttatcactgacatttgtata

SEQ ID NO: 441169 - DNA, 581 bp, Homo sapiens
ttgatacaattgaaaaaatggtacctctttttttctgcatttttatggtcaacaggcaaggctgaatatcccttgtaaaagtgtaaaatttgtcaatcatgaatatttgcccaaatttggattacttttatagtacagtggaaatgatctactgttaaatattgctgtaggcttacctatcacactcttcctgctctgtcctaggaatttgctgaccatcagtttttccattctctccttgttgaattaacccattatcaatacggtcatctgtggagacatcatgtaggtttcttgatgcttctgtttcattccttgcatgtgtcttcctttctccctcygcctttagtgaaagtttcatagataggatacttgttatcattttattcattgaaaaattgttctgttttcattgattttatcgcttcacagtttaactttcacaattttagtcattaaaatattttgtacttatgttatcattatataaaggattatatatagaattataagatataagtagcataattttatcactgacatttgtataaagttagcttcatttctgtgtgagtgaatgc

SEQ ID NO: 441170 - DNA, 529 bp, Homo sapiens
tacctctttttttctgcatttttatggtcaacaggcaaggctgaatatcccttgtaaaagtgtaaaatttgtcaatcatgaatatttgcccaaatttggattacttttatagtacagtggaaatgatctactgttaaatattgctgtaggcttacctatcacactcttcctgctctgtcctaggaatttgctgaccatcagtttttccattctctccttgttgaattaacccattatcaatacggtcatctgtggagacatcatgtaggtttcttgatgcttctgtttcattccttgcatgtgtcttcctttctccctctgcctttagtgaaagtttcatagatargatacttgttatcattttattcattgaaaaattgttctgttttcattgattttatcgcttcacagtttaactttcacaattttagtcattaaaatattttgtacttatgttatcattatataaaggattatatatagaattataagatataagtagcataattttatcactgacatttgtata

SEQ ID NO: 441171 - DNA, 488 bp, Homo sapiens
gttttcattgattttatcgcttcacagtttaactttcacaattttagtcattaaaatattttgtacttatgttatcattatatawaggattatatatagaattataagatataagtagcataattttatcactgacatttgtataaagttagcttcatttctgtgtgagtgaatgcgacaggattttccaaaatttcaaaagggctcttctaaattttgtccttttatttccatccattctttgctacctcatatgaattttcacccatttaactgggaagaaacagaaataaaaagacgaagacacaaaatgtgtcatcttctgccttttcctcctggattttacatcaaacagccagatttagaggatgtgacatttggggcttcaggaagagaaaggaagctttcccctttcttcactaagctattctgtttcccaccaccttttataattcttttttcttttggctcctgggatatcaaaaaaa

SEQ ID NO: 441172 - DNA, 568 bp, Homo sapiens
atgctacaggcattgggcaacgattcccattccaaaagggagcaattggccaaaattaaggggcaacaggccccaggcaagtcagaaacccagcagggaagtcattaaatcttgaagctctgaaataatcctttttctgactccatgtctcacatccaaggcacgtggttgcaaggtgcgggcccccaaggcctttgacaactctgcttctgtagctttgcaggctgcagcccctatggctgctctcacatgttagagttgaatgcctgtggcttttccaggtgaagggtgcaagatgccagtggatctaccattctggggtctggatgtcagcaacccgcttctgacagctccgctaggtggtaccacagtggggacttggtgtggggaatccaaccccatatttccctttggcattgccctaggagaggcttttttttccctgtgaggactctgctcctgcagcaggcttttgcctaggcaccccggttttcccatacatcctctgaaatctaggtggmagccaccaagcctccttcactcttggattctgtgcacctgcaggttt

SEQ ID NO: 441173 - DNA, 631 bp, Homo sapiens
tatgatccaatgcgttttattccagggatgcaaggagggcttaagttaggcaaatcagtcaatgtgattcatcacacacaaaattaaggacaaaaacctttaatcatctcaatacacgtggaaaaagcatttgataaaatccaccatcctttcatgataaaaactcaacaaactaggcatagaaggaacatatctcaaaataataaaggcaatatatgataaacccacagccaacatcatatggaagagggaaaaagttgaaagcattcctctgtaaacaggaacaagacaaggatgcccattttyacctctcctgctactgcaagtcctagccagagcaatcggcaaagagaaaagaaataaaaggcatccaaattaaaaaagaagagatcaaattttctctattcactgatagtatgctcttatgcctagaaaaccctaaagactccacaaaaacctccttagatttgataaatgaatttagtaaagtttctggatcaacacacaaaaatcagtagaatttctctactgcagcaacctacagattccacccaattcctatcaaaatcagcgtgagaactgaatcaagaagacaatcccatttacaaataacaacaaaaataaaacaaaa

SEQ ID NO: 441174 - DNA, 584 bp, Homo sapiens
ataaaaactcaacaaactaggcatagaaggaacatatctcaaaataataaaggcaatatatgataaacccacagccaacatcatatggaagagggaaaaagttgaaagcattcctctgtaaacaggaacaagacaaggatgcccattttcacctctcctgctactgcaagtcctagccagagcaatcggcaaagagaaaagaaataaaaggcatccaaattaaaaaagaagagatcaaattttctctattcactgatagtatgctcttatgcctagaaaaccctaaagactccacaaaaacctccttagatttgataaatgaatttagtaaagtttctggatcaacacacaaaaatcagtagaatttctctactgcagcaacctacagattccacccaattcctatcaaaatcagcgtgagaactgaatcaagaagacaatcccatttacaaataacaacaaaaataaaacaaaataaaatacctaggaatatatgtaaccaaggagrtgaatgatctatacaaggaaaactacaaaatatggtgagagaaactgttgatgacacaaataaatgaaaaaaccca

SEQ ID NO: 441175 - DNA, 584 bp, Homo sapiens
ataaaaactcaacaaactaggcatagaaggaacatatctcaaaataataaaggcaatatatgataaacccacagccaacatcatatggaagagggaaaaagttgaaagcattcctctgtaaacaggaacaagacaaggatgcccattttcacctctcctgctactgcaagtcctagccagagcaatcggcaaagagaaaagaaataaaaggcatccaaattaaaaaagaagagatcaaattttctctattcactgatagtatgctcttatgcctagaaaaccctaaagactccacaaaaacctccttagatttgataaatgaatttagtaaagtttctggatcaacacacaaaaatcagtagaatttctctactgcagcaacctacagattccacccaattcctatcaaaatcagcgtgagaactgaatcaagaagacaatcccatttacaaataacaacaaaaataaaacaaaataaaatacctaggaatatatgtaaccaaggaggtgaatgatctatacaaggaaaaytacaaaatatggtgagagaaactgttgatgacacaaataaatgaaaaaaccca

SEQ ID NO: 441176 - DNA, 583 bp, Homo sapiens
tcaccgcaacctccgcctccccgggttcaagcaattctcctgcctcagccacccgagtagctgggattacaggcatgtgccaccacacccagctaattttgtatttttagtacagacagggtttmtccatgttggtcaggctagtcttgaactcctgacctcaggtgatctgcgcacctcggcctcccaaagtgctgggattacaggcatgagcctagggtacagagcatgaccctgtctcaataaaaaaaagaaaagaaaaagaaaaaatcaccaatgcaatgctaaatctagtgggtgaaattttgaggcataactagacctttatagagccacaaagtattgccacacaaggtatcagtgaaatacaaaaggtaaactgtaactttaccatggacaaacctgacagatactccttaaccaaagaagcaaagtcaacactggccagcaatgaaaccaagtgacagcctccagatatgctgcataagcctccagatatgttgtactgggaagaagtcagcatcacctgtgtgacattcctgcctgaatgacataacctgaatctaataatgaggaaacatca

SEQ ID NO: 441177 - DNA, 583 bp, Homo sapiens
tcaccgcaacctccgcctccccgggttcaagcaattctcctgcctcagccacccgagtagctgggattacaggcatgtgccaccacacccagctaattttgtatttttagtacagacagggtttctccatgttggtcaggctagtcttgaactcctgacctcaggtgatctgcgcacctcggcctcccaaagtgctgggattacaggcatgagcctagggtacagagcatgaccctgtctcaataaaaaaaagaaaagaaaaagaaaaaatcaccaatgcaatgctaaatctagtgggtgaaattttgaggcrtaactagacctttatagagccacaaagtattgccacacaaggtatcagtgaaatacaaaaggtaaactgtaactttaccatggacaaacctgacagatactccttaaccaaagaagcaaagtcaacactggccagcaatgaaaccaagtgacagcctccagatatgctgcataagcctccagatatgttgtactgggaagaagtcagcatcacctgtgtgacattcctgcctgaatgacataacctgaatctaataatgaggaaacatca

SEQ ID NO: 441178 - DNA, 620 bp, Homo sapiens
acagctggacttctgtcttacagaatacagtttcgtagacgttttattaaaaaggaaagtgctattcttcaattttttaaggtatgccaccaatgtagttaaagtccctaacttttcataggaggcaacacaggctcagagagattgtagctygcctgaggtcacgtagtgaattagctacatacaggccggaaatgggcttccggtctccttactgagcctggagttctatgccagctgcttccttcttattcagaaaacagacacagattttaaaatacaactcagaggaaatgcatatgtaaaactgtcacatagctcaataatgtttaggcatgagacagaaaagagtacttctctaaattttaagtttgaaagttatgaaaaaaattagaacagcaattaacgtcagaacttttgttagtagcagtgaatgtactcaatgtataaagaactttttttttttaagtcacaggacagggaacatgaaataaagagcctttagttgaactaagcaagctgaagttgagaaaaattattcctcaaaaggactattaattttctccaaataaaacatggtttaccacaatcaatcaataagtcaattatccatgttgttg

SEQ ID NO: 441179 - DNA, 487 bp, Homo sapiens
agtcaatcgcctgctcaaatctttcyaatagattcctatttcagaataaaaggaaagttccagggcctccgaggccctaggtaaactggcctccaccttcctccctgatctcggctcctacaactctgttccccactactcactcctttcccactatacgtgtatccctgtcacccctcactagtctgaaaatagggttccaatgctaaactaataaatcacatagagctacaatgatctttgtacaggacaaagtgatattcaaatgatagtcatggagccttgagatgaaaattatgaacaaattatttgtaaagatattcaaagtaaattacacataacagtgagaagattaaatcaaacaaggctttgataacattcaccacatttgtccctaatgttgatttaataaaaagtatatgcctttaaagaattgagtggtcattgcaacacataatttgagatggacatattttcagattcaagt

SEQ ID NO: 441180 - DNA, 584 bp, Homo sapiens
tgtctcattttgctagacagagtgtgggcgattatagtatggcagcatattttttgtataatatcgtgggatatttctctattgcatcatcccctacctcatctcccatgacttaaacatatagttcctacctccactgtatccccattttatttttccatgcttagaaaaactacattttcaagttctattaaaactgttttatgttatgtttttttccattgaagaggaaataagtttcatcaacactgtgtatgcagctactagcattaggtgtccattctatgttgaacaaagtaataagatgagtgtggttctaaggaagaacaagatgctcaattaattgctgttgaatgcaaatgccagtgtacaytgagtgtatttacaggccgaagaggtctcactcttctgaaaaatacagcagaaattttgaggatgtctagtgataatttaataatcatgtttgtatttatttttatgtttatccttttgttgcatttttctttttgtcattttgaatccttttaatagaaactcaagctgtgctgtgtcacatgacaaaatgaaagccggtttctttcctc

SEQ ID NO: 441181 - DNA, 588 bp, Homo sapiens
tcaatgaagtttatttttttgtaaaacattttttcctccttttagtgtttagttcaactgttatagcattttaagggggaaaattatatatattatatatgtgtgtgtgtgtctgtgtgtgtttgtgtgtgtatgaacataagagacagctttttttaaaagcacagaaattcaatccagttaacttttcacttgtttcttttataatgatgtctgatttatagtgaacgtatgctataacgtttactcatattttggtggcaatgaaaagtaagatatattttattgcaaacttcagaacacatataagaggacttgtcagccaagcacataattttcagcacataaatgaggcagcagtttcccagtactttatatcgtattaggagtagacttctcacatccatgcagaccacccttctgagagctttgctttagaccaccatgttcctgctactacagtcatcaatttccagcactcagaacaacccccatccctgcttaccactaagaatttaggatcagaatgtcttttccacatataagcaacacatrgaacctaaataactgctctgattggtttatagg

SEQ ID NO: 441182 - DNA, 475 bp, Homo sapiens
tattcacttaaagtctataatgatactttctagttacataatatgtttcctatttaaataaatgagctacattattaaatattagtcctttggatttggcttagtaataacaaagactggcaatgtcctcccttgattaaaagtttaaggaatgagttaactacagaagctaagaaaaaatatattgttttatggccatctgtaggtatgtgtagctttggtggtcatgtagggagaacraaaatggacttaatgtacacaaaaaataatggttatatttcttttcagaattatccctggatgctattatccctggatgctattaatatcatacaatcatttctcaaaacattttctttaaaataccatgtgctaggtatctgcaatattacttaaagaaaaaaatgagaaatttaagtgccaaatattggtgcaagtctaagtgtactggacttatgaacatttatgaaataca

SEQ ID NO: 441183 - DNA, 629 bp, Homo sapiens
tgggatttctctaaaactgctgccctcaagggattcttattctcatacaagtttacattcatcctctgtcacattttcaaattatcactttagtgttcctgcaattatgatgctctagcagcttctgctccaagtaagcagatcttgtctgtgactctccatagtcaacattctctaattttcatatggagatgtgcagtgcaactttctctgttgggtacaagaaaagttgttggttttcattttgttcaggttttttttcttgttattaggatgggagtgacaattgccaagatctttgcatgtcagatttgaaaaccaaacacttgtgcagaccaatttttaatactatttctgactcatactattttcatctattcagaatgttagtaaacatctatcactaatatcctaatcatgagaatacaaatgtcatgtacatgtattgatttgcaggcagaartaacctcaggtgagatttgcaaatcaacctcttaaaattcatcttattattgtttggaagagaaaagtttgattttaaattttattttattgagttagtgattttttgttttaaagtcttattttagacttgtaataagtctgcatgttcttacttgaaactgttt

SEQ ID NO: 441184 - DNA, 474 bp, Homo sapiens
tgccccagattgccctccttccacaatctgcaaccaggaattctgcaaataggtattattgctctttcagaggatagaattaaagaacactattgaattgcttttagggaaaataattcaatatgcttgttgactagttagaagatcaacagtttctttttataataacaagatttctaaaatttatttttatagacctgaaattagtttcagtctatctcttccaaacactagatgaccagaatatgaaatgacattacacattccragatgtatttttatgtataaacttaggtaggtaagtgttcatattgtggggagacaaagtcacatcctacatgcaaagaaatgaattttagaggtctactcccaaaaaatttccatttataacttttgtattatagtttgtgcaaatgcagcacagatattgtatagcaattggtgtgcttcaactagaatattttttgtattttt

SEQ ID NO: 441185 - DNA, 630 bp, Homo sapiens
agcgtagtctttggagtcaggatgatctgagtttgaatcctggctgttatttacaaactatcaccttgggcaagtaatttaatcttgttttgttttagttcccttcttccattattttttaaaattgtagtagtaatatctatatcacaggcatgttttgagaattaacttagaaaacccataaagaaatagctaccgtaatgcctagcacacaaaaagtagttattttgatcctgccatgcaaaacattatgaaaactgattaaattaatcaagaattggaatgcaggaaaattactctgctgcttctaagatgctgaccattgaaaatcayggcagtgaattcctatacacttctatgacagaggccacatatttgttcctcaactctttggcagccacagttacccaaggaaaactagaataatctttctctaaccccagtcagacccctggtttaaaaagaaaaattatatcaaattatatcacagcctcgaaggatgtatgtgagcatggtaatactggattttgatggtgagataacatatgccaaatagattatctagaaaattcagatcatatggttacttcattagacaaaggctgctttatttggcttcagaagccggtt

SEQ ID NO: 441186 - DNA, 427 bp, Homo sapiens
gatggaaaatgcattgaagtttactgagacatctttattaaatatggaggtctgcagcataaatactccccaaaaaattgtttttcaaaaatgytatagatgccacatgaggtggtaatggtatttttgacaaaataggaaatcttagtagctctgtagtgaaacttaaggtgaccttgtaaatagctgacataagccatttaataaaactcagattttctgacattgtttacttttgccacaatttgacactgagttgcatcaagtcaaatgaaactttgtgaacagccatccttcaaacattaaattccatcctttttccctgcctcccagggcgtggaatagctgcttaccctctcctgtttgtaggtttctttgtcgggttgcaaactgggatggataccttctgactttcacagctctccag

SEQ ID NO: 441187 - DNA, 661 bp, Homo sapiens
aattccttgaccttaggagagtgatcataaaatgtaatcaaagtttccagatcgaaaggtgctctaaatggttcagtaagcagctgcatcaatgctataaagcatcatgactgctaacataggtcatgtttcaggaaaacaagatgaaaaccttttgcttttaaaagaaatttggtcaagtcccaggaaaagaatgacmgctatatttatacggcctccaacctcaaggaacttccagcaatttgcaggtttttaatgtcattaacctccagggtatttctgtttcatgtgtttaaaagctggttgcaagtactatcataacactttccaaataagaagtctgcagtgttacatatctaccaacttatctcaaagttagaaatcaaatactgatataggttttcaagtatgatcttattttttccttgcaggaaattcagcatattttgaacactgggaagaaagagtccttaaacttactgttgaacaaaaagagcaatccgcaacatgaaaaccaatcagtagcacacttgagtacataaacttaaaattaccaattctttaaaagattacaagaatgtaactgtctactcttttggtgcttcaaatctgtattcatttgaatctaatatctttaattttaaattcctgtctgaatgtg

SEQ ID NO: 441188 - DNA, 661 bp, Homo sapiens
aattccttgaccttaggagagtgatcataaaatgtaatcaaagtttccagatcgaaaggtgctctaaatggttcagtaagcagctgcatcaatgctataaagcatcatgactgctaacataggtcatgtttcaggaaaacaagatgaaaaccttttgcttttaaaagaaatttggtcaagtcccaggaaaagaatgacasctatatttatacggcctccaacctcaaggaacttccagcaatttgcaggtttttaatgtcattaacctccagggtatttctgtttcatgtgtttaaaagctggttgcaagtactatcataacactttccaaataagaagtctgcagtgttacatatctaccaacttatctcaaagttagaaatcaaatactgatataggttttcaagtatgatcttattttttccttgcaggaaattcagcatattttgaacactgggaagaaagagtccttaaacttactgttgaacaaaaagagcaatccgcaacatgaaaaccaatcagtagcacacttgagtacataaacttaaaattaccaattctttaaaagattacaagaatgtaactgtctactcttttggtgcttcaaatctgtattcatttgaatctaatatctttaattttaaattcctgtctgaatgtg

SEQ ID NO: 441189 - DNA, 632 bp, Homo sapiens
aagacactaaataatagcttctgattttaaagccagatttcttctaatgggtacttaccatttgggagctaatggccagcatgcatttactctattttttctttagagcccatgatctcagtttagcaacacctgtctccagttctcagtttgtgtctttgaatggaagccaatctaggcttaagtcattctgtgtgttctttttatctagtttcagagattcatttaaaaatggccacatgaggctcatttattgttaaacgtggggactttactggaatatcttgaagtgatgtttgttctgttcctctaaactagagccaagagagaataaaatggaaactgcagcatctatctcatcactatgtatagcatgaaaaggaaaccaacacaggacacagggaggaaagtcaagcctaacaaagtggcagtgaaattgagccctgaaggcatcatttgatcaattaatctgtttggatctgatgccactaaatcacatgaattcatatgaatcaaaaacattcccttttttggttaagccagtttgagttggcatttatactaatcayaacctagaatgctaactgaaaaagttttactctaaaccaactctctagaggcaacttgtagac

SEQ ID NO: 441190 - DNA, 622 bp, Homo sapiens
gtctttcactttaaatcaaaagctagaaatgattaatcttagtgaagaaggtttgtggaaaggcaagataaacagaaagctaggccttttgtgtcaagcaactaagttgtgaatgaaaggaaaagttattgaaggaaattaaaagtgctactccagtgaacacaagaatgataagaaaggggaagagacttactgctgacatgaagaaagtttgagtggtttgaatagaagatcaaagcagccatgacactccttaagctaaagcctaatgaagactgaaagaggagaggaaacagcaaaagaaaagttggaagctagtagaggctggctcactaggtttaaggaaagtagccatctccataacataaaagtgccaggtgaagcagcaagtgtagaaggtgctcatgtagaagctacagcaarttagccagaagatctagctaagatcattgaaggtggctgcactaaacagcagattttcagtgtagctgaaagagacttgcattggaagaagatgctgtctaggactttcatagctagggaagaaaagtcaatgcctagattcatatcttcaaaagacaggctgactctcttgttagaggctaatgcagacggtgacttt

SEQ ID NO: 441191 - DNA, 588 bp, Homo sapiens
cacacctcagattaaagcagcaacagaggagtcctgaaggctaacaatgatacaacccaagtctccaaggaaagacctcactgggaataaattggccattcatctttgtttttcagtgcctaggataatgccagacacaatactgactcagcaattttattcaaccaaataaaaaaatgtggaatgaatggaggactccatttatttaaagcttttaaagggcttaaaagaaaaaaaaatcaagcatgtaatcaggaccaaaagcaggaaacttgttacctagacttattacctaaaaaaggaatgctcatagaaagaaattaataaatggtaagaggyatggcaagaatggccacctttaaggattcatgtagtgtcttaaacctacactcaggtaagtttttaagataataccctacatgcatgcaaattttattatgaactgcctcacactgtagaatgaattagttcttaatttaaaatgattaactatcccagtctattttgaactacgtggaggaattcaaggtaccaatgaggcaagaaaggccaacatctcagagaaatgctgggattctgaggccatgg

SEQ ID NO: 441192 - DNA, 577 bp, Homo sapiens
atccacatgatttaatttgcccttctccggtatgatttttccacgtttgattatactttacattgaggaaatcagtttacacttaacttgtttagcatgtgctaaatagtaaatcataactgtagaagacactgtctggtatatttcccatgaatgaataatatacaccaaaatattgttggattctcatatgaaaaatttcaaaaggcagtttgacaacagataaaatatccagtattccaagcattcttttccaaatgctaaatgaaagcagaatgatttgagggtagtagtagycagaataggactcaaggaagcagcagaagattgagatgggtgatttacaaatctcaaatatatgtagcaaaaattgaggctttaaaccttcaataaaaaaacagtcattctgcgaagtttaaataagaacttcagtaaaagattgttgttcccaaaacacacttaaggtgagaaatggatcttctcatgtcctatagagtaaatgagttttgtgttttaccaatagtcattccatttgatcttttagtggcaacctttgttccattttcaataagttctt

SEQ ID NO: 441193 - DNA, 577 bp, Homo sapiens
atccacatgatttaatttgcccttctccggtatgatttttccacgtttgattatactttacattgaggaaatcagtttacacttaacttgtttagcatgtgctaaatagtaaatcataactgtagaagacactgtctggtatatttcccatgaatgaataatatacaccaaaatattgttggattctcatatgaaaaatttcaaaaggcagtttgacaacagataaaatatccagtattccaagcattcttttccaaatgctaaatgaaagcagaatgatttgagggtagtagtagccagaataggactcaaggaagcagcagaagattgagatgggtgatttacaaatctcaaatatatgtagcaaaaattgaggctttaaaccttcaataaaaaaacagtcattctgcgaagtttaaataagaacttcagtaaaagattgttgttcccaaaacacacttaaggtgagaaatggatcttctcatgtcctatagagtaaatgagttttgtgttttaccaatagtcattccatttgatcttytagtggcaacctttgttccattttcaataagttctt

SEQ ID NO: 441194 - DNA, 526 bp, Homo sapiens
agtgttacagtaggtctaaacctaccttttttggaagaattttatccataycagaaggagaaaatgtatttatgtcacaaatattcttcaataggaaaatgttattattatacttttcaaaataagtcacttaagtttccaaataagtcactaagtgtttaaaacatttaacacgttttaaaatttttactgtaagcaaattttttaaaaggcataatatgagataattgcaatacacaacatatctgtgctttcctttttattttccttgataaaaatagacaataactgtgattatagtccataagataacccttataaactttcaaagtttgtaatcacctcttccttgacacttcaaaagatatctttctgttctttgaattttgtatatattccattttaatgtaattggagattttgagcttcttcacaattccttctaagttttcagtaagcatactaaattgtggatccaagatctgactcctggaatacttcttaggagctgatagctgataggctt

SEQ ID NO: 441195 - DNA, 529 bp, Homo sapiens
ttttttttttttttagagacaagacctcactctgtcacccagactgtagtgcagttacaggatcattagctcagtgtatcctaraactcctgagctcaagtgatcctcccacctcagattctcaagtgctaggactacaggtgtgcatcaccatacctagctatttgtttttttaaattttcttgtagagatgcgctcttgcttcgttgctcaggcaggtcttaaattcccggcctaaagttatccttctgacttagcctttcaaagcactgggattatggatgtggctcattgcacctggcctatccctcttattaatataaatatgtattctcttgcttttgtgttacacaagatttggtaacctaatgggtatattttggtgtcatttctatacagctatttactagtgtgcaaattaggatttttcaaatattatgaatattgctaattttcttatcattttcccttaacgatttaaattccagattatccatgtgctctatagggtttcagtgatcccatgcca

SEQ ID NO: 441196 - DNA, 480 bp, Homo sapiens
attgtaaattgtctttcaaatatgttctacttcctcattgagccatataccttaaaatttcatatgcgaagaaaactcaactatgttataaccacgggttcaaaaacgaaatgggttgcacaccatgttcttcattgtttttatcctttaacaagaacaatttggaaaatgagaaaagcttgcaggacacgtgacaaaaaggaaaataagtgtgataatcttgataaagagctttattactttatttccccctcccccatctctaaaaagaaatcagagagtctaggaagagaattttgactatgatttgggaaaatggaatgggaaattattcttcccttacatgaacacttggaatccattttcacgtcattttcctattttttcagagcaagagtgtggcaattgtgcattgaatgcacttattcagttcttatgcwtctaccatatctatttagatggaattgtaactgtgtgttc

SEQ ID NO: 441197 - DNA, 446 bp, Homo sapiens
tcctccatataagctataataacttgatttcactttcttagcattcccgtgttcacttttaacttccttaagacctgtttctttgcatttacaacttgggttactgtttggcccaagaagccttgcctttggcctatatggtcttttgacatgccttcctcactgaacttagtcatttttaggttttcatttaaagtaaaaacatgtaactcttccttttatttgaacacttagagaccattgtaaagttattcatcgttctaatttcaatattgcatttctcagggaatatggaggtctgagtagagggaatatagggggtatagccggtcagaaaacacacttttattaagtttgctgttttataagagtgtcattgcaayagtaaattcaaagatcactgatcatagattaccatagcagacataataataatgaaatattta

SEQ ID NO: 441198 - DNA, 508 bp, Homo sapiens
ttctagtgttcatagtatccttgaatgatcttttgtatttctgtggtgttggttgtaatgtctcccattttgtttcttattgagattatttggatttcctctcttcttttcttgattagtctcactaatggtctatcaattttatttatcttttcagagaaccagcttttcgtttcatttatcttttgtatttttttgtttcaatttcatttagttctactctgatcttggttacttcccttcttctgctgtgtttaggtttggtttgttcttgtttctctagttcattgaggtatraccttagattgtttgtttgtgttctttcagtatttttgatgtaggcatttgaactttcctcttagcacagcctttgctgtatcccacaggttttgataggttgtgtcattattgttgttcagttcaaagaattttttaatttccattttgattttgtttttgactcagtgatcattcaggagcagtttatttagtttccatgtattttcat

SEQ ID NO: 441199 - DNA, 434 bp, Homo sapiens
attgaagttccccactatcattgtgttgatgtctgtcttatttcttggtctattagtaaatgttttataaatttgggagctccagtgttaggtgtatatatgtttaggactgtgatattttcctgttggaaaaggccttttaccattatataatgtccttctttgtctttcttactgctgttgctttaaagtttgttttgtctgatattagaatagctactccagctcgcttttggtgtccatttgcatgaaatgcctgtttctacccctttactttaagtttatgtgagtcyttatgtattaggtgagtctcttgaagacagcaaatagtcagttagtgaattcttatcctttctgtggttctgtatcttttaattggagcatttaggccatttacattcagtgttactattggtctttgaattaattccatc

SEQ ID NO: 441200 - DNA, 561 bp, Homo sapiens
tcagctcattctggcacactatggaattttctgttatttggaaatagcacagacaaaaattctgccatacagaacactgctaagctgtaaagctggatggaacagttaaatttgctaactgcttttactgtatatatagtaagagtaacaaacacttaygtcatgtttatgatgtgccaggcatgtaataattcatttaaaccttactgcgccaataagatggtagtttcccatccccattttacagatgaaagaactgaagcctagagatgctgataaatcaccagagtcccagagctggtggtgacaaagctagaaggaacaccagaagcagagggcctctgtgagaattcatttcaggctgccacagagccaccgcaaacaaacagcttctgccagcaaattttgtcttgctttattcatttaattttcaggtttattccaatcagagttatcccaaaaatttcagaggagaaataaagtgttttctttctctctttctctgtccagggccaatttttatcatatacatagtactgtagaattctacagtacactttt

SEQ ID NO: 441201 - DNA, 591 bp, Homo sapiens
tgtgtttgcttccccttccaccatgattgtaagtttcctgaggccttcccagccatgctgatctgtgagtcaattcaacctcttttctttataaactccccagtcttaggtaggtatttattagcgacatgagaatggactaatacatcagccttcagaagtggtagaaataatttctattgtttacaagtcacccagtctayggttttttgttatagcagcctgaacagactaaggcagaaaattggtacctggagtaggctgctgttttcacatatactttaaaatgcagaagagctttggaactgggtaatgggtagaggctcgaagaattttgatgttcatgctagtaaaatcctacattgccatgaacagcctccaacttgtaagaacagcagcacaggctgctcccagcaaagccattagaggaggggcactcagatacttggggacccaactcctgcacagcaaagctgcaaaggtgaagccttcaccttagtgtatgcagtagacaggacccctgtgccagtggagggcagagcattgagccaaaggaggttattcttaagccttaaggttttggccacgctt

SEQ ID NO: 441202 - DNA, 594 bp, Homo sapiens
  misc_feature (1)...(594): n = A,T,C or G
gttcctatcatgttaatgaggcttttgccactgcatggccccagtgacagttggatccacgaacagcagttcatcaattgattgcaggtgtttccccttggaaaataaatactgcrtgttcataccaggaggtgagggaaaatcgattttcaacagccacacaatctggtgagttctgaaatatggctttgggaagcaaattctcttgctgctggtttcatacataaatacattctatttatgaaatttagagccaaagacagcaatagtaataaggattcataaactgaaaattaactgcagtacacctagaaagggacaaaaccttatttcctaattaatagataataaaatctgaaaatattaaatgtcagtatccataattatccttttggaagtcatttatatccacattgtattaagttcctctctaaaatattctttatcatcaatagaagaacaattcaatgaaaaagatgcctaatttcaatttaggagcctgcccagtaatgtacgtaatcttatattcaggaagtttgagatttcattgtatatgtnanttgatctctccaatagatgcttgtgtcactcccg

SEQ ID NO: 441203 - DNA, 594 bp, Homo sapiens
  misc_feature (1)...(594): n = A,T,C or G
gttcctatcatgttaatgaggcttttgccactgcatggccccagtgacagttggatccacgaacagcagttcatcaattgattgcaggtgtttccccttggaaaataaatactgcgtgttcataccaggaggtgagggaaaatcgattttcaacagccacacaatctggtgagttctgaaatatggctttgggaagcaaattctcttgctgctggtttcatacataaatacattctatttatgaaatttagagccaaagacagcaatagtaataaggattcataaactgaaaattaactgcagtacacctagaaagggacaaaaccttatttcctaattaatagataataaaatctgaaaatattaaatgtcagtatccataattatccttttggaagtcatttatatccacattgtattaagttcctctctaaaatattctttatcatcaatagaagaacaattcaatgaaaaagatgcctaatttcaatttaggagcctgcccagtaatgtmcgtaatcttatattcaggaagtttgagatttcattgtatatgtnanttgatctctccaatagatgcttgtgtcactcccg

SEQ ID NO: 441204 - DNA, 562 bp, Homo sapiens
tgatttttactaaattcttttttgtatgaatccctttatgagttcaagacaaatgccatgtttattttttccctctaggctctctgggtttattttaatacaccgtaatctaaaagatattgagtcactgacaaaaagaatacatgcatctagacagggccactgtgcaatctcagaagcttatttatttatttatttatttatttatttatttattttttaaagaaaagagagcagatcacatttaaagaaaatttctttcctcatctcttagcattgaatttttgtgaagattcaggcactattaatggccagtggaacttccaaaagttggaaattgcagtagcaattttttcacaggggtgaaaaaaaatccctaagctttaagaaatttggatatcaaaagctataatgcccatwtagggaaaattagggtgaatattgcttaattagtcattcaaatgatggaaactatctactccaatgcttttatgaagctctgcatgatggtaacagggaatagatttctgtgacttgggcagggagcgcggtattcccattt

SEQ ID NO: 441205 - DNA, 562 bp, Homo sapiens
tgatttttactaaattcttttttgtatgaatccctttatgagttcaagacaaatgccatgtttattttttccctctaggctctctgggtttattttaatacaccgtaatctaaaagatattgagtcactgacaaaaagaatacatgcatctagacagggccactgtgcaatctcagaagcttatttatttatttatttatttatttatttatttattttttaaagaaaagagagcagatcacatttaaagaaaatttctttcctcatctcttagcattgaatttttgtgaagattcaggcactattaatggccagtggaacttccaaaagttggaaattgcagtagcaattttttcacaggggtgaaaaaaaatccctaagctttaagaaatttggatatcaaaagctataatgcccatttagggaaaattagggtgaatattgcttaattagtcattcaaatgatggaaactatcyactccaatgcttttatgaagctctgcatgatggtaacagggaatagatttctgtgacttgggcagggagcgcggtattcccattt

SEQ ID NO: 441206 - DNA, 577 bp, Homo sapiens
aaacaaaaataacaaaatcaaagcacgaaagacataagtgctcctaacttagctcctaagtgaattcagggtctgaataggaattttaaycacatcttctccgacatgatgtcaaaaaatacacttttgtgatatgtaggcaattcttgatatatgaatgtacactgatgagtcattgtggattcaaatggtcaatggaaaaactggaatccataagtcctgattttttgaggtgataccaatttttgtccctcggttttatatatctgaaaggaatttttaaaaaatctctcttctgttcaaatttagaggcttctgtaacagaaagaaaaaaacattacaaagaaagaaagaggggaagagaaaggaatagaatggagaaaaggggagctatgctgctaggagagaaggcacattcagaagtcaaaagcttgttcattgaaggcaagacatttaagaatcattctgaaggagatatcaagggtttctgtgggcatagtctagaagagagaggtttaaacaaaaccaattaaatgtttttgcataataaaatgctccagttatctactgctgtata

SEQ ID NO: 441207 - DNA, 577 bp, Homo sapiens
aaacaaaaataacaaaatcaaagcacgaaagacataagtgctcctaacttagctcctaagtgaattcagggtctgaataggaattttaaccacatcttctccracatgatgtcaaaaaatacacttttgtgatatgtaggcaattcttgatatatgaatgtacactgatgagtcattgtggattcaaatggtcaatggaaaaactggaatccataagtcctgattttttgaggtgataccaatttttgtccctcggttttatatatctgaaaggaatttttaaaaaatctctcttctgttcaaatttagaggcttctgtaacagaaagaaaaaaacattacaaagaaagaaagaggggaagagaaaggaatagaatggagaaaaggggagctatgctgctaggagagaaggcacattcagaagtcaaaagcttgttcattgaaggcaagacatttaagaatcattctgaaggagatatcaagggtttctgtgggcatagtctagaagagagaggtttaaacaaaaccaattaaatgtttttgcataataaaatgctccagttatctactgctgtata

SEQ ID NO: 441208 - DNA, 652 bp, Homo sapiens
tgtaggcaattcttgatatatgaatgtacactgatgagtcattgtggattcaaatggtcaatggaaaaactggaatccataagtcctgattttttgaggtgataccaatttttgtccctcggttttatatatctgaaaggaatttttaaaaaatctctcttctgttcaaatttagaggcttctgtaacagaaagaaaaaaacattacaaagaaagaaagaggggaagagaaaggaatagaatggagaaaaggggagctatgctgctaggagagaaggcacattcagaagtcaaaagcttgttcattgaaggcaagacatttaagaatcattctgaaggagatatcaagggtttctgtgggcatagtctagaagagagaggtttaaacaaaaccaattaaatgtytttgcataataaaatgctccagttatctactgctgtataacaaatcacttaaaacaataactaaacaatttaaaaaatcatttattttgcttacaaatgtgaggttgactggacttatcaagaaagttctccttagaagcctctcatgctattggagtcagatggtggctgggttggggccatcttaaaaccatctcagctcacatgtcttccagagctaggaagattgaaacagctgtgaggtgaaa

SEQ ID NO: 441209 - DNA, 620 bp, Homo sapiens
attttaaaaatgtttttttacaaaagcactaaaattataactttcaaatatgatagacttctttatgcacaatatttattcataagcaaatccaaaataattggctatatacattttactctcaaaggacaagtttgagtgggcgtctttasaaattcaagcagtggaatctgctaagaatctgatttaatgtgtataactctatttaaaatttaatcattaccataataaagacatcattatagaatgataatccaaatggtaattgacttttcaattttgttgcttcaaggtcaacatggtggcagagcagcctgttcctttctttgctttgtgacatcccgtttcactgtgctaaatagttcatagtgtagattgatacggcttttggcctcactctctgagctggatcagaatattggtggttagtggcagtgaaattaatgagcccaccactctgcctcattctcctcttccctctttaaatggcaattacagtgacaccattcatgttactgtggttaagcattttcatgagaaaaaccagtcttttccaagagtaatatttcacctataaaaccagcctacaaatttaaattagaaagaaaagatacaaacca

SEQ ID NO: 441210 - DNA, 620 bp, Homo sapiens
attttaaaaatgtttttttacaaaagcactaaaattataactttcaaatatgatagacttctttatgcacaatatttattcataagcaaatccaaaataattggctatatacattttactctcaaaggacaagtttgagtgggcgtctttacaaattcaagcagtggaatctgctaagaatctgatttaatgtgtataactctatttaaaatttaatcattaccataataaagacatcattatagaatgataatccaaatggtaattgacttttcaattttgttgcttcaaggtcaacatggtggcagagcagcctgttcctttctttgctttgtgacatcccgtttcactgtgctaaatagttcatagtgtagattgatacggcttttggcctcactctctgagctggatcagaatattggtggttagyggcagtgaaattaatgagcccaccactctgcctcattctcctcttccctctttaaatggcaattacagtgacaccattcatgttactgtggttaagcattttcatgagaaaaaccagtcttttccaagagtaatatttcacctataaaaccagcctacaaatttaaattagaaagaaaagatacaaacca

SEQ ID NO: 441211 - DNA, 653 bp, Homo sapiens
aactgaaaagaataataacattttgcagagattgcctttcctctactacgttcttttaagttcttaaacatccatttcgggtttatttactgggtttccccactaaagatataagtaagtttgccttagttttacagctgaaaayagttcacccaagaagaaagagctgcacccctagggaaggagaatgaagaaagagtctggggcatagtgagctatgctggggtgttagggaatctcagagactggtttccctgaaaaaggtacctggacattccagaccaaaggccatcccaagggtgaacacctgaactcccacggagtgcttgttactctctgaaatgcctggggctgcagcagtcacaggaatgaacagggaaagaggatacaaatcaggactttttacacattagaccttgaggtcccaaaggtaggactgtgcctcagccttcttttttaccacatgcctgggaatattccttgcacctggtggctgcttaaggcaagtttgtttaaatgaaagaataaatacatgattgtgtttccacacacattgtctcatttgattctcacaacaggctgccttgaattttgttttaatgagtactactgaacaccaagaaggctgacaaatataattaagagagtgtgtc

SEQ ID NO: 441212 - DNA, 653 bp, Homo sapiens
aactgaaaagaataataacattttgcagagattgcctttcctctactacgttcttttaagttcttaaacatccatttcgggtttatttactgggtttccccactaaagatataagtaagtttgccttagttttacagctgaaaatagttcacccaagaagaaagagctgcacccctagggaaggagaatgaagaaagagtctggggcatagtgagctatgctggggtgttagggaatctcagagactggtttccctgaaaaaggtacctggacattccagaccaaaggccatcccaagggtgaacacctgaactcccacrgagtgcttgttactctctgaaatgcctggggctgcagcagtcacaggaatgaacagggaaagaggatacaaatcaggactttttacacattagaccttgaggtcccaaaggtaggactgtgcctcagccttcttttttaccacatgcctgggaatattccttgcacctggtggctgcttaaggcaagtttgtttaaatgaaagaataaatacatgattgtgtttccacacacattgtctcatttgattctcacaacaggctgccttgaattttgttttaatgagtactactgaacaccaagaaggctgacaaatataattaagagagtgtgtc

SEQ ID NO: 441213 - DNA, 566 bp, Homo sapiens
gtgcaacattaacaaacaattaaaaaatatttggaatgtatgcatgcgctctcctttgcctctgtatccagaactttctctgttgttatttttgttactttcttaggccctgcaggcattggaggtttgaactttcaagatattcaactccttccaagggctgacctgacatctctgactagagacttcttagagaatagactctcatgggtcctttatcattttgtgttgaatcattctttaatacctctccaacatgattatgaacccctgtaagtaatttactcttgattgattgattgattcactcagttatttgattattaactttagccagccagccatrtctagcacctaccaagtgctggtcatggtgagaaatgcgggagaaatagtgtaactgccacccttacctgtgaagagtcccattctagtggggtggcagataagcaggtaatcacagtctagtgggatgcctgctggcatggaatagaaccagtgatggaaagaaactggtttttggtttcaggtcttgcaattgttagcagtgggagatggtacttcca

SEQ ID NO: 441214 - DNA, 583 bp, Homo sapiens
gtgaggcgtcaaagcccttttcattttcccagcctatggataatagtgtttttttccataactcttagaccaccaacttgccccagggcatctcaagctgtttcaatccagcctccaatcctcctctatttgstgaaagtgtaagtgtggaaaaatagtgtctccacagaaggcaccatgcgcacttgggtttacagtgtcttagatacttgtggtacatgatgcccaagttggagagcagaaccatccacaccagaaagtcatactgtctgagagaaaagtcttggggcctggactggtgtcacttctagtgggaaattgtggatgagatgctggaagcccacaaaggcaaaggcaagtcctcacttgctgagaaaacaaggaatagtgagagttctctggtccctgggagctatggtgggaaagctcataggatgaatgctaagactcagctcctgtgggctgcgtgtgttctgactggtggtcctggactggtctcatggggactactcttccttttaaagcacatttctcagatttatccccaactcctgctccatgttccctcagatccccacagttc

SEQ ID NO: 441215 - DNA, 583 bp, Homo sapiens
gtgaggcgtcaaagcccttttcattttcccagcctatggataatagtgtttttttccataactcttagaccaccaacttgccccagggcatctcaagctgtttcaatccagcctccaatcctcctctatttgctgaaagtgtaagtgtggaaaaatagtgtctccacagaaggcaycatgcgcacttgggtttacagtgtcttagatacttgtggtacatgatgcccaagttggagagcagaaccatccacaccagaaagtcatactgtctgagagaaaagtcttggggcctggactggtgtcacttctagtgggaaattgtggatgagatgctggaagcccacaaaggcaaaggcaagtcctcacttgctgagaaaacaaggaatagtgagagttctctggtccctgggagctatggtgggaaagctcataggatgaatgctaagactcagctcctgtgggctgcgtgtgttctgactggtggtcctggactggtctcatggggactactcttccttttaaagcacatttctcagatttatccccaactcctgctccatgttccctcagatccccacagttc

SEQ ID NO: 441216 - DNA, 583 bp, Homo sapiens
gtgaggcgtcaaagcccttttcattttcccagcctatggataatagtgtttttttccataactcttagaccaccaacttgccccagggcatctcaagctgtttcaatccagcctccaatcctcctctatttgctgaaagtgtaagtgtggaaaaatagtgtctccacagaaggcaccatgcgcacttgggtttacagtgtcttagatacttgtggtacatgatgcccaagttggagagcagaaccatccrcaccagaaagtcatactgtctgagagaaaagtcttggggcctggactggtgtcacttctagtgggaaattgtggatgagatgctggaagcccacaaaggcaaaggcaagtcctcacttgctgagaaaacaaggaatagtgagagttctctggtccctgggagctatggtgggaaagctcataggatgaatgctaagactcagctcctgtgggctgcgtgtgttctgactggtggtcctggactggtctcatggggactactcttccttttaaagcacatttctcagatttatccccaactcctgctccatgttccctcagatccccacagttc

SEQ ID NO: 441217 - DNA, 573 bp, Homo sapiens
tttgactcactaaatggcagactagttaactaaaagagcgatgcaacatctaaagttataaccacatatatgacaattaaaggagggaaaaagatcttggcaaaaatataaaacctgggatgactccagctttctcactattggaaatctcaatacattcaggtttatgctgcctaaaaaattctatactctaaaccgatttcaaggagatgcaaaggttttgaaaaataaaaccccagattatagaggaaatcacagtgccaagggctaataacagggaagctaaaataagaattagaacaacggctatttgagaaacgtttcagaaggttattccataaaagcaaatgtaaaactattacgtaggataacaaaacagcttataataattatgttcatgycattgctgttgtgtttagattaatattccttgaagaaaatagctgtgttgctatcaaatatgttcaatctttaaaatgttctctttttctaactagtatgacagttttactgtattattaattgaacttgggaacagcacctcattccctcttctggaagctcttggtaatt

SEQ ID NO: 441218 - DNA, 592 bp, Homo sapiens
ggtaattcacctgtacccattctaaatgttactgtcctttaacccaggctgttctccatgcaactgtgactataatgacccatggcaatgtgtctgtatctctgaaaactttgataactaccacacactgcaacagatggatttaatcaaacttataagtattaaaaatacatctaaagtagattctagaggcatgtgtaggcaaacattatgaatgagtttacacagagcaagtgtgtagtgtttcatcttattgaatgaactcagccagcctaactaaatggtgtcccataagaaccttgtaaacccagttcctccgtgggtggtggcctcctgttctcttactagactccagtgcagcatgattcttgacaccatctaccccatgtccctcagctaaattgcagcagatgtggccctaatctcttccatgtgaagggaaatatcatttataagtgtaytggggacttcttcatcttatgcaacagcagctggaaactttaattttctccacacaaaatgcatgcaatatgggtgtgaaattacagaaggttgtataagtccctagttctggcacctcattaaacacttt

SEQ ID NO: 441219 - DNA, 588 bp, Homo sapiens
gctgccatgcccaggaggatgctgaccacatttaacagaaaggcaatcacatgcatagttgtagtcatcaaagaggttaactgctgcaacagaaataccaaaatctcagtgatttcagcaataacattttaccacaccagttcagtgcacacgttggataggcagccatgtagtcctttagggacaactccagcctctgtccaactttcttgtaataccrtcactcagcactctggccagctctcatgggaagagaatcacataggaggaatttctatggtcaaggccaggaaatcagctggccacacttgcttacatactccattaggtatgactcagtcccagggacacactcagcttcaaagaggctctggacacagtctagctgtgagccagagaagaaaaggcaatcgatttgttgaatatcaagccatctttgccacacgttagcatttgtttacctttttatgtaattagaaagtttctatattttaaaaagataaatcactccattcacatttagattaatcacggaatcactgatatacataaaattgtatgcctgctattctgcatttttctttcctt

SEQ ID NO: 441220 - DNA, 624 bp, Homo sapiens
tagtcctttagggacaactccagcctctgtccaactttcttgtaataccatcactcagcactctggccagctctcatgggaagagaatcacataggaggaatttctatggtcaaggccaggaaatcagctggccacacttgcttacatactccattaggtatgactcagtcccagggacacactcagcttcaaagaggctctggacacagtctagctgtgagccagagaagaaaaggcaatcgatttgttgaatatcaagccatctttgccacacgttagcatttgtttacmtttttatgtaattagaaagtttctatattttaaaaagataaatcactccattcacatttagattaatcacggaatcactgatatacataaaattgtatgcctgctattctgcatttttctttccttttcttgttgcatacttttccctttacttctgctagttggatacgaatattgtccacttcattttccctcattcatttgtaactctactatacttttttattccagtaatggttactattagcatatattgaattaatttgaacaagataacctctaattattcacaatggccttgtaaattatctacttcaccactgcccctaccc

SEQ ID NO: 441221 - DNA, 624 bp, Homo sapiens
tagtcctttagggacaactccagcctctgtccaactttcttgtaataccatcactcagcactctggccagctctcatgggaagagaatcacataggaggaatttctatggtcaaggccaggaaatcagctggccacacttgcttacatactccattaggtatgactcagtcccagggacacactcagcttcaaagaggctctggacacagtctagctgtgagccagagaagaaaaggcaatcgatttgttgaatatcaagccatctttgccacacgttagcatttgtttaccttttwatgtaattagaaagtttctatattttaaaaagataaatcactccattcacatttagattaatcacggaatcactgatatacataaaattgtatgcctgctattctgcatttttctttccttttcttgttgcatacttttccctttacttctgctagttggatacgaatattgtccacttcattttccctcattcatttgtaactctactatacttttttattccagtaatggttactattagcatatattgaattaatttgaacaagataacctctaattattcacaatggccttgtaaattatctacttcaccactgcccctaccc

SEQ ID NO: 441222 - DNA, 572 bp, Homo sapiens
ttggtgacctgtgtcccagccatggctaaaaggggttaatgtagagctcaggctgttgcttcaaagtgtataagccccaagccttagcagcttccacgtggtgttgagcctgcggaagcaaaaagtcaagaactgaggtttggtaacatctgtctagtgttcagaggatatatggaaacacttggatgtccaggcagaagtctgctgcaggggcagagccctcatggagaacctctgttaggrgcatgcagaagggaaatgtgaggttggagccctcacacagagtgctttctggggcactgcctagtggagctgtgagataaaagccactgtcctctagaccccagaatgttagatccactgacagcttccatcatgcacctggaaaagccacagtgactcaatgccagcctgtgaaaggagctgggagggggctgtactctacaaagccacaggggcaggctataggagcccacctcttgcatcagcatgacctggatgtgagacattgagtcaaaggagattatttcagagttttaaaatttaagtactgcctcgttagattttggact

SEQ ID NO: 441223 - DNA, 517 bp, Homo sapiens
tggcatgctagctcaagtccaaatgcctcagtatgttgttgacaagttcctccgtgatccagctaccctcatctcccactgctaaaatgtaccctgtagttcggccatttcaaaaagcctttatctaaattacccctgccttttcatgtctatgtttttcatattagatctccatgtccctatagtccttcattccctacagtcacaagttgactttgaaaaccatttaagatatcaactatattctgattttttttctcatttcttccatcttccaccccaatcaactaggtaaatttatgtgytttttccataatcttccccaaagatagtacatttattgatggcactacaaattaataaattgaggtacagtaaagttatgtaacattttcagagtcatatagctaataaggtacagaggtatgatttatacctcttattattatattttaatactcagcatctagtattaactgctatgctttaggtaccagcatgcttgtctttttttcat

SEQ ID NO: 441224 - DNA, 607 bp, Homo sapiens
caagggttcccttttctccacattcaggccaacacttgttatttttgtgttgataatagtcattctaacaaatgtgagctgatattgcattgtggttttaatttgcattttcctgattattagcgatgttgagcatttattcatatacctgttggctatttgtatgtcttctttggaaaaatgtctatttaagtccattgttcatttttaaattaggttttttggttttttgctatttaactgagttccttatgtattttggatactaaccccttagcagatatatggttctcaaatattatcgcccattgaggtttccttttcattctgttgatttgttttttggctgtgcagaagcgttttagttagatgtagmcccacttattcattttgcttttgttccctgtggttctgttgttatacaagaaatcatcaccagcaacaatgtcctaaagcttcctttcctcctgtgttttcttctaggggtttcacactttcgggtgttacatttgcctttaatccattttgagttgatttttgcatatggcgtaaaataaagagaaaataaattcttattttacattctggatctgggtttaaatattct

SEQ ID NO: 441225 - DNA, 552 bp, Homo sapiens
tgctatttttatctcctgaggctaaacttagtacaaatgaattagaactatcaattaaaaaggagtggggcaagagagaaaaacagggaaaatctattaagcattcatagacacaaaattgcagaaattatgaagatgagcaaccctaaagaagtattttatgcaacccgcatgcattcttcaaattatgcaaatgaatttartaaaatcagaattcatttaaaatgtacataacctcaacaccccatctctccaagctcctagctctccaggcacacatttactcatttctctgttaatcagtgaaggtaactttttaacctcccagggtttggaaaatagagatccttaaaccagagcaaaagctgtcttccactgaactatgacaggaaaccaaaatgaattgccttccatttgaaagttcatagagaaagaaataagttaaaatgctattcctcaaacagagaagatttgtacataaaaacataagcccaatgtgccccattatctagattcacagctttgccaaaggaaaccacctaatatattaaa

SEQ ID NO: 441226 - DNA, 578 bp, Homo sapiens
aagagagagatactgaggtttccttagataagggaaatagatatgtacatcaggtactggaggggcaggtttgaaattcagaatgttcaggaatgtgttgaaggaaagggataaaatggggatatgaagtcgtaaggcccagtacaaactaaatgagcctggaactgagatagatgtagtctctgaatcagcttcacagtcagatttcaaataatgctttactaagcgtaggtttctgtaactctaaattggcctaataattttcatcttgatgggagatgtgaggttaaaagagctttctgaatatgaatgatttgtcacagtggctgggacgtaatacatgctccgtagatgatcgcctctcttgccataattatttttaggattagcacaataattgatccccagtccaaaagwcaggtaagaaatagaaaacggatatatgaatggaaagggggccacagataaaagctgtctatcttcagattctaagatgatcactgcagcgaggtgggagggacttaaggagctgtggaaaggtgtggaggagatgaacacaggagaagggtaaaagtgtt

SEQ ID NO: 441227 - DNA, 585 bp, Homo sapiens
taagaattataacaaaaacctttgctagtaacttcttttaactaacagttttgtaagataaataatgytagggatgcaagtaccagcagcaaccagggcatcaggttctgcaccagccattcctcaggtttatcttcggcctcggttcccattatcttggtgctctgaaagcagacttttctcatttgttctttaatctgttattcaggtaatttctctgtcccttgtgtaccgctaaagacttttccccagctgcaaggactgatttcatttctaaatagtcttgctttgttttcatcccttactgtctttcccaaatatttctcccaccattgacattgtgttcttttaaccttcaattacccacctcaccctgggattgtttatctttctttaaatttcctccttccaaagcaaactgccacctttaagaagttccttaattcttatgccactatcgcaacaatttgtttttttcttggtgaggaataatttttccccaatttattttgttgtgtatcttcttctctaagtgaattctcatggcatatggcggggatattatctgtgcacttccatagaaag

SEQ ID NO: 441228 - DNA, 585 bp, Homo sapiens
taagaattataacaaaaacctttgctagtaacttcttttaactaacagttttgtaagataaataatgttagggatgcaagtaccagcagcaaccagggcatcaggttctgcaccagccattcctcaggtttatcttcggcctcggttcccattatcttggtgctctgaaagcagacttttctcatttgttctttaatctgttattcaggtaatttctctgtcccttgtgtaccgctaaagacttttccccagctgcaaggactgatttcrtttctaaatagtcttgctttgttttcatcccttactgtctttcccaaatatttctcccaccattgacattgtgttcttttaaccttcaattacccacctcaccctgggattgtttatctttctttaaatttcctccttccaaagcaaactgccacctttaagaagttccttaattcttatgccactatcgcaacaatttgtttttttcttggtgaggaataatttttccccaatttattttgttgtgtatcttcttctctaagtgaattctcatggcatatggcggggatattatctgtgcacttccatagaaag

SEQ ID NO: 441229 - DNA, 611 bp, Homo sapiens
taggtacttgagtcatcagtcttttacagckgtgtgtttgttagtcaggattctccagagaaaaccaataggtgatagataaatgataggtgatagaagagggaatttatttatttatttatttatttatttatattttgagatggagtcttgctttatcacccatgctggagtgcagtggcgtgacctcggctcgctgcaacctccacctcacaggttcaagcgattctcctgcctcagcctcccgagtagctgaaactacaagtgtgtgccaccacacccggcttttttgtgtgtgtttttagtagaggtggggtttcaccatgttggccaggctgctctcgaactcctgacctcaggtggtctgtcccccttggcctcccaaagtgctggcattacaggcgtgagccaccgtgcctggccagaagagggaatttattatgggaattggctcacatgattatggaggcccagaagtcccacgatctgccaactgcaagccagagaatcaaggaaactaattcagtctgagtcccaagacctgagaacaaggagagctgatgatgtaactcctagtctgaggctgaaggcctaagaaccaggagcaccag

SEQ ID NO: 441230 - DNA, 596 bp, Homo sapiens
atcagtcttttacagcggtgtgtttgttagtcaggattctccagagaaaaccaataggtgatagataaatgataggtgatagaagagggaatttatttatttatttatttatttatttatattttgagatggagtcttgctytatcacccatgctggagtgcagtggcgtgacctcggctcgctgcaacctccacctcacaggttcaagcgattctcctgcctcagcctcccgagtagctgaaactacaagtgtgtgccaccacacccggcttttttgtgtgtgtttttagtagaggtggggtttcaccatgttggccaggctgctctcgaactcctgacctcaggtggtctgtcccccttggcctcccaaagtgctggcattacaggcgtgagccaccgtgcctggccagaagagggaatttattatgggaattggctcacatgattatggaggcccagaagtcccacgatctgccaactgcaagccagagaatcaaggaaactaattcagtctgagtcccaagacctgagaacaaggagagctgatgatgtaactcctagtctgaggctgaaggcctaagaaccaggagcacca

SEQ ID NO: 441231 - DNA, 593 bp, Homo sapiens
ggtgcacaacatgcaaattatatgtcacaaccctggcagtctacactagcaaaccttacacagcccctaactgttgaggtcagagaagggaactgattctaggtatagcatattgcaaatactagaatccaccttgacctgcccactcaggtgccctggagtatttgaagaagatgacttcaggtttgtttgaacttaaagtgctatagcaccaaatgctattacaatttaggacrtaagcaatttttgtatgaaacatatcattctcactcttagttctccggagtcagaaggaactaagaaaggtttacctggaggtcagcaagagcagatggatgaacgggagccagggaaagagggagttgggctaccaagccttggtacagctgagagcagctccagtgtggtcagcagatttccctggtgggggctgtggctgccacaggttcgaatgatgcaatgggagtgacatctccaaggactgtgaaggagccagggcgggggtcattcaagtaacagggacctgatgaaattccccttgggctgtccatgagtgccaattgaaactagcttgaaaatctgcagaagcagat

SEQ ID NO: 441232 - DNA, 593 bp, Homo sapiens
ggtgcacaacatgcaaattatatgtcacaaccctggcagtctacactagcaaaccttacacagcccctaactgttgaggtcagagaagggaactgattctaggtatagcatattgcaaatactagaatccaccttgacctgcccactcaggtgccctggagtatttgaagaagatgacttcaggtttgtttgaacttaaagtgctatagcaccaaatgctattacaatttaggacataagcaatttttgtatgaaacatatcattctcactcttagttctccggagtcagaaggaactaagaaagktttacctggaggtcagcaagagcagatggatgaacgggagccagggaaagagggagttgggctaccaagccttggtacagctgagagcagctccagtgtggtcagcagatttccctggtgggggctgtggctgccacaggttcgaatgatgcaatgggagtgacatctccaaggactgtgaaggagccagggcgggggtcattcaagtaacagggacctgatgaaattccccttgggctgtccatgagtgccaattgaaactagcttgaaaatctgcagaagcagat

SEQ ID NO: 441233 - DNA, 593 bp, Homo sapiens
ggtgcacaacatgcaaattatatgtcacaaccctggcagtctacactagcaaaccttacacagcccctaactgttgaggtcagagaagggaactgattctaggtatagcatattgcaaatactagaatccaccttgacctgcccactcaggtgccctggagtatttgaagaagatgacttcaggtttgtttgaacttaaagtgctatagcaccaaatgctattacaatttaggacataagcaatttttgtatgaaacatatcattctcactcttagttctccggagtcagaaggaactaagaaaggtttacctggaggtcagcaagagcagatggatgaacgggagccagggaaagagggagttgggctaccaagccttggtacagctgagagcagctccagtgtggtcagcagatttccctggtgggggctgtggctgccacaggttcgaatgatgcaatgggagtgacatctccaaggactgtgaaggagccagggcggggktcattcaagtaacagggacctgatgaaattccccttgggctgtccatgagtgccaattgaaactagcttgaaaatctgcagaagcagat

SEQ ID NO: 441234 - DNA, 481 bp, Homo sapiens
atgctttgtgttggcgacaaggacctgttcttctctaccccctaaaagctctaaaagataagcataagccacagaatgtttcccctaaggaaactgaaactctgaactccaagctctctatgccttgggacctgctaggtcaccttcccccaccaaacacccctatctttcctcccctcaagagctgctgtcccagacccttctcctaccgctattgttccccctccttataaccctgcctcttggaaattgtccctagagcccactcactacsagcctaagtacccttccctaaagggacttcaaagtgaaacagcaatgtaaagaagatattcaaaattgcccctccccttttacctcaggggaatcagctccagctctcttccccattgagggaggtgcccctaggaggaggagacattggctttgtaaatgttcctttaaccatctcagaagtatgaaacctaaaaagagagcttaa

SEQ ID NO: 441235 - DNA, 640 bp, Homo sapiens
agaacagcacaggaaagacttgcccccatgattcagttacctcccattgggtccctcccacagcacatggaaattcaagatgagatttgggtggggacacagccaaactgtatcaccttcaaaagcaaaggagaaatactttctcaagtaaaaactgagagaattttttactggtagatctgccttgcaaawaattatttttaaaaagttcttagagaaaaggaaagtatataggttagaaactcagaaatatgtaaagaatgaaaaagtgtcagagaatgaataaataaaaataaaaatctttattttattcataatttttaactgtctgctcaaaacaataatagcaacaatgtgttcgatgattatagcatgtggataaataaaataattggcagcagtgtactaggggatgaatcaggaatactttacctgcactacccattaagcagtatgatgtcatttgaaggtggacttagattagttgtaaatgtattaatgtattgcagactctagagaaaccactaaatttttttttaaagaagtataattgatatgctgagagaatagaacattgaattatgtaaaatcctcaattaagaccaaagaaggcagaaaaagaggggaagataaaaaacag

SEQ ID NO: 441236 - DNA, 640 bp, Homo sapiens
agaacagcacaggaaagacttgcccccatgattcagttacctcccattgggtccctcccacagcacatggaaattcaagatgagatttgggtggggacacagccaaactgtatcaccttcaaaagcaaaggagaaatactttctcaagtaaaaactgagagaattttttactggtagatctgccttgcaaaaaattatttttaaaaagttcttagagaaaaggaaagtatataggttagaaactcagaaatatgtaaagaatgaaaaagtgtcagagaatgaataaataaaaataaaaatctttattttattcataatttttaactgtctgctcaaaacaataatagcaacaatgtgttcgatgattatagcatgtggataaataaaataattggcagcagtgtactaggggatgaatcaggaatactttacctgcactacccattaagcagtatgrtgtcatttgaaggtggacttagattagttgtaaatgtattaatgtattgcagactctagagaaaccactaaatttttttttaaagaagtataattgatatgctgagagaatagaacattgaattatgtaaaatcctcaattaagaccaaagaaggcagaaaaagaggggaagataaaaaacag

SEQ ID NO: 441237 - DNA, 556 bp, Homo sapiens
agagaatgaataaataaaaataaaaatctttattttattcataatttttaactgtctgctcaaaacaataatagcaacaatgtgttcgatgattatagcatgtggataaataaaataattggcagcagtgtactaggggatgaatcaggaatactttacctgcactacccattaagcagtatgatgtcatttgaaggtggacttagattagttgtaaatgtattaatgtattgcagactctagagaaaccactaaatttttttttaaagaagtataattgatatgctgagagaatagaacattgaattatgtaaaatcctcaattaagaccaaagaaggcagaaaaagaggggaagataaaaaacagctacaataaatagaaaagttacaaatatggtagatattaattcaactgtatcaattatcattttaagtggaaatgattcaaaaacaccttctaagagacagagattgtcagagcagatcaaagaacagaaactaactatatgttgtctacaagaaatacamtttgaatgtaaatccacagatagattac

SEQ ID NO: 441238 - DNA, 475 bp, Homo sapiens
aaacctggggacatgctgaagtttgaagctggtgctcactttcatcattgcctgagttttcccaagcagcttttgaagagtgaggaactaagttttcttagaagagtaaatgtctcacagaggggtcacccttataccttggatgttgaaactttgtacttctggaactaaagcagttaccacggtgctgggcattgggggtagggctaaggcgttctaacctcaggagggctaacagttcggggacactctttwtatctttggcgaccccatttttttcaagcccaaaatgaggccaggtgatctggcaagttttgtgtttctaacattgtgacaaaccccagaatgatattgcatcacggaaaaaactcctaggcccaggcaactgggacccctgggctaggccccacactttggggggcccatctggccttttccagccacgtctacggccataccaccctgaacgcccccg

SEQ ID NO: 441239 - DNA, 475 bp, Homo sapiens
aaacctggggacatgctgaagtttgaagctggtgctcactttcatcattgcctgagttttcccaagcagcttttgaagagtgaggaactaagttttcttagaagagtaaatgtctcacagaggggtcacccttataccttggatgttgaaactttgtacttctggaactaaagcagttaccacggtgctgggcattgggggtagggctaaggcgttctaacctcaggagggctaacagttcggggacactctttttatctttggcgaccccatttttttcaagcccaaaatgaggccaggtgatctggcaagttttgtgtttctaacattgtgacaaaccccaraatgatattgcatcacggaaaaaactcctaggcccaggcaactgggacccctgggctaggccccacactttggggggcccatctggccttttccagccacgtctacggccataccaccctgaacgcccccg

SEQ ID NO: 441240 - DNA, 475 bp, Homo sapiens
aaacctggggacatgctgaagtttgaagctggtgctcactttcatcattgcctgagttttcccaagcagcttttgaagagtgaggaactaagttttcttagaagagtaaatgtctcacagaggggtcacccttataccttggatgttgaaactttgtacttctggaactaaagcagttaccacggtgctgggcattgggggtagggctaaggcgttctaacctcaggagggctaacagttcggggacactctttttatctttggcgaccccatttttttcaagcccaaaatgaggccaggtgatctggcaagttttgtgtttctaacattgtgacaaaccccagaatgatattgcatcacggaaaaaactcctaggcccaggcaactgggacccctgggctaggccccacactttggggggcccatctggccttttccagccrcgtctacggccataccaccctgaacgcccccg

SEQ ID NO: 441241 - DNA, 552 bp, Homo sapiens
ctctttggtctgggtatgatggttagttttatgtgtcaacttcactggatcacagggtgcctagatatctggttaaacattattttgggtgtgtctgtaagggtgtttctgggagaaattaacatttgagtcagtagactgagtgaagcagatggtcctccccaaggtgggtgggcatcatccattccatggagggcctgcatagagcaaaacggcagaggaagggagaatttcctctttgcgtgcttgcttgagctaggatatcacccttcttccctcagacagaaacttgcactatcagctcacctgcttctaaggcctctggacttggactagaatttatactactggctgtcttaggtctccagcttgcagatagcagattgtggaactttctcagcctccataatcaagtgagccaattctgcataaatctcatatataaatatrtatataacctgatgaatgcactggacatgccatacaaatatctcttcgtctcagaaacctgacatggcaggcctattttaggccctctgggctcttccatgg

SEQ ID NO: 441242 - DNA, 530 bp, Homo sapiens
tgcactggacatgccatacaaatatctcttcgtctcagaaacctgacatggcaggcctattttaggccctctgggctcttccatgggggttaggaacacaagtgtcccctgttcttagaccctaaacttatccaggtaattccatctccatctctccaaccaccaatactgcccctycttggggactcacagcagcatctaatcctctggcttcctctctgactcttctccttccctcggtccaggaatatgtatctaggcctaaatggggaggagctattggggggagtctagctctggctggtgatatagtcttccaaatggatcatgagtctttgatggttttgaaatccaaaaggcaagaattattttcttgtcttttgcattctactattttatcccttctctaaagtaagaaaataaaaacgattgggaggccgaggcaggtggatcatgaggtcaagatatcgagaccatcctggccaacatggtgaaaccccgtctctactaaaaatacaaaaaattagcca

SEQ ID NO: 441243 - DNA, 530 bp, Homo sapiens
tgcactggacatgccatacaaatatctcttcgtctcagaaacctgacatggcaggcctattttaggccctctgggctcttccatgggggttaggaacacaagtgtcccctgttcttagaccctaaacttatccaggtaattccatctccatctctccaaccaccaatactgccccttcttggggactcacagcagcatctaatcctctggcttcctctctgactcttctccttccctcggtccaggaatatgtatctaggcctaaatggggaggagctattggggggagtctagctctggctggtgatatagtcttccaaatggatcatgagtctttgatggttttgaaatccaaaaggcaagaattattttcttgtcttttgcattctactattttatcccttctctaaagtaagaaaataaaaacgattgggaggccgaggcaggtggatcatgaggtcaagatatcgagaccatcctggccaacatggtgaaacccygtctctactaaaaatacaaaaaattagcca

SEQ ID NO: 441244 - DNA, 541 bp, Homo sapiens
ggctgctataagatttggggtcgttggttaacagcaaaagctaatacatactgcagtgaataatcatgaatatacaagtttatacaagtttaagagtagaagttacaatacagaatgagagatggagtgaggtttaagaatgggatgaggttcagggatgaaggaagaatagaggaggctcaaggagaagaggaggacaggaatgggatagagtcctagatgagaagagagtttaggatggagatggcaggctccagaatcagtgaggatatctatgtgcatttacttgataattttcaaaatctgaacgtttattgatttgtttattaagctgcatcaaaatgtcatttgcagagagtgtatattccccatatactcatccaaaacattgattattctttttcctccttgccagtgtgrtaagtgagaatgatacctgcatgtctgggttttgcactctgcaattaatagtggcattgaatttctttccacgtggttaccgtccttttgctctcctgtttgtgtctggcccattttgcca

SEQ ID NO: 441245 - DNA, 531 bp, Homo sapiens
cactccttcatcccccttcttcggagcagaatcctgattttgtgaagctatctatcctcctgtctgcctgtgtgtcagggaagaccccagctcagagggctgatcctgagaggtctaagccgayggtggctttctcctctccctctgccagtggctgatctaggcatgggtccatgatgagcaaactccagcctgacacctgagaggagcgctgctgggggcttctgggaaagtttactgtctcagacagagcttgtttgtggctccatgatgcctgggttgctgcagcccaacttgccaccagcctggtataaagccctcacaggggtggctgggcaggaagaagctggtccgttctgacataatcgaaccactgaattaaccaaatccagagacccacccgagcctcttgtgatgggagagaacccatttccttattagataaacctatttgagacagagttttctcaaggcatctcaactgatacagattgttcagtgaaatcaagccaagaagggagactgaggctc

SEQ ID NO: 441246 - DNA, 514 bp, Homo sapiens
acttagcttccataaatcagtcaattaccacttaagtttgcctgcccattagttacttacttgctccagtagcttctactttaattgtatcatttaaatttcagtgttcttttgttgctgawatataacaatataattaaactttgtatattgaccttatatctatcaccttgtggaattcacttattaatgctaatgcattttctgttaatttttaaatggattttctatgtacacaatcatgttatttaaaaataattacaatttcatttcccattatttctaattttgatagctttttttttttttttttccttattgcaactactgcctattataatgttgaatagaagtggtgactgagtatctttgtttcattctttatttgggtaaaatctttcaatatttcccattaggtgtgatgtttattttagagttctttctcttccaagctactctatcagttaaagaatgttcccttctaatcccacactcagaatttttttttttcttt

SEQ ID NO: 441247 - DNA, 514 bp, Homo sapiens
acttagcttccataaatcagtcaattaccacttaagtttgcctgcccattagttacttacttgctccagtagcttctactttaattgtatcatttaaatttcagtgttcttttgttgctgaaatataacaatataattaaactttgtatattgaccttatatctatcaccttgyggaattcacttattaatgctaatgcattttctgttaatttttaaatggattttctatgtacacaatcatgttatttaaaaataattacaatttcatttcccattatttctaattttgatagctttttttttttttttttccttattgcaactactgcctattataatgttgaatagaagtggtgactgagtatctttgtttcattctttatttgggtaaaatctttcaatatttcccattaggtgtgatgtttattttagagttctttctcttccaagctactctatcagttaaagaatgttcccttctaatcccacactcagaatttttttttttcttt

SEQ ID NO: 441248 - DNA, 507 bp, Homo sapiens
tgttgaacccctgatgtgatgacatttggagatggggtctttgagaggttaaaggttaagattgaatgaggtcataagggtggggcctttatgcaatagggtatgtgtccttataagaagaagagacaccagagatctctgtctgccwtgtgagggcacagcaaaaactcaaccctctgcaaaccagcaggagagccctcaccaggaaccgaattggctggcaccttgatcttagacttcccacctccagaaataagctcccattgagaaataagctcccgttgttgaagccatcctatctgtggtattttgttatggcaacccgagctgactgagacaatcgtcttgcctgtcagccttgaccttgctgctctgtggcatccccatttccatgatagcccctgtcacactggcattccacccagcaagaaggaagaaagagacaggagcacacacaccttcccatggaggtgaacagcataccacacagcccctcagggcccactg

SEQ ID NO: 441249 - DNA, 507 bp, Homo sapiens
tgttgaacccctgatgtgatgacatttggagatggggtctttgagaggttaaaggttaagattgaatgaggtcataagggtggggcctttatgcaatagggtatgtgtccttataagaagaagagacaccagagatctctgtctgccttgtgagggcacagcaaaaactcaaccctctgcaaaccagcaggagagccctcaccaggaaccgaattggctggcaccttgatcttagacttcccacctccagaaataagctcccattgagaaataagctccygttgttgaagccatcctatctgtggtattttgttatggcaacccgagctgactgagacaatcgtcttgcctgtcagccttgaccttgctgctctgtggcatccccatttccatgatagcccctgtcacactggcattccacccagcaagaaggaagaaagagacaggagcacacacaccttcccatggaggtgaacagcataccacacagcccctcagggcccactg

SEQ ID NO: 441250 - DNA, 572 bp, Homo sapiens
attaggaaataacctgctgtgtggcccttagtgaccaaatagattctttatgagatgacctttttgttaaggtgggaaaacttgagcagtgcacagttttcctggcactggagaaatctttgagcaaggtgctatctggaaaagtggaaccctggtcacatgggaggacatggagtctctcaggcacaatgagccatgacatcccttttcctctttctcttaggtctacattgaatacgtctttgctgctctgggatccatcctccagtcttcagtcagctaagaaartgacctgtgggcacgttggcttcctttcttcggattaagtggttgttcagagagaggctgagtctgattgtttacacaagaaggaagtgaacactggctgtgtgcctggcactgttaggagccatcaaaccatgtccagaaaggacgcagggaaaggagatgtcgatgtttccagacattttgtgatgtgaagagagcgcctgaaggtaagttgggaaaaacggttctagtttttgttctgctgttttcaagtttgacttctcagaaccagtttcctcgcctat

SEQ ID NO: 441251 - DNA, 548 bp, Homo sapiens
gacaaatgatcagatcattttgtattttggcaaagaaactgtcaaaaccccttttatttggttctagttttctgtggacagtaaacagcttattattctagccatctgtacttttaggggaacagagacaccagggggctggaaaaaatttaaaatattaaaaaggttttagtaagttgattatatgttagattatatctgaaattattaawagaaagtaaaattactgctctctaactatgtcctatactagcgatgctttatggctttccaaagctatttaaaacatggtttatttaagtgaattagctcttagtgcataacctcttcaacctgcacctcctctttgctccaacaggatcactttccagccatgttctagtaaatggtactaggctaaaacactgggctccatatacagaacagttattagacaaaaggaagcagagagctgtaatccctgggagaaggaaaacaagacacaagccttacaatcaaaaaaatttctcccatcctgggcaacataggaaaccacatctctacaaaaa

SEQ ID NO: 441252 - DNA, 616 bp, Homo sapiens
tggccaacatggcgaaaccctgcctctactgaaaatacaaaagttagccaggcatggtggtgtgcacctataatcccagctactcaggaggctgaggcatgagaatcgcttgaacccaggaggcggaggttgcagtgagctgagatcgtgccagtgcactccagccggggcaacagagcgagacactctctgaaaaaaaaaaaaagcttaacttgatgaatagaccagccatagtttaagcagcaggagctataggctaagccacacgaggtccctgcaggaggggacaccccccccaacacacaccaggagaagcaaaaaggtcttattccatcccatcttccttagaatcactggcagagaaaggggtgcctgtcacccacctggggtaacatctgcccactggttttctttttcatgaactttggggaaggattaaaaacccagaaatgtcctacttatcaacatagctttaccttttctttcattggttatatcaatagctctaatgccagttaaacaatgtgagactgtttggggcttcagttcttcagaatgtcaaaaatctcacagcaatatggatggtttgyacagtctgttcaatttaacaaacact

SEQ ID NO: 441253 - DNA, 432 bp, Homo sapiens
aggccatgtcagagttttaaaatatcaaatgccaaatccaatttttcaggttcaatgtttaattttctatgaaatatgaggacagggttaacaaagctgatggcaatctaaagaaaaaaaaaacgccttctaatattttatcttctctcctactaagtaaatatccctccagggagctcatatctagactagagcctatactataaaggtgaaacccttgtgtgcataagtrttctcatgaaatcctttttccccagcaggtcagaagacggtatttaccaagtctcttcccaaaatacttgcaaatgcacataatctcaaagtgtttttgagggctcttccgatctaaaattggtcctagtgacaaggggtgtttggggaaatcaaagggctggcttaactatgtagacctaggtctggtcttatttctgg

SEQ ID NO: 441254 - DNA, 549 bp, Homo sapiens
gtaagtgactgttagtaaaatctcatcattatttaatggcaacttgtagaaaaacaatatatcaccattatgtgctaaagccctgagaaggcaggatcagctcttcttccttcctcctccccaaagcactctacacccagagctgggtaagccaataaccacactaccaccatctccattgatcctacgtggtggacttggcagaatgtttcctttaaggttcctggcttcagcctttcagaatgtctgctcttgacaaggtggagcttctcatgccagggattgygagggtcagggaggtggcaggtgtgtggcgaggggtgtatgtctccatgaaaggaaccaactccaagcagaagtggatgttgacatccaggagcttgggtttctctgattgttgacttttttgtgtatcatttatgtaggagggggcagatgagtgacatcgcatgagtatactggatgacatgtctacgcagatgcagtgatccagttaattcagtgaagcatctgttttctgtaactcacccacataataaaagtcacaca

SEQ ID NO: 441255 - DNA, 594 bp, Homo sapiens
aaaaacatgaaataaacacaagagcaaaataaaataaaattcatctataaaatcatctcccaaaaataattattgttaacattttggtttctatctttgaagaacaattttgggggaaacaatatataattaaacttggattctaatgtatrgacatttgcaaaccaattttcttcagctataaaaattttcctcattcattgaatattatttattttctttcactaaattgggattatgtactacatattcttttttgtcactattttttctcttaatctaccataaatatttatccatgtgattcattctttcatccatttcctcaaaaaatcaataaatactgtgagataattttgcctgtctttataatggttatatctattttttctgtcgtattttcttattcttttttcttgctattaattataatgattataatgatataatgatatatataattatataataatgatataatgatataattataatgatacctatttctgtcttatttttcttattcttttttcttgctattaattatgatgagcatctttgtcctgttcatggctttaaagagaatgccgcaac

SEQ ID NO: 441256 - DNA, 595 bp, Homo sapiens
ttaattgaccccaattggggcccaggcatcggtccatttctaagaaccccaggtgttttcaatacacaaccagagttgaagactatggtttctccctgaccattctttctgtttcattycttcactccaactgtgcctgcttttcaacatccttgggtcctctgattcagtgactctctcctttgctcatatccatccagcctctcctctttttccctctcatgctttctgtctccctgcctggtttcaactccatgcctcatcgcttcagctgccccttcactagtatcctaaactacctcgctctgttgtgcttccgtaacaaccacccaaaacaccccaatctaaaccaatccaactgttctctttctccatgtctacactgagacttctgagcagtgcttgcgtggggaaagcaatactcttcaagtcaattaaaattacttttagcaaattaaaaatggaacggaacttccttaatagaataatggaatttgcagcaattatttgtgtacataaaaattccaagtaaatccttgttaaactattggaattaaatatggtcatgtgccacatagccatattttagccaaca

SEQ ID NO: 441257 - DNA, 629 bp, Homo sapiens
gtgttgcccaaacgtcaatgatgcagaggttgagaaacctggtccgaaaagagtcaggaattaagtggccccagcaaggggagtggcaaacagaggagaacgtggggcctccttaggggaaccagtgtgcagacttctgcaagaccaagctgcrctgaccgatggagatactgaatgacttgctaacagctttggcctaatgattttgtgcatcctggagccctggggctttttggaggcaaatgttaatgtaatgcttcagttctgcctccaacttctatgatacttacgtgttggattcatagctgaaatataaaaatgacatatatagactatgccaagcatagatctgtgtatgcaaaataacaccaactgaaaaaaagcagaatgtaaaatgccatgtgtatggcattttacatgccactagtacatctgtgtccgatataaaagaatgtacatagacaaagatcagaagagtttgaaataacacagtttatattcagttgtaatctttgttagttacattttaacttttaaggtgttttatataaacatccacttgaagtttcaaaaatcaggagtctagcccttctttcagagccgtacgtacggtttgttgagattttcta

SEQ ID NO: 441258 - DNA, 523 bp, Homo sapiens
gtttgattgactcacagtttcacaggcttaacaggaagcacggctgggaggcgtcaggaaacttagaatcatggcagaaggtgaaggggaagcaaggaccttcttcacactgtcgcaggagagagagagaaaagggggatgtgccacacactttcaaacaaccggatctcatgagaactcactcagtatcacaaaaacagcagggggaaatccacccccatgattcaatcacgtcccacctggttcctcccctgataggtggggattacaactcragatgagatttgggtggggactcagaaccaaaccatattatgctctatcctggtaagcattctatgggagttttcaaaggcgtgtgctctgcagttgttgggtgggtgttctatgtatgtcaatcaatgcagttggttgatagcaccattcagatgttctatatccttgttgatcttctgcctagtagtcctgtcagttgctgagaaggggatgttcaaagttgtgaacttcaataactattattata

SEQ ID NO: 441259 - DNA, 523 bp, Homo sapiens
gtttgattgactcacagtttcacaggcttaacaggaagcacggctgggaggcgtcaggaaacttagaatcatggcagaaggtgaaggggaagcaaggaccttcttcacactgtcgcaggagagagagagaaaagggggatgtgccacacactttcaaacaaccggatctcatgagaactcactcagtatcacaaaaacagcagggggaaatccacccccatgattcaatcacgtcccacctggttcctcccctgataggtggggattacaactcgagatgagatttgggtggggactcagaaccaaaccatattatgctctatcctggtaagcattctatgggagttttcaaaggcgtgtgctctgcagttgttgggtgggtgttctatgtatgtcaatcaatgcagttggttgatagcaccattcagatgttcyatatccttgttgatcttctgcctagtagtcctgtcagttgctgagaaggggatgttcaaagttgtgaacttcaataactattattata

SEQ ID NO: 441260 - DNA, 260 bp, Homo sapiens
tgcaagtaattttgaaatgaagcttctataagcaaaaaggacttaggaaatgctttcttcactattgcattgccagtgcctaccacagtgcctaatacacagtaggtgcttaataaaaacatgttaaagaataaatgaacagtaaagcctatgttccaatagcagtgaacaattatccaagacagggctacragcatcaggggaggtccctgggcgggtcaggggaatacctatcctattctgttcctcctcattaacct

SEQ ID NO: 441261 - DNA, 596 bp, Homo sapiens
actcacagttctgtatggctgggaaggcctcaggaaacttaacgatcatggcagaaggtgaaggggaggcaggcaccttcttcacaaggcggcaggagagagaatgactgcaggaggaactagcaacacttataaaaccatcagatctcatgagaactcactcactatcwtgagaacagcatgggggaaaccgccccttgattcaattacctccacctggtctgtcccttgacaggtggggattgcaatttaagatgagattttgggtggggacacagccaaatcatatcctatactttctcatcctactgcgtttttaattagggacagatttaaattagagataggtattagtgagaacaggaagtagttattcatctcttctcaagtttgtgtgagcacaagtgggggaaacatccctgatctttggctagtgtccactagcctttcaaagtatgtttgaaactctcttagattttattttggctgagaggacaggcttaccaaatgttttcacatggtaatacctccaaataaaacagaaagccaccactaaataaacacatagcttcagaaacaggactataccacgaagc

SEQ ID NO: 441262 - DNA, 553 bp, Homo sapiens
catccctttatttcagcccatccctttgtttctcataaggaatacttttagttaatctataatttatagaaacaatgcttatcacttgctcactgtcaataaatatgtgggtaaatctctgtttgaggctctcaactttgaatgctgtgaaacccctgatttcccactccacactctatatttctgtgtgtgtgtctttaattcctctatcaccgctgggttagggtctcaataactgagctagtctcagcaagtggcgctgaacatggggctcaaaccctggttgaagggtcgctggagcaatcgttggagaatgtggaactaaggtggaggacacctgagtactcttaaagcaatccccatggcgagtaacaaggggagtttggaagcatcagggtaacaatgggacaagtttgagctctggttcgttccaccttggaaccttttcacactgatcatgtggaggaaggggagtataacaaagtaacagaagasgttatagagcaggtttgtttgcagctaaagctaaagtggtaaaggagggagaggttca

SEQ ID NO: 441263 - DNA, 568 bp, Homo sapiens
tacccgtaaaaatcttttatgcattcacttagaactctgcattaatctttgctaggatcggttttcttaagtgacactaaactactgggctttcatcttgtgctgctctttgcatcttaacttttcctggaagtctacccaagaaagcccctttagatggtatgaccacaaggtctgtaatcgtcgatgcctcctctctttcccaacttgctgaaatctactgcaatgaccatttgctctacctacmtgtggggaccctttgatggtcacaacgttctggtcagttaggacagctggaacccaatagttctcaccatttctttttggtgtcagccaaaaaggattaaaggaaaggactttaattttctcttcctaattttggacatgaataacttctaggtagtgggtggctatgaaaacagtatctctgggaatgatgcttcttttccttgttcttgtaaaacatacctattctttcacaacattggcacagggacaaaatacctaagtttagcatatgcaattttgtaattcatattttacctggtgccagacaaacaggaaaata

SEQ ID NO: 441264 - DNA, 604 bp, Homo sapiens
tcttgaagacaccataccatttggtcttggttcattattsagcttgccgctctataccttttaattgggggcatttagtccagttacattcaaggttaatattgatacgtgtgggtctgattctgtcatcatgatgttagctggttattttgcagatgttagctggttattgtgcagatgtttgtgttattgctttatagtgtcactggcctgtgtacttcattgtgttttgtagtggctagtaatgatcttcctttatgtatttagtgcttcctccaggagcccttgtaaggcaggtctggtggtaacaaattccttcagcatttgcttgtttttctccttcacttataaagtttagtttggccagatatgaaacttttggttggaatttcttttcctcaagaatactgaatattggactccaacctcttttgtcttgtagggtttcttctgagaggtgcactgttggtctgatgggcttccctttgtgggtgacttgacatttctagctgcttttaactttttttttttttcattttgaccttggagaattgatgattatttgtcttggggataatcttcttgtgaagtatcttactggagt

SEQ ID NO: 441265 - DNA, 604 bp, Homo sapiens
tcttgaagacaccataccatttggtcttggttcattattgagcttgccgctctataccttttaattgggggcatttagtccagttacattcaaggttaatattgatacgtgtgggtctgattctgtcatcatgatgttagctggttattttgcagatgttagctggttattgtgcagatgtttgtgttattgctttatagtgtcactggcctgtgtacttcattgtgttttgtagtggctagtaatgatcttcctttatgtatttagtgcttcctccaggagcccttgtaaggcaggtctggtggtaacaaattccttcagcatttgcttgtttttctccttcacttataaagtttagtttggccagatatgaaacttttggttggaatttcttttcctcaagaatactgaatattggactccaacctcttttgtcttgtagggtttcttctgagaggtgcactgttggtctgatgggcttccctttgtgggtgacttgacatttctagctgcttttaactttttttttttttcattttgaccttggagaattgatgattatktgtcttggggataatcttcttgtgaagtatcttactggagt

SEQ ID NO: 441266 - DNA, 575 bp, Homo sapiens
tctcctcctggtgggattccagaggcccatggtgagagtggtttgctctttgccagctaaacttaaccattttcctggcgtcactgggggccaggaatgagtcccagtctattgtagcaatgtgcagggttctctggttcttcccacttcagcccagcttctgtgtcttccctctgtccactctcagtgccttccctctgaagatcagttaggagttcgccagtcatcctggyccctctgtggcagctgtttcacctggctgcatctagttagccatcttacccaaatcccaatacctttatttcaaagggaaacagttcagcagattcagggaaagagcactaggttgtaggtagcagcagcaagtgagtatctagcctcctgttttgtgctctgggtgaacatgaaggtaaacctactaaagaaaagctttcacaaacttgtgtttcttcctaagtaacaccttaattgcttgaaaatacaattttgtgccattcaaacattctctcatcctcaaaactcgaaagtatctttctcaggttcttaaaggaagaaaaaacaaattgagttaggaa

SEQ ID NO: 441267 - DNA, 555 bp, Homo sapiens
acttttctcccctgctagggcaaatgttgcaataggcttacgtgatatttctatggtcaatgggaaaatacaaaaacagcctcaataaatgacatttttgttttggactaagggtttgagagatgtggccaacgtaattcagtatttgkgttgggttttcagagttctatttagtattttgtccccctttgtgttcttgtagttgttagctgctgcaatgattaaaggctgagtttacctggaacagagttcacctggaacagaattcgtatctcataaacagctttatttgaaggcttgttcatcttcaatcagtttctcatgattatttcaagtaaacaccaatttacatagaaaagcaatttgatgaagggacattgtatagcatacccacttaacggaattgggagaagtgtgagcctagagcagtggctctaactttagcatgtatcagaattattggtgagcttgttaaaatatagatgctaagaccttcccaggcttattcaatcaggctcactcctgggaggcatcctggcatatatattttttaat

SEQ ID NO: 441268 - DNA, 583 bp, Homo sapiens
taatctaataagaataataaaaccttttatggagcacttagtatgtactaaaaactttataaggattaccttcattaatttagctatccaaattttcccatgaaatacatactataggtttccctttttatgtatgagaaattagactcaaagataaattaacttgctcaatgtcacayggattagtaagtggtagagccagaatataaacccaagcagtatttcccctctggaattcattctcataacttctgatctatgctgctgtaagagagggataagcaactatgatggagattccaaggaaaatgaggtcacatgtgacagaagggatagagacttgaaagatggtggaattttgataggtgcattaaagtggaaggacattctatagacacatcacatcctgaacaaatgctctgagaccaaaaagaccatgaccaaagttttaatcctagatgaaaaaaaaaaatgatggtgtataattaacactaatacgaagtcaaaaggaaaacaagggaatttcttagtttatcaacggatcatacaaatcattaaaaaaattggaaaccatgtttttaaa

SEQ ID NO: 441269 - DNA, 548 bp, Homo sapiens
ttcttcatatacgcagtatatttaattgcactggtatagtttggatatttgtcccctccaaatctcatgttgaaatgtgatcctcggtgttggaggtggagtctaatggaaggtgtttagggcatgggggcagatcccttatgaataccttggtgccttccccaccccatggtaatgagcgarttcttgttctactagttctgaggatctgattgttaaaaagagtctggtgcctttcttctctctcttgctctctcttttgccatgtgacatccatgtttcgccttcacctttcactatgatagaaagattcctgaggccctcactaaagcatatgttggtgccatgtttcttatatggcctgcagaatcataagccaaatgaacctctttctaaaataaatgacccagcctcaggtattccttcatagcaatgcaaagttggctaatacatacacttctttcaattaaataatttattaatttttctatagctcttcttttgaaatgcttctattcctcctgagagatgatggttaaaatacagtt

SEQ ID NO: 441270 - DNA, 472 bp, Homo sapiens
acaagcagtacaggatgaaaccagctgtagaacaaacacaactgatttaagtttgtattattactggagacaaatatatactagcataatgcaaagttgctttccaatggaattttaatgtgccctgggcaaaagccaaaagttttacaggagaaatggagaacattggttagtctagcaaggaagccaagtggggatcaattcagagggtttccctttctctgccagtctctgtatgcacatatgtaaggacataggtatgcatagtccatttaactccagaaagaatttacctcaggtttacaaacatagaaagcawaacaaggtaaaatatattttgaagtaagtagatgggaaaagtaggtaataaggaaaaatgaaatctggaaagataacataaagacaagaaacattattgtttactagaagaaaattataaatctggttctagctcttaaacaggtaaaatcat

SEQ ID NO: 441271 - DNA, 510 bp, Homo sapiens
atttcatctcaatgagaaataaatatacttacttctaatgtatgtattagtttgaaattttatatgaatatagttatttattcaatggatttacaataatttcatattcaaataacaagaatttaaagaaggttctagaaatatgactacttttaaaattataactacatctagactcttttaaaaattatttttatacaaatatgaaatgatttttaatgaactggagttaggtgttttcggtttgaataacccagatacatccttcaaattcctgctccctttgtgatgatmtgatccgatcatattatttgtttttaggatcagtactgaaagctgctgctggatcaatactagttccaaagaaggttacagtgactggatcatgtatctcatagtatgcttgcttatattcacatttctgccaaaacctggaagagaagccaaagaaatagaagacgagagtttatttttctgaataaactggcttctggcacaacataagcacta

SEQ ID NO: 441272 - DNA, 510 bp, Homo sapiens
atttcatctcaatgagaaataaatatacttacttctaatgtatgtattagtttgaaattttatatgaatatagttatttattcaatggatttacaataatttcatattcaaataacaagaatttaaagaaggttctagaaatatgactacttttaaaattataactacatctagactcttttaaaaattatttttatacaaatatgaaatgatttttaatgaactggagttaggtgttttcggtttgaataacccagatacatccttcaaattcctgctccctttgtgatgatatgatccgatcatattatttgtttttaggatcagtactgaaagctgctgctggatcaatactagttccaaagaaggttacagtgactggatcatgtatctcatagtatgcttgcttatattcacatttctgccaaaacctggaagagaagccaaagaaatagaaracgagagtttatttttctgaataaactggcttctggcacaacataagcacta

SEQ ID NO: 441273 - DNA, 602 bp, Homo sapiens
ttattagaatgtgacatgcatatatgacatataaaatttggggccaggcgcggcggctcatgcctgttaatcccagcactttgggaagcctaggcaggaggatcacttgaggtcaggagttcgagaccaacttggccaacatggtgaaaccccagctttactaaaagtacaaaaattagctgggtgtggaggcacacactagtaatcccagctacyggggaagccaagtcatgagaatcacttgaatcgggaggcagaggttacagtcagccgatatctcaccacagcactccagctggggcaataagtgagactctatctaaaaaaaaaaaaaaaaaaaagtgataataataaataaataaataaataaataaataataacaaataaaatttggtataaatttactatgattatagtttctatacaacagtgcaatcaaaaactaatctataaattaaatacaaaataataagtaaacataaacaacttctaattataatgaggtagtgctttggatccatttttgtctttattactatccattggctttaatcaagcaaattcagaatatgactgttggcattacaatagtatccaaata

SEQ ID NO: 441274 - DNA, 596 bp, Homo sapiens
atatgacattgaaatttatattaaattggtatgtaatccaattatttctggaatcagaaactggaaaattgtatctgaagttgacttcaactcttgcgaagtaggaaaaaaattatattttcaacaaagtacatcactggactgttgaaggaaattgcaatttattagaaatgaatcctcttattttgcatttaaaatttcaaatcctcatgaagctattatttaccattaagcctttacttgacttgaatatttcagytttggattacgctactgttctattctctgtagtttaaaaggatgaaggcaatgtattgtgtttgcacacattgttatttcaccatgtagaatttaagctttactttatttaaaaaattcagaaattaaatttttatatcatggaactgtcacatgtgaattattcatgtagtagatacgtttcatatttatttctagtaaaataattcaatataaaaacaataatttagctcagacttgctactggttcccagatatattgaccccaaattaaatatgcttataatcacttggcataaacatgactgtaagaaatacagaagtgtgtataccaagtc

SEQ ID NO: 441275 - DNA, 578 bp, Homo sapiens
tggattataagcatttgccagtgaatgaaatacaacaaaaggaatatatttattaaacaaagtctrtaagggggtgtaaaaacagaatgacaagataatcattttgaactttagagcagaaaacagacaaggcaataccaaaaatcggaggtggtttagagaccccctagagtgggcctctaactcacaatacctctctagagtaggcctctaaacacaatatccaatgtcaaaaaccccagagcacatggggatgaccaacactgaaggtgggactctaactcacacttctagaatgaacgctctcacaatcaggtgttctgccttctacacttgcccaaatgcgttaatggggagctaaagcaaaaactgcaaatgaaacatatatttcagtgtggaaggtaaattaaaataaaatttccaatcaaaaaattaaaatggtgttagaggagaaatggctgagagaagggctgacaaggacaaagctgatccattgtgcttccattcagggcactcaaatggcaggggattttgaatggactacctagccaaggtcttatttccaggctcacccaatg

SEQ ID NO: 441276 - DNA, 578 bp, Homo sapiens
tggattataagcatttgccagtgaatgaaatacaacaaaaggaatatatttattaaacaaagtctataagggggtgtaaawacagaatgacaagataatcattttgaactttagagcagaaaacagacaaggcaataccaaaaatcggaggtggtttagagaccccctagagtgggcctctaactcacaatacctctctagagtaggcctctaaacacaatatccaatgtcaaaaaccccagagcacatggggatgaccaacactgaaggtgggactctaactcacacttctagaatgaacgctctcacaatcaggtgttctgccttctacacttgcccaaatgcgttaatggggagctaaagcaaaaactgcaaatgaaacatatatttcagtgtggaaggtaaattaaaataaaatttccaatcaaaaaattaaaatggtgttagaggagaaatggctgagagaagggctgacaaggacaaagctgatccattgtgcttccattcagggcactcaaatggcaggggattttgaatggactacctagccaaggtcttatttccaggctcacccaatg

SEQ ID NO: 441277 - DNA, 578 bp, Homo sapiens
tggattataagcatttgccagtgaatgaaatacaacaaaaggaatatatttattaaacaaagtctataagggggtgtaaaaacagaatgacaagataatcattttgaactttagagcagaaaacagacaaggcartaccaaaaatcggaggtggtttagagaccccctagagtgggcctctaactcacaatacctctctagagtaggcctctaaacacaatatccaatgtcaaaaaccccagagcacatggggatgaccaacactgaaggtgggactctaactcacacttctagaatgaacgctctcacaatcaggtgttctgccttctacacttgcccaaatgcgttaatggggagctaaagcaaaaactgcaaatgaaacatatatttcagtgtggaaggtaaattaaaataaaatttccaatcaaaaaattaaaatggtgttagaggagaaatggctgagagaagggctgacaaggacaaagctgatccattgtgcttccattcagggcactcaaatggcaggggattttgaatggactacctagccaaggtcttatttccaggctcacccaatg

SEQ ID NO: 441278 - DNA, 578 bp, Homo sapiens
tggattataagcatttgccagtgaatgaaatacaacaaaaggaatatatttattaaacaaagtctataagggggtgtaaaaacagaatgacaagataatcattttgaactttagagcagaaaacagacaaggcaataccaaaaatcggaggtggtttagagaccccctagagtgggcctctaactcacaatacctctctagagtaggcctctaaacacaatatccaatgtcaaaaaccccagagcacatgrggatgaccaacactgaaggtgggactctaactcacacttctagaatgaacgctctcacaatcaggtgttctgccttctacacttgcccaaatgcgttaatggggagctaaagcaaaaactgcaaatgaaacatatatttcagtgtggaaggtaaattaaaataaaatttccaatcaaaaaattaaaatggtgttagaggagaaatggctgagagaagggctgacaaggacaaagctgatccattgtgcttccattcagggcactcaaatggcaggggattttgaatggactacctagccaaggtcttatttccaggctcacccaatg

SEQ ID NO: 441279 - DNA, 591 bp, Homo sapiens
gccagtgaatgaaatacaacaaaaggaatatatttattaaacaaagtctataagggggtgtaaaaacagaatgacaagataatcattttgaactttagagcagaaaacagacaaggcaataccaaaaatcggaggtggtttagagaccccctagagtgggcctctaactcacaatacctctctagagtaggcctctaaacacaatatccaatgtcaaaaaccccagagcacatggggatgaccaacactgaaggtgggactctaactcacacttctagaatgaacgctctcacaatcaggtgttctgccttctacacttgcccaaatgcgttaatggggagctaaagcaaaaactgcaaatgaaacatatatttcagtgtggaaggtaaattaaaataaaatttccaatcaaaaaattaaaatggtgttagaggagaaatggctgagagaagggctgacaaggacaaagctgatccattgtgcttccattcagggcactcaaatggcagrggattttgaatggactacctagccaaggtcttatttccaggctcacccaatgttgaaaggggggcagaaggaacacttacc

SEQ ID NO: 441280 - DNA, 552 bp, Homo sapiens
gacctgcttaaaaaagccatctggccatattttcatggggccactgtgctgtgctgggtactgtttcactcccagatggtttggcctctccaaatcctgaaggttggaactgctaagtcacccagacaccaaagatggtggcccacccatccctctgggagttccatctgaggagttttcaaatttctgtaggcaagggaacactggcagggacagctggagggcccaattaggcagtcctgccaagtgaggrgtaatgacatcagagacccacttagaaaagctgtctgagcctgattttatggagcagctgagatgtgtatgggtaccacttttgccccagccagcttgggcactccaaagcctggaggctggaatgactaagtcacccaaacagcaaagatggttttttgctcttccctctgggagctctgtctcagggacttttcaaatctctgttggctggagaatacagacgggggtggctggaggccccagttggaaggtcctacccaatgagatggaatggatttgggacctgctttaaaaagt

SEQ ID NO: 441281 - DNA, 495 bp, Homo sapiens
  misc_feature (1)...(495): n = A,T,C or G
tccagtgagctaaatcatggagtttttctaacaaacactttgataacgttttaggtaatataggttttttcactgagacctttccagagatccttttgtgtatttaaatagtagtcttgttctttcatttattaatctaactgacaaatgcatgtagtagtgtatgtcctgttatagtttccatggattcctcagggggcataatgagagaggatgcccaggaggtcatggggcatacatttacacttagtttataacaaaaccaggagtcatagctgctcctatgatcagctaatgcatttccttttgnctctttagtatctttagtgcagtgggctggcmccttatttatagccattttcttaggtaattgaatggccatttagtaattcattaactagagcaccattttttatgtgatgtctggatgaagttaaaaacctctctattcagacaagaccataagagacagagagagtgagagagagagagaga

SEQ ID NO: 441282 - DNA, 490 bp, Homo sapiens
ggcaatggggcactgggaccagccccggaaatcattattccctcctaagtctcagggcatgtaattaaaggggctgcaatgaaggaatctgaaaygctttgttggccttttccccattgtcttagatataaccgcttgccttccttttagttatgctgatttctacagcctgcttgaattactcccctgaaaattggcttttcttttctatcacctaagtgagctgcaaattttccaaacttttatcctctgcttcccttttaaatgtaagttccagtctcaggccatttgtctgttcacatgtataaacttaggtggttagaagcagccaggtcacattttggacactctgctgctcagaaatttcttccacccaatacactaaatcatctatctcaactctctcaagttcaaagtttctcaaaatcctagggcaggggcaaaattccttcaacttctttgctaaggcataacaaaagtgaccttagct

SEQ ID NO: 441283 - DNA, 490 bp, Homo sapiens
ggcaatggggcactgggaccagccccggaaatcattattccctcctaagtctcagggcatgtaattaaaggggctgcaatgaaggaatctgaaatgctttgttggccttttccccattgtcttagatataaccgcttgccttccttttagttatgctgatttctacagcctgcttgaattactcccctgaaaattggcttttcttttctatcacctaagtgagctgcaaattttccaaacttttatcctctgcttcccttttaaatrtaagttccagtctcaggccatttgtctgttcacatgtataaacttaggtggttagaagcagccaggtcacattttggacactctgctgctcagaaatttcttccacccaatacactaaatcatctatctcaactctctcaagttcaaagtttctcaaaatcctagggcaggggcaaaattccttcaacttctttgctaaggcataacaaaagtgaccttagct

SEQ ID NO: 441284 - DNA, 599 bp, Homo sapiens
gttttcttttaatgtttttattgataagtaagaatttactccttccattttgttatttgttttctggtatgttttatggtcttctcactattcctgtcttccttttagtgaaggtgatttccactgctggtattatttaattccttgctktttatattttgtttatctattgtatgtttttcaatttgaggttaccatgaggcttgcatatactgtattatttttactggtgacaatttaacactgattgcataaacaaacaagtaagaagacaactaataaaaagtccacactttaagtttttccccacctccactttttaacttcttattttttctctttatgtcttattgcaatgtttcttgaaaaatcagttattattttaattgtttcattatttagtctttctacgtaagagtgttttacacagcaaaattacagtgttatagtattatgtgttttaccctgtgctattaccagtgagttttgtaccttcagatgattttttattgatcatgaacatgctttttttcagattgcagaacttcctttagcattttttataggactggtctagtgttgatgaaatccctcagctt

SEQ ID NO: 441285 - DNA, 599 bp, Homo sapiens
gttttcttttaatgtttttattgataagtaagaatttactccttccattttgttatttgttttctggtatgttttatggtcttctcactattcctgtcttccttttagtgaaggtgatttccactgctggtattatttaattccttgctttttatattttgtttatctattgtatgtttttcaatttgaggttaccatgaggcttgcatatactgtattatttttactggtgacaatttaacactgattgcataaacaaacaagtaagaagacaactaataaaaagtccacactttaagtttwtccccacctccactttttaacttcttattttttctctttatgtcttattgcaatgtttcttgaaaaatcagttattattttaattgtttcattatttagtctttctacgtaagagtgttttacacagcaaaattacagtgttatagtattatgtgttttaccctgtgctattaccagtgagttttgtaccttcagatgattttttattgatcatgaacatgctttttttcagattgcagaacttcctttagcattttttataggactggtctagtgttgatgaaatccctcagctt

SEQ ID NO: 441286 - DNA, 599 bp, Homo sapiens
gttttcttttaatgtttttattgataagtaagaatttactccttccattttgttatttgttttctggtatgttttatggtcttctcactattcctgtcttccttttagtgaaggtgatttccactgctggtattatttaattccttgctttttatattttgtttatctattgtatgtttttcaatttgaggttaccatgaggcttgcatatactgtattatttttactggtgacaatttaacactgattgcataaacaaacaagtaagaagacaactaataaaaagtccacactttaagtttttccccacctccastttttaacttcttattttttctctttatgtcttattgcaatgtttcttgaaaaatcagttattattttaattgtttcattatttagtctttctacgtaagagtgttttacacagcaaaattacagtgttatagtattatgtgttttaccctgtgctattaccagtgagttttgtaccttcagatgattttttattgatcatgaacatgctttttttcagattgcagaacttcctttagcattttttataggactggtctagtgttgatgaaatccctcagctt

SEQ ID NO: 441287 - DNA, 530 bp, Homo sapiens
gagcaggaagcagaacaaggagggcaacttccacagttctgcatccaggtcaggagcacggtcagcccagagcggcctgcctttatgctgccaagcctcccccgacccccaccctcttaaagaatccaagcaaaagtacctttgaacaatgtgtccccaccccatcagtttgaggatgcccctcatccctcacacgctggaaccttggtggcagcgtgcagtcttagagccaaagtcccacgtggcctctgtgtgcctgactcctctgaaccacccctcagtgtctccgggaggcttggacacacaagagcctcctcaccactgtggtgacagtgcccgatttttgcggcatgcattcagagcttccgccttacgtgccagtggactgcaagaccgtgtgctggagggctgcgggcagacaggcagcagggacttgccaggcaaggcccactggcgcatggcacgggatgcttcctcaggcctatcgccctgcccgcaccctarcatccaccctgggaagggctccccta

SEQ ID NO: 441288 - DNA, 529 bp, Homo sapiens
  misc_feature (1)...(529): n = A,T,C or G
ccttgtcactcaccacagtttgagtaaccctctcgcttactcacacctatggctgtatgcgggttggggagaggtcctgtataaccagctgaaggagggggagagagccatagtttggtttacagatgagctgactcagtatgtgggtgcaaaccagaaatgattggtagctgcattatagccacattcagtggtgttcttcaaagacaaggaagagggaatgtctcctcagtaagtggagctacagtcacgatgtctgttcatccaggtgtggtaagtgcttatttgatgttcagtgaatgaatgaatcactcaatgaatgaacacagagcataggagtaattgaactccatagatcrtttctggtcatgttacagttggcgagaaaagtatcaaatggttgcagaagctggacctctagaacttctggtctccgttagttagaacagttaagaaaggaaatttttgtccaacctctattatgctaattccagacaaagaggactccatnnnnnnnnnnnnnnnnnnn

SEQ ID NO: 441289 - DNA, 562 bp, Homo sapiens
gattttgagtctatttttgaaattggaaacgataagtggcatttataattttatgactatgtaaatacttcctagagaaccatgtagtatgttcacatccattgagaagtgaaaatgatatgctgawtattcaacctatgtctgttaaaaagaatattctaaatatcaaggtcaaatagatgatctttctgtatagtccattagttatccaaattatgatccatttaggtctgtttaatttttaaaccgtggacttcctggacagcatttcccccctggaatttctcattgcccttctctttactttttcttataaagaatgtctacgtcctttgtcagacatttgtataacaggctgagaacatttttccttttcctctttggcttatggtatggatttggacgaattaatttctaaacctactcacgtttgtcatcataggttttcttttcgttgtacagctgaacttattacacagtttctaggatgccagattatccgtttcttttttgtcggattattttcaagtattttttttctcagaaaggatggacaggtggt

SEQ ID NO: 441290 - DNA, 549 bp, Homo sapiens
gagagtactgtttgcaaaggtaaacaagttttatttctttatagccaagcaggtaaaagtctcaggctgcaaaatcctctgtgcaaaaaacaaatataacattattctgtaactgaacttaatttcaatcatattcaactcaggctacctttggtcaattatttattaagtctgttccggagttttttttcccccaccattttctccctgagttgcctctaagttctggggccttaagtcatcatactttgatgtctatcaagagggggacctttgtcctcagaaattcttgtttatttgtgatggctcctattggcttccgggcatagtgatctatccttgctggtatcctcaagatggccttgttctcctctggacttgtgtttccagttcatacaacttkcaagactgctagactgcttgaggtcactccagccttgtcttttgcatccctcttgaggtgagaggacagggaagcacaggaaatatttggatgcctttttgtgctgctctggagctctgggagacttgacggagctatgccatgcc

SEQ ID NO: 441291 - DNA, 564 bp, Homo sapiens
accaggctccttccccctgcaaacagcatgaacttccatggctccaccctgttcttcccatgcacaggcyggttggaggttctccagggacccctttatacttaggtgtcttgcctgcctgccctgcctgcctccctccctccctctttcgaaaaatcattattattagtttgagtacatacatacaagtatcccagaacctgccaaaatgcagtataaatgttacctaaatgtcccatcttgaaaggaactttagagaattaaactttaacatggttttctatcaactgtgatttcctttttagagattagcctactcttcttacccgaagttttcatggtattttttaaaccttgaccttggaaattctgatttctaccctgcttgaaataatgtaaaacttaaaaacccactcacaaatttttgaaactcaaaaatcatgagtttgatctgattcacgtcttctacaatacaataaatttttaggtgaaagactgataaggaggaaaatgttgtttccaggttggtcagaactttaggagaatgtatttactgcatttttc

SEQ ID NO: 441292 - DNA, 564 bp, Homo sapiens
accaggctccttccccctgcaaacagcatgaacttccatggctccaccctgttcttcccatgcacaggccggttggaggttctccagggacccctttatacttaggtgtcttgcctgcctgccctgcctgcctccctccctccctctttcgaaaaatcattattattagtttgagtacatacatacaagtatcccagaacctgccaaaatgcagtataaatgttacctaaatgtcccatcttgaaaggaactttagagaattaaactttaacatggttttctatcaactgtgatttcctttttagagattagcctactcttcttacccgaagttttcatggtattttttaaaccttgaccttggaaattctgatttctaccctgcttgaaataatgtaaaacttaaaaacccactcacaaatttttgaaactcaaaaatcatgagtttgatctgattcamgtcttctacaatacaataaatttttaggtgaaagactgataaggaggaaaatgttgtttccaggttggtcagaactttaggagaatgtatttactgcatttttc

SEQ ID NO: 441293 - DNA, 564 bp, Homo sapiens
accaggctccttccccctgcaaacagcatgaacttccatggctccaccctgttcttcccatgcacaggccggttggaggttctccagggacccctttatacttaggtgtcttgcctgcctgccctgcctgcctccctccctccctctttcgaaaaatcattattattagtttgagtacatacatacaagtatcccagaacctgccaaaatgcagtataaatgttacctaaatgtcccatcttgaaaggaactttagagaattaaactttaacatggttttctatcaactgtgatttcctttttagagattagcctactcttcttacccgaagttttcatggtattttttaaaccttgaccttggaaattctgatttctaccctgcttgaaataatgtaaaacttaaaaacccactcacaaatttttgaaactcaaaaatcatgagtttgatctgattcacstcttctacaatacaataaatttttaggtgaaagactgataaggaggaaaatgttgtttccaggttggtcagaactttaggagaatgtatttactgcatttttc

SEQ ID NO: 441294 - DNA, 587 bp, Homo sapiens
catggctgtgttccaataaaactttatttatgcacaaaggcagcaggcttgatttgggcatggcctgtagattattgacccttgctttagagttacactttatacatttatcgctgaggcaaaagttaagtctctagatgtgaaaatccgtggcttccaagtgagagcagtatatggatgtagttagttagactggacacaaggttggtgatacaggtgaatctgcctaatgtagcatatgatactgcttagagttattttatttttaattaattaatttatttatttttgagacagtgtctcactctgtcacccaggctggagtgcagtagcgcaatgatagctcactgcagccttgacctccctggctcaagtgatccttccacctcagtctcccgaatatctaggactacaggtgcacaccaccacacccagctaatgtatttttgtgtgtgaatacagggttttgccatgttgtccaggctaatctcaaactcctgggcttaagcgatccacccacctccacctcccaaagggctgggattacaggtgtgagccacakagcccaacctagagttattttagat

SEQ ID NO: 441295 - DNA, 587 bp, Homo sapiens
catggctgtgttccaataaaactttatttatgcacaaaggcagcaggcttgatttgggcatggcctgtagattattgacccttgctttagagttacactttatacatttatcgctgaggcaaaagttaagtctctagatgtgaaaatccgtggcttccaagtgagagcagtatatggatgtagttagttagactggacacaaggttggtgatacaggtgaatctgcctaatgtagcatatgatactgcttagagttattttatttttaattaattaatttatttatttttgagacagtgtctcactctgtcacccaggctggagtgcagtagcgcaatgatagctcactgcagccttgacctccctggctcaagtgatccttccacctcagtctcccgaatatctaggactacaggtgcacaccaccacacccagctaatgtatttttgtgtgtgaatacagggttttgccatgttgtccaggctaatctcaaactcctgggcttaagcgatccacccacctccacctcccaaagggctgggattacaggtgtgagccacatmgcccaacctagagttattttagat

SEQ ID NO: 441296 - DNA, 572 bp, Homo sapiens
tccttgcaagtaggctgttttctagtattgatgttgaattagatttttagggtagtgttttaaaactaggaaaaagactttttaatacttaaacattcagaaactagtgtcatcaatgtcattgtgcccaccactcacaatgaataaatgttaacattttataatattcccttcatttatatttgtaaaactgaaatattactgatccagctggagcctctttgtacctggtcctattttcctccttctccagagacaactgtgctcatgattttggtatgtatctgacttctagtatgtgcttccatactttgactacacaggtatttatccctaaacaagtgttgctattgtatgtttttaaacttacttaaatggcactgtaatgtatacatcagtctgtaactttgatttttcatttagtattatgattttgagatttatctttacacacagatctaattgttcatttcatctagttcactcattctaggagacaaagacacatgtagagtatttctttaagtaaayattctcctatggatggcccaattaaaatgtacagtattcta

SEQ ID NO: 441297 - DNA, 638 bp, Homo sapiens
ctggcttgggtttttgttgaggcgagaaagtgggcccaggtaaatattcacctgcatgtgcttaggcyggggcttgcatgattcgaatctttctctgtactgccaaaagaggaagcaccaggctttcctgtcagctttcccagttgcagggcacaagaggaagagcaagagtgaggcttaaaagctgccaacagtcaaacatcagaaaatggagtcagatgcctcattacgatgctgaataattgaaagtgatggggttttgtggaatctccctgaggcatcggttgagggtcagaggaaaggcgacattctgcagcaaaagaaagggaagatgagagagcgcatgtcaagtcccctttatggcagaagggcctcagaaacagcttgagacacagaggtctggctttcggttttcttgttagacttgatccataagtcagtgcatgccctcgcttctattactacttaactgagttcacaaagttgaagagattctaaaaagtgctttacctttattaaaggtctttccagtatataaccaccctattagcctctatctaactaagcaaggacagagaactccagtctgtaggtctcggatataatgcctcgactgaccagccataagatgagacccc

SEQ ID NO: 441298 - DNA, 597 bp, Homo sapiens
gagataccactgacactgattctactgctgagctcttctttccaacacggttgaatgcaccttttcaaagagcagagcttcgtgttgcagtcagagagcatggatatatgaggtcctagaataatcagaaagccatccagttgtgcattgcttcattctttcatttkgtcattgtcttccccttttaggttttcaaaggaagaaaaatattatttcccatggaaacatctaaaaaatttgattggacccagttagtcagaaattccagaatgaaagcagtatttttttcagtagtggcaagataactctaaagttttttgtcatggaaaaaatgtaagtggaaagagttgtaaacctaatgtttgcaagagacaaattgtcattgatcattccttcctggccaaccccttctcctcaccctcttccttctttagactgtatattctgttatatcctttgttcccttattcattccttccttttgtaaacttttattgtatatattctatattctagtccctaatgagatgaggggtacaattttattttcacataggactgcatatgggtaacacttggcattacaggatagaaagg

SEQ ID NO: 441299 - DNA, 597 bp, Homo sapiens
gagataccactgacactgattctactgctgagctcttctttccaacacggttgaatgcaccttttcaaagagcagagcttcgtgttgcagtcagagagcatggatatatgaggtcctagaataatcagaaagccatccagttgtgcattgcttcattctttcatttggtcattgtcttccccttttaggttttcaaaggaagaaaaatattatttcccatggaaacatctaaaaaatttgattggacccagttagtcagaaattccagaatgaaagcagtatttttttcagtagtggcaagataactctaaagttttttgtcatggaaaaaatgtaagtggaaagarttgtaaacctaatgtttgcaagagacaaattgtcattgatcattccttcctggccaaccccttctcctcaccctcttccttctttagactgtatattctgttatatcctttgttcccttattcattccttccttttgtaaacttttattgtatatattctatattctagtccctaatgagatgaggggtacaattttattttcacataggactgcatatgggtaacacttggcattacaggatagaaagg

SEQ ID NO: 441300 - DNA, 561 bp, Homo sapiens
agggggtatttgtttcattgagtaacagaattctgtaagacttgatagccacagaagagaacttataatagaaagtgattgttggaaagtgactacatccatatacacatgcatgcacacatgtgtttatgtgtaggagtgtccatgtgtatatagatgtatacacataactacatatacatatgcacttggaggaaccatttgaactttgtaaaaggtaatggatataaaatgccccyagataaataaatttacacattatcgtaggcataaacacatgcactcatatgtctaaagatgcacacaaatgcttctttctcccaagaatagtcaggaaaaattgaatgtaaaatgaattttcaaattggttttaattaactggatgagccaatatttaattgaatagcttttattgaaaagttaagactctttggacaattaatatgatttacaaaataaaagtatatgtttagtcttctcgaagtaaggtaccattaaatatgtatatatatatatatatatatatatatatatatatatatatatatatatataaaacat

SEQ ID NO: 441301 - DNA, 561 bp, Homo sapiens
agggggtatttgtttcattgagtaacagaattctgtaagacttgatagccacagaagagaacttataatagaaagtgattgttggaaagtgactacatccatatacacatgcatgcacacatgtgtttatgtgtaggagtgtccatgtgtatatagatgtatacacataactacatatacatatgcacttggaggaaccatttgaactttgtaaaaggtaatggatataaaatgcccctagataaataaatttacacattatcgtaggcataaacacatgcactcatatgtctaaagatgcacacaaatgcttctttctcccaagaatagtcaggaaaaattgaatgtaaaatgaattttcaaattggttttaattaactggatgagccaatatttaattgaatagcttttwttgaaaagttaagactctttggacaattaatatgatttacaaaataaaagtatatgtttagtcttctcgaagtaaggtaccattaaatatgtatatatatatatatatatatatatatatatatatatatatatatatatataaaacat

SEQ ID NO: 441302 - DNA, 561 bp, Homo sapiens
agggggtatttgtttcattgagtaacagaattctgtaagacttgatagccacagaagagaacttataatagaaagtgattgttggaaagtgactacatccatatacacatgcatgcacacatgtgtttatgtgtaggagtgtccatgtgtatatagatgtatacacataactacatatacatatgcacttggaggaaccatttgaactttgtaaaaggtaatggatataaaatgcccctagataaataaatttacacattatcgtaggcataaacacatgcactcatatgtctaaagatgcacacaaatgcttctttctcccaagaatagtcaggaaaaattgaatgtaaaatgaattttcaaattggttttaattaactggatgagccaatatttaattgaatagcttttattgaaaagttaagactctttggacaattaatatgatttacaaaataaaagyatatgtttagtcttctcgaagtaaggtaccattaaatatgtatatatatatatatatatatatatatatatatatatatatatatatatataaaacat

SEQ ID NO: 441303 - DNA, 561 bp, Homo sapiens
agggggtatttgtttcattgagtaacagaattctgtaagacttgatagccacagaagagaacttataatagaaagtgattgttggaaagtgactacatccatatacacatgcatgcacacatgtgtttatgtgtaggagtgtccatgtgtatatagatgtatacacataactacatatacatatgcacttggaggaaccatttgaactttgtaaaaggtaatggatataaaatgcccctagataaataaatttacacattatcgtaggcataaacacatgcactcatatgtctaaagatgcacacaaatgcttctttctcccaagaatagtcaggaaaaattgaatgtaaaatgaattttcaaattggttttaattaactggatgagccaatatttaattgaatagcttttattgaaaagttaagactctttggacaattaatatgatttacaaaataaaagtatatgtttagtcttctcgaagtaaggtaccattaaatatgtatrtatatatatatatatatatatatatatatatatatatatatatatataaaacat

SEQ ID NO: 441304 - DNA, 558 bp, Homo sapiens
ttggcaaccatttgaaaagaggcgggcctcctctctgaactctgaatggaaacattatttttcctcctgtagaagccatcatcactctttcactagaaggaaggttacagcatctttcacaaaagatttgcctgcttgtaattactgcctgcagcgtacagacaaatgcaatttttaaaatgctaactgtgttatacttayactcaagggatccccgggtacaaatgtaacgcggcctcaccagtttgtcttagtgagaccttacagtgctgattgaaaacagctgaactaaatcaacagttaccttgagccaggggcctttggagagcaattagagtcaaggcttgggttttgaacccaatatgctctgtcagtctcaatgatttgtgtttgttgtactcagtctcatttcctgcatgaaatatgaggctgtataaagagaaaaaattcccaagattaaaaaatatttgacctcagtgcatttgtgagcagagaagtacacatgtctaaatgaccatttgggtttgtagtacaaagttctattgatgttggcagccc

SEQ ID NO: 441305 - DNA, 618 bp, Homo sapiens
acagggatgcattctgtattacaccttttaggaagcaataaatcagaggcaagacatcaccttcattgctttaattggtctcagtcataaccacaaaaccactgtgccagcttccctaattcccatatagcaccrctggagtgagcagagctctccaacacacagatacctttaaatagttatgcactgaagttgtggctgaaactaaagaaaaaggcagcagagtgccaagaacttcacgtgagctaatgatgagcaaacgagtccccccaggctccttcattccattctccttaattgagctattctccttgcaagaagagtttttgctgattgatttgactctattgtttcttgtgaaatccagaaaccttaccctcattcactctactgttgtttctttttttcccagctgggatatggtttcaaaatatgttcctagttcgctaaaagacatccctagggaatgaggtcacttgggtttttcaattagaaaaaaaaataaacagttttattcttctggcaatccttttttcattgtatgacccctcctaatagcaatgttccattatcttatttccatgtagcatcagaatgttctcaggaaagggggacaga

SEQ ID NO: 441306 - DNA, 191 bp, Homo sapiens
gtataatgtcaggtgttattcaagacctttctcatctcaacagccaatgggactgtcaagatagaccatgtcttgtttgcctcttgagtttaggagtyactgtagaaaagtcattaaaaaataatagttgcttgtaagcaggacactgaattttttgatttctgaaattctatataaaaattcagaatatt

SEQ ID NO: 441307 - DNA, 646 bp, Homo sapiens
tctgtgactggcttatttcatttagcataattaaacttatgttacttctttaacatgaggctgttgcaaaaaggggaaaatgtaaattgaagaaacagtggtttcctaatattaacaaacatagagtataatgtcaggtgttattcaagacctttctcatctcaacagccaatgggactgtcaagatagaccatgtcttgtttgcctcttgagtttaggagttactgtagaaaagtcattaaaaaataatagttgcttgtaagcaggacactgaattttttgatttctgaaattctatataaaaattcagaatatttttacctaaatagatctgcttattagtaaaaatttacaagaaaaayagattcagaatctctatctctctttcatgacaagtgtatgtttaatgtgagaaaggggctaggtaacaaacacccttcatgttgtgagttaggccaagattttctcaagattcttggaagtgagttgtagggcagttctggaaagatggcggatagggacagggctgacatgcagctcccacttggacaggacagaacatcatgtggagactcacaccatgaaattttgttccaggaagcaccacaggagcagaccagggaaaccaaaataattcacagatcct

SEQ ID NO: 441308 - DNA, 412 bp, Homo sapiens
ttcattattacacaggcacataggataatgtaaatgtagacaatasatggagcttgaactataggtaagtaatctaggctctcctcttggttcatttatttgccatctgagtgaccttaagcaaggcacttaatgcagcaaagcttccatctccacatatgtaaaccgcgtgctctgagtgctcaagcaaatgctatcaggttcatatgaggctgtataagtcaagtagcatgttttaacgtctgccaattcctacttaatgacactattgccccattctccctggcagtctagatatcctactcattttcagcctatagatgtcacagcttttactttcaactgtagtatcattccttttggtaatcatttcacccctgatccttttctcccaacctcaactcctacttct

SEQ ID NO: 441309 - DNA, 548 bp, Homo sapiens
catcacaatctaaaatcatcatttacttatttattacctgtcttctgtattctcagtgtatagcacagcagattcaatgcatctttgttaaacgaacggactgtccaaagtcagtttaracaagaggggatggaacaggatttgagcccaggactgtctgactctaaagtccatatgcctaaccactgcattcattccctgcttcagccattaaaatattgaaaagaaacagtaggctaacatgggagcatggtttgtaaactccaagcattatgtcaatgtgaacatgcagttttggtactctgtcctctgctggatgccacatggactaaaactgtctgttctcaagaggctctaagtcatcaccggtgttagagaagaaaggccgttgtctacaataaatccttctgctgacattcctttacgactatggtgacatctgtgagaagctcttctcttttcttcccattcttggccagacccttgccaatcctaccttatcttctacactcttggccttgcctttcttgctgccattaaagaaagat

SEQ ID NO: 441310 - DNA, 577 bp, Homo sapiens
gctacctcacattggcaaaaaaagacaggaagctttaaatctgtggcctttctttatgagtggtgaaagatgacatgagtgggtagattttggaggggctagccccctctgaaatgatccaagtgtgttgacagaacctcactaattcacttccctgagaccagcaataaacaagacttcctgtagagtatatttaaccaccacaatttgtttctggttggaaatcatcctaaaaagtttcttgtccatgtttaaaggtggttcttcagggtttaaggccacgctgctaaaatttggtccctgtgaatttccctacaacagtaaagaagctrtctgtatccctcatgttgaagacaggagcacctttatgtgatatgtggagcagaagctggaaaatagactcatacttatcccagccttaccaagctgatcagaaagcagggatctgcagttcagctacgttgaagacatatttgtcaaggttataattcattcagaccattatattcagggagaacagctaaatcagtgaggagcatgtaagcactgtgtagttagacatgctaggtgttaaata

SEQ ID NO: 441311 - DNA, 577 bp, Homo sapiens
gctacctcacattggcaaaaaaagacaggaagctttaaatctgtggcctttctttatgagtggtgaaagatgacatgagtgggtagattttggaggggctagccccctctgaaatgatccaagtgtgttgacagaacctcactaattcacttccctgagaccagcaataaacaagacttcctgtagagtatatttaaccaccacaatttgtttctggttggaaatcatcctaaaaagtttcttgtccatgtttaaaggtggttcttcagggtttaaggccacgctgctaaaatttggtccctgtgaatttccctacaacagtaaagaagctatctgtatccctcatgttgaagacaggagcacctttatgtgatatgtggagcagaagctggaaaatagactcatacttatcccrgccttaccaagctgatcagaaagcagggatctgcagttcagctacgttgaagacatatttgtcaaggttataattcattcagaccattatattcagggagaacagctaaatcagtgaggagcatgtaagcactgtgtagttagacatgctaggtgttaaata

SEQ ID NO: 441312 - DNA, 539 bp, Homo sapiens
cttttccccctgctatgagaagagcatgttgcagaaagggtcagctccttcagcctagatctcagagtaaggtgccttgtgggaagtgccaggaccaaaccatagacctacaactgatatttattatgagcctgtgctgttagcaactgaaatttggagttgtttgttaccacagtgtaatctgccaaaactaatacaacaagttacataaatctctctatgtctcagattcttcatctgtaaaatcaaagtaaggttattgtgaagagaaaataggatgatatttggatatttagtgttttcttagtagcatctagcaattagtgatcattattattattctaggtgcccaggatgaaaatctgtgaaacaaagcatcaggaatccagaagaaagactragcagcaattgataaaaaacataaggctaagggtctatacaactagatattggaatttagctagaggcatgagtaacagattctagggggtgaggtagagggagacaggagcagcacgtatgacatttggtcatggctg

SEQ ID NO: 441313 - DNA, 601 bp, Homo sapiens
aactgtaggaaaaaataaatacstataattaacaattctattaatagaattaatgccaattttctaatactctggtgagtaaaatataataaatcttacttttttgttgtttttatgcaattgttttcaaaaagcccataatgctaaaagttacaaaacaacaaaagcagcactttaagtttcttagagattagctaagttggggtgagtaaactttttctgtaaacggcttgatagtaattatatttcacttggcaggccatatagtttctgttgcagctactcaaatctgtcattttagcctgtgagcatccatgaacaatacgtaagtgaatggacaggactgtgtttcaataaaactttgagaaaataggcagtgggttgttttggcctatgtgtaatagtttgccaacccctgaaagtcagcaatacctggacagtactcattgattacttattactgtatgccatgccctgtgctgggcagtggaggtaaagaaatatatcagagttagtttctgccctcaaggagctttcagattacatgtaaataagtgtaatatattgtttgaagtaggatggcagctatacagatcatggg

SEQ ID NO: 441314 - DNA, 601 bp, Homo sapiens
aactgtaggaaaaaataaatacctataattaacaattctattaatagaattaatgccaattttctaatactctggtgagtaaaatataataaatcttacttttttgttgtttttatgcaattgttttcaaaaagcccataatgctaaaagttacaaaacaacaaaagcagcactttaagtttcttagagattagctaagttggggtgagtaaactttttctgtaaacggcttgatagtaattatatttcacttggcaggccatatagtttctgttgcagctactcaaatctgtcattttagcctgtgagcatccatgaacaatacrtaagtgaatggacaggactgtgtttcaataaaactttgagaaaataggcagtgggttgttttggcctatgtgtaatagtttgccaacccctgaaagtcagcaatacctggacagtactcattgattacttattactgtatgccatgccctgtgctgggcagtggaggtaaagaaatatatcagagttagtttctgccctcaaggagctttcagattacatgtaaataagtgtaatatattgtttgaagtaggatggcagctatacagatcatggg

SEQ ID NO: 441315 - DNA, 601 bp, Homo sapiens
aactgtaggaaaaaataaatacctataattaacaattctattaatagaattaatgccaattttctaatactctggtgagtaaaatataataaatcttacttttttgttgtttttatgcaattgttttcaaaaagcccataatgctaaaagttacaaaacaacaaaagcagcactttaagtttcttagagattagctaagttggggtgagtaaactttttctgtaaacggcttgatagtaattatatttcacttggcaggccatatagtttctgttgcagctactcaaatctgtcattttagcctgtgagcatccatgaacaatacgtaagtgaatggacaggactgtgtttcaataaaactttgagaaaataggcagtgggttgttttggcctatgtgtaatagtttgccaacccctgaaagtcagcaatacctggacagtactcattgattacttattactgtatgccatgccctgtgctgggcagtggaggtaaagaaatatatcagagttagtttctgccctcaaggagctttcagattacatgtaaataagtgtartatattgtttgaagtaggatggcagctatacagatcatggg

SEQ ID NO: 441316 - DNA, 633 bp, Homo sapiens
agtgttttgacaacaaccatgcctttcttcctaatgcagcatggtatgttactgcttaccaggaataactgctccaaagcatctctgatatgaaatttcagctgtgtactagccctgctatgttctggaagtgagaaaaggagtaaagtataagaatatttccagagttttatatatatataccagaaatccaataatcgtttgaggtcttatatgccaagaaggagactggtatcctgtaggatattctgaagaaatcttccctcagtacccaggacaaagtaaacctctgatgctgatgcctttatggccactattcctgccacatcctctgtatatcagaaagtcagtgttctgtaggcttccaagtacagtatattcagtatatatatccatgccaccagatctatggtgaatttcatgtcatagatttcattttggtttaatgttgaaattgcactgtcaattttagcagcatctttattagaggtacatcagttttcccarctgctgcagcatgacagtgtaatttcctgagtaagccctttgattaaagagaaagtcttttaggtgataccacttcaggctgaacagaaagtgccagcacctcagtaaaacccattcaataacaaa

SEQ ID NO: 441317 - DNA, 577 bp, Homo sapiens
gtgggctgggcccagagtccctgtgctttgtgcagtctagggacttggtgccctgtgtcctagccattccagccttggctgaaaggggccaacgtagagctcaagccatggcttcagagggtggaagccccaagtcttgacagcttccacatgacacagaagtcaagaattggggtttgggaacctccacctagatttcagaagatgtatggaaacacgtagatgcccaggcagaagtttgctgtagggaccgagtccttgtggagaacctctgctagggaagtatgaaagggaaatgtggggtgggagcccccacacacagtccctsctgaggcactgcctagtggagctgtgagaagagggctaccatcctccagaacccagaatgctagatccactgacagcttgcacagtgcacctggaaaagccaaagacactcaatgccagcctgtaaaagtagccaggagggaggcctgtaccctgcaaagtctcaggggccaagctgccccagtccgtggtaacccacctcttgtatcagcatgacctgggtgtgagacatggagtcaaaggagatcat

SEQ ID NO: 441318 - DNA, 552 bp, Homo sapiens
gctaattgaaaaataagaccaagtgcgttctgaccttcgtttctcttacctttatttttacaaccaccatttcaatggcccacttgctgatacaaatgattgtttaattttaaaaagcatttaattgaagtcaagttatttagaacctaatcatttacacgtctttgttgttgctgctgttttgcaagagtgaagagcttggagtcaggtgaatctgggatgargtacagttgtcatttattagtcatgtaatttgtgacaagccacttaatctctctgaagacttcagtttcttcatttgtaaaattggcataataatgctgtccctagtagggaatatagaattatataatgggtcctttgtatatattggctagtattgctctcttacgatttggcactatggagacactgtgggagattaaaagaagatgatgaataaaaggtgacttcagctctgaagggctttatgatccatttgggagaacaggtaatgtagaatatactggcttcaaaagtggcaggtgtttagaagagaaaaggatacatgat

SEQ ID NO: 441319 - DNA, 530 bp, Homo sapiens
tcccattgagctgccctctgatggctctcagatctggctgctgttctcctctcccctgcctcaactgtgggcccatcagctctggcctggacctctatagtatctgtgctttcactctcccctcccttctgaacattctctgcaccatgaccagaggcgtcaactgaaagcaagtttcacagtgctgtttctaggcttaaaatccttcactgcttcccctcctgccccaaggacagtgtccaaagtcctgtgctrtggaccgaattgtgtctctccctagaacttatatgttgaagtccaaaccccagtgtgactatttggatatagggtctttaagaagtaataaaagtttaatgagcttgtaagggtagagtcctgatctgatgggatcagtgtcctaaaaagaggaagaggagacaccagggagttcactctctgccatgtgaggacacagcgagaaggcggccatgtatcagccaggaagagtcctcactaaaatctgaattggttggaacctcgatcctagactt

SEQ ID NO: 441320 - DNA, 582 bp, Homo sapiens
aaaaaatttaacaaaagcagtaagttatatgtttaaaactgttcaatgcaatgttatctataaaggcaaaaaagcagaagcaataaaaatatcccatgaattggaaatagatgatagaattatagaaacacttgtggcagaataataaattgacattaaaaatagtaattgccatatatatatatattccttctctctcaacaccagtaagactggcataatgytcattaaaacgaaacagtggttatttctagatggaattatggttcatttttgttttcttctttatgctttcatgtatatttcaaatgttccataatgaacacatatgacttttataaaaaactactgtcattgaagtagcaattaattttataaagagtaagtgacaaagaagaaaatagttaagttataatgtgaaatgagaaggaaatgaaatgaagatgaaatgaatactcaggctgcacctaggttgaaatggcaacagaccaaatccctgaaaatcactttgctaattatcaatccatttaataaccaattctctaaaaatttaccaccctgcctataggtgtttttgtgtct

SEQ ID NO: 441321 - DNA, 230 bp, Homo sapiens
tatgtattaatgtatgtacttatatattacaaacatttctttaaaataactgtccatgtcagagctatatcccattctactgaaatgctgcctagtattcaaagggtgaaggaatgtgtcmtaagttactgaaactaaatgaccattttggttgtcaccatttttcataattgcaaataatactgaaacaaacatatctgcacatttgccccatacatgtgtgtgaatat

SEQ ID NO: 441322 - DNA, 230 bp, Homo sapiens
tatgtattaatgtatgtacttatatattacaaacatttctttaaaataactgtccatgtcagagctatatcccattctactgaaatgctgcctagtattcaaagggtgaaggaatgtgtcctaagttaytgaaactaaatgaccattttggttgtcaccatttttcataattgcaaataatactgaaacaaacatatctgcacatttgccccatacatgtgtgtgaatat

SEQ ID NO: 441323 - DNA, 479 bp, Homo sapiens
catctactattgcctttgtgcttttaccagaaaactgggtgagaacctccttttccttttccctgcccctccagcctcagttttatgaccctgtggagccagtggactttgaaggacttctgatgacacacctgaacagcctggatgtgcagcttgcccaggagctcggggacttcactgatgacgacttggacgtggtgttcacgmcaaaggaatgtaggactttgcagccctctttgccggaggaagggtaaatagttttctaaaatgtagatgtgattgggattgtcatgattgttttcaaataagtgggtaggggagatgccttcaatctgaacttaaaaataaaataaaattactcaatccattcaaatgtgtgggacagctatatgatatcatcatgtaagtatagatagtttttaaattagtttggccagagattttgaaaagctatgtgaagactaagccagtgcaaggga

SEQ ID NO: 441324 - DNA, 513 bp, Homo sapiens
tcaaaagggactggggctgccctttatatctgtgtgaataatctgtatgggggaggacaagagaagaagccaggagaccagttggagtgggcatggtagaagcagaaaggatgaatttggtgcatattttggagttaatgtccatgggattcactgatggattgaatgtgkaggtgggaaataggaatgaagggacacttggtcaaggtgtgacagtgctatagctgtgagtcgcagtcatctggaaatgcattcattcatttattcacttatttagcaaagactgaaggcctgctacatgccaggccctgtgcgaagcactggggatagatcagtgagcgacagccactgtggtccctgccctcagacaccacatgcagagtgccagacacggcaggaatgaagcggcaaaccggggggaaggaggatggaaggtccagggtctcaaagctgctagggttggggtggtgggcagggaggtttccctggagaattgagagctccccagctccc

SEQ ID NO: 441325 - DNA, 513 bp, Homo sapiens
tcaaaagggactggggctgccctttatatctgtgtgaataatctgtatgggggaggacaagagaagaagccaggagaccagttggagtgggcatggtagaagcagaaaggatgaatttggtgcatattttggagttaatgtccatgggattcactgatggattgaatgtggaggtgggaaataggaatgaagggacacttggtcaaggtgtgacagtgctatagctgtgagtcgcagtcatctggaaatgcattcattcatttattcacttatttagcaaagactgaaggcctgctacatgccaggccctgtgcgaagcactggggatagatcagtgagcgacagccactgtggtccctgccctcagacaccacatgcagagtgccagacacggcaggaatgaagcggcaaaccggggggaaggaggatrgaaggtccagggtctcaaagctgctagggttggggtggtgggcagggaggtttccctggagaattgagagctccccagctccc

SEQ ID NO: 441326 - DNA, 608 bp, Homo sapiens
atgccaggttttttttttctttatatagtatctaacacaccatggtacacacattggtacttaataaaaattatttgagcatgaagatttgattactggcaaatggtkgttgaatatttaatagaagaagacatctttgcatttaaatgtatgctcattttaaaaatgctaacgagaaatagttggggggaaaaacctttaagaatgagctgtcatgtttctgggttatgtcggcaataattctctactatattagttccttcaaaggtgagtggtttctgattatgatataaccttaacttgccatctgttatgaaacagtgtataaagcttaaacttaggattttcagcttcacaaattctccaacaattatgaactcttactgacttcataattaagtctagacaaggttaacaatcacctgccattctgttaatgtaattgttcatccatgaaccttgcaaattcttctaagtaattgtgatatttgcttttaaaaacaaacattcttataatctttctgagagtgaaaattctgtgacaaatcaggaaaactcttggggcttaaagaggccttgttaaacccatcttaaccaattccccatct

SEQ ID NO: 441327 - DNA, 643 bp, Homo sapiens
gttcataatgtcatcaagggatttccaaggaaagagagttctgaatgtatgccttatttgtcctatcagtagaattttttttctccttttaagcaaaatctgagtgtgtgtgtgtgtgtgtgtgtgtgttttaactttcatgatggaaagtttcagacataaaggtatggagtatggtatcgtccaacttgaataattactgactaatgtccaattatgtttcacccatattctatccattctccccaccccctgattattttgaagcaaatctctgttatcatttataatactgtaagtatttcagcatatatctccaaggaattctttttcaaaatatgaccatyacacaacttagaaattgacaataatgtctaaatatcattaaatatccagtcacctgttcaagtttccatgattgtctcataaatgcttatttttaaaatgtgttgtatttgctcacatcgggattgaaataattttcccaattataattggttgatatatctcttaagtagaaattgtagtggtgtgaagaagcactgcccagattcccatttattgaatgacttgttgtccagctactgggagttcagcagtcagcttctagctctcggccccttctgaattgccccagctgcag

SEQ ID NO: 441328 - DNA, 643 bp, Homo sapiens
gttcataatgtcatcaagggatttccaaggaaagagagttctgaatgtatgccttatttgtcctatcagtagaattttttttctccttttaagcaaaatctgagtgtgtgtgtgtgtgtgtgtgtgtgttttaactttcatgatggaaagtttcagacataaaggtatggagtatggtatcgtccaacttgaataattactgactaatgtccaattatgtttcacccatattctatccattctccccaccccctgattattttgaagcaaatctctgttatcatttataatactgtaagtatttcagcatatatctccaaggaattctttttcaaaatatgaccattacacaacttagaaattgacaataatgtctaaatatcattaaatatccagtcayctgttcaagtttccatgattgtctcataaatgcttatttttaaaatgtgttgtatttgctcacatcgggattgaaataattttcccaattataattggttgatatatctcttaagtagaaattgtagtggtgtgaagaagcactgcccagattcccatttattgaatgacttgttgtccagctactgggagttcagcagtcagcttctagctctcggccccttctgaattgccccagctgcag

SEQ ID NO: 441329 - DNA, 643 bp, Homo sapiens
gttcataatgtcatcaagggatttccaaggaaagagagttctgaatgtatgccttatttgtcctatcagtagaattttttttctccttttaagcaaaatctgagtgtgtgtgtgtgtgtgtgtgtgtgttttaactttcatgatggaaagtttcagacataaaggtatggagtatggtatcgtccaacttgaataattactgactaatgtccaattatgtttcacccatattctatccattctccccaccccctgattattttgaagcaaatctctgttatcatttataatactgtaagtatttcagcatatatctccaaggaattctttttcaaaatatgaccattacacaacttagaaattgacaataatgtctaaatatcattaaatatccagtcacctgttcaagtttccatgattgtctcataaatgcttatttttaaaatgtgttrtatttgctcacatcgggattgaaataattttcccaattataattggttgatatatctcttaagtagaaattgtagtggtgtgaagaagcactgcccagattcccatttattgaatgacttgttgtccagctactgggagttcagcagtcagcttctagctctcggccccttctgaattgccccagctgcag

SEQ ID NO: 441330 - DNA, 643 bp, Homo sapiens
gttcataatgtcatcaagggatttccaaggaaagagagttctgaatgtatgccttatttgtcctatcagtagaattttttttctccttttaagcaaaatctgagtgtgtgtgtgtgtgtgtgtgtgtgttttaactttcatgatggaaagtttcagacataaaggtatggagtatggtatcgtccaacttgaataattactgactaatgtccaattatgtttcacccatattctatccattctccccaccccctgattattttgaagcaaatctctgttatcatttataatactgtaagtatttcagcatatatctccaaggaattctttttcaaaatatgaccattacacaacttagaaattgacaataatgtctaaatatcattaaatatccagtcacctgttcaagtttccatgattgtctcataaatgcttatttttaaaatgtgttgtatttgctcacatcrggattgaaataattttcccaattataattggttgatatatctcttaagtagaaattgtagtggtgtgaagaagcactgcccagattcccatttattgaatgacttgttgtccagctactgggagttcagcagtcagcttctagctctcggccccttctgaattgccccagctgcag

SEQ ID NO: 441331 - DNA, 586 bp, Homo sapiens
cgctgggagctgccgtcttgccgccacttcccacagaagcactgagagcttgtcctcagggcccgcttctctgcctcccttcccccgactcccatccggcggtggccactctggatctgccggaaacggcgcaggaaggggaggggcctgaggtggaccggggagcctgtggtctctgggtgtggcctgctctggccaaggcacctcttcagtctcacccagtctcaacctgccccgtcccccatatatatatatatatwttttttttttgaggaagatagtatctgtgacagtaaacggcatgctcagcagatctttccaaattcccatgcttctgaacacagctagagcgtattgctgggcagtgtgtccaaatacgatatggacgttttcagtcttcagatatggggaaagttcttttggggtaagtgcctgcccgatatctacaaagccactgatccccaaaagtgatcgctggaccgagctgatccacttcgttcccccggagatgaaggataagaacacacaggctcaagcacagccagggtcaggaagaatgactgaggccacagaggctagttggccc

SEQ ID NO: 441332 - DNA, 522 bp, Homo sapiens
ctatactagttaatctatcaatcaagtgttagggttagaataaagacttaagacatgcaagatctcaaatattttgcctgcaatgaatatttttcatactggaggattttcttctggaaaatgtgttccaccaaaatgagggagtaaaccaagaaagaggaagaagcaaagaggaagatgtaggagatgacaaacaacggaactgatacagacaagaggttactagaatccccagaatgatggagcagagaggccccaaagtaacatttgtacatcaggtcctagagggcaaccagttcagtccaggctggtcagaagtgtctggyggaaacttctgcaagacaataaaaggaacagaacctcatgcacttaaatggtttgagaagaaatgaagacactggtggaaagcttagggttctattaaggaaaaatacacagaaaactaagcaaaccgaagaacaaggcagtcatttattacaataaaaacaaaaagtcacacaggaaaggaaactgaaacatagt

SEQ ID NO: 441333 - DNA, 457 bp, Homo sapiens
ctttcaccactaagcatggcaacacgattaagttttagctataggtgtgtgcatgaaagtattgtgtgttacttccaggcctgggctaaacagtgctcccatatctgactctctacgttcttttctyctcctccatcttgtgcagacaggcgccagaatattggaagctgcaagctgcttttataatcacatgttggaagacagctgccacccatttcgtaccctatgagagagacaaataaactcctattgtgttaagccactgagatttttagggtttattctaataggttattagagcagctcatagtaatacttagtaaaatacatagtaatacttagcaatacatagtaaaacttacactgtagtacattcccattttacaggttacaaagctgagccaggccaggcatgactcatgcctataattccagcactttgggaggctgaggcagg

SEQ ID NO: 441334 - DNA, 577 bp, Homo sapiens
ggtctctgggtctcagctttcagcttgaaggctaaaagtcgtaaggaggcacaacagagaggacaaaaaaaaaaaaaagaaaagaaaagaaaggttgctcttgaggctgatggacttccagttagggaggtggcctcagggggatgcctgttcaggactggactgatcgctgaagtgtatactggaggagagaaggtgtgtaagggaaggagcttggcagcaggggcaaagggtgggagagaaaagattggtgctgaattccagaaatcctggtctcccaggaggagccgaggaatccgtgtaaccacagaggaatttctgtttccctgawgttagggtcttgggagcaacataggttgggtggggtagaggtgtcatcctaatagttcttgaaacttgaaagaggttgacccttccccagccagcagaccaccacataccctagggacataaaggccttaagtagttgatggtatctgcggtagtcttagcacctgggaggcatatattctgctaggaaaaattgtgaaagactttgaagtgggcaaaaaagactactgggtgtcttatctagggc

SEQ ID NO: 441335 - DNA, 497 bp, Homo sapiens
atctttcatgaaggaagaatcaatcagtgtggcaaactttattgttgtctcattttaagaaattgccacaatcactttaaccttcagcagccacgacctgatcagtcagaagccattaacaagaccctcctccagcgaagatactgtgaagatattgtatgacttgttgaaggctcacatgatgactagctttttttttctttttttctttttttagcaataaggcattttaaaattaagctctgtacttttagcaaagacaattatattgcaaacttaatagactacagtatagtataaacataacttttatatacactggaaaaccaaaaaattagtgtgacttgcttattatgataatcattttattgtggtggtctagaactgaacccacaatatctgcaaggtktgcctgtaccacaaacttcatgacttaaagcaacacagatgaattctcttatgaatctagagattagaagtctgaaatcaagatgtca

SEQ ID NO: 441336 - DNA, 569 bp, Homo sapiens
tatcgcaccactgcactccagcctgggtgacagagcgagactccgtctcaaaaaaaaaaaaaaaaaaaaaaaaatctactccattaggttcaaacagatcttgtccattcttttaactctgcagtattgcatgaaatgtattaactccatttttttttaacggttcttgtaccacgggaatttatctctttttcttttgaaaatattggtcctactttcttgtttatatttttaagtatgcattttgaaatgtattatgaaatgttccatacacctaaaaggctctatataacatgcacgtaacgtgaagaataacacaggtatgaaggcccaaggacaaaggtgtactaacacccctgagggagcctcatatttggcagrgactagtagtgcagactgcccagggtaatttgggtctggttttccactcatgagttttggcagggcttccagtaccccatgaagacatgaaaaggcatcattcttgaaggctaagatgaaacttgctctttaactcaggaacaaggctccccttttctggaactgaaagatacacaaagtttccttgt

SEQ ID NO: 441337 - DNA, 575 bp, Homo sapiens
caccatcccacataacttcatcccaaatctgtgctgtgggcttcacttcggcaaattccckgtcaccaccccttcagtcacctaagttggaagcactgggatacatttagaagcattgtgctgataccacttgcattaatgctgcttctttaaaaaaaaaaaatttttttttgagacagagttttgctcttattgcccaggctagagtgcaatggtctcagctcactgcaacctccacctcccaggttcaggcaattctcctgcttcagcctcccaagtagctgggattacaggcatgcaccaccattcctggctaatttttgtatttttagtagagacagggttttgtcatgttggcaaggctggtctcgaactcttgacttcaggtcatccacccacctcggccacccaaagtgctgggtttacaggcatgagccactgcacccggccttttttacaaaaattctgttcagaaactctccagtcagtttccactagccaggttcaggcccttcctactgacctctctgtctccagtctagtgtccctttattaactcctttctccaacatgca

SEQ ID NO: 441338 - DNA, 575 bp, Homo sapiens
caccatcccacataacttcatcccaaatctgtgctgtgggcttcacttcggcaaattcccggtcaccaccccttcagtcacctaagttggaagcactgggatacatttagaagcattgtgctgataccacttgcattaatgctgcttctttaaaaaaaaaaaatttttttttgagacagagttttgctcttattgcccaggctagagtgcaatggtctcagctcactgcaacctccacctcccaggttcaggcaattctcctgcttcagcctcccaagtagctgggattacaggcatgcaccaccattcctggctaatttttgtatttttagtagagacagggttttgtcatgttggcaaggctggtctcgaactcttgacttcaggtcatccamccacctcggccacccaaagtgctgggtttacaggcatgagccactgcacccggccttttttacaaaaattctgttcagaaactctccagtcagtttccactagccaggttcaggcccttcctactgacctctctgtctccagtctagtgtccctttattaactcctttctccaacatgca

SEQ ID NO: 441339 - DNA, 539 bp, Homo sapiens
tcttataaagttgttgtgaggattaaatgaaaccatctaagtaaaacagctagtcctctaccacacatttaataggtatgaataaatgactgctcttatcattatgcttttattattactataattattttcacatatttctgatctttcatatctaataactttagtaatatttttatttgacacttctaatcacagaggtatcaaattttcttttctgtgaacataatcttgrtgaattcttagaaaatatggcttaaaggaaaatctatttttagcacactgagacatctactgtgccccctccatggaataaataataattaacaaagcagctgcggggaaaaaagcacatcccatgaatttattcaatgcattatgaatagcaatagaattgtttgcccattgcacccccttgtgagagctcaaggtaactacctttattcaagagagtaggtggttttgagccttgcaattcaaagtttggtccttagttcagcagtatgggcatcacataaatgattgttagaaacttattt

SEQ ID NO: 441340 - DNA, 473 bp, Homo sapiens
tggacaaggggaccatgtctccagccacttttccaggaacctcctggtgctggtgctgatgctgtgataaagagggatggaaagagaaatacctgggtaaggaggacatagctttaacaactgagggtctggtatggtagcacagagctagctagacaggactgagtctctcctagggaggaagtaggagtgagaacccaagattcatggctggagaaacaggtagacaggcacagagacttgtccttccttcrggacccagatggtcttacatgtcccaatccctacatcctaagaacttccctcctccctcctaatgctgctggtgccaagtgccagcctctggcacagacctctcgcatggataactctacccagtcacagagctgctgcttcatgacaatggttctttcacacactttcccattttccagcacttgatggccacttgtagtcattgggggttagaagca

SEQ ID NO: 441341 - DNA, 588 bp, Homo sapiens
atatcaataatagctaatacttactgagcatttaaccctgtcccaagaactgtactcaatgtctgaaatgcacgatttcacttaaccctcacaacactctgtgaggtagttaccattattattcccattttacagatgaggacactgaggctcagagacacggaatcactcgcccaactaggaaataataggggagaaatttgaacccaaggctgaatgttattctaattattattcccaccytcaccccatcataatcaattataaagctgaggggaacttttctctgatctaagctatactacgtcttatatgtgaacaactttttaatgaatgagacacatgctctcctattaatgaaaacagagagatacccttctctgtgttgacaatgtagctttacccttcaggcccaggattgggatcaagaaacagctgaacctggtagtacactgctgccagagaaaagaagaaactggtcatttggttgcagctgaaattgccatttttgatgcatgtctttggtatactaacgcaggcaatgactccgattttgccaggtgttgccattgtctgggcttttatcct

SEQ ID NO: 441342 - DNA, 588 bp, Homo sapiens
atatcaataatagctaatacttactgagcatttaaccctgtcccaagaactgtactcaatgtctgaaatgcacgatttcacttaaccctcacaacactctgtgaggtagttaccattattattcccattttacagatgaggacactgaggctcagagacacggaatcactcgcccaactaggaaataataggggagaaatttgaacccaaggctgaatgttattctaattattattcccaccctcaccccatcataatcaattataaagctgaggggaacttttctctgatctaagctatactacgtcttatatgtgaacaactttttaatgaatgagacacatgctctcctattaatgaaaacagagagatacccttctctgtgttgacaatgtagctttacccttcaggcccaggattgggatcaagaaacagctgaacctggtagtacactgctgccagagaaaagaagaaactggtcatttggttgcagctgaaattgccatttttsatgcatgtctttggtatactaacgcaggcaatgactccgattttgccaggtgttgccattgtctgggcttttatcct

SEQ ID NO: 441343 - DNA, 449 bp, Homo sapiens
gtccttttctcactaactaggaagttggcacatgctttaagccattggaaccaaaaggagtaggcattagggacccttttcctgcctgaaaagcagaccaagagtctgtagraagagcagcaggatgaggaaaatattttggaagaaaggcagactgaaagaaaaggtatttgtaaacgtttgctgaagagccacatattgatagcctataatcataactattctattaactataaaaagaacccctacaagttgataagaaaaatttcaatttgcaaactcgatgctggggaatttgggttcaaataggggaggaaagtgcattccaggcaccaggaactgcctgtatatatacagagaaacaactggcctgagcatgttttgaaatgacaaggagctgggtgtggctgtagtacaggagagtggcgattgctaaagctagggaggta

SEQ ID NO: 441344 - DNA, 435 bp, Homo sapiens
tctggcttgtttcaagtatgtactgcggctaagaaacatcttcccaaggcttcagtgtggtggcctgactcacagtgtggtgacttggtcttattacacatcataacaataattatcaccatgttatgaccacaacaactgccacttattaagcccctactgggtgccagattcagtaaaaaatattttactagcattgtctcacttaatackcacttaatacagcaattccataaggcagatattatcattagccccactatcccaatgaaaaaacagattaggagaggttatggtcaaggtcataaacttacaagtggtagagccacttgaacccaggcagctctaactgcccttccactaaggctcctaatttactattctgccaaatatttcctataacaataataactaccacattaataatagtaacac

SEQ ID NO: 441345 - DNA, 347 bp, Homo sapiens
tcaagtatgtactgcggctaagaaacatcttcccaaggcttcagtgtggtggcctgactcacagtgtggtgacttggtcttattacacatcataacaataattatcaccatgttatgaccacaacaactgccacttattaagcccctactgggtgccagattcagtaaaaaatattttactagcattgtctcacttaatactcacttaatacagcaattccataaggcagatattatcattagccccaytatcccaatgaaaaaacagattaggagaggttatggtcaaggtcataaacttacaagtggtagagccacttgaacccaggcagctctaactgcccttc

SEQ ID NO: 441346 - DNA, 590 bp, Homo sapiens
tctctccctaatctctagttacaactgaaaactatgaacaaaatatgaaaagcagttacctraaaactaaacaaaagcatacagatagggaatgggggtcaaatttggagcagcaaaccaaacaaaaatacatttcccaagttttcctcccttttctcttttctcttatgcccagtcatagaactgttgtggtggcagtgcaggcagcccaaactgtttctctggccaggataattggggaaagaggcccctgtagtcgaaacatgtgagaagaaaccctgttgttgtttttctctctttctccttttgcttctttgcctttaaactgtgggtccagtcatggaaccgtgttacagcagcaatggtataacagatttaaaactctaagtaaaaccctattttcctggccagagcatcagaaaaaaaaaggtcctctgtgagctgggtcaaaggggaaaggaattccctaattctgtgtatgagactgcacaagtctcaggcttaatcttgagctgtgcatacacaggaaagacccagagcaacacagaaaaggttttgggaactgaattattatttaatcgccccagttt

SEQ ID NO: 441347 - DNA, 590 bp, Homo sapiens
tctctccctaatctctagttacaactgaaaactatgaacaaaatatgaaaagcagttacctaaaaactaaacaaaagcatacagatagggaatgggggtcaaatttggagcagcaaaccaaacaaaaatacatttcccaagttttcctcccttttctcttttctcttatgcccagtcatagaactgttgtggtggcagtgcaggcagcccaaactgtttctctggccaggataattggggaaagaggcccctgtagtcgaaacatgtgagaagaaaccctgttgttgtttttctctctttctccttttgcttctttgcctttaaactgtgggtccagtcatggaaccgtgttacagcagcaatggtataacagatttaaaactctaagtaaaaccctattttcctggccagagcatcagaaaaaaaaaggtcctctgtgagctgggtcaaaggggaaaggaattccctaattctgtgtatgagactkcacaagtctcaggcttaatcttgagctgtgcatacacaggaaagacccagagcaacacagaaaaggttttgggaactgaattattatttaatcgccccagttt

SEQ ID NO: 441348 - DNA, 590 bp, Homo sapiens
tctctccctaatctctagttacaactgaaaactatgaacaaaatatgaaaagcagttacctaaaaactaaacaaaagcatacagatagggaatgggggtcaaatttggagcagcaaaccaaacaaaaatacatttcccaagttttcctcccttttctcttttctcttatgcccagtcatagaactgttgtggtggcagtgcaggcagcccaaactgtttctctggccaggataattggggaaagaggcccctgtagtcgaaacatgtgagaagaaaccctgttgttgtttttctctctttctccttttgcttctttgcctttaaactgtgggtccagtcatggaaccgtgttacagcagcaatggtataacagatttaaaactctaagtaaaaccctattttcctggccagagcatcagaaaaaaaaaggtcctctgtgagctgggtcaaaggggaaaggaattccctaattctgtgtatgagactgcacaagtctcaggcttaatcttgagctgtgcatacacaggaaagacccagagcaacayagaaaaggttttgggaactgaattattatttaatcgccccagttt

SEQ ID NO: 441349 - DNA, 564 bp, Homo sapiens
gtcataaaataatatttttaaatgtcccagaatacaatccaaaattactcaatatagaaaaaagaagaaaaacatgtctaattctcaatggaaagacaaaagatgccaacccttagatgacccagatgttgyattatcaaacaaagatgttaaagcaactatcataaccatagtccatgagataaagatgaacactcttgaaattaatagcaaggtaaaaattatcagcagggaaataaatcctataaaaagaaccaaatggaaatgctgaaatttaaaaatatgtaatctgaaatagatgattcactagatggattcaacagcagaatggagatgacagaaataagtcagtgaacgtgaagatggatgcatagaaattatctaatctgaataacagaggaaataaagattgaaaaataatggacagagccatagagacttgtgaaacaatatcgaaaggtggccagacagtgcctcacgccttgtaatcccagcactttaggaagccaagacaggtgggtcccttgagcccatgagttcaagaccagcttgggcaacatggca

SEQ ID NO: 441350 - DNA, 564 bp, Homo sapiens
gtcataaaataatatttttaaatgtcccagaatacaatccaaaattactcaatatagaaaaaagaagaaaaacatgtctaattctcaatggaaagacaaaagatgccaacccttagatgacccagatgttgcattatcaaacaaagatgttaaagcaactatcataaccatagtccatgagataaagatgaacactcttgaaattaatagcaaggtaaaaattatcagcagrgaaataaatcctataaaaagaaccaaatggaaatgctgaaatttaaaaatatgtaatctgaaatagatgattcactagatggattcaacagcagaatggagatgacagaaataagtcagtgaacgtgaagatggatgcatagaaattatctaatctgaataacagaggaaataaagattgaaaaataatggacagagccatagagacttgtgaaacaatatcgaaaggtggccagacagtgcctcacgccttgtaatcccagcactttaggaagccaagacaggtgggtcccttgagcccatgagttcaagaccagcttgggcaacatggca

SEQ ID NO: 441351 - DNA, 564 bp, Homo sapiens
gtcataaaataatatttttaaatgtcccagaatacaatccaaaattactcaatatagaaaaaagaagaaaaacatgtctaattctcaatggaaagacaaaagatgccaacccttagatgacccagatgttgcattatcaaacaaagatgttaaagcaactatcataaccatagtccatgagataaagatgaacactcttgaaattaatagcaaggtaaaaattatcagcagggaaataaatcctataaaaagaaccaaatggaaatgctgaaatttaaaaatatgtaatctgaaatagatgattcactagatggatycaacagcagaatggagatgacagaaataagtcagtgaacgtgaagatggatgcatagaaattatctaatctgaataacagaggaaataaagattgaaaaataatggacagagccatagagacttgtgaaacaatatcgaaaggtggccagacagtgcctcacgccttgtaatcccagcactttaggaagccaagacaggtgggtcccttgagcccatgagttcaagaccagcttgggcaacatggca

SEQ ID NO: 441352 - DNA, 564 bp, Homo sapiens
gtcataaaataatatttttaaatgtcccagaatacaatccaaaattactcaatatagaaaaaagaagaaaaacatgtctaattctcaatggaaagacaaaagatgccaacccttagatgacccagatgttgcattatcaaacaaagatgttaaagcaactatcataaccatagtccatgagataaagatgaacactcttgaaattaatagcaaggtaaaaattatcagcagggaaataaatcctataaaaagaaccaaatggaaatgctgaaatttaaaaatatgtaatctgaaatagatgattcactagatggattcaacagcagaatggagatgacagaaataagtcagtgaacgtgaagatggatgcatagaaattatctaatctgaataacagaggaaataaagattgaaaaataatggacagagccatagagacttgtgaaacaatatcgaaaggtggccagacagtgcctcacrccttgtaatcccagcactttaggaagccaagacaggtgggtcccttgagcccatgagttcaagaccagcttgggcaacatggca

SEQ ID NO: 441353 - DNA, 393 bp, Homo sapiens
aaatcttgctatgttgctcaggctagccttgagctccagggctcaaaggatcctcctgcctctgccttccawgtaggtgggactacaggcacacaccacagcacccagaaaagaaaaaaaaaaattaaacatagagacataggttaaaagtaaaaaaataggaaaacatataccagtacagtaatcaaaacaaagctggctgggcacagtggctcacacctgtaatcctagcactttgggaggctgaggtgggagaatctcttgaggccaggagtttgagaccagcctgggcaatgtagtgagaccctgtctctacaaaagatttaaaaatgagccaggcatagtggcgcacacctcttcctccctatcaccctacccctcatccccagcatg

SEQ ID NO: 441354 - DNA, 530 bp, Homo sapiens
gggtaaacaacagattctcaaccacgaactgtgctaccagcctgtattaggccattcttgcattgcaatgaagaaataactgagattgggtaatatataaagaaaagagttttaattggctcatggttccacaggctgtacaggaagcatgatgctggcatctgctgtttcaggggaagcatcaggaaacttacaatcatggtggaaggcaaaggtggagcctgcatgtcacgtggccagagcagcaggaagagagagaaggggaagtgccactcactttcaaacaascagatctcacaagaactctctcaatatacaacgccaaggggggatggtgctaaaccgttcatgagaacttcgctccgtgatccaatcacttcctatcaggccccaattccaacattcaggattacaatgcgacatgaaatttgggcagggaagcagattcaaaccatatcatagatgattttgcccaactataggctaggtaagtgtcctgagcatgtttaaggtaggctaggctaagctat

SEQ ID NO: 441355 - DNA, 530 bp, Homo sapiens
gggtaaacaacagattctcaaccacgaactgtgctaccagcctgtattaggccattcttgcattgcaatgaagaaataactgagattgggtaatatataaagaaaagagttttaattggctcatggttccacaggctgtacaggaagcatgatgctggcatctgctgtttcaggggaagcatcaggaaacttacaatcatggtggaaggcaaaggtggagcctgcatgtcacgtggccagagcagcaggaagagagagaaggggaagtgccactcactttcaaacaaccagatctcacaagaactctctcaatatacaacgccaaggggggatggtgctaaaccgttcatgagaacttcgctccgtgatccaatcacttcctatcaggccccaattccaacattcaggattacaatgcgacatgaaatttgggcagggaagcagatkcaaaccatatcatagatgattttgcccaactataggctaggtaagtgtcctgagcatgtttaaggtaggctaggctaagctat

SEQ ID NO: 441356 - DNA, 528 bp, Homo sapiens
tatcttcttttgtgcagcatatgttcacttcattactcattattttattggattgttgttttatttttattgaattgtaagagttcctgatatatttggttacaaattctttgtcagatattttctcccaatttgtggcttgtgttttatttcaacactgtctctcaaagagcagaagttttaaatttttttgttcaattgtttgttgttagtgtatagaaataaaattgattatagtgtattaactttgtattctgtgaccttgctatattcatttattagatgtagtagcttataggcttcttaagatttttttttaagtccccaacccaccatctctgagtattttacttctttctttttaaatgtgaatgcatttkatttctttctcttgtcttactgtactggctaagaccctcagtaacaatattaatcctgatcttaaggagaaaacctgtcggtttttttgtagatgccctttatcagatagaagaaattatcttctattcctacgttgttgactgtttt

SEQ ID NO: 441357 - DNA, 596 bp, Homo sapiens
atacatacatatatttacatatatatgtatgtatatagccaaaacctcaattacttttgcaccaacataatactttatgcactagtagaataggttaatgatataggttagctctgaaattaaatctagtagatatgaaataaaggaaacttctgggaaaataatataatttgaataggtgtaaaaaaattataaaaccttccytttttttttttctttttgagttggagtcttgctctgtcgcctgggctagaatgccacggtgcaatctcagctcagtgcaacctctgcctcccgggttcaagcaattcttctgcctcagcctcccaagtagctaggattacaggtgctcaccaccacacctggctgattttttttgtatttagtagagacgaggtttcactatgttggtcaggctggtctcaaactcctgacctcaggtgatccaccggccttggcctcccaaagtgctgggattacaggcgttagccaccatgcctggcttataaaaccttcctgatgtgctattttttccccagttttgtacagccagatctcttatttggcacatacataactaaataaagttggtatat

SEQ ID NO: 441358 - DNA, 470 bp, Homo sapiens
ataacccttaacttcaatttccttgcaactagaatgaaaaaatacagtctgaaagtatatgatttatagcagctctgacctaaaaatgaagatgaaggaatttagaagtgatacagaatttataataaagacacctgagttgaagtcttaccaccctttcttattaagtatatgacctatagtaagttatttaacttctttgaagtctatttgcttgtctgaaaaaggcagttaagaatacctgctgcattagtcggggttctctagagggacagaactaataggatattagggagttcattaagtattaacttacacaatcacagggtcccacaataggatgtctgcaagctgaggagcaaggagagccaatctgagtctcaaaactgaagaacttggagtctgatgttygagagcaggaagcatcccgcacgggacaaagatgtaggctgggaggctaggccaatctc

SEQ ID NO: 441359 - DNA, 558 bp, Homo sapiens
aggtgagaaaagaggtgagaaaggtaaaatgacaaatgtagacccctcctttcggttcaagaagaaggtttgaaattgtattactaggggaaagggagaacatgttgactagggccaactagaaggattggagttaaggctggaaatcttaaaagaacagtgataacaatttgtgtctggtctaccttcatcagcatcaggtataggttagagaaggtgggtagccgggttcaccaggattgggattttgccaagtgggtatatagaagaatgaggaagaatggaattgagagtgttaagcaagagaaagattgaaaggatrgggctttgtttttaggctgcctagagaaggaaataaaaactagaggaagctgagaaattggggtgaagtagaagaatcaaggggcttagtgactttgatgcaattaaaagcacacattgataagaagattgtactcagacattgtacaatttaaattgtagtttaagatttcagaaatggagcgattctaattgatgacaagatctaggatgtaatttagagtgtaggctagaaaa

SEQ ID NO: 441360 - DNA, 598 bp, Homo sapiens
catttctgcttccctgcagtagtcgggccctgggtatcattgggattggcacagtttctttgagtctttccccacctcacaggcagtcaggcttagagagctgtgatggggatgggcagggtcttgggtctgggaagccccagaggaaagactgcgttctttccccaggttgaagctgttaatcatcctgctgaaggctggattcgcagagagagaaaatgtaaaagggctgctttatgatatccatggatgtgccctcatggccgtgaacttcaatagytcttaactttacttgcctaagtaagggaaaacataataaaccagcaggcaatttgaaacattagcagactgttatatttcatctgaattttaggtcttcacttttgtaactcaggattttatgtgaagctatatttctttaaagatggcagcattttcttctcaaaatgaggatcaagactatggtatctttacagtattaaaaataaactgtgctttggacctgcaaagaaatattcagatgtcataacctgaaaataacctctgaattttcccacactctaacaaatctccaaactgccaaatggatatgcaccaa

SEQ ID NO: 441361 - DNA, 472 bp, Homo sapiens
aatacttggttgcctccccatctacaggacaatctgatggactagctcttccactctccacaactgtttcatattgtcattttcttcaaacatcttatcacttcctattctaaatatgtaactttgaataatatttcctctagaaaatgtgggcaaatcatgaccaaaactccaatgggattttataatggaatataaagcaattataaacactgtccagaaaagtaaatacataggaataatcaataaaatgagaaaaacaagaaaaatgggagtaatgttgacctaccagttatcaaacaaattatagagctaccatawttaaataatgttaaattcctgctggaatagacaatacatcaatggcacagaccagagaccacatgtaagggtaaaataagataaaggtagcatttcaaaatgatgagaaaggataggatatttaacaaatggtgttgaaaagttggctatc

SEQ ID NO: 441362 - DNA, 540 bp, Homo sapiens
aaattaagtaggaatgcagtaggcctcctatccatttcatttctaggaacaccatgattaattagccaaggccagagctctagacacatcagactattctgattgtcgctttgcctctgctatccgttatggtaactacgcccaccttgcctttgatggttgagtgtcaccacttggcccccgctacctcgggatccaattattcccattgtatttaaattttgtagttgagtgactgcagttcccatcattagatctgacacacagagaagagcaattacagcaattacagggctcttcaaagatgcaggtgctgcccttacaaatctattccacaactcagtgtccctagtttcatcagggggatctggcagtcccacaygtccccattccaagtttcagggtcccattcttttccagtagatgccctcactttaacagtaaacacctggtgcatgcatcttttgttacaagtcagccactcacatgataagagcttgtgtttgtttttccacaatttcagctctttctgttcaggag

SEQ ID NO: 441363 - DNA, 520 bp, Homo sapiens
aagcacaaatggtgaaagatgcactataaaattgtgtgacaaaacatatgcataccaacaaagatctttttaggcacttgcattcagaaacattccttttataaataagcacttataacagttccactccaaaaaataaacctgattttcccaaattgcacctattagttgagactatatcatatattagggatgcattcaaatggaccatttggtggggaaagtcaactgaactttaaaaaatacgaatccacctatcttattcacaactttaaaaatacagaatttaaagataattccagtgaggcacaaatgtgaccctatcaaaacattctaccattcagtattaccaacagaggataaatacaacaacaaaaggcaaaacccatgatttggcagtcctatacaaaagrggccctgtcaaaacattctttcacaaaacaagcacaataccacaaaataacacaacaacaacaaaaaaaccctgaaatttgacatccctacacaaattgtggaattt

SEQ ID NO: 441364 - DNA, 552 bp, Homo sapiens
gacaaaatcataggccacatacaagragttagaaatgagaaggatttcaggcttcaaagagaacaaaaaaaacacctttgaatttctgaagaaaaataattttcagtccaaaatattagaaccgtccacactatcaacacttatgacatttccattcaagagagtagaatataaagacattcgtggataaataaggttttaaatatttactcctattctaccttgctcaagtatgggcatgaccaaaacaggagaataaaacaaaacaaaacaaaacaaaacaaaacaaaacaaaacagggaagacatgacaggcatttcctcataaaagaggagaaggtggaaaagagataccccaggatggcagctagttaccatatttttaaaaatccagtacaaaattatagctagataaggaggagtaagttctggtgttttataccactgtaagatgactgtagttaacaataatatattacatactttcaaataactaaaaggagggtaatgaatgttcccaacacaaagaaatgatgcttgagatgatggatgg

SEQ ID NO: 441365 - DNA, 599 bp, Homo sapiens
tactactacatctgtatgttcttagtcacatcaggctgctacaacaaaaataccacagagtgacttaacaaagatttatttctcacagttgtagagattgagagatcaagaccaaggcactatcagattcagggtctggtgtgggccccaattcctgatgcgtagactgttcttttctctctgtgtcctcacatgatagaaggggaagggtcatgagggctccacctagtcacctcccaaaagccccaccctccaaatatcatcacatcatcacactggggattaggaactcaacatgctaattttgcagggggtcataagcagtccatagcaactcagttcaaccaagtcttaaacagataaawaccaaagattcaaccaagattgtgaggttctaatgagaatttacaatgctaaatgatctcaaaaaccattatgttttgatatatgctgcttaactggttgactctatatgacataaacaatcaaacacattttttcattggtcaagcgatgtagttttacatttagcttcactgagagtaaatgtagacaaaagtaaaaagtaataatagaagtctacatgcaaccattgtggt

SEQ ID NO: 441366 - DNA, 445 bp, Homo sapiens
atagaaacaaatgtatagacagaagaataaataaaattgacagaggttagggaaagcaaggagacatttctgggcagattctattgtatctggttggcaggagaaataacagattctgctattcatttttcgtaatactaaattaaaggctcagcaaaagtttccagtataaaaagcaatgctttactttttcaaaattctgatatatttgaaactayatacaaatttacaaagaaattatctagaatatatatactttttattaaaaatatacaacttttaaaatttaggttagagctacagatgactaagtcctacataagacttgtgtatgttgtccaggaaaaataaaagactagactaatatgctgtgaacatacatatgaacatgtatcacatccatgtttaaatgaattccaggcagtcatatattaaatgaaaagaa

SEQ ID NO: 441367 - DNA, 568 bp, Homo sapiens
gtcaaatatggaagccaccagccacatgtggctatggagcacttggaatatcactagtgcaactgaggaactaaactttaaattgtatataatgttaactcatttaacataaatagtcacctgtggcttctggcagctgtatcggacagctcagatctagatcagcagcagaagacatattktagatgaagtacacggtaattttgtattaaagtctcctaaaagaaaaacatggatacagctcttctgattattcattgtattattttggaaatggggaatgacaacattttcagaataataaaagtcatactattttagctttaatttaaaattggcttctattcttggactttttatacagggaaattctgctattcattctcggaaaaaaatggtatgtaaccaaatctgacttttccaaataaatctgataattaactctctgagaggactcactaactgccagcttctgatagtattatgttctatgctctacaaggacagggagtgttttttaattgctattttgtgtctattagctggtatagtgatggcacatagtaag

SEQ ID NO: 441368 - DNA, 581 bp, Homo sapiens
gtatatgtatgtaggtacacacatacgtatatacgtacgtatatgtacgtaggtacacacatacgtatatacgtacgtatatatatacgtatgtacacatatatatgtgaaaaaccaatgtcccagcaccattactgaatatcagtcatttcccctacttgatctgcaatgccaatatcaagtgtcatatattaggtctctttatgtgctctattattttcttatgagatcaccatcatatatgcagtccatcactgactgaaacgtcattatgcagtgcatgactgtattgtatgttatatactactactatgctatacattggcccttttagtgtctcccccaacctccatacacacatcccaaaatgtaagctccaaagggacgaggactttgtcagctagatccaacacctagaatagtccctagcacatcagaggcattcaataaatagagcaattaagtaaatgcaccgtactgycacaatttcataaaatccaacaatcagtgagagactgagtaacaaagatctggaaacaatatatacaaaaaaaatttgctactgttaaacagagaggaaa

SEQ ID NO: 441369 - DNA, 462 bp, Homo sapiens
  misc_feature (1)...(462): n = A,T,C or G
attgacaatgacttccacctgagtggtgagtggtctctctcagtcataatcacaggctcaacagtgcatcattcccaatgccaccttttcttttttataagtgttaaaatattaaatatgtaaggaaaatgttctataatgcagcatcatctcatgctagtcatcaggtttaaagttaagaagatagaaacttcatatatttgacaaagataaaacaaaagaatgaaagggggaaagtatgagcaggggtatttctttcctgnggattgttattcagatacagttagacaactcctgctgattctgccgatggaggaggcattagactgataaagccanacccttttagnntttaccaacttcnntctataattctaccattaytgggactattgagagatgtcaagcagctggggtcatgtcccaatacagagatcaatgtctcctaatatactcacagaa

SEQ ID NO: 441370 - DNA, 646 bp, Homo sapiens
accaatctctttatagaggcaagaagggagagtatagtcctatataaaatggtaacagaatgacaaaattacaatttatgctatctcagtagagctcaggagtagctgttggcagttttttgtaagaaagttgtgatttagaatcaaaataattaaagatcctggcttttgattagcactaaacgcttctattttccaacgtttgaatttgttaatttctgaagaactttaacccaggagaacagacagaaactccatgaaagttagaccaagtgagacctcaaagataactactaggattcatccattgctgttttctcccttctctctttccttccaaactcagggctgcaaacagttatggagggtccctggaacagtaagcatcccygtagactagtctacattttcctgcagatgtctaaacccaaaccctgcaaattgtaatatagaggtgctaagtatgtctgtgaaaaccccacttgcctactcactcactcattcattttaatttatgtacagttatgttatgtacagtattctctgtgccaaatatctctctaaggactggggaaagagaaataaacatggcataggttctaagcaaagcatcgtccctatcttcaggaagctcatgttctagtgt

SEQ ID NO: 441371 - DNA, 507 bp, Homo sapiens
ccaagggtgggatgaaatgttgctttagctgatggggaacagtgctgttttagtgggggaattactgctgaatgtgctcttgcccagttaagctttgtggcaggtaatttargcttttgaaaaacataacatgggaagcgagagaggtacgtagttgttatttgaggctaggttttcgaagtgggacatagcgtgttccgaacaaaccgacgtttggcatcactgattgctgtctggagcagtgcttcgcaaaagtttggcacaattaccggtgctggtccttgaagaaacaaatatggaaattgaaagcgtttaaaaccttttgaaagcaatataacaataattttatacctgttaaatgtaataaattggggcctgcattttgtatgtttcttttattccatatttctctaaggattcatttttattgttttatgaaactactagtctgtgacatggaaggtagaggaaaaagattcttgaccctagttgcttgtgaaacctggg

SEQ ID NO: 441372 - DNA, 507 bp, Homo sapiens
ccaagggtgggatgaaatgttgctttagctgatggggaacagtgctgttttagtgggggaattactgctgaatgtgctcttgcccagttaagctttgtggcaggtaatttaggcttttgaaaaacataacatgggaagcgagagaggtacgtagttgttatttgaggctaggttttcgaagtgggacatagcgtgttccgaacaaaccgacgtttggcatcactgattgctgtctggagcagtgcttcgcaaaagtttggcacaattaccggtgctggtccttgaagaaacaaatatggaaattgaaagcgtttaaaaccttttgaaagcaatataacaataattttatacctgttaaatgtaataaattggggcctgcattttgtatgtttcttttattccatatttctctaargattcatttttattgttttatgaaactactagtctgtgacatggaaggtagaggaaaaagattcttgaccctagttgcttgtgaaacctggg

SEQ ID NO: 441373 - DNA, 507 bp, Homo sapiens
ccaagggtgggatgaaatgttgctttagctgatggggaacagtgctgttttagtgggggaattactgctgaatgtgctcttgcccagttaagctttgtggcaggtaatttaggcttttgaaaaacataacatgggaagcgagagaggtacgtagttgttatttgaggctaggttttcgaagtgggacatagcgtgttccgaacaaaccgacgtttggcatcactgattgctgtctggagcagtgcttcgcaaaagtttggcacaattaccggtgctggtccttgaagaaacaaatatggaaattgaaagcgtttaaaaccttttgaaagcaatataacaataattttatacctgttaaatgtaataaattggggcctgcattttgtatgtttcttttattccatatttctctaaggattcatttttattgttttatgaaactacyagtctgtgacatggaaggtagaggaaaaagattcttgaccctagttgcttgtgaaacctggg

SEQ ID NO: 441374 - DNA, 585 bp, Homo sapiens
gtccttgaaagcacattattattcatttcctggaatctctgtcctgaagagctttgcttgacagtgttataggcaaatgagcaaagagctaggaaatttgttgttagggatttgttgcaaaagaatgttttctggcatataaaatgtctgcgaggtgactgccagaagtttaatatttgaaatgaaaaaagagggagatcctaaaatgaggcaagtgcatcatgtgaaaaatgttcagcagatttaataatttactaggagtggttttatctagaacatgtaaaagttcagaaagcaggaaatatggtagaycacaacttaccatgccatttctcatgcctctcaatttatctgaatagtgaaatttagagtgcagcaaaggaaaatcatgaggataaaaactgctgtaatcctggggtagattatcttacggtttaacaaatgttcactctctccccttgtcccacaacctaaagagagaagtgcatttcccttgctgttgatgttagccttggccatgtgactcgctatagccaatgggaggtcagaatatcagacaagtagagagacatgacatgtgcctgt

SEQ ID NO: 441375 - DNA, 619 bp, Homo sapiens
aaagccaaaagatagacacaacccaaatgttcatcaactgataaacagataagcaaaatatagtatatccacacagtggaatagcattcagccgtaaaaagaaatgaagtactgatgcrtgctacaacggatgaactttgaaaacactgttctgaatgaaacatgccagacactaaagttcacatagtgtatgatcccatttatataaatatccaggacagtcagatccataaaaactgaaagaagattcgtagttgccaggggtgggaggagcgggggatagagagtggctgctgaataggtacagggtttcttctggggggacgagattgtcaaactagattgtggtgacggttgcccaacattgtgaatgtactaaatgtcactaatagtaaattttgtgttgtgtgtatttaaccacaacaaaaacaattaactcagttttttaaaaatgcagatgctcatgttccaactccgaagtttctgattcagtgggtctgggataggacccaggcacctacttttttttttttttttaagctgcactggagatttctgatgctgaaaaggaaacatcttgggttggctgcccaagttcccctgaaacacagagtaagta

SEQ ID NO: 441376 - DNA, 558 bp, Homo sapiens
acgtatcaaaaatatgtgaattttgtatacagtatttgattagcaattttcatgaacttgtgaagtgatctctctcagatggttattaacatatataaaatattcaaacactcttttggactcactgggccattgtaggtcaattatatacactagagaaggggtcctccttcctcaaagtatgttggtctctaggtatacatatggataagtggaccagatatttcatagtatgaataggcagtctataaaatggcaaacagtccccaaaaataatyctagcaaagaaaagcacccgatttttgtctaaagacttcaagctttccagattttggaaattttaattaaattcacttttttaaaattttgccattagaagtgactggaaaagcagctgggattcttttgcgaacaaaggttagcaattatctcagctcataacaatgaagagaccaaaattagctgttcatgttatcctcagattattgctagaggctgaatcccattaggctcatgatctgataacagaaatagtccatctttcaaaatgccccattc

SEQ ID NO: 441377 - DNA, 575 bp, Homo sapiens
atgttggtctttttaagatctcatggatttgctcctttctcctccccagagcctgtcccttaccaacatcctcagtacctcgggcccaaatcacagctactccttatctggtcctttagcctcagtctctggcctcagtcttcttccttgtcacttttaccaagtcacactcttgaacggctaatgtcctgcagaatgtaggcctggacagccaaccaacctcagctaggacacaggagtcacttctcaccacagactgcacgggtttgggccccgactctgccacgggatactatgtgaccttagccatgttacttgatcactctgagcatcagcttcctcatttgtaaaactggtctaatacttaaaaattcttatgaggataacatacataacataaaggattggacacatggtaaaataataggcagttaagacctgttagctgcgrctatgggagttacggtcattgtcactgttagagtgcatagttgtctcctggagctagtgtaatgcctatgcttggtctctaagacatataattggtcccaccaaatatatctaaaggtacactc

SEQ ID NO: 441378 - DNA, 493 bp, Homo sapiens
tttcacacaggcacacagggagaatccaggttttatttttgtttttggtttttgggtttttttttttttaagtctagttactgtgaagataacagaaaaatgctgggaaagttggarttccagattaggaacaagttcacatgctctcatgctttttctctcttcttccctcccttcctttctcctttcctattttgcctttccttttgataattttcagttatattaaagaaaaattttaaaagttcttaaggaaaatataaaataagaaaatcccattcattcaggcttctctgagagctaagtatcagctgagaagaaatactcagtcactctatagtcccgttatacatcataaactctcacgtatttatagtgaaataaaaatgtttactgcctgtctggatgcatttcccagaaaaggagaaaccagtgtctaactcagagtgctaggaatgttatctgatactacagagaaaagagcaatatgttt

SEQ ID NO: 441379 - DNA, 493 bp, Homo sapiens
tttcacacaggcacacagggagaatccaggttttatttttgtttttggtttttgggtttttttttttttaagtctagttactgtgaagataacagaaaaatgctgggaaagttggaattccagattaggaacaagttcacatgctctcatgctttttctctcttcttccctcccttcctttctcctttcctattttgcctttccttttgataattttcagttatattaaagaaaaattttaaaagttcttaaggaaaatataaaataagaaaatcccattcattcaggcttctctgagagctaagtatcagctgagaagaaatactcagtcactctayagtcccgttatacatcataaactctcacgtatttatagtgaaataaaaatgtttactgcctgtctggatgcatttcccagaaaaggagaaaccagtgtctaactcagagtgctaggaatgttatctgatactacagagaaaagagcaatatgttt

SEQ ID NO: 441380 - DNA, 652 bp, Homo sapiens
agatttactaaaatggagataaattttttgtttttaccctaaagaattggaaagatactagaagactgaaaaattatttaagacctataaataagaaagaaaaaaaaggatcatcggattgtaattatattatagatgatgaacttcggctgcagtcaaatgatagaactaatattaagagactatctctgtatgtctccagaccaagtgatcatttaatagaaaatgtcagggttatcctgactaaaaatatttttcttctttggctataatgtttcaacayatgcaaatatgaaactaagtaaaataaatatatgtatcagacaacattttacaaaataaaattaatctagtgactgtcataaatcaacttaattatatagttagtaaaatagcttgagatttggctggaagatgataaaccagaggtggtcataaaagagttggggagctcaggagaggtcccagtgggaagcccagggaattagtcttgggctcagtcttactttacatcttaattactgatttcaaagaaaggctaaactgcacattaactaatttgcagatggcactaaactggcaaacactgggaattgcagattaaaaatccaaagggattttaagaggttagaaataggaaacagggaaatct

SEQ ID NO: 441381 - DNA, 660 bp, Homo sapiens
tgcttctgcaaccactaaatgccctcatcatcctggaatttggagggttggagacayagacaaccaattctgtatccacttaccctaaattgcaacttcttagccctagggctatcaaagtaggcttgttcaggtaagtagggggagggaagaaattgtggccactatcccctctacctacagccttaaaagatggagctctattgatttgcagagttgagcagcaattacagccacccacttggcctgacttggccacacacagaaaagccaactgagccaagtataattcccaggaaaggtaaaacttccgttgaaaatccaatagcaggggaaattcacaccaggtacccttttcttccatgagatccctgaatagataaccaagcatcaccaggcaaatgagaaaaaccagtagcaggaaagaaaataacaaccagaagaaacatagaccctggagaaaatatattcagtaggatggtaaaatttttagagcaatccaggacatattaggcacacgagataagaacaagggaaaaaacaggatataatgaatgtgaccaatagaagttagaaagaaagacaatttaaaacttcaaagaaaataaacaaatagccctggtcatgaaattcattatctagataaaaagcaaattaaat

SEQ ID NO: 441382 - DNA, 660 bp, Homo sapiens
tgcttctgcaaccactaaatgccctcatcatcctggaatttggagggttggagacatagacaaccaattctgtatccacttaccctaaattgcaacttcttagccctagggctatcaaagtagkcttgttcaggtaagtagggggagggaagaaattgtggccactatcccctctacctacagccttaaaagatggagctctattgatttgcagagttgagcagcaattacagccacccacttggcctgacttggccacacacagaaaagccaactgagccaagtataattcccaggaaaggtaaaacttccgttgaaaatccaatagcaggggaaattcacaccaggtacccttttcttccatgagatccctgaatagataaccaagcatcaccaggcaaatgagaaaaaccagtagcaggaaagaaaataacaaccagaagaaacatagaccctggagaaaatatattcagtaggatggtaaaatttttagagcaatccaggacatattaggcacacgagataagaacaagggaaaaaacaggatataatgaatgtgaccaatagaagttagaaagaaagacaatttaaaacttcaaagaaaataaacaaatagccctggtcatgaaattcattatctagataaaaagcaaattaaat

SEQ ID NO: 441383 - DNA, 660 bp, Homo sapiens
tgcttctgcaaccactaaatgccctcatcatcctggaatttggagggttggagacatagacaaccaattctgtatccacttaccctaaattgcaacttcttagccctagggctatcaaagtaggcttgttcaggtaagtagggggagggaagaaattgtggccactatcccctctacctacagccttaaaagatggagctctattgatttgcagagttgagcagcaattacagccacccacttggcctgacttggccacacacagaaaagccaactgagccaagtataattcccaggaaasgtaaaacttccgttgaaaatccaatagcaggggaaattcacaccaggtacccttttcttccatgagatccctgaatagataaccaagcatcaccaggcaaatgagaaaaaccagtagcaggaaagaaaataacaaccagaagaaacatagaccctggagaaaatatattcagtaggatggtaaaatttttagagcaatccaggacatattaggcacacgagataagaacaagggaaaaaacaggatataatgaatgtgaccaatagaagttagaaagaaagacaatttaaaacttcaaagaaaataaacaaatagccctggtcatgaaattcattatctagataaaaagcaaattaaat

SEQ ID NO: 441384 - DNA, 660 bp, Homo sapiens
tgcttctgcaaccactaaatgccctcatcatcctggaatttggagggttggagacatagacaaccaattctgtatccacttaccctaaattgcaacttcttagccctagggctatcaaagtaggcttgttcaggtaagtagggggagggaagaaattgtggccactatcccctctacctacagccttaaaagatggagctctattgatttgcagagttgagcagcaattacagccacccacttggcctgacttggccacacacagaaaagccaactgagccaagtataattcccaggaaaggtaaaacttccgttgaaaatccaatagcaggggaaattcacaccaggtacccttttcttccatgagatccctgaatagataaccaagcatcaccaggcaaatgagaaaaaccagtagcaggaaagaaaataacaaccagaagaaacatagaccctggagaaaatatattcagtaggatggtaaaatttttagagcaatccaggacatattaggcacacragataagaacaagggaaaaaacaggatataatgaatgtgaccaatagaagttagaaagaaagacaatttaaaacttcaaagaaaataaacaaatagccctggtcatgaaattcattatctagataaaaagcaaattaaat

SEQ ID NO: 441385 - DNA, 506 bp, Homo sapiens
gtatatttatgtccctatatttatctaccctctatctatcatctatctatctgtatataaaaaggagatttattatgaggcattggctcatgtcatatggaggctaagaattgccacaatctgcattctgcaagctggggacccaggaaagccaatggtgtaattcagttttagtctgagaatgaatggtgtaaataccrgttcaagggtagaagaggagatgggatgtcctactcaagtagtgaggcagaacaaaagggatgaattcttcctttctccaccttttcttatattcgggctcttaaggggttgatgattcccacccacattgggggtggcaacctaccgaggccacttattcaaatgttaatctcacaagcaccctcacagatacacccccaaagtcacatataatctgggcatttcatggcccaaccaagttgacacataaaattaaccatcacagggcccttcataatttggtggcaatgataaaacctgcccat

SEQ ID NO: 441386 - DNA, 662 bp, Homo sapiens
cttaaccttggcaaaataaactttgtaaattgatttagacttgtatcagatatgttttggtttacattctaaagtcatcagctacgttgttattttcaggacaaatgaactctcaattgcttaacacctaacaggtagttctcactcaaattcagctgtaggtcaatgaggggaggaacacacagaggcccctgctcaacataggctctcaagcatctaggttgatggacactccactctctggaacatctgcagtacctgccgcagcagaggcagatggggatcatgggctgggtcctccgtgtgtggacccgtaagtgacccatcagtaccgcccagaagcaagaacagcaagggagttggaaagtgcaggggagcagattaagtgattgacgaacctcctgtctccgcgacggataataatgggatctatagagagaatggcagcaagtagagacacagttgaaaagacgtaaagrtcacaacaaagtcatttctggagtcagatttcagaaatataaatttttgaaggaatgctgttgaattaaatattttaacataatactcattgtttgacttctgaaaagcagtacttcccaaaactttattattacttttcatgttttaaattcatgtttcaaactttttcacggattacagat

SEQ ID NO: 441387 - DNA, 550 bp, Homo sapiens
gttgctattagcttaacaatgtattttattagctaygtgaatattcaatggatatctttgatttcccttaactgaatattctttaaataaatatttagtgaagatactcactatacaccaggcactgtgctaagtataggtattataacactgaagaaaaaagttcctcttctcatagtttacattctagtgtgtgtatgtgtgtgtgtgtgcactcacagagatgataagttaccaaatatatttcatttacatatagatgtatataaaaatgtaatttgcacaatatatatttggaaaacacagagacataaacatattaaatgtaatgtatacaaattatagcaagcagtggtatattttatgaaataaatatgtaggataaagatagagaatgaaaattgggtgcttttttgttttgaatcaagaaaaaactttctggatggagagtggagcaagatagcgaaaaagaaactttcatcattcttcactccctcaggaaaactaaactgaacaactacccacacacaaaaaagcaccttcataaaaa

SEQ ID NO: 441388 - DNA, 605 bp, Homo sapiens
tcactatacaccaggcactgtgctaagtataggtattataacactgaagaaaaaagttcctcttctcatagtttacattctagtgtgtgtaygtgtgtgtgtgtgcactcacagagatgataagttaccaaatatatttcatttacatatagatgtatataaaaatgtaatttgcacaatatatatttggaaaacacagagacataaacatattaaatgtaatgtatacaaattatagcaagcagtggtatattttatgaaataaatatgtaggataaagatagagaatgaaaattgggtgcttttttgttttgaatcaagaaaaaactttctggatggagagtggagcaagatagcgaaaaagaaactttcatcattcttcactccctcaggaaaactaaactgaacaactacccacacacaaaaaagcaccttcataaaaaacaaaaatcaggtgagcaatcacagtacctggttttaaatatcattgaaaccagcacctggttttaaatatcattgaaaccagcacctggttttaaatatcattgaaaccagcacctggttttaaatatcattgaaaccagcacctggttttaaatatcatt

SEQ ID NO: 441389 - DNA, 585 bp, Homo sapiens
agaaaggcaattgaatttttttcattatgagttctgaaagttttctgttacwtattatttaactgccagtgtactttattgcaatatgccagtgaactcacttgatatacatccttctggccttcatcccctctcaagtgatgatataataagatatattatttagagggcagatatagatttgacttagtcataaaccagtgtaacataaggttcctgacttttagatctgacacaaaatgctctcttttagtggtagtacagaatgttgaagtaaggctggatatgtaagcttacatttttatttcattagagaatgcaaaactcattgtatttaactgacagtctcaaaacttctctgccaaatcttaaagtctctagacttctgaattccagaaatgagttcactgacctaaatatttggaaagggaggaaaatgcgttttcccaaaaaggaaataaatctaccaaagtaaaattagggagggagagacattctccttggaataagcatgtttggatttatatacagtgcattagtagatgatgtattttggtgcattgtgataatcagaaaagttacagt

SEQ ID NO: 441390 - DNA, 585 bp, Homo sapiens
agaaaggcaattgaatttttttcattatgagttctgaaagttttctgttacttattatttaactgccagygtactttattgcaatatgccagtgaactcacttgatatacatccttctggccttcatcccctctcaagtgatgatataataagatatattatttagagggcagatatagatttgacttagtcataaaccagtgtaacataaggttcctgacttttagatctgacacaaaatgctctcttttagtggtagtacagaatgttgaagtaaggctggatatgtaagcttacatttttatttcattagagaatgcaaaactcattgtatttaactgacagtctcaaaacttctctgccaaatcttaaagtctctagacttctgaattccagaaatgagttcactgacctaaatatttggaaagggaggaaaatgcgttttcccaaaaaggaaataaatctaccaaagtaaaattagggagggagagacattctccttggaataagcatgtttggatttatatacagtgcattagtagatgatgtattttggtgcattgtgataatcagaaaagttacagt

SEQ ID NO: 441391 - DNA, 572 bp, Homo sapiens
acctattcttggcaggagtcatcacatgctgactaaagagcccttagaccctcaataatcaacaacggtacctagctagtactctctgcaggccttggatgagactgagacatgtgctggcttcaggtgtgacccaacacattccaaattgyggtgtctatggagataaactcctactacttaagaaaaggagaagaaaaagcaaaagggactttgttttgcagcttaggtaccagcccaagcacagtggggtagagcacttgaggtcctctattccaggccattgctcttggatggtatttctggaccttccctgggctacaggggagcccactgttctgaagggaaagttccaagcctagcaacatttaccgcaaactgatcgaagagcccttggaccttgggcaaacatcagcagtgcccaggtggtacttgctttccagccctggctctcagatggcatgtctggactcagcctggctgggagaaacttgctaccctgaagggaaagacacaagcctggctatcttttccacctactgattgtagagccctagggccttgcgtgaaca

SEQ ID NO: 441392 - DNA, 572 bp, Homo sapiens
acctattcttggcaggagtcatcacatgctgactaaagagcccttagaccctcaataatcaacaacggtacctagctagtactctctgcaggccttggatgagactgagacatgtgctggcttcaggtgtgacccaacacattccaaattgcggtgtctatggagataaactcctactacttaagaaaaggagaagaaaaagcaaaagggactttgttttgcagcttaggtaccagcccaagcacagtggggtagagcacttgaggtcctctattccaggccattgctcttggatggtatttctggaccttccctgggctacaggggagcccactgtyctgaagggaaagttccaagcctagcaacatttaccgcaaactgatcgaagagcccttggaccttgggcaaacatcagcagtgcccaggtggtacttgctttccagccctggctctcagatggcatgtctggactcagcctggctgggagaaacttgctaccctgaagggaaagacacaagcctggctatcttttccacctactgattgtagagccctagggccttgcgtgaaca

SEQ ID NO: 441393 - DNA, 585 bp, Homo sapiens
agaaaggcaattgaatttttttcattatgagttctgaaagttttctgttacttattatttaactgccagtgtactttattgcaatatgccagtgaactcacttgatatacatccttctggccttcatcccctctcaagtgatgatataataagatatattatttagagggcagatatagatttgacttagtcataaaccagtgtaacataaggttcctgacttttagatctgacacaaawtgctctcttttagtggtagtacagaatgttgaagtaaggctggatatgtaagcttacatttttatttcattagagaatgcaaaactcattgtatttaactgacagtctcaaaacttctctgccaaatcttaaagtctctagacttctgaattccagaaatgagttcactgacctaaatatttggaaagggaggaaaatgcgttttcccaaaaaggaaataaatctaccaaagtaaaattagggagggagagacattctccttggaataagcatgtttggatttatatacagtgcattagtagatgatgtattttggtgcattgtgataatcagaaaagttacagt

SEQ ID NO: 441394 - DNA, 585 bp, Homo sapiens
agaaaggcaattgaatttttttcattatgagttctgaaagttttctgttacttattatttaactgccagtgtactttattgcaatatgccagtgaactcacttgatatacatccttctggccttcatcccctctcaagtgatgatataataagatatattatttagagggcagatatagatttgacttagtcataaaccagtgtaacataaggttcctgacttttagatctgacacaaaatgctctcttttagtggtagtacagaatgttgaagtaaggctggatatgtaagcttacatttttatttcattagagaatgcaaaactcattgtatttaactgacagtctcaaaacttctctgccaaatcttaaagtctctagacttctgaattccagaaatgagttcactgacctaaatatttggaaagggaggaaaatgcgttttcccaaaaaggaaataaatctaccaaagtaaaattagggagggagagacattctccttggaataarcatgtttggatttatatacagtgcattagtagatgatgtattttggtgcattgtgataatcagaaaagttacagt

SEQ ID NO: 441395 - DNA, 536 bp, Homo sapiens
tattaggccacaaaacaaatctttaaacattcaaaaaaaaaatgaaattctatcaagtgccttcyctgaccacaataaaatgaaactagaaatcgatagcaagaggaattttgaaaaccatacaaacacatggaaattaaataatatactcctaaagtaccagtggtcaataaagaaactttaaaatttcttgaaacaaataataatggaaacatgatgtaagagctatgagatgcatcaaaagcagtactaagaggaaagtttatagctataagctcctacatcaaaaaagtaaagacttcatataaacaacctaattgggcatcttaaagaactagaaaaacaagagcaaaccaaacccaaaactagtacaagaaaataaataataaagattgacgcagaataaaagaaattgaaatgaagaaaaaaaaaacaaagatcaatgaaacaaaaagttttcttttttttttgagaaggttgacaaaactgacaaaccttcagctagacaaagaaaaaaagaagaccaaaataaataa

SEQ ID NO: 441396 - DNA, 536 bp, Homo sapiens
tattaggccacaaaacaaatctttaaacattcaaaaaaaaaatgaaattctatcaagtgccttctctgaccacaataaaatgaaactagaaatcgatagcaagaggaattttgaaaaccatacaaacacatggaaattaaataatatactcctaaagtaycagtggtcaataaagaaactttaaaatttcttgaaacaaataataatggaaacatgatgtaagagctatgagatgcatcaaaagcagtactaagaggaaagtttatagctataagctcctacatcaaaaaagtaaagacttcatataaacaacctaattgggcatcttaaagaactagaaaaacaagagcaaaccaaacccaaaactagtacaagaaaataaataataaagattgacgcagaataaaagaaattgaaatgaagaaaaaaaaaacaaagatcaatgaaacaaaaagttttcttttttttttgagaaggttgacaaaactgacaaaccttcagctagacaaagaaaaaaagaagaccaaaataaataa

SEQ ID NO: 441397 - DNA, 536 bp, Homo sapiens
tattaggccacaaaacaaatctttaaacattcaaaaaaaaaatgaaattctatcaagtgccttctctgaccacaataaaatgaaactagaaatcgatagcaagaggaattttgaaaaccatacaaacacatggaaattaaataatatactcctaaagtaccagtggtcaataaagaaactttaaaatttcttgaaacaaataataatggaaacatgatgtaagagctatgagatgcatcaaaagcagtactaagaggaaagtttatagctataagctcctacatcaaaaaagtaaagacttcatataaacaacctaattgggcatcttaaagaactagaaaaacaagagcaaaccaaacccaaaactagtacaagaaaataaataatraagattgacgcagaataaaagaaattgaaatgaagaaaaaaaaaacaaagatcaatgaaacaaaaagttttcttttttttttgagaaggttgacaaaactgacaaaccttcagctagacaaagaaaaaaagaagaccaaaataaataa

SEQ ID NO: 441398 - DNA, 534 bp, Homo sapiens
aatagccaaacctatcttgagaaaaaaaaraaaaaaaaaaactgaactaatcacattacctgacttcaaattatagtacaaaattatagtaaacaaaatggcatggttctggcataaaaacagacacataggccaatggaacataatagagaacccagaaataaatgcatacacctacaatgaactcattttttataaaggtgccaaaagaaaagacatatattggggaaaagacagtctctttaataaatagtgctgggaaaagcggatatctagatgcagaagaatgaaactagacctcacttcttgacctgtacaaaaatcaaatcaaaatggattaaagacttaaatctaagatctcacactatgaagctaatacaagaaaccattgaggactctctccagacatgggactggacaaagatttcttgagtaataccccacaaacacagccagccaaagaaaaaatggacaaattggatcacatcaagctaaaaagcttcttcacagcaaaggaaataatcaataaagaga

SEQ ID NO: 441399 - DNA, 534 bp, Homo sapiens
aatagccaaacctatcttgagaaaaaaaaaaaaaaaaaaaactgaactaatcacattacctgacttcaaattatagtacaaaattatagtaaacaaaatggcatggttctggcataaaaacagacacataggccaatggaacataatagagaacccagaaataaatgcatacacctacartgaactcattttttataaaggtgccaaaagaaaagacatatattggggaaaagacagtctctttaataaatagtgctgggaaaagcggatatctagatgcagaagaatgaaactagacctcacttcttgacctgtacaaaaatcaaatcaaaatggattaaagacttaaatctaagatctcacactatgaagctaatacaagaaaccattgaggactctctccagacatgggactggacaaagatttcttgagtaataccccacaaacacagccagccaaagaaaaaatggacaaattggatcacatcaagctaaaaagcttcttcacagcaaaggaaataatcaataaagaga

SEQ ID NO: 441400 - DNA, 534 bp, Homo sapiens
aatagccaaacctatcttgagaaaaaaaaaaaaaaaaaaaactgaactaatcacattacctgacttcaaattatagtacaaaattatagtaaacaaaatggcatggttctggcataaaaacagacacataggccaatggaacataatagagaacccagaaataaatgcatacacctacaatgaactcattttttataaaggtgccaaaagaaaagacatatattggggaaaagacagtctctttaataaatagtgctgggaaaagcggatatctagatgcagaagaatgaaactagacctcacttcttgacctgtacaaaaatcaaatcaaaatggattaaagacttaaatctaagatctcacactatgaagctaatacaagaaaccattgaggactctctccagacatgggactggacaaagatttcttgagtaatacsccacaaacacagccagccaaagaaaaaatggacaaattggatcacatcaagctaaaaagcttcttcacagcaaaggaaataatcaataaagaga

SEQ ID NO: 441401 - DNA, 577 bp, Homo sapiens
taccacaatggagtgttgtttagccatcaaaaataatgagatcctgtcatttgcaataaaatggttggaactggaggtctttatgttatgtgaaataagccaggctcagaaagacaaacttcatatgttcacacttatttgtgggagctaaaaattaaaacagttaaactcatggagataaagaatagagtaatgtttaccagcatctggaaagggcagtacaggggaatgggggatggttaatgggtacaaaaatatagttaggattagtaagatttagtatttcatagcgcagcaggatgattacagtcaaattaatttatttaacattttaaagtaactaaaggattgccattggattgtttttaacacaaagaaagaataaatgctagaggagattataccccgtttaccctgatatgactmttacacaatgtatgcctgtatcaaaatatctcttgtaccccataagtatatacctacttttgtgagtatgtacctattatatactcacaaaaattaaaaattaaaaaaaaacctttctgagtaaatgtaatctgagcagacatgtgaatga

SEQ ID NO: 441402 - DNA, 426 bp, Homo sapiens
atgcaaccagagaaatccaacattatgaagytcagagcaagagaataatattgtatttcagcacaattataccagatgtccaagaaaatgaagctatatgtttgccaaggcctagtttttggaaactggcaaggttgaacagcagtctacaaacctgactgacatcactaagagacattctggtcatacgatatgatgggaaactggacaagctgttaataactaaatgaaactttaataatatgccaatgccttggactcctacttctcaggctacctgtacctcaaaaggtagacattatttgggagggaatttctgagaacttcttcctactgggacttcaaactctgtgatgttgtagctcccaacagactgatcgctgtgtaaccaaatgcctagaaatgtatctgattaaaatgggcaaa

SEQ ID NO: 441403 - DNA, 578 bp, Homo sapiens
gtgggcataagtcagtggccctctattctagctcctgaagctcaaggggcacacctatgggaatcttatgactccccaaacatgtaaaattctttggaggcacttttgatttacactgatgtcttgtgacagttctggcycccagaatagtttgctaaatactactcatgacttccccattggagggaagagagccctgttacataataacaacacacaatggaaaccagtctagatttgagcctgtaaggtgagatgagatgattggctttgtcctcagttgtagattctgttgggaaggcaaagcaaatacctctgtaattcttactactttgttgtgtattctgtaatgaaactgaattataccatgttcatactataatattgtgtaatactggcattgttggtaagattcaattacactaagtaataagacttatgacaatactaatattgattataaaatgtattgggagattgacttaaagctccttcaggacatacagcttatgtattaccatttttattttatgcacaataactactagcctgaggaagaactggatctggctaatcat

SEQ ID NO: 441404 - DNA, 572 bp, Homo sapiens
aactagggcaatggggaaccgggattcactaaaataggaattgcaccttctagtcaatgagaatgagcatatcctattcaacatattgagaaatatcagagctgtatgaagatgcttgttgtttaagcagacaaacaggaaactatggtactaagtgttcttacaagttctggttaatgcctgttcyccatctgagatatgccaattatgttgtgcctgtgttgacacttctgttctctatgtggtttatatatgggtcttaaattgagttaattgtagcctggttagtgatattagccatacatatgtacatacacacattataatggttgggaaaaaaaagaacatctttgatgtttgtaaatgataatattgagcataaagaggctgtctttattgaatgggaagccaaccacaacaaccatctacgcataaacatctgcctaagtacacagtttacagaacaaaatctattcatagtccacacataaacaagatttcttcctaaacaattttgtcaatatttcttggtactcacatctgtaaccaacgaaattctctatatgctcaaa

SEQ ID NO: 441405 - DNA, 572 bp, Homo sapiens
aactagggcaatggggaaccgggattcactaaaataggaattgcaccttctagtcaatgagaatgagcatatcctattcaacatattgagaaatatcagagctgtatgaagatgcttgttgtttaagcagacaaacaggaaactatggtactaagtgttcttacaagttctggttaatgcctgttctccatctgagatrtgccaattatgttgtgcctgtgttgacacttctgttctctatgtggtttatatatgggtcttaaattgagttaattgtagcctggttagtgatattagccatacatatgtacatacacacattataatggttgggaaaaaaaagaacatctttgatgtttgtaaatgataatattgagcataaagaggctgtctttattgaatgggaagccaaccacaacaaccatctacgcataaacatctgcctaagtacacagtttacagaacaaaatctattcatagtccacacataaacaagatttcttcctaaacaattttgtcaatatttcttggtactcacatctgtaaccaacgaaattctctatatgctcaaa

SEQ ID NO: 441406 - DNA, 572 bp, Homo sapiens
aactagggcaatggggaaccgggattcactaaaataggaattgcaccttctagtcaatgagaatgagcatatcctattcaacatattgagaaatatcagagctgtatgaagatgcttgttgtttaagcagacaaacaggaaactatggtactaagtgttcttacaagttctggttaatgcctgttctccatctgagatatgccaattatgttgtgcctgtgttgacacttctgttctctatgtggtttatatatgggtcttaaattgagttaattgtagcctggttagtgatattagccatacatatgtacatacacacattataatggttgggaaaaaaaagaacatctttgatgtttgtaaatgataatattgrgcataaagaggctgtctttattgaatgggaagccaaccacaacaaccatctacgcataaacatctgcctaagtacacagtttacagaacaaaatctattcatagtccacacataaacaagatttcttcctaaacaattttgtcaatatttcttggtactcacatctgtaaccaacgaaattctctatatgctcaaa

SEQ ID NO: 441407 - DNA, 572 bp, Homo sapiens
aactagggcaatggggaaccgggattcactaaaataggaattgcaccttctagtcaatgagaatgagcatatcctattcaacatattgagaaatatcagagctgtatgaagatgcttgttgtttaagcagacaaacaggaaactatggtactaagtgttcttacaagttctggttaatgcctgttctccatctgagatatgccaattatgttgtgcctgtgttgacacttctgttctctatgtggtttatatatgggtcttaaattgagttaattgtagcctggttagtgatattagccatacatatgtacatacacacattataatggttgggaaaaaaaagaacatctttgatgtttgtaaatgataatattgarcataaagaggctgtctttattgaatgggaagccaaccacaacaaccatctacgcataaacatctgcctaagtacacagtttacagaacaaaatctattcatagtccacacataaacaagatttcttcctaaacaattttgtcaatatttcttggtactcacatctgtaaccaacgaaattctctatatgctcaaa

SEQ ID NO: 441408 - DNA, 582 bp, Homo sapiens
tacccactctcaggctaatatcctaaatattgatgtttccaataactgtaccccttctattatctcaggtgtaatcatcctactttttgactaattgtaatgcttcctattttctagctcactgwctctagtactcaaattccaataattctttggctatactggaattttctactttgtctttgaccctaattccattcaaaatttttctttcctgctttcagcttatattccttcaactctgcttataacttcctattatatatcctcagtcacttgctgctttgctcttagacatactctcctcaccaaactccaaacttagttagatccaactctttgcctactccatgtataacaatgccctaaacattactggaaaaaaatactcaaccatgctgatcttaatttatattcatttcttttatttatagtatttttattccatcttatttcttactctccaattttgacattctataattatttttcttgctgttgatgttttttcataaagcctatgatgacataaatgagccctcatgttaaccaatatgtttatattaataaaatcatacagca

SEQ ID NO: 441409 - DNA, 582 bp, Homo sapiens
tacccactctcaggctaatatcctaaatattgatgtttccaataactgtaccccttctattatctcaggtgtaatcatcctactttttgactaattgtaatgcttcctattttctagctcactgtctctagtactcaaattccaataattctttggctatactggaattttctactttgtctttgaccctaattccattcaaaatttttctttcctgctttcagcttatattccttcaactctgcttataacttcctattatatatcctcagtcacttgctgctttgctcttagacatactctcctcaccaaactccaaacttagttagatccaactctttgcctactccatgtataacaatgccctaaacattactggaraaaaatactcaaccatgctgatcttaatttatattcatttcttttatttatagtatttttattccatcttatttcttactctccaattttgacattctataattatttttcttgctgttgatgttttttcataaagcctatgatgacataaatgagccctcatgttaaccaatatgtttatattaataaaatcatacagca

SEQ ID NO: 441410 - DNA, 385 bp, Homo sapiens
ttatctacaagtttttttggggctcaggcgatccttctgccttggcctcccaaagttctgggattacaggtgtgagccatggcacccagccagatcacatcttcttatcactaagtaacttgaaacccatgagtggtaattactcagtaagatatggatatactgcartttgtttatctattcacgtattgcaggatatcttgcttccttccaagctttggcaattatgaataaagcttctgtaaatatttatgtgcatatttttgtatgaatataagttttcaacttatttggctaaatacctagaaatgtgattgctggatcttacactaagactatatttagttttgtaagaaaccgacaagctgtcttccaaggtggctgt

SEQ ID NO: 441411 - DNA, 601 bp, Homo sapiens
tgatagttttgtgttttccatagctgccattgcattaaaatgcagttgctgttacacgaagtctcggagggccacagagtaaatctgaagggagcagggaaaaaatagcacaaaaccttcatgtgtcagaatacatcaaaacccaccatctcaaattatgagtaactcctaagtttctggtacatagcaggaatgaggaacaagcattgactgtagaaaatagaactayttgaaatacaaacttgggatggtctcctggctcctgggttgaaggggagagattagatgttagaccacattgagaggctttgatggctttttgcttctcatttgggtctgagataggactaaaatcctcaatttgagatcacacgaggggctagtaacctgacctcaaaagttaagtagaaacccactcaaaaagtgattagaaagtaaaagaagccctcacctcctgcctctcctctctaaagtcactaaatccaatggacacccttatgtgtctcttgaatctgcttctttcacacccatggccactaccctagtttggccaccataatctcttccctggattcgttccaacactggtaacctgacagcc

SEQ ID NO: 441412 - DNA, 601 bp, Homo sapiens
tgatagttttgtgttttccatagctgccattgcattaaaatgcagttgctgttacacgaagtctcggagggccacagagtaaatctgaagggagcagggaaaaaatagcacaaaaccttcatgtgtcagaatacatcaaaacccaccatctcaaattatgagtaactcctaagtttctggtacatagcaggaatgaggaacaagcattgactgtagaaaatagaactatttgaaatacaaacttgggatggtctcctggctcctgggttgaaggggagagattagatgttagaccacattgasaggctttgatggctttttgcttctcatttgggtctgagataggactaaaatcctcaatttgagatcacacgaggggctagtaacctgacctcaaaagttaagtagaaacccactcaaaaagtgattagaaagtaaaagaagccctcacctcctgcctctcctctctaaagtcactaaatccaatggacacccttatgtgtctcttgaatctgcttctttcacacccatggccactaccctagtttggccaccataatctcttccctggattcgttccaacactggtaacctgacagcc

SEQ ID NO: 441413 - DNA, 601 bp, Homo sapiens
tgatagttttgtgttttccatagctgccattgcattaaaatgcagttgctgttacacgaagtctcggagggccacagagtaaatctgaagggagcagggaaaaaatagcacaaaaccttcatgtgtcagaatacatcaaaacccaccatctcaaattatgagtaactcctaagtttctggtacatagcaggaatgaggaacaagcattgactgtagaaaatagaactatttgaaatacaaacttgggatggtctcctggctcctgggttgaaggggagagattagatgttagaccacattgagaggctttgatggctttttgcttctcatttgggtctgagataggactaaaatcctcaatttgagatcacacgaggggctagtaacctgacctcaaaagttaagtagaaacccactcaaaaagtgattagaaagtaaaagaagccctcacctcctgcctctcctctctaaagtcactaaatccaatggacacccttatgtgtctcttgaatctgcttctttcacacccatggccactaccctagtttggccaccataatctcttccctsgattcgttccaacactggtaacctgacagcc

SEQ ID NO: 441414 - DNA, 590 bp, Homo sapiens
tgtagtgcagaggataggggatgggcaaagggactattgaaatagagtaggtaraacagtggttgatgagaaacaaataaacttaagaattatttaagagtatagtgtccaaataccttgttttgaattggatccatcagcatttgaactgtctgaaaaatatactgagaaatattttatatttttaattaaaaagtatgattactacattatgatacaatttgtgtgcaagtctcctcgcccattctctggggctacattgtgagtaattcagcttatttgctgtctggttagccgaaggcttattatacaatcaaggcagatcacaacggccagctgcgtggataaaatttctatgagcttgtccaacaggagataatatacagacacactatattgctcaaattttcttttcataaatataatattcatgctttttgttcagcttttatctttgtcatatctttatgtgtttttttcaggaaagaaatatttggtgggtttaataggctgattattttaaatcaaaacctttgttcaacactgtcttgtgataattaaaagaaaaataccggtttgttgtaaagaaa

SEQ ID NO: 441415 - DNA, 605 bp, Homo sapiens
ccattctctggggctacattgtgagtaattcagcttatttgctgtctggttagccgaaggcttattatacaatcaaggcagatcacaayggccagctgcgtggataaaatttctatgagcttgtccaacaggagataatatacagacacactatattgctcaaattttcttttcataaatataatattcatgctttttgttcagcttttatctttgtcatatctttatgtgtttttttcaggaaagaaatatttggtgggtttaataggctgattattttaaatcaaaacctttgttcaacactgtcttgtgataattaaaagaaaaataccggtttgttgtaaagaaagctacatttgtatggtagaaggactttttttctggtttttatagtcaataaacataccggtacatttacatctaaaatactaaatacatacccaagagtgttcaaatatttcatgatatggtttctttctgataattcactatagtatgccctaaataattgtatctggattatcaatagagtcccatctaactcagtaaaaaaggcaatgctctaaccatgttctgtcgggtctttcatgactgatccagctgtt

SEQ ID NO: 441416 - DNA, 605 bp, Homo sapiens
ccattctctggggctacattgtgagtaattcagcttatttgctgtctggttagccgaaggcttattatacaatcaaggcagatcacaacggccagctgcgtggataaaatttctatgagcttgtccaacaggagataatatacagacacactatattgctcaaattttcttttcataaatataatattcatgctttttgttcagcttttatctttgtcatatctttatgtgyttttttcaggaaagaaatatttggtgggtttaataggctgattattttaaatcaaaacctttgttcaacactgtcttgtgataattaaaagaaaaataccggtttgttgtaaagaaagctacatttgtatggtagaaggactttttttctggtttttatagtcaataaacataccggtacatttacatctaaaatactaaatacatacccaagagtgttcaaatatttcatgatatggtttctttctgataattcactatagtatgccctaaataattgtatctggattatcaatagagtcccatctaactcagtaaaaaaggcaatgctctaaccatgttctgtcgggtctttcatgactgatccagctgtt

SEQ ID NO: 441417 - DNA, 521 bp, Homo sapiens
ttccttcattgcaatatcccccaacagatatagtatacatgtatttgtatatttgtttgtctcatagcactaagatgtaatctccattaagtcaatacctaggatataatattcactgactttgaatggaaaaatatgttaataaatgaacaacaggcaattttttccacctaaatgcactgctcctccaaatttgtttaaagtggtttaawgtatttttcaattgctttatcttggcaacatggaaagaatatttagcattatgaatactctatgaagggatcattgcaaatatttaagcttaggtcagtgaggcatagatttaattttgtttcatttttaatataccattcacttctttgaaagcaaaatgtctttttaaagaacaaaaactatattaaatacacactatctaaataaaacataaggatattataggttgtcgtcaaaaacatttttcatattgtcagtacatattttgcacactattgtttattaaatattgagaattttttttggta

SEQ ID NO: 441418 - DNA, 549 bp, Homo sapiens
atgtgacacccaataacactccatcgcaagtcaagtcacaagacagaaaccaaagtctagggggtgggaatacataatcctctttagtcagattgcaaacatcccttgtcacagagaatgggtacaggcgtagatggagaacaagagcttttactgaaattaattgaaaacacaatacaactatagatagcttgartcagtattatttttaaaagcttgatggcaccaggagaagaaagctaaccaatgctcagatgaagtacattttgtgtcaaattttaaaatgctttgaatgttatattttaaaatatgcttgtcatcataagcatcctttgctccttcctttttcagaagccccctgaaacacacacacacacacaaagttgaaccttacttcttgtgaaattaactgttcatttcaaagccgtacttatgaattggtggcgaagcaaacaccatgaaatcagtctctatacttggatgtagacaaatggtattccactgttagaaatatcttagattctgtctccaacattaatattgatcatt

SEQ ID NO: 441419 - DNA, 539 bp, Homo sapiens
atagttctaaccattgattcacatacgtggtgagcaccactgttctgagcttccatcatggcagggagagccccactgaagcacctcatttcaggttgtgaattcttacttagtcctatctccagyggggcactttcagtttttatcatgcactggaaaccaaactgccagtaggctctacttgcttccatttctggaaccagctagccccatctactttgtgtttcgtttctatttctgatcaagaacatggatattttgtctttgagagtggttttatctttctgatttcctgtattttgcttcaattaaaattctgatgggaaatgggtgtgaatttataacacaggaactggatactgttcatttattgataaagtggaaatggcagatatatttcattaagctagtttagtattctggatatcacagttgctagtagtgatgctcatgctactcttacttaggcaagtggttcagtggcccttggatggggaatgaaataagaatttggtgcaattttctctgtataatgaaag

SEQ ID NO: 441420 - DNA, 539 bp, Homo sapiens
atagttctaaccattgattcacatacgtggtgagcaccactgttctgagcttccatcatggcagggagagccccactgaagcacctcatttcaggttgtgaattcttacttagtcctatctccagtggggcactttcagtttttatcatgcactggaaaccaaactgccagtaggctctacttgcttccatttctggaaccagcwagccccatctactttgtgtttcgtttctatttctgatcaagaacatggatattttgtctttgagagtggttttatctttctgatttcctgtattttgcttcaattaaaattctgatgggaaatgggtgtgaatttataacacaggaactggatactgttcatttattgataaagtggaaatggcagatatatttcattaagctagtttagtattctggatatcacagttgctagtagtgatgctcatgctactcttacttaggcaagtggttcagtggcccttggatggggaatgaaataagaatttggtgcaattttctctgtataatgaaag

SEQ ID NO: 441421 - DNA, 286 bp, Homo sapiens
taaattacccaatctcaggtatttcttcatagcagcatgagagtggactaatacacatagctttatatttcatctattaaatagaaaactaggatgagtcccatatttatatctctagcccaaaatttccccctaaattttggactcatatrtccaactgcccactcaatatatctgtttaaatatgactcacaagcatttcacattaattatctgaaataaactcctaatctttcactacccccaattccaacactttcttccttgagtctttcctgtatttgaa

SEQ ID NO: 441422 - DNA, 580 bp, Homo sapiens
atatgcaaaagaaaatattcacaaatataaaataagtgtaaatgtgtaaaaagaaaaataaacactaaattacaccatatggcctgatatgcatgaatagaaaaaattctgaaaggatacataccaaattcttatttgtggttaacccagaagagagacaaagactaggagaggtgatcagaaggaactgtctaatctgttatatttttaggttagcttaattttaaactaagagaaaagcaatttctgtgtttcctrtggaattgaaattaatagtttctaaaagaatttctcttgggattattaacatatttggacaatatttatgcaaactggaaaatggagtcaagaatctgttgttaaaataggcaaaatattgtgcagtatcctgtacaatgttttgtcttaacagagctaattccttctggttctgccatatgctgcacttgagtgttgcagaagcaagttttgaccaaagataaaacctagcaaggcgcagagtgcagaattttcagggataatactcacttacagaaaccatttagagtcattttctggcagggacggggcagagcactgc

SEQ ID NO: 441423 - DNA, 600 bp, Homo sapiens
tatttttgtgaatctctaaaatatatctgaaatctcaaacctcatttttacttttgatactattcaaaagtagtctatatttttgtagctaattaaaactaacataagaaatcactacaattagagtacatcctacataggtaattcacttatccgttcatttatttaacatttatttactggtctccttttatatgccaggagctgtgccgcatgttaaaatgttaaaacaccaaataactaacaattcttgtccctgtagaattcatgtaacaagatgtgaagaaaccctacataacataatttagaaatacaattataatttatggaaatgaaacttaagactgcctcattcgtctgttgttcagttattttcctgaatgaaatagacaattgcagtgccttyagtttattttgctgtgtcagtgtagccctaaatttataactaaggtcaagtcctcctaaaaacaacgtaagcaacagtgttgtttggtgccttagcattgtggttgacatcccttttgatgtgccacaagatatgtaaacagtagaaaatacatatggtatatcttcctgacaaacaaattttactgcaaaatt

SEQ ID NO: 441424 - DNA, 600 bp, Homo sapiens
tatttttgtgaatctctaaaatatatctgaaatctcaaacctcatttttacttttgatactattcaaaagtagtctatatttttgtagctaattaaaactaacataagaaatcactacaattagagtacatcctacataggtaattcacttatccgttcatttatttaacatttatttactggtctccttttatatgccaggagctgtgccgcatgttaaaatgttaaaacaccaaataactaacaattcttgtccctgtagaattcatgtaacaagatgtgaagaaaccctacataacataatttagaaatacaattataatttatggaaatgaaacttaagactgcctcattcgtctgttgttcagttattttcctgaatgaaatagacaattgcagtgcctttagtttattttgctgtgtcagtgtagccctaaatttataactaaggtcaagtcctcctaaaaacaacgtaagcaacagtgttgtttggtgccttagcattgtggttgacatcccttttgatgtgccacaagatatgtaaacagtagaaaatayatatggtatatcttcctgacaaacaaattttactgcaaaatt

SEQ ID NO: 441425 - DNA, 612 bp, Homo sapiens
tttaaaaaatatgggtacatagtaggtatatatatttatgagttacatgaactattttgatacaggcatgcaatgtgtaataatcacatsaacgtaaatggggtctccattttctcaagcacttatcctttgtgttacaaacaatccaattatactctttcaggtatttttaaatgtacaattaaattacttttggctatagtcaccctgttgtgctagcaaataaaacgtcttcttgattctttctatttttttggaaccattaatcacctccacctttcctccaacccccattctcactactcttcccagtctctggtaaccattgttttactatttccatgggctcaattttttttttttttttagatttttagcttccacaaataattgtgaacatgtgatgtttgtccttctgtgcctggcttacttcacttaacaccatgaccttcagtttcatccatgttgttgcaaatgacaggatctctttcttttttatggctaaatagtactccattgtgtatatgtaccacattttctttattcattcatctgttgatggacactcaggttgcaccaaaatcttggctattgtgaataatgctgcaataa

SEQ ID NO: 441426 - DNA, 612 bp, Homo sapiens
tttaaaaaatatgggtacatagtaggtatatatatttatgagttacatgaactattttgatacaggcatgcaatgtgtaataatcacatgaacgtaaatggggtctccattttctcaagcacttatcctttgtgttacaaacaatccaattatactctttcaggtatttttaaatgtacaattaaattacttttggctrtagtcaccctgttgtgctagcaaataaaacgtcttcttgattctttctatttttttggaaccattaatcacctccacctttcctccaacccccattctcactactcttcccagtctctggtaaccattgttttactatttccatgggctcaattttttttttttttttagatttttagcttccacaaataattgtgaacatgtgatgtttgtccttctgtgcctggcttacttcacttaacaccatgaccttcagtttcatccatgttgttgcaaatgacaggatctctttcttttttatggctaaatagtactccattgtgtatatgtaccacattttctttattcattcatctgttgatggacactcaggttgcaccaaaatcttggctattgtgaataatgctgcaataa

SEQ ID NO: 441427 - DNA, 640 bp, Homo sapiens
ttggacaaatattcaggagtaatgagagactaactttcgtcacccttccacaatttaggagatacttagagttacttcagcgtttggtattgtaaaatgacatccattggtcttaaagtaggagagttttaaaacagttttctaagaagcactgaaaaatggcttcttaaaaagcactgagtttcgtttaagccttgtggcaccagagttcctattagttatatagcaataacataattggatattttgtgtcattgcctctattttttaaacattaaattttattaagcatttttcataaacagtaatattttcaggtgagaatacaaaataaattgttcattttaaragttaattctgtaaccaggtctatggttgaactgtaaagttagaaattaatttacacactcaggattgctgtttgcaaagaccatttgttttttccaatagagtaaggaaagcagctgagcaaaatggaattccagtttttctaaagggctgttataacgacaggagtgtggtacaattatgtctatttacttgtcctgacactgggttatctccctcgtgaccctgcagagcctgaggtaatgcattctgcatggtagtttgggtctgagaaagttctaagaacttagtg

SEQ ID NO: 441428 - DNA, 640 bp, Homo sapiens
ttggacaaatattcaggagtaatgagagactaactttcgtcacccttccacaatttaggagatacttagagttacttcagcgtttggtattgtaaaatgacatccattggtcttaaagtaggagagttttaaaacagttttctaagaagcactgaaaaatggcttcttaaaaagcactgagtttcgtttaagccttgtggcaccagagttcctattagttatatagcaataacataattggatattttgtgtcattgcctctattttttaaacattaaattttattaagcatttttcataaacagtaatattttcaggtgagaatacaaaataaattgttcattttaaaagttaattctgtaaccaggtctatggttgaactgtaaagttagaaattaatttacacactcaggattgctgtttgcaaagaccatttgttttttccaatagagtaaggaaagcagctgagcaaaatggaattccagtttttctaaagggctgttataacgacaggagtktggtacaattatgtctatttacttgtcctgacactgggttatctccctcgtgaccctgcagagcctgaggtaatgcattctgcatggtagtttgggtctgagaaagttctaagaacttagtg

SEQ ID NO: 441429 - DNA, 527 bp, Homo sapiens
tacagattgaatgcatttgggccatccacrggctactgggttaaggatttttgataggaaggcctcagtgcttttgggatacgcccttgtttacactgacaacaaagtagtattggagtgttacaggattatggagaataccttcaattatcaattataggtttcaaatttaccttggcttttaaaggaatagggtacactttttttcttaactacttgtatatctctgtctttctcttctctgtctctctctctcctctctgcctctctctctctctctctctgcctctgccagccacttatgctgcaattctctcaaccactgtgaagggatctaaaaccagcagtaaccaagcatctatgtacgggaactggtctgggtgccctggctttacaggttaccttgtgccatacctttgaaacaagggacctttccaggcttccttctgatggccaacctacctctaatgctggccagtctattttacataaagttctaagttttcctggtgtcatagtctccctta

SEQ ID NO: 441430 - DNA, 541 bp, Homo sapiens
attaaaggctttgacatgaacactttttaggtttaattatttttaaattagtaaatagaraatccgtggacatgagggcccttcctctggcttgtgccacacttcagaaacatgtctcagttgatttcatcatgtggaaaaaaatgggttagattaaaaaaaaattaggtgaaagagtaaatagttgggagatttaaatgaaaaattatgagttgaaagtaagaagtgaaaatccatgtactgcgtcttgccataattagaatctgggtgcgtttgatgaactgaagattaaatagtttctgggaacttttaaagccaggggcttttccatattcccagcatgactcagcatgggaaacttccactcagtgtaagcatgcagggcattttgtgagcagaaaagccctgccagcttctaagcttcatgggagaaaacaataaatatggaagccaccagctctctgaattaaagagaacaaaaaatgttctgaaaagaaaaggaaggggtagctcagtaaagagaaccttattactgggagct

SEQ ID NO: 441431 - DNA, 595 bp, Homo sapiens
tttcctcacctgggctttatgctccactttcctgaccctgaacatgatgttctgcttgcctaattgcttcctccttccacccagctctcacctccagcctccacatctttgcctcctcacctgacaatattctcgccatctgtattatttcaatgtagaaatcatctttgtaaagatgtcttttccccgtggttgctactactcctttcctagcacatttgtatgctgtattatctgttaaatgtctgagtcccccactagatgaaaaaactttgtgagtatgtgaatgtttacctgtctgattcacgttcattgtgttgtctaattgtctggctcagcatagattattaataactatttataaaataaatcactctgttgcaatattaaaatactataatagaatgttaaataaaattataaggctgagacaaccgtttaaatttgactggcrtgggttggggtataaagaaaatgagagcctggggcacttcagaggcaatttatgacacataaagtacccttccggggcactttatgatgtcagaacaaaaaagttgtgcttttcgtttgggattttgggaatgaaccagag

SEQ ID NO: 441432 - DNA, 605 bp, Homo sapiens
tctttgtgttctaattggttcaatgttttttgtctttaccagtctttcttaatcttacctgtaggattttatttctatttttttggacaaactttgtattttctagggagattgatgagtgagtgcattttctgtggctgctataacaaattaccacaaacttaatggcttaaaacaatgcaaatgtattttcttacagttttgaaagtcagaagttcaaaatcagtctcactgggctaacatcaaggtgtctgtttcttctggaggctcaggggaaacccatttccttgccttttctagcttctaggggctgcctgcattcctcagctagtggccccttcctcaccatactccaatcttaagcttttgtcatcacatctactactcactctgatctcctgttcccttttaaaggattcttgtgattacattattaggatcatctggataacccaggctactytacccatctcatgatccttaagcacatctataaagtctattttgctatataaggtaaaattcacaggttgtggaattaggatatgggcatcttttgggttcagtataccacagtcagttgcctgaaattcccacagacttct

SEQ ID NO: 441433 - DNA, 546 bp, Homo sapiens
aaagtaagtactaatttaaattctcattttgttattcaaacactctattcaatttctgtattttaataaactttgattgaaacttaaaatatgtagaaaaaagtatgtaaatagtacacatttgaagagtgatcacaaatagaacacaacagtgtgaacttttccaggtcaatcaattgccacctatgtcttttctatccacttgacctggtggacactaagcattgtatgcagctrttgttcctaaatcattgttcgaaatggagattcccagctcccgtccaggagctgctaatcagaatcttggtggtgggtctgggagcatctgggaaattctggaacgtcttatcaagtgatagaatttgggaacagatgtttttcttcttgaattttaactgttttgagttgtcttaattatgcattttttactgaagctacagttcttcaaatgatttgtggtactgctactgctctctcctagtttgagacttatgttttgctaccactagaatgcaaatgcatcacactgtctccaaagttaccctc

SEQ ID NO: 441434 - DNA, 600 bp, Homo sapiens
cattctgcttccatgtattcctcctttcaccccttattaacctgtaatttctcaaatgcagcttcctcaaaccctcacttatcaccacaggggcccatcctatttctgatcacccttygctcaaccacataataaagtttgtcatttctcgacaacaactccttatctcattgcttatgttagtcattccacctggaatgccccttccctcttttctttgtgtatctcaattccacccatccttaaaagtttcccatgcaataccatcttttccattccccagtaagaaatataattacatgtgcatttgattttctgctgtcagagattgtgcagctttgaacattgcatctgccttttcccacagctgggactacctaattgtcccttgcagtctcaactccatccaagcttctaagacctatcttagccttgttgagaaagaatttcagaatctgatctacacttgtggaactcaggcactcgtgttgtaatccaatatcagtgtttgacccagcactggaaactaggttttagccttattctgggaaacttcatttctgtttatggaaattagacttcagacttgttagtacttca

SEQ ID NO: 441435 - DNA, 611 bp, Homo sapiens
tcaaaggctgtgcttagaaactgtttttctcattttattccctgttacttattgttctgctgtgtggattttttcattagaggtctatttgtgcctggtttgccttgagggaagggatgatacagaactctcatctgtccctgttactatgtattattacttgggcaatgtcaaggcaaatgccatataaataaataaaacactctggaagcttcagttctcactgctaggcagcaaaaagagcaaatgtttaacttttaagagatagacttaataaaaagctgccattttcccatagtatgagagaaaaaggatatttttctcaagcatttataatttrgcattgaggattaataaaatgttattgagtctggctttgttatctgtctgtaacaatggttatttggttttatcacagcctggaaatctcagttctatggggcttagtgtatatactcagctattgcataataaaatcaatctattgaaaggaacagaatcttttattaggtgagggtgggcagaagagattaatttttcatcactccgaaggctcatttctggttaatcttgttttggtttccccaatcatgtggagtgtcagtaaaacc

SEQ ID NO: 441436 - DNA, 475 bp, Homo sapiens
tttctctcatcctaaactcctgctaaccacatgtactctctctgttcatttccctatttatttatatcagcacttccttcttcttgccaacttcggtgccacataagggaaaaacaacagaaatctaacaccctgggataccttcagagaaaacagaaaagacactgcagacttctttttgggagaaactcctgtgttttttttttgtttgtttgtttggttggttgggtttttttgtgtttttttttgtgtttttttctatcagggagtcctaagaactgtaaacgaacatgttagcactagagaacatatcctagtcatgtggcaccraagtatgttactggtggcaaatgcatacacgtctgcagcaacctcaattcctgcctgctcagaagaaagaattcagctgaggggcataaggcacagtgagagactgaggcaagttttagagcaggagtgaaaatgtactaaacag

SEQ ID NO: 441437 - DNA, 544 bp, Homo sapiens
caagtttgattccttataaggaaagcacatgattccagtcaaagccttggtaaaataaccaaattctccaaatgtgtcctgttacaaatgaaaacagattcttactgcacttatgcaaataactgtattgccataagttaagaatactcacaaatagtttccaaattctggakaaatcagatagaaacaactatgccacaaattttgttcataggagtatactaaattgttaaaatctgtcagtagctcaaaagaaaagtcataagactcggaaacgcaaaacaaaggaccagcaaatattttgagcaaaaagtaaaaaagattggttcagtccatgcagttaattcctgttaattcctgcttgatactcatgaacatttagctctccatgagtcctgaaggttcttcctctattctgttgtcacaatctccaaagttatcagaaacctgcattcaagagcacctattggagttttatagctgattataaaaccacctcctaaagaggaccaaaacaagacaacaattgtccatggatgaaaaa

SEQ ID NO: 441438 - DNA, 544 bp, Homo sapiens
caagtttgattccttataaggaaagcacatgattccagtcaaagccttggtaaaataaccaaattctccaaatgtgtcctgttacaaatgaaaacagattcttactgcacttatgcaaataactgtattgccataagttaagaatactcacaaatagtttccaaattctggataaatcagatagaaacaactatgccacaaattttgttcataggagtatactaaattgttaaaatctgtcagtagctcaaaagaaaagtcataagactyggaaacgcaaaacaaaggaccagcaaatattttgagcaaaaagtaaaaaagattggttcagtccatgcagttaattcctgttaattcctgcttgatactcatgaacatttagctctccatgagtcctgaaggttcttcctctattctgttgtcacaatctccaaagttatcagaaacctgcattcaagagcacctattggagttttatagctgattataaaaccacctcctaaagaggaccaaaacaagacaacaattgtccatggatgaaaaa

SEQ ID NO: 441439 - DNA, 544 bp, Homo sapiens
gggcacggtggctcatgcctgtaatcccagcactttgggaggctgaggtgggtggatcacctgaggttgggagtttgagaccagcctgaccaayatggagaaaccccgtctctatttaaaaaaaaaaagaaaaaaaatgcaaaattagcctggcatggtggtgcatgctgtaatcccagttacttgggatgtagcaggacaagctgcaggcaaaacctctcagacaccgagttgtagaaggaagggctttattcagctgggagcatcatcaagctactgcctcaaaatctgagctccccgagtacacaatttctgtcccttttaagggctcacaacgctaaagatttcacatgaaagggtcgtgattgatttgagcaagcagggggtacgtgacaggggctccatgtactggtggtcagagaaacagaacagggcagggagttgcacaatgttcttttatacaatgttgggaatctatgagtaacatcggtttctaagttatgagttgatttttaactactgggtttaggccaggcaggcccag

SEQ ID NO: 441440 - DNA, 544 bp, Homo sapiens
gggcacggtggctcatgcctgtaatcccagcactttgggaggctgaggtgggtggatcacctgaggttgggagtttgagaccagcctgaccaacatggagaaaccccgtctctatttaaaaaaaaaaagaaaaaaaatgcaaaattagcctggcatggtggtgcatgctgtaatcccagttacttgggatgtagcaggacaagctgcaggcaaaacctctcagacaccgagttgtagaaggaagggctttattcagctgggagcatcatcaagctactgcctcaaaatctgagctccccgagtacacaatttctgtcccttttaagggctcacaacgctaaagatttcacatgaaagggtcgtgattgatttgagcaagcagggggtacgtgacaggggctccatgyactggtggtcagagaaacagaacagggcagggagttgcacaatgttcttttatacaatgttgggaatctatgagtaacatcggtttctaagttatgagttgatttttaactactgggtttaggccaggcaggcccag

SEQ ID NO: 441441 - DNA, 544 bp, Homo sapiens
gggcacggtggctcatgcctgtaatcccagcactttgggaggctgaggtgggtggatcacctgaggttgggagtttgagaccagcctgaccaacatggagaaaccccgtctctatttaaaaaaaaaaagaaaaaaaatgcaaaattagcctggcatggtggtgcatgctgtaatcccagttacttgggatgtagcaggacaagctgcaggcaaaacctctcagacaccgagttgtagaaggaagggctttattcagctgggagcatcatcaagctactgcctcaaaatctgagctccccgagtacacaatttctgtcccttttaagggctcacaacgctaaagatttcacatgaaagggtcgtgattgatttgagcaagcagggggtacgtgacaggggctccatgtacyggtggtcagagaaacagaacagggcagggagttgcacaatgttcttttatacaatgttgggaatctatgagtaacatcggtttctaagttatgagttgatttttaactactgggtttaggccaggcaggcccag

SEQ ID NO: 441442 - DNA, 639 bp, Homo sapiens
ggtgatcaagccacgcttccactcagatggagtggggcaagttccaaagactagtcttaccaacttttagatgtccagactccaagcgccagttccttcccagtgttcagccactgtgtggatcctccacgggggcctgctacgtgctgctctggcaaggcgttccaatgggggcaatttcctaaccgggagcgctctttggatcgcgtcactcaggctggccggagtcccctgcagggatgctccgcggggcaggcctaagctgcctaaggggctgcctcggccatccatcagtcacctcgtttccctgtcagggaaccaagaaatgtagcaggacgagccacagacaaaacctctcagacaacgagtcgtagaaggaagggctttattcagctgggagcatcagcaagctactgcctcaaaatctgagctccctgagtgcacratttctgtcccttttaagggctcacaacactgaagatttcacatgaaagggtcgtgattgatttgagcaagcagggggtacatgacaggggctgcatgcaccggtggtcagaaagaaacagaacagggtagggcgtttcacaatgttcttttatacaatgtcgggaatctatgaataacatcggtttctaagtt

SEQ ID NO: 441443 - DNA, 557 bp, Homo sapiens
ggtggttcctcaaaagttaaacatagaattacattacaacccagcaattttacttctcaatgtatacctaaaagaattgaaaacgtacgcaaatagctgtacatgaatattcatagcatcacaatttacaatagccaaaggcggaaaaaactaagtgtctattaacagataaatggcgaaatgaactgcggaacatatattcagtaaaatattcagtcatgaggaatgaagtactgatacgtgctacaactttcattaacactgaaaacattacaataagtaaaagacgrtagacataaaaggtcacatattgtgtaattccttttatatggcatatccagaataagcaaatactagagactgaaagcagatttgtggttgccagggatggggaaaggggaaaatgggtagtggttacttaatgggtgagggggtgttcttccgggatgataaaacagcttgtgactagagagatgtattggtatataacactgaattcatcaaataccactaaactgtatattctacaatgattaattgcttattatgtgaatttc

SEQ ID NO: 441444 - DNA, 533 bp, Homo sapiens
aaggaagaaagaagaaaggaaggaagaaaggacaaaaggaatggagggagggagggaaagagggagaaagggagaaatgaatgaaggagaaagaaaaggaagtgaatggtgtcaaacagaaaacttgcaaaagaaagtgggtggtttgaagtttaggataaarggaataaaagatccagataaattttttaacaagcaaattaaagttatgaaatgctaagtgaaagaaaactgaaatcagcctaaggagcagaacaatattgctcagcaggggatggtggttttcaaggtatctgtcttagtcaattcaggctgctataacaaaacatcatagactgggtggcttaaaccacaaacatttattttccacagttctgaaggctgggaagtccaagattaaggcgtcaacaggtcttgtgtctgctgagggctgtctccctgatttgcagatgtctgctttcttgctgtgtcctcacatgggaaaaagagagagaatttgctggtattcctttttataaggacactaaccccat

SEQ ID NO: 441445 - DNA, 533 bp, Homo sapiens
aaggaagaaagaagaaaggaaggaagaaaggacaaaaggaatggagggagggagggaaagagggagaaagggagaaatgaatgaaggagaaagaaaaggaagtgaatggtgtcaaacagaaaacttgcaaaagaaagtgggtggtttgaagtttaggataaagggaataaaagatccagataaattttttaamaagcaaattaaagttatgaaatgctaagtgaaagaaaactgaaatcagcctaaggagcagaacaatattgctcagcaggggatggtggttttcaaggtatctgtcttagtcaattcaggctgctataacaaaacatcatagactgggtggcttaaaccacaaacatttattttccacagttctgaaggctgggaagtccaagattaaggcgtcaacaggtcttgtgtctgctgagggctgtctccctgatttgcagatgtctgctttcttgctgtgtcctcacatgggaaaaagagagagaatttgctggtattcctttttataaggacactaaccccat

SEQ ID NO: 441446 - DNA, 533 bp, Homo sapiens
aaggaagaaagaagaaaggaaggaagaaaggacaaaaggaatggagggagggagggaaagagggagaaagggagaaatgaatgaaggagaaagaaaaggaagtgaatggtgtcaaacagaaaacttgcaaaagaaagtgggtggtttgaagtttaggataaagggaataaaagatccagataaattttttaacaagcaaattaaagttatgaaatgctaagtgaaagaaaactgaaatcagcctaaggagcagaacaatattgctcagcaggggatggtggttttcaaggtatctgtcttagtcaattcaggctgctataacaaaacatcatagactgggtggcttaaaccacaaacatttattttccacagttctgaaggctgggaagtccaagattaaggcgtcarcaggtcttgtgtctgctgagggctgtctccctgatttgcagatgtctgctttcttgctgtgtcctcacatgggaaaaagagagagaatttgctggtattcctttttataaggacactaaccccat

SEQ ID NO: 441447 - DNA, 533 bp, Homo sapiens
aaggaagaaagaagaaaggaaggaagaaaggacaaaaggaatggagggagggagggaaagagggagaaagggagaaatgaatgaaggagaaagaaaaggaagtgaatggtgtcaaacagaaaacttgcaaaagaaagtgggtggtttgaagtttaggataaagggaataaaagatccagataaattttttaacaagcaaattaaagttatgaaatgctaagtgaaagaaaactgaaatcagcctaaggagcagaacaatattgctcagcaggggatggtggttttcaaggtatctgtcttagtcaattcaggctgctataacaaaacatcatagactgggtggcttaaaccacaaacatttattttccacagttctgaaggctgggaagtccaagattaaggcgtcaacaggtcttgtgtctgctgagggctgtctccstgatttgcagatgtctgctttcttgctgtgtcctcacatgggaaaaagagagagaatttgctggtattcctttttataaggacactaaccccat

SEQ ID NO: 441448 - DNA, 592 bp, Homo sapiens
tttggccatatctttaagcctttcctatagacctcttaaatacgaaattcccacaactggaatatataccgcattgatactatyttcccctttatcctaaaactgtcatctttaagcttcaaacagtactgtgatttgatgttaaccatgatgatttgtacaaccgtatttacaaggccacaactcaagtcatttttagatttcatccttctagactgtagccaaattcccatccataaagcctatctgattcttatttcagtgtactcctctttctctaccatcagtattggattattcgtcaattgcatttgtattctcaccttttctaactatactgctctaacttacaatttcaaattcaattttttttcataaagccactaaccacctaattaaacaaacaaacatcccattatagccttagaatctgcagctcaccctggtaagccctgcaccagactaatggtgttatcagcatgtcttaaatactgttatctaaatgttattgaaactgtatcacatgtcaacttgggaaaaaatgttgtgcatatttttgagataagaccactaagctggtccaaggaatata

SEQ ID NO: 441449 - DNA, 592 bp, Homo sapiens
tttggccatatctttaagcctttcctatagacctcttaaatacgaaattcccacaactggaatatataccgcattgatactatcttcccctttatcctaaaactgtcatctttaagcttcaaacagtactgtgatttgatgttaaccatgatgatttgtacaaccgtatttacaaggccacaactcaagtcatttttagatttcatccttctagactgtagccaaattcccatccataaagcctatctgattcttatttcagtgtactcctctttctctaccatcagtattggattattcgtcaattgcatttgtattctcaccttttctaactatactgctctaacttacaatttcaaattcaattttttttcataaagccactaaccacctaattaaacaaacaaacatyccattatagccttagaatctgcagctcaccctggtaagccctgcaccagactaatggtgttatcagcatgtcttaaatactgttatctaaatgttattgaaactgtatcacatgtcaacttgggaaaaaatgttgtgcatatttttgagataagaccactaagctggtccaaggaatata

SEQ ID NO: 441450 - DNA, 593 bp, Homo sapiens
atttcagacgaattttagaactgtaaaatccctcccctcaaaaattaaactccaaattacctataaaaatggctactaaaaacgataagctagaaaataccagaataacatcttccaagttctaaaaggaactgctataaatccagagatttgtattcagttaaactctcattgaagaacaacagagaaataaatagttttcagacaaactgcaaaaaatgtcatgaggacatgtcatgaaatgaacttctgaaggatgtattccagaaagaacaaaatcacaccgagaaaaattacacaaatttcaaaactgaaagtaagcaagattctgggaaacaggaaggtcaatctcgacaaacmcaattttcatcaaaagagaagaatgtccaagaaaaggtgactaaaaaagtaagtgcaatgggaaaaagatctgaacagacacctccccaaagaagatagactgatggcaaacaggcataaacccatgaaaagatgctcaacatcatgtgttattagggaattgtaaattaacacaacaatgagataccccaacacacatactacaataactaaaatccaaaatactgacaaca

SEQ ID NO: 441451 - DNA, 288 bp, Homo sapiens
tcatttggctgtcatgagcatctaagatgttgaatatatggtgcctgaaatagtgtgggagcatagctgatacgccacggatgcagattattactcctacatcatctgagcctctgccatagttccttgtttkgtaccctcgaagacttaaaaaaccagagtaaagtcttcttttttattttttcattttatttttatttatttattcatcctactgtaagttctgggatacatgtgcagaacgtgcaggtctgttacatagttatacatgtgccatggtggtttgct

SEQ ID NO: 441452 - DNA, 549 bp, Homo sapiens
cccggccctcaccttcacggtcctttggccaagctgccccctggttccaatagttctgggactaaaccctggcttttgcccttgcgccaggagtagtggtgaatgtaatcattctggccacatcattgagggaactagatgggatcagggccagctttgcctcctgttcactttgtccagagctgacatcagagcctgctggagagtaggtgagcagcaatatgtgtccctttttacccatgtccagatgcagcatccatccttaygacctcattccctccccagctgagattcattctcagtcacacacagtcttttcagtctagaagcaaagactcttctactcattgtgtaggtcagaaagagaaatgcaaaggttttgagatctgatttctgacctgaagatccttattactagctatgtgtcttcagaaagtttaacctctcttagtttcagttccttcatctgtaaaaattgagacataagtagcccatacctcatagattgcaggaagaattaaatgatgtggtgtatacaaactcttagtc

SEQ ID NO: 441453 - DNA, 440 bp, Homo sapiens
cctggcagaatagaaggagcayaggctctgagacagacttgaattcagatccctcttcatcacaaactagctctataaagcccaagtctgtcccttcacctctttgagctttgatttcagggtatgcaggcggcacaggagctcagctctcattccaacggtcagcaagtatttattccatacccaccctgctccaggtgccaggccactaaggagacgtcactaaggagacacttgtgaggaggctggacaccgtccctgctctcacagagtggccagtctggagcaggtaacagacctgaagcagagactcccacagatacatgtggaattaccatgtgtgatctatgcaggaaaatttcaggagcagaataacagatgccagggaagctgggtctgcggatgatgggagacactgagccaagctctaaagaaagaag

SEQ ID NO: 441454 - DNA, 638 bp, Homo sapiens
aacattccaagatcaagaatcagttccaaaactatcctgggaattttaagccacttcctatgagcaacaaaatttcagacaagttcctttctcatccatccccactgataaaactaaagaagcaatgaaagagaaggcaagggcaggtggagtttatatagtgacattccaacacttgctaccaaagctgttaagtattattatggcatttttgatgaccatgcccagaacttaataaaagctcaaatttttctgtactgtagctaaatttactatagcagaaatttcttctgagatagcatgactcttcagaagccacaagcatatttaaaataaaaaaacaagggcttcaatattgtaaatttaaatggccataaacgtctgactcaaatccgtttcttcccttggaaccacctcctctctcctcagatctcaacatttaaaaattaatgggtgtgttcactttctgacaggcccagaaaccccaagttatcctgggacctcgagaggagaggaatgtacacaaacttatagatatttgagggyagaaacccgttgttgggcttagcatcaagaaagtcttatctgagattccttatgaaaccatcaaagccagttttaaaagcctatgtgaaaaa

SEQ ID NO: 441455 - DNA, 638 bp, Homo sapiens
aacattccaagatcaagaatcagttccaaaactatcctgggaattttaagccacttcctatgagcaacaaaatttcagacaagttcctttctcatccatccccactgataaaactaaagaagcaatgaaagagaaggcaagggcaggtggagtttatatagtgacattccaacacttgctaccaaagctgttaagtattattatggcatttttgatgaccatgcccagaacttaataaaagctcaaatttttctgtactgtagctaaatttactatagcagaaatttcttctgagatagcatgactcttcagaagccacaagcatatttaaaataaaaaaacaagggcttcaatattgtaaatttaaatggccataaacgtctgactcaaatccgtttcttcccttggaaccacctcctctctcctcagatctcaacatttaaaaattaatgggtgtgttcactttctgacaggcccagaaaccccaagttatcctgggacctcgagaggagaggaatgtacacaaacttatagatatttgagggcagaaacccgttgttgggcttagcatcaagaaagtcttatctgagaytccttatgaaaccatcaaagccagttttaaaagcctatgtgaaaaa

SEQ ID NO: 441456 - DNA, 592 bp, Homo sapiens
gaaataatttattatatcaaaaacacacttgcactcatacrtttaccacagcactattcacaatagcaaagatacggaatcaacctaaatgtagccatcagtggaggggtaaatacacacacacacacacacacacacacacacacacacaccctgtaatactactcagccatgtaaaagaatggaatcacgtcttttgcagcaatgtgaacagaactggaagctgttatcctcagggaaataactcagaacccaaataccacatgttctgacttataagtgggagctaagcaaagcaatggatgcacatgaacatacagagtggaataacagctattggagactacatggtggaagggggataagagttgaataattatctattgagtacaacgtttccattcaggtgatggttgtactgaaagcccagacaataccataacacgatatatgcatgtgagaaacctaatttgtacctcatcaatatataaaaattgtaaaaattaaaaagtcaaaaacaattttcaaaatgtcaagaaattatctcagactcaaattaatcattgtattgccaaaaacaaatgttggaatg

SEQ ID NO: 441457 - DNA, 592 bp, Homo sapiens
gaaataatttattatatcaaaaacacacttgcactcatacatttaccacagcactattcacaatagcaaagatayggaatcaacctaaatgtagccatcagtggaggggtaaatacacacacacacacacacacacacacacacacacacaccctgtaatactactcagccatgtaaaagaatggaatcacgtcttttgcagcaatgtgaacagaactggaagctgttatcctcagggaaataactcagaacccaaataccacatgttctgacttataagtgggagctaagcaaagcaatggatgcacatgaacatacagagtggaataacagctattggagactacatggtggaagggggataagagttgaataattatctattgagtacaacgtttccattcaggtgatggttgtactgaaagcccagacaataccataacacgatatatgcatgtgagaaacctaatttgtacctcatcaatatataaaaattgtaaaaattaaaaagtcaaaaacaattttcaaaatgtcaagaaattatctcagactcaaattaatcattgtattgccaaaaacaaatgttggaatg

SEQ ID NO: 441458 - DNA, 592 bp, Homo sapiens
gaaataatttattatatcaaaaacacacttgcactcatacatttaccacagcactattcacaatagcaaagatacggaatcaacctaaatgtagccatcagtggaggggtaaatacacacacacacacacacacacacacacacacacacaccctgtaatactactcagccatgtaaaagaatggaatcacgtcttttgcagcaatgtgaacagaactrgaagctgttatcctcagggaaataactcagaacccaaataccacatgttctgacttataagtgggagctaagcaaagcaatggatgcacatgaacatacagagtggaataacagctattggagactacatggtggaagggggataagagttgaataattatctattgagtacaacgtttccattcaggtgatggttgtactgaaagcccagacaataccataacacgatatatgcatgtgagaaacctaatttgtacctcatcaatatataaaaattgtaaaaattaaaaagtcaaaaacaattttcaaaatgtcaagaaattatctcagactcaaattaatcattgtattgccaaaaacaaatgttggaatg

SEQ ID NO: 441459 - DNA, 533 bp, Homo sapiens
gcacagccatatgctctgctcatgtgagcagcacctggggggagtacattggcttcagactcaagtggagacttgggaagtttgtttagtaaatgagacctgcgataactgcagaagcggcccctgtcctccacttatacataatgtatttcttcacmcagtctatgagagttaggtttttttttttttccattccatgtccaccaagagaagaaaaaaaaaacctttctgttactataaaatacacagaataaaaagtctatcttggtgtaagaggatagtgagtggctgaagggagaggaagaaatcaatatgtcttatcaaacccacatcatattgtatataccaaagtcattagacccagagcctacttcttaggaataaatattttgccctaggattaaatccctttatgccacagaagttgaatttctttcagccaaccagaaaaaccacaacaaacaaaactcaatatagcatcaatagagtggaaaatgcaggaagcaaagattctgtaggtttaaatgggaaac

SEQ ID NO: 441460 - DNA, 614 bp, Homo sapiens
catgattgtcagtttctcaaaaccactgacctcccacaataaccctaaactcagaagtaagtggttttcttaaaccagaagaatgaaattaggagcaggtgagtacaaacataaacaaggtccactctgttggtgatgtagaaattgaaagtgacattttagacagtgccaacacattaaaagcaccaataacaaacattgaagattatatttttctggaagttgagaaagccagcatttaccttaatccttcatttcattgatgcaaagtaaaaaaaaaatcagccatgcccactgctttaaatatcagcgccaccttcacgtggagtcaaatgattaaaaagcgaagggaaacctgaagctctttttgaaaagtaatttccatggacacacctggctggaggcaggatcgctggccttcatctctacatctgctaaagaacctcataacactgtgacttctatgacacagcttttcacagcctggcttatactatgaataatattatttaaaatagaaacaaggtcttctttacctttattgcacctcctagagcttgaaaawatgcaaattaggtgttaatctaaatttattggaaaataatagtttggtt

SEQ ID NO: 441461 - DNA, 503 bp, Homo sapiens
ttttttatttatgctatctatttcactggagatttttccattcatatcccatgtctttttttttttcaaattcatctaagttgggcatcacctttctcagatgcctccttgactggcttaatagtagatcttctaaattctttctctggcagtccagagattttgccttggttgggatccattgctggtgagctagtgtgatctttcaggggtgttaaagaacsttgttttgtcatattaccagaattgtttttctggttccttcccatttgagtagactatgtcagagggaagatctatgactcaaaggctgaagttcaaattcttttgtcccacagggtggtcccttgatgtactgctcttccctttcccctagggatggggccttctgagagctgaactgcagtgattggtatttttcttcagaatcttgccacccagaagagctaccaggcccttggctggtactagagatagtatgcaaagagtcctgtgatgtgatc

SEQ ID NO: 441462 - DNA, 579 bp, Homo sapiens
agcgaatccagaaacagacttaggtacataatgacacttgatatttatcatccatctctgttaccaaactcagatgacctgaaagatacaacagcctttaaaagaaaagattgaaatactccagaactattccagagcacagaaaaagtcattttaagagatcattattawcttaatcacaaactggggaaaggaaagtttaaaataaataaaatacacaaagggaaagcaatattgtaagccagtctcatttatgagaaattctaaatatggcattgacaaatcaaatacaacaatgtattaaaaattgttacatcttgaccactcaagtgtttatccaggaatacaggaaatggtcagcatcaagcaacctgttattatcatcagtagattaatggtaaaaaaatatgattatgtatatagaggctggaaaattttgacatttgacaatactgccattaaaaaatctgttagcaaactaatgacagcaaactttcttaagttgcttagcgatattttccagaaactaatatatacatctacagttacacatttttctttaagcatggctatggctat

SEQ ID NO: 441463 - DNA, 534 bp, Homo sapiens
gttggtttttccatttttgtcatgaataattctgcagtgaagaactgactacttcacaccgtcgtttttttgtttcttttttttgaggtgaggatggcttattaagagtaaccctctgaaacatcaggaaaatacctgaggtggggaccatcatggaaagactccctgtctgtactgtgctcacccctcctctccctgttattccgcacaggtcagaatcggaacctcaaccacttttatttttctaaaatcacttttacttcaacctttgtttytttcataggacaagttggagaaaacaaagcttgaagtaaaagtgattttagaaaaataaagaaagaaagaaaaaataaagagaagcacttgggtcgagataagaagtgctgtggaaggaatttcatctgcttgtctgcctggaatcggaagacgataaatgtcccccaccacccatcccctgaaaaaaattggcaagccatttcattttgagcgttgcttgcaaatcagaaaatttccgctccatctactactacttga

SEQ ID NO: 441464 - DNA, 534 bp, Homo sapiens
gttggtttttccatttttgtcatgaataattctgcagtgaagaactgactacttcacaccgtcgtttttttgtttcttttttttgaggtgaggatggcttattaagagtaaccctctgaaacatcaggaaaatacctgaggtggggaccatcatggaaagactccctgtctgtactgtgctcacccctcctctccctgttattccgcacaggtcagaatcggaacctcaaccacttttatttttctaaaatcacttttacttcaacctttgtttcyttcataggacaagttggagaaaacaaagcttgaagtaaaagtgattttagaaaaataaagaaagaaagaaaaaataaagagaagcacttgggtcgagataagaagtgctgtggaaggaatttcatctgcttgtctgcctggaatcggaagacgataaatgtcccccaccacccatcccctgaaaaaaattggcaagccatttcattttgagcgttgcttgcaaatcagaaaatttccgctccatctactactacttga

SEQ ID NO: 441465 - DNA, 602 bp, Homo sapiens
tttggcgtggaagctgggaaggtgatgagctagagagagttggaactttgttatytggtagagttctggccatctagttttgacactttctgaattaggcatatcccataggcatacacttttatcttgtgagaactctcacttggggtgtacttttgaggatggcaaagtcatcttcagcttctttcttactcctttctcagtttctgggaatctggaatgccttaaacattttgctgttgatgtgtgttttcaccctttacgtgccctattggtagggtatggcaagcccaccaccagctttctctctgctatcgatataggccatgtctgaacctcagaaaatatttgcagatccttggttttaacaaattctgagagtgcagttatttataagccacagctctctagtctaatttaccatcacaagatcttaggccagcctcctaattaatagttcattagtatccaaaaactgtagaaggcatatattaagctctctccctaagttttaaggcagtaccaccccccaaacctcatccagtgggggctaatggagcccagagttccaccatctccaaaaaaaacaaacaaaagaagta

SEQ ID NO: 441466 - DNA, 584 bp, Homo sapiens
atttagtactcaccacatctagggcaggtgttgtttgagttgttttaggtacattaactctcttaatcctatcagcttcctgtgagttcgattttttttaatgtccaatttttatcattaaaaaactgaaaacagagatgtcaagagcaagtaacaaatgaagtaactgggataagtttgactaagagctccaaaaaaatgtctcaagtcgataacttgaagcacatcactgcccttatctttcttctgccagttcaraaatgaagatggggattttatattattacagttttataccatgtttatgtctagctttaagaatgtccccccttcctgatatgtggcattctctctcttctccctcctcctcttccttctttctcctgtttcctttcctttttctctaccttttttctttttattaattcctcactctcttcttttttcctttcttacaattagaaatgcttatcaaagcacacattatttagtaaaatgaaaaagcaaataatttgtacccgaataatttaatattctatttggcaatacatttttaatataaccatgacataagttcaatatta

SEQ ID NO: 441467 - DNA, 584 bp, Homo sapiens
atttagtactcaccacatctagggcaggtgttgtttgagttgttttaggtacattaactctcttaatcctatcagcttcctgtgagttcgattttttttaatgtccaatttttatcattaaaaaactgaaaacagagatgtcaagagcaagtaacaaatgaagtaactgggataagtttgactaagagctccaaaaaaatgtctcaagtcgataacttgaagcacatcactgcccttatctttcttctgccagttcaaaaatgaagatggggattttatattattacagttttataccatgtttatgtctagctttaagaatgtccccccttcctgatatgtggcattctctctcttctccctcctcctcttccttctttctcctgtttcctttcctttttstctaccttttttctttttattaattcctcactctcttcttttttcctttcttacaattagaaatgcttatcaaagcacacattatttagtaaaatgaaaaagcaaataatttgtacccgaataatttaatattctatttggcaatacatttttaatataaccatgacataagttcaatatta

SEQ ID NO: 441468 - DNA, 591 bp, Homo sapiens
gaggaattcatatgggctgcagaaatgtgcataggtaaaaggaagacaagtactgatagccaaatcaatgggagagagctttgaaggcattttagagatcttcatggcagctcctcccatcataggcccaggggtctaggagggaagaatggtttcctgggccaggtccagggctccactgttctgcatagtcttgggacactgctgcttgcatcttggctgctcaaactccagccatggcccaaaggggcccaggtacaccttaggcctgtacctgcttcagagggtgcaagccataagtcttggcactttttacatggtattaagccagtgggtgcacagagttcaagagttgaggtatgggagcttccacatagatttcagaggatgtatggaaaagcctggatgtacaggcagaagccagattcagggatggagccctcagaaagaacctcttctagagtagtctggagggaaaatgtggkgttggagcccccacacagagtccctaccggggcactacctggaggagctgttaaagagggccaccatactccagaacccaaaatggtagatctaccggcagcttgt

SEQ ID NO: 441469 - DNA, 629 bp, Homo sapiens
cttttttggaattgaaatagtaacaacatttgttttgtgtggtaaacagaagccttttggcagtgcagttgctttcattttgaaactgccaagaattatttgcttatctgtggaatttcaactactttccctgcctgtgagtcatattgatgctgatctagaataaacaggactgcacagaacactgggtcttactgtggtctttgggcaatttcctcccacccttgcccaacacacaggggcaggcattcacagtacgccactaggagagggtaaaagaagtggaaaagagagaagataatgcaaagggagagaaagaagagacacacaaaagcatgataaaaaaagaaaattcaacaagggagggaaggacatgagagaaaaggaagagaaatgtcagagaggatgacagaagtcctagagacataaagaagcagaaaagaaaagtgtcaaaaaaccaaaataataaaaagaamaaagaaggtggaaaagggagaaatgtgagagggttaggtagatagagcaagaattcagaaagtacagggaataacagtgaaaaagtgggaagaagcttggaaagacttcatggagcaggaatagcctaatataatttggaagggactgcagag

SEQ ID NO: 441470 - DNA, 644 bp, Homo sapiens
tttaaaattataagctctcatgagacccattcactatcacaagaacaccatgggaaagacccacccccataattcaatcctctcccactgggagctacaggatgagatttgggtggggacacagagccaaaccrcatcaaaaaggtaactaaagactctcaaaaaaataaaatctgaatttatcacaaccaaactaatactataaaaaatgctagagttcttcaggtagaaagaaccttttaccagatataaactcagatccacacaagaaataaagaataataaaactgtaaatacatgggtaaatatagacaatgtcttctcatattttaatttcctcaaaagattaattgggaggtagtacttccagaatgtcagaatacccaactgtttcccaaaaaccaataatactggataaatgtgtcaaaaacagtaattccagggctctggaaaccaacaacatgcatacaacaaactgagcagtgtttattcaagaaaagctactgaaacttgaataagaaaaataggagtttgtggtgttttagcctgggaatgctaccatacacccctcccctagctccatcaaaattggaattctaccagaggaagataacatcggaaaaacagatgctttactgctaaag

SEQ ID NO: 441471 - DNA, 644 bp, Homo sapiens
tttaaaattataagctctcatgagacccattcactatcacaagaacaccatgggaaagacccacccccataattcaatcctctcccactgggagctacaggatgagatttgggtggggacacagagccaaaccgcatcaaaaaggtaactaaagactctcaaaaaaataaaatctgaatttatcacaaccaaactaatactataaaaaatgckagagttcttcaggtagaaagaaccttttaccagatataaactcagatccacacaagaaataaagaataataaaactgtaaatacatgggtaaatatagacaatgtcttctcatattttaatttcctcaaaagattaattgggaggtagtacttccagaatgtcagaatacccaactgtttcccaaaaaccaataatactggataaatgtgtcaaaaacagtaattccagggctctggaaaccaacaacatgcatacaacaaactgagcagtgtttattcaagaaaagctactgaaacttgaataagaaaaataggagtttgtggtgttttagcctgggaatgctaccatacacccctcccctagctccatcaaaattggaattctaccagaggaagataacatcggaaaaacagatgctttactgctaaag

SEQ ID NO: 441472 - DNA, 644 bp, Homo sapiens
tttaaaattataagctctcatgagacccattcactatcacaagaacaccatgggaaagacccacccccataattcaatcctctcccactgggagctacaggatgagatttgggtggggacacagagccaaaccgcatcaaaaaggtaactaaagactctcaaaaaaataaaatctgaatttatcacaaccaaactaatactataaaaaatgctagagttcttcaggtagaaagaaccttttaccagatayaaactcagatccacacaagaaataaagaataataaaactgtaaatacatgggtaaatatagacaatgtcttctcatattttaatttcctcaaaagattaattgggaggtagtacttccagaatgtcagaatacccaactgtttcccaaaaaccaataatactggataaatgtgtcaaaaacagtaattccagggctctggaaaccaacaacatgcatacaacaaactgagcagtgtttattcaagaaaagctactgaaacttgaataagaaaaataggagtttgtggtgttttagcctgggaatgctaccatacacccctcccctagctccatcaaaattggaattctaccagaggaagataacatcggaaaaacagatgctttactgctaaag

SEQ ID NO: 441473 - DNA, 550 bp, Homo sapiens
gattgagcatgaaaaagcaataagaaatggctccccagtttggaatttggcacaagttaccagatagtggtaccatttactgacatagaaaatataggagaggaagagttgcaaggtaatgggaaatgatgaatttcatttgagactcagtaaactgcctttgagacatggcaaaggaaatgctcccataagtaattytgtacacatttaggggtcagaaatgagatatgtatcaatgaaatatctgtggggaatcttggaaaaaaataaatcacagaaattgataagatgacccatggaatatccagggtaagaaaaaaaccctagatatggtaaaagcagagaaaatggagcccacaaagttcattgagaagcaacagaaatagataaaaactaacaaatgttaggtcaataaaccagtgagaaagagtacttcaagaaggagggagtggctaaggtgtaagagttgagggaagaggtgggaacacaaaggactaaaaatagttcattaaatttatcaaaatgtagcctgtctgatattatcaaatca

SEQ ID NO: 441474 - DNA, 571 bp, Homo sapiens
ttttacttttaatttattcatagcacatgttctagttataaaatcagtttttttcattttattaaactgattaagtgtgatagataaccacaggtagaatttataaaatacagcattaggtctttctaaccaagggagctatcccagttgtctagttgcttcatagcctagtctagttattgcagctaaaggwaaatggttattctctggttggagattttatctttgtagggagaaataaaatatttgtttgttgaaggaggttgaagccatttttgcttcccacaggtatataagacagatatttccaatgctgctattctcaagttaaatttgctaatatttcaaaaacaaaattggtttgggatgttttttctgttgccactaaagaatcattaggctatatatcagaaacaaaatgtactcattcaaaaagaaaggccccagtcttccagtgtatctattcccctatgttgttattctcaaattgcttacaaaatagtattttccctcttgtatgctcaatgcataaggcatatataagaatctgggcatgacttaaaagtaaacc

SEQ ID NO: 441475 - DNA, 543 bp, Homo sapiens
gtgtctgtgtgcatgtgagtttgtgtggggtggagagagaatagaaggaggcaaaacataacccacctgtgcatctgagagacggtacccaggagttccttgcactcctgcaaattttcttttcttttctttctttttttttttttgagacagtatctcactctgttacccargctggagtgcagtggtgtgatctcggctccctgcaacctccgcctcccgggttcaagtgattcctgtgtctcagcctcccgagtagctgcaactataggcatgcgccaccaacaccaggctaacttttgtatttttcgtagacatgagtttcaccatgttggccagggctggtctcaaactcctggcctcaagtgatctgtttgcctcagcctcccaaagtgctgggattacaggcgtgagccaccatgcctggcctctgcaacttttctttaagtttgaaatgttatccaaaaactgctgaaaaagaaaaggggaaaaggagaagggcaaaagggatgagggaagagttctcctaactctaactgccag

SEQ ID NO: 441476 - DNA, 581 bp, Homo sapiens
gaattatgtccaattaaattaatcctttctcattatcaaccatgtatttggagggattgctattaatcctagggacaaatttgaaatgtgaataagtgcatccttgttatggagaaaaatattgtttccctctaaccttggagatacttgagtctcggagttatctcttccagaggcatcttcagagatgcctatcactccacctgcctcttggtcctcactccaagcaagaccttccgataggatgtggtgtttttctgtatagttggcccctgcagacctggatagattttaaaggcagatccaataggattggccggtggattcatggaaggacgagaaaggtcaaatatgactccaagcacatcggagttgctgtattaatgagatgggaaggctgagcaaagaacgtgttggatggaagagggactttttgaaagtcacaactgacctttttagaactcttatccccagggtcagggctggaagatgtatcttcttggggcccctctcargtgcctgcctgtgtgttgcagccacccgtccaggctgctggcctccttccccttcacctagcttta

SEQ ID NO: 441477 - DNA, 620 bp, Homo sapiens
gaaatagcatcaccaatagagattaggagtacacatctaaaaatgagaatttcttcaatttcttatagtatttaatcaataccctctgcccttagtagctgctaaccaactcttgtctgctttctcacagatagccagtgtcaaaatcgtcatttcttctcactctctgttccttacatctctcctccactgtgcagttgagtgcattctcccccacccccttgtaggatgtggcagcattgattccctgcattctccaccgccttgcagccattcctcttctgtctgctcacactaccccagccttaaaaacacctccttttctcccctctgagtttgaaagctactgcctttctctctcgttccctttattggcaagtgcctattcatttactcattttataaattgctaaagctccaagcttgtagcaacatcaaacagaactgtagtaggtaagttaagwtccctcagtctcctttcccaccacttccaggtggcagccactgttcacagttcagtgtgtatttttcttagatgtttataatatgtaacagatatgtacctgtttgtgttgtagacttattttacacaaatgagaccacattacacaatactgcag

SEQ ID NO: 441478 - DNA, 572 bp, Homo sapiens
gaattaccacactgtctcctacacttttgaattaatttacatgcccaccaacagtgtaaaagcattcctttttctccacaaccttgacagtatctgctgtttcttaactatttaataatcaccactctgggtggctggcaagatggctaaataggaactgctgtggtctgcggctcccagtgagatcaacacagaaggtgggtgatttccgcttttccaactgaagtacacagctcatctcattaggactggttagatagtgggtgcagcccacagagggtgagccaaagcagggtggggtgttgcctcacccgggaagcacaaggggttggggaactccctcccctagtcaagggaagccataagggactgtgccatgagggactgtgctatccagcccagatacttcgctattcccatggtcttcccaacccacagatagggagattccctcatgtgcctatgccatgaggaccctgggtttcaagcacaaaactgggcagctattttggcagacacagagctagstgcaggagattttttttcataccccattgacacctggaaagcca

SEQ ID NO: 441479 - DNA, 587 bp, Homo sapiens
cagggggaatgtgttcagctcttccccattcagtgtaatgttggctgtgggattgtcatagatggcttttattaccttaaagtatttcccttctatgctgattttactgagggttttaatcttatagcaatgctggattttgtcaaatgctttttctgtgtctgttgagatgatcatatgattttcttttaattctatttatgtgttgtatcacrtaaacagaattgcatatgttaaaccacccctgcatccctggtatgaaacccacttgattattatggattatcttttttatatgctgttgagtacagttagctagtattttgttagggatttttgcacctacgttcatcagagatattggtctgtagttttctttttttgttatatcctttcctggttttggtattatggtgatactggcttcatagaatgatttaaagaagatgccctctttatcttgtagaatagtgtcagtagggttgctaccaattcttctatgaatgtctgatagaattcagctgtgaatctgtcttgtcctagacttttctgttgacaattttttaaattgctatttcaattttgct

SEQ ID NO: 441480 - DNA, 635 bp, Homo sapiens
gatttaattacttgtttattttttaaaaaacttagtttttattttctttttattttgttacttaccttttttctgctcaataaacttatcttgagttgaattcatctaccatctttgactctttcctcacctttccaggttggttagttttgaatatgcctccatgcagatcccatggtttgtaatactgaaaacaattactgtatttataactcacagctcctgtcctatggaaacatggagaacagcacagatctaatcatcaacccagcagattttctttgctccctgcagcattctttgttgttgtgttgttgttgttgttgttgttgttgttgttgtttatgtgttttggggaaggagwgaaagtttcatttttatataagcatatttctagttgggcagaacataggctggagaactaaaccatcatctccagcctctgagaaatagcctcctgacttcccttctctttatgcctttatttgggttaaaggttatatgagagattatagtgtttctatatgtgttaggtttaaaaaaaagtcatcacatacttcaaaaattttgtaaaatttgacttcaaatttagcaagccataggtgaattttaaggaaatttatatatgcagaaat

SEQ ID NO: 441481 - DNA, 568 bp, Homo sapiens
tatatacctataactgtatatatgtgtgtatatatatatatgagttatgataatgtctttattaatgaatgactgtgaaggattgcctctagattgctttctattgtagtcaatccactggcatcaaagatgcccttgaaacagatgagctgggtttggtgtgggaaaagaatgagtaatagtacgaaaccacagaaagatgaaagtgagactgatgcaagcaaggagcttgaagaaaagtactgaggactcaatgaagcacagtgggaagcactgtaacataactccctattgatgagaactgagactattcaacatcccttgcagtcgtgctggtgtctgagatggagcaactcaatatgaacaaaaaccccatgctgtaagtgargaaaagtagtgttgccaaaaaagacactgtgagccatgatcagagtggttattaagcctactatcactgtctctctctctctctgtgtgtatatgtgtgtatatatatatacatgcatacatatattctatatatataaacagagaacaaagaaaatgtcatatatgctaaaaatttcag

SEQ ID NO: 441482 - DNA, 541 bp, Homo sapiens
ttcttcttatgcacagaattttcagatttactttagatgtctaagaaactgcaagaatagcttcataatttcatatatttttacaaaaatgtttatacattactagtatctactgaaactcttcagatgactgaatctgtcagtacatggtataaaaataaagcaaaatgatgaataacacagtatttcttactttgaaaaggattcatgaaaatccttcctattttctagtcataaaattgaagtattacattcttatctcttctcaatcataatcattaataaaaaaactaggtatcaaatttttgaatgtgattttttttatttgtttaacttttaagttcaggggtacatgtgaaggcttgttacataagtaaacttgtgtcacgggggcttattgtacagattatttcatcaccaagttattaaacctagtacctstaagttatttttcctgttcttccctctcctgccacctttcaccttctgataagccccactgtctgtctgttgttcctttctatgtgttctcatcatttag

SEQ ID NO: 441483 - DNA, 506 bp, Homo sapiens
aatttaaacaatgacattagagcattattttttctaaatgtagactgtggtaaataatggttaataatattaaactagtaaattcatattctgtttcataaaggttaatagttgcagcttgattcatttaaaatattcattaaacattcaaaatcatttaatgaagatttgaattaaaatttaaatgataaggtaacattattcttaatgtcaaaaataaaaatattaaacattttagtttttgattttaaatgaaaggacactgacttggaaaaatgcattttatgaatgtttagtaaataacatttactatattttctagattatttataactctatcaattaatacaatttgtaatattttatttgggtagtacttttagtggaagtacatatttcctagtatctatgcataaaagaagactcagtgtttttttttktttttttttttttgagacagggtttcactctgttacccaggctggagtgcagtggcatgatcttgg

SEQ ID NO: 441484 - DNA, 562 bp, Homo sapiens
gcgtgtgcctgtagttccagctacttgggaggctgaggcataagaatcgtttgaacccgggaggcagagattgcagtgagccaggactgcaccactgcactccagcctgggtgacagagagcgtgtatctctctctctctctctctctctctctctctctctctctctctctctctmtatatatatatatatatatatatatatatatatatgcattatgcatttcctttaatctattatctttttgagtatttttgttcactgcgcatcacatttgtcctcgctaaaaatttatttgttatgcaattagaaacatttatctattcagtcagtaaaaagaatttatgagtgtctgggttaaataaatatttaaaaattaattaaagagggtgtgtttagctatgctatatttaaaatagtcaaatcaggcatgccaaatatttgggtaaaataatatttttgaatgtccatgtctttaactaccttaaaatccactaaaataagtgttattttccattattgctcttgtttatattatgaagatttgggatttttatatact

SEQ ID NO: 441485 - DNA, 376 bp, Homo sapiens
ttcttctcagtactgtataaaaataaccacagtgaatatgtgtttgtgtaatatttactccattgtctcatttccagaaactgtgacaagccrtaaaggtatttcagtgttggtaagggtatctggattgctggtggcagaggtattaaccgttcctattcctgaaacagaagcttgttgaatatttgcaaggataagttttgttcctcctgcagtaatcaaagtatcgtcttgcacagcttccacagatgccagcaccgtactgctagagtgaataccttttttattctgctgtgttttagtatgttcggcaagatggtcacttctcacaaagcattttgaacattctgaacaaacaaatttcttctcacctgta

SEQ ID NO: 441486 - DNA, 586 bp, Homo sapiens
acttaatatatatttcttctctatgctttaggatcttgacttgttttcctttttgcttcatgcgagatatttaccaagtcctatgaaaatcatatttttcaaggatttttttccatgcagttttaaaaaacaaatgagtaaaatggagtggggattcatagagacaggtgctgcagaaatccctggcttggttgttctgattggcatttataaatcttataaaagtaatttgcttaattttaattttgcctttccagggcatccatgaagctgacaaaatatgattcagagcaaagatatattattttctycctctctcttttcagaggtaaagctgcttttaatgcttcatttgggtacagaactaaaaagacttaaaagtcacgttattatgaaaaagagaagaacacaactgtctaattgttcacaggaaatgtgtagaaaacagcaactctctgacgtatcttctgagtttttggtagttttatgtttacgcaaggctataaagtgatgaaaccaacaaaagggatgtacggttgacttcatgttccatactgtgaacaggagggatactcctttcaaaaat

SEQ ID NO: 441487 - DNA, 563 bp, Homo sapiens
taacttttatggcttatggcagtgaccttcaaactgtttttgtaacagaattcataagtaatggtcacaagcccagtgattgtttgtttgctaatattcctatactgttttatcctatactgttgtattgtaaccattacaaaaattttcaaaattgtaaataaaattaagaaatactgataaaaattattatttaaaaacttggtactgatagtaccaactcmtttagtttgcagtattaagtagaccttgcatgtggaaaatcagggcaatgagtggcatccagtaagcacttgataaaggtttgtttgtattatcattgctgctactggtactgaactccttgctggccaaaatgccccttttttgtagttggatagcccagcaaattctttttttcactcttagcatttccttaagtctggacttctgattttgtaagcaaataactgctattacaaaataattttatactttaaacagtactataatgtgaagaatagttatattcgaaattgatttatttgataaaagttaagtcactggtagaaatgaatagatat

SEQ ID NO: 441488 - DNA, 553 bp, Homo sapiens
catgtctccaagtcttttctaatctatgacagtttatttttcttccctgctgttcatgactgttcagatgtcttgtaaaatgttcctgagttgggtttgtctgatgttttcttgtgtgatatagtttggatatgtgcccccacccaaatctcatgttgaattgtaatccctaatgttgtaggtgaggcctagtgagaggtgatttgatcatggggatggtttctcatgaatggtttaccactatccccttggtgctgtacttgtgatagtgaattttcatgagatctggccttgtaaaggtgtgtagtaagaygactgctcctcctttgccttccaccatgattggaagctttctcaggtctcccccaaagcagaagctgctatgtttcctgtacagtcagcagaaccataagccaattacatctccttgctttataaattacacggtcggactaatgtatcaggattacactggaattatttattctgggaaagaatatcaaagaaatatccctcgccactttccatatactagttgttggaagcaagccac

SEQ ID NO: 441489 - DNA, 604 bp, Homo sapiens
cctgtaatttgagtgaaagccattttaactgggatgacatgatagctcattgtagtcttgatttgcatttctctgatgatcagtgatgttgagtaccttttcatatacctgcatgccactggtatgtcttcctttgagaaatgtctattcagaacttttgcctattactaaattggattatttgcctatttttaattggaatttttcctattgagttctgtgtgctccttatatattctggttactaatctcttgtcagatgaatagttagcaaatattttctcctgttctgtaggttgtctctttacattattgattgtctcctttgctgtgcagaagcttttaaacttggtgcatccmacttgtctatttttgcttaggttgcctgtgtttgtggggaatttttgtccagaccaatgtcctggagagtttcccagtgttttgttttagtagttttatagcttgaggtcttagatttaagttttaatccatttgattttattgttttacatgacaagagataggggtctagtttaattgttcttcatgtggatatccagttttcccagcaccacttattaaagagattgccctttccccaatg

SEQ ID NO: 441490 - DNA, 581 bp, Homo sapiens
atgaaaaagtagaaaaaatgtaaacctaatcattattaacctcaggaaaagcaaacattactcatgaaggctctcaggtcatagttgactactcaacctaaataatgtgaagtctaattatttaataaaatatttttgggggaggggatagggagggagtagagagtagggatttcagaagtaaattttcaactttcattrgagacgttccttagaaaataatctaaaatttataaactaataaatggttttgcaagtttatatatttataaataaagaagagtttaatttgcctctggcaaatgtttgaatgatatgagggaggagtagacgggaatcaaatttttattaatgcctttagttatatttggtatcttatctatatatgtaaattgagaaaaacttgatttttaacctaaatttaaaattcaagaacatgtattattttactaccctccaacactttgcttttaaaatttgcatactactccataagattaatttggttttattggtgaatactttaactgtacaaagaaaagatgcctttccaaagatcacaccttctgtttctaagggtc

SEQ ID NO: 441491 - DNA, 537 bp, Homo sapiens
taaaattccctaatacaagactgcttttgataacatttttaacttctttttcaaggaaatccccttcttgtgtctttccactaaataagaagttattcaccatcctttgcagatgagcatcacaggctttttgaaagataaaattttctattaacctctgtgtgctttggttttctcataagtaaaaatagatggtaatatgtaactccaaagtttgttgtgaaaaaaagaattgaggtgatgtatgcaaaagtaactaggaagtttttcccacacagggagtgctcagtcactgttagataccctcgttcttctctatatatatacatagtttaggttcacataaggacaaagcatcaaaatagagtgtcttacaattggcactaacaatttttttttaactcaaagatttgcattttatatataagaaacaacaggactactgataaataacaaaagctcttaatgcaracaacctacacttacgtctgggcttgatcacaaactagcattttggtgctaaaatatgttatttgg

SEQ ID NO: 441492 - DNA, 571 bp, Homo sapiens
gcacttctctttttaaaagtacattcatcaaagtcttggtgtatgatgagtgttctggagaggagctggggcagcatacrggtggagctgaccttcagctgggagcagactagaactgctgatgtaacgcatacttctattttcatgggaaggctaacgaatctcgtcttcacgttgcaaaacctaagaattcaacaaagtcaactctgccttacaaactctgttaaattactgagagtagttttttaaaatatttctagatcttgaattctaaatgtatttttaattattatttttcttcaataataaatgttttaaattttaacataaaaaagacaatctgacacaattttaacattttctgaagattatcataaggatagtgtgcaatgtagagagataaagcccttttggtagaattaatacaatcatgatacaaagattttccatgtttagtattgctcagtttagtgtaaacactggcaagtggaatgctatttacatgaagctgaataaccagccttgattcttgggcataactgtgcacagaaaacaatgaagtagttacagt

SEQ ID NO: 441493 - DNA, 571 bp, Homo sapiens
gcacttctctttttaaaagtacattcatcaaagtcttggtgtatgatgagtgttctggagaggagctggggcagcatacgggtggagctgaccttcagctgggagcagactagaactgctgatgtaacgcatacttctattttcatgggaaggctaacgaatctcgtcttcacgttgcaaaacctaagaattcaacaaagtcaactctgccttacaaactctgttaaattactgagagtagttttttaaaatatttctagatcttgaattctaaatgtatttttaattattatttttcttcaataataaatgttttaaattttaacataaaaaagacaatctgacacaattttaacattttctgaagattatcataaggatagtgtgcmatgtagagagataaagcccttttggtagaattaatacaatcatgatacaaagattttccatgtttagtattgctcagtttagtgtaaacactggcaagtggaatgctatttacatgaagctgaataaccagccttgattcttgggcataactgtgcacagaaaacaatgaagtagttacagt

SEQ ID NO: 441494 - DNA, 631 bp, Homo sapiens
aatcatatctatagttcatgtttgcacttcaattttcacaaatcctaygatgagagtcctgttattccatttgacattgaactttagagtttaagttgatggtaaaatcacaaaataagggaaaaaaaattacttagccaaatgcagacagcctggtttaaagctgaaggaattttaactgttcaaccttaagagagttttgtaaaacatgatggctttaaggacaagtagcaaatttaaaagcagaataaaaccccataaaatttctttaagacatactagtacacttgggagccatttgcatcttatttttgtgtttgcattttctctttgaaaatatacttggcaaaatgcctgcagaatattacctaagaagaataattaaagccatttctgtcagcctttccttaatgtaactaagccatccatttccattggactcaattctcttgctctaggacttttgcaaaggtcaaggctctgctcaatagcactttttatttaaataaagccacaagtttatttctatgttgtttctcccaactctcaaaagcctcaatgattctcaacttcttatagctctgaatcttctgatttatcagccagaattaaaacttcacatttgtaagat

SEQ ID NO: 441495 - DNA, 631 bp, Homo sapiens
aatcatatctatagttcatgtttgcacttcaattttcacaaatcctatgatgagagtcctgttattccatttgacattgaactttagagtttaagttgatggtaaaatcacaaaataagggaaaaaaaattacttagccaaatgcagacagcctggtttaaagctgaaggaattttaactgttcaaccttaagagagttttgtaaaacatgatggctttaaggacaagtagcaaatttaaaagcagaataaaaccccataaaatttctttaagacatactagtacacttgggagccatttgcatcttatttttgtgtttgcattttctctttgaaaatatacttggcaaaatgcctgcagaatattacctaagaagaataattaaagccatttctgtcagcctttccttaatgtaactaagccatccatttccattggactcaattctcttgctctaggacttttgcaaaggtcaaggctctgctcaatagcactttttatttaaataaagccacaagtttatttctatgttgtttctcccaactctcaaaagcctcaatgattctcaacttcttatagytctgaatcttctgatttatcagccagaattaaaacttcacatttgtaagat

SEQ ID NO: 441496 - DNA, 523 bp, Homo sapiens
gatctcggctcacggcaacctccgcctgccaggttcacgctattctcctgcctcagcctccaaagtagctgggactaccggtgcctgccaccacgcctggctaattgttttgctttttttttttttttttttttttttagtagagaaggggtttcaccgtgttgcccagggtggtttcgatctcctgacctcgtgatccaccagcctcggcctcccaaaatgctgggattacaggtgtgagccaccgygcccggcctcttcttcatgttttaagtgaacttcagtaaaactagttagtttctctgttgtgtgtatgaagatattttgctttgtattgtagagagctgcatatgctgccagcttctctgtgagaggtcagagctttaaaaccacactgaatgaatctaataccaatgtattgaattgaaataggtatcatttattaaatgtaaatgcatattgctcaacttttatgttttccagtgttcatgtttattgagaatatatcatagaatgttaatca

SEQ ID NO: 441497 - DNA, 586 bp, Homo sapiens
gctttgaccttctttcattaatgtgctatcctgcgatgcaaacttacaaaattccttgtttctgttcctaaaatgatgatgctggatatggagaaaactttctgggcatgaacaagaattaaaataaaacaaaacacttcaaagatctgaaagaaagatcaaggatttctgccatataatgtaattgtgaaattgttgaatcacacagtttagaaaggaagtaaaacaaaaacaaaaaccagccctctggtgctagacagaagtcaacctcactgtttgaatcacatggttttccttcccaatttttagaatcccagaggtagmatttctgcagcttcttcgatagcctttgttcttgttatcttgctcagtagcttttgtcctctacttcatagaaatataagaacgatatcactgctactatcaggatttggaatgtttctagaccaaagaaaacccgattccttatttcttcatggctcctgcagagtcgaggccagaacttctggtactactgtaaggattacaggaaacttgcaactacaccctcttcttaatctcagtgaattactccatggagtcactg

SEQ ID NO: 441498 - DNA, 544 bp, Homo sapiens
taaaaaaataaaaaagtcattactatcaacttcacagaaataaaagagattataagagaatattatggacagctgtacaaacatatcaggcaactaaataaaactgacaaattactagaaagatataaactaccaaacatcattaaagaaattgaaaatttgaatagatctatagcaagtaaagagattgaattagaaattctaatacttcccttgaagtgtgtaccattaatctcttcccttgaaattttgcacttgaaaagtgcaagcccagataccttcactggtgaatcataccaaatatttagagaagaattaataccaatcctttacaaaatcttctgaaaaataacaagaaagaaaacatcccaactattctctgaggccaatattaccctaataataaaatcagacaaagatatgacaagaaargagaatcacactctagtatccattatgaacatagacacaaaaatcctcaacagcatacttacaaatgcaattcagcatcatattaaaggggttatgcaccatgaagaaaatg

SEQ ID NO: 441499 - DNA, 549 bp, Homo sapiens
tatataattctttctttctgaaagaatactcatcagaagttatattaatactttgaaaggtttatgaaaaataaaaaatgaaagatrcccagcattttttttctggtgtatttttagcaagatcagatatcatagaatttaaatgaagaactttgctctacgtaattagtcattgatcaaagaaacgacaaattttggaatgaaaatagcaaattcagttaaaatattctgcaaaaatacttctaaaattatttttaaaagatagttgttaaggcataggactagtactcttggatactattttttctaggtgtatcatatgagtattaataattcaatctgaaacaaatcagtaagctttctagtattgaaattttctcttttgctttcctactgtgtcaccatcgtactgttttgttttacacagtgagagcataattttcttctacagggaccacgaagcttcaggccagccctgtcccgaagtcttctgtgcttcatgtcgagtggtctgcagtggactgtgtctgcttgaagcgatgctccgga

SEQ ID NO: 441500 - DNA, 549 bp, Homo sapiens
tatataattctttctttctgaaagaatactcatcagaagttatattaatactttgaaaggtttatgaaaaataaaaaatgaaagatgcccagcattttttttctggtgtatttttagcaagatcagatatcatagaatttaaatgaagaactttgctctacgtaattagtcattgatcaaagaaacgacaaattttggaatgaaaatagcaaattcagttaaaatattctgcaaaaatacttctaaaattatttttaaaagatagttgttaaggcataggactaktactcttggatactattttttctaggtgtatcatatgagtattaataattcaatctgaaacaaatcagtaagctttctagtattgaaattttctcttttgctttcctactgtgtcaccatcgtactgttttgttttacacagtgagagcataattttcttctacagggaccacgaagcttcaggccagccctgtcccgaagtcttctgtgcttcatgtcgagtggtctgcagtggactgtgtctgcttgaagcgatgctccgga

SEQ ID NO: 441501 - DNA, 642 bp, Homo sapiens
actcaggtgactatgtttaatctacacagggccagtctttcatattctagcccctccctggctcctatattaattaatttaaatgaatgatggccaaatctcctctttactatatgtaagtttggtatagtctaagttcccaatggtcggctagtctatattcagtagyaggaaaactgaaaatatttatttattcaaaaatagtataaggcctgtgtgatcttctcagatatttagcttacctctgtgagctcttttattgaaggataacactgatgtggtaaagaatgcaagttttaagtgtacaccttgatggatttttataaatatacatacttacgtgaccaaaccgcagatggagataaacctggagtctaacaagcctccatctgtctcctccctgccaatatctgcccatcaacacacccacaatcctgacttctattatttttcccatcatttgttttgagccctgagagcttgttacatgttattattgaactctttaatgtacaatttctatgacaattaattacattttttttaactcaaagagaaaagaaggctcgggaaaagttagtttcttgctcaagttcatggagctggtgagcggcaggcctgaaatcaaattagtcagctgat

SEQ ID NO: 441502 - DNA, 492 bp, Homo sapiens
agtctaacaagcctccatctgtctcctccctgccaatatctgcccatcaacacacccacaatcctgacttctattatttttcccatcatttgttttgagccctgagagcttgttacatgttattattgaactctttaatgtacawtttctatgacaattaattacattttttttaactcaaagagaaaagaaggctcgggaaaagttagtttcttgctcaagttcatggagctggtgagcggcaggcctgaaatcaaattagtcagctgattgcagaggccagttgagctaccctgcttctcccagtaattcagatattaaacaagaaagataatagaaagtaaaaactagtcagtgagttattcaaggtggttaaaagaattatttcctaaatataatattccttgtacttatgagaccttgaactccaaggtgaattggaaggtgtttagcagctctataataagaatatgataatgatacttaaccagt

SEQ ID NO: 441503 - DNA, 492 bp, Homo sapiens
agtctaacaagcctccatctgtctcctccctgccaatatctgcccatcaacacacccacaatcctgacttctattatttttcccatcatttgttttgagccctgagagcttgttacatgttattattgaactctttaatgtacaatttctatgacaattaattacattttttttaactcaaagagaaaagaaggctcgggaaaagttagtttcttgctcaagttcrtggagctggtgagcggcaggcctgaaatcaaattagtcagctgattgcagaggccagttgagctaccctgcttctcccagtaattcagatattaaacaagaaagataatagaaagtaaaaactagtcagtgagttattcaaggtggttaaaagaattatttcctaaatataatattccttgtacttatgagaccttgaactccaaggtgaattggaaggtgtttagcagctctataataagaatatgataatgatacttaaccagt

SEQ ID NO: 441504 - DNA, 492 bp, Homo sapiens
agtctaacaagcctccatctgtctcctccctgccaatatctgcccatcaacacacccacaatcctgacttctattatttttcccatcatttgttttgagccctgagagcttgttacatgttattattgaactctttaatgtacaatttctatgacaattaattacattttttttaactcaaagagaaaagaaggctcgggaaaagttagtttcttgctcaagttcatggagctggtgagcggcaggcctgaaatcraattagtcagctgattgcagaggccagttgagctaccctgcttctcccagtaattcagatattaaacaagaaagataatagaaagtaaaaactagtcagtgagttattcaaggtggttaaaagaattatttcctaaatataatattccttgtacttatgagaccttgaactccaaggtgaattggaaggtgtttagcagctctataataagaatatgataatgatacttaaccagt

SEQ ID NO: 441505 - DNA, 492 bp, Homo sapiens
agtctaacaagcctccatctgtctcctccctgccaatatctgcccatcaacacacccacaatcctgacttctattatttttcccatcatttgttttgagccctgagagcttgttacatgttattattgaactctttaatgtacaatttctatgacaattaattacattttttttaactcaaagagaaaagaaggctcgggaaaagttagtttcttgctcaagttcatggagctggtgagcggcaggcctgaaatcaaattagtyagctgattgcagaggccagttgagctaccctgcttctcccagtaattcagatattaaacaagaaagataatagaaagtaaaaactagtcagtgagttattcaaggtggttaaaagaattatttcctaaatataatattccttgtacttatgagaccttgaactccaaggtgaattggaaggtgtttagcagctctataataagaatatgataatgatacttaaccagt

SEQ ID NO: 441506 - DNA, 558 bp, Homo sapiens
acacatgcatctggaggaatggctaatggatgctgggctgattacctaggtgatgggttgatctgtgcagcaaacaaccctggcacacatttacctatgtaacaaaccttcacatcctgcatagatataacctggaacttaaaataaaagttgaagaaaaaaaaatacatgcagtaaagaaaagcaataaggagacggcataaacacaatwtgaaacattggcaaaagacttgaaagaaccttcacaaaagaagatatccaaatggcttagacttagccttaatctaaataacagaataagcattagtctcaactccaaatttcagatacagttataaaagatcctctagctagaaaagtgactatttggaaaataattatattaaagacttgaccaaaggtaatattgattttctgcataaaatagaacttaccagagccatcatatctggaaaattagataggaattagcgagctccatgttgcaaattgcaagaaattagtatttcctggtgaagacttggaggcatggaatgatgcaataaggttcaataggct

SEQ ID NO: 441507 - DNA, 516 bp, Homo sapiens
taacagattatgatgctgaaaatcaaaacaacaactgcactctttccaaattttcggatttctcattatctagcatttgaataaattccttccgaattaaagcttaaactatattcatgagttaaatggcattatgttagatgtatatagacttacatatgaattcctttcatgaagaaacatatactctcttaagcaggtttccctacctttatmtaatgttttcccattttattctaagtggaggcctatcttaatctctgcattgttattgatgtgtgtagaacattcacatttaaaagaagtatctacacatttgggcttaaatctaccacgttattattggctttccatgtatccttcctgttctttttttgttctttttctgcctcctttgggactgattgaattttttacattacattttttctccatttttattagctattattctttatgttttagtgactgctacagaggttatatctctttcacttatcacaaggtaatttcaaa

SEQ ID NO: 441508 - DNA, 585 bp, Homo sapiens
tgggtttcattgttctttttgactcaaaggaatgtaaatattctctaaccttctagtccttaccttgaaaaataacacagcatttacatattcccaagtacttctgtaaccaaatccactctctcctctttgtataaggcttcttgtcactaaattatgacttatagccaaggcatcaaagtttaaagtctatattttgtcattgatttgtacaaagtggttaataccagccaaaaataaatcttaatgaattttgagtcattattatcattgcttcaatkatatcaatgccttttagtggattttgaggggagaaaaggcaatagaaaaaaatgaacaaattaaagtactattaaaataccagtcaattattaattgatcagtctataatttgttccctgtaatataaagtatttggaatagaacaccttaagatttattcaggtgcagatgtttcaagattacataatttgactatcagatggttctagtcataatcgtaaatacaatcaaattatggtgaaaatgaaagaattttttttggcatccagaggaatataaaaaataaagttggctataaaaata

SEQ ID NO: 441509 - DNA, 519 bp, Homo sapiens
tgatagtcaagactttgaaattacttgaacatttgttattccgcggcttctgagtttcgttgtgtatgagtaactcagcagtcgggcatcacaaagtaatgagactcagatcacacccttcctatgctgggatttaatagagtatttggtaggaatgggaaatgcagataggggatagtttatccatgtggggcctttacttatccttcgcagttgagtgatagattttaagtaaacactcttgaggttattgcagttggaagtagcatgaaatgtagcraagaacaggattacaatagaattttttgcataattaattagtaccttggcctacctagctgactgataaatttcaatgatttaccaatccatgatccgtacaacctctcagccttttcctcccttgatcttttcatctccaaaatatccctgttacactttatctcaggtgttcatggttgcagcctagaaccttaagattccaataattgctccatctctgagatgtcgtttacaggc

SEQ ID NO: 441510 - DNA, 553 bp, Homo sapiens
gtaaacagacaaccccacaaagcgggagaaaatcttcacaaactatatatctgacaaaggactaatatccagaatctataatgaactcaaacaaattaggaagaaaaaaagcaatcataycaaaaagtaggctaaggacatgaatagacaattctcaaaagaagataaacaaatggccaacaaactattaaaaaatgctcaacatcactagtgatcagagaaattcaaatcaaaaccataatgtgataccaccttactcctttaagaatggccataatcgaaaaatcaaaaaataattgatgttggcatggatgtggtgaacagggaacacttctacactgctggtgggaatgtaaactaataaaaccactatggaaaacagtgtggagatttcttaaagaactaaaagtagaaataccatttgatccagcaaccccactactgggtatctacctagaggtaaagcagtcattatacaaaaaagatacttgcacacacttgtttatagcagcacaatttgcaattgcaaaaatatggaaccaactcaaatgtc

SEQ ID NO: 441511 - DNA, 549 bp, Homo sapiens
caacactgtcctggtggagaaagattctctggagaaactttcccagttatttttttgctaacactttggctaacttttaaaaaacattctcataataagcagatgttatcattctttagctcttcagaaaatcaacaagtgaaacgccccgggcatcacgaaaacctgttgcygcgacctttgctattgaccagtccatttgtgttttgactggaccacttccacctcttggtagctgttgtttttactatgctttgtattctggattgtactggtaaagctatgtttcttctcctgttaaaattcttcaaagaaatgcttcaggatctttatccaacttgtttacagtttctgttgaaagctctgatcttatctgcagccgatctgggagaaactgtttttgcacccactgagtgaaaagtttgctcaactttaatttgccagtcagaatgttgtaagctgaactaatggagatgtttttggtgttggctattgtttctgctgttaatgtcagtcctttttcaattaaggcattaacaagattagttt

SEQ ID NO: 441512 - DNA, 549 bp, Homo sapiens
caacactgtcctggtggagaaagattctctggagaaactttcccagttatttttttgctaacactttggctaacttttaaaaaacattctcataataagcagatgttatcattctttagctcttcagaaaatcaacaagtgaaacgccccgggcatcacgaaaacctgttgccgcgacctttgctattgaccagtccatttgtgttttgactggaccacttccacctcttggtagctgttgtttttactatgctttgtattctggattgtactggtaaagctatgtttcttctcctgttawaattcttcaaagaaatgcttcaggatctttatccaacttgtttacagtttctgttgaaagctctgatcttatctgcagccgatctgggagaaactgtttttgcacccactgagtgaaaagtttgctcaactttaatttgccagtcagaatgttgtaagctgaactaatggagatgtttttggtgttggctattgtttctgctgttaatgtcagtcctttttcaattaaggcattaacaagattagttt

SEQ ID NO: 441513 - DNA, 588 bp, Homo sapiens
gatcctcttgccttagcctcttgagcagctaaaactacagacatgtgccatcacacccaggtattttcttacgttttgtagaggggatagaagggagtctcatcatgttacccaggctgggaaactcattatctcaatatttaggaaactcatttcacagtatttaattgcacgctttcacctaacaaaatccccttatatttggcttgtcagcaactagcagtttatctttagccatttagatttctcaatgcagaagctaaacacacattcactgtgtgcatcacattgcaggaatcacaggttagacttcctgagaggttccaaagctctgttcactatatggaggtgaggggaagagctcctatagctttttttgatggtggtggtagartgagacccttagactagctcttcccaaagaaagccttttcacaaatgccatcccttgattcaccaactccaatcatcaccattgaatgccatcagtgatcaactcattcatgaaacttgttttggactgtttattttgaaaattttcagcttgataatatctgtgtacttaaagtcttgaaaaagttgccatgt

SEQ ID NO: 441514 - DNA, 500 bp, Homo sapiens
taaacacacattcactgtgtgcatcacattgcaggaatcacaggttagacttcctgagaggttccaaagctctgttcactatatggaggtgaggggaagagctcctatagctttttttgatggtggtggtagaatgagacccttagactagctcttcccaaagaaagccttttcacaaatgccatcccttgattcaccaactccaatcatcaccattgaatgccatcagtgatcaactcattcatgaaacttgttttggactgtttattttgaaaattttcagcttgataatatctgtgtacttaaagtcttgaaaaagttgccatgttaatattctcttacatattaaatgcatcatctcatttaatcttcacaaaaaacctgactctaggtatacataygtttttcagtttaatatatgagggattgagggtcagacaggatcaatgatctgactctcgtcccagagctaataaaaaatgacacaaggattttaatcc

SEQ ID NO: 441515 - DNA, 574 bp, Homo sapiens
tgatttgagttataactccagttcttgcacatgcagtggcctcacatcagttaaactctttctctactgcaatgccatggtctcagtgaattgattttgtctgcacaacaggcaggaagaagctgtcaggtgattacataaactggagggggaaaaaaaaccaactatggcattttcttaatttagaacagaggtatgtttattttttaccaaacttaattactgattttcattcaatcattcaataaatgaggkttttttttgtgcgcactgtgctaattttttacatttctggaacttaaaaaattcagtaattcatctctttattttaaaaattttatatttgtagtgaatagaagggctaatttcatatttgtttgtttttatttctctgtagacaaaaggtctcactgcattgcccaggctcgtcttgaaatcctggcctcaaccaatcctctagccttgtccttccaaagttctgagattacagacatgagccaccatgcctggtcttctctatatttttatgttgacaaagtgatgttagtttgcatgtataatataatcagagaga

SEQ ID NO: 441516 - DNA, 574 bp, Homo sapiens
tgatttgagttataactccagttcttgcacatgcagtggcctcacatcagttaaactctttctctactgcaatgccatggtctcagtgaattgattttgtctgcacaacaggcaggaagaagctgtcaggtgattacataaactggagggggaaaaaaaaccaactatggcattttcttaatttagaacagaggtatgtttattttttaccaaacttaattactgattttcattcaatcattcaataaatgaggtktttttttgtgcgcactgtgctaattttttacatttctggaacttaaaaaattcagtaattcatctctttattttaaaaattttatatttgtagtgaatagaagggctaatttcatatttgtttgtttttatttctctgtagacaaaaggtctcactgcattgcccaggctcgtcttgaaatcctggcctcaaccaatcctctagccttgtccttccaaagttctgagattacagacatgagccaccatgcctggtcttctctatatttttatgttgacaaagtgatgttagtttgcatgtataatataatcagagaga

SEQ ID NO: 441517 - DNA, 527 bp, Homo sapiens
gcacatacacaaaggaaagctacagaccaatatcacctaggaacttaggtgcacacactcctcaacaaaatttagcaaattatatccagcaacatataaataaaattacataccatgaccaagtgggatttattgcatgtatgtaacactggttcaacatttgaaaatcaatgtaatcacagcagactaaaaaagaatcatataatcatatcaattgacacatgaaaatatttgacaaaatacaacacccattcatgttaaaaactcccagcaaactaggaataaaggagaacttcctcaacttgatattgagtaaccacaaaaactctacagttgacatgtacttggtaataagaaaccagatgctttctgcctaatgctaggaaggatgtttgctttccccattcctattcratatagcactataatttctagccagtgcagcaagtcaagaaaaagagataacaggtactcagatggaaaggaggaaactattacagaaagagaaaaaaaataggaagagctta

SEQ ID NO: 441518 - DNA, 624 bp, Homo sapiens
aacaggtactcagatggaaaggaggaaactattacagaaagagaaaaaaaataggaagagcttagaattcagaaattaagayggaactaaaaactctaaattggagaatgggtcaggaatcaggaatcctgtgggtaatagaaatgttaagtcatggtacatattttagggtatgaagtggcaagagaggcgcatacattgcatacattggtgtaggtatgtttcagagagtgtttagaaatcaatttaatttggcataactgttttgtcttatgcaaaaagcaggaagaaatctgacattaaggacctgatttgttcaatgctttctggtggaaactaaagaagcatattagggagatacttaacatagtatagtatagtatcagtagtaacaggtgcagatgctggcaaaacaattatcctctgtagagacttcactgaaaataagctataagtagaataacggtgtctgaattaatttttcaactgatactgcttttgcattaagtatttagagtgatgaagttagcatcaatagaataatttaatgtctgaagaaaaaaataattttaaaatgtaagccgatgtatggcgggggctaccataacaaactatcagaaactg

SEQ ID NO: 441519 - DNA, 624 bp, Homo sapiens
aacaggtactcagatggaaaggaggaaactattacagaaagagaaaaaaaataggaagagcttagaattcagaaattaagacggaactaaaaactctaaattggagaatgggtcaggaatcaggaatcctgtgggtaatagaaatgttaagtcatggtacatattttagggtatgaagtggcaagagaggcgcatacattgcatacattggtgtaggtatgtttcagagagtgtttagaaatcaatttaatttggcataactgytttgtcttatgcaaaaagcaggaagaaatctgacattaaggacctgatttgttcaatgctttctggtggaaactaaagaagcatattagggagatacttaacatagtatagtatagtatcagtagtaacaggtgcagatgctggcaaaacaattatcctctgtagagacttcactgaaaataagctataagtagaataacggtgtctgaattaatttttcaactgatactgcttttgcattaagtatttagagtgatgaagttagcatcaatagaataatttaatgtctgaagaaaaaaataattttaaaatgtaagccgatgtatggcgggggctaccataacaaactatcagaaactg

SEQ ID NO: 441520 - DNA, 585 bp, Homo sapiens
tgataatgagtaaggagactgaatcggtaatcaaaaacttctcaacaaagaaaatcccaggaactgatccctttataggctaattctaccaaatatttaaataattgattccagtccttcaaactcttttaaaaattggagaggaaggaacacttccyaactcattttatgagtccagcattactctgataccaaagccaagcaaacactgcaataaaaaaaaattacaagacagtatccctgatgaatacggatgcaaaaatcttcaaaaaaaaaaaaaaaagactaacaaaccaaattcagcagcacattaaaaggatcatacactatgatcaagtgaaaattatccctgggaagcaagagtggttttaacatacataaatcaataaaggtggtgcacaatgacacaatgagtgaacacaatcatataatcatctcaatagatgcagaaaaaacattcaacagaattcaagatcctttcacgataaaaactcagtaaattagatacagaagaaatatacctcaacataatagaagccatatacaacaaacagacatgtaattttatattcgatagtaaaaacc

SEQ ID NO: 441521 - DNA, 585 bp, Homo sapiens
tgataatgagtaaggagactgaatcggtaatcaaaaacttctcaacaaagaaaatcccaggaactgatccctttataggctaattctaccaaatatttaaataattgattccagtccttcaaactcttttaaaaattggagaggaaggaacacttcccaactcattttatgagtccagcattactctgataccaaagccaagcaaacactgcaataaaaaaaaattacaagacagtatccctgatgaatacggatgcaaaaatcttcaaaaaaaaaaaaaaaagactaacaaaccaaattcagcagcacattaaaaggatcatacactatgatcaagtgaaaattatccctgggaagcaagagtggttttaacatacataaatcaataaaggtggtgcacaatgacacaatgagtgaacacaatcatataatcatctcaatagatgcagaaaaaacattcaacagaattcaagatcctttcacgataaaaactcagtaaattagatacagaagaaatatacytcaacataatagaagccatatacaacaaacagacatgtaattttatattcgatagtaaaaacc

SEQ ID NO: 441522 - DNA, 550 bp, Homo sapiens
ttttccatcatataaaaaagttctgtacggcaaagaaaaaaatatataaaatgaagaagcaacttagaaaatgagaaaaaaattgcaaatcataatcttatcaggggttactatccgaaatatataaaaaattctaataacttaayagcaagaaaacaaataatctaattgaaaaatgggcaaaggacctgaacagacatttctcaaaagaagatatatgaatgactaacatgtatatgaaaaaaatggttaacattactaatcatcagggaaatgtaaattaaaaccacaaggatacttattagaatgggtatatcaaaaaagacaaaagataaatattggtgaaaatgtagagaaaagggaaactttgtacatgttggtgtgaatttgaattagtacagtcgttatggaaaacagtatggaggtccctcaaaaacctaaaaatagaactaacacatgatccagcaatcccacttctgaatacctatccaaatgtagtgaaataagtatgttaaagagatatctgcatttccatgttcataacaacatt

SEQ ID NO: 441523 - DNA, 606 bp, Homo sapiens
catgccgaacttcatggtttcatttgctatgtgtattctccaaaatccaaaccatgttgtcccagtccagctgtttctaaaagactgcagagggatataaacaagggcccactgcctattgcaatggcagatctcaaagaatttcaaatcagcctgtcaaagccagtatttcttacctgcttctttccaactctctcttctccaaaatgtgcttcctatgttcttatgttctttttctgtccttatttttttttgtttgtttttgtttgtttaggccctggtcatttatttccttgattacagtgacagccacctaactggtctctgatctctttaactcccaacatatgggtctagacctttattggaatcatagaactgctctgagagtaatggatgctttcccagcaaaaatgtacatatgcactcaacatggaaaattttgcctacaattttgaaaggattatgtatccatgagycccatcgttatgccttataccagttatcagacaccaggttaagagttcctaggttaaactactctcaaaacttctgccagagtaatcataaggaagtaaatctatagggagactattctatatgata

SEQ ID NO: 441524 - DNA, 606 bp, Homo sapiens
catgccgaacttcatggtttcatttgctatgtgtattctccaaaatccaaaccatgttgtcccagtccagctgtttctaaaagactgcagagggatataaacaagggcccactgcctattgcaatggcagatctcaaagaatttcaaatcagcctgtcaaagccagtatttcttacctgcttctttccaactctctcttctccaaaatgtgcttcctatgttcttatgttctttttctgtccttatttttttttgtttgtttttgtttgtttaggccctggtcatttatttccttgattacagtgacagccacctaactggtctctgatctctttaactcccaacatatgggtctagacctttattggaatcatagaactgctctgagagtaatggatgctttcccagcaaaaatgtacatatgcactcaacatggaaaattttgcctacaattttgaaaggattatgtatccatgagccccatcgttatgccttataccagttatcrgacaccaggttaagagttcctaggttaaactactctcaaaacttctgccagagtaatcataaggaagtaaatctatagggagactattctatatgata

SEQ ID NO: 441525 - DNA, 514 bp, Homo sapiens
caacctctgttctggtggttaactccagagtggacctgcaggtgttcatataaactctcccaaatccatgaatgattaactggaagctttctatgttaacttttcttgagaggggtgrtagaatgctttgacaggcaacagtcgtccttccctttcttctctacagggaaataaagggaaagtttcttaacatttatgaccacaagcaccgttttttccatatagcgtatggatgattcaacattttcccttccttctctaatcctctaataaagaatggggaaaaggtgtaacagatatagttgtgctgccttatactaagtccttcaagaaatattttctccaattcttaatgtcagtctttagcacagggtgttgggtaccaactgactttgtgtgttcagctatctttgccatttgacccccagaacctccttttttggtcgttgtgtctcatcaagtcccttgttagtgcagagatttttttccttctgcagatcacacacaacttcat

SEQ ID NO: 441526 - DNA, 511 bp, Homo sapiens
tttactgagatagcaagatgtggaaggaaaccagatggctgtgactaggaggagaaatggcactggaaaagaaaaaatgcatcaatgcaaattttgtgagaaatactgaatatttgcagatgatttttttactcctgtctccagttacataaattttgaagatatacatgatagctgtgytatttccatatttttaaaaattactctaaacatatcatgggattttattctgaaaaaggcagtttactgatcatggtatatttatgttttccaaaattcctgtaatgtggaagggaaactggaatcatgcatatgtgaatttttagttccttttgggtccccttttagtcctgtgaccttgggtagcttaatgtttctgaacctcatgtttttattctgtaaattgaaaagaataatagttctgttatatgattactataagtgtaaataaatataagcaattggtcataacacaagatagtctacacagtagatgctcggaaagtactaa

SEQ ID NO: 441527 - DNA, 557 bp, Homo sapiens
tttaattcaagagcacatccatctcagctcttttgtttaacagccattggcgtctttacaaaatttaatccccatccaacctcygtcttcaaggaatataactctaaactattttgaaataagttatttggccatgtactgaatccttcatactgtggctacttttgttcaatttggtataatattcttatcaatattcttttatcaaaagaaaatgtcttcacaggaatccttggttccataaactcatgcctgctcaaaagccactttaagctataccttttctttctcgcttcttcttcttcttcttttttttttttttttttttgagatggagtttcactcttgttgcccaggctggagtgcaatggcgcaatctcagctcaccgaaacctctgcctcccaggttcaagtgattctcctgcctcagcctcccgagtagctgagatcacaggcatgcaccacaacacctggctaatttttgtatttttagtagtgacggggtttctccacgttgatcaggctggtcttgaactcccaacctcaggtgatcctcc

SEQ ID NO: 441528 - DNA, 557 bp, Homo sapiens
tttaattcaagagcacatccatctcagctcttttgtttaacagccattggcgtctttacaaaatttaatccccatccaacctctgtcttcaaggaatataactctaaactattttgaaataagttatttggccatgtactgaatccttcatactgtggctacttttgttcaatttggtataatattcttatcaatattcttttatcaaaagaaaatgtcttcacaggaatccttggttccataaactcatgcctgctcaaaagccactttaagctataccttttctttctcgcttcttcttcttcttcttttttttttttttttttttgagatggagtttcactcttgttgcccaggctggagtgcaatggcgcaatctcagctcaccgaaacctctgcctcccaggttcaagtgattctcctgcctcagcctcccragtagctgagatcacaggcatgcaccacaacacctggctaatttttgtatttttagtagtgacggggtttctccacgttgatcaggctggtcttgaactcccaacctcaggtgatcctcc

SEQ ID NO: 441529 - DNA, 472 bp, Homo sapiens
aggtatttcaaacttaacatattcaaaagtaagcctttacttctctaaaactggtccttctatacccttcctatttgtaaattgcaccaccatctaggctcattcttgatttttaccctttcacaaatgtaactattgcattgaaagagtagcaatttacaaagttatagtaaaaaatcaaccctttcattttttcccctagtacctggtcatacctgtttttttccatgtccttgacacctcaagtagatcacatgactatygagtaagaaaactccttcaattatttaatcttatatcagtgtcactttggtaactgtctacccagtctaataaaatactaagagtagaaattaaactctttctcctcttcagatcttatcctagttggaaacctgcattggaaagaggtatagaataggcttttctctatttcctctataggagctcctctcccactcccaacccccaa

SEQ ID NO: 441530 - DNA, 472 bp, Homo sapiens
aggtatttcaaacttaacatattcaaaagtaagcctttacttctctaaaactggtccttctatacccttcctatttgtaaattgcaccaccatctaggctcattcttgatttttaccctttcacaaatgtaactattgcattgaaagagtagcaatttacaaagttatagtaaaaaatcaaccctttcattttttcccctagtacctggtcatacctgtttttttccatgtccttgacacctcaagtagatcacatgactattgagtaagaaaactccttcaattatttaatcttatatcagtgtcactttggtaactgtctacccagtctaataaaatactaagagtagaaattaaactctttctcctcytcagatcttatcctagttggaaacctgcattggaaagaggtatagaataggcttttctctatttcctctataggagctcctctcccactcccaacccccaa

SEQ ID NO: 441531 - DNA, 570 bp, Homo sapiens
aaaaatttggatttggaatcagataggcttgaagtaacatatattagggttcaaatcctggtttccagtttaagagttgggtggactttgtcaaatttctcagtattcccaagcttctttcatctgtaaatagaaatagcactatttaaattacaaaatgcgtcaatttatacaaaatctcagttcaatgtttagtagagttataaacaatagttatttttttatgtgtgctgtagactgaatgtttgtgtctgttcaaaattcatatgttgaaacctaatcccaatgtgatcacttttggaggtggaaccttttcaaagatgattaggtcatgagagtgaagcycttctgatgggattaaggcccttataaaagaaactcagagaccgaaacacaaagatgagtcaactcatatcagaaatcagattttccagattcagggtactcttatatttccttttctgtggcttgactgggcatactcttcacatcccttcaataatctctctaaaaatcactaatcagagaagctttctgtgacatcccaaaatacatagacaggtggttgtc

SEQ ID NO: 441532 - DNA, 570 bp, Homo sapiens
aaaaatttggatttggaatcagataggcttgaagtaacatatattagggttcaaatcctggtttccagtttaagagttgggtggactttgtcaaatttctcagtattcccaagcttctttcatctgtaaatagaaatagcactatttaaattacaaaatgcgtcaatttatacaaaatctcagttcaatgtttagtagagttataaacaatagttatttttttatgtgtgctgtagactgaatgtttgtgtctgttcaaaattcatatgttgaaacctaatcccaatgtgatcacttttggaggtggaaccttttcaaagatgattaggtcatgagagtgaagctcttctgatgggattaaggcccttataaaagaaactcagagaccraaacacaaagatgagtcaactcatatcagaaatcagattttccagattcagggtactcttatatttccttttctgtggcttgactgggcatactcttcacatcccttcaataatctctctaaaaatcactaatcagagaagctttctgtgacatcccaaaatacatagacaggtggttgtc

SEQ ID NO: 441533 - DNA, 533 bp, Homo sapiens
tacggtagcaatcaataaagggcaggggaatagtgacagaaaataaccacaagtgtactgtacctgtaaatgttgagatatatgtaacgcactctctccctttccataattcagttctaatttccaccttatccccaataacctcttgtatcccagtgatggagggctagtacaaaaccatatcagctttacagacaatacatggaagatagataatgggtagattgaatgctttatatcataattagtatttagagatacttgggatctttacatatrttttagacatcaatttgcaaaattttcatttctcagttaaaatattacatactttacttaatagtataagtaatttaatattaatagatgtattcaaataaatatgtttattctgtaagtgagtattttgcctggaaagaatttattattgctaatccttacaaagttttccaaccttaagttttatagttgtcattttcagtgagaaaattgaaactgcaagaggttaagtaacttgctcaagggcatatatt

SEQ ID NO: 441534 - DNA, 351 bp, Homo sapiens
ggaaactgcaataattctttctcttaagacacttataaaattttgaattcacatgtgtgagtggcttaagagttaagcttaaaacatccgaaagttacaattttcagagtaaaagaattagacaatgattggtttttataacaagctaatgtgagccatgcccaagctggaactctgcagaaaaaaacagtggaattaytgacaatcttgcttgacaatttgtatttaggagagaaatttttgatgaggaggggagggatctgagaaatgtgtcacatgaatctaactaaagctgccacctatccctgactcagctcaattatgatggtgctgagataatcacaacattat

SEQ ID NO: 441535 - DNA, 568 bp, Homo sapiens
agagtaaaatatatatattgacttggccaggcgcggtggctcacgcctgtaatcccaacacttcaggaggccaaggcgggtggatcacgaggtcaggagatcaagaccatcctggccaacttatgatggtttgacttacaaatttttcaattttaggatgcaataatgatacacattcagtagaaatcatacttcaaattgtaattttaatcattttttgggctagcaatatacagtacaatactctcttgtgatgccgggtagcagcaagttgtagctcccaggcagccacacaatcacaagggtaaaccaccaatactctgtagtgtgctgtgttgccaaatgattttgcccarctttaggctcctgcacgtgttctgaccatgttgaaggtgggctaggctaagctattatattcagtagactaagtatattaaatgcatgttcaacttaagatatttccaactcatgatggtgtattgggacataacctcattgttaagtcaaggagaatctgtgtgtggtggggcagagggtggggccagcaagtgaaagggcagaatgagag

SEQ ID NO: 441536 - DNA, 576 bp, Homo sapiens
tctcagttgtttgctagtttttggggtagggaaggtgaatattctttctattccatttagattgataaaaagtccttcctttggtattgtattacctaaatatcttaattgtttttgagagaactgaagtttttcttttgagawcttgtgtcattttgaagctaatcgttgtagcaaataaatgtcatcctctttgaaggcttgtttattccctgagaagagaagtaaaacatctacatactgcatcaaagtggatttcttaggggtgtcagcatgtgaaaggcctgcttttaatatttgtaaaaaataagttgggctgtcagtatttccctgaggcatgactgtccatgtgtattgtttgtcttcccaagtaaaggcaaagagaaattgtctatttttatctacacgaatactaaagaatgcactccataggtctgttatagtaaacatctcaccttcagttgggacaacagttgacaacacatgggggtttcataccactagacatcaaggaataactatattactaattgccctcaaatcctgtacaaatctctgttatctacaatttggttt

SEQ ID NO: 441537 - DNA, 576 bp, Homo sapiens
tctcagttgtttgctagtttttggggtagggaaggtgaatattctttctattccatttagattgataaaaagtccttcctttggtattgtattacctaaatatcttaattgtttttgagagaactgaagtttttcttttgagaacttgtgtcattttgaagctaatcgttgtagcaaataaatgtcatcctctttgaaggcttgtttattccctgagaagagaagtaaaacatctacatactgcatcaaagtggatttcttaggggtgtcagcatgtgaaaggcctgcttttaatatttgtaaaaaataagttgggctgtcagtatttccctgaggcatgactgtccatgtgtattgtttgtcttcccaagtaaaggcaaagagaaattgtctatttttatctacacgaatactaaagaatgcactccataggtctgttatagtaaacatctcaccttcagttgggacarcagttgacaacacatgggggtttcataccactagacatcaaggaataactatattactaattgccctcaaatcctgtacaaatctctgttatctacaatttggttt

SEQ ID NO: 441538 - DNA, 576 bp, Homo sapiens
tctcagttgtttgctagtttttggggtagggaaggtgaatattctttctattccatttagattgataaaaagtccttcctttggtattgtattacctaaatatcttaattgtttttgagagaactgaagtttttcttttgagaacttgtgtcattttgaagctaatcgttgtagcaaataaatgtcatcctctttgaaggcttgtttattccctgagaagagaagtaaaacatctacatactgcatcaaagtggatttcttaggggtgtcagcatgtgaaaggcctgcttttaatatttgtaaaaaataagttgggctgtcagtatttccctgaggcatgactgtccatgtgtattgtttgtcttcccaagtaaaggcaaagagaaattgtctatttttatctacacgaatactaaagaatgcactccataggtctgttatagtaaacatctcaccttcagttgggacaacagttgacaacacatgggggtttcataccactagacatcaaggaataactatattactaattgccctcaaatcctrtacaaatctctgttatctacaatttggttt

SEQ ID NO: 441539 - DNA, 638 bp, Homo sapiens
ttgaatatctaatgttcttcacatttactaaraattataaaatttatttttcatgaacaattcatagttcaaatcttttgtgacttttgacttagctcttccaaaatgcaagtctttagagagcattggaacagtgatctcattaatttctaccacatccctgagaggtaaatggcaagcctgacctgacagatggattgggggcatttttattaagtgcatggcagacaccaaggaaggtggccagcacttagcaagacgaaattaaaaattagaagaaactttagagcagtgactaggtgttacagaatagaatttgagacagattacttctctgcaataatttaccaagaataaatgtgaactgcaaattaggaacaaaaataaaatgagaattggaagttgtaagtaaagacaaaaaaagccatacacactatattgtaaaaaatacatacagatatctaattttcatgaaaaaatagctttcccaatatattcagtgtcccattctccctgaaatacattttttagtttgtctccaacctgagaaaaacaaggaaaagtccaaacacagacaaagaaacatttctgatgtaggaaaaatgctgaagtacaggatattttagaggagattaaaa

SEQ ID NO: 441540 - DNA, 638 bp, Homo sapiens
ttgaatatctaatgttcttcacatttactaagaattataaaatttatttttcatgaacaattcatagttcaaatcttttgtgacttttgacttagctcttccaaaatgcaagtctttagagagcattggaacagtgatctcattaatttctaccacatccctgagaggtaaatggcaagcctgacctgacagatggattgggggcatttttattaagtgcatggcagacaccaaggaaggtggccagcacttagcaagacgaaattaaaaattagaagaaactttagagcagtgactaggtgttacagaatagaatttgagacagattacttctctgcaataatttaccargaataaatgtgaactgcaaattaggaacaaaaataaaatgagaattggaagttgtaagtaaagacaaaaaaagccatacacactatattgtaaaaaatacatacagatatctaattttcatgaaaaaatagctttcccaatatattcagtgtcccattctccctgaaatacattttttagtttgtctccaacctgagaaaaacaaggaaaagtccaaacacagacaaagaaacatttctgatgtaggaaaaatgctgaagtacaggatattttagaggagattaaaa

SEQ ID NO: 441541 - DNA, 526 bp, Homo sapiens
gtttgtaagcagtattttctttcaattactcttttcatttacagagcaaaagctagggggacatttttaatttttctttatcgcatgtactcagttttggaaggaagcttcattttctaacttattaaaaactgcctcattttcctattatattttaagaaatcaatcagtttgttaaaaatatagcagtatagaataaaatttgtmttaggtttatattacctattattttaagaataaaaatggaacttaaacacttttaaacatgtttgcatgtactttctactccaaaataataccaaaagttacactgctagtgagaatttttagagatatactgaattatcagtaatatttaatttcttgatgctcagtgtgaacttttttttttgaaacggagtttcgctcttgttgcccaggctggagtgcaatggcgtgatctcaactcactgcaacctctgcctcccaggttcaagcaattctcctacctcaacctcccgagcagctgggattacaggcatgcgcc

SEQ ID NO: 441542 - DNA, 565 bp, Homo sapiens
aatgaaaacaaaaacaaaaatcagatcatcaaagatgtgtgggactatttcaaaaggtayaccagataagtaattggaataccaggataccagaagaagaaagagaacataaagcagtgaaaatacttgaagtaatgatggccgtgaattttccaacattaatgacagacatcaaaccacaggtctaagaaactcagaaaacagcaatctggataaacacaaaacaaattaaaaacaacaccaacacatatcatatttaaactgcagaaagccaaaggcaaggtaaaatattgaaagaaaccaaaggggaaaaaatacttcacctgtggaagaacaagataagaattactaccaacttctccttagaaaccataccaacaaacaatttcaagaacaaaagggatctgagaagttggaagagaatggagtgaaatactaaaagtgttaaaattgaccaggcacggtagcccacacctctaatctcagcactttggaaggccgaggcaggaagattgcttgagtccaggagttcaagactagtctgggcaacataggctagttgccc

SEQ ID NO: 441543 - DNA, 606 bp, Homo sapiens
tggctcacgcctgtaatcccagcactttgggaggccaagaggggcggatcacttgaagtcaggagtttcagaccagcctggccaacatggtgaaaccccatgtctactaaaactacaaaaattagccgggagttgtggcgagtgccggtaatcccagctaatagggaggctgaggcaggaggattgcttgaaccctggaagcagaagttgctgagatcacaccactgcactccatccctgggggacagagagagactccatctcaaaaaaaaaaaaaaaaaaaraaaaaaagaaaaagaaagagaaagaaagagaaaatataggtcaaaaaatatatagagcatacaaggaaagactcttagaaaaagaaaaaaatggagcagtcaagagacagtaacaaccctaaaaatcagtttctcacagaaaacaacaagaaaatgtttcagaaaggtaaatttggtcaatggtgtgaatattggacagagataggaggtgaggctatgaggaagctattagcttggctcttaggaatatgagacatcaaattttccaccattataaattggcttctttggtgagctacagctcccacgttctaaagtaatt

SEQ ID NO: 441544 - DNA, 578 bp, Homo sapiens
gagtggcatggtggatgccagtggctgggaagagagagaaatcgggagctactaagcatttttatttactgctgtgtgttttttctttctcaagcacattcagtaactatttcctttctaataagacttttaaaaagcaaaattagtaataatacaaaagaaaggtcaaacaaagcaaacttgattccatgttttcaaaacgatgagggaaaagggaacacatgggaatgtgttttttttttaatggaagaaaacaatataaatcaatwcacctcaggaaatactgactaaaatattgcttttaattggtacagattcatattgaactaggtaaatatcttaatattacatctcttccttgtcaatggaaaaccaatatgttaatgttagatgcatgttatattttggaagtgcagtgtgaaacaatagcttaaaaattataaataaaaaagaaaagagtacaaaaatgctctaaagtaaatgatagaactcatttcatccgtagttgcagaaagaaccaaatattgctaactctggatgacctctgacaatattctgggtttgaaaatgtttcaaaa

SEQ ID NO: 441545 - DNA, 581 bp, Homo sapiens
tcttcctcccttctttcctttcattcgtataacaaagatgtattaagttactgttgagtttctgctattggccaggcactgagttcaccatggtactaaacactgcagattcaaaaagaatattatttctcttccccttaaaatgtatatagttggataagaagaaataaataagtaaaaatatagcagtacgtaattacctgtgcaayaaaaagctgtatggagtataatgggaacaaagaatggagtggttaatcttcttggccaataaaagcctcttgaaagagaatgtagtgtacatgtaatttaattaaggaagtatcagaaaggatgcaggacttctggggcagagccgaatgggtgtagccacttagatcctgcccaaagagtgtcaacaattccttagcacaccagtaggagtgaatataactgtcggattaatttgtttacaatgataggaaaatggtttaagtttacatttcagagttgaactataatcattcttaagaggtagttttatcattttaatcaaatctggagttaaataattctctcttgtccattatccaatataggattct

SEQ ID NO: 441546 - DNA, 483 bp, Homo sapiens
caaagagtgtcaacaattccttagcacaccagtaggagtgaatataactgtcggattaatttgtttacaatgataggaaaatggtttaagtttacatttcagagttgaactataatcattcttaagaggtagttttatcattttaatcaaatctggagttaaataattctctcttgtccattatccaatataggattctctcatctattatccaatataggaaactctctgggaattctcctttcctgttagttacatacacaaaataaagtgaatactgttactctttcacagtactggagatatggagttcagaatttgtattgtttcataatataaatgcaaatatgtatgctatttgattccattttgagttatgaaccagtaaactctgctytttttattggaaaaagaaaatattttatttcaatgtaaaattttgtaggcagaaattgaattaataatattcttgaaatttctacc

SEQ ID NO: 441547 - DNA, 604 bp, Homo sapiens
ttccaacttttgtcaattattaataaagctgctgtaaagatccatgtactgctttctatatggatataagtttttaattcatttgggtagtgcaaytgatggaacatatggtaagagtatgtttaattttctaagaaactgacaaactctctttcaaagtggttgtagcattttacattcccgtcagcaattattgagagttccagctgctccacattctcaccagcatttggtggtgtcagtgttgtgaattttggccatttttatagatgagtaatgatatctcattttttaaaatttgtaatttcttaagacatatgatgttgaacatgtttttatattcttatatgccacctgtatatcttaatggtgggatgtctatcagcctttgcctgacgtattttgacactttgttattaggtacatacacatgaaggattgctatatcttcttggagtattgaccctttatcactatataatgccccttttttatctccagtaactttcctgtctgaagctcactctgtctgaaattaacatagctagtctcagttactcttgattatgttcatggtatatcttttgccatccttttgctttaa

SEQ ID NO: 441548 - DNA, 568 bp, Homo sapiens
cctccccctacaccagttcctgttgtgctttcagcaagtgagtttctgctttagtaagttgtgatgttttgtacctgcctgtctctccaagttttagggcagtgattgcctcgtgacctcactkctctaacagagctaagaaggactgttggcttttctgttgtttagcttttcacctgctgtcgggtggcatggtgatgtgcaaatttcttagatgctgaaccagaaagtggaaggccaccaaatatgtcaactaagcaattctttttcctccatgttcaaaataaaaattaaacatattgctgaatttttatttattttatgataattaggaaaaagaaatgtgaaaaaccctgttatatataactgttatgcagcaattatatttacttattaaatctattcaattaaatgtggaatgattcatttaaacaatgagcatcataggtatttttatctggtcttacttttatttcataccattattgtcatggatttagtgaataggagtaaaactatttattcaaaatcaagggtacaaaataaataaatacataaaataaaggca

SEQ ID NO: 441549 - DNA, 568 bp, Homo sapiens
cctccccctacaccagttcctgttgtgctttcagcaagtgagtttctgctttagtaagttgtgatgttttgtacctgcctgtctctccaagttttagggcagtgattgcctcgtgacctcactgctytaacagagctaagaaggactgttggcttttctgttgtttagcttttcacctgctgtcgggtggcatggtgatgtgcaaatttcttagatgctgaaccagaaagtggaaggccaccaaatatgtcaactaagcaattctttttcctccatgttcaaaataaaaattaaacatattgctgaatttttatttattttatgataattaggaaaaagaaatgtgaaaaaccctgttatatataactgttatgcagcaattatatttacttattaaatctattcaattaaatgtggaatgattcatttaaacaatgagcatcataggtatttttatctggtcttacttttatttcataccattattgtcatggatttagtgaataggagtaaaactatttattcaaaatcaagggtacaaaataaataaatacataaaataaaggca

SEQ ID NO: 441550 - DNA, 606 bp, Homo sapiens
attacacatatatgattgctaattaagatttcccttgcagtctctggaaattatactatatccaatgataattatgatacattttcaaattttcaaatcttattaaggttcttttccaaatttcaaagctgaaatgcccaaaagatgaaaacctatattaaggatctacatttacaacttatttgttaaaaattattaaaaattatatatctataaaatattcagaagataatgtctaccagaatgcttttkttaaaagatcaatgttctgcttgcatcactttgagcagcaactctgttaggatctgtggtcttgaaatataactgcctctgagttccctatttttgcagcaaacttttcataatatctgattttatacttacatttaactttaaattaatatttcattactgctcaaagctgttattacattttatctttgaatatttcccattaattgactcactcttagcattcagtatctgtatattttttatctggagaatatcaagctgtaaaatgaaaacaatgatgcttgctttatctattctttcccagagttcactgagaacctaatagttattgaatactatcaatattatcat

SEQ ID NO: 441551 - DNA, 606 bp, Homo sapiens
attacacatatatgattgctaattaagatttcccttgcagtctctggaaattatactatatccaatgataattatgatacattttcaaattttcaaatcttattaaggttcttttccaaatttcaaagctgaaatgcccaaaagatgaaaacctatattaaggatctacatttacaacttatttgttaaaaattattaaaaattatatatctataaaatattcagaagataatgtctaccagaatgcttttgttaaaagatcaatkttctgcttgcatcactttgagcagcaactctgttaggatctgtggtcttgaaatataactgcctctgagttccctatttttgcagcaaacttttcataatatctgattttatacttacatttaactttaaattaatatttcattactgctcaaagctgttattacattttatctttgaatatttcccattaattgactcactcttagcattcagtatctgtatattttttatctggagaatatcaagctgtaaaatgaaaacaatgatgcttgctttatctattctttcccagagttcactgagaacctaatagttattgaatactatcaatattatcat

SEQ ID NO: 441552 - DNA, 606 bp, Homo sapiens
attacacatatatgattgctaattaagatttcccttgcagtctctggaaattatactatatccaatgataattatgatacattttcaaattttcaaatcttattaaggttcttttccaaatttcaaagctgaaatgcccaaaagatgaaaacctatattaaggatctacatttacaacttatttgttaaaaattattaaaaattatatatctataaaatattcagaagataatgtctaccagaatgcttttgttaaaagatcaatgttctgcttgyatcactttgagcagcaactctgttaggatctgtggtcttgaaatataactgcctctgagttccctatttttgcagcaaacttttcataatatctgattttatacttacatttaactttaaattaatatttcattactgctcaaagctgttattacattttatctttgaatatttcccattaattgactcactcttagcattcagtatctgtatattttttatctggagaatatcaagctgtaaaatgaaaacaatgatgcttgctttatctattctttcccagagttcactgagaacctaatagttattgaatactatcaatattatcat

SEQ ID NO: 441553 - DNA, 424 bp, Homo sapiens
tctgatgatagatgtgttgatggagacatgtacagttgcttctgcctataatcctggcactttgggaggccaaagtaggcagatgacttgagttcaggagtttcagaccagcctgggcaacatggcaaaaccccatctgcacaaaaaaaataaaaaggaactgggtgtggtggtgagtgcctgtagtcccagctacttaggaggctgagatgggaagtttgcctgagcccaggagttcaagactgcagtgagccgagattgtgccactgcactccagcctgggtgacacaytaagaccctgtctcaaaaaaaaaaaaaaaaaaaaaaaccaacatattgatacatacatagaaggcgctacaagaaaacagcaaggcagcaagataaacatttgagagctgtgattatgagggtctgtttgaga

SEQ ID NO: 441554 - DNA, 558 bp, Homo sapiens
attacaatttggattacaattcaaaatgaaatttgggtggagacacagagccagatcgtatctagcttttaaataatctcaaaagctatttgatagatttattgaataacagtcaattctagtatccaggcctgttctggatatatccatgtattaacatatgtaatcttaaaactctatatgataggtaatattgccaatttttggcacagatgcattgaattctttgccctgggttacattagtttcagtgagcatgatgcagagccaagatccatggccaacaaataggacttcagccaagaataacgttaggattgtctctgcagattgtgtataaaaaacttcactctatattttaaaatgttttgaaattctttttgtgtatgtgggcgaaatagaaaattgcagaagaaacttacttaaagaaatgtattgttggaaagggtatttataaatattagtctaaatacctgaacaagtaatttaagaacattaatgttcagtgatatgcttcatrtacagcaaagatttccctgattatatttttgagaggac

SEQ ID NO: 441555 - DNA, 568 bp, Homo sapiens
gtgtgctggaaatcagtaaactaggggctgagaagtgcttggatgtggccgttgaggtgaggaaccactgggcctagctccaggcactctggagggaggttcaaaaatggtgggattaggaatctggggaaggttggaggtcagatggagagaaacggaaagggaggtcttagaaatctaaaagccattgagacaaaggaaaatcagaatccaaagctttgatgccttgggtcaaacccttcatttattttttttcaaatgagcattagctattggttgttagaagatgcagacaggtgcccctggtctgttgttgaggttgaaccttatctaacttagtgtgctgkgtacccagtggttaggagcataaatgcaaagaaaacacaaaccaccacttacttctcgtccttgtcccagtctcagtgcctggagagatgaatgttgcagtgtgacaggaagctgtcttgagacacaagggctacctcatgaaaggtatgtactttatccagggagagccttagcatacaacagaactccttaaggtgtagtctctggataagcagtgcca

SEQ ID NO: 441556 - DNA, 534 bp, Homo sapiens
catgccatcaacccccccactaaaaattttcagtcagactcagacaggtgccatctgaccatcccctcaatgctaatccataagaaaagaaaagtgacagtaggaaaacatcaggataaacacacataaataaattctyagccagttctgacttctgcttatctggaccaagcagggtattacataagaggagccacacagaagaaatgtaagggacaactctttgaattgtagttggagagatactgatcacaggtaccactctgttactcacactccttttattggcctccgtagcatctgttcaaagaaagtatcatatttaccaaaatttagtgatctcatgaaacttgaagactttaggaattctgccatagaactccaatgactaggaggccatatcaggcagccttctattgtttgcagtggcaaaactatagtcaacaatttattgtacattttaaaataactaaaatacttagactgtttgtaatacaaaaaaggttaaatgcttgaagtgatgcttgcccaatt

SEQ ID NO: 441557 - DNA, 625 bp, Homo sapiens
attactaaataaatcaccttcccttattcttcagcggctagtaaagtgtaattttcattttgctctgtgcacagaatatactattctctttcctaggtcattcttagtacgctgacatggatacatttgttagaggcagatacaaagttaccatgtgagaaaaccaaaacacaacacaaacaatagttctatttattttactctaatcaaccaaaaattctagatctagcaatttaatattgcaatgtattatcctrctatttctaaattaatcatatttaagtcagatactttctgttccaataagcctacctcctacctcctaaggtattacactgggaaatgctttatgaactggatagtgctatcagaggcagggaaccttattattttcataattacgattcagtaaggagtctgtgggaaaagggctagttgtcaatagacatgataaaaggtttgagaactgaattctggaatcctcaaatatttagaatgtggaatgatgaggagaagcccagcaaaataaatccaaagattgaaaaccaccttactttttaaaagtgtctggtatctggttctagttgtgatcagatgcattttccctcgattaccactgtgaacc

SEQ ID NO: 441558 - DNA, 573 bp, Homo sapiens
ttttttttttttcctatggccatacctctattttacattttgtcaaccygtcaaagtattgtacagtattcatctacagatctccctcatgtccatatcacaccctgtggacttgcagaggttgcacattgaaatatgacttaccctgctaacttgccattatctacatcttcaacgtcctgataactcattttttttctcatagtgttatttatcatgtttatgtgtgctggctgtttgtttggattataaatgtgttaagagtagtcttatatatctataatttcatagaacctatcaaaggatactgcaatatccctaactcaggttaaaataagtcacataatatggatcaatgctgcttccatattgttattatttggtgagaaaccaggctgtttatagacaggaaatgttcaagtgggtgttaagaggttttcattaagaaaagctagtattctattatatggtagttaaacataggatgaaaccaaaatgacattttctgcttaggagcaacagtatatttcacagacacacacaaatcactcattagattatttgactccatct

SEQ ID NO: 441559 - DNA, 573 bp, Homo sapiens
ttttttttttttcctatggccatacctctattttacattttgtcaacccgtcaaagtattgtacagtattcatctacagatctccctcatgtccatatcacaccctgtggacttgcagaggttgcacattgaaatatgacttaccctgctaacttgccattatctacatcttcaaygtcctgataactcattttttttctcatagtgttatttatcatgtttatgtgtgctggctgtttgtttggattataaatgtgttaagagtagtcttatatatctataatttcatagaacctatcaaaggatactgcaatatccctaactcaggttaaaataagtcacataatatggatcaatgctgcttccatattgttattatttggtgagaaaccaggctgtttatagacaggaaatgttcaagtgggtgttaagaggttttcattaagaaaagctagtattctattatatggtagttaaacataggatgaaaccaaaatgacattttctgcttaggagcaacagtatatttcacagacacacacaaatcactcattagattatttgactccatct

SEQ ID NO: 441560 - DNA, 542 bp, Homo sapiens
gtaactctttaataaaatgcctagtattggggctattctgtgtaacataaagactaataggttataatttttgtatatgatgcatggctttgtctcctacgcatgaagtactaatgaattttctgaatgatatctgacatgactgaaaagagataaacaatagtttaaatgggactagtttaggtttgtcatgactctttctttattttatatattttttaatttttttaattttgtggttacatagtagctgratagcttttggtatataaaaaatgaaccttgaagtttatttcaaacctgaagagattaaaaaatgaagaagatttttctataggtagtaagaaagaactcttaaaaaataggatcagaacaaaacacgaaaacaaattctaaacaggcacattcagagataaatgcatgtcaaaatggtctacaagtagggttgttgacactgatactatggtcatttaaattcaattagatgctgtcttaagggaaactaaatttagtatcactggtaataggaaagaaggcttggt

SEQ ID NO: 441561 - DNA, 606 bp, Homo sapiens
aataagttattccaccataaaaatgagaatgtacggcatggatgaacaagttacagcatggatgaaatttgaaaattattatgttaaatttaaaaagtcataaagaatgcttattatgattccatttatagaaatatccagaataggcagatctattaagacagaaagtagattagtggttgcctagtactgggaatgaggtggagagatactgttaatgggcaagttgtttctttatggggtgatgaaaatgttctaaaatttattgtggtagtgtttgtgcaacattgtgaataaactaagaaagcactgaattgtacacttaaagtgaatacattctatrgtttgtgaactctatctcgacaaagatgccataaaaaattaatgatgttttaaaacacctacacaagaaatacaagtatgtcaaatatacacatacttggaaaaaataattatatgatcatgatttttctattaatgctaatgtggaaaatttaaaaacacaagactgtcagggtgtggtggctcacacctgtaatcccagcattttgggaggctaaggcaggcagatcatgaggtcaagggatcaagaccatcctggccaac

SEQ ID NO: 441562 - DNA, 611 bp, Homo sapiens
tactatacttcctggaagacaggacaagaagaaatgtaaatgatctaagaagggaatattatccttagagagcagaatctttcttcttaaaaaatagaaacaagagaggaaaagtgatacaaataaatactgtattggagaggaaaaagaaggaaacacatgtcctaagataytgatgttgactttcccagctgagtgggaagcacgtttgcaatgggagtatgaagtgtgttgcttcaactcaagaatgcgtctgtgctctgagtagcctgtgtttccattttaatatgtaaatatttaaacagtatccaagtgacaacttttattcacatgatttacacatgataaatttgtttccttttcttctgttgtatcatttataattctataattctctaataatttacaaatataataacattattattctataatttagagtaatattgtttccagttttcatttttctgtacaatgaagagagactttgaacttctccacagtgagttaagatggctactctctatgtcataaaaatataaaccaaggtgttccatctttatgacaatgtataaaatattcggtccgtgctaatagctaaagagtatgga

SEQ ID NO: 441563 - DNA, 611 bp, Homo sapiens
tactatacttcctggaagacaggacaagaagaaatgtaaatgatctaagaagggaatattatccttagagagcagaatctttcttcttaaaaaatagaaacaagagaggaaaagtgatacaaataaatactgtattggagaggaaaaagaaggaaacacatgtcctaagatactgatgttgactttcccagctgagtgggaagcacgtttgcaatgggagtatgaagtgtgttgcttcaactcaagratgcgtctgtgctctgagtagcctgtgtttccattttaatatgtaaatatttaaacagtatccaagtgacaacttttattcacatgatttacacatgataaatttgtttccttttcttctgttgtatcatttataattctataattctctaataatttacaaatataataacattattattctataatttagagtaatattgtttccagttttcatttttctgtacaatgaagagagactttgaacttctccacagtgagttaagatggctactctctatgtcataaaaatataaaccaaggtgttccatctttatgacaatgtataaaatattcggtccgtgctaatagctaaagagtatgga

SEQ ID NO: 441564 - DNA, 624 bp, Homo sapiens
tctgtgtgtgtttgtgtgtgtgtatgtatgcatagtctctagacagttcctaagaaatgataattaaaagaaaatgtgatgctttttatctctracatgtctttatcttattccatctttaatagataaattaaatgggtatagatttctaattcaagatcatcttccttaggatttttgaagttatttctctactgagtggacatatgaaaagcacttgaaaccaaattctcacatactttacttttgggatatgtttagtatttcctagataattcgtgtaactttttttcttaattttattaaaattcttaagactattaaatgtgtaaaggacctcttgaatgtatcctcaaagatctacattttttataaatgtttatgtgactttaccttagtctcccattgcatttgtggtatttcaaaatattacaataattttacttttatttctttttatttatatttttgttttatataagtattggtttcattcaactctttggagaaatcaactgtatagctggctcgtgaacaacacgggttcattgataccgagatttttttttcaacaaaagttacaccaagtgtgcctgcctctccttcttcgccttccatcttctc

SEQ ID NO: 441565 - DNA, 598 bp, Homo sapiens
tgtatttttgcaaacaaatggtgagtaaagcaaactataaaaaatagtacacaaaagcagcattatttccctaaatagctagttataaattgttctgctgatagaagacccctgaagctttttaaggataaagttctgtcactaataataaagcacaactgtgaaagaatggttgaacccgatgttaaatcaaatttattttatctccagaatagggtgggaatattttcagctaaaattactagggtgtagctaacatgattatcatttccatgtgttaaacagcagagtaagaagcctttcaagtttcctaagtccaamttccataaaacagaattgctttgaggtcaagtgtaaactcgtttatgctattaatattcatcgtaaaagaaaattgtcatttttttaggttcagcaataggttctaattgtcacatttcctgtaaaaataaatgatctcttatgaacaaagaaaaaatgtggatgaaataaaattatattcgggattatagtcctcataaaaaatctataaatactaccccataaaatatttttcaataaacctaaaacaacttaattttgtatacagcatgaaaac

SEQ ID NO: 441566 - DNA, 535 bp, Homo sapiens
accccaatggtttaaataaccacccttttctttctatttggtgacctaatattcccacttgtaatatggcctccaaattcctcccagatctaaaattgtggcattttgttatgaacatcctaattagtatacaaacaattcatgatgttaagctctgactatgaagggatacatctctatgtcaaacatttaatttaaggcattcagaaataactgacagagatttaagcaatayatctcatttttatgaagtttaattggaagttgtaatataaattatgtataacaggtaaaaggaatgtttcataataaaatatagatttgtagtttctctgctatgttaatttgatttcaaaatctcaatgtagctgctaacattactctgtatctaatattttagtttagttttcactgtggtcagagaaatactctaagctatattttatgatccatcatattatcaatttggtaaatatcctctgtgaacttgaaaaggatgtgctttctgtcattgttgggcttgatgttttattat

SEQ ID NO: 441567 - DNA, 535 bp, Homo sapiens
accccaatggtttaaataaccacccttttctttctatttggtgacctaatattcccacttgtaatatggcctccaaattcctcccagatctaaaattgtggcattttgttatgaacatcctaattagtatacaaacaattcatgatgttaagctctgactatgaagggatacatctctatgtcaaacatttaatttaaggcattcagaaataactgacagagatttaagcaatacatctcatttttatgaagtttaattggaagttgtaatataawttatgtataacaggtaaaaggaatgtttcataataaaatatagatttgtagtttctctgctatgttaatttgatttcaaaatctcaatgtagctgctaacattactctgtatctaatattttagtttagttttcactgtggtcagagaaatactctaagctatattttatgatccatcatattatcaatttggtaaatatcctctgtgaacttgaaaaggatgtgctttctgtcattgttgggcttgatgttttattat

SEQ ID NO: 441568 - DNA, 535 bp, Homo sapiens
accccaatggtttaaataaccacccttttctttctatttggtgacctaatattcccacttgtaatatggcctccaaattcctcccagatctaaaattgtggcattttgttatgaacatcctaattagtatacaaacaattcatgatgttaagctctgactatgaagggatacatctctatgtcaaacatttaatttaaggcattcagaaataactgacagagatttaagcaatacatctcatttttatgaagtttaattggaagttgtaatataaattatgtataacaggtaaaaggaatgyttcataataaaatatagatttgtagtttctctgctatgttaatttgatttcaaaatctcaatgtagctgctaacattactctgtatctaatattttagtttagttttcactgtggtcagagaaatactctaagctatattttatgatccatcatattatcaatttggtaaatatcctctgtgaacttgaaaaggatgtgctttctgtcattgttgggcttgatgttttattat

SEQ ID NO: 441569 - DNA, 535 bp, Homo sapiens
accccaatggtttaaataaccacccttttctttctatttggtgacctaatattcccacttgtaatatggcctccaaattcctcccagatctaaaattgtggcattttgttatgaacatcctaattagtatacaaacaattcatgatgttaagctctgactatgaagggatacatctctatgtcaaacatttaatttaaggcattcagaaataactgacagagatttaagcaatacatctcatttttatgaagtttaattggaagttgtaatataaattatgtataacaggtaaaaggaatgtttcataataaaatatagatttgtagtttctctgctatgttaatttgatttcaaaatctcaatgtagctgctaacattactctgtatctaatattttagtttagttttcactgtggtcagagaaatactctaagctrtattttatgatccatcatattatcaatttggtaaatatcctctgtgaacttgaaaaggatgtgctttctgtcattgttgggcttgatgttttattat

SEQ ID NO: 441570 - DNA, 568 bp, Homo sapiens
ctgactagattataagctgctgaactaaaacaaaagcctcaaaagtaagtaaaagagcacagataagtattccaagaaaaactctggaagctggagacaatgaaatggcatttyaacatgctgaggggcaaatttgccagtctaaaatttaataaccagtgaaaaacacaaaagtgagacacagtaaaatatatttagacaagtaattgttgagagaatgtttgcctaggagacccgaactacagaaatactaaggaaagttcttcggactaagaaaaaattatcccagctagaagcatgcaattagaggaagcaatgatgttaactgaaaaaaaaaaaaagtcttaaaatattggcacaagaagttctaaaaatctgagtaagttctgtatctgttatagaaactatatgattaacacattttacaaacacacacacacacaattccaaccacatgtggattagctggtgaattcttaccaaaacttaaggaactaattggactaggcttacacaagcattttcaggaaataatacaaaagaaagaacacttaattttttgtgggaa

SEQ ID NO: 441571 - DNA, 590 bp, Homo sapiens
tatatttgacttaaccaaagaaagaaaaaaaggagaaaccaatctgataagctatattaatactcataagaacacatctttatcgcattctgtaagaatagaatatatttaactmgcactaagaattttgtggccttttgttcaaaggctgctcaagtgcaccaattctcatctatttattttccatgttaaataaaatgtattactgtgtctaatgagaaaacatttcattatgttaactgcctttttaattttgcacctcttttggcttccattttttaaaccaatatatttggcttgtaaaaccagatcttagaaggaatgaggaattgattttggaagcatttatcgtgcttttaattcacaatgagagaattataaagtaaatgaattcttctcccaccaaaaggcatgtctaataggtgcaaagcagctctgtgtggttttgagggaagctatcagaccaacctctacatatgactgcacctttccagaaggtgacccctgcctttggtataatcaagattacatgaatagttgaaaccagctattctaggtacatcaacatttacattatttctcagttggtc

SEQ ID NO: 441572 - DNA, 529 bp, Homo sapiens
cagtgacattctaggaaatgtctgaggcacatgaactcaaatttttaagaaataaaactacacaaaactatattttaactattcgtgctaaggagaacagcaaaatggacaccaagattttccaccttaacccctggggctgtgaatatgatgtcagtcrtgcctaccaacttacatgacaaaaggaattttgcaatgtaactgatgccattaatcagttgattttgaatttacaaaaagggagatgatctgcttggaataatgcaaccacatgatttttttcccttttttaaaaattatactttaagttctagggtacatgtgcacaacgtgcaggtttgatacatagctatacatgtaccatgttcgtttgctgcacccatcaacttgtcatttatattaggtatttctcctaatgctatccctcccactgtcccccaaagtttcctctgactatcaccagaagttagacattccaagcatgagatgtgagggtgaggagcttgcatgcaggggcccatgctgctgc

SEQ ID NO: 441573 - DNA, 529 bp, Homo sapiens
cagtgacattctaggaaatgtctgaggcacatgaactcaaatttttaagaaataaaactacacaaaactatattttaactattcgtgctaaggagaacagcaaaatggacaccaagattttccaccttaacccctggggctgtgaatatgatgtcagtcgtgcctaccaacttacatgacaaaaggaattttgcaatgtaactgatgccattaatcagttgattttgaatttacaaaaagggagatgatctgcttggaataatgcaaccacatgatttttttcccttttttaaaaattatactttaagttctagggtacatgtgcacaacgtgcaggtwtgatacatagctatacatgtaccatgttcgtttgctgcacccatcaacttgtcatttatattaggtatttctcctaatgctatccctcccactgtcccccaaagtttcctctgactatcaccagaagttagacattccaagcatgagatgtgagggtgaggagcttgcatgcaggggcccatgctgctgc

SEQ ID NO: 441574 - DNA, 529 bp, Homo sapiens
cagtgacattctaggaaatgtctgaggcacatgaactcaaatttttaagaaataaaactacacaaaactatattttaactattcgtgctaaggagaacagcaaaatggacaccaagattttccaccttaacccctggggctgtgaatatgatgtcagtcgtgcctaccaacttacatgacaaaaggaattttgcaatgtaactgatgccattaatcagttgattttgaatttacaaaaagggagatgatctgcttggaataatgcaaccacatgatttttttcccttttttaaaaattatactttaagttctagggtacatgtgcacaacgtgcaggtttgatacatagctatacaygtaccatgttcgtttgctgcacccatcaacttgtcatttatattaggtatttctcctaatgctatccctcccactgtcccccaaagtttcctctgactatcaccagaagttagacattccaagcatgagatgtgagggtgaggagcttgcatgcaggggcccatgctgctgc

SEQ ID NO: 441575 - DNA, 561 bp, Homo sapiens
ttttctgcattagtaaatggaatacgaatatttatctggagctgggagtggtagggcatgcctgccgtctcagcttcttgggaggcgaggtgggaggattgcttaagcccaggaggtggacaatgyagtgaaccatgattgcatcactgcactaaagcctgggcagcagagtgaaactgtctcaaacaaaatgaaacaaaataaaacaaagacaacaaaaaggtaatatttatttggaaggttttgtgagtattatttgagatacattatgaaaaatgctagcacattatgagtattcagttatggttagttaactttatcattaagatcgttataaccagtaggagctgacactgctaccccaatcctgtattggaggagagaacccatatgggagtaacattaactggctccccactctgccttgactctgtcatttgcgtctacctaattataaaataaacagtgtttcaagttttgaacttattccctgtcatggtgggtacaaagtcaatcactacacctgtagttatagaacaattagaacagaggaaaagacac

SEQ ID NO: 441576 - DNA, 571 bp, Homo sapiens
aaatatgacatgaaataaatgctaaggcacacaaaacagtgacaaaagaatattatcaattacataaaaatacctgaagttaaatttaaagacataaagcacaagactaacagtaaataataataacaataatttaaaacaaagcaaatttcaggtggcttggtaaatggcctagaaaaataaaggtgaaattataaacagagtggacactttatgatttgatcttcagcatattcacaagacagaactttcataacctttcatctttctcaccctcaaaccaaaaaactcaggaggcaccggcaagcagtacgctgagggaagcccatgcttcggccaagtcggtttggaccaaaatgaattcctcagtaatgctaaaggtagaaaattttgcaagataaatgacccttccataaacaagctaagatgatattttttacatttccactttcattacagtacaacgcccccactccccacccacatacattcacctaagtttattcatccattcactgaaccaatattgcayggcagggactccctaaaaaccgttaacatcccctagaaa

SEQ ID NO: 441577 - DNA, 600 bp, Homo sapiens
cccacttctgcctactctaattatgaactactctgcatctttaagtatttccattttgagtaaaaacaaaataataaacactataggagaaggagccctagactagaatcaggatttcttgaaccagctttactgttcacttgccatttgtgactataagaacctttccgtttcttaaccattacggaaaataattgttttttctgtccttgcttgctccctttggaacttgtccccatgtgaccagtgtcatctgaataataagccaccttatggtgttgtatacatcaaatgagatcacataactaaagacacttaacccataaatcattatgcaaacatgtactcttatcaaaagtgayagatgctatccacagtaactgtccaaactgctttaccatggctattgctatctttccactaagaccctaggcttcaaattaccactttagcattaatttctttctgcccccattttaagcatccatagaggtgcctgtcattatctttcttattgactaattattctctccaggtatctatcctattagaatatatgttaatagctggaaaaagagacctacattgtttttgccctct

SEQ ID NO: 441578 - DNA, 600 bp, Homo sapiens
cccacttctgcctactctaattatgaactactctgcatctttaagtatttccattttgagtaaaaacaaaataataaacactataggagaaggagccctagactagaatcaggatttcttgaaccagctttactgttcacttgccatttgtgactataagaacctttccgtttcttaaccattacggaaaataattgttttttctgtccttgcttgctccctttggaacttgtccccatgtgaccagtgtcatctgaataataagccaccttatggtgttgtatacatcaaatgagatcacataactaaagacacttaacccataaatcattatgcaaacatgtactcttatcaaaagtgatagatgctatccacagtaactgtccaaactgctttaccatggctattgctatctttccactaagaccctaggcttcaaattaccaytttagcattaatttctttctgcccccattttaagcatccatagaggtgcctgtcattatctttcttattgactaattattctctccaggtatctatcctattagaatatatgttaatagctggaaaaagagacctacattgtttttgccctct

SEQ ID NO: 441579 - DNA, 612 bp, Homo sapiens
agcaccattcattcaggtgtttctgaaaaacaactgaacatcttgagagaagcagaaaactgtatgtgttttaagttatattatcctacagcacttctgacaaaagaaaaccacaaaagcyaacttttggacgtattcatattaataagattctatcctaatattctaaaaggtaaaagttggagatttttttaatgaaagataatggaaagcaaaaaaatgcacagtaagaattgtcttaattactggaaatgcaggcacctctaattttcaatatctaaggcaggggtgtccaatcttttggcttccctgggccacactggaagaagaattgtcttgggccacacataaaatacactaacactaacactaaagacagctaatgagctaaaaataagtaaataataaataaatcacaaaaaaatcttgtaatgttctaagaaaaatttacaaatttgtgttgggctgcattcaaagccattctgggccacatgcaccccatgggccataggttggacaagcttgatttaaggtttcagaaatacaatcatcctagaaagcatcttcagcatgattcagttttgctttctctgagctcatttattcatttcc

SEQ ID NO: 441580 - DNA, 642 bp, Homo sapiens
ggattaaaaaacccatgtttttgaacttttgtctcctttagtttaatgctttaaaagccttaaaaacttaattacacaaataaatatgaagttttaaatatgtagttacactgttggtaagtttartgaaggacaagtacagagcactctgagtgagatgacctggtgtgtgacagtgtacacacagtgaggggtcaaggaagacctctctaaggaggtgtcatgcaggctgggttccaagggagggtagcagaagttagctcaacagtgggaaggtgctacggggaggctggagaggtgtggggggcagatgaggtggcgtgcttccgaattgaggaggcttctaggtagcagtgtctaagatcatcctgggggaggaaccagtttggcagcttctaaggattttaatgtaggccagtgtagctggagcctggattcatcactgttcatattctttcatgtttggttcgcatgcgcttgtgtgtcctgtgtgcatgttgataggtagatttggaggctgaaccatggtgaagaaagttgcaaatatcataacacttcatccctgaatttgtcagcatgcatcttttaaaaagtaaggggaatagttattcattatttttacacttgatcttagccaaaagg

SEQ ID NO: 441581 - DNA, 510 bp, Homo sapiens
ggagaaaagtgtggagttatacagaaattagactgaaggggtaaactgaggcagaccatattaattttgtcagtcaatttatttataccctatattattgcacagatttaaggtatctcatcaaatctcttcaataaaacagggttacaaattaggtattcaaacaaagaacaaatgtgggttggatatttgtgaaataaggttgaaattatgaataatagttaaagacagatcacctgttttgttttgagcttcctagctgccaactcaggggaaaaaaaaaaaccaaccaccrtgatatctattaaataaaacgaatctaggtgcttagaagaagtaatggcccctggaatgcagtaagtgctccttcagtttcactggtaagtcactttgcagataggaggcttcagacatggtaagtagagatctggggagatctgtccttgaaaagcatgagcttgatgaagagggtaagggtggctgaaggtgaagtatagggagcatggcctc

SEQ ID NO: 441582 - DNA, 572 bp, Homo sapiens
tgttatactattttaaagtagtattatggcccacagtttatatataagtgatggcggccctgcctgtgtctagcaggtacatcaaatgtgtttagaagtaacattagatacttttgcaccaacctaatacaagttacaatagagtaaaatgtgaggatacatctggttacagatgataaaagcaaaatccttagacattatcttctgtatttggaaaatgcagtgatttagaacctgcgctctaccccgtgtatcatctttagggcattcttccagagggctgctctcagtccttgagtcaggcactttgtgaagttttgttgacaagggattttgttgaaattctgctggcaagccaagcgaacaagcaaagggcttcttacttttgttactttgtctcacaagttcccccttctggtcgtaattcaaccctctgttgtatatacaagaccagcagtgattgtattatgtagttgggaaggctcttctctaggaaagtccatagtctttagtcacagttgtcatagtcataaggaatgagtatcrggtttggggtgtatacttgtctattt

SEQ ID NO: 441583 - DNA, 658 bp, Homo sapiens
tggggctaagggtgttacagggccaggtgtgttctctactagggcctgcctgccttcttccctataataactaacactgcttgagcacttactgtgtaccaggcaccacttaagtgcttgttacatgatatgatccatttagtcctcagaatattcctatgagattatccataaaatagtcttatctcattttcagttcagaaaaacaagacatagagaggctaagcaacttacccaaggttgcacagctattaagtggcaggctggaatgcaaacccaggcaagctgttttcagtgcagtcttaagttccscctttccctgccctcgagatttggcgcccaacacgttgggactcagctgcagcctctagctgctaaatctgactcctctctcgggccagtgccctcagttggatctctgccttgtttctgagaaccaggatcccaagagctatgttacattgtgtgtttgtaaaaacaacttttaaaagttgttttccttatttaaaaaagcaatacttatttactgtggaataattagataatataaataagcaaaatgaagaaaagcaaaatacttccataattccagaccccagagacaagcactcttaacgtatcactgagtatctttccagaccgtttttgcgcgcgtata

SEQ ID NO: 441584 - DNA, 658 bp, Homo sapiens
tggggctaagggtgttacagggccaggtgtgttctctactagggcctgcctgccttcttccctataataactaacactgcttgagcacttactgtgtaccaggcaccacttaagtgcttgttacatgatatgatccatttagtcctcagaatattcctatgagattatccataaaatagtcttatctcattttcagttcagaaaaacaagacatagagaggctaagcaacttacccaaggttgcacagctattaagtggcaggctggaatgcaaacccaggcaagctgttttcagtgcagtcttaagttccgcctttcmctgccctcgagatttggcgcccaacacgttgggactcagctgcagcctctagctgctaaatctgactcctctctcgggccagtgccctcagttggatctctgccttgtttctgagaaccaggatcccaagagctatgttacattgtgtgtttgtaaaaacaacttttaaaagttgttttccttatttaaaaaagcaatacttatttactgtggaataattagataatataaataagcaaaatgaagaaaagcaaaatacttccataattccagaccccagagacaagcactcttaacgtatcactgagtatctttccagaccgtttttgcgcgcgtata

SEQ ID NO: 441585 - DNA, 439 bp, Homo sapiens
acgtcagcaccacaaactgagaggaagcttctgccctcgctaaagcccaggcgcgcgggtaaagacccccggggatgataccccgcgcgccgcggctccgtgcgcgcggtcccccgcactcgcgggccgccccacctcctcccctgcactccaagagtccggcctggtctccgaggccgggagccacgcggcaccgcagcctcgagggagaggacgcccgcaaccaacacgcacgcgggcaccaagagggcacaggccagggcggsgagggccgaatggggccggggggcacgcggagctggaccagaaccagcgagggcgcgcagacactgaacggatgcgaaggtcccggacgcggagcggcccggggcgtcgtgcgtggggcgcgagcggaggcccgggcgccacttacggcggggagggcgggtggctgtcccga

SEQ ID NO: 441586 - DNA, 533 bp, Homo sapiens
ctggcatactttccttttcagttagacattcagctggctttcagaaactaccatatcagattcacctactctccaaacattcagtgtgttttcatgatgctttagctagtggaaatgcaaaaactgaacaaacgaaaataaaacaaaccccattcctcaagatgctaatggtttagtggcagagacaggcatataaataaagttacaacacagtgtgataagcactacattaaaggtatgtctcattcctggaaattaaaacgcaactagaaatactccattctcagtggggaatgggagatgacacggcatcacagaccccccagcatcctgctcagcatcgggaagctattcaacagacgtttgaggatggaagagtgaagctctcactcaaggcttagaagcagcattccaccattttaaaacgtcacttagcttttgctatacagcctcaacaactaaataataagtctcccagaaaaargcaactttgtgtctatggaataatgtaatgaaaaaccttgtcaagtacc

SEQ ID NO: 441587 - DNA, 552 bp, Homo sapiens
catccacttgccaactctttcctgtgggccttaatcaaatacacatgggtagtgcacaaggtgctagggcaggagagctgagagagcccctatgtcacgtcaggcacctgtgaagtccctagatgcagagcagcagcctgacaccaggaggaaggcaagtaagtggacagaaatcagcttttaccatctctacaaaaaatacagaaaatkagccgggcttggtggcaggcacctgtaatcccagcttcaccagaggctgaggcaggagaactgcttgaactcaggaggcagaggttgctgtgagtcgagatcagccactgcactccagcctgggtgacagagcaagactccgtctcaaaaaaaaaaaaaaaaagaaatgaaaagaagagcagggcaggccaggcgcagcggctgacgcctgtaatcccagcactttgggagaccaagacgggtgaatcacccgaggtcaggagttcgagaccaacatggcgaagccctgtctctactaaaaatacaaaaattagccaggcgcggtggcatgcatgtgtaatc

SEQ ID NO: 441588 - DNA, 414 bp, Homo sapiens
cactgtccacagaggtttctgggcaagaaaatcgacaccccaaagatcctgtaacatcatgattggctgtctccacatttacatcatacaattcaattacaaaccactgcaaagcagcacttattgatgaagagctggctcgtgagctgtaagtggacatgccatcagtggtggcaggttgtagcttattaacttgaaatgatactttttttacattcctctctgccctcacgtggtgctaataattgtcataaaagggagtatatgactccaccatgacctcaaaaggcctattccccatctcaaaggaaaatgtcactttcctggtgctagaaattgtagatatgagagttgctcaagttcatttatagtgaagagaagttartagtgtatttatagaagcctaacactatg

SEQ ID NO: 441589 - DNA, 560 bp, Homo sapiens
tttatagtgaagagaagttagtagtgtatttatasaagcctaacactatgatatgcatatattttttaaatactatagaaggagccaatggcagtgatccagaaaatatatccttttcagttgagatagaagagcaaaagaaatctctattcctattgcagagaaaaaatagtaaatatatttgctcataacaacataactaaactgtttgtggcttaataaataaaaatatagttatttaaaggtggttcaaggtttcgtatataatcttacattccccaaatgtgaatttgcacagtaatgaattaaaaataaaacaaagcaatattacttgtcaattcaatcaaataactttgtaatttagcagaaaataaattgcaccagtttggtttaaagccctaactacacatctatagtttccttaaattaattaaaagaagtcatgcaattttcacagaatatcacatgcatgttatccattttaatttctcttaaaaatgggttagttgccattatcaaactttagacaagaaatcaaacagataaagtaacaatgaaag

SEQ ID NO: 441590 - DNA, 560 bp, Homo sapiens
tttatagtgaagagaagttagtagtgtatttatagaagcctaacactatgatatgcatatatttwttaaatactatagaaggagccaatggcagtgatccagaaaatatatccttttcagttgagatagaagagcaaaagaaatctctattcctattgcagagaaaaaatagtaaatatatttgctcataacaacataactaaactgtttgtggcttaataaataaaaatatagttatttaaaggtggttcaaggtttcgtatataatcttacattccccaaatgtgaatttgcacagtaatgaattaaaaataaaacaaagcaatattacttgtcaattcaatcaaataactttgtaatttagcagaaaataaattgcaccagtttggtttaaagccctaactacacatctatagtttccttaaattaattaaaagaagtcatgcaattttcacagaatatcacatgcatgttatccattttaatttctcttaaaaatgggttagttgccattatcaaactttagacaagaaatcaaacagataaagtaacaatgaaag

SEQ ID NO: 441591 - DNA, 392 bp, Homo sapiens
atatgggagttccatttttaattttttgaggaaactccatactgttgtcactaatggctgtaccaatttacgttcccatcaactatcaactaagcacaagggtttctttttctcaatatccgcagcaacatttgttacctttttactgttacaatagccatcctaatagatgtgaagtgatatctsattgtgcattttcctgatgattagtgatggcaaacatccttttattagtatatacctattgtcaatcgtatgtcttttagaaatgtatctcttcaggtctgatatgctttggctgtgtccccacccaaatctcatgttgaattgtagctcccataattcccatgtgttatcggagggacccagtaggagacagttgaatcatggga

SEQ ID NO: 441592 - DNA, 575 bp, Homo sapiens
tacaggcgtgagccaccgcgcacagcccgagattgttttcttaaattctttctgggatagttcactgttagtatatagaaatgcaacaggttgttttttttttttttttaatgtcaattatgtgttctgtaaatttgctgaatttgtttcttaattttaacaagttttctttttggagcctttagaattttctctgtataagatcatgtcatcttgaaatagacacactttcacttcttttccaatttggatgccttttatttctttttcttacctaattgctctggctaagacttacagactttttcagaaaccccccagagtaatctaggggagtccactgtcactagatctgctttataagaaaccctaaagggagktcctcaaactgaaatgcaataagactaattagtatcatgaaaccatatgtagttataaaaagtcactggtaactatacagtcaaattcaaaatactcttaatactgtaatgatgcagtataatcactttaacttttaaaaggttaaaagacaaaaaatactacaaataaatataattacaaaatatacaaagaaa

SEQ ID NO: 441593 - DNA, 575 bp, Homo sapiens
tacaggcgtgagccaccgcgcacagcccgagattgttttcttaaattctttctgggatagttcactgttagtatatagaaatgcaacaggttgttttttttttttttttaatgtcaattatgtgttctgtaaatttgctgaatttgtttcttaattttaacaagttttctttttggagcctttagaattttctctgtataagatcatgtcatcttgaaatagacacactttcacttcttttccaatttggatgccttttatttctttttcttacctaattgctctggctaagacttacagactttttcagaaaccccccagagtaatctaggggagtccactgtcactagatctgctttataagaaaccctaaagggagttcctcaaactgaaatgcaataagactaattagtatcatgaaaccatatgyagttataaaaagtcactggtaactatacagtcaaattcaaaatactcttaatactgtaatgatgcagtataatcactttaacttttaaaaggttaaaagacaaaaaatactacaaataaatataattacaaaatatacaaagaaa

SEQ ID NO: 441594 - DNA, 614 bp, Homo sapiens
aactgaataccattcaatgataaaataaatggctgtcaagccatgaaaagacacagtggaagcttacatgcataytgcagaatgaaagaagccaatctaaaaaggccacatatgtcacttccaactttatgaccttctggaaaaggtaatactatagaaatagaaaaaaaaatcagtggttcccaggagttaggaggaagagagggatgaataaccagagcacagaggatgcttaaggcagtgaaagtacgtgtatgatattttaatagtgaatacttgtcattgtaaatttgtccaagcccaagtgtgaaccttaatgcaaactataagatgtatcatgtaggttctttaattgtaacaaatgcaccactctggtgggggatgtttattatgggggaggctatgcatgtgtgggggacagggagtatatgggaaatctatacctgctgctcagttttgctgtgaactttgaactgctcttaaaaataatgtgtgtatgtgtgtatatatacatacatatacatgtttgtgtgtatgcatatctgatcataagaaacaatacatagtttcacttatttaaaaagtcaaatgtgcaaaactaagcaatatacaag

SEQ ID NO: 441595 - DNA, 614 bp, Homo sapiens
aactgaataccattcaatgataaaataaatggctgtcaagccatgaaaagacacagtggaagcttacatgcatactgcagaatgaaagaagccaatctaaaaaggcyacatatgtcacttccaactttatgaccttctggaaaaggtaatactatagaaatagaaaaaaaaatcagtggttcccaggagttaggaggaagagagggatgaataaccagagcacagaggatgcttaaggcagtgaaagtacgtgtatgatattttaatagtgaatacttgtcattgtaaatttgtccaagcccaagtgtgaaccttaatgcaaactataagatgtatcatgtaggttctttaattgtaacaaatgcaccactctggtgggggatgtttattatgggggaggctatgcatgtgtgggggacagggagtatatgggaaatctatacctgctgctcagttttgctgtgaactttgaactgctcttaaaaataatgtgtgtatgtgtgtatatatacatacatatacatgtttgtgtgtatgcatatctgatcataagaaacaatacatagtttcacttatttaaaaagtcaaatgtgcaaaactaagcaatatacaag

SEQ ID NO: 441596 - DNA, 614 bp, Homo sapiens
aactgaataccattcaatgataaaataaatggctgtcaagccatgaaaagacacagtggaagcttacatgcatactgcagaatgaaagaagccaatctaaaaaggccacrtatgtcacttccaactttatgaccttctggaaaaggtaatactatagaaatagaaaaaaaaatcagtggttcccaggagttaggaggaagagagggatgaataaccagagcacagaggatgcttaaggcagtgaaagtacgtgtatgatattttaatagtgaatacttgtcattgtaaatttgtccaagcccaagtgtgaaccttaatgcaaactataagatgtatcatgtaggttctttaattgtaacaaatgcaccactctggtgggggatgtttattatgggggaggctatgcatgtgtgggggacagggagtatatgggaaatctatacctgctgctcagttttgctgtgaactttgaactgctcttaaaaataatgtgtgtatgtgtgtatatatacatacatatacatgtttgtgtgtatgcatatctgatcataagaaacaatacatagtttcacttatttaaaaagtcaaatgtgcaaaactaagcaatatacaag

SEQ ID NO: 441597 - DNA, 230 bp, Homo sapiens
cgcgccgactcttcagcaccagtcgcggtggccaccactgtgcgcggagatggctgcgacgcgtgcgcaggtaaagtccatgcgcgccttgcctcccaccggcgccttcccgggcctctggtttttgtmcccgccagcggctccgactccatcgcgtcctcttccagtctagtgcttttttccagatctcgatcccaaactccctcctgccagaatctggacccgaatcc

SEQ ID NO: 441598 - DNA, 194 bp, Homo sapiens
gaagtgagtctcttataggtggcatatatttggttcttgttwtactatccattcagccactctgtggcttttgtttcactaatttggtccactgatatttaaagtaactattgataggcattttgtaggttttttgttcttttatttctctcttgctgtgcatgatttgattactttgattattttctgtagtg

SEQ ID NO: 441599 - DNA, 194 bp, Homo sapiens
gaagtgagtctcttataggtggcatatatttggttcttgttttactatccattcagccactctgtgkcttttgtttcactaatttggtccactgatatttaaagtaactattgataggcattttgtaggttttttgttcttttatttctctcttgctgtgcatgatttgattactttgattattttctgtagtg

SEQ ID NO: 441600 - DNA, 583 bp, Homo sapiens
ctcgccacctggactattgtaatggtcctgaattattgctaattagatgtgcagaaaatactattttatgttcatatctggataaagtacccatgagggttttgactaatgtatrgaggagaagaatcctttttaaggatttagatgtgattttactgagttgcagatgtcttcttccccacagtaccttgggggactgaatacaggtgtggaggccacccagcttgtatctgtgtttactgtccttctctgattggaagcctccccgtcttattccattagactttgctactgttctcccacttagctgacctgtcacctcttgcctgagagtctcagggttagtaatggatttcatgactgtacactttagtaatgaagaactccattatcactggaaggggagtgatccttctgtggtgtctgagccaagacaggacaacatggaagcccagcacgtcaaggtccaggagcgtgttcagtggctgggcctgggggcaggaggaagagaagagacagatgcagggacagcccccccccatcctgcccccaccatgattactcatccttctttgtagttacg

SEQ ID NO: 441601 - DNA, 633 bp, Homo sapiens
gtttcaccatgttgtcgaggatggtttcaatctcctgaattcatgatcctcctgcctcggcctctcaaactgctgggattacaggcgtgaaccaccttgcctggcctatacataatttttaaaacagatacagaatatatagatagcttaacaattataaaattgtatttatcaagtaggtcacgaggtaaacattttacgctatgcaaaagggagcaaacctccgaatttgtcatgcagggtcactagtggaactcacagcaacaggtctgataaagcagaggagggaaccgggcttccgtgtgctttagagagagtgaaacatgaggagtcacaggcagagaaaactgtttttcagaaagaaaagaaaggggacatgacagcccagcagtagggtgaagagggcctctccgtgggtgccgctggcttgagctgctgtaagtggctgtgccgggaacagaggatctgtataggagaatggggaagggagtgctggaaccgggggtgggcaggagcagcagtctggagaccagaatgacctagggtttcctctcatgctcccattcccagtgtttcaygtgtgtaaagtagcaagcatgcatatactacttagaggcatctacacttaacata

SEQ ID NO: 441602 - DNA, 577 bp, Homo sapiens
aacctccaaactttgcagcgagcagagattgcaccactgcacttcagcctgggtgacagagcaagactcggtctcaaaaaaaaaaaaaaaaaaaaaaaaaaaaaaggaaaggaaagaaaagaaaagaacctctaaaagtagccaacagctggagacagacatccatcctaagaactacggagcaagtaaatgatatgatgaagcagtccgcttctgccaaagatcctgaaacaagattcactccgattccccttctttgtctctgacttcaattttgggtctacktattctgctactactcctgtgtcctctacaacgtcccatctttatcctagtgatgtgtcctacttacaacatatatactccatctccagcctcagcagccctgtcatgattcccctgtttcctccttatcttaccctatcccgtgctttcctctcatgaccgtaattccctcggtctcttagctgacaaagtagccaatgaaattaaccaaagtaattgccgggtctatgcccattcccactctatcctaaaactcgtattcccttaataattgtctcccttatgctttaga

SEQ ID NO: 441603 - DNA, 577 bp, Homo sapiens
aacctccaaactttgcagcgagcagagattgcaccactgcacttcagcctgggtgacagagcaagactcggtctcaaaaaaaaaaaaaaaaaaaaaaaaaaaaaaggaaaggaaagaaaagaaaagaacctctaaaagtagccaacagctggagacagacatccatcctaagaactacggagcaagtaaatgatatgatgaagcagtccgcttctgccaaagatcctgaaacaagattcactccgattccccttctttgtctctgacttcaattttgggtctactyattctgctactactcctgtgtcctctacaacgtcccatctttatcctagtgatgtgtcctacttacaacatatatactccatctccagcctcagcagccctgtcatgattcccctgtttcctccttatcttaccctatcccgtgctttcctctcatgaccgtaattccctcggtctcttagctgacaaagtagccaatgaaattaaccaaagtaattgccgggtctatgcccattcccactctatcctaaaactcgtattcccttaataattgtctcccttatgctttaga

SEQ ID NO: 441604 - DNA, 573 bp, Homo sapiens
aactaccgaactactaaatatgtgtatcaccctaggaaatgaaagacatctcttcaactgcttttgtgtcttgacttttttcccaaaggaagacctatattttgcttcatttctttctactctacatttctttttactctgcttgcatttagtttaaaaaaaaagctctctgttggtgatttctaatctgttttaaggtaaataattgtactgtccaattagagactgagataactcatgaattatcacacaggttgttctcctgtacaatatatatgattttgagtactaatattacacagtgaattcagaattgtgtgtytgtatatacataccatagtcttataaataacttcaacttgcaataattaacttgcagttaattcttacagtagcatgagtttgggcctcttaaaaaaagaactaaaaccaactccctgcctgagaatagaaaacacacacacacacacacatacacacacacacacacacacacacagaccaaattgaataatcttgttttctcacttacagttgtgggcattcatttatggagttcttggcagctatgtt

SEQ ID NO: 441605 - DNA, 573 bp, Homo sapiens
aactaccgaactactaaatatgtgtatcaccctaggaaatgaaagacatctcttcaactgcttttgtgtcttgacttttttcccaaaggaagacctatattttgcttcatttctttctactctacatttctttttactctgcttgcatttagtttaaaaaaaaagctctctgttggtgatttctaatctgttttaaggtaaataattgtactgtccaattagagactgagataactcatgaattatcacacaggttgttctcctgtacaatatatatgattttgagtactaatattacacagtgaattcagaattgtgtgtttgyatatacataccatagtcttataaataacttcaacttgcaataattaacttgcagttaattcttacagtagcatgagtttgggcctcttaaaaaaagaactaaaaccaactccctgcctgagaatagaaaacacacacacacacacacatacacacacacacacacacacacacagaccaaattgaataatcttgttttctcacttacagttgtgggcattcatttatggagttcttggcagctatgtt

SEQ ID NO: 441606 - DNA, 573 bp, Homo sapiens
aactaccgaactactaaatatgtgtatcaccctaggaaatgaaagacatctcttcaactgcttttgtgtcttgacttttttcccaaaggaagacctatattttgcttcatttctttctactctacatttctttttactctgcttgcatttagtttaaaaaaaaagctctctgttggtgatttctaatctgttttaaggtaaataattgtactgtccaattagagactgagataactcatgaattatcacacaggttgttctcctgtacaatatatatgattttgagtactaatattacacagtgaattcagaattgtgtgtttgtatatacataccatagtcttataaataacttcaacttgcaataattaacttgcagttaattcttacagtagcatgagtttgggcctcttaaaaaaagaactaaaaccaactccctgcctgagaatagaaaacacacacacacacacacayacacacacacacacacacacacacagaccaaattgaataatcttgttttctcacttacagttgtgggcattcatttatggagttcttggcagctatgtt

SEQ ID NO: 441607 - DNA, 573 bp, Homo sapiens
aactaccgaactactaaatatgtgtatcaccctaggaaatgaaagacatctcttcaactgcttttgtgtcttgacttttttcccaaaggaagacctatattttgcttcatttctttctactctacatttctttttactctgcttgcatttagtttaaaaaaaaagctctctgttggtgatttctaatctgttttaaggtaaataattgtactgtccaattagagactgagataactcatgaattatcacacaggttgttctcctgtacaatatatatgattttgagtactaatattacacagtgaattcagaattgtgtgtttgtatatacataccatagtcttataaataacttcaacttgcaataattaacttgcagttaattcttacagtagcatgagtttgggcctcttaaaaaaagaactaaaaccaactccctgcctgagaatagaaaacacacacacacacacacatacacacacacacacacacacacacagaccaaattgaataatcttgttttctcacttacarttgtgggcattcatttatggagttcttggcagctatgtt

SEQ ID NO: 441608 - DNA, 538 bp, Homo sapiens
gctttcctctcatgaccgtaattccctcggtctcttagctgacaaagtagccaatgaaattaaccaaagtaattgccgggtctatgcccattcccactctatcctaaaactcgtattcccttaataattgtctcccttatgctttagatggccttggcagaaaacattacaaatatacagccatttaggtctcccttttagaaagatattgggttatttcttaaaagcccttgtgactgggagtatgatgtggcctctttaacctaagaaacgtggtgttttactagaaatcagtctaataaatatagtcaccctgtggaacacagtaaatgctctgtgtccttgtgaaaagatgaaacctattttcaagaaacagacattctttgtaagrgccaaactcccattaaggacagcattgtctgcaatacccacgcaataccagtatcataggaaattattttaccccggatcaatattttggtgaactgaaagactgggcaaaaaattgctggctaaatggtaccaaagtacccagcca

SEQ ID NO: 441609 - DNA, 558 bp, Homo sapiens
aattcggttcttttacatttgctaagcgttgttttatgtccaattatgtggctgattttagagtatgtgccatgtggtgatgagaagaatgtatattctgttgtttttgagtagagagttctgtagaagtcaatcagatacatttgatctaatgttgagttcaggtcctgaatatgttttttaattttctgccttggtgatctgtctaataactgttagtggagtgttgaaatctcccactgttattgtgtgagactccgtgtctctttgtaagtctctaagaacttgctttatgaatctgggtgctcctgtattgggtgcacatatatttaggatagttagatcttcttgttgaattgaactctttaccattatgtaatgctctcctttgtcttttttgatcttgcacttggcttcttaaaaacatccttaatggcaatattctttgtctcttaagtacaccactattcttctttttttttttcttttccagatagagtctcactctgtcaccaggctggagwacaatggcactatctctactcactgcaacctccc

SEQ ID NO: 441610 - DNA, 599 bp, Homo sapiens
tcactgtgtgcctggaaaagccacaggcactcaatgccagcccatggaagcagtcactggggcagtaccctgcagagccatggggcagagctgcccaaggccttgggaccccaccccttgcatcagtgtggcctggatgcacaccatgagcagtaatgggaaaattcttattgaaaaaggcaagaacaaatcarcccagtgagatgaattacatgttgcactccttcctgggatggaagaattgaacaatgataggatcttctacatttcggtttttactttactgactcatgaacagtggccaatggcctggccatgtaaccaggaagaggggcaatggcaaactgggctgtgaaaggatccccacatggagcacagcactgcaggaatttaaagggcacattaaagtaggtcatgtcaatgcccacctgaagaacccctcccaggatcagtgatcagatctggtaggtggatatcctggtgaccttgaggtggtcacctgggcttaatgaaggagtggacacaggggagctgcagccgtgcagggatgggctgctcagcaacaagtccctcctccaccctcagaggcaccaaatgcc

SEQ ID NO: 441611 - DNA, 588 bp, Homo sapiens
agaactctggactctcagtcccaaattctactagcagaactcctttttcatattcttcatacactgggggctttgctgagagtttgctggactgaatataggaagaacaacagacttctgaagttagtcacatctgtccttgattcaattatacaaacatgaggattctcaaagttatgatttttttcctagaaatactttattttcaggaaatatttatttagcrttgatgacttgagtattaatctcaaggcaaggaaatgagggaaatgacctcctgatgtctttcccatgaatctgtaacttggtggtcagcttcttcccaagttatttttcttgtggcacctcagtgattttattagtttcaccacaagtactcccagcaagggaaatcagtgatcccaaaggcaccaggctggagttttcccgcataaagatcactctttgaagcagctccttcctagaaatttgttatgtttacctttgccaatcatctatgattagtgtagtaattattctgtttttgctatcttttatttttgaaattcactgaaggcttcactgatcaacgattaagtcatgtgcttc

SEQ ID NO: 441612 - DNA, 588 bp, Homo sapiens
agaactctggactctcagtcccaaattctactagcagaactcctttttcatattcttcatacactgggggctttgctgagagtttgctggactgaatataggaagaacaacagacttctgaagttagtcacatctgtccttgattcaattatacaaacatgaggattctcaaagttatgatttttttcctagaaatactttattttcaggaaatatttatttagcgttgatgacttgagtattaatctcaaggcaaggaaatgagggaaatgacctcctgatgtctttcccatgaatctgtaacttggtggtcagcttcttcccaagttatttttcttgtggcacctcagtgattttattagtttcaccacaagtactcccagcaagggaaatcagtgatcccaaaggcaccaggctggagttttcccgcataaagatcactctttgaagcagctccttcctagaaatttgttatgtttacctttgccaatcatctatgattagtgtagtaattattctgtttttgctatcttttatttttgawattcactgaaggcttcactgatcaacgattaagtcatgtgcttc

SEQ ID NO: 441613 - DNA, 588 bp, Homo sapiens
agaactctggactctcagtcccaaattctactagcagaactcctttttcatattcttcatacactgggggctttgctgagagtttgctggactgaatataggaagaacaacagacttctgaagttagtcacatctgtccttgattcaattatacaaacatgaggattctcaaagttatgatttttttcctagaaatactttattttcaggaaatatttatttagcgttgatgacttgagtattaatctcaaggcaaggaaatgagggaaatgacctcctgatgtctttcccatgaatctgtaacttggtggtcagcttcttcccaagttatttttcttgtggcacctcagtgattttattagtttcaccacaagtactcccagcaagggaaatcagtgatcccaaaggcaccaggctggagttttcccgcataaagatcactctttgaagcagctccttcctagaaatttgttatgtttacctttgccaatcatctatgattagtgtagtaattattctgtttttgctatcttttatttttgaaaytcactgaaggcttcactgatcaacgattaagtcatgtgcttc

SEQ ID NO: 441614 - DNA, 587 bp, Homo sapiens
ctgttttttgatacaagtgtgaaattcttaaagaaaatggcaaacatcactaacaaccattacaattctaatagctaacttttctgagccattacttggaaccatgcactgtttaaaatgcctcacttggccaggcacggtggctcatgcctgtaatcccagcactctggtaggccgaggcaggcagaacacgaggtcaggagatygagaccatcctggacaacatggtgaaactccgtatctattaaaaatacaaaaattagcctagtgtggtggtctgtgcctatagtcccagctactcagaaggctgaggcaggagaatcgcttgaaccggggagttggaggttgcagtgagccaagatcgcgccacaggactccagcctagcgacagagccagactccgtctcaaaacaaacaaaaaacaaaaaaaattcctcactcatctcactcatgtaatcatgacaataacattaattgtattatccctacattacagatgacaggtgacaaaaatatgcagagaggggttaaactgcataacattactcagagaatgcattctttttattccataggttttttgtatt

SEQ ID NO: 441615 - DNA, 354 bp, Homo sapiens
aaataaaaccttacaaatgttcactaataaaatgctacaacatatcctataccatatgccaatttaagataggttttactccartgagttaggttatctgtaaataacacatggtcaaatcccatatgtctgtgtagcaaatactttctcagtgtcctgttgtttttaatccagcatgttccaccagcctggcctaggctagggctggcacctagatagtcattagggtaagtgtgtgtttgttttggggtgtgggtttcttttggggtgtgtgtgtgtgtgtgtgtgtgtgtgtgtctgtgtgtgtaagactcattggctctactccaggccccctctatcaaaatttctgga

SEQ ID NO: 441616 - DNA, 585 bp, Homo sapiens
tccccacttttcattccaagtgtgacacaggtttaaataataaacmgacaaaaagtttagataaattcatgaattattgaaccagatgataaaaaatagggaagctatttagggcatagtctctagtgtgtaagggtgacatcctaaataataaatttatgctattgttgacaatattgctgacaaggctaaatggtcaatgtgcttgacatattgcctggtttttcatgttctattgcatgagctgattctctctctctcagttatttatattttcgaactctgccattatgttatcatggacattatgccaacaatttgatgcatctatgtatatgctttaaatctctgggaataaatttactgagtgctacttatgtgaacaaacttctcttaagcacaaatggaaatccacaaagaaacacagcctcttctatttgttttatgtgaggcaacagatacactgtagacaaaaagaccaagtataattaactcatattggtaactaacaatatctgcatattacatatttttctattatgttttctgagcaacttcgtggcttctgatttggaggggtaggat

SEQ ID NO: 441617 - DNA, 594 bp, Homo sapiens
ataactgatcaagaaagacactctaagcttgtgcatcagcattctctttttatctaaaagaaaatatattaaatacagggaggaatggcaggagtaaagagacttgaaggaaaagaaaatattgactttttaatgatattttacaatgctaagatctttagaaaccaactattccatatgtcctttaaatattagtttggtgcaaaggtaattacagtttttgtcataaaagtaatggcaaaactacaattacttttgcaccaacctaactgatacattcattccattttggaggtattgcaaatatgctgaatcaatgaatttcttcagtatttttcattgtattagtacaaatttaacctaatagtattcttctgcatgttatttccctttgtgcttcctttaatgcaatgaagttgtatttaccaaatagagtgccctaaaagggcaaggcttgtctgtgaattgagcctagcatagaattggctctcagtgaagatctgytgaacgttacatgaatgcatcaacgtcataatccttcatgtgcttgtaagcaattagtaaaattttctctggcctattcaggcctgtgtt

SEQ ID NO: 441618 - DNA, 494 bp, Homo sapiens
tcaaaatatatggacgtgtttgctgtttctattaggttttaacttctggtatcagaaaccagggctgtttttcttaatttgtgtcctaaaactacagtagggttgtatgcattgtgataatgcttaataaatatataaaaagattaatatccattcatttacattttcttaatcaaacccaatttctggaggagtagctgtgaaactctcaactggacgagctctgactagtgttaagtatagkatattgggaaaagggcttctatatgcaacatatatgtgaggcaaatgagaaatattagctgggctacattaaatcccaatgacatgaatagaaattttattatccaggtagcaaaaatgaagtcaaaaaaataaataagagaatgaagtaaaggtatggggcaaaacaattagctttttctttaagtcaatattttagaaaatagcttttgaaggcccaatcacacagaaaattgacactttgacttttc

SEQ ID NO: 441619 - DNA, 494 bp, Homo sapiens
tcaaaatatatggacgtgtttgctgtttctattaggttttaacttctggtatcagaaaccagggctgtttttcttaatttgtgtcctaaaactacagtagggttgtatgcattgtgataatgcttaataaatatataaaaagattaatatccattcatttacattttcttaatcaaacccaatttctggaggagtagctgtgaaactctcaactggacgagctctgactagtgttaagtataggatattgggaaaagggcttctatatgcaacatatatgtgaggcaaatgagaaatattagctgggctacattaaatcccaatgacatgaatagaaattttattatccaggtagcaaaaatgaagtcaaaaaaataaataagagaatgaagtraaggtatggggcaaaacaattagctttttctttaagtcaatattttagaaaatagcttttgaaggcccaatcacacagaaaattgacactttgacttttc

SEQ ID NO: 441620 - DNA, 408 bp, Homo sapiens
tgggttcaaattccagttctgctacttatcaggtataagaatttgggcaaatttcttagtttctctgtgcttcagtttcctgatctgtaaaactgggataacaagactacctgcctcaatctgyggttatgagtaaatgagttaatacataagagcaatgcaataatccttggcatgtggtatgcgttcaataaacattagctattattattatagtaaattagaaatttaattctagagaataaaaagctgaactcaaatatgtaactatttattcgatacaggcacattttccacaaaataaaaaaccgtcagtttgcacttgccttatataatgactattctggtgtttgtgtgtatctcttgtgggtcgggggtcttgggctgagtaaataatcacattaaaaa

SEQ ID NO: 441621 - DNA, 481 bp, Homo sapiens
ctaattctaccaaatttccagtggttaaagaatgagtgatgtgggaagagtaatttgaggcctgttacttagggggaaataggtcctaattttaaagaatagttgacatgaacttccaaaaagctacacatatttcacactagctgtgyattatgtggtgtctttatttcaaatttaagatacctttttatgcaaatatactacataagtctagctaataaaccacattaggcctgctcaatctgagggttaaaaaaagttgtgtatgtttcaattctaccaaatattgctgcttactcttcgtttaattgagcctctctaaaaatcatttggataatgtttgtgtgtttgtttgtttgtttgaacagaaagaatgcaatgaagattgtaacttcaaagaactaattctggaaaaccattacaacacatatgcagcagctaaatggacacacaatggaggggaaatgtttgttgccttaaa

SEQ ID NO: 441622 - DNA, 481 bp, Homo sapiens
ctaattctaccaaatttccagtggttaaagaatgagtgatgtgggaagagtaatttgaggcctgttacttagggggaaataggtcctaattttaaagaatagttgacatgaacttccaaaaagctacacatatttcacactagctgtgcattatgtggtgtytttatttcaaatttaagatacctttttatgcaaatatactacataagtctagctaataaaccacattaggcctgctcaatctgagggttaaaaaaagttgtgtatgtttcaattctaccaaatattgctgcttactcttcgtttaattgagcctctctaaaaatcatttggataatgtttgtgtgtttgtttgtttgtttgaacagaaagaatgcaatgaagattgtaacttcaaagaactaattctggaaaaccattacaacacatatgcagcagctaaatggacacacaatggaggggaaatgtttgttgccttaaa

SEQ ID NO: 441623 - DNA, 481 bp, Homo sapiens
ctaattctaccaaatttccagtggttaaagaatgagtgatgtgggaagagtaatttgaggcctgttacttagggggaaataggtcctaattttaaagaatagttgacatgaacttccaaaaagctacacatatttcacactagctgtgcattatgtggtgtctttatttcaaatttaagatacctttttatgcaaatatactacataagtmtagctaataaaccacattaggcctgctcaatctgagggttaaaaaaagttgtgtatgtttcaattctaccaaatattgctgcttactcttcgtttaattgagcctctctaaaaatcatttggataatgtttgtgtgtttgtttgtttgtttgaacagaaagaatgcaatgaagattgtaacttcaaagaactaattctggaaaaccattacaacacatatgcagcagctaaatggacacacaatggaggggaaatgtttgttgccttaaa

SEQ ID NO: 441624 - DNA, 481 bp, Homo sapiens
ctaattctaccaaatttccagtggttaaagaatgagtgatgtgggaagagtaatttgaggcctgttacttagggggaaataggtcctaattttaaagaatagttgacatgaacttccaaaaagctacacatatttcacactagctgtgcattatgtggtgtctttatttcaaatttaagatacctttttatgcaaatatactacataagtctagctaataaaccacattaggcctgctcaatctgagggttaaaaaaagttgtgtatgtttcaattctaccaaatattgctgcttactcttcgtttaattgagcctctctaaaaatcatttggataatgtttgtgtgtttgtttgtttgtttkaacagaaagaatgcaatgaagattgtaacttcaaagaactaattctggaaaaccattacaacacatatgcagcagctaaatggacacacaatggaggggaaatgtttgttgccttaaa

SEQ ID NO: 441625 - DNA, 507 bp, Homo sapiens
ggaaggcagacaaaaatgagaacctgaagcaatgcttacagtagatgtctcacacagaacaatacaaayatgtaaaaaatctttcaccacatattcttgccaattaattggatcatataagtaaaatcattacaaatataagtatttacaggatttaaaagttagaatatatttgaatgcataggtagaaaagtatcatattttaaaactatgtatatttaaatttagtaattttctaatctctagaaatctctgctgttcaaaaggtggcagcactgaaagttgttttcctgttagatggcaagagcacaatgcccaaaacagaagatacagttaggaataaggggccttgaatgtcatgaaggcttgaggtcagcttacagataacaggattattaaaaagatgaatttccacttccaaagtctttcattggcagatcttggtagcactttatatgttcaccaatgggaggtcaacatttatctaatttaaaagctatgctaacc

SEQ ID NO: 441626 - DNA, 507 bp, Homo sapiens
ggaaggcagacaaaaatgagaacctgaagcaatgcttacagtagatgtctcacacagaacaatacaaacatgtaaaaaatctttcaccacatattcttgccaattaattggatcatataagtaaaatcattacaaatataagtatttacaggatttwaaagttagaatatatttgaatgcataggtagaaaagtatcatattttaaaactatgtatatttaaatttagtaattttctaatctctagaaatctctgctgttcaaaaggtggcagcactgaaagttgttttcctgttagatggcaagagcacaatgcccaaaacagaagatacagttaggaataaggggccttgaatgtcatgaaggcttgaggtcagcttacagataacaggattattaaaaagatgaatttccacttccaaagtctttcattggcagatcttggtagcactttatatgttcaccaatgggaggtcaacatttatctaatttaaaagctatgctaacc

SEQ ID NO: 441627 - DNA, 527 bp, Homo sapiens
gatgtatggttttatattcccaccarcaggaatataagcattccaaacatgaattttgtgggaacatatttcaaaccatagcagtcaccaaaagctcaagcaacaaaacaaaaaatagatcagttcaatttcattaaaaagttctctgtttcaaagtcgacatggtttggctgtgtccccacctaaatctcatcttgagttgtaactcccagaattctcatgtgttgtcggagaaacccagtggaaggtgactgaataatgggggcaggcctttcttgtgctattctcatgatagtgaatgagtctcaggagatctgatggttttaaaaatgagagtttccctgcacaagctctctctttgcctgctgccatccatgtaagacgtgacttgctcctccttgcctttcatctttcaccatgattgtgtggtctccccagccacatggaactgtgagtccaataaaactccttcttttgtaaattgtccagtctcaggtatgtgtttatcagcagcatgaaaacagact

SEQ ID NO: 441628 - DNA, 527 bp, Homo sapiens
gatgtatggttttatattcccaccaacaggaatataagcattccaaacatgaattttgtgggaacatatttcaaaccatagcagtcaccaaaagctcaagcaacaaaacaaaaaatagatcagttcaatttcattaaaaagttctstgtttcaaagtcgacatggtttggctgtgtccccacctaaatctcatcttgagttgtaactcccagaattctcatgtgttgtcggagaaacccagtggaaggtgactgaataatgggggcaggcctttcttgtgctattctcatgatagtgaatgagtctcaggagatctgatggttttaaaaatgagagtttccctgcacaagctctctctttgcctgctgccatccatgtaagacgtgacttgctcctccttgcctttcatctttcaccatgattgtgtggtctccccagccacatggaactgtgagtccaataaaactccttcttttgtaaattgtccagtctcaggtatgtgtttatcagcagcatgaaaacagact

SEQ ID NO: 441629 - DNA, 563 bp, Homo sapiens
acctttaacttctcatgggagcataaattggaaaacagttcattttaacgtagtaaaaccaacagtatacaaatcttttgacacaattatttgaatgttgggtttataccttagagaaaatctaccttttatgtccaggagactcatacaagaaaaggacatctagttttgtaatagaaaaaaatggataaccccaatctaataaaatggaatgctcattatagtattatcctgtgatggaatactctaaatcaatgcacagaaagtacagacaaacatatcataagaatgaattttacaaattaaatattgaacyaaaaagcaatttcagaaaaatatattcagtgtgattccatttgtttaaactgaaaaatatgtgaaacaataatgctcaatgtcctttactaatgcatttattttggcaaaattataaagataagaaatgggactcattaacaggacagtgttaaggactctaaaaatacgggtagttttttattcttaggcaggtaatgtgtacatcagtgttcattttattatttcttacactgtcttcatgactt

SEQ ID NO: 441630 - DNA, 358 bp, Homo sapiens
acctacagtgacagacactgggtctttggtgtagtgcatgattttggtatgttttgaaaacagagaggattcatgacagcaacttgtccccagtcaaaagtaaaccccaaatagcagaacttctagagtcattgctattgccccagctagttgttacarttaaagctgagggatatagtataaaatactcagatgaggctcagggaaataaattggctgataaaggtgctaagctagcatcctcttccttggccgcctaagaaatccaggaagtctccaaaccttgtgactagatacctgggcttcatttcaaatacccacagtcctgctaggattatttaccctctttaaataaatt

SEQ ID NO: 441631 - DNA, 236 bp, Homo sapiens
tggattcgggtccagattctggcaggagggagtttgggatcgagatctggaaaaaagcactagactggaagaggacgcgatggagtcggagccgctggcggggacaaaaccagaggcggkggaaggcgccggtgggaggcaaggcacggatggactttacctgcgcacgcgtcgcagccatctccgcgcacagtggtggccaccgcgactggtgctgaagtgtcggcgcgtgccgg

SEQ ID NO: 441632 - DNA, 598 bp, Homo sapiens
acccagtcagtgcccttcagttaaagaccaccaggagcacacttgtaattacattgcagcaaggaatggggtactatgggtcatctcagtgggaggagttagagagaaactrttatacgatttgggctttaattggttgatttcggacaggatctcagaaagtgaagactttagattggatgctgtcagaaagcaggagcaatatgattattaagtattttctgggtggcatcaagaccttgttttttatctgcacttagacaacattataaagtgcccttgtttttgtttgcacttatcacggtctcagattaaccttctgaagttgatattctgtgagattgtttatgtccaacaggaaaacaaaatgtcctggccatgagcatcagactagcgtgtaataacattaaggcctgtgacccaaatattgacagaattgaagttagaaatagttctacagtaatagagtcttcaatactccatttaaaataatgcatagaagctggacatggtggctcatgcctttaatctcagctacctgggaggctgcggcaggtggattgcttgaggtcaggcgttcgagaccagcctgggcctt

SEQ ID NO: 441633 - DNA, 598 bp, Homo sapiens
acccagtcagtgcccttcagttaaagaccaccaggagcacacttgtaattacattgcagcaaggaatggggtactatgggtcatctcagtgggaggagttagagagaaactgttatacgatttgggctttaattggttgatttcggacaggatctcagaaagtgaagactttagattggatgctgtcagaaagcaggagcaatatgattattaagtattttstgggtggcatcaagaccttgttttttatctgcacttagacaacattataaagtgcccttgtttttgtttgcacttatcacggtctcagattaaccttctgaagttgatattctgtgagattgtttatgtccaacaggaaaacaaaatgtcctggccatgagcatcagactagcgtgtaataacattaaggcctgtgacccaaatattgacagaattgaagttagaaatagttctacagtaatagagtcttcaatactccatttaaaataatgcatagaagctggacatggtggctcatgcctttaatctcagctacctgggaggctgcggcaggtggattgcttgaggtcaggcgttcgagaccagcctgggcctt

SEQ ID NO: 441634 - DNA, 530 bp, Homo sapiens
tcaagcccagcctgggcaacatggggaaaccgtctctacaaaaaatacaaaaattagccggacatggtggtatacatctgtagtcccagctacttgggaggcaggagcgttgcttgagcctgggaggcagaggctgcagtgagccatgaccatgccgctgcattccagcctgggtgactgagcaagaccctgtctcaaataataataagaatcatcatcatccagggggcctttaattaacaatgaatcgttatctgattctaaaaaatattctccattgkaaaatacttactataatctgttattttctttgtaatctcaaactgtcttaaataattttaatatttcctccaatgttaaaatattgcacacttcctactttttgcctgttctaccacacacattctctcacatcattacatcagagaatattaagatcatcatatacagatgctctcatttagataagcctggcctaagacttgaggtcgcctgggtaaatgcaccttgttaaacttacaacaaatgtt

SEQ ID NO: 441635 - DNA, 601 bp, Homo sapiens
ataccatttaacttggctttttgaagtaaatatcaccagataaaagccagctggatctgaataataggatacttgaatgaatgtattagtgtttgaaaaagagagtacaaatcttctaaaaagattaatttccataaaaaagatagctcccagatctacaaaagaataaattcaaaaacataataaactctcagaaagaaaggtagattaaagtaaaagctgcagcaccttgttactgcagctgttgtgtagcaatgattctgtatcaattacattcggttggtcctgtagggctcttcaaagctttstgtgaaaagcctgaatgtggaatacatgtgacaccgtaagtaataactttagcgattaattttgatgcaacaccacatttattctgatcttactctcaatatttacagtttgagagaagctacaaaggtttagatgggaacggatgaatctactaacaacgctttttttcctccatttattaaagatgtggatatgaatttttctttgtcatgaaaatactgcagctttatcacaggacatagttgctgacatcatcatgtaaaaagacttgagttggccaatggactttgtt

SEQ ID NO: 441636 - DNA, 480 bp, Homo sapiens
atccaatgtgcaattgcagagctctgcttggtggcctgcgttctcagtttccttttatttgctttctcaaggtctccaagagtttttcctgaaatcataaaattaatcttttccttccaaatagacacatgtgttagaagaaaggaaatgactccarcataaactattttgtttctgcaggaatggttaaaattaaagaaagataagagtagggtgagctgaagaagataattttatctctttaactgcctggctttttttcccttcatatatttgttttgttttattggttgaggaatagaagaactaaggagtgataaatacccttgaaggtgacggctttattctcaaactcaagtccttaatcttacttgaaacttctacattcttgtaacgattacaagtttgagaaaatgaaaaacaatcatatgttttgagcatgtgaaatgtgttcaggtttgttgatcagggcattagtgt

SEQ ID NO: 441637 - DNA, 554 bp, Homo sapiens
gcaccaggtgaaagcaagaccaggctccctactaagaagtgcactctgcacagctggaaggcaatgagttcttctggggtcaaggatggagcaggtttatagcagcagctctgtttcttttctgtatttgccaagaatagtaaaggagacttctgagaagagaccatctaacctgaatcatgaatggaaaaaaaaaatcaagttttattcatagaatattaaggatacaaacacggtgtttcgaaaaatgtggttaagcctagataccagaatccaaagcaagttggaataattggttttcattaaattagtagagggttttagaatcaacgagcaggtttgattttaygcaagaaaccataaagtgctactccaagtttaggaggggaagcattgtcggaagagcaattgataaacatgattctcccccctctttatttactgcataattttgacataggcatataactggggagcttaagaagaaaaaggtgaagaaaaatgcagaaatatcaactactttctagaacgaaacactgtagtttagaatgtac

SEQ ID NO: 441638 - DNA, 554 bp, Homo sapiens
gcaccaggtgaaagcaagaccaggctccctactaagaagtgcactctgcacagctggaaggcaatgagttcttctggggtcaaggatggagcaggtttatagcagcagctctgtttcttttctgtatttgccaagaatagtaaaggagacttctgagaagagaccatctaacctgaatcatgaatggaaaaaaaaaatcaagttttattcatagaatattaaggatacaaacacggtgtttcgaaaaatgtggttaagcctagataccagaatccaaagcaagttggaataattggttttcattaaattagtagagggttttagaatcaacgagcaggtttgattttacgcaagaaaccataaagtgctactccaagtttaggaggggaagcattgtcggaagagcaattgataaacatgattctcccccctctttatttactgyataattttgacataggcatataactggggagcttaagaagaaaaaggtgaagaaaaatgcagaaatatcaactactttctagaacgaaacactgtagtttagaatgtac

SEQ ID NO: 441639 - DNA, 562 bp, Homo sapiens
aacttctatctaagaggcctagggagtcatgccctacaaatcataraatctacttaaaaagtggtttttttttaaattaagcctgaatattgtggctcagtttccaatctgactctgttagagcatcataggaccacagacccctttatcttaacttaagcattcatttctacgaacttcaagtctttaaacaatagcttaactctctcaactgaaattgtcaatcaaagagtctctaaaatccacctatgactgtaaaagcccctggttcgagatgtcctgccttttcagatcaaaccaatgtatatctctcatgtattgatttatgattttcccggcaattcccgtttccctgaaatgtataaaattaaactataactcgatctcttcgggcgcactttcccaggacctcctgagactgtgtaacacgaggctgcagacactcacattggctcagaataaacctctttaagtatgttagcagtgcttggtttttcagtcatcacatatacgcatatatgaaaacaggtgaaatgtgaagcctaatgggatatttagtaaa

SEQ ID NO: 441640 - DNA, 562 bp, Homo sapiens
aacttctatctaagaggcctagggagtcatgccctacaaatcatagaatctacttaaaaagtgktttttttttaaattaagcctgaatattgtggctcagtttccaatctgactctgttagagcatcataggaccacagacccctttatcttaacttaagcattcatttctacgaacttcaagtctttaaacaatagcttaactctctcaactgaaattgtcaatcaaagagtctctaaaatccacctatgactgtaaaagcccctggttcgagatgtcctgccttttcagatcaaaccaatgtatatctctcatgtattgatttatgattttcccggcaattcccgtttccctgaaatgtataaaattaaactataactcgatctcttcgggcgcactttcccaggacctcctgagactgtgtaacacgaggctgcagacactcacattggctcagaataaacctctttaagtatgttagcagtgcttggtttttcagtcatcacatatacgcatatatgaaaacaggtgaaatgtgaagcctaatgggatatttagtaaa

SEQ ID NO: 441641 - DNA, 562 bp, Homo sapiens
aacttctatctaagaggcctagggagtcatgccctacaaatcatagaatctacttaaaaagtggtttttttttaaattaagcctgaatattgtggctcagtttccaatctgactctgttagagcatcataggaccacagacccctttatcttaacttaagcattcatttctacgaacttcaagtctttaaacaatagcttaactctctcaactgaaattgtcaatcaaagagtctctaaaatccacctatgactgtaaaagcccctggttcgagatgtcctgcyttttcagatcaaaccaatgtatatctctcatgtattgatttatgattttcccggcaattcccgtttccctgaaatgtataaaattaaactataactcgatctcttcgggcgcactttcccaggacctcctgagactgtgtaacacgaggctgcagacactcacattggctcagaataaacctctttaagtatgttagcagtgcttggtttttcagtcatcacatatacgcatatatgaaaacaggtgaaatgtgaagcctaatgggatatttagtaaa

SEQ ID NO: 441642 - DNA, 587 bp, Homo sapiens
gatatcctaaaaaaaatgttcaaaaaatgaacacttcattatccaatcccacacctcctcctatcattttgttaatctcagtcccattctattcccctcctttccagggtcaaataacaagatgaatcgttagtgtgacattctagttcatagagttacaaagacatagatttatccaaatttgtgtgcaactatgagaaacattgaacatattttaggttaaatttaaataagcaatatcatgccattaatatattttttcaactttcattatgtttttgagactcaaaactgtgttttaaggcttgattcatgtaaatctatttattcatttgaagtgctgaatggtattccattacacagcaatgttttatctcattyatgccttcctctattgcaacgttcagtttgtttcaaaatgtttgctattattaaatgttgcagtaaaatacttttatctctatactagatctttgaacacattattctatgtaactctcacaaaaatgttgcatagaattattatctccttttcatcataaaaaaacctgaaccttaaagagattgagtaattttcctaatattac

SEQ ID NO: 441643 - DNA, 574 bp, Homo sapiens
gtaacaatctgcacaatgacactgttatcttaatgttggcacacactgagataacaaccactatttctctgtcagagcacaaygattctgccctccaacttaagaaagaagttaggaggctatttaaacttcacgcttatggaaacaataagcacgttggtaggaggatttttatccattgtaggatgaggaaagaaaccctcatcacaaggagataggcagttccattccattccagtggaccaagagagctcagattttgctggcggttaatttctttgcttttttccatgagggaattagatgtacagaagtagatgcaaataccttgtagaaacttaaaaataataatattcataatcaccaagccataaaacccagtattttcccattccacttgctcaaatagtacaattaaaataattcccctatcttgtctggatgactatagtatctttccttttatttttttttctaaaggcgtctaattagcagaaagagggtctcaaacatctagctgacactgcatacctgcaactttaataggtcctttggaaaaatcaaggacagtgtc

SEQ ID NO: 441644 - DNA, 612 bp, Homo sapiens
gttcaatccacaggatttttgtaaaatgctattgcaattattttagactatccagattaaatatagaataaattgaagcttgtccccaaaactctaaacaagaattagggaaggtgaaataatgaagacttttgagaaaaaaattaaaggagataatcatatgtaagtttagaaggacaagttaataaggatccaggaatctagtatgtaaaccaaaaaataaaatgctagggacaaattattgattacaatcaaaataaatagtttaagtatagacagtatagattgaactatacacacaaaaaaactatgttatacaattatagacaattayatataaaatcaaggaatagttcatccaagggagatagttagacttaaaaggaaattgaattaacaatagcagcctgtgtgcctgatatcaggaagtatatgaaagtacaaagatccttgcattggagaaagaagaaagggaaatttaaaatcaatattaacatagtgttaattccaataatatcatagtattatggtagttaggtgagaaggtaagttagtaggcagatatgtaggctaaaaagataatttgtaagcatatatactatatttcccact

SEQ ID NO: 441645 - DNA, 619 bp, Homo sapiens
taggtagtgatccagtgaaggctgatacatttttatgtagaaaattacattttacttaaagtaatttggctccatatgtcaaacagatcagctttctaaagtttatattgcttgcaataaaatttttttaaatcatcctatcaactgtttcctcagatcacagcttcgtaaaagcacacaggattgtcagactgatttaccttcacaaaagtataattctcaagcacttgtgcaccagattacatttttcaaaagagggawatataaagaagaaaattaatttatggcttttttaaagtaaattttttaacttgtatcttaaagatttacattggatataataaatttctaataatgtatttaataaatggctcctcctgaaatataccaataaaataatacttagttattactattttgatatgaaattatagaacattaaaacataagggtactttacttgcttggagtagaagcaaaagcagttgtttttaagaatttagaaacatattgagcattcattcttaaagtttaatcaccacttaggtagagctatatgcaattacttttaaaaagcatttctatacacaatatattgcttataattaattcaatgaac

SEQ ID NO: 441646 - DNA, 540 bp, Homo sapiens
aggggaggatggttcttaggatactgaagtcggttaatgacaagtctaatgaaatacattttaagtttatgccacagcaatggtgagagacaatagttgattgaccccaaattttttttctgagtgagrcataatggttgttatactacataaatgtcattgttttctaaaataatctaatttgtaaattattttcatcattttttagagattgagttttttttttaaagggtactgtatctagcaatgtttctacagttgatacggcttagaaagtacaatatctgtctatataagaagacttcaaataatactgctaagaaacatttcttaataacctagctagatcctggaggagaagcttacttgatccatgtttgtatttaacataaatttatttcagaatcagacaatatctaaggtttctcgagtgtcactgaaactcatgtgataaaatttgttctcaataatgtgttgcttctaatgaaattaaaacaccttagttgaagaggattttagcaatcaccatcctaaccaaat

SEQ ID NO: 441647 - DNA, 469 bp, Homo sapiens
ctaaggtttctcgagtgtcactgaaactcatgtgataaaatttgttctcaataatgtgttgcttctaatgaaattaaaacaccttagttgaagaggattttagcaatcaccatcctaaccaaatacttttaaagatgagaaaaccaagatgcagaagaatcaagagactgactgaaaatcccaaatactgagttgagtgtgcctagatcagaactgtccagctacttagtcttctttaytattcttttaatgtttccctggtctcttttcagggagaaaaagaataatgtcccttggaatcaggaacttttgtagaccaaaaaacaaacaaataatcaatagtacagtatcaactgacagtttttttttttttttttttttttgagatggagtttcgatcttgttgcccaggctggcgtgcaaatggcgcgatctcggctcactgcaacctctgcttcccaggttcaag

SEQ ID NO: 441648 - DNA, 547 bp, Homo sapiens
tgcctttccagagtattctataagatggagaataatggagacaataaagaattgcttaggagggaatctcataattattactgaaacaaaatagataatgagttttattcagacataataagawagaagcagttcaatgtctataagaaaactatgtaaactggatttatcatttcatttgtgtaataccctttaacgtccaataaggggctgaagcaggacagagagaacgaatatttaatttaatacttcaacacactcctttatagtcctgaatcaactttaccaatcaataaaacacaatcttttgcaatgttccatctttataaaactcgccacaataataaatgaaaatttaagaggagcactctttcactgaaaaaaaaaaaaaaggtcatactaataaactaatagtaaccggaggacaaaaaaggaaaagctgcatttttgcctctgggaagaacaagaagtatttggtgtgtaggataattcagaatcaaaaatagaattcaaaaacaacatactcaaattctaaaataaacagtgt

SEQ ID NO: 441649 - DNA, 412 bp, Homo sapiens
ttaatctttatgacaacctaatggggtagtgctgttattacataaaatacaaatatattaaataatttgtctatggtcacactggttggaggtgataaagtcgaaatgcaaatccaagtagtcttttttcagaacacatgccttaaatcactaaaatatgctgcgtttcttcctttcactattacttctatttcagcaagtacgcccttttcaaaatctttataacattgtgaatttattaaataaaaactgagaaaaatattgattcattcaagagaattttgggttacataatgaatgatacctaagagaatcaattawtagaacatttcaacttattaggaattctccaatgacaagagaaattgatctcttgatttatattgtttattttactcagtcgtttaacgta

SEQ ID NO: 441650 - DNA, 564 bp, Homo sapiens
atttaattctttactgtttttgatatttcaatagagcagcaactattttttcatttaatagatctgatgatcattattacaaatcttccaaatcaattatttccctaaaattaaagtcccacattatcagatgtattcataaaaatcatgtcatcttaatgctatttataacttatagtaaagatattactactggagaataaatttttttcccaaaattctagttgtaagcacagaatttaatgttagtccactggaatctctaaagtcaccaatgacctcctgatttctaaaagtcaagtccacaaatccttttcaggtttatcttagtttaccastgagaggcatctgttcacatattctctcttcccatcttttacatctacttctcattttattttttgtcttccccttttattatttatcctccactattagttcccaaggagccatgttctgatgaggactctgggctggatcatgttatataccacacgaaccaaagaattctaagtttggaagtgacaggatcagatttgcatttaagaatttaacctggtatca

SEQ ID NO: 441651 - DNA, 592 bp, Homo sapiens
tcttttcactaagtgatcagttcttgagagagaattataagagaataaagggcagagttagtgggtcaaaggagaaagaggaaaggactcagggaaagctgagatatggtgaaaaactgccttttgggatttatacctctgcccatgacagggtagtggtaccagattagccctaccacaataaaaactataaaactgaacaaaattcacaaacactaggaaaagaaaaactactagggatctttgagctgaacaactaccagagttccttcattaaatamccctggtattcagaagggtatttatcttataaagtctatgtttagaagtaggactaatctatccctaaagtaagagttactccatacctatctttacaaattttaaaactaagccctgataaagaaggatgcttgctatttaatattattttggaagttttgtctcatacaaaatggctttaaaaataaaaataatgggtatttggggagggagggaggaataccttgaaaaaatcaggtgattcaacagtaaattgacttcatacctgaacaaaacttaacactcaaccaagaagaccgcaaaatccaaa

SEQ ID NO: 441652 - DNA, 588 bp, Homo sapiens
attttgtatatcttttgcaatctcacatcatattagaacaaggaagggtatagataagtgaattttaatttaatatctttttaagcagtgtttcccacgtgggaggcatatcagaatcatctatgtaatgtttaataaaaaacagatggtaggccccatgttggccctgatgaatcagaatcttcaggatagtggagcttaagtttatatatgtttcaaaagttccccacctgtttctgataatgtatctttaattttgaaccactgcgctaaactgtgttttctgtttctttttttacttttccaaggtaatgtgtgatgtaactctatggcaaatatttttctggaatgattcataccaggagttttctttaaatttatctgtttttatatttactttaaaaaattctgtgtgtttgtatgtatttgtatacatacatatatatacagacacatatatatttatatgcacatgtatatgcatatrtaatatttgattttttttcatagtttgactataaaaatgacccacagacacttattttgattttgtcctgttctagagagcgatccctttggtgttctgta

SEQ ID NO: 441653 - DNA, 561 bp, Homo sapiens
acagttcataaaaacgtttaccaaattaattcctgtggtcctttagatgatgttcctccccagctgggtacctcagtaatatcctttctttcagtgtacccaccaagtggttacattatcctgtcatctaatttgtgggttatgratttgatgagtcagagctacagactcctgaaactggagatgccagcaagtggtgtggtcagggctgttttggaaaagaatactggagacaagagtctatgggtttcttcatctttattttctagatcacaagcttaaggagcttgagaaccactgagatgcagtgtgtattttctacttagttttgttatgtcccttgccactagagaacagctacattcctttcaagtgttatttacttttttagtttgagaaaaacgttaaaaatccaaaaaatgtaaatacaaatatataacacatatccaaatttatcacccagatttaacaactgttcatatttttccaaatttgattctactcttccttttgcagaaataaaacactataattatagctgaggtctcctttaaccaccac

SEQ ID NO: 441654 - DNA, 502 bp, Homo sapiens
ctggcatttcagcaactttgtctattctggagagttggtggatgaattgacccaatgcagatttgatctgtaagcgaagtaatagccaacctttcacattacagcaattagagggttgtaagaatttggtcaagtgacagtttggaataggactacagccaacagctaatgggaccaagccaagttaagstctctcactaggggaatagaatcattcgtgacagcatgcttgtagcagtgagaaccagtccattgctcatcttttcttgcctgaactattgcagtagcctcctggttaagaactcagcctctgatctctcctttccatgccttacatgtttctactaataaagttgattacttgctcttctgctcagaaccctgcaatgactcccgttgccactatctgtttcacttgtcttccaccaacctttctctcccacgtatgcttaagccatatgagctgcctgtggttcccaggtatcacataccatatctatta

SEQ ID NO: 441655 - DNA, 437 bp, Homo sapiens
tcttcagtgttctatgttaattccttctgtagagatgagtaatgttgggcttcaggaggttaggagattgaccaaactgggaaaaggcctcagatttagtctggtgctgcttttcaacactgcagtagtcatagctcattttgtcttcttttttcttttttttaattttacattgacagtttataactgtataaatttatgggttctgtgaagagggagttgtgtggggaaaaaaaatgtatagtccaaaatgatgttataccttacgaatacaatgcaaaataattaaatcaagctaattaacatacccatcatgtcaaatagttagcattacttgtgatgagaacatttgaaatttacttagcaattttgaaataggcaacactattattaactagaaatattcaacatgttgwacaatagaaatcaaaaagaag

SEQ ID NO: 441656 - DNA, 597 bp, Homo sapiens
gcacatacaatttttaataaagaaaaagagtaagactggaaaaagacaaatgttaagtttcacctgaccctctaaaaaaaactgaaagaaaaagaacttgatawggaaaaacagaaaataaactctaaaatgtgatcacaacctacagagaaattctggaggagcaatggatgcacctgttcagcttacccttatctggcctccactcctgggtcctgaactctgtgaggaaaggacttcgtactattcagccttgaattcccagggttcacattgtgtctggaaaataatgggcgtgcgaaaaatgccgctgttgactgaatctctgcagtctataagtggcatattacaagaattcagcattaaactctcatgacaaacacctcaccttggcgcttaagttatgtaacccccctcctctttttgtgccaaatgggggtagtttcagaaagactcatttagtgagatttatctttcccaagcactgattctatactacagtttaagaagaaagcatttgaattttaagttttgatgcaatgtatattaagtgagggtctttaaacaggaacttgaatcagttcaggatatatatat

SEQ ID NO: 441657 - DNA, 597 bp, Homo sapiens
gcacatacaatttttaataaagaaaaagagtaagactggaaaaagacaaatgttaagtttcacctgaccctctaaaaaaaactgaaagaaaaagaacttgatatggaaaaacagaaaataaactctaaaatgtgatcacaacctacagagaaattctggaggagcaatggatgcacctgttcagcttacccttatctggcctccactcctgggtcctgaactctgtgaggaaagracttcgtactattcagccttgaattcccagggttcacattgtgtctggaaaataatgggcgtgcgaaaaatgccgctgttgactgaatctctgcagtctataagtggcatattacaagaattcagcattaaactctcatgacaaacacctcaccttggcgcttaagttatgtaacccccctcctctttttgtgccaaatgggggtagtttcagaaagactcatttagtgagatttatctttcccaagcactgattctatactacagtttaagaagaaagcatttgaattttaagttttgatgcaatgtatattaagtgagggtctttaaacaggaacttgaatcagttcaggatatatatat

SEQ ID NO: 441658 - DNA, 597 bp, Homo sapiens
gcacatacaatttttaataaagaaaaagagtaagactggaaaaagacaaatgttaagtttcacctgaccctctaaaaaaaactgaaagaaaaagaacttgatatggaaaaacagaaaataaactctaaaatgtgatcacaacctacagagaaattctggaggagcaatggatgcacctgttcagcttacccttatctggcctccactcctgggtcctgaactctgtgaggaaaggacttcgtactattcagccttgaattcccagggttcacattgtgtctggaaaataatgggcgtgcgaaaaatgccrctgttgactgaatctctgcagtctataagtggcatattacaagaattcagcattaaactctcatgacaaacacctcaccttggcgcttaagttatgtaacccccctcctctttttgtgccaaatgggggtagtttcagaaagactcatttagtgagatttatctttcccaagcactgattctatactacagtttaagaagaaagcatttgaattttaagttttgatgcaatgtatattaagtgagggtctttaaacaggaacttgaatcagttcaggatatatatat

SEQ ID NO: 441659 - DNA, 597 bp, Homo sapiens
gcacatacaatttttaataaagaaaaagagtaagactggaaaaagacaaatgttaagtttcacctgaccctctaaaaaaaactgaaagaaaaagaacttgatatggaaaaacagaaaataaactctaaaatgtgatcacaacctacagagaaattctggaggagcaatggatgcacctgttcagcttacccttatctggcctccactcctgggtcctgaactctgtgaggaaaggacttcgtactattcagccttgaattcccagggttcacattgtgtctggaaaataatgggcgtgcgaaaaatgccgctgttgactgaatctctgcagtctataagtggcatattacaagaattcagcattaaactctcatgacaaacacctcaccttggcgcttaagttatgtaacccccctcytctttttgtgccaaatgggggtagtttcagaaagactcatttagtgagatttatctttcccaagcactgattctatactacagtttaagaagaaagcatttgaattttaagttttgatgcaatgtatattaagtgagggtctttaaacaggaacttgaatcagttcaggatatatatat

SEQ ID NO: 441660 - DNA, 646 bp, Homo sapiens
ttcctttttttggctgaatagtactccattgtggatatgtaccatattttcatattttctttattcattcatctgctgatagacaaggttaatttggtgtcttggttatttgtagaaagtgctgcaaaaaaccaaaaccaaaacaaaacaatgggaatggagatatctcttcgacacactgatttcattttctttggatatatagccagtagtgggattgctggataatatggttgtgatggttaatattgagtgtcaacttgattggattgaaggaaccaaagtattgttcctggtgtgtctgtgagggtgttgccaaaggagattaacatttgrgtcaagggactgagagaggcagcctcgccctcaatctgggtgggcaccatctaatcagctgccagtgcagctaaaataaagcagacaggagaaggtggaatgagcagactcactgagttttctggtcttcatctttctcccatgctggatgcttcctgcccttgaaaatcagactcaaagttcttcagcttttggactcttggacttacaccagtgatttgccaggggctctcaggcctttggccacagactgaaggctgcactgttggcttccctactttggggtgtggggacttggactggcgttttt

SEQ ID NO: 441661 - DNA, 646 bp, Homo sapiens
ttcctttttttggctgaatagtactccattgtggatatgtaccatattttcatattttctttattcattcatctgctgatagacaaggttaatttggtgtcttggttatttgtagaaagtgctgcaaaaaaccaaaaccaaaacaaaacaatgggaatggagatatctcttcgacacactgatttcattttctttggatatatagccagtagtgggattgctggataatatggttgtgatggttaatattgagtgtcaacttgattggattgaaggaaccaaagtattgttcctggtgtgtctgtgagggtgttgccaaaggagattaacatttgagtcaagggactgagagaggcagcctcrccctcaatctgggtgggcaccatctaatcagctgccagtgcagctaaaataaagcagacaggagaaggtggaatgagcagactcactgagttttctggtcttcatctttctcccatgctggatgcttcctgcccttgaaaatcagactcaaagttcttcagcttttggactcttggacttacaccagtgatttgccaggggctctcaggcctttggccacagactgaaggctgcactgttggcttccctactttggggtgtggggacttggactggcgttttt

SEQ ID NO: 441662 - DNA, 536 bp, Homo sapiens
gttttctgcatgttttattactgttgtgatgctcattttctccattactgcctcctttgtggttagttgattttttttttcacaccgttttgatgccctgcttgctgagttctgtgtatactttttaaacacagtctcagggattgccagggggattatatttaccatcttaagtttgtagtgatatggttagaacggacacctatttaacttcaatagcaaacaaaaactcttcttctatacagctctatccccttttatgttattgttattgttacaaattatatcttcatatattgtgtgcctaacataaaatataaagatactgtgaaccctgaaaatctgagasaggtcttagttaatttagaaagtttattttgccaagattgaggatgtatgcccatgacacaacctcaggcggtcctgatgacatgtgcccaaggtattaggggcacagcttggttttatacattctagggagacatgagacttcaataaatgtgtgtaagatgtagattggttcagtccagaaaggt

SEQ ID NO: 441663 - DNA, 595 bp, Homo sapiens
aatcacaaatgaagccaggagaataaaagaatttaaacaacaaaatgcagattatgatagttgcttgggtgtaaaagactrtagaaaactcaagcgatgatggatagtttataataaactaaaaattgagaaccctagggcaggattctagttcttcctttaaccagctgagtaacctgaggcacatcccagtgaggtctttctggctgtttccttgtatagaaaatgaatgggatagacttcatcagtgacttccaaactgggttccagggagattaggcattaggaagcagttcatggggataaagggagaattgatggattttgcatatatttgcaatatgattctgctatgttaaacatttaaaatcattgcattagatcatctctagtttttttctgataaaaaaatattatttgtaattttacgaagtatatagccctaatttaggagagaactgggaattagaaaacacagattccaggccggctcttttgtttatagccctgagattttaataatgcttatcattatctctgccttttttgtcttcatctacaaaagggagctagtaataattctctatgcacttct

SEQ ID NO: 441664 - DNA, 564 bp, Homo sapiens
ctggtaacttacccatacgattttttaagtgcttgaaaagaattccactaacaaactaaatactgaactgtgaagtaattttctgatttatattttcaacttattgctataaaaaataagcaatcacaaatgaagccaggagaataaaagaatttaaacaacaaaatgcagattatgatagttgcttgggtgtaaaagactatagaaaactcaarcgatgatggatagtttataataaactaaaaattgagaaccctagggcaggattctagttcttcctttaaccagctgagtaacctgaggcacatcccagtgaggtctttctggctgtttccttgtatagaaaatgaatgggatagacttcatcagtgacttccaaactgggttccagggagattaggcattaggaagcagttcatggggataaagggagaattgatggattttgcatatatttgcaatatgattctgctatgttaaacatttaaaatcattgcattagatcatctctagtttttttctgataaaaaaatattatttgtaattttacgaagtatatagccc

SEQ ID NO: 441665 - DNA, 615 bp, Homo sapiens
gctatacttttaaaagaaatactacctttgttttcttcatggttgccttaagcatgacgataggtaggaataaggmagaaagcctcaaagggcgatttaagggcatggatgaagagttaaacaagccacacagtgagagccataaaggtatgatgtctcaaagcccagagtggccaatgtggtcacagctatacaatggggtttttacagaagcttccagaagggaatctctactaaacagttgtgtatagttacaagaatcaggtcctgtgactgctagatttgacagagaatggaaaagtaaggattttccattagaaaagatggaaagctaaaccggcgaagtggttatgggtaagagttggaggcaatgacacagatatcctacacctcaaaccttacagggcactatatcttgtaagtttacataataaaaggtagtcgtaataactggttaatgttttctgtcagtattttaataaaactttggacatttaccaaaaatatttgcttccctctcttttctaaaaatgttggaggcctacctaacagtcttcttcaaatagatatgtaccttgcagcaatttcttggagaaaaaaacaatgggcataacc

SEQ ID NO: 441666 - DNA, 542 bp, Homo sapiens
ctccagggtcagcaagcccccagaagtcaaagcatcaaaatacaggaaatgaaagacatgtctaatacaatattctgagatgcaaataaaatcctgaaagggaaagttaagaaaacttwttcaccatttaaaaaggtctctgttgtccttacatggggttcctgagcacctacaccgggccatattttccaaattccagaattccaaattcaccttgtcctggaggagggtcagtcaacatagagggcttgtagctcctgccccggtgagtgctgctatcttgaggagtccagttctgaaaggcccagcacagccaagccttacttccctcctgcttggctaaacctaactcctataagggggcaagaagtgcagaagccctgagtgctgcgctgtatccctggtgcattgaatgaaagtcaaattttccattatctaggggaaaagaggaggcaccaggcagaaattgacctactgtgccagcagcctagattagcttgtttccctccaaggaactgcaccatagtcactgtcactgggga

SEQ ID NO: 441667 - DNA, 542 bp, Homo sapiens
ctccagggtcagcaagcccccagaagtcaaagcatcaaaatacaggaaatgaaagacatgtctaatacaatattctgagatgcaaataaaatcctgaaagggaaagttaagaaaacttawtcaccatttaaaaaggtctctgttgtccttacatggggttcctgagcacctacaccgggccatattttccaaattccagaattccaaattcaccttgtcctggaggagggtcagtcaacatagagggcttgtagctcctgccccggtgagtgctgctatcttgaggagtccagttctgaaaggcccagcacagccaagccttacttccctcctgcttggctaaacctaactcctataagggggcaagaagtgcagaagccctgagtgctgcgctgtatccctggtgcattgaatgaaagtcaaattttccattatctaggggaaaagaggaggcaccaggcagaaattgacctactgtgccagcagcctagattagcttgtttccctccaaggaactgcaccatagtcactgtcactgggga

SEQ ID NO: 441668 - DNA, 595 bp, Homo sapiens
gcagacctctggccacatgactcctgagcaataagggtttatagaaactatgcctacgttttagcagaattcaggcctctcccataattctagtcttgtgacctttttttcatcttacataggcgattttggctcccawacaagggcgggagcagctttagggaaggactattttcacctttgcttcaaaattaaattataaactaaattcctccatggttggatcggcttatgcccaggaatgagtgaagacaggcagtgtgtgaggctggaagcaagatggagtcagccatgctacagttctctcactgacatcatctttgcagaggcagtttcagcaacacatgggtatcactcttcttatgagttctgtggtagccttctttgaaaagaatatcaaagttcctctctgtttatgtaacaatctcaggctcgtaggcctatgattgcaagacatcagttctttttttccaccttcagtagttattgtctcagaaaagtcatgtcaatccctttaggtggaatgaataataaaatgatttctagttggtgtgaaacatggatagggacccagtgctgcgcacaacccccagag

SEQ ID NO: 441669 - DNA, 538 bp, Homo sapiens
ctgacttaatatctctattaaatcctactgtatattgcaatgatctcattactgatcttacaaggggaggaggtggcagtgagataatctcatttgtataaatccctacatattatcactaaaaattactgggtgaggtaatacatttatttggttatacattatggaattaattttgctaaaacataattgggtgtgcatgtaaaactatatacacactggaggttatttactgatgaaaattattatatgtaatagatgtactcttgaaaggttgttgataaatataaatgtggccaagcatagtggctcaygcctgtaatcccagcactttgggaggctgaggcaggaggatctcttgaggttcaggagttacaccagaccagcttgggcaacatagcaagaccttgtctctacaaaaaatgtgaaaaaatcagccaggtgtggtggcacatgtctgtagtcctagctactcgggaggctgaggtggtaggattgcttgagcccaggagtttgaggctgcagtgagctatgattg

SEQ ID NO: 441670 - DNA, 636 bp, Homo sapiens
gttgttttcatgacaaaccccccatcttaagtcagggtctggtaagtggcccctgccttgattcctaggcttgagtttccttcttgataatctgcccattctttagttttcccaaggctgagactctactttcctatcttcaaaaaacttctccctggggacagagagtctgcttttgtagacaaattttgtagacatcgaatcctgctgtctgctgggtgcccctgtcaccatgccctgcctaggtgacgtgatatcacctttggggttcccagtttctcaccacctgcctggattgccccctgtgcagtagccagtctctagagccaccctctacccacctggccttgctttctaccatgtttccccacccagtccaccttgggactgttccaacttgctcctggcaaagggctattgagtttctaggtctcagtccctcttcaccaggcttgtgtaaggcctagttccaacagatttaaaggcaactggaggccaggatcattggctcatgcctgtaatcccagcactttgggagaccgaggaagaaggatcatttgarctcacgagttcaaggccaagccactctgcttctacaagaaaaaacaagaaacaaaaaacaaaaaacacacacac

SEQ ID NO: 441671 - DNA, 587 bp, Homo sapiens
gtaaatgacaaagaactcacattcgaaatattttttaaaactcctcaaatcattaagaaaaaggcaactcaatttaaaaatgggccaaaaactttaatggctacttcacmaaatatggtaccaaatagctcaacatcataattaattgaagaaatggaatataaaatcacaatatgatagtataatacctcccattcctccatttctgaatggctaaaagaggtggagggagtaccaagtatagaatatagaacagtggggtcatatgctgtttggtgtatctacctagacacatcataatatatgttccttataaaccaacaattctatcataagtgtataccaatagacatttgtgcatatgtgtgccaaaagacatgtacaacgtttttataagcattactttaatagatcaaaatggcaaacagcagaatgaatgctatacagccatgaaaatgaattactgctgcatataataacatgaaagaattttacatagtgttgatggaactaagtaaggcacaaaataatatataccatgtgattgcctgtatataaagcttgaaaatagtcaaacctaatatgtg

SEQ ID NO: 441672 - DNA, 587 bp, Homo sapiens
gtaaatgacaaagaactcacattcgaaatattttttaaaactcctcaaatcattaagaaaaaggcaactcaatttaaaaatgggccaaaaactttaatggctacttcaccaaatatggtaccaaatagctcaacatcataattaattgaagaaatggaatataaaatcacaatatgatagtataatacctcccattcctccatttctgaatggctaaaagaggtggagggagtaccaagtatagaatatagaacagtggggtcatatgctgtttggtgtatctacctagacacatcataatatatgttccttataaaccaacaattctatcataagtgtataccaatagacatttgtgcatatgtgtgccaaaagacatgtacaacgtttttrtaagcattactttaatagatcaaaatggcaaacagcagaatgaatgctatacagccatgaaaatgaattactgctgcatataataacatgaaagaattttacatagtgttgatggaactaagtaaggcacaaaataatatataccatgtgattgcctgtatataaagcttgaaaatagtcaaacctaatatgtg

SEQ ID NO: 441673 - DNA, 540 bp, Homo sapiens
catatggtcaatcttcatgtatgtttcacatacgcttggaaagactgttttctacagttgctggatgcagtgtttcttaatgtcagttacataagggtggttgttcaggaacattctggatggtggtgaaagttctggcttcccatatggcctcttctaacattactccaggcaaggatggtgagggggcacttcgttactgcagactgagggttcagaatccctataatattccccagtgatagcaggtatgggggtgtttgattactgctgatagaaatgaaattactggctcctcactcagtccattctgagagcactccagcaggggtaggaggctgcggtagtgcamtttttgtctaaaggttttctgttttcctatgttccccctttcttggtcctttggctagacacagcagatttttcttgaggctcctttttgtcttttctagttttatgttttcacattacctacttcttcagcacctgatataggatatataagtgggggaggaaaccaaggactcactaccatgtcat

SEQ ID NO: 441674 - DNA, 540 bp, Homo sapiens
catatggtcaatcttcatgtatgtttcacatacgcttggaaagactgttttctacagttgctggatgcagtgtttcttaatgtcagttacataagggtggttgttcaggaacattctggatggtggtgaaagttctggcttcccatatggcctcttctaacattactccaggcaaggatggtgagggggcacttcgttactgcagactgagggttcagaatccctataatattccccagtgatagcaggtatgggggtgtttgattactgctgatagaaatgaaattactggctcctcactcagtccattctgagagcactccagcaggggtaggaggctgcggtagtgcaatttttgtctraaggttttctgttttcctatgttccccctttcttggtcctttggctagacacagcagatttttcttgaggctcctttttgtcttttctagttttatgttttcacattacctacttcttcagcacctgatataggatatataagtgggggaggaaaccaaggactcactaccatgtcat

SEQ ID NO: 441675 - DNA, 597 bp, Homo sapiens
aaaactctttcctttataaattacccagtctcaggcagttctttatggcagtatgaaaacggactaatacagaaatgaatsattatcattgaaacttttatcactttaaagacaagagattgattttgttctggccattttcttgaacaactacatctgggggtgtagtactgaaaattcagcactctctggaacccacgttctctcccttctgggttagggaataacatcaagtctccttcctttgagccctggatcaaagagacctgataggtgattgattgtgtgggcagaatggagacttgggaaatggagtcacattctgcccttcattgtccctcaggaactacttatgccctcattgttttatccaattttaggtgtgcttttaaatgtacatatcacatacacttttccactgtggaaaagacacaaccacaaactccagcatgaagaacagcccagttgacctccctcatctttacaataggacaaaacagcttcttgagttcattggaaacaaagcctttcctacagggatgagaccttttcccattgtttatttatttattcactcaagaaacattgaactcctac

SEQ ID NO: 441676 - DNA, 532 bp, Homo sapiens
ctatagcctcttaaccaggctccctatttgttctctackttctgctgtctgtacttagcagccagggtaatattttaaaacataattcaaaccatgccatgcctctgccttgagcattccaagggctcctgacttcattcagagcaaaagcaaaaatccttaaaatggcctacaaagtccagcctaatgtggcctccccgcctcccagccttacttctctgagctctgacacacctctcactaccctcccccaacttactctactgtccccaaccctggggcctccacagccaaacctggtgtgggctggcttctctccctgctgtcccttcctactcatatccgcctgactcattcccacacttccttgacatctttgctcaaatgtcaccgtatttaaaattgtatctgctctggctcccagctctcctggttccccttagcctgctctctttttcccactgcatcaccactaacctaccaggtaagtgacttattaatggtgtacattgtctccctgccgaggtgtaag

SEQ ID NO: 441677 - DNA, 589 bp, Homo sapiens
cagggtaatattttaaaacataattcaaaccatgccatgcctctgccttgagcattccaagggctcctgacttcattcagagcaaaagcaaaaatccttaaaatggcctacaaagtccagcctaatgtggcctccccgcctcccagccttacttctctgagctctgacacacctctcactaccctcccccaacttactctactgtccccaaccctggggcctccacagccaaacctggtgtgggctggcttctctccctgctgtcccttcctactcatatccgcctgactcattcccacacttccttgacatctttgctcaaatgtcaccgtatttaaaattgtatctgctctggctcccagctctcctggttccccttagcctgctctctttttcccactgcatcaccactaacctaccaggtaagtgacttattaatggtgtacattgtctccctgccraggtgtaagctccatgatggcagagatttttttgtctgcatgttcgtagctatatcctaagtaacccaaccagtgtcagcccacagtagggactcaactggtatttgctgaataaattaataagtggt

SEQ ID NO: 441678 - DNA, 550 bp, Homo sapiens
tgtcaccacttgccataaaatacccttcactatacacatacaatctcagtggcaacaacaccacagcctttctaggcttgctgtctttacttagtgtctctttccaaaatgaatgctgggttttgcacagtttatttacctatttcataaatacaaattccatagtcccacagatataattaccttcttcattcgaggtgtcttgtgttttttcagatggcctcaaagaaacatgcatgatgcttggtatgtaacaaagactagctgagatgaagaattatttagagctggcagggagaaaaaattttgctagagttcatgatgaataattctggtaaatgctcccaaagctaattagaacttaattagataccatcgcacattatttgctgatggtttcatgtgtttattcatcttttccttactgctttttaagttccatgagcatgggccaggtgcagtggctcatgcctgtaatcccagcactttgggaggctgaggcagtggatcackaggtcaggagatcgagaccatcttggctaacacagtg

SEQ ID NO: 441679 - DNA, 557 bp, Homo sapiens
caaaatcaacctggaatgtagtggtatgtaatgacaaagttgactccatttactttcgttcttatgacttcattgtcatatattcccgtttgtatttgaaggagtttatcacagatgctgttatttaagtgttattaaaaaaattctgragctaaagaaaaagaaatcatatacaaggaatggccacctggattgaaacaaaaaagttgttccagtttaaaagtagtccttgggttgacttaaaaagaattcaaacatcccctccccctagatttaaaaagtatctctccttctccccactttgtattttttaaaaggtcttgggttccattttcaaaataagttctatatttttaagggtgacacataccaagtaaccagaaactggccttggcttggaaaacctcccagttctcatcaacatgcaatcactagctcctttcagcatgatgaatactattgattggctcagatatgcttgtgacccagcaggggtattagacattggctataaaacatctcgttatgaattttttattggcttgagtgtctgaaga

SEQ ID NO: 441680 - DNA, 557 bp, Homo sapiens
caaaatcaacctggaatgtagtggtatgtaatgacaaagttgactccatttactttcgttcttatgacttcattgtcatatattcccgtttgtatttgaaggagtttatcacagatgctgttatttaagtgttattaaaaaaattctgaagctaaagaaaaagaaatcatatacaaggaatggccacctggattgaaacaaaaaagwtgttccagtttaaaagtagtccttgggttgacttaaaaagaattcaaacatcccctccccctagatttaaaaagtatctctccttctccccactttgtattttttaaaaggtcttgggttccattttcaaaataagttctatatttttaagggtgacacataccaagtaaccagaaactggccttggcttggaaaacctcccagttctcatcaacatgcaatcactagctcctttcagcatgatgaatactattgattggctcagatatgcttgtgacccagcaggggtattagacattggctataaaacatctcgttatgaattttttattggcttgagtgtctgaaga

SEQ ID NO: 441681 - DNA, 557 bp, Homo sapiens
caaaatcaacctggaatgtagtggtatgtaatgacaaagttgactccatttactttcgttcttatgacttcattgtcatatattcccgtttgtatttgaaggagtttatcacagatgctgttatttaagtgttattaaaaaaattctgaagctaaagaaaaagaaatcatatacaaggaatggccacctggattgaaacaaaaaagttgttccagtttaaaagtagtccttgggttgacttaaaaagaattcaaacatcccctccccctagatttaaaaagtatctctccttctccccactttgtattttttaaaaggtcttgggttccattttcaaaataagttctatatttttaagggtgacacataccaagtaaccagaaactggccttggcttggaaaacctcccagttctcatcaacatgcaatcactagctcctttcagcatgatgaatrctattgattggctcagatatgcttgtgacccagcaggggtattagacattggctataaaacatctcgttatgaattttttattggcttgagtgtctgaaga

SEQ ID NO: 441682 - DNA, 598 bp, Homo sapiens
tgtaagtaaaaggatgcacacacacccacacacacacacacacacacatgcacatgcacacacacaaacttaaaattaatcctttggcaatggatatgtttttcagagaagctgatgttactacagaaaaaggaaatatagttcaaaaaacagaaagattgtcttgaaatatacaatgcctagggagagcaatttagatcaagcaagttttattggaaaagctggtacagttgaggaggagaagtcagggaatacaggaatagagatgtgactaattgaatggccattggactgaaagtcaagcaatcctatattttagacctgattgtgccaggaacttcaagggatttgagaggaagtcatttaacctctctgagtcacagttttaatattacaaaacaagagagctgaatgagatctggtttcacatttaacatcrtgtcattctgtgatatgagaaaggctaggcagagacaatggggaaaaaattgcattctcacaatcttcccagctctctccatctaccttgtttatgtatgaactcctagcaagattttggtattcaacaacatatgcaagaagagcatcaggcgttttc

SEQ ID NO: 441683 - DNA, 538 bp, Homo sapiens
ttttgtcacctcattactgatttatcatgtggaaaattgctttgtcccaggaaaatggatcctctcattgtcagaaggagattttctaggttgtatgaaattgactctggggcacccaagaagaacctctcctgctcccactaaaattaaggggcctccctctgcaggataaaaaacaatctagttaaatgacaacgcatttctgaaaagttttccaggactgaaaaccttaacatccacatacactttgatctaagggacagacggttcatagaatgaaagagtatggtgtcaataaggcttgaattctagaatgaggagccagccatgccatagcaggggaatgatactccttaaaaggaaaaatttaactaccaatcctctgaagtagaaatgataagaataaccaaaatatctgcaatggttcaatagcaaataattaattggcagctgcttaccgtgttcattttgcatcttttttcccaccacacatattaaggagcagctgargtcatgtttgacattctctccctctttt

SEQ ID NO: 441684 - DNA, 626 bp, Homo sapiens
attatcatatcttttctgttcaatggttgcttctctttggctcactgttctctacttttcagcctgagagctggctaatctgggacagtactcgaatgcagtgtacacatgggtaacatggaaaaccccgattttcccttatattcaaggtattatttgaccttaagaaaaactgttytacatttcataccaattaatgagaaaaaaatattggcaagcactgactgggcagaatacagggaagcttcactatggagaagtgaatttgggattgagggcctttattgcaatctccttgtaaataatatttgatactcttcctcatctggagacacattcctaagtaacttttcctgaataatttggtctccttgactgaatcagtaagtacaaatagatccccaagcatggctctttcctagaatgaaagaaatgtcaagaagtctgaagatgattcttgaattttggttttttgctattgctatttgggcttgttgtccttgttgttgctattgagttgagctccttatatattctggttactaatcccttgtaatatggatagtctgcaaatattttatctcattcaaagataattattatttactttcataggctgtttttgg

SEQ ID NO: 441685 - DNA, 574 bp, Homo sapiens
accagcatgggtctgggtgaggtctatgctggggctggtgatatgggaggcatcacaattttcactgtgacccagagtctgctgagctccctaaaagtggaggtggatcccaacatccatgctgtgaacacccaggagaagaagcagatcaagaccctgaacaagtttgcctccttcattgacaaagtgtggttcctggagcagcagaacaagatgctggagaccatgtggagcctgcagcagcagaagacagctgggagaacgtggacaacatggagagctgcatcaacaacttkctgcggcagctggacacatgggaccagaagctgaaggtggaggtggagcttgacaacatgcaggggctggtggaggacttcaagagtaagtaccaggatgagatcaacaagcatatagagatggagaatgaattttcctcatcaagaaggatgtggttaaagcttacatgaacaacgtagaataagtagtctcgcctaaaagggctgccccaggagaagagaagatccgtgagctgcagtcccagatctcggccacatctctggtcctatccttggac

SEQ ID NO: 441686 - DNA, 574 bp, Homo sapiens
accagcatgggtctgggtgaggtctatgctggggctggtgatatgggaggcatcacaattttcactgtgacccagagtctgctgagctccctaaaagtggaggtggatcccaacatccatgctgtgaacacccaggagaagaagcagatcaagaccctgaacaagtttgcctccttcattgacaaagtgtggttcctggagcagcagaacaagatgctggagaccatgtggagcctgcagcagcagaagacagctgggagaacgtggacaacatggagagctgcatcaacaactttctgcggcagctggacacatgggaccagaagctgaaggtggaggtggagcttgacaacatgcaggggctggtggaggacttcaagagtaagtaccaggatgagatcaacaagcatatagagatggagaatgaattttcctcatcaagaaggatgtggttaaagcttacatgaacaacrtagaataagtagtctcgcctaaaagggctgccccaggagaagagaagatccgtgagctgcagtcccagatctcggccacatctctggtcctatccttggac

SEQ ID NO: 441687 - DNA, 574 bp, Homo sapiens
accagcatgggtctgggtgaggtctatgctggggctggtgatatgggaggcatcacaattttcactgtgacccagagtctgctgagctccctaaaagtggaggtggatcccaacatccatgctgtgaacacccaggagaagaagcagatcaagaccctgaacaagtttgcctccttcattgacaaagtgtggttcctggagcagcagaacaagatgctggagaccatgtggagcctgcagcagcagaagacagctgggagaacgtggacaacatggagagctgcatcaacaactttctgcggcagctggacacatgggaccagaagctgaaggtggaggtggagcttgacaacatgcaggggctggtggaggacttcaagagtaagtaccaggatgagatcaacaagcatatagagatggagaatgaattttcctcatcaagaaggatgtggttaaagcttacatgaacaacgtagaataagyagtctcgcctaaaagggctgccccaggagaagagaagatccgtgagctgcagtcccagatctcggccacatctctggtcctatccttggac

SEQ ID NO: 441688 - DNA, 584 bp, Homo sapiens
aaaaatgtactttatgttagcaacgatattacaaaatctctagaaataccttgaataaaaaatgagggtgacctatatgtagaaaacagcacagttttactgagggacatagattaaaaaaaaagtaagccattcaatgttttgaaggagtatgagctttgaaaattgttcaactcttaaattattaaaaaggcttaatgcaatttcaattaaaattctggtgaatttttttcaaacttgttgaaaacataattttmttgagaagaaaacggcaaaaatatttaagaatattgatttaaagcagaataacaagataggacttaaccaagtacacacacacacacacacacacacacagacacacacaaatttactatatatatacacacccaactatcaatttacttaccctatatatatattctctatatatatatcctatatatattatagatatatatagtagatatatagagatatacagatatatataccatatatatatatagtaagtatatatatttaccctatatatataaatctgtagtaagtggatatatatatatctacttaccatacatata

SEQ ID NO: 441689 - DNA, 584 bp, Homo sapiens
aaaaatgtactttatgttagcaacgatattacaaaatctctagaaataccttgaataaaaaatgagggtgacctatatgtagaaaacagcacagttttactgagggacatagattaaaaaaaaagtaagccattcaatgttttgaaggagtatgagctttgaaaattgttcaactcttaaattattaaaaaggcttaatgcaatttcaattaaaattctggtgaatttttttcaaacttgttgaaaacataattttcttgagaagaaaacggcaaaaatatttaagaatattgatttaaagcagaataacaagataggacttaaccaagtacacacacacacacacacacacacacagacacacacaaatttactatatatatacacacccaactatcaatttacttaccctatatatatattctctatatatatatcctatatatattatagatatatatagtagatatatagagatatacagatatatataccrtatatatatatagtaagtatatatatttaccctatatatataaatctgtagtaagtggatatatatatatctacttaccatacatata

SEQ ID NO: 441690 - DNA, 595 bp, Homo sapiens
gtaatttacgataaatatcctttatcatgttgagggctttcctttctgctttctggtatgtattattatgagaaataaatattgaatgtattatatgatttctcaaaattctttaaaaaaatttcctctttatcctcttgatgaattgcggtaggttaaacagaagttaaacattgaccctgcctctttttcctgaaagaaactctatttgattaaaatatgattcttttcatataatgctagttttgatgtactagtattctatttattgtttttgcctttgtattcatatgtgaaactagcttttagttttctgttttggggrgaattagtttgttcaggtttcactgttagttcatatgctcataaaatgaatagttccagagcagtttatcatgtaaagaaataatctattcccagataaaacttttctataaaacgatctagacatggaaccttttgaagaaatagatttggacacttttcagcctttgctacagtgattgatctgtgtactttttagcttcttgttgggtaaaattttggtaatttatgatttcctaaagaagcattaaattcttgtgaattttaaaac

SEQ ID NO: 441691 - DNA, 598 bp, Homo sapiens
cagtcttttgaatgggttgttgaatttggttttctggtattttgttgaggatttttgcatcactatggataagggatactgatgtgtactttccttttctgcttgtatctttgtttagctttggtatcagggtaatgctggccttataaaatgaggttggaagtgttttctcctcttcaattttttggaggagtttgaggcactttggtgtttgttcttctttaaatgtttgtcaggattcactagtgaaaccatctggtcatgaacttttctttgtgtagaggtttttgatttctgattcaatctctttmctgtttatatatctgttcagattttctgtttttgctttattcagccatcgttaagttgtttctaggaatttataattttaagtagattatccaattaagtgatacacaattgttcatcacattctcttataattttctaagatttctgtaaaattagttggactttcccctattttatttctgatttcaattgtttgagtcctgtttttttttcttaaacaatataaccaaagctatgtcctttttgttgatctttacaaggaatcaatctttacaaagaagcaatt

SEQ ID NO: 441692 - DNA, 589 bp, Homo sapiens
gagggtgatttttcattggttaggtgtttgcttggttgctgcagctgcttaactggtttctagagttctcacaaaagtattttgctaggtacattattattatttgttgtttccatgggaaaatgagggcatgaggcttcctagtctaccatcttgccaatgtcactctgagataattctttcagaaatgtgtgaaattacattgcataactttctcaatgactcttctcagatttactgaggtctacataaagttccaagtaaaagaaactctttccaaatataacrgcagacttattctaatctgaatggaacactatcttacttatgcctcaaatgaataaaaccaatcaagagttataagaacactgatttttatcaagaccaatttgtaggagttttctgacaaaattctacagtctggttcagatacatagttgatagagacatttcacttcagatcttaagatttttgttgttgttgggctaagcagggatctcatcatacccagtgcttccttatattcctgggtactttaacatttccattgatttctgtttctcacaaaaacttcttgaatttagcaat

SEQ ID NO: 441693 - DNA, 603 bp, Homo sapiens
gcacacctcctacagtgagaagcacaggtgtgtgtggtgtcctgcactgctctctagccccacagaagacatcrccaactgatctgggctcttgatctcaacaagccttggtgctggctcagaattctccttacagagtgatatacttcctcaaaatgagacctagctggccttccatttatatccatgtcctggatcaacaagaaaaagcaaacagccacaagtaccgagccctcttccagataaaagggttctgtcctccaaaaacaggaagacgccctgcttacatgtaagatacactcagctgactgccttccaatcatgggtactgagaaaaagggttttatggaacacaaccacatccattcagaaaacatccattgaggacctactgtgtgccagagagagtgactggtacaaaagataagtgatgtatgcccaagctttgtctcagagatcccacagcctaggaggaaagaacaagtcatggaggcagacaggtcagcggagtaagaagggcacacaggcagggccagagagtggcccaaaggcagatcctcgcagcctgaaccttgtctctggtgcttgctaactgtttggcct

SEQ ID NO: 441694 - DNA, 557 bp, Homo sapiens
tcaaagcaaaggatgtcaaggaagccttcctcagagagtgactgctaaactgagaatggaaatgtaagaatttgcccggaaaaccaatcacaaaggggcatacagctacggaaacaccccgcacagaggcaggygattgtgacactgtgtgtccagtcctgggtgtcaatgataggctggcacctctctgtggcacctccctttgcctcttcaagccttggggtgatgacagcttcctttgtttctacacccagggcacaagataaccctggcaacctacagcctgatgaaaagggaggagaatctaaatgacttactgctgtgtacttggccatgagagaataaccgtgataataactcaggtaaaaggctcagaatgagaagtaggtttaaaaagtaggtaatgaagattgggataggccaaggagaacctgaagggcatatgggacagccagaaggaaagcctgtaaggctgtgggatgtaggcatttggagcctggagtgtcctgagctagagacacagaagcaggaggcattcacttgaaggttgtgtttaa

SEQ ID NO: 441695 - DNA, 643 bp, Homo sapiens
agggtctcctgtcacaaacacatctgaaatataatatggtgtaaattcaacaacaaatgtttatctaaggtctgttcgaaggacatgagactcaaagcaaaggatgtcaaggaagccttcctcagagagtgactgctaaactgagaatggaaatgtaagaatttgcccggaaaaccaatcacaaaggggcatacagctacggaaacaccccgcacagaggcaggcgattgtgacactgtgtgtccagtcctgggtgtcaatgataggctggcacctctctgtggcacctccctttgcctcttcaagccttggggtgatgacagcttcctttgtttctacacccagggcacaagataaccctggcaacctasagcctgatgaaaagggaggagaatctaaatgacttactgctgtgtacttggccatgagagaataaccgtgataataactcaggtaaaaggctcagaatgagaagtaggtttaaaaagtaggtaatgaagattgggataggccaaggagaacctgaagggcatatgggacagccagaaggaaagcctgtaaggctgtgggatgtaggcatttggagcctggagtgtcctgagctagagacacagaagcaggaggcattcacttgaaggttgtg

SEQ ID NO: 441696 - DNA, 590 bp, Homo sapiens
tgagctagagacacagaagcaggaggcattcacttgaaggttgtgtttaaaaatatgggagaggtaggagctgtctaaagagaggaactagagtgagaggggcaagacattttagaaataatttagaagaaataaaaacccaatagatcttgaataacaccatagtattttatcagtttaaaacctagtattttatagtattttatcattacaatataaatatttccctctctcttcttcttctttttttttttttttttttttttttttgtgcgtgtgtgtgtgtgagacagagtcttgctckgtcacccaggctggagtgcagtggcacgatctcggctcactgcaagctccacctccctggttcatgccattctcctgcctcagcctcacgactagctgggaccacaggcacctgccaccatgcccggctaattttttgtatttttagtagagacgaggttttgctgtgttagccaggatggtctcgatcttctgacctcatgatccgcccgcctgggcctcccaaagtgccgggattgcaggcgtgagccactgcacctggccctctctcttctttttcattcatc

SEQ ID NO: 441697 - DNA, 553 bp, Homo sapiens
tacacactccaaccccaaatcttcttttcttaagccattgagtggagagaccagtggtgaagttggaaaggagcaaggtaagagatgaaagaaattggcctcctgaaacaagtggtcttcatagagcaacctctggaaggaggagacctccaagggcctctaaagttctctccagccctgaggctgcacctgcacaaggactctggatgtgtgtatccctgccaccatgtgggagacactgtgggagggtttttacacgggactccagatgtgtgtgtcacctgccaccgtgtgggagacactgtgggaggggttttacacaggacttcggatgtgagtgtcaccggccactgtgtgggagacgctgtgggaggggttttattcatatcagttcttcaaatcctcactctcatgccatgaggtgggtgatggcattgcacttggagaaggggcactgggcactggctggtaaaccgaktggcctccaccatgcagctggaatttgacagcatcctgatccaaaaaccagttgtcagatggcaaatgccatgtt

SEQ ID NO: 441698 - DNA, 544 bp, Homo sapiens
cgagctcttatcagacaaaaaagatgccagactcttagttaattctctcctggaccagggaagagacctggaaaggaatggagattctctacagaatgtagattttccccacaagagatagctttgcagggccatttcaaaacatgtcaaatatgatttgggatttaaaaaaaacttcaatttctttcagggctggctatctgtcatgtgatagtagagtcaggctggaatttggtgtcttactgcgacaaagagtctgctttgtcagtcttaagatctgttttatttgggagactgaagcaagaggatcgcttgagcccaggagtttgagaccagcctgagcaacagagtgagaccccatctctattaagataaaaaaaatctgtagtaatgtaaatgctggtcagctgtgcctgaattccaaaaggaggagggtataatgaggcagtccaaccccytacttcccattatggcctgaaatagtttttcaaattaactttggaatgtccttggcccaggtgaagggtccatcagttggttagag

SEQ ID NO: 441699 - DNA, 528 bp, Homo sapiens
  misc_feature (1)...(528): n = A,T,C or G
caacacaataacagtgggggacttcaatactacactgacagcagtagacaggacatcaagacagaaagtcagcaaagaaacaatggatttatactacatctaggaacaaatggacttaacagctacatacagaacattccatccaacaactgcattctgttcaacagcatatggagatttctccaagatagaccattatgataggccataaaacaagcctcaataaatttaaagaaaattgaaattatatcaagcgctcctcagaccccagtggaataaaactggaaatcaactscaagaggacccctcaaacccatgcaaatacatggaaattaaataacctgttcctgaatgagcactgacccaaaaaataagtcangatgggaattaaaaaattcttcaagctaaatgacaaaaatgacacaacctatcaaaaactctgtgatacagcaaaagtggtgctaagaggaaagtttatagccctaaacacctgcatcaaaaagtctgaaagaacacaaacaatctaag

SEQ ID NO: 441700 - DNA, 527 bp, Homo sapiens
aaaaacacttggggataatgtccccagccccacgtctgggctgctcagaagctgtgcaatttgtgagtggcagcattctcctctgmacccccagacactggaacactttcttcttcacaccaagaacgtgggtcttcaaggtgctgtctctggacactgcccagttctaacgggcacactcccttagagcaaagtccacacccacacagcctggccaagaattccacctcctccagtgtctgccacgacagatttcttcctctttggtcatgggcccacatggtggtgatgacaaacagtgccttgaggtaagagctatttcctggagacaaagtatgttctaatgctgaacatcttaggcagaatggcactctgaatgattctaaactataaaatctcctagcagggacccttgaatcatgccatgtaaacaaactaccacatctccccctcgagtctgttctgcttgtcttctgtcacgatcactctgggatcactgatttctatattttcccctggcctttctc

SEQ ID NO: 441701 - DNA, 593 bp, Homo sapiens
aaacaaactaccacatctccccctcgagtctgttctgcttgtcttctgtcacgatcactctgggatcactgatttctatattttcccctggcctttctccctttactctccctgtttaagctgatagacaagctgaacacgtccttaccttggaggaggttgtggcagaggggaagaagaacttgtctgcaacaaacttcacttgcccgattgtgttttcccaaagcccgcacatgttggagattgcacctggtggctggaagagggtgggagaagctatcaggacagtgccctgggtggctgggaargtgatgggcagtgtgagtcctggggtggaagcctggctatgcgctcagctgtggggcacccagaggggtggcaagacctgaggtttgctcagggagctcaaggttaacagagatcacacacccttctccatgaggccctaaagggaggcacctctcctaatgccgaagatggcagttaacaggaatttagttgtggggagggggttatgggtcagaatgaccttgatttaaggacgcagagataagtttatttcttgcatacctgagcatgtgggctgtaagtcc

SEQ ID NO: 441702 - DNA, 529 bp, Homo sapiens
aggtctgcactcacattcttacccagttttaattacatgtaaattaaaaagcagagtatgcagacatttctagaaaaaggatggtaagttttggatcatctgctcactgccatggaaaggggtggtaacctctggatgttgccatggcaatggtaaactcacatggcacactggtggatgtatcttagggaaagctacttccactccatccctgtcttaactagtcctcaatgtggtctgacatctgagacctatctccagaattgagtcccacctcctacctcactggggcacactttattatccagggccttaaagatgtgttgttggctagttccctcccctttatctgatcgggctcatcctaaaaggggcctcttcagaacctgctcttgggctccccttccccaggcytcaggtgtgtggccctcaagctgaggctgcccatggcaggcttctgcctggtcctgggctgatcttggtgcccgagcaaagcagttcctgcaaatggaggcctaaaggtccctcc

SEQ ID NO: 441703 - DNA, 569 bp, Homo sapiens
ctgtggagtgaattatcctctaagaacaatgctaatggttgtttattagcttgcttatttgttttagctggaaaataattcagctgggctcaaactggaaaccctctttttcagggaagagagcaaatgcagtcagctccctgatcctcagctgggtgcctggcgcctgctctgtgcctgtgtggctcaagggttggtcagggaagcgagcagagttcatgcaccccctctctggactccttttctcaggattctcactccctagcagctgtggtcctctcaactttgacctctggttcttcatgccagtaaagaggcaaattattgatcagggtgytaacttcccagagtggcacagaccagggcctgcccttagttgaaaccctgaaaaaattgggcagctcacagcaggtcattccaagtattgtctcttccagaactgaaaagctcctttccagacctttctgcaggcccccgctgaccacttaaacgtccccctcatttcagcctcattgctgccctgcaaggaggggaatgccttaaagatcatacccattttactgaagggg

SEQ ID NO: 441704 - DNA, 621 bp, Homo sapiens
ccaccacagggcccttgcacatgctgtttcttctgcctggaatgcccactccatcacatcctgcacaaatatattggccccacttaattctgtacatgtttaagagctcaggcctaagcttcacttccttagggagttctctatccaatggattctactccagtttagaccaattgccttctccctctgtgtagtaakgattggcttaatatttgtctccactagagtagaagctccatggaaacaagaccctcaccaatgttgttctccactatgtccaagaggcccagtacagtggcaaactcatagcagaaacacaataaaataggtgttgaatgagcaaataatgaattaattgggaagtgggagtaggggatcttgggttctagtctttctttcccttcctccctatctctctctctctctaactcaatgagcagtataatcaaactaggtaacaagtagaaggggtaaaaatacagggcttgggtagtaagagctgcaagacatgggacagagaaatccataaatgtccaatgtatgcaggcaaccgaaaagccctcagcatctgacatttctctgagtatggcagaaatctaaaatgtgtcagtggcttggccc

SEQ ID NO: 441705 - DNA, 621 bp, Homo sapiens
ccaccacagggcccttgcacatgctgtttcttctgcctggaatgcccactccatcacatcctgcacaaatatattggccccacttaattctgtacatgtttaagagctcaggcctaagcttcacttccttagggagttctctatccaatggattctactccagtttagaccaattgccttctccctctgtgtagtaatgattggcttaatatttgtctccactagagtagaagytccatggaaacaagaccctcaccaatgttgttctccactatgtccaagaggcccagtacagtggcaaactcatagcagaaacacaataaaataggtgttgaatgagcaaataatgaattaattgggaagtgggagtaggggatcttgggttctagtctttctttcccttcctccctatctctctctctctctaactcaatgagcagtataatcaaactaggtaacaagtagaaggggtaaaaatacagggcttgggtagtaagagctgcaagacatgggacagagaaatccataaatgtccaatgtatgcaggcaaccgaaaagccctcagcatctgacatttctctgagtatggcagaaatctaaaatgtgtcagtggcttggccc

SEQ ID NO: 441706 - DNA, 621 bp, Homo sapiens
ccaccacagggcccttgcacatgctgtttcttctgcctggaatgcccactccatcacatcctgcacaaatatattggccccacttaattctgtacatgtttaagagctcaggcctaagcttcacttccttagggagttctctatccaatggattctactccagtttagaccaattgccttctccctctgtgtagtaatgattggcttaatatttgtctccactagagtagaagctccatggaaacaagaccctcaccaatgttgttctccactatgtccaagaggcccagtacagtggcaaactcatagcagaaacacaataaaataggtgttgaatgagcaaataatgaattaattgggaagtgggagtaggggatcttgggttctagtctttctttcccttcctccctrtctctctctctctctaactcaatgagcagtataatcaaactaggtaacaagtagaaggggtaaaaatacagggcttgggtagtaagagctgcaagacatgggacagagaaatccataaatgtccaatgtatgcaggcaaccgaaaagccctcagcatctgacatttctctgagtatggcagaaatctaaaatgtgtcagtggcttggccc

SEQ ID NO: 441707 - DNA, 642 bp, Homo sapiens
cttctggcaagatgtgcctggagccaggggagcggcgctgaagcctcagggatgcgcagggaggggcaggatgtggtgtgcattgccctggaatcatgttcctgagyctcatcaaggaggagccgggtttcctggagcagccgcccctgtgatgacacgaaggaaaaggatatgatcaatatcctttctgaaaaggatggaaaaacggcaccctcccctggactcgcacacatttttttctagctcagcaagaaagagtgaggtcccctcagcctctgcgcacatcagggtgacaaaggtggacaatgtctggttcgcctttcaccttcaaggccaattctgggacttacagagtaggtgtcaaaattgtattttaagacaaatgcacttggtactgatgtgcttaatggctccattttagacattttccacaattcacactcacacctgaggcaatcagtatagaaaaatcttggcagaaaagtgaacaggtgacaggtttgggttacctgtgagtgtttaattgaaggactgtggtttccttactcctttggcttcacacagataattaaaacttgaaagtgctttgaatatttattcatttttttcaccaacagctgatgatcattaaacacacagaaa

SEQ ID NO: 441708 - DNA, 642 bp, Homo sapiens
cttctggcaagatgtgcctggagccaggggagcggcgctgaagcctcagggatgcgcagggaggggcaggatgtggtgtgcattgccctggaatcatgttcctgagcctcatcaaggaggagccgggtttcctggagcagccgcccctgtgatgacacgaaggaaaaggatatgatcaatatcctttctgaaaaggatggaaaaacggcaccctcccctggactcgcacacatttttttctagctcagcaagaaagagtgaggtcccctcagcctctgcgcacatcagggtgacaaaggtggacaatgtctggttcgcctttcaccttcaaggccaattctgggacttacagagtaggtgtcaaaattgtattttaagacaaatgcacttggtactgatgtgcttaatggctccattttagacattttccacaattcacactcacacctgaggcaatcagtatagaaaaatcttggcagaaaagtgaacaggtgacaggtttgggttacctgtgagtgtttaattgaaggactgtggtttccttactcctttggcttcacacagataattaaaamttgaaagtgctttgaatatttattcatttttttcaccaacagctgatgatcattaaacacacagaaa

SEQ ID NO: 441709 - DNA, 633 bp, Homo sapiens
gtgtggtttccttcacccatattaggagtgtgcacgtggaagatgcagttattaggaatacaggatcagaaggcccaaggtaaaacacttgcccttccccaaggaatgactgcttcatccaaatactaaaaagtctcatgaaacaaaatcatctccaaagggagcctggaatgaagctactgggcattggccaacttgctaggactgctggaagartggtgcatggggacagaggtggacatttcactcaggtagggggagctatcacctgtggtcagaacccagagacaaggggcaatttcatcaagaccaaattaaaacattgagttatgtttggtttgcagctggatggaattttatatgaagtaacccagtccattgaccctaaaatcagacctgggaatgaaaagtagagggactggaatgttatgttcaaaagtcccccttccttcatccctcattatccccattctctaatacactcctttgacaagtaatggctttgctccaggagggagggagcctgatcctaactgatccatcacattcagaagaggagtcctacccagagttaggcctctttccaattagcctggagactggacctcatcactagaatgtgtcactgggata

SEQ ID NO: 441710 - DNA, 577 bp, Homo sapiens
agaaggctggagaatacacgtttagctgatgtagacatactaaagcctgaggacttttgcagagaaagccctgtccagatgatgatctgattcagaaaatgcatacccactccacttagactgagtaaaatatagagctagttcaagtctaaaactctgtccttcacctaaggagataaaatctgaccgggttctgtccatcttctrtttttaaactggccaaagaggtagggacagaaagtaaccaagtatccacagaaagagttaggaagagctaatcttagacagagacaggctggtgacactagccacatctgagtagctagcaccagtgtggagatagcaggtcagatgggagctgcaatggaagcgtccagcttcaggtagcagtgcaggagaactccttcccaagcctgtattcattgtctaaagctgctataaccagttaccacaaattcatggcttaaaacaacacaaattacattttatcattcataaattcaaaatgggtcttgctgagctaaaatcaagatattggcagaagtgcatttctttctcgagactcccagggagaatc

SEQ ID NO: 441711 - DNA, 577 bp, Homo sapiens
agaaggctggagaatacacgtttagctgatgtagacatactaaagcctgaggacttttgcagagaaagccctgtccagatgatgatctgattcagaaaatgcatacccactccacttagactgagtaaaatatagagctagttcaagtctaaaactctgtccttcacctaaggagataaaatctgaccgggttctgtccatcttctatttttaaactggccaaagaggtagggacagaaagtaaccaagtatccacagaaagagttaggaagagctaatcttagacagagacaggctggtgacactagccacatctgagtagctagcaccagtgtggagatagcaggtcagatgggagctgcaatggaagcgtccagcttcaggtagcagtgcaggagaactccttcccaagcctgtattcattgtctamagctgctataaccagttaccacaaattcatggcttaaaacaacacaaattacattttatcattcataaattcaaaatgggtcttgctgagctaaaatcaagatattggcagaagtgcatttctttctcgagactcccagggagaatc

SEQ ID NO: 441712 - DNA, 541 bp, Homo sapiens
gagaggtaaccagcatttatgagatctgaaactgaacccagccacccactggtgacagactttctggctccgtgtgtctgtcacccaaaacacacagacaggagtcatgactggttgcaggtcactgggagctatagctgctggcctgacacacaggcccctccatctcctgagcctccctctggtccttgtcactccccatcagcaggaaaatgaaggagcaaacataggaatacagtaactgggtgcattcatcccgctggtgctccatctggagcgtgaaacttaccccatcacttttctgttgcttcttactgtgtttttaaaarccactctgttttatgacctctggggcagctgcctcaaagttacttggaggctatcattgcatcaaaagaatttcccacagcacagagatgggtggcatgtcccagggcacaaggcctgttagaaacctgtcctgccccatggttcagatagtaactaaagggcatggaggcagagtcagaactcaagtcagagatgaaaggcgctgaggttc

SEQ ID NO: 441713 - DNA, 574 bp, Homo sapiens
ccggctaatttttgtattcttagtagagacaaggtttcaccatgttggccaggctggtctccaactcttgaccttgtgatccrcccatctcgacctcccaaagtgctgggattacaggcgtgagccaccgcacctaatctaaggaaagattgtggaactggcttcattttccacgcctccaactcactctgcgtattcacctccttcctgtctttaatggtggggggtatggcatgctggctaactgggctttctgattaattgcacactgtaaatgtaactatattaaacactctttttcagctgaagaagatttaattcttccctgatgatccagaaatgttcataattaagaccagcaattatacgaatgggtttcacaaacattgggttatttgaatggatgactcaggctctgaagaatcgtttccagctgaaggagcattggaaaaccatagataacatattgtcctgatttagagagcctgaagaataggctcaaaggacacagagaccacagagggcaccttaccactcacagagaggagttggactgctgggactcccagcaaaa

SEQ ID NO: 441714 - DNA, 481 bp, Homo sapiens
ctctctcttcccctctccttttcctttgtgtctacttaacttgtattattgccatttgcttcttttcccctcagtgaagtgtgagactggtcagtgtttttttttttttttcttttccccctgttcgttcccaggaaacagtgaagtttatataagtctcaatcaaagcagccttccatcaccacgttccatcatctgcccaaacttctgcttcctcttgacatttaggtctggggtggagggcaaaggctgtcaccagaraaaagccagctgctcacagccacaatgtctcacatgctggtctgtcctcagatagcctgccatgtctcagggtctggttctcaacctcaaaagtttccaaagatgacaaccttctcgcagagacagggctcactagtttttttttttttttctcaattctgtaattcaaaaattgtttatgtttcatttgataacttaatttctagagttttgaagacac

SEQ ID NO: 441715 - DNA, 559 bp, Homo sapiens
  misc_feature (1)...(559): n = A,T,C or G
ttttcctgctggctagaacctcatctaaaagatgcaactcaaatgtacaattgctgctacttgtcagctgttctgataaagcattagatatttgtaagttactcttgtgactgattgaaaataaccaaataagtgaaggtgagggtggcattttcaatgtcaagaagagattacrtagattccattttaatttgtctacactctgttattttgatcataggtaattgtgaattggctctagtttaaagccagatagacagagatcttaaactcgggctgtctttacaagattcacaatagtatgccctgataatttgggccttttttccttaacacaaataaatgtgcgctaagcagagttgaaacgtgtcctaaaaaacccattggctacgggggttccattaaaaaatggtgtgtgggcaaacaaagctctatctttgcagcataacaaataataggttttcactttataagtatgttttcgctgcattnttaaagcatctggctaatgcaaaacaagcatgggccagcaatcccagtttagcattgtatctggaaa

SEQ ID NO: 441716 - DNA, 617 bp, Homo sapiens
tttaaatatcagtggatactgaaatgcttgatgtcaaggttttgagttcttgcttggcacaagtagaacatgcaaatgtttaatggataaatagctgaatagaaacatttattggagccaaaacaatctagctccagttttgaggaccactgctaagtattaggaggaaatgataactcacatgatctsaagagcccaaatctagtcctgccacccatatcattactacctaatcatgaaaactaaagtgtcacagagatcaacagaaggaaggaaaatctggtcccagtgtgaaagtataattaacttctggttggaaggacatgcacacaaaggactaaaatattgatatcctaagtcagaaatgggcatactcccaaatgaaattgtacctaaattttataaatagattctaaataaaaatgaaaatagatatattcaactttattaaagatgttgaatggtctgccatttggtaataaattgagtttaccagatttcagtaaatttcacttgtgataaacaagggtccctgtttttgaaagggaattaatactttgacagcttgctcctggtaggactattctaatgagcttaaatgtcaaggtggggatggg

SEQ ID NO: 441717 - DNA, 592 bp, Homo sapiens
agtcactcaataaaaatgtgagaatttccaagtaaactatcattctgattccagggtgttgggtcacatgatacattcatataaataaraaaccattctggtgctcactctcttttcagagctcaccaaatacttggtggccacaaaaatgaaaggatgaatgaaatggctacatgaaattttgcctccctctcattgttttccaagtagcctaattttggacagctctgtcacattaactattctgggatctttatttccattactgctttccatgataattttttgatggtgtgcagaaaacagttaacataccaggccagagactgctatcctttgaaaggcctgctcactaggttggtccttggttggcttctggaaagttggatttcaggcatgctcccaccattctcagaactgatgatgaatggctcactgcctcagttgttgcacaaacaatgtgatttatatggaacacctcctttccttctgggagtctagaattttggtatgtgctagggagaggacacctatatgactagcccccagtaaaaatcttctagtgttgagtctctgatagacttccctggta

SEQ ID NO: 441718 - DNA, 508 bp, Homo sapiens
taaactatcattctgattccagggtgttgggtcacatgatacattcatataaataagaaaccattctggtgctcactctcttttcagagctcaccaaatacttggtggccacaaaaatgaaaggatgaatgaaatggctacatgaaattttgcctccctctcattgttttccaagtagcctaattttggacagctctgtcacattaactattctgggatctttatttcmattactgctttccatgataattttttgatggtgtgcagaaaacagttaacataccaggccagagactgctatcctttgaaaggcctgctcactaggttggtccttggttggcttctggaaagttggatttcaggcatgctcccaccattctcagaactgatgatgaatggctcactgcctcagttgttgcacaaacaatgtgatttatatggaacacctcctttccttctgggagtctagaattttggtatgtgctagggagaggacacctatatgact

SEQ ID NO: 441719 - DNA, 508 bp, Homo sapiens
taaactatcattctgattccagggtgttgggtcacatgatacattcatataaataagaaaccattctggtgctcactctcttttcagagctcaccaaatacttggtggccacaaaaatgaaaggatgaatgaaatggctacatgaaattttgcctccctctcattgttttccaagtagcctaattttggacagctctgtcacattaactattctgggatctttatttccattactgctttccatgataattttttgatggtgtgcagaaaacagttaacataccaggccagagacwgctatcctttgaaaggcctgctcactaggttggtccttggttggcttctggaaagttggatttcaggcatgctcccaccattctcagaactgatgatgaatggctcactgcctcagttgttgcacaaacaatgtgatttatatggaacacctcctttccttctgggagtctagaattttggtatgtgctagggagaggacacctatatgact

SEQ ID NO: 441720 - DNA, 457 bp, Homo sapiens
agttggtacataaatgaatacatgccacttaggtatttctctcaattacaatgcctggctcaatacattgmaaatttttatttgacttatttgaatacgagatcattagcatcctctaaatttccagaacctaaaaatttcatcagtctctggagacagaggaggatatgagctttggtgactggctgaaatcataagaaaccaacaaagaggaatcatattttaatttaggggatgaaccacaagatatatatttgaaattttctaatgtaaaattcaaaattcaagcttaagtggaccaatatgagtgggaaaaaaattgtgatctcatgtctatatcttgtcttacttctgcagtttataaggttaaaatataacctacatagcagtcacataggatagctatatgggttattttgtatatgtagcatggcatatattcagtagctattaattc

SEQ ID NO: 441721 - DNA, 493 bp, Homo sapiens
ctagggtttgcttagctttgcatccccagtgcagtgatttacacacagaatacacctagcaaatagttggtacataaatgaatacatgccacttaggtatttctctcaattacaatgcctggctcaatacattgcaaatttttatttgacttatttgaatacgagatcattagcatcctctaaatttccagaacctaaaaatttcatcagtctctggagacagaggaggatatgagctttggtgactggctgaaatcataagaaaccaayaaagaggaatcatattttaatttaggggatgaaccacaagatatatatttgaaattttctaatgtaaaattcaaaattcaagcttaagtggaccaatatgagtgggaaaaaaattgtgatctcatgtctatatcttgtcttacttctgcagtttataaggttaaaatataacctacatagcagtcacataggatagctatatgggttattttgtatatgtagc

SEQ ID NO: 441722 - DNA, 618 bp, Homo sapiens
aactcttctgtggattttctcaggggttatcagaataggatggttaacagaaggtggaatgcaaaagaaggaagttggcaccccttcctttgactctgttctctctcacccactttgggaagctytcattcatcacaaatgaagacactcttgttgctgttaaatctgctgacaagtaatgtcatcggttctacttcaaggtgtaggagaccttgtagaatcaggtaaatatgctgccatgtgccctcctctgccttgggagtgaaaggaggaaatctaacactgacttagggaacaacatatgcctcatgaatacagaacacagaaactacattgacgaaagattgccatttcaacactgcatttagaatcacaattccataaggttcaaggtttgctgaatcaatcagtcaatcagtcaaaaaaccataagatgttacaggaagacatcttaagagagcatctcattctaccctttatcatctaggcaagagaaatgaaattaaaacaggtgaggtaatctcctgcaaggttccttagtggcagacacaagtaaaatccacgtctccagattatcagtcttcctcatacacacacatattcacactcatacacaca

SEQ ID NO: 441723 - DNA, 461 bp, Homo sapiens
aaatgaagacactcttgttgctgttaaatctgctgacaagtaatgtcatcggttctacttcaaggtgtaggagaccttgtagaatcaggtaaatatgctgccatgtgccctcctctgccttgggagtgaaaggaggaaatctaacactgacttagggaacaacatatgcctcatgaatacagaacacagaaactacattgacgaaagattgccatttcaacactgcatttagaatcacaattccataaggttcaaggtttgctgaatcaatcagtcaatcagtcaaaaaaccataagatgttacaggaagacatcttaagagagcatctcattctaccctttatcatctaggcaagagaaatgaaattaaaacaggtgaggtaatctcctgcaaggttccttagtggcagacacragtaaaatccacgtctccagattatcagtcttcctcatacacacac

SEQ ID NO: 441724 - DNA, 501 bp, Homo sapiens
cccctcctttccttctatgcatatgtcattgtctcctatttcacagaaaaaaagaataagtcctttagatttgaataccctaaaatcactgcctccccaaacttcygtgcccctgaaccatgcttccttcagtctctcatgggttaacttgtctttcctgttgattaaggcaaatctcttccatctgcactctgaattccatccactgctgtccccaaagggatctcattccattatttattactctcccccctcctctatattgtcactctttccctcccattgattcttttctctatgctcatctcttcatatcttcatatttaagacagagagagcaagagcaagcctcttctccacattgtgttcctgttcctactagccaaaggttttccttcctttcacagccatgtttctagaaagaagtcttcactatacttcatgactccacaaactcagcaaacagaaactctgacttttgatgtcatcatccaactaaaa

SEQ ID NO: 441725 - DNA, 501 bp, Homo sapiens
cccctcctttccttctatgcatatgtcattgtctcctatttcacagaaaaaaagaataagtcctttagatttgaataccctaaaatcactgcctccccaaacttctgtgcccctgaaccatgcttccttcagtctctcatgggttaacttgtctttcctgttgattaaggcaaatctcttccatctgcactctgaattccatccactgctgtccccaaagggatctyattccattatttattactctcccccctcctctatattgtcactctttccctcccattgattcttttctctatgctcatctcttcatatcttcatatttaagacagagagagcaagagcaagcctcttctccacattgtgttcctgttcctactagccaaaggttttccttcctttcacagccatgtttctagaaagaagtcttcactatacttcatgactccacaaactcagcaaacagaaactctgacttttgatgtcatcatccaactaaaa

SEQ ID NO: 441726 - DNA, 501 bp, Homo sapiens
cccctcctttccttctatgcatatgtcattgtctcctatttcacagaaaaaaagaataagtcctttagatttgaataccctaaaatcactgcctccccaaacttctgtgcccctgaaccatgcttccttcagtctctcatgggttaacttgtctttcctgttgattaaggcaaatctcttccatctgcactctgaattccatccactgctgtccccaaagggatctcattccattatttattactctcccccctcctctatattgtcactctttccctcccattgattcttttctctatgctmatctcttcatatcttcatatttaagacagagagagcaagagcaagcctcttctccacattgtgttcctgttcctactagccaaaggttttccttcctttcacagccatgtttctagaaagaagtcttcactatacttcatgactccacaaactcagcaaacagaaactctgacttttgatgtcatcatccaactaaaa

SEQ ID NO: 441727 - DNA, 539 bp, Homo sapiens
tcaggaggtctgggttagggcctgagatgatgcttttctaacacactccctggtgatgtgatgttgtgctccagaaaccactgcagtagcaagtggtactaaattgtaccacttttstacaattatctagattgtaaacttaacctccttttaaaggcccccaaagccttttctgttgggtctccatttatccctatagactcgtctccaaccattttttcttctttgctcttaatgctttagcaacattggatggcttctggccttctgaacccaccatgatcatctgctcctctatggctttacattttcagttccatctgacttgcgtgcccacctataactctataggtttatatttactcaacattatctcggtaagtctgactccttgcccgatgacgagctcactaagaagggtctggttcatctcccagtttctagccctagcagagtatcctggctcagaggagctactctccaaagtttggggaatcaatcatctattcctctacagcataagccacttaaaaattccc

SEQ ID NO: 441728 - DNA, 638 bp, Homo sapiens
ggtatacagcctgaacatcagttagtttcagtagcaattactgatttaacgtgttctaaatgtgcagccaggactgaaaatcactagtttaatacttagttgtcagatttttttaaagggagataatatatgagattcaatgaaatactttatgaaaatgyttagcccagaccctggcccacccagctcaataatgctggtcgttattgttaaggcaggagatacagagggatcactgtctagagctgggactggcaatctggagtcagagcaaaactggctgaggtgacccctcactgccgatcttactaccctgctgcatcagatgagttattagcctaactggagccctcaggagagtctgatcccaactctaatcctgggagataatctgaaccctgactccttaatcctgagagtctgaaccctagctttttaattctggagtaaagtctgaaccctagccccttaattccggaggagagtctgaaccttagcttcttattcctggaagtgtctgaaccctggctccacagtcctgagagagattctgaaccctcaatccttaatcctgggacagaatctgaacactagctccttagtactgtgaaagaatctaaaccctacctccttattcc

SEQ ID NO: 441729 - DNA, 536 bp, Homo sapiens
aaatacctggactattcagaacatggccaaactcagaaagtaattaaaatggcagtcataaaaatcactgtaactaactcacgaaaggccctttggtctcctgttttgggtctattgttctaactttgcatttcatactaagcaggttgattaattgacacaggttgaatctcccttctctgaaatgattggcaccagaagtcttttgtattttagggcattttggatgtcagattttcagattrggggtatttaatctctatggctcaaagattttaaagtagcccctatgatcctcacctcctggtctttatagcctggtgttcataatcctttcccttgagtgtgggcagaatctgtgactgcttctaaccaatagaatatggcaaagacgacaggatattattcctctgatgatgttgtgtaagacaccctcatactagaagatttgcttgagagtcttgctctccttcctactggctttgaagaagccagctaccatgagttttacagccacaggccatgaattcttccaa

SEQ ID NO: 441730 - DNA, 536 bp, Homo sapiens
aaatacctggactattcagaacatggccaaactcagaaagtaattaaaatggcagtcataaaaatcactgtaactaactcacgaaaggccctttggtctcctgttttgggtctattgttctaactttgcatttcatactaagcaggttgattaattgacacaggttgaatctcccttctctgaaatgattggcaccagaagtcttttgtattttagggcattttggatgtcagattttcagattgggggtatttaatctctrtggctcaaagattttaaagtagcccctatgatcctcacctcctggtctttatagcctggtgttcataatcctttcccttgagtgtgggcagaatctgtgactgcttctaaccaatagaatatggcaaagacgacaggatattattcctctgatgatgttgtgtaagacaccctcatactagaagatttgcttgagagtcttgctctccttcctactggctttgaagaagccagctaccatgagttttacagccacaggccatgaattcttccaa

SEQ ID NO: 441731 - DNA, 550 bp, Homo sapiens
tttcttttatatattaatatataggcatgtgtgtataccatatgcaygtatatcacatgtatatctatcatatgtgtatgtatcctatatgtataccttgtatatacacatatacacacaccacctaagatgcctctgaggattgctctgtggatatgaggtgctgtcttcctgaggagaagccaatttctccatcacagcttacactgatgcagtgccttccatgcaacaggtactataccaaaggctttatatggcatacccctcactcaatcctcacaaacagtcctctgagaaatatagactttctctcatttaagatgaggaatccaaggcacagattagttcatttatttgctcaggatcatgtaactctgatgtacacagccaggattcaaaccctcttactctgtaacccatgcctcgcactgcctccctcagtcacataatactgatgtggaaaaaggcagtaagagcatttacaaggctccgtaagtgaagtaagttgcatagtggttcccaaacctggctgcacatcagaatcatttgg

SEQ ID NO: 441732 - DNA, 550 bp, Homo sapiens
tttcttttatatattaatatataggcatgtgtgtataccatatgcatgtatatcacatgtatatstatcatatgtgtatgtatcctatatgtataccttgtatatacacatatacacacaccacctaagatgcctctgaggattgctctgtggatatgaggtgctgtcttcctgaggagaagccaatttctccatcacagcttacactgatgcagtgccttccatgcaacaggtactataccaaaggctttatatggcatacccctcactcaatcctcacaaacagtcctctgagaaatatagactttctctcatttaagatgaggaatccaaggcacagattagttcatttatttgctcaggatcatgtaactctgatgtacacagccaggattcaaaccctcttactctgtaacccatgcctcgcactgcctccctcagtcacataatactgatgtggaaaaaggcagtaagagcatttacaaggctccgtaagtgaagtaagttgcatagtggttcccaaacctggctgcacatcagaatcatttgg

SEQ ID NO: 441733 - DNA, 592 bp, Homo sapiens
tgggcatggtggcacaagcctgtactcccagctacatgggaggatgaggtgggaagatggcttgagcctggaggttggggctgctgtgagccatgatggtgtcactgtacaccagcctaggcaacagagtagaaccctgtttcaaaaaaaaaaaaaaaaaaaaaattccacactcttgcttttaagagttaacgtgaatactttttgctcacttctttcaattttaagattcttgggctttggaggaaactaaacaccaagaatatcttcttcaaaagaggctttcactctaraaagacttttctcaagtgtaataaagacctactttcaaaaatcattaattataaagccacttcctatatgttttagaaacaggattctttcaggtgtcattttattctattttcccatcagaaatcggcagtggtttggcggcaggaaactgtgctggagggctcagcacggtggctctgaagaacaatgctggtcgtgactgacttctggctcagcatttaacacttcctggcgtaactttctaatctgtaccaggttatatacctgccttccagttaatgtcttcaggcatgcagtt

SEQ ID NO: 441734 - DNA, 632 bp, Homo sapiens
agaacattcagttcatgagacatgtgaacgattaacctatttagttaaaaatatattggccaggcgtggtgactcatgcctgtatcctggtgctgtgggaggccaagttgggaagattgctccaagctasaagttcgtgaccagctgggcaacataagagaatctccccatctctacagaaaattaaaaaaaaaaaaattagccaaccatggtggcacatgcttgtagtcctagctgctcaggtggctgaggcaagaggattgcttgagcccaggagttggaggctgcagtgaactatgtttgtgccagtgcactgcattccagcatgagtgacagagcaagaccctgtctgtaaataaataaataaatttatctgtatgttcatgtataaatagaatttttctattctatttttacctattcaggtataggtattatactctgatacttgctttcttcttatcttttagtattgtcagatttttttaatgctttttataaatatagaaaaaaaccacaaagctctttacagtttgaaaaaagcttttgtaggagtatccaaaaatacttagcatgcatgtatggatagggggtgttttttctgttccttttgatggaaatacctgaggaaa

SEQ ID NO: 441735 - DNA, 648 bp, Homo sapiens
gagtcactgttcctggccccgtctgcactttctaaattctcctggcctaaagttccactgatgatgatgagccctggaattttgaggtcaataatcctgtagctgaatgtcagagaagtctaatttttttaacagaataattttaataatataattacatcatttaaatcaagtagctgataatgtaatcgcccaatgggttctccttgcccactgcccagatagagctgatttatcaagatgggagttgcaatagaaaagagtttaatttacacagagctaggctaaacgggtgaacagagatttaatactcaaattagtctccctgaaaatctgaaractggggttttttaaggctaatttggcaggttgggggtcagggtggtgagtgctgattggtcaggtcggagatgcaatcatagtggggcccgagtgggttcttgctgaattctgttcctgtgtgggatcacagagctggttgagccagatggaaaatgggtctgggtggctccggctggtgcaaaatgggtctgggtggctccggctggtgcatcagaatggggctctgaagaatacctcaagccctgatcttaggttttgctatagtgatgttatccctaggaacaattagggaggttcaggatcttg

SEQ ID NO: 441736 - DNA, 580 bp, Homo sapiens
tgaatcataggtggtttccctcatcctgttattgtgatagtgagttctcacgagatctgatgggttttaaggggttcttccccccttcacctggcacttctccctcctgccaccccatgaagaaggtgtcttgcttcccattagccttctgccgtaattgtaagttccctgaggcctcctcagccatgaggaactgtgagtcaattaaacctctttctttccctaaattacccaatcttgggcagttctttatagcagtatgaaaatggactaatacatctgtctcttctaaaaatacaaaattagccaggtgaagtggcccacatctgtaatcccagctacttgggaggctgaggcacgagaatcgcttgaayccaggaagcagaagttgcagtgagtagagattgtgccactgcactccagcctgggcaacagagtcagactctgtctcaaaaaaaagagagagatcatcagaattcatttatttaacttgctttcactaaaaacttaagtgccttctatgtgctaaacactgtattagacttgggaattgttgtgttaaacaaggatcatgtttagg

SEQ ID NO: 441737 - DNA, 580 bp, Homo sapiens
gatgaaacccataagtttttttttttttgtctgagaaagtctttatttgtcttctgtatttgaagaatatttctactgcttatactcttctagggtcaaagttttatttccttcagcattttaaatatgttatgccactgtcttctggcctgcaaggtttccagtgaaaagcccactaccagaaatgttgcagagctccattgtatgttatttgtttttgtttttctcttgttgcttttagtatcttttctttatctttgacctttgtgagtttggttttaawatggcttgagattgtcttctttggtttatgtctgcttggtcttctatgaccttcttgaacttgaatattggtatctttccttaggtttggaaagttttctattgtttttcttttgaataaactttctatttctatttttttctttagctcctctttaagacccaaaactcttagatttggccttttgaggctacttttaaattctgtaggcatgctttatttttttatactcctttcttttttgtctcctctgactgtgcatttccaaatagtctgtcttcaggaccaccgattctt

SEQ ID NO: 441738 - DNA, 580 bp, Homo sapiens
gatgaaacccataagtttttttttttttgtctgagaaagtctttatttgtcttctgtatttgaagaatatttctactgcttatactcttctagggtcaaagttttatttccttcagcattttaaatatgttatgccactgtcttctggcctgcaaggtttccagtgaaaagcccactaccagaaatgttgcagagctccattgtatgttatttgtttttgtttttctcttgttgcttttagtatcttttctttatctttgacctttgtgagtttggttttaatatggcttgagattgtcttctttggtttatgtctgyttggtcttctatgaccttcttgaacttgaatattggtatctttccttaggtttggaaagttttctattgtttttcttttgaataaactttctatttctatttttttctttagctcctctttaagacccaaaactcttagatttggccttttgaggctacttttaaattctgtaggcatgctttatttttttatactcctttcttttttgtctcctctgactgtgcatttccaaatagtctgtcttcaggaccaccgattctt

SEQ ID NO: 441739 - DNA, 546 bp, Homo sapiens
cagagccccaaaaccctttagtccttggtggtgacagctgagatgagtgatcccatctggctagtgctggtttgaatatttcctacatgggcaagggtcagctgagttcagcccaattttgcttttccctgtgacagggcagtgctgagttcaatgtgatctctcactatttctgtgctctctctctcttcagcatacagattacttctctgttccatgcagccactgctgaaggatgaggaggtgtggttggtatcagtgatcaaakactttctttcctaccttccgtgtagggagaacactcccaaaccatgttttcctctattttcacaccacaacaataataaacacagaagaaggcttctgtgaccaactgtgtggggtttttccccacaccagcagacatcagctggttgtcctctaattcatttctatcactacctgcctgaagagagtgtcagatcccacagtagaggcctcaattcccaagactgctcctctccacacaccagttgcaagtctgggtccccagagcttctgaccaaa

SEQ ID NO: 441740 - DNA, 581 bp, Homo sapiens
tctttaaataaatgataataaaaacacaacataccaaaacctgtgggatacagtgaaagcagtactaagagagaaatttatagctataaaaacctatatcaaaaaaattcaaataaacaacctattaacatgctttaaagaactagaaaatcaatagaaaaccaaacctaaaattaatagaagaaaagaaatttaaaatatcaagcataaataaataaaattcaataaagaaaacaatagaaagatcaataaaatgaaatgttggttttttaaagagacttttaaaaatagacaaacctctagtcagattaactacttaaaaaggagtagactcaagtaaataaaaccagaggtgaaaacagagacattgcaactgataccacaaacatttaaaggatgataagtgactgctacgagaaattatatgccaataaattggaaaatctagaaaaaatgaataaattcctaaacacatagaaagtaccaggactgaaacatgaagaaatccaaaacccaaacagaccaataataataacaagattgaarccataataaagtctcccagtaaagaaaagcccagg

SEQ ID NO: 441741 - DNA, 496 bp, Homo sapiens
gtggtgtacgtacaccatggactatgcagccacgaaaaagaacaaaataatatcctttgcagcaacacggatacagtcagaggccataaacctaagctaattaatgcagagacagaaaaccaaatactgcatgtctcataartgggagctaaacattgggtactcatggacataaagatgggaagaatagacattgtggactactagagaggggagaaagagtgaggccatggtttgaaaaactacccattgggtaatatgctcactacctgagtgatggcatcatttgtaccccaaacctcagtgttatgcaatatgcacgttacgaacttgtacatgtacttcctgttttagattttaaaaaaagttgaagtaaagcagacctggggtataggtaaagattttgggcaaatatttatgtggagtgccttcccttgcccccagatgcatttctgattttctcattgtctttggttttaagcacttttatcatggt

SEQ ID NO: 441742 - DNA, 579 bp, Homo sapiens
gaatgaaaaactgtgatagtatggatttatcttctaacttttgaaatcttaggagaattgctaagctgttcatgcttcagttaaaacaaacaaacaaaacaaaataaaacaaaaacaaaattaaattatctcccaaaaatgaaaatccattttactttatgaaacccttaggaatttttacatactgcctaagaaaatatctagtgatgtttcttatggcaaactattcttcaattcaacttaaagcaattataaatagagaaatattatgcatacattaatataagtatgattgagyttttaaggcagacataaagcacctttataaagaagttcacggatcttcaaggctatgtgtgtggtctgtagtcttggttttagaaggtcggtctggctctctgccactgccagcgtcccatattaggtacaagattaaatgaaaagctgaaaagaaaaacaaataggttcaaaagttcagaaacacaaaagacttgggcaggtgtttagagagaccagtacttaatatcatagacttccaaatcagagataaggcttgatatcaggctctgatacctacta

SEQ ID NO: 441743 - DNA, 579 bp, Homo sapiens
gaatgaaaaactgtgatagtatggatttatcttctaacttttgaaatcttaggagaattgctaagctgttcatgcttcagttaaaacaaacaaacaaaacaaaataaaacaaaaacaaaattaaattatctcccaaaaatgaaaatccattttactttatgaaacccttaggaatttttacatactgcctaagaaaatatctagtgatgtttcttatggcaaactattcttcaattcaacttaaagcaattataaatagagaaatattatgcatacattaatataagtatgattgagtttttaaggcagacataaagcacctttataaagaagttcacggatcttcaaggctatgtgtgtggtctgtagtcttggttttagaaggtcggtctggctctctgccactgccagcgtcccatattaggtacaagattaaatgaaaagctgaaaagaaaaacaaataggttcaaaagttcagaaacacaaaagacttkggcaggtgtttagagagaccagtacttaatatcatagacttccaaatcagagataaggcttgatatcaggctctgatacctacta

SEQ ID NO: 441744 - DNA, 589 bp, Homo sapiens
taaatcagtctcttttaacagttatacctatattttaatctgactttataatgtgaaacagtaaattgcattgacctatttttaaagggcttatctgcttggtctgcagtcttaaataaagactgatttaagactctcccttagagggaaattgaagatartagagttaatatttcaatatttttgtttctatgtgtcttttctagagaaagaaggtttcttcttttctgtctctcacctttctatccccatgaagtaacttaaatgcagtaaaacatttcttctgttaatcatgtttttggggcctattgcttcaacaaatacatgactgtatgaatcctattgccataattttacaaagtagaggctcttcttcctacctggtttatcagagtaggtttgcagtggctattccaaaagcaggaattctaggaacatctggcagagaggaattcagttttaagagacataaattgtacttaaatatttcactgaatagctgcttgagtttgtacaaggaacttaacctattacttcctactctcaccatccatgaatatgattaaatattctatccttcccacagttt

SEQ ID NO: 441745 - DNA, 589 bp, Homo sapiens
taaatcagtctcttttaacagttatacctatattttaatctgactttataatgtgaaacagtaaattgcattgacctatttttaaagggcttatctgcttggtctgcagtcttaaataaagactgatttaagactctcccttagagggaaattgaagatagtagagttaatatttcaatatttttgtttctatgtgtcttttctagagaaagaaggtttcttcttttctgtctctcacctttctatccccatgaagtaacttaaatgcagtaaaacatttcttctgttaatcatgtttttggggcctattgcttcaacaaatacatgactgtatgaatcctattgccataattttacaaagtagaggctcttcttcctacctggtttatcagagtaggtttgcagtggctattccaaaagcaggaattctaggaacatctggcagagaggaattcarttttaagagacataaattgtacttaaatatttcactgaatagctgcttgagtttgtacaaggaacttaacctattacttcctactctcaccatccatgaatatgattaaatattctatccttcccacagttt

SEQ ID NO: 441746 - DNA, 589 bp, Homo sapiens
taaatcagtctcttttaacagttatacctatattttaatctgactttataatgtgaaacagtaaattgcattgacctatttttaaagggcttatctgcttggtctgcagtcttaaataaagactgatttaagactctcccttagagggaaattgaagatagtagagttaatatttcaatatttttgtttctatgtgtcttttctagagaaagaaggtttcttcttttctgtctctcacctttctatccccatgaagtaacttaaatgcagtaaaacatttcttctgttaatcatgtttttggggcctattgcttcaacaaatacatgactgtatgaatcctattgccataattttacaaagtagaggctcttcttcctacctggtttatcagagtaggtttgcagtggctattccaaaagcaggaattctaggaacatctggcagagaggaattcagttttaagagacataaattgtacttaaatatttcactgaatagctgcttgagtttgtacmaggaacttaacctattacttcctactctcaccatccatgaatatgattaaatattctatccttcccacagttt

SEQ ID NO: 441747 - DNA, 617 bp, Homo sapiens
ttataaaccaatgtgctataataattgaagaaattatagttcatgatgctattgtgctatatatagggcatgatgcttggtaaggtgctgcagctggccagtttgtgttgccatggaatcctggttctttgttatataggcagaggatgtggaacctgaaaaaggggttgcattgacgtcacagtattgctgcaggaatgacataggtcatctaggattatcatttgttcatatgttttgacagttaaagctctttttaaaccaatgaattgttcaagtatgtattatataccttttttattatagtgcactatggatttgaaatgtctaaatggtggaaatagcattgaactaaaacatggcaaatcgtgattattatggataaatgatacatatgtgggtatttggattgttaaaaagcaaacacatgtattgtgcaattgttttcatgttggtacatatatagttctgcatcacactatttaatagctgcatggtattgtacagtttacatatcacttgtgatttcaacaggaaacacttttggrcaggttgaagggaaccagcaaaagatggtgaaatacccaggtattggcaaaggaagaaagcaattacca

SEQ ID NO: 441748 - DNA, 617 bp, Homo sapiens
ttataaaccaatgtgctataataattgaagaaattatagttcatgatgctattgtgctatatatagggcatgatgcttggtaaggtgctgcagctggccagtttgtgttgccatggaatcctggttctttgttatataggcagaggatgtggaacctgaaaaaggggttgcattgacgtcacagtattgctgcaggaatgacataggtcatctaggattatcatttgttcatatgttttgacagttaaagctctttttaaaccaatgaattgttcaagtatgtattatataccttttttattatagtgcactatggatttgaaatgtctaaatggtggaaatagcattgaactaaaacatggcaaatcgtgattattatggataaatgatacatatgtgggtatttggattgttaaaaagcaaacacatgtattgtgcaattgttttcatgttggtacatatatagttctgcatcacactatttaatagctgcatggtattgtacagtttacatatcacttgtgatttcaacaggaaacacttttgggcaggttkaagggaaccagcaaaagatggtgaaatacccaggtattggcaaaggaagaaagcaattacca

SEQ ID NO: 441749 - DNA, 572 bp, Homo sapiens
atagtcaaaggctacaaggattaggatgtagacatatatctagggccattattctgcctaccatatccaactaagcaaatgtgattacccaaaaagaattccattcttcttcttagtagaactatgttacaaaaattatactctattattactattgtattttgttaattaaattatactctactattactatctgttttgttaagtaaaatatatgagaatttgtttttctcttgttatatagttacccatataatattctctattttgccttttagcccataagcytaaaatatctagccctttacagaaaaagcttgccaataccctatctagtgaaaaagtataaatatgtatatatgaatatatattaaaatatatatatatgcagactttctggaagaaagtttaaaaatatttttccaaaactgaaaaaacaaaaacaaaaaatactgtgcaaatatgccggtaattatattacttttttttcccctgggtaactatttatatgcttatatttagtaacagttttatattaaatgatgtttatttagcattatttaaaaaggcag

SEQ ID NO: 441750 - DNA, 572 bp, Homo sapiens
atagtcaaaggctacaaggattaggatgtagacatatatctagggccattattctgcctaccatatccaactaagcaaatgtgattacccaaaaagaattccattcttcttcttagtagaactatgttacaaaaattatactctattattactattgtattttgttaattaaattatactctactattactatctgttttgttaagtaaaatatatgagaatttgtttttctcttgttatatagttacccatataatattctctattttgccttttagcccataagcctaaaatatctagccctttacagaaaaagcttgccaataccctatctagtgaaaaagtataaatatgtatatatgaatatatattaaaatatatatatatgcagactttctgraagaaagtttaaaaatatttttccaaaactgaaaaaacaaaaacaaaaaatactgtgcaaatatgccggtaattatattacttttttttcccctgggtaactatttatatgcttatatttagtaacagttttatattaaatgatgtttatttagcattatttaaaaaggcag

SEQ ID NO: 441751 - DNA, 598 bp, Homo sapiens
caaaataaatataaataattatttcgtataccattcgttatatacatttcagtgtttttaataatgtcaatttcttatattttaaggagaactctagttatttttataaatctaattgacttaattttgtgggaatataaaagaagtgattaaaaacctttggtttaaagtagttaatcctgaaatcaagctctgtaaatattgtgtagggatatggagaaatcctcaaaaagaaagagctaaagaaaatggcagggatggcatcttgggagtataactgaaagtaggaagatgtggataraagagtcttatttttaatcacagggcatatgtgctatttgaattattttgacaaaagtataaaaatatggaattatgcattgtgtgtgtgtgtggtttcatctgtttaagaaatatgtgatggagactgtcctatcatcaggaaattattccagttcacagatcagaaatgactgaggaattgagagtacagctaattactaaggttgcttcttttgaccaaataggccagagcttgaataaaagaaacatggattgaatgaatttttataagacctaagaagaaagtttcataagc

SEQ ID NO: 441752 - DNA, 588 bp, Homo sapiens
gggtgaaatgcgatcaaacaacatttcatgctacagagaaatctttcatgaaaggaaaagtcaagagatgtggcaaacgtcattgttgtcttattttaagaaatttccacaaccactctaaccttcagcaaccatcaccctgagcagtcagctgccatcaacatcaaggcacgaccttccaccagcaaaaagattacaacttgctgaaatattaaatgaccattagcattttcagcaataaaggatttcttaattaagctatgtacatttttagatgtaatgctattgacaactaacaggctatggtatggcataaagataatttttatatgcactgggaaaccaaaaaatttgtgtgacttgctttattgcaatagttgstttattgtgatggtctggaaatgaacctgcaatttttctgagatacaaaatattaactgtactttgttttggtttgtacatatgaatctaaggtttattgacatggaatgatttgaccaaggtgatatagtggttaagcagttaagtgattaaactaactagtacaaaaaaaaaaaaaaaacccacaaaacttgattgtctgaaatc

SEQ ID NO: 441753 - DNA, 584 bp, Homo sapiens
aggcagcacttcatttcttgccctaaacaagcaaagaaaatgcagaggtctcatccttaagactcagaagctaatgcttctttcatttctggggggaaaagatgggcaactgagtgaagaaaacaggcaatgaatggtatgactagatattaagaaattcaaggccaaacaaaacaaataccaaaaataaaaaaaaaaagaaaaatgaaaacaaaagttatttctgagaccctgcaattacatctttgttcagggttaataaatcagtgaatggaagggggagggggaatcctcaacaatttgtgggatttcttttcattatggggctcaatgtatttcttattactgattacacatccacctggtgtcatatccacctatttacatcttcagcctggcttgattgttaacatgtggggagtttgtgttttggtgccgtgtgagtgtgtgtctgaaagcagtgagttatgaatgtagtagggattccaggaatgatgtgtatgkgtgtttgcatagcaaacgaagcaggaattttctgtgtataaaaataggaatgtgcacctaactgatgtactagataactg

SEQ ID NO: 441754 - DNA, 553 bp, Homo sapiens
accacctgctcaattgcagttagtagaaaatagatgacatttgaatgactgcttgatgataaatatttctcattaaaatttctattctcacatttggctatttattgcataatctattttaggccaaattttcctagtacctgctttaagtgcatctagcattttcatacaaccctggaaaccacattaaattctccaaaatgctcagcttcttcaacagtgtttcacaacagttcattacccctttttcaggtaactagtaatcttagaacttctatttctgttccatgaaaggttttttttttttttttttttactaraatgcttattttatatcttaaggacacaatatccattttcatatgtgagagaattcttatgtgtactattacatttgtatgctcttatcttagtcatatcaggctgctgtaacaaaaataccatagacagaatgacttaaacaacgaagatttatttcgcacagttgtggagtttgaaaaatcaagaccaaggcactatcatattcatggtctgatgtgggccccagcccctg

SEQ ID NO: 441755 - DNA, 623 bp, Homo sapiens
ctctaaatcttatggtgctattccattgaagttcaatggtatgaatgctgtttgacaggattttgaggacttcattatttggaatccatgccaaaaatatttggagatttaaacctcaaaattcctatcttattcatttcaataaaagaggattcttagcatgataaaaaagtgggaataaataaaattggagcataccaatacctgtttttcatgctctaggccaagtgtcagtaaactgcataaacaaatgagcatggctgtgtgccattaagactttatttaaaagaaaaactggcaagggccaggtttgtttggtgggctgtacattgccaacccccactttatattaaaaaacaccgtgtcactcaatcattatttttttcaaaatgataaataatgtttttcttctactggaaaacagataccctcagctccaagtttgcgctgtaaatctgttttctttctgtcttcaaaatgttgcatctacaactgcacttcgactggaagactcagatctacaaagaaaaaaatagacaaatgtattacaagtttctattacatacttgcaytcaatttggaagtaatttgtggacactaaaagactggatgaaaagaatgta

SEQ ID NO: 441756 - DNA, 559 bp, Homo sapiens
taacgataaaagaatgctaaaacttgtgggtgaaaacatgatgaacaagaatatatttagacagtctcaaagaatctccccattaaagtactaattaattaccaaaaaaaggaatattaagtttacagaggagagcaagtggccaccacgtaaggwataatgggataaagcaacatcataagcaaccagatggctagcactagaaggagcactgcataatttatgtagaattctctcagacagcataacctgaataaaattatgaagacacttcagacaaagccaacctggagaacattctacaaaattattgatctgaactcatcagagggaggcagaggaactcgtccagataaaagaaagctaaggaaagacattcaacagttgaaggtaatgtatgattctggattagatcctaggtcaagaaaagcaaaaccttcctgacattatttggtcaatatgcaaaattggaatatagaatgtagataaaatagtacgttaaatttgttaaatttgatagctgcattgtcattatgtgcaagaatgtccttgtccttag

SEQ ID NO: 441757 - DNA, 559 bp, Homo sapiens
taacgataaaagaatgctaaaacttgtgggtgaaaacatgatgaacaagaatatatttagacagtctcaaagaatctccccattaaagtactaattaattaccaaaaaaaggaatattaagtttacagaggagagcaagtggccaccacgtaaggtataatgggataaagcaacatcataagcaaccagatggctagcactagaargagcactgcataatttatgtagaattctctcagacagcataacctgaataaaattatgaagacacttcagacaaagccaacctggagaacattctacaaaattattgatctgaactcatcagagggaggcagaggaactcgtccagataaaagaaagctaaggaaagacattcaacagttgaaggtaatgtatgattctggattagatcctaggtcaagaaaagcaaaaccttcctgacattatttggtcaatatgcaaaattggaatatagaatgtagataaaatagtacgttaaatttgttaaatttgatagctgcattgtcattatgtgcaagaatgtccttgtccttag

SEQ ID NO: 441758 - DNA, 570 bp, Homo sapiens
atttttaaaaattacctattagtcactgttggaggttgccagggtgacaatattttaaatattggtaaataaatagaaaacaatcaggtatttatcttgcctttcctgtgtagactataactagttgatgaaagagtgttcttttttatagaaaaatcacagctaataagagcacaagtaatgaaagaatcagaaaaaagcactattttaaaaagtctaatgaaattctgtatataggcaatagttttcaatagtagctaaagccatttaaggaaagattgcttgagaatttaaatgatgttaacaggtttataacatcagaatccgtggatcaatctttataagtaatatgccttctgktgtaatatgacaataaatatacagctctacctatgaattactccagcttctccttccccacccaataaaaaaaaattgaatctgaatctaatcaagtctctatatctgtcaaatttatgggaaataaatgggataaaggaatatagtaaacaacaccaggaggccaccatccgcaaaatgcagaataaggcaaattttatatgaaaattc

SEQ ID NO: 441759 - DNA, 690 bp, Homo sapiens
gttatattcttgtattcaatttagtccataaataagtactcaacaattaaaaaacattgtattgcttttattggctattacttatcctgaatacaagtatacgctttgtattaacttgaactttacattgagtaaataacgttccctacaggtattacttcctctatcttctgcaatatttatgaatagtagccttttcctccccccttttcacttaaaaaatgcttaatttctctcctcctccctggcatgaatggtttctgattaacttattttgaaaaagaattaagagaggtaagatataaaggaaaacatggttattgaatacccctcctcactggttacagcctaagtggaatccctgataattaattcagtgctttgagtgcttttctaaggatttaattatgcctcacagataaagaaatataaaaaaattatgaataaggtaatacaattttattgaacattaaaaatggagcagatccagaatccttttctttgtagcttagagtagatgcagacagatatacatgtagttggagaaaacagaaaaacagaaatggtacttgagacttamctgaaggactctctgagagttaatattttaagtcagtagggacatatgtgagccatcagttcttaaaacactgaaccatgctctctagaagccatgttagtatgtcaatc

SEQ ID NO: 441760 - DNA, 577 bp, Homo sapiens
aatgtttagtttgatttttgaggtcttaaattatgtttcatgctgcctttacaaaaatactttcttaattttctactagagtgggaggcaaagagtacaactttcaagaagtggaaaakgtaaggtctagatatatagttctaccagagtcagatcagaaaagcatcatccttataattactaagctagcacttgagaagtgctttcatacccatgcatgaatatgctcacaataaaaactagaaataagcatttcataggtaagaaaacaggattagattactcgttttacttgcttatatttagcagctaacaagtaatgggaaaatgattcaaacctaggactcagtattcataagagacaaatgagactggagaagaaaaactgaggcaaagcaaaaagccatttgatatcttctcttgcaatttatgttcttcctattccataattctgaccctattatcagactctgttgtgcaagtcaattttagtgatagatataattttggagactactgaagtcttgttgtttccttacctgcagctatatagtggaattccatctgtttgttgaat

SEQ ID NO: 441761 - DNA, 577 bp, Homo sapiens
aatgtttagtttgatttttgaggtcttaaattatgtttcatgctgcctttacaaaaatactttcttaattttctactagagtgggaggcaaagagtacaactttcaagaagtggaaaatgtaaggtctagatatatagttctaccagagtcagatcagaaaagcatcatccttataattactaagctagcacttgagaagtgctttcatacccatgcatgaatatgctcacaataaaaactagaaataagcatttcataggtaagaaaacaggattagattactcgttttacttgcttatatttagcagctaacaagtaatgggaaaatgattcaaacctaggactcagtattcatargagacaaatgagactggagaagaaaaactgaggcaaagcaaaaagccatttgatatcttctcttgcaatttatgttcttcctattccataattctgaccctattatcagactctgttgtgcaagtcaattttagtgatagatataattttggagactactgaagtcttgttgtttccttacctgcagctatatagtggaattccatctgtttgttgaat

SEQ ID NO: 441762 - DNA, 566 bp, Homo sapiens
gacctgtatcaaaatcattcttaaatttttctatatccttttagttctcagcatagaaaaacatactatgagtaatagcagaggaagatatgagaatttcagggctgcactattttaaaagtttactttttaactttttttacaagtaaagagtatactaacagtatccagaagatcaaagaactttctcttccttgagttactacttttgttcaagtgtttaaaagtaggcaaaaagggcatctatctttctgagatagatgttagtctcagtaattgctaccagtttgaactcaaatgcctgacaggcrcagtgctaaattcctcaagtgctttagcatatattatcatttcaacaaccctgtaaaataaattatccataatcaccattttgtacatgaggaaactggaaccaaagaggcataactcttgctattgtcatttaattattagcatgattgtcttagtccattaaggttgctgggtgccttataaacaactaaaatatatttctcatagttctggtggctgagaagtataagatcaaggcaccagcctattcaatg

SEQ ID NO: 441763 - DNA, 606 bp, Homo sapiens
ctccccagggtggaatcatggaatgactcatttctctagagtgtttctgccagtgtgctggtggacaagggtacatttacaacagccctggcatgcagaagtatttaggcaatggttctgacttaaaagcatgccaaattgcattgtaagccacataattaatttcagtttgttttctaagaccttgctcctcaaagtgttttgtatagaccagcagcatgagcaccacctgggagcttctttgaaattaaaactcctcaggtcttacaaaagacctactgatcagaatctgcatttcaacaagctccccagatgattaatatgcccctttgtgttagagacgytcagatctaaaactcaaggttgacctcagcactcctaattcatgatgtgatttggaagactcatatattgttgagactgaatatgccataagaaaatatggtaattgagactctcagcatatcgtttatcatggtgttatcatggaaacaccaaagaggtatctggagaattatcaagaggctgttctatattgaaaaaccctcatccctatcatctacagttgagcctgtcacctgtttaagctttaagctgattacagtc

SEQ ID NO: 441764 - DNA, 563 bp, Homo sapiens
cagatcaagcgaaggtgccaacctcttatgtggactttcttactataacctcacattttggcaggtggaaggcaagagagaataaatacaatcaccataccagagactgcagtcaccacccaatgccctgcttattagaaakcatgacactcttgcctgtggctctgaagaagtggctcagagatttttcctggttggagaggtagaatagggagttccaaagttatccccaaaggaattgactttgtttgaaacacaatgtgaggaatttcaaagttaaggttagtcttcaaagcaagggatattttggtggtaagcaattataacagtttggtagcaccattaggccaataagccaaaccacagagtatccatttgactggagaaaaccagggaaagacaaagctaggaagaatccttctagagccagaacaacaacaacaaaaatggcctcaaaactacctctgcaaaaggacttaaaattaagttggactatggagcaatttatcatcctgagattcaggcgaaaaactggccaagcttaatgtcatggcatgatacaa

SEQ ID NO: 441765 - DNA, 563 bp, Homo sapiens
cagatcaagcgaaggtgccaacctcttatgtggactttcttactataacctcacattttggcaggtggaaggcaagagagaataaatacaatcaccataccagagactgcagtcaccacccaatgccctgcttattagaaagcatgacactcttgyctgtggctctgaagaagtggctcagagatttttcctggttggagaggtagaatagggagttccaaagttatccccaaaggaattgactttgtttgaaacacaatgtgaggaatttcaaagttaaggttagtcttcaaagcaagggatattttggtggtaagcaattataacagtttggtagcaccattaggccaataagccaaaccacagagtatccatttgactggagaaaaccagggaaagacaaagctaggaagaatccttctagagccagaacaacaacaacaaaaatggcctcaaaactacctctgcaaaaggacttaaaattaagttggactatggagcaatttatcatcctgagattcaggcgaaaaactggccaagcttaatgtcatggcatgatacaa

SEQ ID NO: 441766 - DNA, 563 bp, Homo sapiens
cagatcaagcgaaggtgccaacctcttatgtggactttcttactataacctcacattttggcaggtggaaggcaagagagaataaatacaatcaccataccagagactgcagtcaccacccaatgccctgcttattagaaagcatgacactcttgcctgtggctctgaagaagtggctcagagatttttcctggttggagaggtagaatagggagttccaaagttatccccaaaggaattgactttgtttgaaacacaatgtgaggaatttcaaagttaagrttagtcttcaaagcaagggatattttggtggtaagcaattataacagtttggtagcaccattaggccaataagccaaaccacagagtatccatttgactggagaaaaccagggaaagacaaagctaggaagaatccttctagagccagaacaacaacaacaaaaatggcctcaaaactacctctgcaaaaggacttaaaattaagttggactatggagcaatttatcatcctgagattcaggcgaaaaactggccaagcttaatgtcatggcatgatacaa

SEQ ID NO: 441767 - DNA, 563 bp, Homo sapiens
cagatcaagcgaaggtgccaacctcttatgtggactttcttactataacctcacattttggcaggtggaaggcaagagagaataaatacaatcaccataccagagactgcagtcaccacccaatgccctgcttattagaaagcatgacactcttgcctgtggctctgaagaagtggctcagagatttttcctggttggagaggtagaatagggagttccaaagttatccccaaaggaattgactttgtttgaaacacaatgtgaggaatttcaaagttaaggttagtcttcaaagcaagggatattttggtggtaagcaattataacagtttggtagcaccattaggccaataagccaaaccacagagtatccatttgactggagaaaaccagggaaagacaaagctaggaagaatccttctagagccagaacaacaacaacaaaaatggcctcaaaactacctctgcaaaaggacttaaaattaagttggactatggagmaatttatcatcctgagattcaggcgaaaaactggccaagcttaatgtcatggcatgatacaa

SEQ ID NO: 441768 - DNA, 549 bp, Homo sapiens
attaatcctattaaattatcccaaaagattgaaaaaaagggaatcttccctaacatagctgtgaaatcagtatcactttgacaccaaagtcaggaaaggacatagaaaagtggaaagtagagaccaatatccctgatgagtatacacgcaaaaatcctcaacaaaataccagcaaatataatccaacagcacattaaaattgtaattcaccatggtcaagtggatttcatcctarggaggcaaggatggctcaacatacacaagtcaataaatgtgattcaccacataaacacaattttaaaaaagaaccatatgatcatttcaatagtgcagaaaaagcattcaatagaatccagcatccctttatgataaaaaaaaaactaggtgtagaaggaacatctacagaataataatagccatctatgacaaacccacagccaacattatactgaatgggtaaaggtgaaagcatttccttgaagaactggaacaagacaaggttgcccacttttattactcctattcaccatagtattggaagttctaggc

SEQ ID NO: 441769 - DNA, 459 bp, Homo sapiens
agaatggagcttattgtcatggggcttacagtccaatggattcttccatggactgttacaaggacattccatggaatgttatagggacagtgatagtggcatgtacaaaaccctaagggagcacagggcagactaatatatattactctgcgttggataagggaaggcttccaagataagtgcttataagcctacattttgaagaatgagtgtacaataatttaagtaaataaggtaatgtaagagcaagtgacaaagagaatgtttttatattttytaaaaataacaattgcataaataaaaacattttaaccaaattactcataagtaaagaaataaaagaacctcaaattaatgctatgaaattttaaatatatatgattttattttcatgatcagaaagtgcatagaaattgcaaggaaaaagttggagaatcatataccccctaaaagaatgca

SEQ ID NO: 441770 - DNA, 562 bp, Homo sapiens
ccaccatgactcaactgttatacaaatttgaagaccactaataacattcttaggtgctcaaaccaaaatattaaatctttaatcctgaagaagtgcttccatatcagtaaatatagcccaatgaagctttatatttgatctgttgtgatgctatacccttcgactctgcccccacacacagacattccagacttttcccgttactgtcaggggaagtattttacatgttgtgtgaataaacataaaaacaggtaaggctactcaagcatatgggactatttgatacagagactawcttcccctggagcaggccatagactttcttgactgagctgtgctaataactaactcttgttataggtaggtctgagcacaaagggaaatagtgaagttcaattttgaagaaatttagcatcagcttgtgaaggtatctgtcctagggttacctttgagataattttattaatttgtttaagtagcaggtaagtaatcaattaatatgtttgttttaattaatgtcagagatatttaaaactaaaataatatacagaaaatggcttcc

SEQ ID NO: 441771 - DNA, 562 bp, Homo sapiens
ccaccatgactcaactgttatacaaatttgaagaccactaataacattcttaggtgctcaaaccaaaatattaaatctttaatcctgaagaagtgcttccatatcagtaaatatagcccaatgaagctttatatttgatctgttgtgatgctatacccttcgactctgcccccacacacagacattccagacttttcccgttactgtcaggggaagtattttacatgttgtgtgaataaacataaaaacaggtaaggctactcaagcatatgggactatttgatacagagactatcttcccctggagcaggccatagactttcytgactgagctgtgctaataactaactcttgttataggtaggtctgagcacaaagggaaatagtgaagttcaattttgaagaaatttagcatcagcttgtgaaggtatctgtcctagggttacctttgagataattttattaatttgtttaagtagcaggtaagtaatcaattaatatgtttgttttaattaatgtcagagatatttaaaactaaaataatatacagaaaatggcttcc

SEQ ID NO: 441772 - DNA, 562 bp, Homo sapiens
ccaccatgactcaactgttatacaaatttgaagaccactaataacattcttaggtgctcaaaccaaaatattaaatctttaatcctgaagaagtgcttccatatcagtaaatatagcccaatgaagctttatatttgatctgttgtgatgctatacccttcgactctgcccccacacacagacattccagacttttcccgttactgtcaggggaagtattttacatgttgtgtgaataaacataaaaacaggtaaggctactcaagcatatgggactatttgatacagagactatcttcccctggagcaggccatagactttcttgactgagctgtgctaataactaactcttgttataggtaggtctgagcacaaagggaaatagtgaagttcaattttgaagaaatttagcatcagcttgtgaaggtatctgtcctagggttacctttgagataattttattaatttgtttaaktagcaggtaagtaatcaattaatatgtttgttttaattaatgtcagagatatttaaaactaaaataatatacagaaaatggcttcc

SEQ ID NO: 441773 - DNA, 540 bp, Homo sapiens
gcttcctttcccactagggtgttcagtgatatttgttgattgaaacttctcaattatgtgtctctcatttgagaactctattctttactgctactgtctctatgttgcctggaaatgttaagatataattctgtgattctcaaaattaagttttagactttgtaatcactcactttttttggtaaatattagaaatgtttgcacttttacattttttattatttcttatattttttttggccggggggacagggtctttctctgctgcacaggctggagtgcagtggcatgatcttggcttactgcagcctcagcctcccaggctcaagtaatcctcccacctcagcctcccgggtagctgggataacaggcatccactaccacagcagggtaatttttgtattttttgtagagttggagttgtgccatgttgcccaggctggtctcaaacacgtgagctcaagtgatctgcctacctcagcctcccaaggtgttggcattacaggcatgagccactgygcctggccaggatgcactttt

SEQ ID NO: 441774 - DNA, 560 bp, Homo sapiens
ctgcaaatgtttttgtcagtggctaatggatcatgatatgctgaagactgaaacagatggagtgccccaaaattctcctttaattgtgcagrtgaaaattcctagaactgagaatcggtgaccgatttgaatagcttcaatcgagaaaaatttcctgacttgaaacagtcatagactagttgaatgaacaggaagtcatgtctcattgagaaaggatgctataaaccaccacagcaatatgtcttctccttgtcttctcaaaagagatcagaggtcatttaaccgaaatggcattatcaagacttctagaggtctttttggccttagtttatacatatacatttccttggctattaaaacaacactgtgctacttgaacagagaaaggtgctaattaaaggcagtaattacaaatgcagttctgacttagattttaagtgaactttctattttcaggatttgaatcttcatattggttccctgacctagaaagactgtgtctgaaaatgtcccaggattcactcccattattaatacttgtgagaaactggtacatgtgt

SEQ ID NO: 441775 - DNA, 560 bp, Homo sapiens
ctgcaaatgtttttgtcagtggctaatggatcatgatatgctgaagactgaaacagatggagtgccccaaaattctcctttaattgtgcagatgaaaattcctagaactgagaatcggtgaccgatttgaatagcttcaatcgagaaaaatttcctgacttgaaacagtcatagactagttgaatgaacaggaagtcatgtctcattgagaaaggatgctataaaccaccacagcaatatgtcttctccttgtcttctcaaaagagatcagaggtcatttaaccgaaatggcattatcaagacttctagaggtctttttggccttagtttatacatatacatttccttggctattaaaacaacactgtgctacttgaacagagaaaggtgctaattaaaggcagtaattacaaatgcagttctgacttagattttaagtgaackttctattttcaggatttgaatcttcatattggttccctgacctagaaagactgtgtctgaaaatgtcccaggattcactcccattattaatacttgtgagaaactggtacatgtgt

SEQ ID NO: 441776 - DNA, 560 bp, Homo sapiens
ctgcaaatgtttttgtcagtggctaatggatcatgatatgctgaagactgaaacagatggagtgccccaaaattctcctttaattgtgcagatgaaaattcctagaactgagaatcggtgaccgatttgaatagcttcaatcgagaaaaatttcctgacttgaaacagtcatagactagttgaatgaacaggaagtcatgtctcattgagaaaggatgctataaaccaccacagcaatatgtcttctccttgtcttctcaaaagagatcagaggtcatttaaccgaaatggcattatcaagacttctagaggtctttttggccttagtttatacatatacatttccttggctattaaaacaacactgtgctacttgaacagagaaaggtgctaattaaaggcagtaattacaaatgcagttctgacttagattttaagtgaactttctattttcaggatttgaatcttcatattggttccctgacctagaaagactgtgtctgaaaatgtcccaggwttcactcccattattaatacttgtgagaaactggtacatgtgt

SEQ ID NO: 441777 - DNA, 552 bp, Homo sapiens
cagcatggaggagaaagggatagagctacaaatgctttaaacattatgacagaaaccttgctgtctttttcttcataactctccgtaactatgktcaaaatcatttctaaagtcaatgcgtttgggacagatgaacagactttgattcacagaatagtcactcaatctgaataattattctttgaaggagaattgcatgtagtttaggcaccatttaaaaatcaatgttgtgtatagattccaggtgtcctaatttttatctcacttgtccctgctaatatctgttcaattgtttctcacaagtgtaattttatcatgctaaaatcttgctaaaatttgtactggaagtggaaataaaaaagataacaacctttactatccactaagaagaaaccataatttattttggaggttgtgagaagatttgtttttttctgctatgaacaaggaacatatctttattaaacaagaatttattggggttctactgtgtggatacattgtgagtagagttgtgaagaataatataagttcccccacttaaatttgtct

SEQ ID NO: 441778 - DNA, 593 bp, Homo sapiens
aatgcaacacgtgtactattctgtgttcacttactctagtttcaaaagataataaatcattacttaacaatgctattttagtatgctgttagtggcagtaattaaattctgtgttstccatatatcaattgttaaaatgacacctggatgtagaccaaaacaatgctcaaatgatttaaaagttttatttaaatgaatcattgaattttagcactaggaaaaaagtttagatattaattattatatttgtctcttattttagagctgtataagcaaggaaacagtagttagatgacatgggaaagcaagaaaccaaatttgcccagtctagatagaatactaaaatgtgttttaccaatattagtctgttttcatgctgctgttaaagacatacccgaggctagtgattatatttttatttccatttgcaaacattaaatttatgttaacaaatacaactaaccattcaattatcagcttgatacttcctcggtgaaggcactgcatttttttcctggacaaatatgtctattgagttttaataacatgtaatatacctttattgtagttttatactattatgttagagttac

SEQ ID NO: 441779 - DNA, 553 bp, Homo sapiens
atgggcacctaggtggtttctagcttagctattataaataatgctgcagtaawcatagaagtacaggtagctccaccacatactgatttcagttcctttgcattatatgcccagaagtgggattgctgaatcctatggtaaatacatgtttagttttctaaggaacatacataccctttttcatcatggctatgttaatttgcattcccaccaacattacccaataattccctttcctccacacactacgcaacacttgttatctcttgtatttttaaaaatagccactttaacacatgggagtttttattgtggttttaatttgcatttctctggttagggatgatgaacatttttcatttatctgttgaccacctaaatgtactcttttgagaagaatttagttcctttgcccattttttatattgagatttctttttcttgctattcagttaaattccttatgtattttggatattagctttttatcagatgtatggtttgaaaatattttctcctaatttccattatccagttcctctatgaatttttt

SEQ ID NO: 441780 - DNA, 553 bp, Homo sapiens
atgggcacctaggtggtttctagcttagctattataaataatgctgcagtaaacatagaagtacaggtagctccaccacatactgatttcagttcctttgcattatatgcccagaagtgggattgctgaatcctatggtaaatacatgtttagttttctaaggaacatacataccctttttcatcatggctatgttaatttgcattcccaccaacattacccaataattccctttcctccacacwctacgcaacacttgttatctcttgtatttttaaaaatagccactttaacacatgggagtttttattgtggttttaatttgcatttctctggttagggatgatgaacatttttcatttatctgttgaccacctaaatgtactcttttgagaagaatttagttcctttgcccattttttatattgagatttctttttcttgctattcagttaaattccttatgtattttggatattagctttttatcagatgtatggtttgaaaatattttctcctaatttccattatccagttcctctatgaatttttt

SEQ ID NO: 441781 - DNA, 553 bp, Homo sapiens
atgggcacctaggtggtttctagcttagctattataaataatgctgcagtaaacatagaagtacaggtagctccaccacatactgatttcagttcctttgcattatatgcccagaagtgggattgctgaatcctatggtaaatacatgtttagttttctaaggaacatacataccctttttcatcatggctatgttaatttgcattcccaccaacattacccaataattccctttcctccacacactaygcaacacttgttatctcttgtatttttaaaaatagccactttaacacatgggagtttttattgtggttttaatttgcatttctctggttagggatgatgaacatttttcatttatctgttgaccacctaaatgtactcttttgagaagaatttagttcctttgcccattttttatattgagatttctttttcttgctattcagttaaattccttatgtattttggatattagctttttatcagatgtatggtttgaaaatattttctcctaatttccattatccagttcctctatgaatttttt

SEQ ID NO: 441782 - DNA, 606 bp, Homo sapiens
ttccctttcctccacacactacgcaacacttgttatctcttgtatttttaaaaatagccactttaacacatgggagtttttattgtggttttaatttgcatttctctggttagggatgatgaacatttttcatttatctgttgaccacctaaatgtactcttttgagaagaatttagttcctttgcccattttttatattgagatttctttttcttgctattcagttaaattccttatgtattttggatattagctttttatcagatgtatggtttgaaaatattttctcctaatttccattatccagttcctctatgaattttttttcctttgctatgcttacttaaaataatgacgtctggttccatctgacactccatttaccctgatgtcactattacacattgtatgcttgtatcaaaatacctcatgtacaccataaatatatacacctactgtgtagccacaaaaagtaaaaattgtaagtatttaaaaaacccaattccacatctattaacatccttcatgtgcaggmtcataacccattgaaaagatggagaaagcatttttgtaggtttgtaagaaggttctgagagctttaactg

SEQ ID NO: 441783 - DNA, 507 bp, Homo sapiens
gaacctattaaatgaatattcaataaaaaggaattgtttatttgataactaaaaaatattaagaacaattattcacagtgttgtgagtccaaagtcttccttacatggttgttttgtgtatcttactcttacaccatcgttggtcygatcagtaaaataaagaaaaggcaatatggctaactcttaaatttacataagaaagaactagaactccttcaataattattcttaagaagatgagggtaatgagtataggtgtgagaaacagatcctggaaagagagaattgagagaatgaccttcaggacagtcaaagaagaatatgggacattcaggggaaatttggaaagagggaaatatattcacagcaaaattgtatgtaatgttatacaattcaagccctccatctactatctcctattgatctattggatctattgattcatgagtaaacagtttttttagaatttaatggagtttgagatttttttaatgttctatgatgcat

SEQ ID NO: 441784 - DNA, 407 bp, Homo sapiens
acacctaataaatgacagaacctagattcagattgaggctccacagtttacactccttcccataccccargcagtctcatggaaatccaaatttgctgatttagggcctcaaaacctaggaaaaatgtctgagcagagtaatgtcatgatggaatacagatgtatttctttatataggttttgtacttcaatgacttgctattccaatgaccatagacctccactggaacatgagctccctgagggcaggagtctgagtcatccaggatttccagcccagagctttgactcatgggggaggagtccctgaatctaaacatgaccaactcaggtactgtgcaagctctggctgtgcccagttgggcccatcctggaaaagctgcaccacagcaaaggcaagccactga

SEQ ID NO: 441785 - DNA, 530 bp, Homo sapiens
ggggtggcctgcctcagctgccaagcatgaaccccactctagaccacaacccaacctcagagctgcctgtggcyattcctgcatagcaacagcacagacaacaaaggccccttaaccttcctcttctagcggcaactatagcagtggctgctgctgccttgggactcagcaggatgaggtacagaacagggaatgggctggctaagtcaaaacactaggaaggcacagatagttcctgtgcccacactgggcactcaccctttgggcatcttggcaaggccacaggggctgcccccacagagctaggccagacagagaaatgtggccaatggaaactaaggcctgggacctagagggccactgagctttgagggaagagccagctgttttccatcttcactgaggactgagggaatagaaacaggcaggaaaaacagtgagaagaaccactggtttcaaaagaccagctttctatcctaggcatactgtggagaggtgactggacctccagccgtcctccttcaatccac

SEQ ID NO: 441786 - DNA, 530 bp, Homo sapiens
ggggtggcctgcctcagctgccaagcatgaaccccactctagaccacaacccaacctcagagctgcctgtggctattcctgcatagcaacagcacagacaacaaaggccccttaaccttcctcttctagcggcaactatagcagtggctgctgctgccttgggactcagcaggatgaggtacagaacagggaatgggctggctaagtcaaaacactaggaaggcacagatagttcctgtgcccacactgggcactcaccctttgggcatcttggcaaggccacaggggctgcccccacagagctaggccagacagagaaatgtggccaatggaaactaaggcctgggacctagagggccactgagctttgagggaagagccagctgttttccatcttcactgaggactgagggaatagaaacaggcaggaaaaacagtgagaagaaccrctggtttcaaaagaccagctttctatcctaggcatactgtggagaggtgactggacctccagccgtcctccttcaatccac

SEQ ID NO: 441787 - DNA, 554 bp, Homo sapiens
  misc_feature (1)...(554): n = A,T,C or G
aggcactgctaacatttttgaagggatgcctgagtgagggccagggtgagggaggggcagggcctgccaaaggtcagacccccaaaacagaccctcaggcttcagggcatgcatgtggaccatcgcatgcatgaactgtttaagtgggcatggagctaatcaacagagctgcagaagagaatgaccaccttgggcctggcatgttttttggtgaccaaaaaaagcaaccccaacactcaatcatatactgagcttatcmatttccaacacannnnnnnnnnnnnnnnnnnnnnnnnnnnnnnnnnnnnnnnnnnnnnnnnnnnnnnnnnnnnnnnnnnnnnnnnnnnnnnnnnnnnnnnnnnnnnnnnnnntgagaagtccagctggtgggtccagctggggatttcaaggacgatggggcccatctggagggagcttggagtgagccagaggggccagtagggaggaaaagccccttgggaacagaagactgggctgggaggactctctcagaatgatgcaaagaagaaaaggaaaggccaggaacctgggct

SEQ ID NO: 441788 - DNA, 559 bp, Homo sapiens
cccatgacccaaacacctcccaccggccccacctccaacactggggatttcatttcaatatgagatttggtgggggcaaatatccaaaccatrtcagtgtcctttgaaacacaaaagtttttaatcatgatgagatcaaacttatctttttatgtcacttgcattttttttttttccgagatggagtctcactctgtcacccagggtagagtgcagcggcgcaatctcagctcactgcaacctctgtctcccgggttcaagagattctcctgtctcagcctcctgagtagctgggactacaggcacctgtcaccatgcctggctaatttttgtatttttagtagagacgaggtttcaccatattggccaagctggtctcaaactcctgactttgtgatccacctgcctcggcctcccaaagtcctgggattacaggagtgagccactgcgcctggccatcattggtattttttatattgtgcctaagaaaccatgggagcctaatccaaagtcactattttcttctaacacctttatagttttagctcttacatttagg

SEQ ID NO: 441789 - DNA, 559 bp, Homo sapiens
cccatgacccaaacacctcccaccggccccacctccaacactggggatttcatttcaatatgagatttggtgggggcaaatatccaaaccatgtcagtgtcctttgaaacacaaaagtttttaatcatgatgagatcaaacttatctttttatgtcacttgcattttttttttttccgagatggagtctcactctgtcacccagggtagagtgcagcggcgcaatctcagctcactgcaacctctgtctcccgggttcaagagattctcctgtctcagcctcctgagtagctgggactacaggcacctgtcaccatgcctggctaatttttgtatttttagtagagacgaggtttcaccatattggccaagctggtctcaaactcctgactttgtgatccacctgcctcggcctcccaaagtcctgggattacaggagtgagccactgcrcctggccatcattggtattttttatattgtgcctaagaaaccatgggagcctaatccaaagtcactattttcttctaacacctttatagttttagctcttacatttagg

SEQ ID NO: 441790 - DNA, 588 bp, Homo sapiens
gttttataattgttacatctctgacattgagcagatgactgaactacattgaatcgcaactaaaaaattcaaataatttctgcctttcaggtttatattagaaatagtatggaaaatttggtaaagtaactaaactaaaaacttttccaatatgagcatccattggatattctagataaaatattacagatataactagcatcctttaaaatgcmtgattgagattagaaaaacagaaaaggatatttccaggggcaagacatgcaagaaataaaatagaactgggaactaaacaggtaaaccctggatctaaatttgtggttggtatagtttggataagggagagccatcagttttggcaattgagtggcttgaatattcttgttcaccccaggagagatgtggctttgcaactctgcaaggtagtgtattgggactaacacttttaaaataaggattttaaatgagattttcaggacccctgaaacgacccctgaaaatctacatgtttggtgaaagggtgtactagggaaaaaatatgtatatgcatatgtctagctacctaccttaataccatgataattaaca

SEQ ID NO: 441791 - DNA, 581 bp, Homo sapiens
tttgctttttaattcaaggagaagcaggttctttttagtccaacagcctgtaccatgtggaggatatgcagaatgagtcttttctggctcagagccaggtgtttacacgccgccaaatctggctccaactcaactaggggagggaaaagaaatccaccagaatcctcaggggaaaagctcctggctttctggtgctacacgacagcagtgcttatttatttattttatttttttcgttttgagaggaatgttatttctacacataaaatggaccaggcattttatacaagcaataataacctaacgccccccatccaattaaagtattttactgcaacaatctttgtgtgagagagtgaatgagtgctcaagagaatgtgtgtgaagaaaggctccttgtgtgaattatagacatttataaagcagtctcctgtggaatcccaggtgttatatatatatatatacatatatatatatacacayatatatatacacacatatatatacatgtatatatatatatacacacacacacacgtatttatgtagacacacttacatagttaaaatgcattcactac

SEQ ID NO: 441792 - DNA, 595 bp, Homo sapiens
tggggtataatcttttgtaaacaataaaaatgatatacgaataccatttgttctattgttgttgtcaaagacaaagtgctcctcaggttcttaaaracaaacaagaattgaggaggccaagttatttctctcctgtaggaggcaggaaaacgaagggacaacgaagttcatgtcttatgggtccttgaactccttgatctccgtcctcaaatgcactgggatcatttggcaagacatttcactcatccattcattgaacatacatttactatttgtttccatctgtcttggaagccattctaactctttatgcatatatgtatgtatgtatttgcttgtttttaattgagtgcataaaattagatgaaatttaattcttggttcatgacccaccctaacccttgatctatgactgacattcatatatatatgtatatataaaagaccttcatatatatatatatatatatatatatatatatatacacacacacatatatatatatatatataaaatgtatcatgtactgctatcccttttttactacaatacttgatcttttatggatgtgttccctctcttttaatcattttt

SEQ ID NO: 441793 - DNA, 595 bp, Homo sapiens
tggggtataatcttttgtaaacaataaaaatgatatacgaataccatttgttctattgttgttgtcaaagacaaagtgctcctcaggttcttaaagacaaacaagaattgaggaggccaagttatttctctcctgtaggaggcaggaaaacgaagggacaacgaagttcatgtcttatgggtccttgaactccttgatctccgtcctcaaatgcaytgggatcatttggcaagacatttcactcatccattcattgaacatacatttactatttgtttccatctgtcttggaagccattctaactctttatgcatatatgtatgtatgtatttgcttgtttttaattgagtgcataaaattagatgaaatttaattcttggttcatgacccaccctaacccttgatctatgactgacattcatatatatatgtatatataaaagaccttcatatatatatatatatatatatatatatatatatacacacacacatatatatatatatatataaaatgtatcatgtactgctatcccttttttactacaatacttgatcttttatggatgtgttccctctcttttaatcattttt

SEQ ID NO: 441794 - DNA, 595 bp, Homo sapiens
tggggtataatcttttgtaaacaataaaaatgatatacgaataccatttgttctattgttgttgtcaaagacaaagtgctcctcaggttcttaaagacaaacaagaattgaggaggccaagttatttctctcctgtaggaggcaggaaaacgaagggacaacgaagttcatgtcttatgggtccttgaactccttgatctccgtcctcaaatgcactgggatcatttggcaagacatttcactcatccattcattgaacatacatttactatttgtttccatctgtcttggaagccattctaactctttatgcatatatgtatgtatgtatttgcttgtttttaattgagtgcataaaattagatgaaatttaattcttggttcatgacccaccctaacccttgatctatgactgacattcatatatatatgtatatataaaagaccttcatatatatatatatatatatatatatatatatatayacacacacatatatatatatatatataaaatgtatcatgtactgctatcccttttttactacaatacttgatcttttatggatgtgttccctctcttttaatcattttt

SEQ ID NO: 441795 - DNA, 564 bp, Homo sapiens
gaagtggttctccggatagcagccttacccaacccatcaggcttcaacctgccaaattatctcaacacctttctcagactgtctggtcactgtcatgcataagttctcaaaggcaatattaactgatttttatgtcttgcatcatgatgttcatcatttagaggggagagagtgaatactagcaacccagatagacaagtggagaaaccattgcgtggttattaccagccaggttactcagcatcttcatgagaagtcggttaacatacttttatgggtagaaaagcaggattggagagaaatgaaaagttcctgtgccaggaacaaaagttcctccctgccacacactggccaggtttgaattcagactatatgaccatgtgcaagagatttaacctgtgagtcagttcactcactgataaaatgagagcagtaataayaagatctactgtttagggtttctgtgagtgttgaatgagtcagtatttactgagtattcggggcttgtctggtgcagagttttcactcgagtaatgtaggctattttcattttaatagtcgttc

SEQ ID NO: 441796 - DNA, 469 bp, Homo sapiens
gaaaaactggcacagctgggtatctaataaatggaataacttcatggttaaaatgtgtagactctgcctagatgctgtgaatctcacgtctgctatgtctctgtgtaactgtaggcaagttactaaatctctctgaaccacagttttttcctctacaaaacggggataacattatttatctcatagggtttctgggaagatggatataacttctgaattaatcatattcagtcaggcrcggtggctcacgcctgtaatcccagcactttgggaggccaaggcaggcagatcacctgaggtcaggagtttgagactagcctgtccgacatggtgaaactctgtctctacaaaaagtagctgggtgtggtggcacgcgcctgtaatcccagctactcaggaggctgacgtaggagaatcacttgaacctgggaggcggaggttgcagtgagtccagatcatgctgctgcac

SEQ ID NO: 441797 - DNA, 609 bp, Homo sapiens
agtagccatctcaattccgttgttaggggtgaattattttttagtgccacttggctgctagcttaacttcaacacattttctatttcttggaacaaattcactaatcttatttaaaacaaggcattgttaagaagaygttctcaatatatacaagcctctccccagtgtataggaatttctctttaaacatcccttatctaggaaggtactggcttccttaaattcttcctaagaccagaatctcaatacctttcaagatagtcctgtgtgaatttgggaaagtttaatggtggacacgaacattgttaagtccatttttagtttacaaaatattgcttgtacgaaatccttttagtttcagtatcatcttaccaggtaagttaagagattttctcaagatcatgtcaccagtagctggtagtaccaggtttgaaaaccctacatggtgctctgctcctctgctcccacaaggtttatgtgttactgcacttcaacattgcatgatcaaattttcctgtttcggtgttggtttccctcatttgactgcagtctccttgagagcaagaactctgtttgataactgttcatttcatgcctagttgatgaag

SEQ ID NO: 441798 - DNA, 552 bp, Homo sapiens
tgtgccagaattattttcttaaaaataaaatatcgccatgtcacctctcttctttaagtatatcctctaatgtacattagtttcagaatgaaatacaaattccttaacatggcattcatgaccttagccaagcttcccagcctcatctgttatctgtccatttatccccaagctccctgtgaagcaatcattctgtacaaggagcccaccttgttcttttatgcctcaggctctacactctctattcctttcatcttcatcttggacagcccttcactgtagtactgatgacatggtatggtatagcagcaatctcttcccatgttatttgcctatgagctagagggtggggattttatgttactcatttctataatacttctattaatcacggaaggacttgatgctttttatatgactgaatgagggaaagtgcaaatattgctcattagataaaacaggacttgaacrtcttgattgaacccttatttggctatataaatcccttttcaagtgacaaggaagcataagccacaagcacatctgaaatct

SEQ ID NO: 441799 - DNA, 601 bp, Homo sapiens
tcctccttttccactacttctcctcctcctcctcctgctcctcattctcctttttcctcttcctcttcctcttcttttttttcttgagacaagttcttgttctgttgcccaggctgaagtacagtggcatgaaatgggctcgctgcaacctctscctcctgggttcaaatggttctcatgccctagtagctgggattacagacacactccaccatgcctggctaattgttttgtatttttagtagagatgggtttcaccatgttggctagcctggtctcgaactcctgacctcaaatgatccacacacctcagcctctcaaagtgctgggattacagtcatgagacacctcaatctgcatagacgccttttatttctttcttttgcctaattgttctgactgggacttccagtactgtgttgaagagaagtggagagagtagacatacttgtcatatttctgatcttattgaaaactttttgattttttctgattgagtataattttggctttgtatttgttacacgtgaccttttctgtattgaggtactctccttctatacctaatttgttaggagtttttatcatgaaaggatgttaa

SEQ ID NO: 441800 - DNA, 529 bp, Homo sapiens
atactcaagttccttatataaaatggtgtcgtattctcatataacctaagcacatcctcctgtatactttacwtaatccctaaattacttataataactaataaaatgtaaatgctatgtaaatgattttctcatttgtgttttcaaaattgttccattgttcttaagcaaaaagaacaaaggtggaggcaacacatatctgactataaactatactataaggctacagtaaccaaaatagcatggtagtgatacaaaaataaacatatacaccagttgaacagaatagagaaatcagaaataaagccacacacctacagccatctgatctttgacaaaattgacaaaaacaagcaatggggaaaggactccctattcaataaatagtgctaagacagctggctagccacaggcagaagaatgaaactgggcccctacctttcaccataagaaaaaataataactcaagatgaacgaaagatttaaatgtgagatcttgaactgtaagaatcctggaagaaaacttagg

SEQ ID NO: 441801 - DNA, 617 bp, Homo sapiens
atgactctggagagaaatgttggtagcaggagcgaaataatctgtttcaatgagataatttgtgatacaactcataatatatcagttaattacagctgtttaataaattacactaaaaaatcagtggtgtttttaatggagatagatagtagaaggatggtttacagaggctgggaagggtattaggggggttgcgggtggtgggaatggttaatggatacaaaaaaatggttaaaataaatgaataagacctagcattcaatagcacaayggctgactattgtcaatcataatttagttgtatatttttaaataactaaaagagtataattggattgtttgtaacacaaaggataaatccttgaggggatgtatacccttactatgatgtgattattacacattgaatgcctgtatcaaaacatctcatgtaccccataaatatatatgcctactatgtacccagaaaaattaaaaatatatttttttaaaaatatagtggtttgaaaaactgcaagttatttttcacaagtctatgacttgaatgggcagttctgctaaatcaggctggttttggttgggcagttattccggtctttctgggactcaggtgatca

SEQ ID NO: 441802 - DNA, 633 bp, Homo sapiens
aagcagtgagattgaatcaatagtaataaaaaatcctccaacaaataaaagcccaggaacagatggattgatagctgaattctaccagacattcaaagaaaaataagtaccaatcctactaaaactattccaaaagagggagaaggagagaatcctccctaactcattctatgaagccagtttcaccctggtaccaaagccggaaaggacataacaaaaaaagaaaatgaaacaccaatcttcttgataaacacacacacacaaatcctcaacaaaatactagcaaaccaaatccaatagcacattaaaaagaaaatacaccatgattgagtggatttcatcccagggatgcagggatggttcaacatactcaagttaataaatgtgacttaccacacaagcgattaaaaaaaacccatatgataatctcaacagatgcagaaaaaaattcaataaaatctagcatccttcataataaaaatctgaacaaactaggcatagaagaaacgtatctcaaaataatataaaacaaatawcacaaacccatagccaatatcatactgcacagggaaaagttgaaagcattctccataagaagtggaaaaagacaaggatgcccactttcaccacttc

SEQ ID NO: 441803 - DNA, 603 bp, Homo sapiens
ttggtgtcaagaactccaagggctgcgagactacactgttatgaaatactaatgccccctttgtttttgttggaattatttccaccacctaaggatgattttgcaaagggttgggatgggcagaaaatgagcaatgatctttgaattgggcttaggtgatgagaaggaggaacaacacctgaaagtctggatgggttactgctttctggaaaacggtcatcctttaaaaaacaaaacactgggtttagaaccccatgtctcaaactaactgtataatcttgacaaagtcacttgacgctcttgatctgatatttctgtgatgatttacatttaaattaattgaaatgaattataattaaaattccaatcctcagtcatagtagccacatttcaagtattcaggaaccacatgtagctagtggctactgtaatggacagcayagaacacatttccatcattgcagaaaaatccattgaacagtgctcctgtggatgctgaacttcagttttctcatgtgctaaaatggagataattagtcctatgcctctgagtagcttaaagtggttggcacagtgggtgacacatagaagatgctcaaggaa

SEQ ID NO: 441804 - DNA, 634 bp, Homo sapiens
catccttgctgtattcctagctggtcctttcatcctaaagcagaggtttccagtttacattccataccacaaaatcatcagaaacaaattaaattgttcttcccctctagcttagtgttagtgatgaacagaaagaaagagtcatctaatgtgtctctttcatatatgtactactcctacgagttgattcatgttctacayatcagtggtttcatccaactgtgaagcaaattcttttttcataccacccctccccttatagaaatagtaattgcaattccatattgcacagatattatgtgacacccaacagtgctatttaatgaaggaattttgccaatagcttgttttgccttctccacatgtaatgtttatcattaaatctgtcaatagtttaaaaagtctcttagcaatagtgtgacttgcaaataaacattttagcaatgaggaacataattttagcaataagagatttaattttgaataattattggtctcttttccacctctagagacaaaattctctattttgtactagaaaactttttttcttattctggaggaaaagcacttaaaagtttatttattgagttttaaacaatgcaaaagtcttggtggctcctcacccctgttt

SEQ ID NO: 441805 - DNA, 557 bp, Homo sapiens
actaaaaatgaagacgtttgtgaggaagccatccaggaaaaataaatataaacaaaagcacagaggtgggaaagcaccacatcagattcttagggcattatctgatyatgtttcctcattttaagacctgagcagaaactccattacacgtgagcaaacccttttctgatgctgtgtgtacagtggctctctgcctccctgccacttgcttctccctatttctttcactctcgacaaaataataataataatagcagcatccattaatagaatatagggccttaggctaaacacttttcatgaatttcttatttgagaaacaaaacatccctacatggctgctagtatttacatgttgattttacagatggtgaatctgaggcataggaaggtaaagcaacttgcttacaatcatatgctattaagtgatatcctatattctgcctatcttatccctattttaggtctgttttaataacctcaccccttgcaaagttgggtcatgtcctgggaatcgcaattccaaggactgcttcctgccagatttccaacttgcc

SEQ ID NO: 441806 - DNA, 501 bp, Homo sapiens
ttcagctgctgttaggacttgggctgtttggttaaggccaacaagataacaggtgcaggggcaatggacagagaatgtcttcagactctcaacacaataatgagctggagtttatgagcattgaaggactctgggaaagaacacaactttcctgagaatgttggatgtattaccccaaagggagtttgttttagcagcactggaactgctaatattgtgggtagaccaaaaatccctggagatttagtgctctgccaatgaagatgaaataggtggacataccaatatcttgagagatttttatgcatgartgatggttgttttgtaaacctcgaatcctaatttgttgatagaattatagggtttatgatttcatttagcttattggctactttatccacatctagactaatgagcatatacttcacctggtgataattctaaaactggagtggggtggagaaaaaagtaacaatcccaggggatacacaaagttacatg

SEQ ID NO: 441807 - DNA, 594 bp, Homo sapiens
ccgcttccaacgaaatcctcaaaactagccaaatatccacttgcagattccacaaaaagagcgtttcaaaacttctctatgaaaagaaaggttctactcctttagttgaggacacacatcacgagtaagtttctgagaatgcttctgtctagtttttatgggaagatatttcctttttcaccttaggccggaaagcgctccaaatgtccacttacacacactacaaaaagagtgtttcaaacctgctctgtgaaagggaatgttcaattctgtgacttgaatgcaatcatcacaaagaagtttctgagaatgctgctgwctgctttttatatgtaatcccgtttccaacgaaatcctgaaatctagcccaatatccacttgcagattccacaaaaagagtgtttcaaaactgttctgtctaaagaaaagttcaactgtgttagttgaggacacacatcagaaactagtttctgagaatgcttctgtctagttgttatgggaagatatttccttttccaacgtaggcctgaaagcgctccaaatgtccacttccatatactaaaaaaagagtgtttcaaacctgctctaccaaag

SEQ ID NO: 441808 - DNA, 594 bp, Homo sapiens
ccgcttccaacgaaatcctcaaaactagccaaatatccacttgcagattccacaaaaagagcgtttcaaaacttctctatgaaaagaaaggttctactcctttagttgaggacacacatcacgagtaagtttctgagaatgcttctgtctagtttttatgggaagatatttcctttttcaccttaggccggaaagcgctccaaatgtccacttacacacactacaaaaagagtgtttcaaacctgctctgtgaaagggaatgttcaattctgtgacttgaatgcaatcatcacaaagaagtttctgagaatgctgctgtctgctttttatatgtaatcccgtttccaacgaaatcctgaaatctagcccaatakccacttgcagattccacaaaaagagtgtttcaaaactgttctgtctaaagaaaagttcaactgtgttagttgaggacacacatcagaaactagtttctgagaatgcttctgtctagttgttatgggaagatatttccttttccaacgtaggcctgaaagcgctccaaatgtccacttccatatactaaaaaaagagtgtttcaaacctgctctaccaaag

SEQ ID NO: 441809 - DNA, 594 bp, Homo sapiens
ccgcttccaacgaaatcctcaaaactagccaaatatccacttgcagattccacaaaaagagcgtttcaaaacttctctatgaaaagaaaggttctactcctttagttgaggacacacatcacgagtaagtttctgagaatgcttctgtctagtttttatgggaagatatttcctttttcaccttaggccggaaagcgctccaaatgtccacttacacacactacaaaaagagtgtttcaaacctgctctgtgaaagggaatgttcaattctgtgacttgaatgcaatcatcacaaagaagtttctgagaatgctgctgtctgctttttatatgtaatcccgtttccaacgaaatcctgaaatctagcccaatatccacttgcagattccacaaaaagagtgtttcaaaactgttctgtctaaagaaawgttcaactgtgttagttgaggacacacatcagaaactagtttctgagaatgcttctgtctagttgttatgggaagatatttccttttccaacgtaggcctgaaagcgctccaaatgtccacttccatatactaaaaaaagagtgtttcaaacctgctctaccaaag

SEQ ID NO: 441810 - DNA, 425 bp, Homo sapiens
gagcgctttccggcctaaggtgaaaaaggacatatcttcccataaaaactagacagaagcattctcagaaacttactcgtgatgtgtgtcctcaactaaaggagtagaacctttctattcatagagaagttttgaaacgctctttttgtggaatctccaagtggatatttggctagttttgaggatttcgttggaagcgggaattcatacaaattgcagactgcagcgttctgagaaacatctttgtgatgtttgtrttcaggacacagagatgaacattccctatcatagagcatgttggaatcactccttttgtagtatctggaagtggacatttggagcgctttcaggcctatgttgaaaaaggaaatatcttcccataacaactagacacaagcattctcagaaacttgtttgtgatgtgt

SEQ ID NO: 441811 - DNA, 554 bp, Homo sapiens
acttgtctgatgtcacacagctagtaaaaaaggtgaacagacccatttagtgagggtgctttcagataacagttcctggcaaggaagaagaatacaggcaggagaacagacacaggtgccatcaagggtgttcattctactgctccatgccgtcctgcaaaaggaaatctggtcctcctcctacacttgcatggccaacacatgggaaacacctgagctaaccctgacttggagaattgttccatgtggttactttcaatgctcctgcctctcttgaacaagacacagagatgtccagaacccagtataacttggtataatcctccagtcctgtatgtctccctttaagcctcctccttccactgagcctraggcaaatcttttgacccggggtggacccggagggatgaggatgctgaggagcagtcccccaggtaccctcctcggtgatatcccagccttcctctgaatgcctgatggtgctgagtcctccaggtcattttggtgggtctcccccccgactgaaccaagtgcagggaccatgggtatactta

SEQ ID NO: 441812 - DNA, 527 bp, Homo sapiens
cttgtgtgcacatgtggacaccatatcctccctgtcagcattgttttacagagactgtgttcctacaggctcataaaaaaaggcctggatgaaactgccatatacaaattgagagcatttgctgagattattttcgttctcaaaatattaactttttttaaaggactagccacagaattggtatttttaaataaagaccctataacttctatcaaactcattgagttattgaatttgcacactgrcttacttttaaaatgacccaaatgtctggcagtgttaaaggacatatttctgtacaaaaccattccaggcaatgttgggatggctcataatgagagatatgccagacttgtgaagttactatatgtttccaccatctccagccctcatgcctgcttgagggttgatacacagacatacagattcaggcatactcacacatatggtttgattttctctgattcagtctgggttttcttcatgcttttcttctgaacaaagtccacctttactcacaagttcca

SEQ ID NO: 441813 - DNA, 546 bp, Homo sapiens
ggttgtgctgggacatttctcgacgtcttcccgagattttgtttccagtccctctgcagaggtcactcagatttgcagttttcagttcacaataagacaggagaagaggactcrttcctctcccttctccacaactgcctcataaacagatgccaaatctggaaaatgagtaggatcccagagactctatagccaaaggaagattgaatccagatacacaagacccaacttggtaggggaagccatcataatattccacttctgggactggtcccattgagggattggctagccccttggaaagccgctacaatgaattagatggcatggtagagaaactgcttttgactgtaaaatcgaggagtgactcatccatccacagaatgtcaaggctggatggttctttaggcatcatttaatccagccctcttattttcagaagaaggaaccatgccatcttcatatttaatgcctaaaacacaagatggtgtctggcacatagtaggtacctgataaatattgtaaaaggagtaaactttgagaacg

SEQ ID NO: 441814 - DNA, 546 bp, Homo sapiens
ggttgtgctgggacatttctcgacgtcttcccgagattttgtttccagtccctctgcagaggtcactcagatttgcagttttcagttcacaataagacaggagaagaggactcattcctctcccttctccacaactgcctcataaacagatgccaaatctggaaaatgagtaggatcccagagactctatagccaaaggaagattgaatccagatacacaagacccaacttggtaggggaagccatcataatattccacttctgggactggtcccattgagggattggctagccccttggaaagccgctamaatgaattagatggcatggtagagaaactgcttttgactgtaaaatcgaggagtgactcatccatccacagaatgtcaaggctggatggttctttaggcatcatttaatccagccctcttattttcagaagaaggaaccatgccatcttcatatttaatgcctaaaacacaagatggtgtctggcacatagtaggtacctgataaatattgtaaaaggagtaaactttgagaacg

SEQ ID NO: 441815 - DNA, 547 bp, Homo sapiens
tagtgagcctgtctcactagtgaccaacacaggcactatatgctgggcactgtcttgggcacatgggcaaggcagtgctgagtgtctgctagggaagtcagataagtaaatggccaattaccattcaatgtgaacaggcttatggtaatagaagtaccaagtggtgctgggggcccataagaaggggaccccatgcagaactggagactcagtcttcccatgaaatatcacaacactattaacgaggtgcatctgagaatgtgaaaaagtttggtatgttcacagagtggctgttttctaaatctacttcagaggcttatagggttcctggagacgtttatagggtatcctcaaagtcaaaagtattttcatacaattacatatgacatcatttgctttttccactctcattctctcctgagagtccagtggagctatctgatagacacatgacatgtgatgtcatttgtgctctgatagctaatggarcacactcttctgtattcttgaatttttaaatttcttagctttagtttataaagcggaa

SEQ ID NO: 441816 - DNA, 534 bp, Homo sapiens
gtttgaataaaattatttccagacatctccccacacttacatccaatgcaactattagttggtgaagtttgctcctagtttgttcctgaccttcttaaagcatgatatgcagaatggagttcaactggaggcactgaggtctctggttccctgagccaattyggagctccaaggaaacccagcagccttgggttttcctcctatgtaaatttagtacatgtgcaccaggaaaagacactgttctttttttagagcatcctattacagtctctgtgatccttttggctcagacccttttaatatccttgaagaaataaacttttccatgagccaaactctgcaatttatttctcaactcattctcatcctatttatcttcacatgtttaagtttttggacttcccaaactaacttaaaactcccaaattcatgagcaatgccagacatatctgtatggttggggaaaaaacatggggaatgcaggggagggaaaggaggaggattggaccatggtctcagccctactattgatgt

SEQ ID NO: 441817 - DNA, 539 bp, Homo sapiens
ctgtcctttggaagtatttggtccctctgttgattaacaagaaactagggaggaaggatgagccaggcagatttgtcatctttgctctcctgtggcttcccacccctgacagtcattttctccaaggaagggaggaagattacatcatcccttgccagttgcaggagaaagcccatggaggggtggaatgttcacctggcacccaccatcaggaagcatgctttaatgttctatgctgtaacttttaactcaatgttaacaggctagaaggttaacaaatatttatttagcatctgctatgtgaatactctatggactaggcmcactgtattaagcaaaagctacatggcgttgagcgaagcagtgctctttaatagagacaaaatgacaacgatcttacaggattttgatgacaatcagatgagttaactaataactaggagatgtgtttcatatactgtaaagtgctgccttcaatgaagttgactgaatgaataagtgatacatgtgtgtcaacatcccacaaagttaagaaagtc

SEQ ID NO: 441818 - DNA, 539 bp, Homo sapiens
ctgtcctttggaagtatttggtccctctgttgattaacaagaaactagggaggaaggatgagccaggcagatttgtcatctttgctctcctgtggcttcccacccctgacagtcattttctccaaggaagggaggaagattacatcatcccttgccagttgcaggagaaagcccatggaggggtggaatgttcacctggcacccaccatcaggaagcatgctttaatgttctatgctgtaacttttaactcaatgttaacaggctagaaggttaacaaatatttatttagcatctgctatgtgaatactctatggactaggcacmctgtattaagcaaaagctacatggcgttgagcgaagcagtgctctttaatagagacaaaatgacaacgatcttacaggattttgatgacaatcagatgagttaactaataactaggagatgtgtttcatatactgtaaagtgctgccttcaatgaagttgactgaatgaataagtgatacatgtgtgtcaacatcccacaaagttaagaaagtc

SEQ ID NO: 441819 - DNA, 551 bp, Homo sapiens
acagagtgcggagaagctcagtggtatggaatgactgcatgtagagaaggggaggaggagagataagagggctccaaggctgccttccagctctgttgttcatggttctagacagtttcctcccaggtcctcagtctgcagggtggatgctatttatgctcacctattctttgctggtcggggggtggggttaggatttctgtcagtccaagtaggttttaccaatggcagtaataccacaaggattctaatttattctactgtcccctgcatccaatagggagaacagcaaagaatacagattccaaaatgaaacaaaactyggttccaatgctggcttttacacttcaagttgtatgaacctgatcgattcactctatatttgggagccttagttttatcacctcctaaataagtccttgcaagaattaaagttcaggggacacagtgggtgtttagccaatatgtaccctttacttcttttcatcttaggcagcacagcctcctaagtggaagatgaggaaggaaagtttgaacattgactcggtagt

SEQ ID NO: 441820 - DNA, 594 bp, Homo sapiens
ctcagctaaatcactaactggctctaccctcttaggtgagtcacttgtcctttctagtcttccgatgcctcaactttgcatgcaggaggttgcactggattaattcttctctctctctttttttttttttctttccaagacagtcttgcactcttgcccaggttggagtgcagtggtgtgatcttggctcactgcaacctccaccccccaggtataagcaattctcctgcctcagcctcctgagtagctgggattacaggcacgcaccaccacactgggctaatttttgtgtttttagtagagacggggtttygccaggttggccaggctggtctgagaactcctgacctcatgatctgcctacctcagcctcccaaagtgctgggattacaggcatgagccactgcacctggctagttcttctcaatttggattgcacatttaaaaactgggacatttaaaaattgcctgggtctcacttgtatcccatctccactctcccccgagatatttatttaatggttaagaataaggcctgaccattagaacttttaaaatctcataaggtgattataatttgcaacaagtttaaac

SEQ ID NO: 441821 - DNA, 607 bp, Homo sapiens
gcatcagtatcacctgggaactgagaaaggccaggctctcaggccccagtccagcctagtgaatcagaaactctgagtgcagggcctctccaggtaatttggatgctagttaaagtttaatagccactgctctaaattatctccaaggccaggaatctccaaattctctttcactcatgcaactacttgctcaactcacaaatatgtaatgagaacattctatatgccagattctgtactggaaacagtattaggatgactcagaccagtccctttcttgaaggcactcaaacttaagtgctgagctcctacccactttgtaaaagtgccacgtactgtgccaaatcatcagtagtgaggtcgacactcttatgcacaatttgttctttcattcactctccaaatatttctttagtccctactatgtgtcargcacaagggctagactgaggctttcatcggccttcctcttcgaatcttttgtgtttcaaggagtttattggagatctgggctgggatgggctgggcttcctgacctgaatgttctctgagactgaaaaaagagaaacacatccttccaaatcaacctaccatttcaactccttta

SEQ ID NO: 441822 - DNA, 560 bp, Homo sapiens
tttatctcacactgggcattggcaagaggaatggacaaaatctattcagtctgtgcttggagacactgagaatcatgagggcaggtcttggtgggtttatgttgtgtctgttaaaacacaacctcagacaccactttagagatgctgaatttggaatcaagagatctgactcccacaycagcaccagccttgctgtggaacagctttcttccattgtttaagcttaagttccttcccttggacaaagtgggtgactgtccatatagtctaacaaggagtggtgggaaaaactgataagataatagacttgcaagaacatgatgcaatctagtgaactgtaaagatttaaatgttcatgattctttctattgtttgatttttcactacgcttgttcttggccagagccatgatagagagtatgtgtaaaaggcaaacactctgacacatacagacacacacacatcaagcagtttcccgtaaactctaccaggagttgctatgcttcagtgttgggttagaagaaggaaaagataaattgtactttaacctttgtaactga

SEQ ID NO: 441823 - DNA, 557 bp, Homo sapiens
atggtgaatgagccgggggagagacattgggagagaaaagtaccttgggttggttctctgccctgtctcaaagcagttctcagaagcagctgcccccttggacaccggctgttcctgtcgccatgatttctcggctgccctcacacttgtccttgggtgtggataaagaaatttttaaaattctgtgtttgttttcagccktgactgtgattgatgtgcgcaggacaggagctttgagatagacttttaacagtcatgggcctaattgccttgactttagaaaaggggtcggtgacaatcgctaaactgcaggcttccaagctcacttcttgctctgcaatggtaggttaaaaagaaataggcccatttaaacccacatctcattaaatggcgccggttttcaactggccttggtttacacctggccccctggcatgagatacatgcatttaaaagcttctgactggtggttatcccaagttgggcgagtcagtagtcaggtgaaaaaggaaaaaacctgtctgtaaattgaaaaagagtgtttgtggttggtcctg

SEQ ID NO: 441824 - DNA, 557 bp, Homo sapiens
agccaacttactgggtgagaagtgatagctcatggttttggttagcatttttctagtagctaatgatgttgagcatcttttcatgtgtttgctagtcctttgtgattcttctttggagaattgtctactcaagtcctttgcccatttttaaattgggttgcttatctttttgttgatgagctgtaaatatacttacatatatttctccatacatgagtaatcacatacatacaaatatataaggatttggttctttataaaatagggtcgtgttttggacacttctttacaattcacttttcttgatayatatgaaagtccatcaaactcaagtagttttgatctaattcatgtagtctagtggctacataatattctatggtatagatatacctttatttaaccgttccctattaatatttccagtttgttgctaatatatacagtgttggtaatgaatattcttgagtatacatccttatgtactggttatttttttctgggagatagattctgaggagtggaattactttgttgaaggaaatgtaattttaatg

SEQ ID NO: 441825 - DNA, 600 bp, Homo sapiens
tctattctatttcactggtctatacatctgtctttataccawtgttgtaatattgtgattactgtagctgtgtagtaagttttgaaatcagaatgtgtgagacatccaactttgttcttctttttcaagattgctttgactatttgagatcccttgacatttcatatgaattttaggttgaatttttctattctgcaaaaaatgtcattgggatttttattaggatgcattgaatttgtagatcactttgggtagtattgacatcttaatattatgttttctaatccacgaacaaaggatgtccttccatttatttattgcttctttaattctttcagcagtcttatagtttccagtgtacaagtcttttgcctcctaggttaagtttattgctaaatattatattctttttgatgctatttttgtaaatgggattgttttcttaatttccttttgggatttttaaattgttactatatagaaatatgactgatttttcatgtagattttgtatcctgcaattttgctgaatgtatttgttaatgtgtagaatccttagaattttctacatataaaattatgccatttgtgaacagagat

SEQ ID NO: 441826 - DNA, 577 bp, Homo sapiens
agcgtctttttttggctttaatattgcatcgtaatagttttccatataacaatattagcttcctgtttataattgtaatgaattgcatactcttctatttgttgaacatgtcataattctccaaacacttcccggttgttaaacatttaggttgtttctgttttatatattattgttaatgcagctattattttttgcctatagtggcttctcttacattgttttcttaggataacctcccagaaatagaattgctattgaaagaatgtggatacctttctaattcatgatccatcacattatgttgctttttaaaagggctgttgcacagctctggctgtttcagtattctttcacagcatagggcggcactaataaggatggtccttatgccggatgtttatgggtaggtggatttatagtcttacactggaaaacaacttaaccttgggggttatttaaatggaaaagcctaagaagaagctargactataccaaggcaggagtttctaagttgtgcctttttttactggtacaactgattgtatcacatcataacacttggcagttaattgtg

SEQ ID NO: 441827 - DNA, 557 bp, Homo sapiens
tattatcatttccagtaataacttttatttttttctttatcaataggtttagtatttatgccagtattggtctcccaatacttttgatagatttataatttcagttgtccacgtaatcacctttgtcagtctccccaaagtcacaggatggttaacagcatgaagatgaagacctgaggcttcaaaaggggcaaacctaagtgatgtatgtgggaatcattcttgttgccttggcctcactacccctgctctgtatgcactctctgaagtcacaagccaccaatttgttccagtggcttcaaagatgcacacttataaatttctgttgtgagccattttcttgagaaagttgtggtcttaaagtaaatgttttttattagacaatttattttgcccataatttaccaggtggtacatagtctttgttcatcaaataatccacamattgtcatagttgaaatgacatttcatttaattaatgttaatatttcgtccagtgatcacaataaaattataaaagcaactgggtaatttgctcaattctgtagcaaaagtag

SEQ ID NO: 441828 - DNA, 601 bp, Homo sapiens
gtcaaggaatctgcatttttaacaaggtccctaggagactctgatgcaggtggtgtagaccacatgctttaggaaggagaaacagcttctgacctgtttactcctgtctctccagcatgataaacacaatgctagttacacatgcaatatgtatttgttgaattacttgtttaatgcatacaataaatatttgtcaaattgtttaatcatgcttcactctatagcattttagagtttataaaacattctatgtgctttatatgatgattcccaaatctatatataaaccaggccatccactaaagctcatatttcatctttaaacagctctattgagcatttttacctgtatatttcagaaatctcaacatatctaaaaaccatattcattatttttcaggcaaagccactttctcgaatttccttattttctcaaccaygacattattttctaagtcatccttgacttctttctctcattcacctctgtatgctaaattctgctgaattttgttttgaaaacttcttccttgcccccagagctcatctttatttctgctgcagcagccctagctcaggcgtttatcagctgcctcctaaa

SEQ ID NO: 441829 - DNA, 455 bp, Homo sapiens
aagacacccagttgtggctgtgatagccttgtctcctgtcactacggtaaatgcagtctccccggggggtcaagggccagcattctgtgctgattccatggcacccaccacagtgggagtcacaacacctccggtgcccaggtctgactcaaccagaatcagggaaatgctggtttctgcagagcctgtgcagagggccagagtaaataaaggggagtcaaagccttctggggtaaatttggaccaaagagacacaaaagatgggagaagccagaaaagaaattgatccacataaagatatattccaagatttgttcatttccaacaacctggcaggagacacaacctgtggaaccaagcacccagctatatttccttatgaaaccgtggcctttcayttactgtgtctcttcacccctcattttcactctgtcttcactctagttttcgagaaa

SEQ ID NO: 441830 - DNA, 566 bp, Homo sapiens
aggggtaagttgcaggcaagaaatctttgtcaaatctacgaattgttaagtgtaactactgcttaaaaaacaacaacaacaaaaaccctaaatattttaagaactagaaatgctacaattcaggtcaaatgaacaaatatgtcttgagaggttattataggaaaggccctaatctatgttactttattcctttggatgatgacaatggagcaagagaaaagcaatcttcctgagatttgaccttccttggaaagaataattgttccccatctatgtccaaaaccatagcactgtgaagacatcactatttattacccttatcaatgtcataaaatactttgtttwtatatctagttttgcccatttatcataaaatcctttattttgaacacttcaaaagcaagaagtaggtcttgtgattccttaaatcttctggggttacatacctgaatgcttggcatgttgtaagcattcaacaaaatgtttgtgaaagcaaattgaatgacatgcagagtctgctatttttgaagcagagagccctctgagttccaacagcacaggactct

SEQ ID NO: 441831 - DNA, 232 bp, Homo sapiens
aaatgcataaaccagtaataacattgtttgttatcactagcaagtattatgtattatacatagatatgctatatgtgctgtatttttacattactgtcagcacaataggcttgtttacaccagcatcaccacaaacatgtgagtaatgtgtttcacaatgacattaggatagctacagtgtccytaagccataggaagttttcagctgcattataatattatgagaccactt

SEQ ID NO: 441832 - DNA, 622 bp, Homo sapiens
tgtcatataaaccttgcttatccctacttctgaccatttactcatgcacttccatgcaaaactttcctcttctcagctcctttttatgagtttatattyagtggttactttaagttctgtctcaaaactagtttcctccaagttactgttcaagattttcctactctgaaaatttctttacctagatttctgtttagtacatatctaaccattgtcgtataattttcttatcatgtatatgttctaacttgctaatatgttattttgccattattcttgaatgggattgtcttttttacttggaatataagcttcttaatatcagaaactttgtttcaagcttgtctaacctgcagctgaagggccacgtgtagcccagcatggcttttaatgcagcccaacacaactttgtgaactttcttaaaacatcatgatttttttttttgcattttttttctagctcatcagctatcattagtgttcatgtattttatgtgtgacccaagacaattcttcttccaatgtgacccaggaaaggcaaaagattggacactcctgctttattccattaatcttctacttaggggttaaatattgatggtggaaaaacacatcattaata

SEQ ID NO: 441833 - DNA, 622 bp, Homo sapiens
tgtcatataaaccttgcttatccctacttctgaccatttactcatgcacttccatgcaaaactttcctcttctcagctcctttttatgagtttatatttagtggttactttaagttctgtctcaaaactagtttcctccaagttactgttcaagattttcctactctgaaaatttctttacctagatttctgtttagtacatatctaaccattgtcgtataattttcttatcatgtatatgttctaacttgctaatatgttattttgccattattcttgaatgggattgtcttttttacttggaatataagcttcttaatatcagaaactttgtttcaagcttgtctaacctgcagctgaagggccacgtgtagcccagcatggcttttaatgcagcccaacacaactttgtgaactttcttaaaacatcatgatttttttttttgcattttktttctagctcatcagctatcattagtgttcatgtattttatgtgtgacccaagacaattcttcttccaatgtgacccaggaaaggcaaaagattggacactcctgctttattccattaatcttctacttaggggttaaatattgatggtggaaaaacacatcattaata

SEQ ID NO: 441834 - DNA, 577 bp, Homo sapiens
tttttttttgcattttttttctagctcatcagctatcattagtgttcatgtattttatgtgtgacccaagacaattcttcttccaatgtgacccaggaaaggcaaaagattggacactcctgctttattccattaatcttctacttaggggttaaatattgatggtggaaaaacacatcattaatatattaaatgagagagttaaaataaaaaacattagaaaatactgaaatcctggacttggtctggtgaggtgaaattttgataattgtattatcttttggttcacagaaactagagcccaaatgcataatagagagatattgtagcatagaattatatgtgaaaaggccagtgttctatttggctctaaactaagtcattggaaatcaaatctgcaagttatagaaatgatacctattgagaatggttggagttcatgatacaaaagctgaaggaaggctcatgagatagctaaagtacataaaagtcagttcatgaaagccttgcatgtcatyatttttaggccaagatttattgagcactgaacagatgacagacactgaaaatcatcaat

SEQ ID NO: 441835 - DNA, 578 bp, Homo sapiens
ttgtactcattttactaacaaagaagcaggctttgattttaagtagtatacctgaatgagttgaccagatgtatataatagaagtatgacttttgaatcaaggactggcaggcaggtcagcactccagaaaacgatgggtactacaactactataattcatagtgttctgaccatggtcaatgtgacttcctccaactgtattcttacaacactaacattcctgttaagatgttactgagtgttcttcgtgtgtgtgtgtgtgtgtgtgtgtgtgtgtgtgtttgtggtggggtggtggtggtggggtacctacatgggaargagttggataggatttatgacaatgtcgagttatataatttttagcaagtttatctcttgtattacttttgcaaggagagatacaatagggaacatgatcaatatattacagaatattatctccagtggaacacaatttataaagagctgaacgagaaaaagaatacaagatcaacagttaaaaacctagtgtgttagtctatttgggctgcagtaacagaatactacagactaggtgcttataaacaacatactt

SEQ ID NO: 441836 - DNA, 544 bp, Homo sapiens
ctcaaaactgtagtgtgttttataactcagagtgtcagagttaattggaagtcaaaagaagaaggtatccaattgaacatctaaaacaaaacagatttcaagtaggcacacatggaaggagaatkacctgtgtttctgctttagaaagtgtttggggaatgaggctaagcacttaagagttagttaatatttaccatgctgtgttataatcacaagaatctgagctgatgctgttgggtaaaaatggtctccatcttttcagaaagcagcttctatccagccatggggagggaacaaacaagaccatggagagacatgactgaattattaaaagcctcgtctacttataaggattaattgtgagttctgaatcaatattttatcattttagctagtgaaaaatttatgagacagccccttttttgcaagtgccccagtataattaaaagagatctaacctttcaattggcatatttttctgcttatacctagatgacattgattagctaagccctaatcgagctaggaacagtctcttagaccc

SEQ ID NO: 441837 - DNA, 544 bp, Homo sapiens
ctcaaaactgtagtgtgttttataactcagagtgtcagagttaattggaagtcaaaagaagaaggtatccaattgaacatctaaaacaaaacagatttcaagtaggcacacatggaaggagaattacctgtgtttctgctttaraaagtgtttggggaatgaggctaagcacttaagagttagttaatatttaccatgctgtgttataatcacaagaatctgagctgatgctgttgggtaaaaatggtctccatcttttcagaaagcagcttctatccagccatggggagggaacaaacaagaccatggagagacatgactgaattattaaaagcctcgtctacttataaggattaattgtgagttctgaatcaatattttatcattttagctagtgaaaaatttatgagacagccccttttttgcaagtgccccagtataattaaaagagatctaacctttcaattggcatatttttctgcttatacctagatgacattgattagctaagccctaatcgagctaggaacagtctcttagaccc

SEQ ID NO: 441838 - DNA, 544 bp, Homo sapiens
ctcaaaactgtagtgtgttttataactcagagtgtcagagttaattggaagtcaaaagaagaaggtatccaattgaacatctaaaacaaaacagatttcaagtaggcacacatggaaggagaattacctgtgtttctgctttagaaagtgtttggggaatgaggctaagcacttaagagttagttaatatttaccatgctgtgttataatcacaagaatctgagctgatgctgttgggtaaaaatggtctccatcttttcagaaagcagcttctayccagccatggggagggaacaaacaagaccatggagagacatgactgaattattaaaagcctcgtctacttataaggattaattgtgagttctgaatcaatattttatcattttagctagtgaaaaatttatgagacagccccttttttgcaagtgccccagtataattaaaagagatctaacctttcaattggcatatttttctgcttatacctagatgacattgattagctaagccctaatcgagctaggaacagtctcttagaccc

SEQ ID NO: 441839 - DNA, 549 bp, Homo sapiens
tcttatatctctgtgctggattcagatgatttcttcaaatttatcctcagtttacagattagccatgtctgatttgctagttatcatctcctacgttttaaatttcaatgactagtcttcatttatagaaattctgtttttttaaaatctcttctgtttattcatggcttcttattattttttggtttattttctgtattttgtcttcgatccttttaatctcattttttatagttatttaaaaacctatttcagattgtaccattatatcaagttctgtgatgttattttgtgttgtgccaatagactgcctattagatagaatcatttcttcatgtattgggygacttttgataagaggttatcgttggcaagaattatttgtccatgagagttttgctcatgctggattatagtagtttctgttttattgattaaatctggagttttatttctgccaagagcttgcaaaacttaataagcctatacctattttaacaataagttctcatcacgtaatttatgcaccatgtgtggtgtaaatttgga

SEQ ID NO: 441840 - DNA, 583 bp, Homo sapiens
agaattgaccactacctacatcctaaactggactgtaaagtattatcactttttttcagaaaatcagtattttaggctctggaatttttgtgccatttgcctttcatattttaatctaawatttattatcttaaactgatatttatttctatatatgaagctggggacatacacatcagctgagtcttatgaatattgggaatttgtattatttagtaatccaaaaaataaaatttaaaaaaaattgaaatggggtattaatcaaggaatgtgcacttatgatctgtacacttattgtatttcatatatatatatatatatatatatatatatatatatggagagagagaaagagagaagttttaagtataggtagcaaaagctacttatactgaatatttataaacaagcatgccctatatttaagatttacatcttctgggtatgttaactttcttcttctattggctactttttacaccagtcattgttgtaataaaattaccgatttaaaatgttttctgtttcttgagagtcaaagaaaagttgaatttactatcacttttaagcagtgatagaactg

SEQ ID NO: 441841 - DNA, 583 bp, Homo sapiens
agaattgaccactacctacatcctaaactggactgtaaagtattatcactttttttcagaaaatcagtattttaggctctggaatttttgtgccatttgcctttcatattttaatctaatattyattatcttaaactgatatttatttctatatatgaagctggggacatacacatcagctgagtcttatgaatattgggaatttgtattatttagtaatccaaaaaataaaatttaaaaaaaattgaaatggggtattaatcaaggaatgtgcacttatgatctgtacacttattgtatttcatatatatatatatatatatatatatatatatatatggagagagagaaagagagaagttttaagtataggtagcaaaagctacttatactgaatatttataaacaagcatgccctatatttaagatttacatcttctgggtatgttaactttcttcttctattggctactttttacaccagtcattgttgtaataaaattaccgatttaaaatgttttctgtttcttgagagtcaaagaaaagttgaatttactatcacttttaagcagtgatagaactg

SEQ ID NO: 441842 - DNA, 583 bp, Homo sapiens
agaattgaccactacctacatcctaaactggactgtaaagtattatcactttttttcagaaaatcagtattttaggctctggaatttttgtgccatttgcctttcatattttaatctaatatttattatcttaaactgatatttatttctatatatgaagctggggacrtacacatcagctgagtcttatgaatattgggaatttgtattatttagtaatccaaaaaataaaatttaaaaaaaattgaaatggggtattaatcaaggaatgtgcacttatgatctgtacacttattgtatttcatatatatatatatatatatatatatatatatatatggagagagagaaagagagaagttttaagtataggtagcaaaagctacttatactgaatatttataaacaagcatgccctatatttaagatttacatcttctgggtatgttaactttcttcttctattggctactttttacaccagtcattgttgtaataaaattaccgatttaaaatgttttctgtttcttgagagtcaaagaaaagttgaatttactatcacttttaagcagtgatagaactg

SEQ ID NO: 441843 - DNA, 583 bp, Homo sapiens
agaattgaccactacctacatcctaaactggactgtaaagtattatcactttttttcagaaaatcagtattttaggctctggaatttttgtgccatttgcctttcatattttaatctaatatttattatcttaaactgatatttatttctatatatgaagctggggacatacacatcagctgagtcttatgaatattgggaatttgtattatttagtaatccaaaaaataaaatttaaaaaaaattgaaatggggtattaatcaaggaatgtkcacttatgatctgtacacttattgtatttcatatatatatatatatatatatatatatatatatatggagagagagaaagagagaagttttaagtataggtagcaaaagctacttatactgaatatttataaacaagcatgccctatatttaagatttacatcttctgggtatgttaactttcttcttctattggctactttttacaccagtcattgttgtaataaaattaccgatttaaaatgttttctgtttcttgagagtcaaagaaaagttgaatttactatcacttttaagcagtgatagaactg

SEQ ID NO: 441844 - DNA, 619 bp, Homo sapiens
tagttttgctaatttgggggttacctttttatcaactgtttggtatttaagctcctcccacatgtttgtagctagttttctattttaaaaccttactagttggctacctggaatgggtttcactttcctgatataggcccatgcaaatagacctcaggagtcccaaccctacaaaatacctacccaggtgtatctgaacactggtgaaggcaacatagactttgcttggatctgtaatacaggcatatattgaatcaattaacatatsgtcaaatgtgaagacagagtcattgaagagccatctggaacttttgaacaggctgatagaaaagatggcgagggtggtgatgaatgtttcagtgcatggagttcaggatgaggggtggcatttctgaaaaatgaaacatcacatttaggctgggcgtgatggctcaagcctgcaatcccagcactttggaaggctgaggtcggaggttcagttgagcccaggagttaaagacaaacctgggaaacaaagcaagaacccctctctgcaaaataatactaatactgctaataataataatagttagaataatgattcagtttggagtatggtatactgtggaagacagggaag

SEQ ID NO: 441845 - DNA, 595 bp, Homo sapiens
aaggtaaataaatcttcagatctgcctatagacactggaagccgcatgtgtgagcyaattttgctgtttttcatgccgatgtgttttactacgattctcttcacaaatatcccttcaaagatcaccttccatccaggtctgacattcagactgtgtactagaatggctatgtctggtctttctgtttattaaaaaaacaacagaaatatttccgtacaagctggtaaatagccatgccctgagctccctagattccccagcttccctggccaccttgactcagagaaaccttgattttcaggatccaagtttatatctggccccacaggtggtctgtcaacctgtttcaacactgtagatgacagcagttgtgactgcctgaccaagttttgaagattaggaatagcacttctgcttctaataaaaagggggttcatctttatagtgccatccagtcttccctcactttgggaataacttagattccatgagaagagctagaagcactgttagaagacaaagctgcacagcacaatacaggcttgggggtcagcctgaaatgtattttaatttaacttgccagttggatgagttt

SEQ ID NO: 441846 - DNA, 595 bp, Homo sapiens
aaggtaaataaatcttcagatctgcctatagacactggaagccgcatgtgtgagccaattttgctgtttttcatgccgatgtgttttactacgattctcttcacaaatatcccttcaaagatcaccttccatccaggtctgacattcagactgtgtactagaatggctatgtctggtctttctgtttattaaaaaaacaacagaaatatttccgtacaagctggtaaatagccatgccctgagctccctagattccccagcttccctggccaccttgactcagagaamccttgattttcaggatccaagtttatatctggccccacaggtggtctgtcaacctgtttcaacactgtagatgacagcagttgtgactgcctgaccaagttttgaagattaggaatagcacttctgcttctaataaaaagggggttcatctttatagtgccatccagtcttccctcactttgggaataacttagattccatgagaagagctagaagcactgttagaagacaaagctgcacagcacaatacaggcttgggggtcagcctgaaatgtattttaatttaacttgccagttggatgagttt

SEQ ID NO: 441847 - DNA, 562 bp, Homo sapiens
ctattaaaagtagcagctgctgggtgtggtagcaggcacctgtaatcccagctactagggaggctgaggcaaggagaatcccctgaacctggaaagtggggtttgtggaaagtgagctgagatcacaccgctgaactccagcctgggcaacagtgcgaggctcggtctcaaaagaaaaaaaaaaaaaaacaaaaaaagcagctgtagcgctggtagtatggtgagaatatggtctttagctttaaaaggctagatataagatcaatggcaaatctgagactcattttcttcattagagaatgagggatataatagtttttttgagttactaaattaaataacataatgtacataaagcacttatggttcatggctaagtactaaattttttktgtgtgtgtatatgtccttatgtgtgtatatatatgtgtgtatgtatgtatatatacctctacacctaaatttatatatctttatctgacatatatgagattatatcttaggactttaaaggaatcataaaatccatgattaaggtaggtttgaggttgtgtctatgggt

SEQ ID NO: 441848 - DNA, 562 bp, Homo sapiens
ctattaaaagtagcagctgctgggtgtggtagcaggcacctgtaatcccagctactagggaggctgaggcaaggagaatcccctgaacctggaaagtggggtttgtggaaagtgagctgagatcacaccgctgaactccagcctgggcaacagtgcgaggctcggtctcaaaagaaaaaaaaaaaaaaacaaaaaaagcagctgtagcgctggtagtatggtgagaatatggtctttagctttaaaaggctagatataagatcaatggcaaatctgagactcattttcttcattagagaatgagggatataatagtttttttgagttactaaattaaataacataatgtacataaagcacttatggttcatggctaagtactaaattttttgtgtgtgtgtatatgtccttatgtgtgtatatatatgtgtgtatgtatgtatatatacctctacacctaaatttatatatctttatctgacatatatgagattrtatcttaggactttaaaggaatcataaaatccatgattaaggtaggtttgaggttgtgtctatgggt

SEQ ID NO: 441849 - DNA, 583 bp, Homo sapiens
tttagtccacttaccacttagactttcagataagattcgaagtctatacctgaccacattatttcaatttgaatggtggaatcttgccacttccatactgaattcatacttaggaattccattatattccccaattcatttttccaccttgttttatgatgtatgtacctagtaagctgtcyccctctagactgtgggttctgtagaggacatagagtgtcagattctgcaatacattctttgtgtcagcaggtcaccaaagagcaaacagtgctaaaaattggtatgagcaaggtcttcttaatgccaactgctttggggtctgcaaagattactatattccacatctttttttgtcaaggagagaacaaggtgagatagatatggtgattatgtggtgacaagaacacaaataactattatatagtcataggacagaagacgtgtcaggttctcatagtataagcaaagacttgagagattcaacggagattgaaatcatatggtttagtgggtttccgaggatgactgatgaaggatttttccctcatgttgggacttgaaggagatagaatttggtagg

SEQ ID NO: 441850 - DNA, 462 bp, Homo sapiens
tctagtctgttgttttgtgcatgccatctttgtccagaatcccctctcagtagctcaaatgctgcttctcagtatctattgactcctccaggaagttccatttaatttttctgacaatatttagtctaatatttgataatgcatggtaatctaaatgaatgcatatctgtctttcccactagagcctgagttctcactcccaacctcrggatatctgcaaattcaaaaagcatttcttttaagccctctaagtcattgccccaaatattaaacaggacaaggccaaggccctgtcatcctccattaattttattttaaaatatttatggaggcctgcactctgatgaatgctgtgcaggatttagaaaaagtaaaatacatagttcctgttcccaaattgctcacaatatagcacaaaaacaagactaacacttgtaaaacaattagaggacaaatatcaca

SEQ ID NO: 441851 - DNA, 586 bp, Homo sapiens
aaatgttgtattggaatttgttttatttaatcagttaatgatacagaatcatctcctttcaccaaagtgggtcccctgattaacgaatctcttttggttgtcatgactaaacattctcgggaagtgggagaggtgggcaggaatagggggcacagagacatcaaccaggaatttcagtaagccagacctgggtcgggcacactgtttctctactttcgttgtcctcatctactgaataagggtcttgatctagaatatttcttccagttttaacatgccatcctctctctgaattctgaaacaattctgccctctctggcaccattatcaccaactgatgacagaggaatcatatagttgcaagggatctaccgggcttaagatacagaagtagggtcagagtcagagtttgggctgctgcatctgcacacagtcaggtaccgtcaggatcctccatgtgcacacccttcctgggaatgcaggattttcaaataccagcatgttttcaggggmttcttctgtaaggcggcagggtaggggtagaagaatggtacatagcagggaacatgaaaaggaagggtgggat

SEQ ID NO: 441852 - DNA, 603 bp, Homo sapiens
aaggatcccaaatgctgaggtaattgtcttagtaaataatacgatgggcacttcaaatatgaacaagtgatggtcagagcgcagatagaatttttagatgacatttaacaaaatgcagtgaagatggccaatgtaaatgtttttctttttttcttaataaaagaacataggggccatatgctgaggcacaaacagttggaaaatgcagtaatccaggaaaaagaagcagatcagcattaattctagccttgctttgtagcgatamatgtgttttttaaaatgactaattgaatacatgacaagaaaagacattcctggaaaataactagcagttgagaacatatcgctaccttgcagaaaccgactcacagtaacttatactgaaaggtgaagtcaaacaaacagagttagaattaataaaccacagcaataactcagggcattgtgaaatgactgaaaaaaatagtctttactctgcaaacttttggcacaaagctgcttctttaaacctgcttgtttttgcgggaaatcacacgtgatcaatgattctatgagtaagaagtcatgaatatttcaggctgtagtagtcgattaagtacacag

SEQ ID NO: 441853 - DNA, 603 bp, Homo sapiens
aaggatcccaaatgctgaggtaattgtcttagtaaataatacgatgggcacttcaaatatgaacaagtgatggtcagagcgcagatagaatttttagatgacatttaacaaaatgcagtgaagatggccaatgtaaatgtttttctttttttcttaataaaagaacataggggccatatgctgaggcacaaacagttggaaaatgcagtaatccaggaaaaagaagcagatcagcattaattctagccttgctttgtagcgataaatgtgttttttaaaatgactaattgaatacatgacaagaaaagacattcctggaaaataactagcagttgagaacatatcrctaccttgcagaaaccgactcacagtaacttatactgaaaggtgaagtcaaacaaacagagttagaattaataaaccacagcaataactcagggcattgtgaaatgactgaaaaaaatagtctttactctgcaaacttttggcacaaagctgcttctttaaacctgcttgtttttgcgggaaatcacacgtgatcaatgattctatgagtaagaagtcatgaatatttcaggctgtagtagtcgattaagtacacag

SEQ ID NO: 441854 - DNA, 389 bp, Homo sapiens
ttgcaaatatttttcccactctgtaggttgccttttcattttgttgatttctttttcttttttgttgagatagggccttgctctgtcacccaggctgcagtgcactggcatgaatacagctcactgcagcctgaacctcccaggctcaagcaatcctcccacctcagcctcacaagtaactgtgactacaggcatgcatcaccatgcccagctaattaaaaaaaatgcagagatggggtctcactatgttggtgaggctggtctcraactactgggctcaaggcatcttcctgcctcagcctcccaaagtgctggaattacaggcatttgacatcatgtccagatgattgttttcttttctatgcagaagatttttttttttttaattt

SEQ ID NO: 441855 - DNA, 589 bp, Homo sapiens
cacagtcaaatgcagcatcttagcctttaataatcaaatataaccgagtataaattgaccttttctttaaagaaatgtatggataccaacacacactgaaataggaggccttgcttcatatgctctgatgtgagcaacatttgcttctactttgcaagcaatgaatgcyttggcttattggcagctagtctctctctaccttttccacactgtacatttgtctaccgattatctgggtgctgaacagactctgcctggaacttatggcatgtactctatgaggcattccatcatcttgatttcattgtcattaaaaagtccctggcaactcagatgttgaatgctcatagcaggtctgcctggtggggcacctgtcctcttagtcaccattggccctctcagtcatggtttcttttaattggcaatattatcaaaacgttcatttcattcataataccatcaacttttctagtctgaaataatttcaaagttcatcaagttcacatactttttttttagagttagggaaattgaagtgtagaggtcatatgagctcttagtagcaaagcccgtaatagaatccagacat

SEQ ID NO: 441856 - DNA, 589 bp, Homo sapiens
cacagtcaaatgcagcatcttagcctttaataatcaaatataaccgagtataaattgaccttttctttaaagaaatgtatggataccaacacacactgaaataggaggccttgcttcatatgctctgatgtgagcaacatttgcttctactttgcaagcaatgaatgctttggcttattggcagctagtctctctctaccttttccacactgtacatttgtctaccgattatctgggtgctgaacagactctgcctggaacttatggcatgtactctatgaggcattccatcatcttgatttcattgtcattaaaaagtccctggcaactcagatgttgaatgctcayagcaggtctgcctggtggggcacctgtcctcttagtcaccattggccctctcagtcatggtttcttttaattggcaatattatcaaaacgttcatttcattcataataccatcaacttttctagtctgaaataatttcaaagttcatcaagttcacatactttttttttagagttagggaaattgaagtgtagaggtcatatgagctcttagtagcaaagcccgtaatagaatccagacat

SEQ ID NO: 441857 - DNA, 574 bp, Homo sapiens
catcaacttttctagtctgaaataatttcaaagttcatcaagttcacatactttttttttagagttagggaaattgaagtgtagaggtcatatgagctcttagtagcaaagcccgtaatagaatccagacatcttgacatctagcttaatctattttctgcttttgtaaatttcaggcagttctgctgaaaaagattgaacacacttgrttcacacatccctcttcctcaaacatctttttatgggttaatttctgtcattaaaaaatgtatttttcatgtctcccagaatgtatcaactgcaggcaagttcaggtaaagttctccatttgctttttcagttgacttacataaataggatttattctccaggcttgatatcacctgagatattatagctctcatgactttggaatgtatctggttgtggtcagataaatactaagcacccccagagcttctttaatctgaaaatcttctagaatgggggtctgcaaactgtaacccgtgagccacatctggtatgctgcctgcttttgtaaatagttttatcagccatgctcatttgttcacaa

SEQ ID NO: 441858 - DNA, 589 bp, Homo sapiens
gcttttgtaaatagttttatcagccatgctcatttgttcacaaagcctgctttcaactacaccggcagagttgagtagcagtgacagagaatgtttagcctgcacagcttgaaatatttagtctgaccctttatagaaaaggtttgccaactgctgctttggaaactataaaaatcccttctaataatcaagattctgtttgtyagatactatttcttttttattttctacaagaaaagcattaggtaattttagagtcatgctaaggtttgtaaatagacaatttagttaatgacttccagaacaatccatgatgttttcctttttgttgtatggtcattcttcctgtgttcttgaatattcatttttcctgaaagctgacaggtaattataaattgaaatgacatctcttacataaacatggatggtttctctttttacatgtaagaacctgaagatacaaatgtgtctttgatttgtgaattgacatttgcaaggccttaatgaattatccataagaagaatatgggagaaatcaacatgctttgaaattactcttgagttttgtgcctactcttgttcttagtga

SEQ ID NO: 441859 - DNA, 589 bp, Homo sapiens
gcttttgtaaatagttttatcagccatgctcatttgttcacaaagcctgctttcaactacaccggcagagttgagtagcagtgacagagaatgtttagcctgcacagcttgaaatatttagtctgaccctttatagaaaaggtttgccaactgctgctttggaaactataaaaatcccttctaataatcaagattctgtttgtcagatactatttcttttttattttctacaagaaaagcattaggtaattttagagtcatgctaaggtttgtaaatagacaatttagttaatgacttccagaacaatccatgatgttttcctttttgttgtatggtcattcttcctgtgttcttgaatattcatttttcctgaaagctgacaggtaattataaattgraatgacatctcttacataaacatggatggtttctctttttacatgtaagaacctgaagatacaaatgtgtctttgatttgtgaattgacatttgcaaggccttaatgaattatccataagaagaatatgggagaaatcaacatgctttgaaattactcttgagttttgtgcctactcttgttcttagtga

SEQ ID NO: 441860 - DNA, 537 bp, Homo sapiens
ggatttggggatataatataaccaagtggggttcatcccaggtaagataatttaatatttaaaatctattagtaataatgattttctcaatggaaaaaagaaaatttaatataattaracacatataataaatactctcaacatacttgaagcagaagaaaaccttctcagtctggtgaagagtttcaacacaaaggcatcagatagcataattcttcatggttaaataagtattgaatagtgtcctttgattttaggaagtagacaaggatatgtatgatctcatttttgtatctggcttctttcatttagcataatgcttttgagattcacccacattgtttcaaatattaatagttcactgcctttgttgctgagtactagttaattgtgtggatatagcataattagattgtacattcaccagttgaatgcttatattgttttatttatgttgttgaatgaaccatataaatgtttccaggtttgactattattaatgcagctgctatatacatttgcattcagtctttgtat

SEQ ID NO: 441861 - DNA, 538 bp, Homo sapiens
tctgcatgcaaaacaaaatggaagattggtagttttcgtattatgctctatgcttatttctgtcactcctaactcttcctaacttgcactgttctcttcatctggaaagaaaatcctttctctcagccctgtcactttctcccatcaaaattgcaatccttcttcaatggcacattgagtgccttttcacactttcytatggcaataaatgcatgcaacagaggtgttatttgtgtatctccctttttgccttaatgtctttgttgaccaaccccgtttcctaaaacacattttataaaatttgcatttcacagaatgttaatctaggtcatgtggagagaaaaaaaaatgattccatggtaactcaattttgaaatggctgtatttaaaaaaaaatttaagtagattattttaattttggacctatcaagaacattttatttgtcaataaccattgtgaaacttcaagagggacctataatattcagactttcaacttgttgtccataaaactactttgtacattttaatggtttcc

SEQ ID NO: 441862 - DNA, 538 bp, Homo sapiens
tctgcatgcaaaacaaaatggaagattggtagttttcgtattatgctctatgcttatttctgtcactcctaactcttcctaacttgcactgttctcttcatctggaaagaaaatcctttctctcagccctgtcactttctcccatcaaaattgcaatccttcttcaatggcacattgagtgccttttcacactttcttatggcaatawatgcatgcaacagaggtgttatttgtgtatctccctttttgccttaatgtctttgttgaccaaccccgtttcctaaaacacattttataaaatttgcatttcacagaatgttaatctaggtcatgtggagagaaaaaaaaatgattccatggtaactcaattttgaaatggctgtatttaaaaaaaaatttaagtagattattttaattttggacctatcaagaacattttatttgtcaataaccattgtgaaacttcaagagggacctataatattcagactttcaacttgttgtccataaaactactttgtacattttaatggtttcc

SEQ ID NO: 441863 - DNA, 538 bp, Homo sapiens
tctgcatgcaaaacaaaatggaagattggtagttttcgtattatgctctatgcttatttctgtcactcctaactcttcctaacttgcactgttctcttcatctggaaagaaaatcctttctctcagccctgtcactttctcccatcaaaattgcaatccttcttcaatggcacattgagtgccttttcacactttcttatggcaataaatgcatgcaacagaggtgttatttgtgtatctccctttttgccytaatgtctttgttgaccaaccccgtttcctaaaacacattttataaaatttgcatttcacagaatgttaatctaggtcatgtggagagaaaaaaaaatgattccatggtaactcaattttgaaatggctgtatttaaaaaaaaatttaagtagattattttaattttggacctatcaagaacattttatttgtcaataaccattgtgaaacttcaagagggacctataatattcagactttcaacttgttgtccataaaactactttgtacattttaatggtttcc

SEQ ID NO: 441864 - DNA, 448 bp, Homo sapiens
aggtttggtcttcttacataatcccatagttcttggagatttagttyattccttttcattattttttctctaatcatcttgtctgcctgtcttatttcagcgagatagtcttcaagctctgaaattcttccctctgcttggtctatttagttattgatacatgcgtttgcattgtgatgttcttgtgttgtgtttttcagctccatcaggacatcgcttcctctctaaactggctattatggtaacagctcctgtaatgttttatcatggttcttagcttcttcacattgggttagaacatgcaactttagctcagcaaagtttgttattacccatcttctgaagcccatttctgtcaatttgctcatttcagcctctgtctttttctgtgcccttgctggagaggtatttcagtcatttggaggagaagaaacactctggttttttg

SEQ ID NO: 441865 - DNA, 563 bp, Homo sapiens
ttttagtctcctatattagcttctagcttggattttcacatgataaacaagaaatacttgttgaatgaaagcatcgaaatattaccctagtacataatcctgtcacaccggaaactatcattttggagcgagcaccatgtgaagggtggccccagatgaaagtaygccagcccatgcagataagaggttccacatgctatgacaacagcacctgtttctaattagcattggcattttctttgtggtttgtggtgctgatggtgacccatgctgtgatgtagaaaaccatttcatcttagctgacacaactaaggtgggatacaataacgtagatgtcacctcatatcatcagcccgaaacatttttttttcttcaggaagataaataagctggcatttaagtgtctaagacacacaactaagcatgttcttgtcagcagaatgaaatgttgtcacaaactcgtaggttcctgctgctccgtaaatgccacagtcttgattttcgctgatctcatagtgagattgttttccctcatataaggctgttgatacagatataatcac

SEQ ID NO: 441866 - DNA, 571 bp, Homo sapiens
tttttgcattcatcctacttggggttcaatgggcttctttgatgtgcagatcattttttcatcaatttttagttttcactcattattcttaaaatatttttttctgctcctttctcttctctttttcaggtacaccctttatgtatatgttggtatgcttaatggtgtccacatttctctgagattctatacattttttaaaatttgattttctctctgttttttgggtcacataatctctatcaatttatcttcaaatgtgctaactgtatcaaatataatgttgagcctctckagtggattttatattttgatgatagaacttttcactccagaacttacatgtggctatgtttataatcttctcagctaaaacattgtcatcatagcttcttttaacatatttaagcatggttccctttagttttttgatatatttataagggatactttgactcagttctttttattctgttaaatctgacatctgggccttcctagaggcagattttatcgtctgcctctacaaagcagacaatattcctgtatatggctcacactttcctgttgc

SEQ ID NO: 441867 - DNA, 450 bp, Homo sapiens
aaaaaaaaaaaaaacagatgatactatgggtactcaaagtagtttctactaaatagatatcactttggaccattgtaaaattgaaagactgtatatcaagacatcataagtcggggaccatatgtatttaggagtttctatcaatgatgaatttataagaacagtgagctcacagaaataatcaggaaacagtggctgccaaaaaatgatgatgataataataataatgtgactttaaactttattaaatggaagtgtgaggaaagtaatgtttttttcaattgtaccggatagaacatacttccagarctgttttagttttgggtgtctttttttttttttaaagagagagaaggcaattggttatattttaagttactagccagaagagaaaaggcctttgaaaactgttaattttaaatggaagatatttaactggaaaaagagaaa

SEQ ID NO: 441868 - DNA, 635 bp, Homo sapiens
ggggtcttgctgacacctgtgttgctcagctgtccaatttgagcagattttatatacattccttctgtgttacccctttttcctggatttctccactaacttttgtctgccagcttttatcactgaactctgtcctgtgaaacctcaggccagtagctgccctgagccacatacattttcagaactgtcttaccaggtacaatcctgtcttgcagggatagtgctgtggattgaatgtttctactatttccrcaaaatatatatgttggagccccaaatcccaatgtgatgctatttgggggaaggggctttgggaagcaattatgtttagatgggctcatgaaagtggaacccttgtgaggtaatgagtgtctttataagaagaggcaacttttttatcagagctaactttcttctccaaagtgcacaaagaagagatcatgtgaacacacagcaagacggtggccatctacaagccaaaagaagaagcctcagaataaaatccaccttgaacttgggcttctcagcctccagcactgtgagaaataaaagtctatttttaagccactcagtctttgggattttgttatggtagctgaagcagactaagacaggtagtcttcactccagtttct

SEQ ID NO: 441869 - DNA, 635 bp, Homo sapiens
ggggtcttgctgacacctgtgttgctcagctgtccaatttgagcagattttatatacattccttctgtgttacccctttttcctggatttctccactaacttttgtctgccagcttttatcactgaactctgtcctgtgaaacctcaggccagtagctgccctgagccacatacattttcagaactgtcttaccaggtacaatcctgtcttgcagggatagtgctgtggattgaatgtttctactatttccgcaaaatatatatgttggagccccaaatcccaatgtgatgctatttgggggaaggggctttgggaagcaattatgtttagatgggctcatgaaagtggaacccttgtgakgtaatgagtgtctttataagaagaggcaacttttttatcagagctaactttcttctccaaagtgcacaaagaagagatcatgtgaacacacagcaagacggtggccatctacaagccaaaagaagaagcctcagaataaaatccaccttgaacttgggcttctcagcctccagcactgtgagaaataaaagtctatttttaagccactcagtctttgggattttgttatggtagctgaagcagactaagacaggtagtcttcactccagtttct

SEQ ID NO: 441870 - DNA, 479 bp, Homo sapiens
tctgtatagatcaaagaatgacttaaaaaagagctgtgtactcctaataacatatttattatacattaaaaatcagtatcataatgtagcagataaagagggtatgaatttgtggaaatacgattaaaccaggtatccaagcgagccaatgcccaaagctgtgtttaccatacaattttaattttggaggaggaacttgtagtactgttgagaaaatttgtcaagtcatacctactaatgactgttcttcggkgggggggcttttttgttggatctaattttttagttaaattgatcctatggaggacagctttagctgaaaaagaaaatggaaatgaaagacttaattaaaaatgtaacatcacattcttgctgtggggacaccaaaataggcaatgaacacattctcttcaatatttattcatctgattttcatggtaattggttggtccctgactataaagggggaaacttggcag

SEQ ID NO: 441871 - DNA, 422 bp, Homo sapiens
tgagaaccaccagttagcatatttcagtatacaggctggccaacataaacacacatatatgtatttactgactaaggaaatagagaggctagttcacttcattaccgtaaatactcaagtctggcttctkcccagagaacttatagccagcagaactctctgtgtggacccacccgttatgcactagaaattctgatggctgattaaaaccactgggcagccaggacaaacttagactccagacacacctgcaaggattctgccacagtgaagacacatggaatgttaaccccagacaactggttgaggctgtgcatcgtaaagaggaaataaaaatcaagatgaaagccttcattctagtcaggctacagaagagactaaaatgtgcatatactagaaattaagaaaagtctaaaattaat

SEQ ID NO: 441872 - DNA, 422 bp, Homo sapiens
tgagaaccaccagttagcatatttcagtatacaggctggccaacataaacacacatatatgtatttactgactaaggaaatagagaggctagttcacttcattaccgtaaatactcaagtctggcttctgcccagagaacttatagccarcagaactctctgtgtggacccacccgttatgcactagaaattctgatggctgattaaaaccactgggcagccaggacaaacttagactccagacacacctgcaaggattctgccacagtgaagacacatggaatgttaaccccagacaactggttgaggctgtgcatcgtaaagaggaaataaaaatcaagatgaaagccttcattctagtcaggctacagaagagactaaaatgtgcatatactagaaattaagaaaagtctaaaattaat

SEQ ID NO: 441873 - DNA, 374 bp, Homo sapiens
ttttttttctttctttctttctttyttttttttttttaaagaaaaccctcttgataaagtaggagaggaaattcctcaacttgataaagaatatctatgggctgggcatggtggctcatacctgtaatcccagcactttgggaggccaaggcaggcggatcatttgaggtcaggagtttaagatcagcctggccaacacagtgtaaccccatctctaccaacaaaaattcaaaaattagccggacgtcatggtgggtacctgtaatcccagctactcggaaggctgaggcaggaaagtcgcttgaacctgggagatggaggctgcggtgaactgagatcatgccactgcactccagcctgagcgacagagcaag

SEQ ID NO: 441874 - DNA, 374 bp, Homo sapiens
ttttttttctttctttctttctttcttttttttttttaaagaaaaccctcttgataaagtaggagaggaaattcctcaacttgataaagaatatctatgggctgggcatggtggctcatacctgtaatcccagcactttgggaggccaaggcaggcggatcatttgaggtcaggagtttaagatcagcctggccaacacagtgtaaccccatctctaccaacaaaaattcaaaaattagccggacgtcatggtrggtacctgtaatcccagctactcggaaggctgaggcaggaaagtcgcttgaacctgggagatggaggctgcggtgaactgagatcatgccactgcactccagcctgagcgacagagcaag

SEQ ID NO: 441875 - DNA, 451 bp, Homo sapiens
acactatggaatagtactatgtagccatttctaaaagtgaactagagtcctattacagttgatttgaaaagatttttacaaggaattgttgagtgaaaacagcgtggtgaaacaaagcatgtgtatgaacccatccttgtaacagaagcaatcacaagaaagcatgtatatatccacaattatagttggagacttcaacagcccgctagacagaataatctagtaattgataccactagccattgatggractactagacagaaaatcgcaaggatggacaaaagctgaacaaaataatcaaccaacaggatctaacggacatacatagagccttccacaaaatcacagcagagtaaacattcttttcaagtgttcatgaaacattcaccaagatataccatgttttaggtcataaaacaaatctaaccaaatttaaaagaattaaagtca

SEQ ID NO: 441876 - DNA, 529 bp, Homo sapiens
  misc_feature (1)...(529): n = A,T,C or G
aataactaataatacatcagaacaattatgatgacaagtcagcatcactactcttgcactttagggccattattcagtaaaataagggttccttgaacaccagcactgcagtaccatgacagtcagcctgataactgggattgttactaagtgactaagggatgggtagtataggcagcctggagatgctgggcaaagggatgattcacactgcgggtggagcaactggggcttcatcatgctgatcagaagagtgtgcaacggaagacttattaattgtttatttctgtaattttccattaatatttttggaccccagttgattgtggggaactgaaaccacagaaagtgaaactacaaataagggggawctactgtatactcaaaatcactgaattgtacactcttaaaaggtgaatatttatggcatgtgaattatacctcaatataaaatacttgtaaaaagtacagctatattaaataaaatgaaccagannnnnnnnnnnnnnnnnnnnnnnnnnnnnnnnnn

SEQ ID NO: 441877 - DNA, 521 bp, Homo sapiens
ttggtgttgaattctaattgtgccagaattgccttgggttttattaracctcttgaaagctaaatttgctcgtctccatgatgctttctgtctcttgcatcattttcagtaggtgacatgtttcttacttagctaatagctggaggtcactcaaaggaaacaatttgacaaatcaacttcagaatgaagcactttgcatccagttgaagaatacacagcaatgtcttgcagatgtagcacactgtggagcttttaaggtctccatggtaactaagtgttcaacatacctgtgattaaactccactgccatggtttactttatatactaaagaaattcttggaagtttatagggaaatctaatgtcctaattaagttatattatacaggcaccaggaaaactggtttccaaaggcactccagtcacaccttttattaaaaaatatttttataagcagataattaatccctaattatctgtttaatttaaaattttgcccctacggctgggcttcactcccag

SEQ ID NO: 441878 - DNA, 571 bp, Homo sapiens
ccattccatttagatttttgggaaggtgaagcagcataatgggacaagtggagcattattcttgtacttaagaaatttggtgttgaattctaattgtgccagaattgccttgggttttattagacctcttgaaagctaaatttgctygtctccatgatgctttctgtctcttgcatcattttcagtaggtgacatgtttcttacttagctaatagctggaggtcactcaaaggaaacaatttgacaaatcaacttcagaatgaagcactttgcatccagttgaagaatacacagcaatgtcttgcagatgtagcacactgtggagcttttaaggtctccatggtaactaagtgttcaacatacctgtgattaaactccactgccatggtttactttatatactaaagaaattcttggaagtttatagggaaatctaatgtcctaattaagttatattatacaggcaccaggaaaactggtttccaaaggcactccagtcacaccttttattaaaaaatatttttataagcagataattaatccctaattatctgtttaatttaaaattttg

SEQ ID NO: 441879 - DNA, 521 bp, Homo sapiens
ttggtgttgaattctaattgtgccagaattgccttgggttttattagacctcttgaaagctaaatttgctcgtctccatgatgctttctgtctcttgcatcattttcagtaggtgacatgtttcttacttagctaatagctggaggtcactcaaaggaaacaatttgacaaatcaacttcagaatgaagcactttgcatccagttgaagaatacacagcaatgtcttgcagatgtagcacactgtggagcttttaaggtctccatggtaactaagtgttmaacatacctgtgattaaactccactgccatggtttactttatatactaaagaaattcttggaagtttatagggaaatctaatgtcctaattaagttatattatacaggcaccaggaaaactggtttccaaaggcactccagtcacaccttttattaaaaaatatttttataagcagataattaatccctaattatctgtttaatttaaaattttgcccctacggctgggcttcactcccag

SEQ ID NO: 441880 - DNA, 566 bp, Homo sapiens
ttaccatgaatatccttttgctactcactcctgataaaattctgtgtataataatatcagttgctgattggtattgttattattaatatctaccaattcattccagggtgttttttctaactgaagggaaagattggtttgatgcaacaaactgaagttattgaaaatatgtggtgatgtggcattaattttcacttgagctgatattgtctagtatttcattctgtgtttctgctttactaattctaatratgatgatgaggatgacactaggatagaatacttaccctgctccagacactgcactaaggtgtcattcatacattcaacaaatatttatcaaacacataccatgtctagtcactgtttagatattgaagataaaacactaagtaagtgcttaccttctgttatggggagagggaaatacacaaacatatacataagtaggatatcaaggtgaaccatatgaacatgccatttttatagatgaaatgatccagtatcagcaattttatatagttcagcacggtaatttcagatagcgatgagggtgtgtgtggtct

SEQ ID NO: 441881 - DNA, 566 bp, Homo sapiens
ttaccatgaatatccttttgctactcactcctgataaaattctgtgtataataatatcagttgctgattggtattgttattattaatatctaccaattcattccagggtgttttttctaactgaagggaaagattggtttgatgcaacaaactgaagttattgaaaatatgtggtgatgtggcattaattttcacttgagctgatattgtctagtatttcattctgtgtttctgctttactaattctaatgatgatgatgaggatgacactaggatrgaatacttaccctgctccagacactgcactaaggtgtcattcatacattcaacaaatatttatcaaacacataccatgtctagtcactgtttagatattgaagataaaacactaagtaagtgcttaccttctgttatggggagagggaaatacacaaacatatacataagtaggatatcaaggtgaaccatatgaacatgccatttttatagatgaaatgatccagtatcagcaattttatatagttcagcacggtaatttcagatagcgatgagggtgtgtgtggtct

SEQ ID NO: 441882 - DNA, 544 bp, Homo sapiens
atgtgttgagaatgttactagatgaaaatatgggacagtcaatgaaatctaagtrtaggttaggtcgggtataccgattccttcttattttttaaagtctctgtatgatagtatcttacagttcttaggaagatgggtggatgagttttggagaatctcctcagccaattctgttattaaaagttgtgccatggaaaactggagcccagtcttaatagagtaattgtaagctctgttccagagaattaggcttggattgttagaaaaaggtcttaaagctgtttttttggagaatgagacaatgtaacaataatattggtcatttttgataaagcttaagtgtgggtaaccatttagcttttcatttcttttttttaataattgacagcaatcgtgtgaaataagccaaataccattcattatccttagttttgagaggtctaatccaaggcctcttggatatagaaataataacagttaactttaggtttatcctgtagactagtttttaattttactaaattgtgaattttgttctccttga

SEQ ID NO: 441883 - DNA, 544 bp, Homo sapiens
atgtgttgagaatgttactagatgaaaatatgggacagtcaatgaaatctaagtgtaggttaggtcgggtataccgattccttcttattttttaaagtctctgtatgatagtatcttacagttcttaggaagatgggtggatgagttttggagaatctcctcagccaattctgttattaaaagttgtgccatggaaaactggagcccagtcttaatagagtaattgtaagctctgttccagagaattaggcttggattgttagaaaaaggtcttaaagctgtttttttggagaatgagacaatgtaacaataatattggtcatttttgataaagcttaagtgtgggtaaccatttagcttttcatttcttttttttaataattgacagcaatcgtgtgaaataagccaaatascattcattatccttagttttgagaggtctaatccaaggcctcttggatatagaaataataacagttaactttaggtttatcctgtagactagtttttaattttactaaattgtgaattttgttctccttga

SEQ ID NO: 441884 - DNA, 496 bp, Homo sapiens
ctgggtgcagtggcttatgcctgtaatcccagcactttgggagtgtgaggcgggtggatcacttgaagccaggactttgagaaccagcctggccaacaaggtgaaaccccatctctacgaaagaatacaaaaattagccaggtgtggtggtatgcacctgtaattacagctcctcgggagtctgaggcacaagaattgcttaaacccagaaggcagagattacagtgagctgagatgtcgtcactgcactccaatctgggtgacagagcaatactctgtatcaaaaaaaaaaaagagagagagagagagagggaaggaaagaaagagaaaggaagaaaaaaaagaaagaaagaaagaaaagaaaagaaaagaaaagaaaagaaaagaaaagaaaaaagaaattgcctttaagcagctgccctggtgagggagaggatgacaccygggaaagggggcaggctgtgattgaagactcattcttttttttttttttttt

SEQ ID NO: 441885 - DNA, 580 bp, Homo sapiens
gtgcttttggttctcacttgaagcagctgtatgtgaaagaagtaacttcctaaggcaagtttaaaacattcacccaggttctgtggaagaaatctatgtctctcaaggccttagtggggaaaggtggagacatggtgggagcgggggagaattacatgcaggagccaggaactaaaagcaaagactaatggggaaaaaagggaaagagagagagacatcaagctccattaaaagcaagatggaaaatcttggagaaaagtggagagagaactgctggaagctgtccaaatcaacaaaatagggagaccaaaggaaaaaagaaagcactaaacagtaaaaaggagtaggaactactttttttttttttttttgagacggagtctcactctgtcaccaggctggagtgcagtggcacgatctttgctcacctcccaggttcaagcgattctcctgcctcagcctcccgagtagttgggactacaggcaggagccaccatgcccrgctaatttttatatttttagtagagatgggttttcaccatgttggccaggaaggtctcgatctcttgacctcatgatc

SEQ ID NO: 441886 - DNA, 619 bp, Homo sapiens
cctaatttatggaatttatctagtgtttactgtctaaggtgcccagcgttcgtctgatggtctcttcatggctcctttatactccagttgacttttaccctgcaacctcgtcagcaatgctgtccagcctttcccttctcttgtatttctctttgtccactctagattttctttttaaaagtatagttttcttttgaatttttctaccagcatccttcagcttagcactccattagcagaagcaacatttctccagggatgtgtctttgttggaaggcaaggtgaatctgaaataatacgtgaattttaactaataagtgaactttgaagaatatataaatttttaaataacagtttttttggttacaaaaatttctgctcaatgaaaaaatgttagaaatcacacagaawtataaagggggttataacaattaccacattgctaactaccaccggcataacatataacatatttctctctttctctctctctttctctctctctctctctccctccctccctgtctgcctctatccctctctttctggttgggtttgaatccccacaagaaaccaggaggaatctctcctaggacctcctggaatgctgaaatcaagt

SEQ ID NO: 441887 - DNA, 602 bp, Homo sapiens
taccaccggcataacatataacatatttctctctttctctctctctttctctctctctctctctccctccctccctgtctgcctctatccctctctttctggttgggtttgaatccccacaagaaaccaggaggaatctctcctaggacctcctggaatgctgaaatcaagtctaacttgcaaaaaattctgatgacagttgaatgttttcttttcttttgacagaagtaaactgccacaacttggaaacccagtggtactcattcccttgtttttaaaaaattgatggattaaatattgaataggtgatatattcatggggttcagaattttaggagtataaaaactggtcttaaatatgtctgcaaattctttgaccctcttcccatcaaagacagagtctaatttctctycccttgaatatggcttgctcttagtgacacagtttcttgagtatccatccagagatttttatgcacttgaaaaagatatatattcttttctctccttttcactcgttgtttcatatcttttttttttttcagctagcagcatatattggagatcttttgttcttttttacaccttaataatatttcctt

SEQ ID NO: 441888 - DNA, 456 bp, Homo sapiens
catgtatacatgtgcgtttgtctgtgtgtgggagaagggaggtgtatgcagccttcatctcaatttgagtcatcacagcatattggtattgttagttatttctcttttgtagatgattaaaatgagaatgtaaatgattacattgaggtttcattattcaactcttttaagatcatatttcctatctcttaacagagataatatattttttctagaatattttatattttaataaggaaaaactacatttaagaaaaacacctaaattatygttgccattatacagttggtctatagtatatggattaaaagtggtaaaggaaatggaaagaaacatcaatatattgtaactggagtaaagaatgacacttggtaactcactgattatagagtataaaagatttaccattcaagatatcatttcaatttcaattataaattttgtattaacatttc

SEQ ID NO: 441889 - DNA, 456 bp, Homo sapiens
catgtatacatgtgcgtttgtctgtgtgtgggagaagggaggtgtatgcagccttcatctcaatttgagtcatcacagcatattggtattgttagttatttctcttttgtagatgattaaaatgagaatgtaaatgattacattgaggtttcattattcaactcttttaagatcatatttcctatctcttaacagagataatatattttttctagaatattttatattttaataaggaaaaactacatttaagaaaaacacctaaattatcgttgccattatacagttggtctatagtatatggattaaaagtggtaaaggaaatggaaagaaacatcaatatattgtaactggagtaaagaatgacacttggtaactcactgattatagastataaaagatttaccattcaagatatcatttcaatttcaattataaattttgtattaacatttc

SEQ ID NO: 441890 - DNA, 619 bp, Homo sapiens
gaggtgacttcttttatgaaagagtattagttattgattcaatttctttaatatatgtaggcctatcagatgatcttttctgcatgagtatgatagtggtgtcactcaagaatttgtctattttatcaacattttcaaatattgagacagaaaaatgtttttagtatccttttatatatcctcttaaggcccataggaacaataatggcaatccctgtttgatttattatattaaaaactgtgtcctctctctcttttctcccttgattagcctgactagagtctttaccaattttattaatattttcaaataataacttttgtattagtttattttctttattgtttttctatttttaatcttactgagctctattctaattttaattatttctcttcttttscttagtttggctgttatttctctagcttcttaaagtagaagcttaagttattgattatagattttactttctaatatatgcatttaatgttatacgtttgtctctgtgcactgctttttctggatctcacatggtttgaccagttatagtttcattttcatttagttcaaaatattttttaagtttctcttcagacttctttgaccaatgtgtta

SEQ ID NO: 441891 - DNA, 410 bp, Homo sapiens
ggctttaagatttttcctttgtctttcattttctgcagtttgcatatgacatgcctagagaaatttttttgttttgtttttatctttatagtttatttagcttagtgttctctcaacttccaggacatgagaatcatttgtcactcattttggaaagttttcagccattattttttcaaatattttttcagctctgttctctttcttctccttctaatattacaataacacataatacactttttgaaattgtcccacagtacttagatactctgctgtgattttattttattttatttttcctctttragttttagtttgggaaatttctgttgatatattttcaagcccactgatctttccttagctttctacctatgtccattctctaatgaacctatcaatggtct

SEQ ID NO: 441892 - DNA, 570 bp, Homo sapiens
caaatacacagacaattcaactcaaacttgctcaaagactaactcagttttatgcctgaggaaggaggtgtgctcctgatgttctgtagcacagyggttcccaacctttttggcacctgggaccagtttcctggaagacaatttttccaccagatgggaggggagggtggtttcaggatgaaagtgttccacctcagatcatcaggcattagatccctcacatgcgcagttcaaatagggtttgagcaccagtgaggctctaatgcgcccctgacctgacaggaggcaaagctcaggcagtaatgctctctcaccctcccctcacctcctgccgtgaggcctggttcctaaatggacacaaaccggcactggtccctggcccaggggctgaggacgcttgctgtagcagatattcctggactaatagatcttactacaataatctgtatctaattttatagcaggcaatgtattaactaaacctaatgcagagacataaagctatatcaccaaatgcccatggggagaactggagatgcagtatgtttcctatataaactattttaaaat

SEQ ID NO: 441893 - DNA, 574 bp, Homo sapiens
atatttgtacagaaaatacatatatttacaatatatttctggaaatatatatcagagacggcaaaggtctttgtgtattagccagctcggctgccaaaagaaaatatcatagactgggtggtttaaacaacagaaatacattttctcacagttctggaagctgaaactttgagatcagggtgccagcayggtgaggttctggtgaggcctctctttcttccttgcagatgaccatcttctccatgaggccccacgtggccttacctatgtatgtgctatggaggcagagacacagaaatctgtctctttctttttataaggtcacccattctatcgagttagaaacccacagttataatctcacataaagttaattacctcctaaaagccctatctccaaatatagtcacactaagggtaaatgttgcaacatatgaattttgagagggcaaaattcagtctgtagaaccttgtctccagggagataatttgcattgccaggagacaaaaaagggaaggagacgtttctcactctactcttttgtaatttccatcttttaaatgtgaatgtgaa

SEQ ID NO: 441894 - DNA, 550 bp, Homo sapiens
cttacgttgctatataattataatatgaatattatggatgatatacatatctttataatccatttaaatcacttctaaagcatgaataatatatatgtcttttacacatgcatgtatacacacaaatacaatttacttataaacctattaagaagttagcactatgggaatattatatatattatatatatatataacatttttcatctctctgtcyccaaactttgtgattttataatttcaataaaagtacaattttgttcaaactgtatttgtatcttatgtttctgttcatgcttctgcaggatattttacaagataaaagtgtggtccattgttatttgctttactaaagttctaaattttaaatactactaagaccaccaggaaaatactttctaatttattagaaaatacttacaataaagcattaattcgataattcaagaatgccaatataaatacatgaaatggaacacagttaaaaataaatgtatgaacagtcacataaaccatttcatgtcatcattttctgtatttaccaaagtta

SEQ ID NO: 441895 - DNA, 467 bp, Homo sapiens
agagggtggtgcccagctggttgtttacttttccccttagagaagattgaggaaatagtattaagatttactattagaaagatgtttagaagaataattttgtgacagtgattaaattctaaaatccttgatccaaaagggaattgagagtatgaaattagataatgaaatttcctgctgtgtatcacatgccatcactgaataaattctcttgccacatatttttgtattgtgtttcttttcctctgtgtcataaacctctatccacctcatttaacatttttactgatttttttctcccayaaatcatattcttattgtgccaaatactattaatataaaatctaacaggctaacataaagaaagagatgtcactttatccttagaggtatctccagatgtgggcctgtcatgtggcggggggagtatctgctgagcctcttaagactgtggagatggcagaagc

SEQ ID NO: 441896 - DNA, 578 bp, Homo sapiens
agaggcaaatcaatgacttttatatttttgaaacccctaaattaactttttaagccaaatgaggctattatataatagtcatcattctttaaaagtttctacttccatttcttcccctcctgataagtttattttctcctgtatcacaccactcaaatttctagtaacctcttaacttccaaaaggaataatggtgtgttcctcatgccctgtgacttcctaccaggatttgcttacagtcactatccctgaatggaaactayttttctctgatcccaagatcctaagcagagcattgtgtgtatgttgtactctacttccaaccaaccctttaaagcaccaggcactctgcatgttgcattctggccagagtgcactgctttgaattcctctcatttgactctttgacgatccttactcagtgctcttcttcagcctgtttcgtcagtctgcaattatctttttcttctttacctccagttgaaattttacttctatttcaatatctattttaaatactttctccttctaatgattaccctcacacccacttaagtacacacacttgtacacacact

SEQ ID NO: 441897 - DNA, 617 bp, Homo sapiens
gatgaagcttcgttttcaatataaataaatattacagcagtttgctttaaaaaatttagatgaaaactatgttctttgaagtaaaattgatgagtgaaaagtttcaatcttgaaagtattaaaaatattcatgaactgtctactgatcgaattctctctgaagtatagtccttcaaacaccttctgtcatgcatttcatccaaccagatgtgtaagctcaagaccatgaaaagaaagggagaaagmtcataatgctttgctgccactatagcacgcagccatctgtgaagccttgttttaacattattgcttcagtgggtgtttatctttgcataaaaaagtttagactgatatattcccatgtctttgcacacactaaacacttacatttgtagtaaaggggaatcttattttagtttttaacagaatcgtaaatccagaagggacataagagaagagctgggtttagatggaagttttctgtccccagctcaatgctttctccattaagccatcattccaatgataccaagcacattgtattctaagaaaatggaacaaactctctaacctgccccactatctagttttagtggcataaatactttgtgggcaac

SEQ ID NO: 441898 - DNA, 605 bp, Homo sapiens
aacagatattttattactatatttcaaagtttcctgttttattgcattttatttacttgaaataaataaacaactgaaatacaggatgaagataacaacaaaactcacagctaacatttatcatgagcaggtataggataagtgattgacatatgctatcttatgtaaccctcacaaccacccagaggggtaaacgccactattctcatttagacatgaggaaactatagtcataactaggtatccagttctaaaaaaggagcttaactcaaatgcttgaggccctgccatgatgcaccactacttcattgcattaaacacagtttaaaattaaactacacatatccttaaaatttatctgtgggagcaggagaaataaaactaagaagaatggttggttttattaaaatccctttcctaatgtcattgagcagtacracatgtttataattaaaatgaatgaaacttaacattggctttattcttttgtgattcctgcacgtagcatccttctctaccacatagcacaacattatggacaacagcatgagaaccatctttaattctgcctcctgtttccagtaactccagcaataggagtcaat

SEQ ID NO: 441899 - DNA, 617 bp, Homo sapiens
gatgaagcttcgttttcaatataaataaatattacagcagtttgctttaaaaaatttagatgaaaactatgttctttgaagtaaaattgatgagtgaaaagtttcaatcttgaaagtattaaaaatattcatgaactgtctactgatcgaattctctctgaagtatagtccttcaaacaccttctgtcatgcatttcatccaaccagatgtgtaagctcaagaccatgaaaagaaagggagaaagctcataatgctttgctgccactatagcacgcagccatctgtgaagccttgttttaacattattgcttcagtggrtgtttatctttgcataaaaaagtttagactgatatattcccatgtctttgcacacactaaacacttacatttgtagtaaaggggaatcttattttagtttttaacagaatcgtaaatccagaagggacataagagaagagctgggtttagatggaagttttctgtccccagctcaatgctttctccattaagccatcattccaatgataccaagcacattgtattctaagaaaatggaacaaactctctaacctgccccactatctagttttagtggcataaatactttgtgggcaac

SEQ ID NO: 441900 - DNA, 572 bp, Homo sapiens
agatcaaatggagactttttgcttctctataatattttattacttctctgtttttcttctgatacttcgggcgaaactggtgcaagctaagagttgaaaatcaatgccttagggcatgggcttttaataccactacatattagaatcaccttgaaatagtaaatacatgaaagctgacagcccacctcagaacatttaagttataattggatggggccagaatgtttagagtttgaaaagtttcaaggtgtctctcatatgcatacactattgaaaactactcttaagaggtaagaaacctaaacaaataaagtctattcttaaaattcaatttttctacttactctcccatagcaaattcatgtatttcccacgatattatttttttattctccccatataccttacaaagaggtcattagtactctaattatattttgtccttctctttaggaagtgtttctgtcaggtattatrattattttactttataattataatgcaataatattttgcattaaaaattaattaacacatagaatgtaccaggtattgttccaaaaaacttttcc

SEQ ID NO: 441901 - DNA, 617 bp, Homo sapiens
tgactaaaaatcagtcagctgttaggtagcatagacatgatacaaccccagagcagcatggtgcttcactaataataacaaaataatgagttgatagttatatagcaattagaacagctctggcaagtgttaggttattgcttactttactattatcattatgatcattattattattatttactgtgtgattaccatgtgctaggcataatgctaagaactttacatagttacatggttgtatatgctttatttcattttcacctcacaatatccctgtgagatgagaacacttattgctgtaagcaacttgtttcagtcacccaaccaataagcagatgagcctgaacaaaaacccatagttaaaaccatggcgtttttctttttcattttgtatcctgtacaggatttaataatagttttctcaaacagtagtaaactattatttactgaattgaattaaattgaatttgtatatctatgattcaaacttagttacattactttgcagtagagacattttcctttttttatatatatttgtgtctgtcttatttaatatctcttagcctgacgttcttaaaaaatatcagyttatcagatgagtagattgcaaa

SEQ ID NO: 441902 - DNA, 594 bp, Homo sapiens
tatcaacattatccaagaccttatttaggttccttgaaagctggtatctgtgcagcttccattcaggtggaaggtactgaaataatcatagactggcaaaaatggccaagcgcagtggctcacacctgtaatcccaatactttgggaggtcaaggcgggcagatcactcgagctcagtagttcgaaaccagcatgggcaacatgggaaaaccctgtctcaactgaaataaaaaagttaactggacatggtggcatgcacctgtagtctcagctgctcaggaagctgaggtgggaggatcatttgagcctgggaagtcaaggctgcagtgagctgtgatccggccacygcactctaaacctggcaacagaacgaaaccttgtcaaaacaaaaacaaaacaaaacaaaacaaacaaacaaacaaacaaactctatttttaagtcctcactgctaaatgcaaaattttctaccacagggtggtagtaatagatttctgttattgagaagaccctcctccccacccaccccccccccaaaaaaaaaaacaaaaacttttctctcctggtatttagtacttccttcttttttttctctt

SEQ ID NO: 441903 - DNA, 281 bp, Homo sapiens
atttttaagtcctcactgctaaatgcaaaattttctaccacagggtggtagtaatagatttctgttattgagaagaccctcctccccacccaccccccccccmaaaaaaaaaacaaaaacttttctctcctggtatttagtacttccttcttttttttctcttttatcaggaaaactgatatactattttcaatgagttttggattttctaagggcacacacagagagaataactttaggctacttcttgaagatataattcaatgatttttaaccaatat

SEQ ID NO: 441904 - DNA, 497 bp, Homo sapiens
caaatcataagtaaagaaaattaaatgataagccacaaattagaagaaatttttgtcayacatgaaaaatcgatgtggggaaggataaattatatttctttctactagttttatcatatgcaggggaaatgaaattaaaatatacagtcatgtgccacataagagtatttcagtcaataatgaaccgtatataagatggtgatcagagcaacaggcgataccatgtagtctaggtatgtagtagtcagtaccatctcgggctgtgtaagtatactcttggatgttcatacaataatagcaaaattgtccaacaatgcatttctcagaatgtgtaccttttgctaagcgaaacattaatatatttatatatgtactcccccattagttttatgttttatacaggaacatctattttaaaaattgcaaaaaaaccatgattaagcattttaaaaatctatttgcatgctttccattaaacaaaactacatttttctcca

SEQ ID NO: 441905 - DNA, 602 bp, Homo sapiens
acaaatcataagtaaagaaaattaaatgataagccacaaattagaagaaatttttgtcacacatgaaaaatcsatgtggggaaggataaattatatttctttctactagttttatcatatgcaggggaaatgaaattaaaatatacagtcatgtgccacataagagtatttcagtcaataatgaaccgtatataagatggtgatcagagcaacaggcgataccatgtagtctaggtatgtagtagtcagtaccatctcgggctgtgtaagtatactcttggatgttcatacaataatagcaaaattgtccaacaatgcatttctcagaatgtgtaccttttgctaagcgaaacattaatatatttatatatgtactcccccattagttttatgttttatacaggaacatctattttaaaaattgcaaaaaaaccatgattaagcattttaaaaatctatttgcatgctttccattaaacaaaactacatttttctccaggcagcttatacctgctttttgatagatgttatcaagacaattgatgatttacttcaatgggctgaggagataattccatggaagctcttaaagatctaatatg

SEQ ID NO: 441906 - DNA, 552 bp, Homo sapiens
aataaaagcaggccaggtgcagtggctcatgcctgtaatcccaacactttgagaggctgatgatgtgggcagatcacttgaggccaggaatttgaaatcagtctttagttcttttctggccaacatggcaaaaccccatttctgctaaaaatacaaaaattagctgggcatggtggcttatcctggaatcccagatactacaaaggctgaggcacaagaactgctcgaacctgggaggccaaggttgcagtgagctgagatcacgtcactgcactccagcctgtgcaagagtaagcactatctcaaaaagagaaaaaaagaaaagaaagaaaagaaaaaaaattttttttggctactcccaatagattttgcatgtaactactggttgtttttctgcaggtacagaaatgattgccacatattcactccccragattaggctgtaaggtttttcatgggcataaatataatttttcatctttgcgtcttaataaccaaacccaaacaggaataactcaatctcagttaactattaataaagtaagaagaaat

SEQ ID NO: 441907 - DNA, 620 bp, Homo sapiens
aatttcagcaatattttataaagcatagtatctcttcggaaatatataacaaaattaagactatcaatctccaaaagttaattctgcagttttttttwtctaaagaaaaccccactttccaattgacaaccattatgacattgtacacagagaatataaaaatttagttaactaatgcatggcacttaaaactgtgaatcagattcaggtttgctatgaagttagagtaggtagataggcagataatagtagggcaggatagtgccccaagtaatgtcaggtgactgtcttgtaattgtcaggtggccccttaattgtgggccacaactcccaataaaatcctaagaattgagcaaacatgtggcagatgacatgattgtatatttagaaaaccccatcgtctcagcccaaaatctccttaagcttatgagcaacttcagcaaagtgtcaaggtacaaaatcaatgtgcaaaaatcacaaacaatcttatacaccaataatagagagccaaatcatgagtgaactcccattcacaattgctacaaagagaataaaaatacctaggaatacaacttacaagggatgtgaaggaccgcttcagggagaactacaaaccactg

SEQ ID NO: 441908 - DNA, 620 bp, Homo sapiens
aatttcagcaatattttataaagcatagtatctcttcggaaatatataacaaaattaagactatcaatctccaaaagttaattctgcagttttttttatctaaagaaaaccccactttccaattgacaaccattatgacattgtacacagagaatataaaaatttagttaactaatgcatggcacttaaaactgtgaatcagattcaggtttgctatgaagttagagtaggyagataggcagataatagtagggcaggatagtgccccaagtaatgtcaggtgactgtcttgtaattgtcaggtggccccttaattgtgggccacaactcccaataaaatcctaagaattgagcaaacatgtggcagatgacatgattgtatatttagaaaaccccatcgtctcagcccaaaatctccttaagcttatgagcaacttcagcaaagtgtcaaggtacaaaatcaatgtgcaaaaatcacaaacaatcttatacaccaataatagagagccaaatcatgagtgaactcccattcacaattgctacaaagagaataaaaatacctaggaatacaacttacaagggatgtgaaggaccgcttcagggagaactacaaaccactg

SEQ ID NO: 441909 - DNA, 570 bp, Homo sapiens
agtttaccagtttacttttttctaatatctgagttgaattagtctcttccaaagtattttttttttgcaattttgaatttactagttattttaatgaatgaagaaataataatgggatataatgtcttaagcaggartgagtagaatatacaaaaatctaatctaagaatgggaatgagatattggatatttatttatgaaaactgaataactaataaaaatgatctcagcaaatatgcttaatttagatattgtgataatttcttgtgaaacttttgaagttaatgttttgagggaactttaaattctctctcaaccacttgcaatttaattaattagctatcaggcatcagtgatattcaaacttgcctccagaatctcatttatgagatttcaccctggatcacatttttagtttgtcataaaggttggcactctgcacaaaattggcaaggcaaaatatttattttcctctgtattcacttaaaaaaaaatactgtcacatctgacagaaaccatagtaacttctctctaaagttattctttctcaagttttttaccctttgtgct

SEQ ID NO: 441910 - DNA, 570 bp, Homo sapiens
agtttaccagtttacttttttctaatatctgagttgaattagtctcttccaaagtattttttttttgcaattttgaatttactagttattttaatgaatgaagaaataataatgggatataatgtcttaagcaggagtgagtagaatatacaaaaatctaatctaagaaygggaatgagatattggatatttatttatgaaaactgaataactaataaaaatgatctcagcaaatatgcttaatttagatattgtgataatttcttgtgaaacttttgaagttaatgttttgagggaactttaaattctctctcaaccacttgcaatttaattaattagctatcaggcatcagtgatattcaaacttgcctccagaatctcatttatgagatttcaccctggatcacatttttagtttgtcataaaggttggcactctgcacaaaattggcaaggcaaaatatttattttcctctgtattcacttaaaaaaaaatactgtcacatctgacagaaaccatagtaacttctctctaaagttattctttctcaagttttttaccctttgtgct

SEQ ID NO: 441911 - DNA, 570 bp, Homo sapiens
agtttaccagtttacttttttctaatatctgagttgaattagtctcttccaaagtattttttttttgcaattttgaatttactagttattttaatgaatgaagaaataataatgggatataatgtcttaagcaggagtgagtagaatatacaaaaatctaatctaagaatgggaatgagatattggatatttatttatgaaaactgaataactaataaaaatgatctcagcaaatatgcttaatttagatattgtgayaatttcttgtgaaacttttgaagttaatgttttgagggaactttaaattctctctcaaccacttgcaatttaattaattagctatcaggcatcagtgatattcaaacttgcctccagaatctcatttatgagatttcaccctggatcacatttttagtttgtcataaaggttggcactctgcacaaaattggcaaggcaaaatatttattttcctctgtattcacttaaaaaaaaatactgtcacatctgacagaaaccatagtaacttctctctaaagttattctttctcaagttttttaccctttgtgct

SEQ ID NO: 441912 - DNA, 586 bp, Homo sapiens
aatatgcttaatttagatattgtgataatttcttgtgaaacttttgaagttaatgttttgagggaactttaaattctctctcaaccacttgcaatttaattaattagctatcaggcatcagtgatattcaaacttgcctccagaatctcatttatgagatttcaccctggatcacatttttagtttgtcataaaggttggcactctgcacaaaattggcaaggcaaaatatttattttcctctgtattcacttaaaaaaaaatactgtcacatctgacagaaaccatagtaacttctctctaaagttattctttctcaagttttttaccctttgtgctcttgacaacttttctgcaaatttcattgtaacagaaccaatacaaytaataagattcctgctgtaactttcctcacgccttctatttatttttgtctgtttattaaaatagtactttttataagagtcgccctatgatattactgcttcttttaattactttttgaaaaataaatacttttatttttaagaagtatgtttaatcaaactcatcttaaatttattttgcgtaccttcaaatatgcagtt

SEQ ID NO: 441913 - DNA, 612 bp, Homo sapiens
aatgtactcatataaatttaactaaatgcttaaatggcctgttgacccaaagggcactattagttttggcttgataatttaataaattaatgcccaggaaataatacatactttttattccacacttttctcttttattttttgaatcaaataaccgtgtgggtataattagaatattgaaaaaaaaaaagcttcctttcttcttggctacccttccttggtatatgcatgtcttcttcactgattatgatgaagaaytgagagaattcaacctacataagttcattttctgtataattgcaatttaaaactttaagcagcatgcttccaaccagttttggtgaaactctaagaacataaataaattatttgaaaagtcagtataaagtataccttcagtatgaatataatatgggtatataagaaagactatttcttgttttctcatgaaatcctaattttcttagttttatgtttagttttctttttatagataaattccttaaagccctaagtcatgacaagcagaaaaagactgaaaagatttcgaattaaaattattttattgtaaaaattatattgattgatcagagacagttaaatattatattt

SEQ ID NO: 441914 - DNA, 612 bp, Homo sapiens
aatgtactcatataaatttaactaaatgcttaaatggcctgttgacccaaagggcactattagttttggcttgataatttaataaattaatgcccaggaaataatacatactttttattccacacttttctcttttattttttgaatcaaataaccgtgtgggtataattagaatattgaaaaaaaaaaagcttcctttcttcttggctacccttccttggtatatgcatgtcttcttcactgattatgatgaagaactgagagaattcaacctacataagttcattttctgtataattgcaatttaaaactttaagcagcatgcttccaaccagttttggtgaaactctaagaacataaataaattatttgaaaagtcagtataaagtataccttcagtatgaatataatatgggtatataagaaagactatttcttgttttctcatgaaatcctaattttcttagttttatgtttagttttctttttatagataaattccttaaagccctaagtcatgacaagcagaaaaagactgaaaagatttcgaattaaaattatttyattgtaaaaattatattgattgatcagagacagttaaatattatattt

SEQ ID NO: 441915 - DNA, 612 bp, Homo sapiens
aatgtactcatataaatttaactaaatgcttaaatggcctgttgacccaaagggcactattagttttggcttgataatttaataaattaatgcccaggaaataatacatactttttattccacacttttctcttttattttttgaatcaaataaccgtgtgggtataattagaatattgaaaaaaaaaaagcttcctttcttcttggctacccttccttggtatatgcatgtcttcttcactgattatgatgaagaactgagagaattcaacctacataagttcattttctgtataattgcaatttaaaactttaagcagcatgcttccaaccagttttggtgaaactctaagaacataaataaattatttgaaaagtcagtataaagtataccttcagtatgaatataatatgggtatataagaaagactatttcttgttttctcatgaaatcctaattttcttagttttatgtttagttttctttttatagataaattccttaaagccctaagtcatgacaagcagaaaaagactgaaaagatttcgaattaaaattattttattgtaaaaattrtattgattgatcagagacagttaaatattatattt

SEQ ID NO: 441916 - DNA, 513 bp, Homo sapiens
ttagacacagaggagaacctttggagatgagaaatttgaactttatatttttcttctttatttctacaggctacactgaaaacagttgctctgtatcaggttagccataagttagagcaccaacttaaattaccttgaaatacatcaactttttataaattttctgatttagagatttcaaaattacttctgctattaatcaaattttccttagacatgttttccattattattgtaatattatyattattaaaataatagtagtagctacattcttttacacattattcaattatggtaagtaatttgcatattttttcttatttaagatctatacaacagttttatgggatggtggtgttaaaattatttttccttggaataataagaataaatatttgggatacctggtttggattactgcattggagaaaaacgtacttcaaagcagactatcattgttaagattgttgcatttcttgagttaatcaagagtaagaccacatttttaat

SEQ ID NO: 441917 - DNA, 430 bp, Homo sapiens
ttttaaatgtgaaatttcatgccagtgatctaaacagtttgagaaaattctgtcttggtgtctcattgaggcaaaagaataactaacatgattattttaatagattattttgacataattcattctaaccaaagtacatgtttacaaaaatcttctttataaaataatttaaaagaactgataatcacaagacagattactaataatttttraagttttatgtaaaaagttattttattcaaaagtattaaggcagttacttgggcagtgaatctaattttgctttaaaaataacggaaaattacattttactggaaaataaattgggaaagagacttttcagtactcttacattcattagtttaaagaaagaagatgttaaaaagaaaaaagttgcctctaaactaaaaaattgcctcagcttcccaaa

SEQ ID NO: 441918 - DNA, 615 bp, Homo sapiens
actagctgaaatcaccaaattctgacctcttgaaactgtgagataatctatttgtgttgttttatttcactaaggttgtggcaatttgttatagcaacagaaaactaatgcaggcataatggaggattcagataattacaaatttatccagctttcatttgcttacttttaaatctttccaatatgaacaacaaaaacatgttaattttgtgacttgcctcagttaacaaaaggaaagttctggtgtgaaaatgtcaatataataccgcatattttaggcaaagagaggttgtgaaatagtctcatataattataacatacatgttttctatttttatgtttactgaataaatgaaatttaacgagtttgagttaagtttctgaaaattaaacacaattgcttatatgcaaattgaaaacttgcatcwaactattttgttttgttttatatttgaaattacagtgacaatgatttccatttagctctaaagccattaagcaaggcaaatttctcaagaaaaggttcttaatgtagtccctgaagttaaatgtaacaattgtctatctaaaattgctcttggaattctacatcgcaataatcatttgcaaatgtaa

SEQ ID NO: 441919 - DNA, 578 bp, Homo sapiens
tagaattacaggtgcgagccactgttcctggcctagattttttttattctgttttttttttttctctgatcattattgcctctaaatattaaaataaaatgttgtttagttagaatatatgactggttgtgaataggtgcttggtttagtactacagattttaaattagtatttagatattaaccaacatttttatacatgtttattttttaaagtgattttatggagcttgatatgagtagcaaaatcacatggcaatgatctcaaaattgaattttgttttaagaatctcatgtcaatataaataatctttcaacccataaatgtcartgaagaaagtgggatcaaagagtatattatctgggttatgttataattacaagagacagaattacaacttgctgttttaaatttcaatatgtatgttgtatatgtacgtaatgtaaactgataaagaagtatcaaatcaattttcaatacaaatggctaaatcaaaataagctacatatttatggagggattaaaggattaaaagcaatgaacaaacatggaataccttcaaatttaatagttaagaa

SEQ ID NO: 441920 - DNA, 578 bp, Homo sapiens
tagaattacaggtgcgagccactgttcctggcctagattttttttattctgttttttttttttctctgatcattattgcctctaaatattaaaataaaatgttgtttagttagaatatatgactggttgtgaataggtgcttggtttagtactacagattttaaattagtatttagatattaaccaacatttttatacatgtttattttttaaagtgattttatggagcttgatatgagtagcaaaatcacatggcaatgatctcaaaattgaattttgttttaagaatctcatgtcaatataaataatctttcaacccataaatgtcaatgaagaaagtgggatcaaagagtatattatctgggttatgttataattacaagagacagaattacaacttgctgttttaaatttcaatatgtatgttgtatatgtacgtaatgtaaactgataaagaagtatcaaatcaattttcaatayaaatggctaaatcaaaataagctacatatttatggagggattaaaggattaaaagcaatgaacaaacatggaataccttcaaatttaatagttaagaa

SEQ ID NO: 441921 - DNA, 578 bp, Homo sapiens
tagaattacaggtgcgagccactgttcctggcctagattttttttattctgttttttttttttctctgatcattattgcctctaaatattaaaataaaatgttgtttagttagaatatatgactggttgtgaataggtgcttggtttagtactacagattttaaattagtatttagatattaaccaacatttttatacatgtttattttttaaagtgattttatggagcttgatatgagtagcaaaatcacatggcaatgatctcaaaattgaattttgttttaagaatctcatgtcaatataaataatctttcaacccataaatgtcaatgaagaaagtgggatcaaagagtatattatctgggttatgttataattacaagagacagaattacaacttgctgttttaaatttcaatatgtatgttgtatatgtacgtaatgtaaactgataaagaagtatcaaatcaattttcaatacaaatggctaaatcaaaataagctamatatttatggagggattaaaggattaaaagcaatgaacaaacatggaataccttcaaatttaatagttaagaa

SEQ ID NO: 441922 - DNA, 511 bp, Homo sapiens
tgggaactgatccatacgaagtcagaaatagaaggacggccagaaaccatctttcagttgtgttgcaggtatgactgacttccaaagattaaaaccaacagaaataacatagaattatgtctcttaagggaatttatatttagtgccctcctgaattttgatgatatcagggtcatactccccaccctccgaaaaaggcaactgaggccgctagtaggagactatgttgattaaataaatatcaaaatcttaagagtgatcaattctcacctccttctgtacgggaggccacatggcactgctgytgggtggctggctggcagcctggtccagcaggtgcaaggcacaggaacacaggcgggcgtggaatggaagcacgatgaacactgtggacacttctgctgttttctctcccccccgacccagtgacagtgaaagcaaaaccaacattgttaaggtgattcgttctattctgagggaaaacttcaggcgtcacataaagtgtgaatta

SEQ ID NO: 441923 - DNA, 511 bp, Homo sapiens
tgggaactgatccatacgaagtcagaaatagaaggacggccagaaaccatctttcagttgtgttgcaggtatgactgacttccaaagattaaaaccaacagaaataacatagaattatgtctcttaagggaatttatatttagtgccctcctgaattttgatgatatcagggtcatactccccaccctccgaaaaaggcaactgaggccgctagtaggagactatgttgattaaataaatatcaaaatcttaagagtgatcaattctcacctccttctgtacgggaggccacatggcactgctgttgggtggctggctggcagcctggtccagcaggtgcaaggcacaggaacacaggcgggcgtggaatggaagcacgatgaacactgtggacacttctgctgttttctctcccccccsacccagtgacagtgaaagcaaaaccaacattgttaaggtgattcgttctattctgagggaaaacttcaggcgtcacataaagtgtgaatta

SEQ ID NO: 441924 - DNA, 575 bp, Homo sapiens
tacattgatggaagacatgtctcattgagggacaccagagtaacaactaccagacaagaaggggcaggtctgtgtgagcgccatttcctaattctatattgcccactcttcagagaagatggttggagggcaaattgtggggagcaaggtaactccaaacttttacaraattaaaggtagggggtctggtcagctacagtccatctgttatcaagaggcctggctgtgtgtcttcattcagtttattaggcatttactgagcacagcctacatgccaggttcttcattttttgacacagggtcttgtgttgcccaggctggagtgcagtgctgcgactgcggctcactgcagccttgacctctccagactcaagcgatcctcctgcctcagcctctggagtagctggggatacaggcgcgcaccaccatgctcggctaatttttgtatttttagtagagacagtgtctcaccctgttggccaggctggtctcggatcccagagatcaagtgatccgcctgcctcagtttcccaaagtgctgggattacaggcgtaagcctccgcgcccggcctat

SEQ ID NO: 441925 - DNA, 321 bp, Homo sapiens
aaggtaaaacaagataggaaaaggaacatagagtaagtaggcagatagaaaacaaatagcgagacagtagatttaatgccagttatgtcagcactggaatgaaaactgactcaagataccagttcaatgacagatttgtctaagtgggtttrggaaaaccaatgaactatgatacaaaactgtacttaactgtaatgagtcagaaatattgaaagcaaaaggatagagaaaaaggtatatcacactcttaaccgacagacagctggtttatgtctatatctgacaaaatagacttaagaaggattgctagaggcaaaatag

SEQ ID NO: 441926 - DNA, 321 bp, Homo sapiens
aaggtaaaacaagataggaaaaggaacatagagtaagtaggcagatagaaaacaaatagcgagacagtagatttaatgccagttatgtcagcactggaatgaaaactgactcaagataccagttcaatgacagatttgtctaagtgggtttgggaaaaccaatgaactatgatacaaaactgtacttaactgtaatgagtcagaaatattgaaagcaaaaggatagagaaaaaggtatatcacactcttaaccsacagacagctggtttatgtctatatctgacaaaatagacttaagaaggattgctagaggcaaaatag

SEQ ID NO: 441927 - DNA, 305 bp, Homo sapiens
catttgaaaaaatcacacgtagcttattttcttgacaatcttaatcatgacaaaacctgggtttcactgactagatatgaaatgtgtggggcatttgtttactacatgtttaagcatggttagaactacaatctgaaaaatgttttaattgtacagccttayaattatttcaatctaaatatcagaggagttaataacatcaattaatttcaaaattatgcttctgtttttgtgaggccaagtataaactgtttttggcaaaaagaaaagctagttttacctgacttttttttttttttggaagg

SEQ ID NO: 441928 - DNA, 570 bp, Homo sapiens
gtgtccccacccaaatctcatcttgaattgtaactcccataattcccaygggtcatgggaggaacctggtaggaggtaattgaatcatggggatgggtctttccctgtgctgttcccatgacagcgaataagtcccatgagatctgatggttttaaaaatggcagtttccctgcacaagctctcttctcttgtctgctgccatgtgagatgtgcctttcaccttccaccatgattgtgaggcttccccagccacgtggaactgtgagtccaataaacctctttcttttgtaaattgcccagtctcaggttatgtgtttatcaacagcatgaaaacagactaatacagagtccgttacattttttcaaagaacttgctaaactctaattagttctaacagttttgtctattgtcttaagttttccagttagtaaatcaaagcagttttctctcttcctttttttatttacaatttatttacagtttttatttcaactcattaattcatcaactttttattgagcacctactgtgtgccaactgttcagagcactggggatttagcaataaa

SEQ ID NO: 441929 - DNA, 570 bp, Homo sapiens
gtgtccccacccaaatctcatcttgaattgtaactcccataattcccatgggtcatgggaggaacctggtaggaggtaattgaatcatggggatgggtctttycctgtgctgttcccatgacagcgaataagtcccatgagatctgatggttttaaaaatggcagtttccctgcacaagctctcttctcttgtctgctgccatgtgagatgtgcctttcaccttccaccatgattgtgaggcttccccagccacgtggaactgtgagtccaataaacctctttcttttgtaaattgcccagtctcaggttatgtgtttatcaacagcatgaaaacagactaatacagagtccgttacattttttcaaagaacttgctaaactctaattagttctaacagttttgtctattgtcttaagttttccagttagtaaatcaaagcagttttctctcttcctttttttatttacaatttatttacagtttttatttcaactcattaattcatcaactttttattgagcacctactgtgtgccaactgttcagagcactggggatttagcaataaa

SEQ ID NO: 441930 - DNA, 622 bp, Homo sapiens
attatttcaaaattaaaagttaaaaacaaaaagaatgccaaatgagctgccttttcttcaaaccagagctaaaaatcacagataacaattttaaatatccaagttgcaaaccctgctttgcttttctttcttttttaaaaattttagggcaaaaacaataatttaagctgtgttacttaaagggcatttgtgtctcattcactcccctctccaaaggtcagaacctcagagaagaccccacaagctgtgaaacattgttaagatattgtgtactattaatgccacaayactcactaaataagagtcctcagtatactgtcatcccagatacaagtgaaaaggaagttatatataggcctctatccctggaccagaaataaagccatacaagtctaagtaagcataccctttttacttctacaggcaccacaccaagccttcctggccagcatccaagtaaactggaggctgaagcttcacattttcaggtattccagggcattggcttgctttgcattttgaattttcttaaggctgggaccatctgtaccgtagttattacttccgtagatctgtaaaccctccaagagaatgaggggtaatggcaactagctaagaaaca

SEQ ID NO: 441931 - DNA, 622 bp, Homo sapiens
attatttcaaaattaaaagttaaaaacaaaaagaatgccaaatgagctgccttttcttcaaaccagagctaaaaatcacagataacaattttaaatatccaagttgcaaaccctgctttgcttttctttcttttttaaaaattttagggcaaaaacaataatttaagctgtgttacttaaagggcatttgtgtctcattcactcccctctccaaaggtcagaacctcagagaagaccccacaagctgtgaaacattgttaagatattgtgtactattaatgccacaacactcactaaataagagtcctcagtatactgtcatcccagatacaagtgaaaaggaagttatatataggcctctatccctggaccagaaataaagccatacaagtcyaagtaagcataccctttttacttctacaggcaccacaccaagccttcctggccagcatccaagtaaactggaggctgaagcttcacattttcaggtattccagggcattggcttgctttgcattttgaattttcttaaggctgggaccatctgtaccgtagttattacttccgtagatctgtaaaccctccaagagaatgaggggtaatggcaactagctaagaaaca

SEQ ID NO: 441932 - DNA, 622 bp, Homo sapiens
attatttcaaaattaaaagttaaaaacaaaaagaatgccaaatgagctgccttttcttcaaaccagagctaaaaatcacagataacaattttaaatatccaagttgcaaaccctgctttgcttttctttcttttttaaaaattttagggcaaaaacaataatttaagctgtgttacttaaagggcatttgtgtctcattcactcccctctccaaaggtcagaacctcagagaagaccccacaagctgtgaaacattgttaagatattgtgtactattaatgccacaacactcactaaataagagtcctcagtatactgtcatcccagatacaagtgaaaaggaagttatatataggcctctatccctggaccagaaataaagccatacaagtctaagtaagcataccctttttacttctacaggcaccacacsaagccttcctggccagcatccaagtaaactggaggctgaagcttcacattttcaggtattccagggcattggcttgctttgcattttgaattttcttaaggctgggaccatctgtaccgtagttattacttccgtagatctgtaaaccctccaagagaatgaggggtaatggcaactagctaagaaaca

SEQ ID NO: 441933 - DNA, 511 bp, Homo sapiens
gccccctctggcactgcactagtgggagaaggagtccactctgttggtactaccaagtggggatggaagtacagcttccccctcggcttctgttgacaccccagggaggcagttccttattacttcagaacagggagttcatgctccctgcttcgccttctctgacatcatcccagtgggagagaggggtcaccttgttacagccatgttggtaaaactggaagtctaggctcygcactagctcttggccagtgggggtggggctgcaatgttttctgtggggttcgattggtgttttaatttgtattttagttctaaaatttctacttggttcttctttaaaagttagagtctaaatattttctgtctttctaggcttcccctttcctgttcctttggctagagagaagaggctttttggggacctctttttgtctatacccattagtgtttgtgggctgccagcctgttcagctccaagtctgggatataggaggcaaaaagaaaaccc

SEQ ID NO: 441934 - DNA, 654 bp, Homo sapiens
gggttccctgggttttctttttgcctcctatatcccagacttggagctgaacaggctggcagccyacaaacactaatgggtatagacaaaaagaggtccccaaaaagcctcttctctctagccaaaggaacaggaaaggggaagcctagaaagacagaaaatatttagactctaacttttaaagaagaaccaagtagaaattttagaactaaaatacaaattaaaaccttctacctcttgcatttcagcacactgcccggtcatgctggctcctggtcccacagccatgccaaatgctctctgtgaggacaagtgacctgcatccaagcctcaggctaagggccttcttcctccatctaggtacctactctatcagactcatgtgaggagtttctaaaaacacccactcacctgttgattctgatatagagggctgaggtagaagtccgaatctactttaatctcccaaggtgattctgatgcatagcaggcttggactttgttgctgcatctgactccttctcagggctccttcctcgtccttgaggacctcacagctcctcccttcatctgtgcccatgctaggctgggtgggtggacagactgggaaatttccaagtccttgctcaccagggctgactcagctgatagtaa

SEQ ID NO: 441935 - DNA, 654 bp, Homo sapiens
gggttccctgggttttctttttgcctcctatatcccagacttggagctgaacaggctggcagcctacaaacactaatgggtatagacaaaaagaggtccccaaaaagcctcttctctctagccaaaggaacaggaaaggggaagcctagaaagacagaaaatatttagactctaacttttaaagaagaaccaagtagaaattttagaactaaaatacaaattaaaaccttctacctcttgcatttcagcacactgcccrgtcatgctggctcctggtcccacagccatgccaaatgctctctgtgaggacaagtgacctgcatccaagcctcaggctaagggccttcttcctccatctaggtacctactctatcagactcatgtgaggagtttctaaaaacacccactcacctgttgattctgatatagagggctgaggtagaagtccgaatctactttaatctcccaaggtgattctgatgcatagcaggcttggactttgttgctgcatctgactccttctcagggctccttcctcgtccttgaggacctcacagctcctcccttcatctgtgcccatgctaggctgggtgggtggacagactgggaaatttccaagtccttgctcaccagggctgactcagctgatagtaa

SEQ ID NO: 441936 - DNA, 505 bp, Homo sapiens
ttgttgctgcatctgactccttctcagggctccttcctcgtccttgaggacctcacagctcctcccttcatctgtgcccatgctaggctgggtgggtggacagactgggaaatttccaagtccttgctcaccagggctgactcagctgatagtaacaactgtaaagagtataaaaacttayataatgtttactatttgtctggcattttgccaagtactttacacttacttgacctgacctggccagaggagattatccttcctttgcctgaaggccttgtactaaccccacctgagggtaatgtgtcttatcctcaatacctgccccaccaccctctttgcttctggattcataactagagtcagaacccagtgtggataagtgctcagtctgacccagatagacatagctgatccataaaaagaacagaagagtttggccaattaacatcagcaacaacagaatcatacatgtgggaaaagattctaaatatggtagttcaat

SEQ ID NO: 441937 - DNA, 601 bp, Homo sapiens
ctatggtattgtattatgtcagcccgagccgactaagacaaccacctacttataaccactgtgtctggactgtagctctctctcatttcaaacattgacagatttctatccacatttaatttgcagtaaatggattgaactctcacctgttgatattttcccctcttgttccttttgctatctgggttgattagttttgtaaatatctacacctttattttagttgggttctgggaggtaaggaagttgaacatatattttccatctgccatctttaccaaaccacaatttttgataccgtagkttattattattacagaaaccacactaggtatttaaacagagaggaatttatatggggtattggttacaaatgagttgaatgtgctggaagagccaaaaggaaggtgtgatatccaggaatccagaagctgctccccactcctatgctgcaggtgctgggatgggccatgggagttcagcaggccccctcccacagctacccagcaactacttggtatttgagccacaagcaggaagtgtatgtcttcttcagttctgatcttctgctgatgccttttattgttagaacctgatgact

SEQ ID NO: 441938 - DNA, 601 bp, Homo sapiens
ctatggtattgtattatgtcagcccgagccgactaagacaaccacctacttataaccactgtgtctggactgtagctctctctcatttcaaacattgacagatttctatccacatttaatttgcagtaaatggattgaactctcacctgttgatattttcccctcttgttccttttgctatctgggttgattagttttgtaaatatctacacctttattttagttgggttctgggaggtaaggaagttgaacatatattttccatctgccatctttaccaaaccacaatttttgataccgtagtttattattattacagaaaccacactaggtatttaaacagagaggaatttatatggggtattggttacaaatgagttgaatgtgctggargagccaaaaggaaggtgtgatatccaggaatccagaagctgctccccactcctatgctgcaggtgctgggatgggccatgggagttcagcaggccccctcccacagctacccagcaactacttggtatttgagccacaagcaggaagtgtatgtcttcttcagttctgatcttctgctgatgccttttattgttagaacctgatgact

SEQ ID NO: 441939 - DNA, 601 bp, Homo sapiens
ctatggtattgtattatgtcagcccgagccgactaagacaaccacctacttataaccactgtgtctggactgtagctctctctcatttcaaacattgacagatttctatccacatttaatttgcagtaaatggattgaactctcacctgttgatattttcccctcttgttccttttgctatctgggttgattagttttgtaaatatctacacctttattttagttgggttctgggaggtaaggaagttgaacatatattttccatctgccatctttaccaaaccacaatttttgataccgtagtttattattattacagaaaccacactaggtatttaaacagagaggaatttatatggggtattggttacaaatgagttgaatgtgctggaagagccaaaaggaaggtgtgatatccaggaatccagaagctgctccccactcctatgctgcaggtgctgggatgggccatgggagttcagcaggccccctcccacagctacccagcaactacttggtatttgagccacaagcaggaagtgtatgtcttcttcagttctgatctyctgctgatgccttttattgttagaacctgatgact

SEQ ID NO: 441940 - DNA, 555 bp, Homo sapiens
tatataaagagtacatatgaaaaataagtagccatagaagtggatggtggcaatgactaatttattacctctcagttcagattcaccctctgatatctgctgtgyaataatggcctagattctataagcatttatctttcatggtgaacatggtgttaattaaacttcgtgagcagaggatgctggaaggacactgcaggaggaagggggcttctctttctgatggtggtgtgctatgttttgctctttcttgttcttgaaatatggtctcagcagtgtgtgtgggggtgggcagggagatccactggtgtttgtcccagccatcgactcagagtattcattcccttagcaaacagccctggctaggcccagtgaaaacctctgcttgcacttcctgacatggacactggcatgttctaggcgttgtgcccacagtgatgccctgatccctctgcacatctgcccaccagcatcagcttgcctgtgccccagagggttgttgtcagctgcccaggaactatggaccagctccggccaaggcaaccaatcaaaatt

SEQ ID NO: 441941 - DNA, 363 bp, Homo sapiens
atgcaagagcatgttcttcaaccatttttaagcatggagttttcctttcctttgagttcatagtyctcagtaactagagctacttaatatgtacatatgcaggcaggaaacctgatgcagaagggtcttataaatgcacttatgaacctgggcaagttgctgtgtcaaaatatgcacagtctaacctctggctgagttagctacaaccaataaacagtagatccatgcaatttttatttgggagttatctttataaaatcacagacagaactaagaagtcacgaatgtgaaaaggcacaggaaatgtaaatgagtgaacagagcaaatcagacaagaaggatggaggtaagagggtaacaggg

SEQ ID NO: 441942 - DNA, 247 bp, Homo sapiens
ttaaacaccatctccttaatgctgtccttctgatagttctcktcataatttcgtagctgtgagattgaatactggtctgctgggttttggatgtgcattgggcctgtggtcccatttgtgttatttttctgggaaatttcttccctttggattaagaaagcttacccaatgcctgtaccatcattgtaccttgaaagaaaagaactccattttaacttcagggactcataggtagaagatactgtag

SEQ ID NO: 441943 - DNA, 563 bp, Homo sapiens
ccaatcgggtcaacttagaaagagcggtcccaaccccagcccctgggggagtgacacagaggtagggactgtgttagggataaaaaccctttccttcctttgttcagtgggctcctgtgatcatgattgatgcaggcagcaccccttctgcagaagtaaattgccttgctgagaaaacttttgcctgagtgctggtttcactttgtagcactgagcatttgtttccaacagtgaatattctacttgttttaaaaaatgtctactttgaggtaactgtgaggtttgacagatacaattttaaagcataataacatttgaaagttaattccaagtttattctttttagaagctggaacacagaamcataggaactggagttagagagcatctcattaatagctaaccctcctctaataactcatgaattaattaataattacaaccttaaaacctcatcagtaactaattactcattggtaattcattttttaactcactagtcacctacgacttcccccaagtgtccacagaagggaggaaggtaggagggatgcgctggcccc

SEQ ID NO: 441944 - DNA, 606 bp, Homo sapiens
gcacaggtcccaagtagccatgcactgctctgagagggctcgccctaccttgggctagattctagtactggtcagagctacaggtggctcagtccctttggtgatcaccttggctgctgggggccccaggctcgggttgaggccagatcaaacccctctggatctggaccttgtgccgtgttagggagttctgtcccacaggaggtcagcatgaggacacaagacatcctgctggctggccagagctatgaggatgccacaccccctcccctccagaggcctccaagtagccatcttcccagtggacggtggtttcagctggctgaggggccatccggggcttctgggcagcttgcrgggtaggctgctgtcctggctccttccagaacatgcaggtcagtgaaactgacagggataggacatgggccactgtgaaggggaggtgtcttcggctcttcctgtggatcttcagaaagctaggcaggggttgatgatgggccccagtggggttgcagggccagtctgtccatggtccgggaggtagccagggcagatgctgaagggatgggggcccagcattcctgcccgaagcagtactgtgggaac

SEQ ID NO: 441945 - DNA, 619 bp, Homo sapiens
gtctatggggaggtttgggactgaattccattgcagtaaccaccaaacaactggtggtctgtcctgggctggggacaggctggccagaccctgagctcctggggctcccagagcaaggcctgtggccccaggctctttggagaccctcatgccactaggggcctcagccttgggaagagcctggccaggcaagggtcagggaggaccacactcctgttttgtgggggctaccccttatggggaggcatggtctcactcttcgtcacccaagctgagtgcagtggtgtgatcacagytcactgctgtcttaagcgatcctcctacctcagcctctcatgtagctggcactacaggcgcatgccaccacacctggctaattttttttgtagagatggggtcttgccgtattgccgaagctggtctcaaactcctggacttaagcagtcctcccacctcggcctcccaaagtgttgagattacaggcatgagccatcacacccggctgatttttcctttatttttgaaaggtaacacaagaatcattatataattttcatttttctaatgtccttgttgaattttagtatcaagactactgctggtgtcacaaaataagctg

SEQ ID NO: 441946 - DNA, 619 bp, Homo sapiens
gtctatggggaggtttgggactgaattccattgcagtaaccaccaaacaactggtggtctgtcctgggctggggacaggctggccagaccctgagctcctggggctcccagagcaaggcctgtggccccaggctctttggagaccctcatgccactaggggcctcagccttgggaagagcctggccaggcaagggtcagggaggaccacactcctgttttgtgggggctaccccttatggggaggcatggtctcactcttcgtcacccaagctgagtgcagtggtgtgatcacagctcactgctgtcttaagcgatcctcctacctcagcctctcatgtagctggcactacaggcgcatgccaccacacctggctaattttttttgtagagatggggtcttgccgtattgccgaagctggtctcaaactcctggacttaagcagtcctcccacctcggcctcccaaagtgttgagattacaggcatgagccatcacacccrgctgatttttcctttatttttgaaaggtaacacaagaatcattatataattttcatttttctaatgtccttgttgaattttagtatcaagactactgctggtgtcacaaaataagctg

SEQ ID NO: 441947 - DNA, 574 bp, Homo sapiens
cagcaagcctcatttgctttttacacgtggtttctacagactactcaattttgtccaaaatctaatgctcacctttctttacagtgccatctgctgctgcctctgactactgcattttcccccgtttgcttagtccacgcccagtgtggtaaaagatgggaaagagaaagccatcctctcattaaagtaattggtccggcatatactaagcgtcaggcacttttttttcagacactacagaaatatatcgacacaggcaaaatgtattttctgtaccctatagtctcacttaataatgggtacattaggctgggcacagtggttcacgcctataatcccaacactttgggaggccgaggcgggtagatcgcctgaggtcaggggttcaagaccagcctggccaacatggctaaaccccgtctctattaaaaatacaaaaattagccgggcatggtggctcatacctgtaatcccagctactcaggaggctgaggcaggagaatcacttgaacstgggaggcggaggttgcagtgagccgagatcgcgccactgcactccagccggagacagaac

SEQ ID NO: 441948 - DNA, 532 bp, Homo sapiens
ccattggcaaaaaagccaaaagcaatagcaaatccatgagggaaattcagaggatgttggctgtttgtgaccaaagatgcatggatgttgattcctgtcatagtcctatttaacctccagtttgaccagcatgaaaagtggatggatggtagataatgacagtggattatgactcaccaataattacagttgcttttccagatgtgagcttttttgttttttttgaaacagagtctcactctgtcacccaggctggagtgaaatggcgcaatctcggctcactgcaacctccgcctcccaggttcaagcaattctcctgtctcagcctccctagtagctgaggttacaggcgtgtgccatcacacctggctaattttttgtattttagtaaagatggggcttcaccatgttgcccagrctggtctcgaattcctgagctcaagcaatccacccaccttggcttctcaaagtgctaggattacaggcatgagccaccgcgcccggccccagaagtgagctttgtagtggagca

SEQ ID NO: 441949 - DNA, 601 bp, Homo sapiens
ctggcatgtcatatgggagagagggagcaggagagatagggcagatcccagactctttaacaaccagatcttgcttgaactaatggcactagaactctcattaatgtagggaaggcaccaagccattactgagggatctgtccccatggcccaaacaccttgcaccaggccccaccaccaacattagcagtcacatttcaatatgagatttggagaggacaaatatcaaaactatctcaacaagttgtgcttcttttaagtttattcctaaaaatgtatttttatgctattgtaaatggaattattgtcttaattttattttcagattgttcactattagtgtgtataaatataattgattttcatatattgaccttgtattctgcaacattgccagacttatttgttagctttaacaattttcatgtgaattccttagtgttttctacgtgcaaattcatattatctgcaaatggatggttttattccttccttytaatgtgtatgccttttatttcttcctcttttgattgtcctgactaaaatcttcagtacaatgtggaatagaaatggaaaaaacagacattgttttgttccctat

SEQ ID NO: 441950 - DNA, 577 bp, Homo sapiens
tttccacaaggtgggttatagaaaccagaaccccttttccccaaagccagctataaaacctaaaaatatgaatctagcctttcctccatctttctgtgtaaaaactggtcataaaggattatctgacctaccttgtttgattgtaggtcataaggctccgatccctgctgagaggaccctgctccacacccagaaggaaagaaagcatgctcacagagaccacaaaaaacctagacagacactgggtttccccactcttttttcttttttytttttttttttttgaagtggagtttcattcttgtctcccaggctggagtgcagtggcgcaatctcagctcactgcaacctccacttccctggttccagtgattcttgtgcctcagctacccaagtagctgggattacaggcgtgtatcaccacacctggctaatttttgtgttagtagagacaggttttgctgtgttggccaggctggtcttgaacttctggcctcaagtgatccacctgtctcagcctcccaaagtgctggaattacaggcatgagccactgcgcctggccttctatatttaaaa

SEQ ID NO: 441951 - DNA, 577 bp, Homo sapiens
tttccacaaggtgggttatagaaaccagaaccccttttccccaaagccagctataaaacctaaaaatatgaatctagcctttcctccatctttctgtgtaaaaactggtcataaaggattatctgacctaccttgtttgattgtaggtcataaggctccgatccctgctgagaggaccctgctccacacccagaaggaaagaaagcatgctcacagagaccacaaaaaacctagacagacactgggtttccccactcttttttcttttttttttttttttttttgaagtggagtttcattcttgtctcccaggctggagtgcagtggcgcaatctcagctcactgcaacctccacttccctggttccagtgattcttgtgcctcagctacccaagtagctgggattacaggcgtgtatcaccacacctggctaatttttgtgttagtagagacaggttttgctgtgttggccaggctggtcttgaacttctggcctcaagtgatccacctgtctcagcctcccaaagtgctggaattayaggcatgagccactgcgcctggccttctatatttaaaa

SEQ ID NO: 441952 - DNA, 639 bp, Homo sapiens
ctatagtagtatggagcgggacaggcagtgagcagggccctagaactcccaagattatatgccctttgtcttccattaccagggtgggtagggaaggaccatcaggtgggggcagggctaggcatgtctgagctcagactctccttgagtgggtcctgctggggctgctgtggggcatgggggtgagattcccaggtcaatggagttgtgtacctacaaggattatggctaccttttctgagtcatgcaggtggtcagggaagtsggggaaagccagcagtcacaggcctcacccagctcccatgcaaactgaagggtcagtcactctcccaccatggccccaccccaatagtcccgagtctgtttccaggtgaagggtgtgatgggcttgaaaacttgccccaggctacccgcctcgcaactgagagagaaaagggcttggttcttcccccacctgtggagtctgcaaaccagatttgtgccctcccccaggttctggccaggaggcttctcatcctgttcaaattgttacaaagttcagctagagattgccttctccctgtggaattttaccccctgctcctctggtctccctcccaatggattcctgtggtgccaggcaggaatggcctgctaggg

SEQ ID NO: 441953 - DNA, 598 bp, Homo sapiens
ttgctggtttgttcttgcagttgaactggagctaaaattcacaatgtgagcttccgcaagctgctctgtctggagctgcaatctagtcctgcctcccatctgccatgatgatcgccctaaattatacacatttttaattttaacaacatcrttaagcttctatgaaatatctccccaaatgtctttttaaatgactgcatgttagtatattattagatattttggttgctgttactttttaactattataaataatattgtgataaatgtcttttacaaaaatctttgattaaatatctgattttttttataagacagatccctaaagtttcaaaggaacctgttaaagactttgtcacaccttgccagtttccctctataaagtttatgccaaatacattcctaccagaacagtatgaaagcattcactttttttacatccttgccaacgctaggctttttcactatttctggcattcagtttatatttgttgtttacctacaatggtcagatcttgggctatggcctcaataaatgcagcatagtagaacaaacagtgaataaatataatttatgatgttaaaaataagtatgtaa

SEQ ID NO: 441954 - DNA, 598 bp, Homo sapiens
ttgctggtttgttcttgcagttgaactggagctaaaattcacaatgtgagcttccgcaagctgctctgtctggagctgcaatctagtcctgcctcccatctgccatgatgatcgccctaaattatacacatttttaattttaacaacatcattaagcttctatgaaatatctccccaaatgtctttttaaatgactgcatgttagtatattattagatattttggttgctgttactttttaactattataaataatattgtgataaatgtcttttacaaaaatctttgattaaatatctgattttttttataagacagatccctaaagtttcaaaggaacctgttaaakactttgtcacaccttgccagtttccctctataaagtttatgccaaatacattcctaccagaacagtatgaaagcattcactttttttacatccttgccaacgctaggctttttcactatttctggcattcagtttatatttgttgtttacctacaatggtcagatcttgggctatggcctcaataaatgcagcatagtagaacaaacagtgaataaatataatttatgatgttaaaaataagtatgtaa

SEQ ID NO: 441955 - DNA, 591 bp, Homo sapiens
tataagacagatccctaaagtttcaaaggaacctgttaaagactttgtcacaccttgccagtttccctctataaagtttatgccaaatacattcctaccagaacagtatgaaagcattcactttttttacatccttgccaacgctaggctttttcactatttctggcattcagtttatatttgttgtttacctacaatggtcagatcttgggctatggcctcaataaatgcagcatagtagaacaaacagtgaataaatataatttatgatgttaaaaataagtatgtaaaatgagtgtgtcttacaaaaggggagrcaactgcctgagaagaaaacaaacttgagttatagcaagtagtagtatagcccagctgagaaggccttcttcctcaaaaatatcttctagatattaaaatgtacttctggtatataatattttaaatgtcatcccacagatgaagagcaggcataccacttccaaaagctggccaaccagtggaagccaaacagaactttaaccaacatttcgtgacagccaaggaaaagaatcttaacaatcctgagctagatccaaacctcgcaatgagtac

SEQ ID NO: 441956 - DNA, 512 bp, Homo sapiens
cttttatttttatcttttaattctagttttctatgaactttttgaagtctccttatacacaacattagggcataaattactccaagaacaaaagaaaaaaatatttgtaccctaagcaatgcgtgcctggcactttctgcaaatgcccccaatatccaaaattatttgtgtgtgaataatcctaccttgggctattgttcaagaaacaaatagcaaaatctagatattaaaagatatttaatgagagtctaagatgatacatttttctttaagtttcaacactgaattagcagcactgaggaggcaatataaaatagttaagggcctaaaagtatggatttgaatttctactgaataattaaaatccatgtgacttcacaaatcacttaaccttttgtaaccctatacaatgtgtgttaggaaaataatacttaacctctaragttattgtaaaagttaaatgaaaatagtaccatattagtagtagtacatatcagctgttgttttgatta

SEQ ID NO: 441957 - DNA, 586 bp, Homo sapiens
gttttaattgtaaagatgatgtcactccgcctggttcttccttgaagcattctacagcgtagaattaagcagaatgtctgaggtcccagatgactaaaattagtgagaaaatgagggacccttaggtgtagcactgaattgttttttgaatcaaagtttacagaaggccttgtcagaagcttatgtctaaggaagcataagcttcttagccacaataagaagatgcaagattccaaggaaatcaaatggtgaaatttgtctgaataatgttttgaggaatgatcaaaatacagtatgtatttggagaataactaaaattctaggactgaagctctacttaatttcattcttcattctaattgtttttccatttacattcacaacttaragagatgggaagatcaaaaagacagaaagagtgaaattctgtttaattgcaggatcttatgttcacaggaaggttgaaagcctgaatccttattaaaagtttaatctgcatcttctttatagcaacacatttccacttgggacagttttatatctatcttggcaagtgaatttaatccaggaaaatgcatttgcttac

SEQ ID NO: 441958 - DNA, 558 bp, Homo sapiens
ctgaataatgttttgaggaatgatcaaaatacagtatgtatttggagaataactaaaattctaggactgaagctctacttaatttcattcttcattctaattgtttttccatttacattcacaacttaaagagatgggaagatcaaaaagacagaaagagtgaaattctgtttaattgcaggatcttatgttcacaggaaggttgaaagcctgaatccttattaaaagtttaatctgcatcttctttatagcaacacatttccacttgggacagttttatatctatcttggcaagtgaatttaatccaggaaaatgcatttgcttaytattctcttggacaaacaaattgttggtgtgccttgacattctagaatagtaactcttattattttctctgttgttattcacaaactttgacatcttcctgtcagtagcattatccatgcaattcatcaaagcttcagttttaacataaactcctcaaacacacctcgcttgagaagtgtcctcactggcttttttctgttatatcccttcaagttaacttccacctgaca

SEQ ID NO: 441959 - DNA, 585 bp, Homo sapiens
tccttaataccaaaataagcaaaatattccaagactttttggaaagcactgtcacattatttgtgtgtgtgtgtgtgtgtgtgtgtgtgtgtgtgtgtgtgtatttatctcaaagccacccacataatttttgaggatcactgttttagagattaaaaacatcaccgtattttttaaatcttggtgttagttgcctggccatgcactggagccttagagcattttctaaagaaatatttcctgtggaaataagtgagggaagattatgacagggaaaaagaagcatttctaacaaattgggtcaaaaagaaaagaagatttaataccctcaaaaattatacttacattaatgctcagaacatttatataggagctagaggaggggtaaagctcttgtgattaggagagtatgaatttagagttgtgaaattagccttaccacatttgagtattctagtgagaatcatattctaacagagagagtatcagagtgtttcttctgcctyattatttcagttttacttctggcaaggtagccaagtgagtttgctggtccgtgatgattctctatgaacttacatagcg

SEQ ID NO: 441960 - DNA, 565 bp, Homo sapiens
atgagtgatacactcctttgcatgcataaaaatgaactttctggtatctcataaagtgaaacaaagacaaaaatctccaaaacatcaactgttctctgctgagattagatcattccttttmattgtagtttttgatgtaatttcttacatattcattttccacttactcaaacgagctttatactgtggagagtctacactgtttttcataagtagttggtctttttcttcttgactaaagatcatgaagattcaccaaaaaaagccagatttatcctcttctcctacctcacatgcatcaaagccaaagaaaaaaaaacatctgctgtgaggtttactgccaactacaaagaaccaatggaaaaccaggacctttgagtgatgagaatgctagttataatttgagtctatcaagtgattactggatatgcaatggcccatatgctgaaatcttcaaatagccagatgggttctgcccaaattcagagagccattgagggtcattcaaaatccctataactagtacccttgacatttaccaaacctggcccacatgaaaagtgat

SEQ ID NO: 441961 - DNA, 356 bp, Homo sapiens
aatgcccctaaacagacaacttcaaggtttytttaagtggcttagcttttatttactaagtcagtaaaaagtctttgtaggtctaagaccgaaaagaaagcataatcaactacagcttcaactgattcatttttaaaggagagtcagggtcataaagcaaacagaattactcatcgatagtgccaggaactgacctgtttctgataactggcccccttttttgagaggtgactgtatctgtttcttaatacctggggcaaagtcagttacacaccttgtgatgacagacaaaaagaggcagccaggacagaaagacaaacttcgcatgttctcactcatttgtgggagctaaaaat

SEQ ID NO: 441962 - DNA, 356 bp, Homo sapiens
aatgcccctaaacagacaacttcaaggtttctttaagtggcttagcttttatttactaagtcagtaaaaagtctttgtaggtctaagacygaaaagaaagcataatcaactacagcttcaactgattcatttttaaaggagagtcagggtcataaagcaaacagaattactcatcgatagtgccaggaactgacctgtttctgataactggcccccttttttgagaggtgactgtatctgtttcttaatacctggggcaaagtcagttacacaccttgtgatgacagacaaaaagaggcagccaggacagaaagacaaacttcgcatgttctcactcatttgtgggagctaaaaat

SEQ ID NO: 441963 - DNA, 641 bp, Homo sapiens
tattagaaacaccaacatttcaatcctcactttggaatagcttacaagtaacaaaacatatgagtatacaaagggccagtcaattttataagtatgtattcgactaatactgaaaattgagactgaaccagtcttgccattcctcacccaacaacaaatccctaccttcgaggaactaattctcttcctctgacaaggtaatcctaccttctcttaaacaaaacacatcatccttgaaatctttgaaaccataaaatgtcttcaaaatccccatgatgttccaatttctgtatgactttacacatccatagtaaattcactaatatgtacacctcttgtgttattaccctgacctgcacttaaaacccaactcaagttacctttaccttcatgacttcataygtaaatgaaaataacagtaattcttttgtaggattgtggtgaggattaaataaggtaatattttttaaaatacctagcactttgtagacaataaatggcagatttttaatagtaattgtagttgtaaaaagaagaaaaggctttgtcatacttccccataagtaccttgaactctcagtccttctcatatggaatgtctggcctgaagaaacaattgaagaggacttgaaagcagggag

SEQ ID NO: 441964 - DNA, 594 bp, Homo sapiens
agaatcacatgtcactagagcagaaacctgccagctgcagcctccatgggaagcagtgacagggcaggaaacctgaactggaattgatgaactgtgggaggctcagtttgggcaagtctgagagttaaaaaattcagtggaaaccagtcaaggggtgtcacatatttttatgggttttacctccaagagccttgccagatcctcacagtaaatatgggagaaaaatttcctcttgcttcctgcaggaggagggggaaagtcaccacttgaaatagaccagagcatctgttcttagcaaagcctgccttcagaagaaactattataccacagcctgacctgctatgggtctatcagcaccttaatctacttggggaaaggaaatgccaaactccagccccctctagttttatatrtacatattatataatattatatctattattatatatataatatataatatatataatataatatataatatatatattagaatatataaaatatataataatatatatattagtattaacttacatgatcacaaggtccccacaataggctgtctgcaagcttgaggagcagggagagcc

SEQ ID NO: 441965 - DNA, 595 bp, Homo sapiens
tataaaatatataataatatatatattagtattaacttacatgatcacaaggtccccacaataggctgtctgcaagcttgaggagcagggagagccagtctgagtctcaaaactgaagaacttggagtctgatatttgagggcaggaagcatacagtacaggagaaagatgtaggccgggaggctaggccagtctcgcgttttcatgtttttctgcctgctttagattcactggcagctgattagattgtgcctaccagattaaaagtggatctgccttccccagtgcactgactaaaatgttaatctcttttgtcaacaccctcacagacatacccaggatcaatactttgtatccttcaatccaatcaagttgacactcagtattaaccatcataagtccaccccttgtcaacttgaacccatacacwtctcctgagatcatacataatcttcaaataaagataataataaggttataattacacctaacgtaatacaactatccttcatacaaccagaaatgcaccaatccccaaaccaaatactattacataaagttagcaatatttaaatgctgatatgaagtcaataaa

SEQ ID NO: 441966 - DNA, 647 bp, Homo sapiens
aaatctactacattcgagtgtgtgttgtcacacacataagattttcacatcattgaaaagtcatataatgttttcctaattatatgtttataagttacagcatttatgtgttaataagttataacatttttgcattaaagatcacttgcacttcttttcatgggagtgcagtaagcacaggaatggatggatgcctttccgtgaatgggaacctacaggagcatttttttttctctattcctgggctggaggatggattgttcctgatttcaagataaacttgcagtcctgctcaaagaaagtatctttttcaaggctgttccttaggccatyaccacctaccatgtggaaggaagctggatgttccagcaggtcatggctagccttgtgacttttgacaaagtctgtagttcagtcacttgagaccacagctccacaggatatgattcttattagaggacaaaccagaaaatatgttgaactggaggtgctgggatccactgctgtgtcatttgcacactgtaagagccatagaaaatgttttatgtgagatgatttataaaatattaaatggaaatgtgattaacttacacacagggagagatgagctaattaaggcaggaatgatagagcttacattggatgat

SEQ ID NO: 441967 - DNA, 647 bp, Homo sapiens
aaatctactacattcgagtgtgtgttgtcacacacataagattttcacatcattgaaaagtcatataatgttttcctaattatatgtttataagttacagcatttatgtgttaataagttataacatttttgcattaaagatcacttgcacttcttttcatgggagtgcagtaagcacaggaatggatggatgcctttccgtgaatgggaacctacaggagcatttttttttctctattcctgggctggaggatggattgttcctgatttcaagataaacttgcagtcctgctcaaagaaagtatctttttcaaggctgttccttaggccattaccacctaccatgtggaaggaagctggatgttccagcaggtcatggctagccttgtgacttttgacaaagtctgtagttcagtcacttgagaccacarctccacaggatatgattcttattagaggacaaaccagaaaatatgttgaactggaggtgctgggatccactgctgtgtcatttgcacactgtaagagccatagaaaatgttttatgtgagatgatttataaaatattaaatggaaatgtgattaacttacacacagggagagatgagctaattaaggcaggaatgatagagcttacattggatgat

SEQ ID NO: 441968 - DNA, 647 bp, Homo sapiens
aaatctactacattcgagtgtgtgttgtcacacacataagattttcacatcattgaaaagtcatataatgttttcctaattatatgtttataagttacagcatttatgtgttaataagttataacatttttgcattaaagatcacttgcacttcttttcatgggagtgcagtaagcacaggaatggatggatgcctttccgtgaatgggaacctacaggagcatttttttttctctattcctgggctggaggatggattgttcctgatttcaagataaacttgcagtcctgctcaaagaaagtatctttttcaaggctgttccttaggccattaccacctaccatgtggaaggaagctggatgttccagcaggtcatggctagccttgtgacttttgacaaagtctgtagttcagtcacttgagaccacagctscacaggatatgattcttattagaggacaaaccagaaaatatgttgaactggaggtgctgggatccactgctgtgtcatttgcacactgtaagagccatagaaaatgttttatgtgagatgatttataaaatattaaatggaaatgtgattaacttacacacagggagagatgagctaattaaggcaggaatgatagagcttacattggatgat

SEQ ID NO: 441969 - DNA, 647 bp, Homo sapiens
aaatctactacattcgagtgtgtgttgtcacacacataagattttcacatcattgaaaagtcatataatgttttcctaattatatgtttataagttacagcatttatgtgttaataagttataacatttttgcattaaagatcacttgcacttcttttcatgggagtgcagtaagcacaggaatggatggatgcctttccgtgaatgggaacctacaggagcatttttttttctctattcctgggctggaggatggattgttcctgatttcaagataaacttgcagtcctgctcaaagaaagtatctttttcaaggctgttccttaggccattaccacctaccatgtggaaggaagctggatgttccagcaggtcatggctagccttgtgacttttgacaaagtctgtagttcagtcacttgagaccacagctccacaggatatgattcttattagaggacaaaccagaaaatatgttgaactggaggtgctgggatccactgctgtgtcatttgcacactgtaagagccatagaaaatgttttatrtgagatgatttataaaatattaaatggaaatgtgattaacttacacacagggagagatgagctaattaaggcaggaatgatagagcttacattggatgat

SEQ ID NO: 441970 - DNA, 571 bp, Homo sapiens
tttgggtgtgcaacattaaaagtaccactgttgtcatgcaacttagtcacattctccaaaagccctattagtaagaagttggcacttgatctcattcttcctattcctcaatctctagtggaatgaagaaaggggctattagatatgatccttctaatgttctagttcaaggaccatgagagataaacaaagagtgaaactttggcactaaaaataatacctggagattaaggcagctgctgtggcccaagagaagcatgtttctttacctttggttttagaagcttatattttaccacataacttgggccaggcacrgtggcttatgcctgtaatcctagcactgtgggaggccaaggtgggaggatcacttgaagtcaggagttcgagaccagcctggccaacatggtgaaaccctgtctctacaaaaaatacaaaaattagccaggcatagtggcgtgcacctgtaatcccagctacttgggaggctgaagctcaagaattagttgtacctgggaggcggaggttgcagtgagccaagatagcaacaatgcactccagcctgagcaac

SEQ ID NO: 441971 - DNA, 570 bp, Homo sapiens
attagactaattatctggatatacatagcttcctgggaattgactcctcttgggaattgactcttcaggaagcacagtctgatatctgctcttctaygtatgtggcaagcaggggagattgtgacttggaggttacatctatctaaccttgagtgcattattagaaattctgttgttgcctcatatctaagctgcatttgtcaacatctctatcataccaaagctgatattttgatcttgccttcctgttaactttgtctttctcaattggttaagaacttggttaaggaaaaggtttattttcctcaaataaaagatcaaaagtattgatcttcaatgttctctaaactttgccagattgcaatttcctgaatggtggaaaccttcatgcttgtattgacaacagtgcctagcacgtatagtgcttccataatttctgtgaaatgaagactgatgttggtcttgccctaccttttcaccctgacttaaggatgagagtctttgtgcattagtagttgactctcacttgtcctacctctgactaagggtggagcattctgaggaaagcaa

SEQ ID NO: 441972 - DNA, 621 bp, Homo sapiens
tttctgtgaaatgaagactgatgttggtcttgccctaccttttcaccctgacttaaggatgagagtctttgtgcattagtagttgactctcacttgtcctacctctgactaagggtggagcattctgaggaaagcaagaaggagstctgcactcccccctctagctgcaactggtttcttcttaagatccagcagcagttggtggcagcctatgtgcagaaggtatcacatctcctgaaatgtcaagctcagatgagtccagagaaagaagcatgaagcagctatcaggccttggagctggacctgacttccagcccagttcagcagcaatgagacctggggaattagggacagaatgtgtggcaaaaattctagctaaatataaaatgtttacatccaacacgtatcttctggacaatttctcctcagtcagatagtaaatttaatatatttgatatcccaagatgagacatccttccacatcccctccttagagctggtttctattaatatcttagcatttttatatccaagctgcagttcctccacccaccattcatattgatgcatgcaaagttaaggccatagatcctctttctagtatttcaatgacttaaagtt

SEQ ID NO: 441973 - DNA, 621 bp, Homo sapiens
tttctgtgaaatgaagactgatgttggtcttgccctaccttttcaccctgacttaaggatgagagtctttgtgcattagtagttgactctcacttgtcctacctctgactaagggtggagcattctgaggaaagcaagaaggagctctgcactcccccctctagctgcaactggtttcttcttaagatccagcagcagttggtggcagcctatgtgcagaaggtatcacatctcctgaaatgtcaagctcagatgagtccagagaaagaagcatgaagcagctatcaggccttggagctggacctgacttccagcccagttcascagcaatgagacctggggaattagggacagaatgtgtggcaaaaattctagctaaatataaaatgtttacatccaacacgtatcttctggacaatttctcctcagtcagatagtaaatttaatatatttgatatcccaagatgagacatccttccacatcccctccttagagctggtttctattaatatcttagcatttttatatccaagctgcagttcctccacccaccattcatattgatgcatgcaaagttaaggccatagatcctctttctagtatttcaatgacttaaagtt

SEQ ID NO: 441974 - DNA, 642 bp, Homo sapiens
cttctttactatatgagaactaaaagagttacttcaaatgagtactctgcctctgagatgttaccatttctctttttatttcacttgtacatctgtttacattgaaaaaggtttctaaataagtctaacaaaagtgggagatggtggtgataggacaagtacygacagagaaagattacattcaaaggataatctcttcttcccatatctttaggttgcctcgattagcttggaatttttatttctgtatatggccaccacactctacttcaaagaatgttgctctcattgaaaagagagtcacttccatattgagggaagcaaagagaatattagatttggtaaaccccatgttcagctgaaatttgttcagtttttcatctcttttatttttctccctatttttaattttgaaaaaatgtaaacatatcaaaaagtacagaaagtaccataacaaacacctatacctatattctaggagtataaacactgtattgtttttgcttttgttttttaaaataaataaataaaacattgcatatgcagttagagtccctattgaaaataggccaagtttgatttttcttcattctctttccaaaagcaactgttaacccgatgtttgaatgtattttttcactc

SEQ ID NO: 441975 - DNA, 617 bp, Homo sapiens
tgaatatcattttcctttaggcaatttgtcttctgaaatctaaaactcttttccatatttcattcttataagacacattgagaggtaaaactaaagcttctggaaaatgtgtatgattttattcataaatttaacatacatgaatattttatttgaaagcaatgatagaagtattaatttctaatcttatttcatctatatattttatttcattattttcctagaattgtattctttcatgcaaccccaaataatctttataaatatcttttgtaaatacaaaccttgtgaaaatttttcaaggaaagagttgaagtgaaacattggacagagaaattatccttgatactttctacttgagagttataagggacagacatatactgcagaataggagcataaaaggaaaaagcaaaaccttactaaccaaggtaggtattatttcttgataactcctttaaaatcaagggagaggaaaaatatactctgtgtttgtggtttgttccctaagcttaaataacacgcaaaaattatttgactacattttaagaattggtaatattagyaatttgccagtattgacttgatattccaaaagctccggattagaaaagtta

SEQ ID NO: 441976 - DNA, 591 bp, Homo sapiens
aagttaaatctattttaaattaaaataacctataaggtttcaggataaattgccatctattttactttttttttttttgaagctgcagaaaaattacagtcctttggatcctcctggaaaaattaatggcacataattaacagcactcatctaaagatactaacatgtattaaagccctgtcatttgacagacattttcacacactgctatttaattctatttgattttttgcttagtccactaaggtaatartaccattgctgttgtacatataaagacattgaagctcaggagaataaggcaatttttacaaggtgataactaatagatgaaagaggaggcattaaagatgtctctacccaactccaaagagtctttatgatcaagatgttgttctcaccaactatgggtcagattctcttttttattttgaaataatttcagattataagatcattattaattacattaagatcataagaaaatgcaaagccagtacagagagatcctttacccagttcccccaaatattatatcttccataaatatagaacagtaatatcagtaaattgacatggcacaatgtgtat

SEQ ID NO: 441977 - DNA, 591 bp, Homo sapiens
aagttaaatctattttaaattaaaataacctataaggtttcaggataaattgccatctattttactttttttttttttgaagctgcagaaaaattacagtcctttggatcctcctggaaaaattaatggcacataattaacagcactcatctaaagatactaacatgtattaaagccctgtcatttgacagacattttcacacactgctatttaattctatttgattttttgcttagtccactaaggtaatagtaccattgctgttgtacatataaagacattgaagctcaggagaataaggyaatttttacaaggtgataactaatagatgaaagaggaggcattaaagatgtctctacccaactccaaagagtctttatgatcaagatgttgttctcaccaactatgggtcagattctcttttttattttgaaataatttcagattataagatcattattaattacattaagatcataagaaaatgcaaagccagtacagagagatcctttacccagttcccccaaatattatatcttccataaatatagaacagtaatatcagtaaattgacatggcacaatgtgtat

SEQ ID NO: 441978 - DNA, 591 bp, Homo sapiens
aagttaaatctattttaaattaaaataacctataaggtttcaggataaattgccatctattttactttttttttttttgaagctgcagaaaaattacagtcctttggatcctcctggaaaaattaatggcacataattaacagcactcatctaaagatactaacatgtattaaagccctgtcatttgacagacattttcacacactgctatttaattctatttgattttttgcttagtccactaaggtaatagtaccattgctgttgtacatataaagacattgaagctcaggagaataaggcaatttttacaaggtgataactaatagatgaaagaggaggcattaaagatgtctctacccaactccaaagagtctttatgatcaagatgttgttctcaccaactatgggtcagattctcttttttaytttgaaataatttcagattataagatcattattaattacattaagatcataagaaaatgcaaagccagtacagagagatcctttacccagttcccccaaatattatatcttccataaatatagaacagtaatatcagtaaattgacatggcacaatgtgtat

SEQ ID NO: 441979 - DNA, 591 bp, Homo sapiens
aagttaaatctattttaaattaaaataacctataaggtttcaggataaattgccatctattttactttttttttttttgaagctgcagaaaaattacagtcctttggatcctcctggaaaaattaatggcacataattaacagcactcatctaaagatactaacatgtattaaagccctgtcatttgacagacattttcacacactgctatttaattctatttgattttttgcttagtccactaaggtaatagtaccattgctgttgtacatataaagacattgaagctcaggagaataaggcaatttttacaaggtgataactaatagatgaaagaggaggcattaaagatgtctctacccaactccaaagagtctttatgatcaagatgttgttctcaccaactatgggtcagattctcttttttattttgaaataatttcagattataagatcattattaattacattaagatcataagaaaatgcaaagccagtacagagagatyctttacccagttcccccaaatattatatcttccataaatatagaacagtaatatcagtaaattgacatggcacaatgtgtat

SEQ ID NO: 441980 - DNA, 592 bp, Homo sapiens
acacaggcaggaacaagactgctggtccctgttatcagggagcttaaattctaatggcagcaaccaaggtaatattactgctctcatgagccataggcactttcatgtgcttcttcctccataaaaatatattcaaaattatatttcatgactgtgttggyataaagactattaatattatatattaaaacatttctttgacctagaaatttattttcgtcttctgattttaaaagcaattaaaacaattcatggatccctaagagtattacgggccctatgcactatgacttctgtgcctgatgaaaaaggtgacagcaaagcaaagtgaacatggaaacaaaagataccaactgacttattttggtgaccatttgaaggtaaacttcatacatcatgcatttcacatgaaaatatttcagcttaaaggcattctcttgtgtacccacgatactatgataatgcctcaaaaattaaggttaatttgtaaaactacggtatttttagcctaaattatagtacttagtcccacatcatataatttctgaattttatatggatacttcaattttttttttttttttggtttttt

SEQ ID NO: 441981 - DNA, 592 bp, Homo sapiens
acacaggcaggaacaagactgctggtccctgttatcagggagcttaaattctaatggcagcaaccaaggtaatattactgctctcatgagccataggcactttcatgtgcttcttcctccataaaaatatattcaaaattatatttcatgactgtgttggcataaagactattaatattatatattaaaacatttctttgacctagaaatttattttcgtcttctgattttaaaagcaattaaaacaattcatggatccctaagagtattacgggccctatgcactatgacttctgtgcctgatgaaaaaggtgacagcaaagcaaagtgaacatggaaacaaaagataccaactgacttattttggtgaccatttgaaggtaaacttcatacatcatgcatttcacatgaaaatatttcagcttaaaggcattctcttrtgtacccacgatactatgataatgcctcaaaaattaaggttaatttgtaaaactacggtatttttagcctaaattatagtacttagtcccacatcatataatttctgaattttatatggatacttcaattttttttttttttttggtttttt

SEQ ID NO: 441982 - DNA, 616 bp, Homo sapiens
taaccattctgttgcagccaaacaccagagaaaaaaatggtggattcaccccactctcatcagcaaatactaagtgaagagcytatacttccatccttgggaggctgcaagaagggaccccagcaaccaccaaggttatgtcagagaagaccaactagggagctgagactttcattcccactggccagtaatgaggtgatcactcccatttccacttccacatatggtgtcaaagaagaccatatgggcatcctggccttcgaccttcaccaggaagtaacaaataaacccaaagcaaacataaagaggaaataatgaaaataaaagcaaaaagcaattaaatcgaaacagaagaatagtacagaaaaagcaataaaacaaaaagctagcattttgaaaatgtcaatgcaattagcaaacctctagcaagactgacagagagaaggaaagagaagacacaaatgattatcaggtatccaaaggatacttgaagacatcaaaaggaatactactaacaactctgcatatataaatttgaaaacttagacaaaactgacaaatttctttagaaacacaaaccatctgacaaagattctttacttggccaagctttagt

SEQ ID NO: 441983 - DNA, 622 bp, Homo sapiens
gaacctaccattatttcacaataaaacgtttaattaacacacacaatatatatatataaatagtttgccaagatgccttgtctttttctttcagatgaacatatagacctgttttatttaggtgactacttaatctattcactcatttttttaatttcaacttttattttagatacaggggtaaatgtgcaggtttgttatataggtatattggaccaaggtagtgagcacagtattcaatagatagttttttaacccatgcatcaccccctacctcgccagctagtagtccacagtgtctgttcccatgttttggtccatgtgtgcttaatgtttagctcccacttataagtgagaacatgtagtatttagttttctgttcctgagttaattcgcttatgattatggcctggagctccatccatgttgctgcaaaggacaagatttcttttttttatgaaaagccatgcctttattcctgataactcagatactcattaagctcttgatcctaagtgcgaactcagggcttcacagccagattggtgggcccaaatttggccagctgtctgactgacagacattgttttgactttgaactracgtcactggaaatgtagta

SEQ ID NO: 441984 - DNA, 601 bp, Homo sapiens
taggcacctaacctccttctaagagcacttatttgctttagaaaagttgtaattgtagattattttctgtgccctttttaagatgtaaatatttttaaaagcctcttccaagttttacaactaggartgtctttctcaaagaccagaaagccattgctttcaaaagtaatcatcaaggaagatagcactccatctcctaggttctctaggaggacagtagcttaactttgtcaggtgccttctttcaagttgtaaaattaccccttgtcatgaagatactagacacagttttttttcttcttcttttgggtaaagccagttaacaaaatcaactggcctaagatcaacctagccgaactctttgtttcaggagagttgagctcagccatagttctagtctctctactctattgtaatagccttgaataaagtctttttttgcctgttaaagtagccagcgcagttttttctttgacactggctacccttatctattgaaaagaacctaatagttagggcagaccaaatggattaggccaattcatagcaatctgaacactcttggacaagttatcttctccaatgctcaatatactcaccc

SEQ ID NO: 441985 - DNA, 577 bp, Homo sapiens
ctctgtgtgggggctccaaccccacctttcccctccatactgccctagcagaggttctctgtgagtgctccgcccctgcagcaggcttctgcctggacatccaggcttttccatatatcctctgaaatctatgcagagactcccaagcctccctcacttttgcagtctgtgcgcctgcaggcttaacaccatgtggaarccaccaagtcttatggcttgcaccctctgaagcagcagcctgggctgtatcttgggccctttgagccaaggctggagcctaagtggctgggatgtaagaagcagtgtcctgaggctgcatagggctgtggggccctgggctggcccatgaaaccattcttcccttctaggcctctgggccctgtgatgggaggagatgccaggaaggtctctgaaattccttagaggcctttaccccattgtcttgagtgttagcacttgactccttcttagttatgcaaatatctctggcaagtggttgctccacagcctgcttgaattcctctgctgaaaaagcattttctttctctgccacatagccaggctataaattttccca

SEQ ID NO: 441986 - DNA, 361 bp, Homo sapiens
tggcacatgctttattttcttaaaaagaagtgagagacaacctatgctacaggaggctctgtgaygtttttctgaagtacaaccccttgctctgccagggcagctgtaaagggtctaaagagccctgagaaaggagagaggatttgggaagccgaggaggcagagggagaccacatagcacatggagttctgaaagggcccaagtggagacagaaaacgagtcatgtggatggacagctggggtggaggaggatggagccacagtcagaccctggggggccttgaatgccgggcctaggagtagggcttcacctgcaggaaggagagagcacgcaaggtttgggagcaaggttctccactg

SEQ ID NO: 441987 - DNA, 593 bp, Homo sapiens
tttgatgcttttctcttctgttttttagaatgttctctttgtctttaactttttcttctgtaagttatttgagtacaggtggtatttagtcacatgagtaarttctttaatggtgatttgtgggattttggtgtaccccatcacctgagcagtatacactgcaccatatttgtaatcttctgtccctcaccccattcccactcttctctccaagtctccaaagtccattgcatcattcttatgtctttgcatcctcatagcttagctcccacataacagtgagaacatatgatgtttggttttccatttctgagttacttcacttagaataataatctccaatctcatccagttcactgcaaatgaattaaattcattcttttttctggctgcatagtattccatcttatatacataccacagttatttttttttatccacttgatgactgatggacatttgagttggttccacgattttgcaattgtgaattgtgctgccataaacatgcatgtacaagtatctttttcaaataaggacttcttttcctctgagtagataccaagtaatgggacagctgcatcaaatggtag

SEQ ID NO: 441988 - DNA, 541 bp, Homo sapiens
aagcagagtggaggctggtcctgcctatcctgctgtcaggttaggctggttccagcagtagaatgtaggtagagaaactctgtactgatagttctcagtttgggttcacraagtgactcctgtttatcataaaaggaggggctgtggaaagcccccaagaaattagctgatccaaacttagttctgctgcacaagcacatggagctagagtggctcccccacagagagcagagttgagagccttaaccctactcaccaccacactgcaccgggggtcctggggctatgttgagaaaaagctcacctacccagtggatttcaaaaggcctaggcaatcccattagcttgtactagctagggtattcaagaaagtccactttgataaagtgacatttaagcagggatatggaggaagtgagaaaaggagccatgctgatatctgggggaagaattggctaggctgaaggagcagcaagtgcaaagaccagagtcttgagcatgctttgagtgttggaaaaaatatcaaggccgccagttgggg

SEQ ID NO: 441989 - DNA, 570 bp, Homo sapiens
ttttgtgctggttggcctcctgccaggacattgcgctttccaggagtatcagctgtgttattatggggaggaactggaggtgggcaaagttttagaactcccaaaattatatgccctttattatccaccaccagggtgggtagagaagaaccatcaggtggtagtagggctaggtgtgtctgagctcaggttcttcttgggtgggtcttgctgtggctgctgtggtrgatgggggtgagattcccaggtcactggaggtgtgcacctaggggcattatggctgcctctgctgagtcatgtgagttgtcagggaagtggggcaaagccagcagtcacacgcctcacccagttcccacacaaactgaagggctggtttcactcccactgtgtcccctgcaacagcacccagaccgttttcaggtgtagagcaatacgggcttgaacacctgccccaggctaagaaagcaaagggcttggttcttctcccacctgtggagtctgcccacccaatttatgccttcccctgagttctggccaagaggcttctcacccagttcaaattgttatgag

SEQ ID NO: 441990 - DNA, 550 bp, Homo sapiens
taaccagctagagatctatacttgaaggccattatcagcaaagacttgatatacccaataaaggagcttgctgaactcatctcagctgtgatgggcatgaaactcttccacagattatctcagctcagtcagttaagccacatttattaagcacccactttgcagaattcgttgtggaacyaggactttgaataggattaagcagacaaaaaggaatggagatgctgggatgatgggccaaaaccaagaagaagtttaattggaatatacatgtaaggttatgcacttgtttctaaacacagaaacaaacaaacaacaattataacaaaacgatggcagcaaagaaaggaaatgcgcttagtattggcctctatactcaaaggttagggaatttacttacctgcaaatttagtatgagtcagtggaaaaatgtggctaatgaaagaaatgtgttttaaactgtataaatagaaacataactaaataatgtttaaatattcatagtagtctaaatatagtaaaatggtgcatatttattttaaagaataaa

SEQ ID NO: 441991 - DNA, 559 bp, Homo sapiens
gtcattattagcagagtgagaacagattaatacaaaagtctcaaaaactgagtggcttaagcaacataaatttattgtctcatagttctggaggctataagtctgatatcaagatgatagcagggttggttccttctgagggctgagaaggagggatccatcttaacctctctctttggctttagattcatcttctccctgtgtctcttcccattatcttctctctttgtatgtctctctttttaataacattaaaagaaataagatcatcagtcatattggatcagttgctcaccctattccagtatgactttatcttaactaaatatatctgcagtgactctgtttccaaataaggtcacactataaggttccattgctgaggacttcaacatacgaatttttggggaggtataattcaccctaagagcactactcatttatrtgctttagttcacgtgtctgtttactaaagactttaaaaagattttaaaataatctttccagagagagaaaataagtgaggaaataagaacttggccaagtgttcagtgtactg

SEQ ID NO: 441992 - DNA, 589 bp, Homo sapiens
ggtaattgtattacagtcagtatcctttggggaaaaaagtctcaaaatttaacttcccttgttgmagaagctattttacagtgccatattattcattaagcattaattaaagaacagcaggataattagtaggatcatcaatattacaagaaacattagatcgctcaagaaggaaataatttaactagaaacactttaaattttctcaagtagtgcagctgatagattagggagaaaaacaacaactccgcttaggggatatagactttaaatcattgtttagaaataggtacttctgtatttattttgttaagttaaaataatagggctcaattaggctgagtaactccctagaggcacagttgtaatagctggtctcagagaaggcaaaccctcctagttctcatcagaaggaaatgatctgtcattagtcctaggtaactgattaatatctcacagtggactggaaatcgctgaatgttctctgcaagttttatactcaaggtgtgaattcataagcaaccatcctatttgaaagttagccattgcttagggttctctattagaatcttatcaagcacattctcag

SEQ ID NO: 441993 - DNA, 373 bp, Homo sapiens
ttcactttacatgtctaggccttagatttcggtgtccaaaattaggagattggtatttgtctctaaattccctgccaaatctactgtcctgatcacagaaagatcagaggagaggcggctcagcatagtgtgaaaaatccttagattcacatctcaggtcagctamttattaactgtgtgaccttgggcaaattatttaaaatatctgagactgttttctcatgggtagaatagagataatatcaacctccctctcaggttgttatgagacttggagaaaaatatactggaagtagctagcattgttaatgttagcgttgttactacaataatttaaatggagaggaagaactccaccttatttttttttcca

SEQ ID NO: 441994 - DNA, 484 bp, Homo sapiens
tggttttatctatgtttggttctagattcactaaagatagaaaagccgcatataacccttatctcttccttttgtgtggtgcagtgatgtaaaatcaccctatgggatccaaaagaatttggaattcaaatggagttgttttcagagagagaagaggcagagaaaaggatatcagaatgtaagcagatcctgtgaaattattcacatttatattgaactgtctgttttcagagtgcacgagagttcaaatgtgtaaagagtgcatatggaaagtgagttaccaaaggggcagacttttccattgatcaatttagtatcacttctcttctccaaatctaggcctctgtgaaactggagcttaccctttctaaatattttttcctttgctagatggcaaaatgttttttgtttgtgtgggttttttttttkttttgttttaattattgggtgaaacttaacctaaagtttactattttaaaatatg

SEQ ID NO: 441995 - DNA, 507 bp, Homo sapiens
catggtctccagtgatggctgagtgttcttcttatctctgattccctccagacaggcccactatggctttcatctggtaatctggctgctgagctccagtatcaccaccccctccttttgtccttgcagtcctaggagtggtaggtaggtgcttcccgttgttgctaatctcagagttgtctcaccatctcgtttggtttctcagctcctctatttatcrtttgtgtaaacaattctctaaatctactctggttcaacccttgaagtggtttctgtttcccgattagaccttgactgatacatatgtattcttccctttattgtaatcttgctactcaggaaggcaagacatcaaacacaatcacaattcatctaattgaaaagtccatacttttcctgctctatcttgctactgactggactacggatttgcatcaagtggacgagaaacggcaatgacacttagagggctctcaaagcatatcttttggacacattagtttctct

SEQ ID NO: 441996 - DNA, 500 bp, Homo sapiens
caaataggagactctgaagggacaagatgctattttaagtgatattttcagtcttatagagttttcatttagtttttcatgtaataggcacatgtacaaaaacaattaagctagaacaaagcagaaaataacagcaggcaactcactgccttcggttacagtgctcccaatctggaacactgtcagtcactggtggggcttgcagaattaaactagctgggakaagtaaaaaaatttttttttggctgagtcagcatccaaatataggaatccttctgaaggattgcagttttctcagagggctatgctagaggcaaggagtagattgattttttaaagtccatacagaaagaaataattattgcaaaatgtgtgtgtttcctgagttgtggtctggaaaagccatttttgggcctgggacactcacctccctgtttgagaccctggaatgagtctttatttcattgtgctaaaccatcacagcaattttgttcctagaa

SEQ ID NO: 441997 - DNA, 550 bp, Homo sapiens
gttttagttgtcttgttgaagattgtaatgatctcagtttgataaatggcattgtttcacttttgttcagaaaaacatttttaaaaagtgagaaaaaatacttgaaatatgatagtaccagaatgttagaacttactgtgtctttgggactggccaatttttatagctgatgccctaggacttaggatctgtaatagctatgtagaggtgtcacagaaaatgacttcctatttaggcttgatattttcgaccaagtgctatgtgaaaattccaggccttcaaactggaactcagaaaaagaattgcctctttctgtagacttttcgagaactgtcacctctaccttcccaagatgatcagacaatggcggctggtggggatmtatgaaccacagtcaggaagagggtaagagggatgcaaaaagagggtggagagaagtgtagggaagagacagacagatgagtggatatcctgaaaaacgttagtaaaatctgagcactggaagtcaagtatcactaggtttggttttccaagggaagctggcacatga

SEQ ID NO: 441998 - DNA, 631 bp, Homo sapiens
gtgttcagctgcaagtagcagagtacctgatttttaatgtcttaagttgcaattattttaaattttaatggataatctggaagtaggcattccaagtttgctttggaaattccatggtattataaaatatccagactctttagaatcttgagctttgtcaagggcagtatctctccttatgatcagaaaacatctgccagatcttcaagaaactcaatctcatatgacagcatcccaagtagaaagctggaggcagctacagagaaagtctttttcttcacatgcctctttgttattaggaaggaatgaaaactttttcccagaagccccaagaagacttttccctttatcaccttagatgaatttggtcaaatactcaccctgctagcaaggagggagaaggaatggtcgtcagggaagcatccaagagcatctgccacgttgcttattttcatacagtgttttgcagctatgcatatgcagcagacagtgttmttcattacaggcaacagaaaatgtccctgtctaatttaaccagaaaatgactttattcacagattttgagtacttcagagctgtcaggatttctgaagagtgaaacttgaggttaagctgccagaaacaatgccca

SEQ ID NO: 441999 - DNA, 591 bp, Homo sapiens
ttttttccaattccttgaaaaatggtattgatagtttggtaggaatagctttgaatctgtaaattgctttggggagtatggccattttaacaatactgagtcttcttatccatgaacattgactgtttttcccttagtttgtgtcatttctgatttctttgagcagtgctctgcaattctcattgtagaaatctttcacctccctggttaactttattcctaggtattttattcttttggtgctattgcaaatgakattgtgttcttaatttggttctcagcttggatattattgatgtatagaaatgctactgatttttgtacattccaagtccctttctggctttttttgttagctccagttgtcattctatttctctccagctctgcctatagtttggtagagtggacagagaggaaagagttctagccaaataaatcagctctgccactttgattaatgtccgagcaaattacttaatttcttgctatgctagtattctcatttctacagatcacaaaaatactgctagtaaatcttcaactttattcattaatttcattgttcatagtaatattggcattgctatt

SEQ ID NO: 442000 - DNA, 559 bp, Homo sapiens
gtccctttctggctttttttgttagctccagttgtcattctatttctctccagctctgcctatagtttggtagagyggacagagaggaaagagttctagccaaataaatcagctctgccactttgattaatgtccgagcaaattacttaatttcttgctatgctagtattctcatttctacagatcacaaaaatactgctagtaaatcttcaactttattcattaatttcattgttcatagtaatattggcattgctattttgaaaccatgttatgaatattataaaatatggcaagtcagttattagaaatcaagatattctagatacaagaaaacagatataaaaccaaataagttcagcaaaaactctagattgtcaaatgagaattgaaaatattattaatttctactactaaaaaatacatttcctacatctgtccattgagaaaaactagaacaatgacatcacagtagtaataagcattcccggttccttgattttggtttctaaatactatttcctactaaaaggactcagagctcctttaagaaatatgt

SEQ ID NO: 442001 - DNA, 559 bp, Homo sapiens
gtccctttctggctttttttgttagctccagttgtcattctatttctctccagctctgcctatagtttggtagagtggacagagaggaaagagttctagccaaataaatcagctctgccactttgattaatgtccgagcaaattacttaatttcttgctatgctagtattctcatttctacagatcacaaaaatactgctagtaaatcttcaactttattcattaatttcattgttcatagtaatattggcattgctattttgaaaccatgttatgaatattataaaatatggcaagtcagttattagaaatcaagatattctagatacaagaaaacagatataaaaccaaataagttcagcaaaaactctagattgtcaaatgagaattgaaaatattattaatttctactactaaaaaatacatttcctacatctgtccaytgagaaaaactagaacaatgacatcacagtagtaataagcattcccggttccttgattttggtttctaaatactatttcctactaaaaggactcagagctcctttaagaaatatgt

SEQ ID NO: 442002 - DNA, 450 bp, Homo sapiens
cacaatggtcacatgggcaggggaagcttcactcaagaaggctgcagctgcacagagcaatgccaaggcttcatctcttagtattgcttcccctgggcttcaacctcaggactggtgcatagagcagggtactgagggataatgccaagatatcagagagtgraagagaaattctataccaccagactggaagccaaaaactgttttgtttacaaataacaaaaataaatctgcatttgcttcagttgagaagggaaagatcttgaaaaacacagggtacaaatgcaatgagacatcagaatggaactgaaatgttaatccagctccctctctcttcatctttcgtctctactcattttgacctgattgttcttttctcctacctttgcagacctgcctccttttattttctgattcatgtaactacaagtgatgcctgtctcacattcc

SEQ ID NO: 442003 - DNA, 450 bp, Homo sapiens
cacaatggtcacatgggcaggggaagcttcactcaagaaggctgcagctgcacagagcaatgccaaggcttcatctcttagtattgcttcccctgggcttcaacctcaggactggtgcatagagcagggtactgagggataatgccaagatatcagagagtggaagagaaattctataccaccagactggaagccaaaaactsttttgtttacaaataacaaaaataaatctgcatttgcttcagttgagaagggaaagatcttgaaaaacacagggtacaaatgcaatgagacatcagaatggaactgaaatgttaatccagctccctctctcttcatctttcgtctctactcattttgacctgattgttcttttctcctacctttgcagacctgcctccttttattttctgattcatgtaactacaagtgatgcctgtctcacattcc

SEQ ID NO: 442004 - DNA, 487 bp, Homo sapiens
ctctgcaagtctcaaggattatcagacacaagatcagattgctgctaaaaattagcagtcaccaattttctgccctcaatactcttcttcctctacacttgcatggtgtcagtgatcacctctatgctgatgattcacaaaatttatatctctcatctattcctcttccttggacctcagacccacacaactactaggttggtaracatttttgagtcccaagatccatccaactcaacatatccaacgcacacattacctgccttccagaccaccaactcctctggtttcattatttttataccaccactcttctatatggcaaggctaaattgctcttggatcaccaattggtggtcaaggtacttccattctacctttaaaatgtcatttgaatataatcttttccttttcatgcctacaacctctgtctagatttagaaatttgttaccttttatctggactattgctatagtttattttttt

SEQ ID NO: 442005 - DNA, 502 bp, Homo sapiens
ctttttctttctttcttcttttttttttgagagggtctccttaggttgtccaggctggttttgaactcctgggctccagcaatcttcctgcctcagcttccctagaagctggaattacatgcacataccaccacatctagtctcaaatagcttttgataagggtgccaagaccttacagtccttttcaacaacaagtagtgctgggaaaactggatatccacatgcagaataatgtggttggacccttacctaatgtcatgtaaaaaaatgaactccaaatggatgaaagacctaaatgtaaaacctaaagcaatataactattagggaaaaaaatggcaaaatttcacaacattggatttggcagtgatttcttgraaatggcaacaaaagagaaatagaaaattagacttcatgaaaattaaaaaattttgtgcatcaaaagacacagtcaacagagtaaaaaagcaacccataggatgggagaaaatatttgcaaatca

SEQ ID NO: 442006 - DNA, 558 bp, Homo sapiens
gatcctagcatcaaaattccagatgtttcacttcaaaattttcactggtctacttctgccagaccctcatttgtcagggacattcagtgtgatatgattaattttctgatagcactttaattaacttcatgaaatcttgtaccatgtgcaagatttgcaacctcaatttgcaatcaagttcactaccagatatttacactttactatctagtagagactcatctagaaatattatgacaratgtatagaaatagctactactttttaagagggaaggatgtttgaatgggtactaataagtgggcaattcattagtaaatatttttgcattaggaagacgcttgtttccatataaaaccttttaagtacaggattttagataacaaagtttcagataatgaggactttctaatttattcatttttaccctatatgttatatttcagttaggaagttagaaaaataaataaaaatgggatatgtgtaccgagcacctaccctatatcaggtgctatgttagaagcatttcgcatgctatttcttttaatccccccatca

SEQ ID NO: 442007 - DNA, 530 bp, Homo sapiens
tatgtaagtaaagatctataaaagagagagaatggaccagaaactgaatttgaagagattgtggttgagaatacataacactgattcaagacaacacacagatgctagattagcatacctcaagcagaaaaaataagaaagtaatccacgtgtagaaacatcacagtataccttctgataaatcaagacaaaaagcaaatcttaaaagcaactgcagaaaaaattcaaggttacctttcaaagtgcaaaatgcaggatgaaaattgattactcaacacacacatgtacacacacacacacacacacacacaaatagaagccagactacaatattgctagcctagaattctatgtccttcaaaaattaagctgaaatgaagacatttgcagacacagaacccattggttggcatagcccaatagtttaaatactatttatatgttgattaccaaatacctatctcaaactccatgctctattcaacwctttcacatctctatttgaatgtttcataaatatttcaaccccc

SEQ ID NO: 442008 - DNA, 529 bp, Homo sapiens
tcacagatccaagaagctcagcaaacctcaagctagataatacaaataaagccatgcaaatcagagtcaaatggttgaaaaccatggaagatagttggcttcttaacagaaacaatggagaccagaagacaatggaataatattttttaattgctaaaaaaacatgaagcctagaatctgtatgttggagaaattacactcaaaagtaaaaacaaatagatttagctggccagaagctgaaataactagttgtcagacaaactaagctgaaagaaatgttataagaaatgtttgaagmtaaaagaaaataaaagaagatagaagactgaatttgagaaaaataaaataataaataataaaattttgtattttgcagccccttttctataaaattgagtaaaataataaataattgtggtaaatattagcaataccaaagaacctacatattgtataggcttttgaagaaacttgttcacaaagcatctgtttttgacctttcagaaatttccttcagtgcccaagagct

SEQ ID NO: 442009 - DNA, 620 bp, Homo sapiens
gctaatgatacattagacagtataagagtgccaattaaagggtaatggtcattccaaaggttaatgcttgtaactcttgaaagagaataaattgatctaatacaatttattttaagagaaaacttcccttctatgatgctgtgactaattatcctattggcaattcagtagacatacataatcattcaatccactactatcaatgtcttaataaaagctttggaatgtggaaagtgtgaagcttttcacacgcaaaaaggaactttacatagatgatgattatttgactgagagaaaaggcaagctgtttsaaagtttgagagaatttagaacataccccgtaaaaatgccacaaccatatgatgatattaaaatgttaagcaaatgctatcactatacgtgctgttcacatacatgcacatatttatatatgaacaccagtcagaatttagtttccttttgaaaagctcaagagtttgtagagtgacacagaacaaaattaatagctctctaaataataggctagaagaaagaactatcgtatctgagcattatgaaccttacctcgttctgaaaaggagctgaagtaaagtgagagaaatggtctgctggctcctaat

SEQ ID NO: 442010 - DNA, 620 bp, Homo sapiens
gctaatgatacattagacagtataagagtgccaattaaagggtaatggtcattccaaaggttaatgcttgtaactcttgaaagagaataaattgatctaatacaatttattttaagagaaaacttcccttctatgatgctgtgactaattatcctattggcaattcagtagacatacataatcattcaatccactactatcaatgtcttaataaaagctttggaatgtggaaagtgtgaagcttttcacacgcaaaaaggaactttacatagatgatgattatttgactgagagaaaaggcaagctgtttgaaagtttgagagaatttagaacataccccgtaaaaatgccacaaccatatgatgatattaaaatgttaagcaaatgctatcactatacgtgctgttcacatacatgcacatatttatatatgaacaccagtcagaatttagtttccttttgaaaagctcaagagtttgtagagtgacacagaacaaaattaatagctctctaaataataggctagaagaaagaactatcgtatctgagcattatgaaccttacctcrttctgaaaaggagctgaagtaaagtgagagaaatggtctgctggctcctaat

SEQ ID NO: 442011 - DNA, 450 bp, Homo sapiens
tatagtattttactacattttgcagtatatttacatattaatttaaataaattttatggctgttactaatgayagtagtgaaaaaaatacttcaattgcatattgtcattcagttgagaaaaattttattcaaaataaccccatggtaaaagatagcacaggtcagacttcatgctgagaaaataaaacaatgttatcttttgctggtaagatttcaaggttggtattaaatctctatataatgtaatgtgttttttattttaatatttaattacttttatataacaatttgaaaatgttacctttttgacccaaaaataattaataaatggttgctatttgcctattatcatttaggaaaaggcaccaattaaaaataagactgttaactagtaacatgcatctgatttttgtgcttgcactctcaaatgtggtttacaagtttataat

SEQ ID NO: 442012 - DNA, 450 bp, Homo sapiens
tatagtattttactacattttgcagtatatttacatattaatttaaataaattttatggctgttactaatgacagtagtgaaaaaaatacttcaattgcatattgtcattcagttgagaaaaattktattcaaaataaccccatggtaaaagatagcacaggtcagacttcatgctgagaaaataaaacaatgttatcttttgctggtaagatttcaaggttggtattaaatctctatataatgtaatgtgttttttattttaatatttaattacttttatataacaatttgaaaatgttacctttttgacccaaaaataattaataaatggttgctatttgcctattatcatttaggaaaaggcaccaattaaaaataagactgttaactagtaacatgcatctgatttttgtgcttgcactctcaaatgtggtttacaagtttataat

SEQ ID NO: 442013 - DNA, 555 bp, Homo sapiens
catgcctggctaattttttgtatttttagtagagacrgggtttcattgtgctagccaggatgatctcgatctcctgaccttgtgattcgcccgcctcggcctcccaaagtgctgggatatgcactttttatttgaaagctggcttcttctattttcagttctttgaaggaatagtggatggtataggagaggatgcagctggaaccattactatttgttcagcagagacagcaggccctgtacttcgcctacttcaaagcttgggagaatttggaagcagaaagttcacaatcgctactgtgtggttttaccctcattattccttttgtacgtgcatatggttgcagctaatctgccttgtggaacaggaccgaccccttctccttgaatgcccaagcggtctgcctcacactgcaagaagaccctctccacatgaagagaagcttcagagtaatcaaggaaatacatcatttgagcaccaagcctcctttcctccacattgttgagagaattgtcaaaataccactgttgttataattaaggttcttcaaaata

SEQ ID NO: 442014 - DNA, 555 bp, Homo sapiens
catgcctggctaattttttgtatttttagtagagacagggtttcattgtgctagccaggatgatctcgatctcctgaccttgtgattcgcccgcctcggcctcccaragtgctgggatatgcactttttatttgaaagctggcttcttctattttcagttctttgaaggaatagtggatggtataggagaggatgcagctggaaccattactatttgttcagcagagacagcaggccctgtacttcgcctacttcaaagcttgggagaatttggaagcagaaagttcacaatcgctactgtgtggttttaccctcattattccttttgtacgtgcatatggttgcagctaatctgccttgtggaacaggaccgaccccttctccttgaatgcccaagcggtctgcctcacactgcaagaagaccctctccacatgaagagaagcttcagagtaatcaaggaaatacatcatttgagcaccaagcctcctttcctccacattgttgagagaattgtcaaaataccactgttgttataattaaggttcttcaaaata

SEQ ID NO: 442015 - DNA, 544 bp, Homo sapiens
taatttgttgtttaacccacacagtctatggttttatttttttcattatagcagcccaaattgactaagacagtgacctcccttggtagaattaagcacttttgccagttgttcaaaaagccccttaagtayacttctgctaagatataatatttataaaatataacatatatatattattttgttgttggcatcagagttactgttagggaaataactgtttttatttaagaaaatacactaaaaaactgaagttaacaaaaagtaaggcctcaaggggatgatttagcaggaacacagagttagattaaagaactgtgtccccagaaaagcagtatggagctgggagaagacacaagagagagaagttggtaataagctgaagatatataaagaacatggtggaaattaccagaaggtagaaattgccagaatcattgagagatttaagaagggagaaatctaatattcagcttaatgtcttctcccatatcgtgatgagacaaaatcctttcatgccattactccaacttatccccagtga

SEQ ID NO: 442016 - DNA, 486 bp, Homo sapiens
gtgatctaaaaggatcagaaggcctagtggggagctttcagaatctagtctttccttctggttggaagtcccgatgggagtagcatgctctaagcaaccaycttgactataatgtaaagaatgacacagggacctttccaaacatgccccctcatggaattccagacccttgtatgatgtttgctaatagtagctgcttacagatctgtgggcaaactggagacatctggactaacggcccttgccacaaggatcatctgagatattggtcagggcatattatgtctctaatttttcaaaacttcatttgtcaggtggacccttctcacttggcttgtcaaattccaaacggcattgtaaatgactatcttaaatatggatgtcctgatcccaaggatgcccctattacatgtaaagaagggaaacttctaagatatgagaaaaatctgctggtgtctctcacaaggcacaacttaggatcgtccc

SEQ ID NO: 442017 - DNA, 600 bp, Homo sapiens
gttgtgcaatggatttaatctaacatgttaccagaaacataagtcttttctctcatcatcaaaggcaatacaaagattcaatttaggcgtgaattttctgtactcagctattggtcaggtaagaattgggatttaaaaggcagatatttctcattctaaaagaggctcattttttgctgttgttctgtgtcataacttctagtgtattattgggtgctgggaccacacataaatatgtgaccatgtgttggagaagttcataatctcgcaaggaaaaaaaaaacacattgacatagaagagtgataatccaagtcctgtatgataaattgcccaagtgcttcaagaatacaaacaacaaaagatggaactgcccactytgagctaagcagttagagcaagagccacaaaaactgaactttatcagtgctttcacaaatggttaaaacttgaataggggatttaatattggacttgttttaattttttaatatgaatgctgtctggctttacccctgaatttaaattttaaaaaaagcactgttatttaaactttttgacagactatgtaaatcagaaaatgtttgggaaaaagatggctt

SEQ ID NO: 442018 - DNA, 589 bp, Homo sapiens
tggtcaatctcctctccaaccccctcaatgttaagatgctcctctcttctcctcttctctgctgtgttgctctgttgcctttctgctcttctactcatggagctgggggtttgggatttgtatggctacaggactgggggccatggmaggccacggtggctttggaaaaagaaacatttggacatgaaaatgggaatgcttgttctcatttagggccatgggtccaagcttaagggtggagcccttgacagcgaccctgctctcctgcctcctgttcatatcaatattaccattattattttagtatcattttaggggagaagagtcatggttaaactgccatatttaaattgaagtatctcacactttagaaggataaatagtaaacagcattaatgggaaaggcaggaggcattccacatagcttctgctccctcacctggaatagatcacagtggaatataagggagagcctctcccactggtaacaatgaaactagatcaaatacattaatcaaatgtttccaggcatgggatgatagatagagcaatattgtgagccctacaatcatcccacctctctggctca

SEQ ID NO: 442019 - DNA, 572 bp, Homo sapiens
aaaatcttaaaagaaccagaggataaagaaacatattacatacaggaaacaatgatatgacttacagcgaactttttatcagaagaagtagaaatgaaaagataatggaacatctctgaagtgctaaaattaaaagtggcaatccttcatccagtggcatttctacgttcagtgaaaacatctttcttaaaaaagttaaattatgatattttcagataaatacatgcttagaaactttctcttcagcacaccttcattgtaataaatgctaaagaatgttttttgtttggaggaaaatgatatcagatgaacactcttatctttaggaagaaatgacaagcatggtattggtaaataagtaggaaactatagaagactayttttttcttactgtaattttcttaaaggacaactgactaaagtaaaaatatttacaatgtaaactggggtttataacacatttaaaagtacaagttttgacagcaatagaacagaagttagagtgagtaaatggcataatactgttataatgttattatattttaaagatagaagaagtgggaagtgaaaaa

SEQ ID NO: 442020 - DNA, 597 bp, Homo sapiens
ggattgactttggcctacctcaatcatgaaaacatttataatattaataacctctgattctataagcataatgggggaaaatgccatgtggctttgctagggagtctgaaacacatttgagaatttttctgaggatccccataacatgctttaagaatgcaaagacaggccgggcatggtggctcacgcctgtaatcccagcagtttgggaggccgaggcaggtggatcatctgaggtcaggagctcgagaccagcctggccaacatggtgaaaccctgtctctactaaaaatacaaaaaagtagctgggtgtggtggcaggtgcctgtaatccmagctacttgggaggctgaggcaggagaatcgcttgaaccctggaggcagaggttgcagtgagccgagatcgcgccactgcactccagcctgggcgacagggtgaaattctgtctccaaaaaaaaaaaaaaaaatagaatgcaaaaataatttatgaatgtatttatcacacttattgaggcaaagaaaaaactcacagataatgcaatctgcttctagtgtatggccatttccatttcaaggagactggatgacttctcaca

SEQ ID NO: 442021 - DNA, 606 bp, Homo sapiens
tgacacttgagcaaactcagcctcagttacctcatttgcaaaatggagcaatatttactccaaagggccatagtgagaataagagaatagaaattaaataaattgtaattgcattttaaaagaaaaggaatgttaagaaaccaaagattgagtactgggagaaaaaaaatttactgccaagaaaagaacccagggcagtacaaagtctatattcccatagatatgggatttgggagaggagaaattgggtagatcttttaaagccaaaataccctgaagtatctcttcccatatsaggaaaagaaaggccctgagtattgcctatgcagggtcgggagggtatctgggcttactgctgcactcagcagctagaaatggttgtgaatgtgcagctcccatttcgagatcttggcattcagctcacctctgttgcatatgtgatgtgcttgagttgggatttgtattgcaacgactacatgcctagtttggggtttacgaatactataatgctgattattattaataatattaaacataacaaattgttctccttgtatcttttcaccttcctcttaggcatcttttccagctactgttcattacctt

SEQ ID NO: 442022 - DNA, 494 bp, Homo sapiens
ggcacttgaccaaacaactgtgcaccatagcctagacaagttgacacataaaattacccatcacaatgttcgacttcattcttatgctgctgcccttctgcaacagaagagaccagttgctatcccttcttcttctcagtttgccagcttctgcttttgtatcaaggcagagtgtgacaggaagagcaagcataccgacaaacagaggaagacgggagtgaggggcaacataacakgtatgcaaagctactattgtttccgtaaggagtcactttttaaaatatacacttgctttaaaccttcggatttggtgaactcaatgtctactgtcgcccccaacttcaattctttacacttaggacaaattgtctgaggagagctagagacactgtggttatttcctccagggaaggcagaaaataatttttaaagtgtggcaaaggataaaaaatggaatccagctgaaatgcatgcagactttggcacacagtaaa

SEQ ID NO: 442023 - DNA, 638 bp, Homo sapiens
catgttggccaggctggtctcaaactcctgacctcaagtgatccacttgtctcagcctcccaaagttctgggattacatgtgtgagccaccacacctggcctcatagccttaatatttttaatagcaaggtataacatatttatagagaagtgcacaagttgtaagtgtatggctcaacgaattttcaaaacaacacaacattgtagacatcacacattttacttaattactaccaggctcccccttttgcccttgctagtaactaacccctttccccacaaataaccaccatcctaacttctatcaccatcaattagtctgtttttaactttatagaaattgagtcatacataaatgcttgttttttwtgtgtctggcttattgtatttaatcttttttgagatttccctatatggttttgtgtaacagtcgtttgttcattttttgctgcatatcataaatgatcataatttattcatttattatactattagaatatgggttgtttccagtttggggtcattaataataatactaatacaaacattcttttatctgcatctaggggtatgtatctgtggaataaaaatccacaagtgaaattgttttgttacagagtgggcacaggttcagtttc

SEQ ID NO: 442024 - DNA, 541 bp, Homo sapiens
tttttaattgggttgtttatctttttgctggtaagttgtaagggtttttatttacattatttgatatactagactcttagcaaatataagatttgcagatattttccccattgtgtaggttgtcttttcactttcttgataataatctttggtgtgcacaaattttaattttgatgaagtccaatttatctatttttttcttttacttcttatgcttttggtgtcatataaaaaaaaatcaattgccaaatccaagatcaaaagatacccctatgtttttttctaagagttttatgattttagttctatgtagactgttgatcttttctgaattaattttttaatatgatgtaaagtaggaattcttttgcttctggatatttggttgtccaagcaccattagttkacaagactatgctttctccattaaatgatcttggcacccttgtcaaaaccaattggccataaatgtatgagatttttctatactcttgattctcacacctctctatttttataaatctttcatgatgaatatttc

SEQ ID NO: 442025 - DNA, 483 bp, Homo sapiens
attaatccattctcatgcagctatgaagaaatatctgagactgggtaatttgtaaaggaagaagtttacctgactcacagttccayatggctgggacggcctcaggaaacttacaatcatggcagaaggggaagcaaatatgtccttcttgacaaagcagcaggagagagaagtactgagcaaagggggaaagccccttataaaaaccatcagatcttgtgagaactcacttactatcatgagaacagcatgagggtaactgcccccatgactcaattacctcccacctcgtgtctcccacaacatacggggattattggagctacaattcaagatgaaatttgggggggaacacagccaaaccatatcacctagtaactcctgaggactgaaaaaaaaacatttttgaatagttttgaaatagtaattgtggccattggcccctgtgctgatgtagcactcatattgtaaagtccggatgaa

SEQ ID NO: 442026 - DNA, 560 bp, Homo sapiens
caggaatttttatccattttattcaccacttacttctaagcacattgtagacaacttataaattaactgttaaataaacaagcaaattatattcctagattctctttcctttaattcattctacacaactctcagaattaactaaaattaatacrtaatcactttttcatttgtccagaacctttaagtgatcacctctcatttattacagaataaagaccaccatatctgattgtaacactcaagacctttcaagaatggccctaatttactcctgaggactcattttctaccacaatctgcagcaccctactcactggatagattagactattcctgtgtctttgatgtcatggatattcccatcttttcaactttgctgtttctgatcactctaccagaaatacccttctctcctttgtatctgagatggtaggatcttttgtctatggtcctctgagtggtcacgtttttaaaaattaagaactaggaacagacaaagttaatatattaagactttagaatataattagatattaggaggagatcaaaaaggctgc

SEQ ID NO: 442027 - DNA, 469 bp, Homo sapiens
ttcctagattctctttcctttaattcattctacacaactctcagaattaactaaaattaatacataatcactttttcatttgtccagaacctttaagtgatcacctctcatttattacagaataaagaccaccatatctgattgtaacactcaagacctttcaagaatggccctaatttactcctgaggactcattttctaccacaatctgcagcaccctactcactggatagattagactattcctgtgtctttgatgtcatggatattcccatcttttcaactttgctgtttctgatcactctaccagaaatacccttctctcctttgtatctgagatggtaggatcttttgtctatggtcctctgagtggycacgtttttaaaaattaagaactaggaacagacaaagttaatatattaagactttagaatataattagatattaggaggagatcaaaaaggctgc

SEQ ID NO: 442028 - DNA, 469 bp, Homo sapiens
ttcctagattctctttcctttaattcattctacacaactctcagaattaactaaaattaatacataatcactttttcatttgtccagaacctttaagtgatcacctctcatttattacagaataaagaccaccatatctgattgtaacactcaagacctttcaagaatggccctaatttactcctgaggactcattttctaccacaatctgcagcaccctactcactggatagattagactattcctgtgtctttgatgtcatggatattcccatcttttcaactttgctgtttctgatcactctaccagaaatacccttctctcctttgtatctgagatggtaggatcttttgtctatggtcctctgagtggtcamgtttttaaaaattaagaactaggaacagacaaagttaatatattaagactttagaatataattagatattaggaggagatcaaaaaggctgc

SEQ ID NO: 442029 - DNA, 336 bp, Homo sapiens
tcatggtttcttgtccaaatrgtcttgatcttgtttagttcttcctgattaatgtatttctctttgatcttctcggttttctttttcttatccttaccactgtcatcctcctcatttgaacccacattttcaatcttgggtttttcctcattatatttatcttcctattatttcttgcctttctcttcctctgcctcatcatcactgatttccttctctctttccttcctcagatagagggtgatgggttagcctatgaactgtgagtgctttttcactgcgtctttgacccatctctcttctaagtactctgtctggttttctttaaggtggagg

SEQ ID NO: 442030 - DNA, 636 bp, Homo sapiens
tgaacccacattttcaatcttgggtttttcctcattatatttatcttcctattatttcttgcctttctcttcctctgcctcatcatcactgatttccttctctctttccttcctcagatagagggtgatgggttagcctatgaactgtgagtgctttttcactgcgtctttgacccatctctcttctaagtactctgtctggttttctttaaggtggaggatcattttggtacccctgccatggtcagcacatacagtgaaggaacccccaccggaaaactcccaggctcactgttcatcatcattgtgctttgtgatcacaaccactttctctgccaccagataggcagaatgaaagccaacaccaaattgacaatcatggagatgtctgcaccagcctgaagagcctccataaatcctttagtctcagacttggcaatggttyccgaattatttatgaaatcaactttgtcatgcaaatgcctgtgtccaccaaagtcggggtgtattcctgagggttgggcatgatgtcagtgttcagctctttaccactgtccaacttgtgtctgccagtctctcatagagaatcttgttcaaggcatcagaagcattagaaatcaattcttgaaggaaata

SEQ ID NO: 442031 - DNA, 503 bp, Homo sapiens
gaaatcaactttgtcatgcaaatgcctgtgtccaccaaagtcggggtgtattcctgarggttgggcatgatgtcagtgttcagctctttaccactgtccaacttgtgtctgccagtctctcatagagaatcttgttcaaggcatcagaagcattagaaatcaattcttgaaggaaatatctgcttgttggaatagaagatattgataataagagacctgagttgggcaatttctgtctgaaaggcaaaagtctccacctcctctccatggtgtacttcctcagacatcttgaaaagaaaagccttacaagtactagagagcaaggtgggttgggactgtcccacatgtatgcggcaccaaggctgtgcaacagtgacttggagcccatatgtcttcttttgaattgaattgtcttttcaagtcttttgtacatttttcaaaatgaggttattttctttttattattgagttttaagagtttcctaatatactctggataaaag

SEQ ID NO: 442032 - DNA, 501 bp, Homo sapiens
accttcttttgtttcttcccactgtatgtgcccccaaggaagcccctcagctgctcccttccttgcccccatgacccacagacggtggttgaaccacagctctctctttctgataacaccctttggtgtgaaacaagtaagactccagattcctgtttgctctaaaaatcctgaatggccttctgtaatcattacattttattactctcatttgattgttttgttttttttttccccgttagatattttctaactgctcttctgcagacaggacactcgcaaatgaacacagcaagcacacaggcatctgtgtctctattcagaagtatcacaagtgaaaggatgatgcccattgcctggggccctttttattccacttagcctgactactgaactggcaagtgcaggtaacrgctttctcgcagagtctctgagcaccgtgactgtgtaatgacagctgtggttggagggcccaaagctgcctcacaaatacatttactg

SEQ ID NO: 442033 - DNA, 590 bp, Homo sapiens
cctctcttctcaggcaatcgatttgctgcttgcctgtgatcttgtctctgaacattatacatgggggagatagtgtgggaaaacagaacctggagctgaggcagctgtcttgtgaacacratgcagcaagcccaaagacaaaagtccaacagacccagggtggcagacagaaaagatggacagaccctgggccctggatgacagcaatgagccactgattcagccctggcaccagctccctctctacttgtaatgtgaaataattctgtgactttttctgttaagtctcgatgctcaattccttgcaattgaaagcaacaaacacacagatgcagcaacttgttttatgaggccatgataacgttacttcccaaacctgaaaaggacactttgagaatggaacattagatgtcattctttctcatgaacataaatgcaaatatcttaaagaaaatattagcaaatcaaattcaacagtatatttgaatggtaatagaatgttcaagttgggcttattccagaaatgcaagcttgacctatcatttgtatttcaccacattaacataataaaggagaaaacctatggccat

SEQ ID NO: 442034 - DNA, 590 bp, Homo sapiens
cctctcttctcaggcaatcgatttgctgcttgcctgtgatcttgtctctgaacattatacatgggggagatagtgtgggaaaacagaacctggagctgaggcagctgtcttgtgaacacgatgcagcaagcccaaagacaaaagtccaacagacccagggtggcagacagaaaagatggacagaccctgggccctggatgacagcaatgagccactgattcagccctggcaccagctccctctctacttgtaatgtgaaataattctgtgactttttctgttaagtctsgatgctcaattccttgcaattgaaagcaacaaacacacagatgcagcaacttgttttatgaggccatgataacgttacttcccaaacctgaaaaggacactttgagaatggaacattagatgtcattctttctcatgaacataaatgcaaatatcttaaagaaaatattagcaaatcaaattcaacagtatatttgaatggtaatagaatgttcaagttgggcttattccagaaatgcaagcttgacctatcatttgtatttcaccacattaacataataaaggagaaaacctatggccat

SEQ ID NO: 442035 - DNA, 610 bp, Homo sapiens
aaataataatcaaaaaaacttcccaaatttgatgaaatacatgaatatagacatccaagaagctcaatgaatttcaagtatgattaattcaaagaaacccacactaacacactttacaattaaactgtcaaaagccaaagacaaaaagagagttttgaaagcaacagaagatatgcaatttggcacacacaaaggatcctcaataacattattagcagattgctcatcagaaactttggaagccagaaggcagtgggctgatatattcaaagtgttaaaagaaaatagcctgtaaaccaataatcctatacccaggaaaactgtcctataaaagtgagggagaaaattaagacattctcagataaacaaatgctaaggaagtytgttacttctagacactccctgtaagaaatgctgaagggaatcctgcatgttgaaatggaagaacactagacagtaatttgaaggcacatgaagaaattaaaattttagtaaaggaaaatacacaggaaattataaaagctagtattgttgaaacaataatgtgtaacttcacttttctttcatgatataagagactaacacattttaaaaaaagactaaaagttag

SEQ ID NO: 442036 - DNA, 637 bp, Homo sapiens
gactcccctcccctgcctctcagcccatctcacgcttgattctgggctagcctttctaggagaggccagggttcctggagaagaggctggcctgggctgtaacagggcatggggcagtgtcccctcagtggccacagggcctccccaaggaccagggacagtcctggagacagtaactggaccacatcaccccctggtgggtgctccagccctgacgcttgactcacaccaggtggggcctccctaggctgcggaggtcaggatgagaccagggccaggctgtgagctcagcagggctccctcctaatgcagccgagacactctttttcctctacccagaacatcctgctccctcttaaaggccacagcaatcacatgatcctacgtggtttggagtgcacttagggagccctccctccttccccctgcccaggtggagagctccttcctcttctggcccaccgctcaggcctcccgcccctrgtgtactacagttgctggttcttgcatctgtctcgactactgaggtctaagccatgggcacgaagacccgcattttactcgctgctgcccatgctgtctcctggcactgagtggtttctctaaaactgtctagtgaattactccaaattctacc

SEQ ID NO: 442037 - DNA, 555 bp, Homo sapiens
ctcctggatcagcgatgcccttctgtctcctggcacacgcaggccacagccagaggccacccccaccccactggcaagttggcgtctgcaggcagagttcacgggtcactcaatcccaggcctgggcccagcaggggcctgagtggtccttgcccacaaggcggacagccttgaggacccaggagccaggaccatgctgccggggcctgatccccagccttgcgtaacttctggcaacttcttgctctctgcatgcccgtttccttgtctgtaaaatgataggattcaatgaagacacagctggttcaagagatctrttgtacaacgtggtgactctagttagtgacagtgtacacctgcttgaacattgctacataggatcttaagtgttcttatggaatgagaccaccacttctcctgttgtccttcccagcttccccacctccccttttccctagtttataagacagtagaaaagggagaaagcaaaaagttggaaagaaacagaagtaagataaatagctagacgaccttggcgccgccacctggccctgg

SEQ ID NO: 442038 - DNA, 555 bp, Homo sapiens
ctcctggatcagcgatgcccttctgtctcctggcacacgcaggccacagccagaggccacccccaccccactggcaagttggcgtctgcaggcagagttcacgggtcactcaatcccaggcctgggcccagcaggggcctgagtggtccttgcccacaaggcggacagccttgaggacccaggagccaggaccatgctgccggggcctgatccccagccttgcgtaacttctggcaacttcttgctctctgcatgcccgtttccttgtctgtaaaatgataggattcaatgaagacacagctggttcaagagatctgttgtacaacgtggtgactctagttagtgacagtgtacacctgcttgaacattgctrcataggatcttaagtgttcttatggaatgagaccaccacttctcctgttgtccttcccagcttccccacctccccttttccctagtttataagacagtagaaaagggagaaagcaaaaagttggaaagaaacagaagtaagataaatagctagacgaccttggcgccgccacctggccctgg

SEQ ID NO: 442039 - DNA, 666 bp, Homo sapiens
cctgccttatgaccagggaatgggcaaagttgagttctctgcaaggttagatgactggccaaggtcagcactgggcacaccatggaggccagaggacatcatgcrttacaggaaggagaggatggggagcaacaacacaggttaaatcaaagcttctcaaaccttggaggccaaaacttctcctggagggtttgtgacgacagaccctgggccccacccttggggagtcgaatccagcaggtctgggatagggctgagaatgtgcatttccaccaggttcccagggacgctggttctgctggcccaggggccacattttaagtagcaaggggctaaaggatgggtgagtgaatgaatggatgaatgaagaaatgaaggactgacactcagcacggagcccatcacccctgcagcaggtcagtggtgccttggatgagaaatagtgcacttaacacatacaaccacacatggacacagagagatacacgcagacatgcacacatccacacatgtgcagtttcacacacatgttcactcacatgcagagacatatatacagagcctttcagccagactcacagaacacagacacatataaacacaaacacacagacatgaagacacagacacacaaacaatatgcacttgcacacattgagacagagg

SEQ ID NO: 442040 - DNA, 624 bp, Homo sapiens
acttttctgcttattcagatcaacgaggaatttaatgggtatcctatccatttcacttctaggaacaccatgatcaactagctgatgtcatgggtatatgggagtcagactacttgattgctgccttgaccatgccgtccatcagtataaccattctcaccttgtctttggtggtgccaagaatgctgcctcttggtctctgtcaccccaggatgcaaatactcccactgcgtttaggtttcccaactgagtggctgccattttggcccaaagagaagagtgaccacagaggtcttcaaagatgctggggttmcccctcacaaatctatttctcaaaggagttgtaaaaggggagtcttctgggccttcccagtgggggagtagcccttaaataacaaattcactctaacactccaatctcctaaagcctttcaatccttttctctacattaaaccaaagcaggccaggcattttcaattcacttactatgcgtcatcatttgatccatgtttcagccaaccaacgagccaaacggctaaagccctttctaactctctgagctgcaacattaaatgcagaatttttgcttagtgagcctatgtcaataaattcaacttgatcca

SEQ ID NO: 442041 - DNA, 580 bp, Homo sapiens
agccaccaaaccccagagagaagctccagagcccacgttcacacacacagagcgggcccycagcctcagtcctaccatccatgaaatgggaagataactgcaccccgtctccggccctggggaggctgaacagaggtggctcggggaaggcacaggcatggaggcacatggggcatggggtgctctccgccagcctcagccccctgctctgtctagtgcaggcccttctgccgctgtgctggtgacagcccccagcaccctgcccaggcgctgtgatcatttctggtgcttccagcaagggccttcagtcttcggctgtatagggagggtgctgggaggcccccagtctagcagcaaaaaagagatgggaacctgggccccagacacaagcatgcgtcctgcccccactccacaactcctacagcccctccgctgcctcctctgagaataaattacagagccttcctcatgactgaggggggtagggggcggggaagcaacagggaccccaagggtggtgccgtctgagcatctggcctctctccacacccatgcactgaactgcacagaccatagcgct

SEQ ID NO: 442042 - DNA, 580 bp, Homo sapiens
agccaccaaaccccagagagaagctccagagcccacgttcacacacacagagcgggcccccagcctcagtcctaccatccatgaaatgggaagataactgcaccccgtctccggccctggggaggctgaacagaggtggctcggggaaggcacaggcatggaggcacatggggcatggggtgctctccgccagcctcagccccctgctctgtctagtgcaggcccttctgccrctgtgctggtgacagcccccagcaccctgcccaggcgctgtgatcatttctggtgcttccagcaagggccttcagtcttcggctgtatagggagggtgctgggaggcccccagtctagcagcaaaaaagagatgggaacctgggccccagacacaagcatgcgtcctgcccccactccacaactcctacagcccctccgctgcctcctctgagaataaattacagagccttcctcatgactgaggggggtagggggcggggaagcaacagggaccccaagggtggtgccgtctgagcatctggcctctctccacacccatgcactgaactgcacagaccatagcgct

SEQ ID NO: 442043 - DNA, 591 bp, Homo sapiens
ttgtcgggttctttgggagactgaagccacaagaggtaacatgtgcagcattcagtggacaagtttcctgccacatggagaaaactggcttcggtgaggcagaagaacagagccaacattaaaatagaatgagaagacacacagagagaaagagagccaatggcatttccgtttctgtttccagttttgactcatttagttgaagcctagccacattctcacacttgggttctgtaatacattccaggattcttataataaaacctgtgttttatttcactggcttcaattagkatgccatctcccacagcaaaaatgtctaacaagcatatcgaccatattcctgaccagagcaatgtatacagcgcactgatggtgatggtgccagctttaggaccacgtggaaaaagcagagcaattatttcaagagttggggataaataaaggcaaaaagttaaaaaagagagatataaagcagaatttgatttaggggaagtttaggaaaaagacaaaactctgtagtcaggaagagtcttgagagacccagcactgggccacataacatggctaagcccagggcccagggggacc

SEQ ID NO: 442044 - DNA, 519 bp, Homo sapiens
acttgtccacagaaagttgtcttgcctcttgcgaatgtgaaagacgagccatgtcaactctggcaccatcatgccactgcaggtccctgcactgctccctcctcccaagccctcagggcccgctaagtgcacacacggtgcctgctccccatgccacgtggtgctgcccaccaacccagccccgtgcccacatgcagttcctctatgattgacctacccatttttgaaaacctgatgtttaagaaatgtgaaattaaagatttctaaccacttacacaattgtccattctttcacaaataacaaagagatgaccttgygatttgggtttccacagtgccccacaaagaggggggactttcccgttcctccacactctcgtcctgaaagaaatgggcagcccatggccttccaacttccaaatccgtcaaatgaagggaagaggtgtgtccggaattggttccttcaggtgggttcttgatctggctgacttcaagaatgaagccgcagaccctcgcagt

SEQ ID NO: 442045 - DNA, 519 bp, Homo sapiens
acttgtccacagaaagttgtcttgcctcttgcgaatgtgaaagacgagccatgtcaactctggcaccatcatgccactgcaggtccctgcactgctccctcctcccaagccctcagggcccgctaagtgcacacacggtgcctgctccccatgccacgtggtgctgcccaccaacccagccccgtgcccacatgcagttcctctatgattgacctacccatttttgaaaacctgatgtttaagaaatgtgaaattaaagatttctaaccacttacacaattgtccattctttcacaaataacaaagagatgaccttgcgatttgggtttccacagtgccccacaaagaggggggactttcccrttcctccacactctcgtcctgaaagaaatgggcagcccatggccttccaacttccaaatccgtcaaatgaagggaagaggtgtgtccggaattggttccttcaggtgggttcttgatctggctgacttcaagaatgaagccgcagaccctcgcagt

SEQ ID NO: 442046 - DNA, 621 bp, Homo sapiens
tccccttcctgtgtccatgtgttctcattgatcattaaaaagtcaggaaacaacaggtgctggagaggatgtggagaaataggaacacttttacactgttggtggggctgtaaactagttcaaccattgtggaagtcagtgtggcgattcctcagggatcttgaactagaaataccatttgacctagcaatcccattactgggtatatacccaaaggattataaatcatgctgctataaagacatatgcacacgtatgtttattgcagcactattcacaggcctatttacaagaacttagctgagcaccaggccggagacttgtttgcacagcaatgacctggggacccaaggactgccatggacctgccgggagctgcraagcccgcacatgggacacactaggaaaggtggctggtcttaagttctctaccctgctcctcaccagctctatttcatgttagacctcataaaagtggttagcattataattgaaagaacacgtgcaaactattggcttcattatgttgttatcaatctcctggaggcattacatatgacttattgattatttaaagaggaagaacacctcatttctttatatgcacattctcttctggac

SEQ ID NO: 442047 - DNA, 476 bp, Homo sapiens
cgtctgagtttctggttccataaaatgaaatggctggattagtcactaaataatctgtggagttctaaaatgtttagagaccatactagcaactgattgcttgtgttgatctaagtcctgttttccaggttgtttggttggaacagatcaaatgagttctttctactgtatacatgacaccaaaatgacaataaagatgctttkgagccaggtgtggtggcccacgcctataatcccaaccatttgggagtccgagactagaggattgcttgcctcaggagtttcagaccagcctgggtaacatagggagattctgtctctacaaaagattaaaaattagccagatatggtggcatgtgccggtagtgccagctactcggaaggcagaggtgggaggatcatttgagcccagaaggtcgaggctgcactgagacatgatcatgccactgaggtccagcctgggtgacagagcaaga

SEQ ID NO: 442048 - DNA, 301 bp, Homo sapiens
ctgggattacaggcatgagccatcgtgcccagactggatctccttcagaggatgaaaagacaagctacagactgaaaggaaatatttgtaaaccacatttgatgaaggacsagtatctagaatatataaagaactcttaaattttgtaaaagaccaagtgggcgtatttgggtggttctattttgggttctttattctgtttcattgacctatgtgtctgccaatactacaaagtcctgattgttgtagctctataagcagcctaaaaatctggtggaataattcctcccacttcattttt

SEQ ID NO: 442049 - DNA, 434 bp, Homo sapiens
agcttcattgggatgtttcaattgaagtcacagtgttgaacagtccctttcatagagcaggtttgaaacactctttttgtagtatctggaagtgtacatttggagcgctctcaggactgcggtgaaaaaggaaatatcttccaataaaagctagatagaagcaatgtcagaaactttttcatgatgtatctactcagctaacagagttgaacctttcttttgagagagcagttttgaaacactctttttgtggaatctgsaagtggatatttgtctagctttgaggatttcgttggaaacgggattacatataaaaagcagacagcagcattcccacaaacttctttgcgatgtttgcattcaagtcacagagttgaacattccctttcatagagcaggtttgaaacactctttttgtagtatctggatgtgga

SEQ ID NO: 442050 - DNA, 434 bp, Homo sapiens
agcttcattgggatgtttcaattgaagtcacagtgttgaacagtccctttcatagagcaggtttgaaacactctttttgtagtatctggaagtgtacatttggagcgctctcaggactgcggtgaaaaaggaaatatcttccaataaaagctagatagaagcaatgtcagaaactttttcatgatgtatctactcagctaacagagttgaacctttcttttgagagagcagttttgaaacactctttttgtggaatctgcaagtggatatttgtctagctttgaggatttcgttggaaacgggattacatataaaaagcagacagcagcattcccasaaacttctttgcgatgtttgcattcaagtcacagagttgaacattccctttcatagagcaggtttgaaacactctttttgtagtatctggatgtgga

SEQ ID NO: 442051 - DNA, 434 bp, Homo sapiens
agcttcattgggatgtttcaattgaagtcacagtgttgaacagtccctttcatagagcaggtttgaaacactctttttgtagtatctggaagtgtacatttggagcgctctcaggactgcggtgaaaaaggaaatatcttccaataaaagctagatagaagcaatgtcagaaactttttcatgatgtatctactcagctaacagagttgaacctttcttttgagagagcagttttgaaacactctttttgtggaatctgcaagtggatatttgtctagctttgaggatttcgttggaaacgggattacatataaaaagcagacagcagcattcccacwaacttctttgcgatgtttgcattcaagtcacagagttgaacattccctttcatagagcaggtttgaaacactctttttgtagtatctggatgtgga

SEQ ID NO: 442052 - DNA, 434 bp, Homo sapiens
agcttcattgggatgtttcaattgaagtcacagtgttgaacagtccctttcatagagcaggtttgaaacactctttttgtagtatctggaagtgtacatttggagcgctctcaggactgcggtgaaaaaggaaatatcttccaataaaagctagatagaagcaatgtcagaaactttttcatgatgtatctactcagctaacagagttgaacctttcttttgagagagcagttttgaaacactctttttgtggaatctgcaagtggatatttgtctagctttgaggatttcgttggaaacgggattacatataaaaagcagacagcagcattcccacaaacttctttgcgaygtttgcattcaagtcacagagttgaacattccctttcatagagcaggtttgaaacactctttttgtagtatctggatgtgga

SEQ ID NO: 442053 - DNA, 521 bp, Homo sapiens
tgaaaactagacagaagcattctcagaatcttatttgtgatgtgcgccctcaactaacagtgttgaaactttcttttgrtagagcagttttgaaacactcttttcgtaaaatctgcaagaggatattttgatagctttgaggattcgtggaaacgggttgtcttcatataaaaagcagacagaagcattctcagaagcttcattgggatgtttcaattgaagtcacagtgttgaacagtccctttcatagagcaggtttgaaacactctttttgtagtatctggatgtggacatttggagcgctttcaggcctatggtttaaaaggaaatatcttcccctgaaaactagacagaagcattctcagaaacttatttgtgatgtgcgccctcaactaacagtgttgaagcattcttttgatagagcagttttgaaaaactctttttgtggaatctgcaagtggatatttgtctagctttgaggatttcgttggtaacgggattacatataaaaagcagacagc

SEQ ID NO: 442054 - DNA, 521 bp, Homo sapiens
tgaaaactagacagaagcattctcagaatcttatttgtgatgtgcgccctcaactaacagtgttgaaactttcttttgatagagcagttttgaaacactcttttcgtaaaatctgcaagaggatattttgatagctttgaggattcgtggaaacgggttgtcttcatataaaaagcagacagaagcattctcagaagcttcattgggatgtttcaattgaagtcacagtgttgaacagtccctttcatagagcaggtttgaaacactctttttgtagtatctggatgtggacatttggagcgctttcaggcctatggtttaaaaggaaatatcttcccctgaaaactagacagaagcattctcagaaacttatttgtgatgtgcgccctcaactaacagtgttgaagcattcttttgatagagcagttttgaaamactctttttgtggaatctgcaagtggatatttgtctagctttgaggatttcgttggtaacgggattacatataaaaagcagacagc

SEQ ID NO: 442055 - DNA, 347 bp, Homo sapiens
aactaacagtgttgaacctttcttttgatagagcagttttgaaacactctttttgtaatatctgcaagaggatatttkgatagctttgaggatttcgttggaaacgggattgtcttcatataaactctagacagaagcattctcagaagcttcattgggatgtttcaattgaagtcacagtgttgaacagtccctttcatagagcaggtttgaaacactctttttgtagtatctggaagtggacatttggagagatctcaggaatacggtgataaaggaaatatcttccaataaaagctagatagaagcaatgtcagaaactttttcatgatgtatctactcagcta

SEQ ID NO: 442056 - DNA, 347 bp, Homo sapiens
aactaacagtgttgaacctttcttttgatagagcagttttgaaacactctttttgtaatatctgcaagaggatatttggatagctttgaggatttcgttggaaacgggattgtcttcatataaactctagacagaagcattctcagaagcttcattgggatgtttcaattgaagtcacagtgttgaacagtccctttcatagagcaggtttgaaacactctttttgtagtatctggaagtggacatttggagagatctcaggaatacggtgawaaaggaaatatcttccaataaaagctagatagaagcaatgtcagaaactttttcatgatgtatctactcagcta

SEQ ID NO: 442057 - DNA, 600 bp, Homo sapiens
tgatttttaaatgttgaattaaccttgtatttctgagataaatactagttgattatgacgtattagctttattatatattgttggactctasttactgatatttgacttaaaagtttgcgtttttcatgagtgatttggttcatggttttcttttttttcaatgtctttgtcatgttttgatattatggttatactggctactaaaatgagttatgaagtgttcccttctctattttctgaaatactttgtgtgagattattatttcttttaatgtttcatggaattaaccaagaaagccatttggacctagaattttcttgacaggaaggatttaatgacaaacttaatattttaaatagatgtagagctattcagattttttgtttcatcttttgccagacatagtaagttgtacttttcaaggaattttgtctatttcctctatgttgtccaatttaatcctgttgtggtctgagagcatactctttatgatttcagcatatggtctacctaggggaatgttttgtgtgtccctgcaaagaatgtatgttcagttgttgatgggtacagtgttctataatctataactcaggttggt

SEQ ID NO: 442058 - DNA, 561 bp, Homo sapiens
cttttattatatttcaagctagttggttgctctgtaatcttagctctctgatgggttcgagaaaacttatgtttttgcagattacccagctttgttcttgttataaagatgggagcagtgttctttccagatgtctacatgctaggcagaaactagaagtctggacagtctccatkgtctcctactatcagaatatgtgcccttttcagtgtgactttgccacttcacccatcaagaggtagaatctatttcttcaacccctgcaactgagcttggctattttgttggccaatgggacattaacaagtatgatacaagcagaggcttgagaagtgcctgcacaatgaggcttgcccacttttgcagctctttggaatcctgaacccatgtgtggaaaagcctgaagtgtgctgttggaaaatgagagcgatcacatggagcagtaatggagcaaagaccagccatcccagttgagataccctacaccaaccagattttcaactgctggacatatgaatgaagctatcctaggcatgcagtcttggtcaaggcaactttggc

SEQ ID NO: 442059 - DNA, 561 bp, Homo sapiens
cttttattatatttcaagctagttggttgctctgtaatcttagctctctgatgggttcgagaaaacttatgtttttgcagattacccagctttgttcttgttataaagatgggagcagtgttctttccagatgtctacatgctaggcagaaactagaagtctggacagtctccattgtctcctactatcagaatatgtgcccttttcagtgtgactttgccacttcacccatcaagaggtagaatctatttcttcaacccctgcaactgagcttggctattttgttggccaatgggacattaacaagtatgatacaagcagaggcttgagaagtgcctgcacaatgaggcttgcccacttttgcagctctttggaatcctgaacccatgtgtggaaaagcctgaastgtgctgttggaaaatgagagcgatcacatggagcagtaatggagcaaagaccagccatcccagttgagataccctacaccaaccagattttcaactgctggacatatgaatgaagctatcctaggcatgcagtcttggtcaaggcaactttggc

SEQ ID NO: 442060 - DNA, 509 bp, Homo sapiens
tctagtctcatctttgggtatttgtctcctttgcttttgtgatttttaaaattaacttgtaagaacaacttacatattaagaatgttcatttttcttggaactttctgaggtctagagcccaaattattattattattattattattattattattattattactactactactactattattattattattattttagatggagtctccctctatcgcctaggctggagtgcagtggtgccatctcagctcactgcaacctctgcctcctgggttcaagtgattctcctgcctcagcctcctgagtagctgggattacaggcatgcttctctcctggctaattttgtatttttagtagagacaggttttctccatgttggtcaggctggtctcaaactcccgatctcgggtgatccgcctgccttggcttcccaaagagctgggattacaggygtgagccaccgcacccggccattatttttattatgttactgtttttcagattgtt

SEQ ID NO: 442061 - DNA, 610 bp, Homo sapiens
aagggttaagtaagatactgggtataaaagtttcaggcacacagcaggtgcctagaaaatgctagttctgcagctatccataagggagtcttgaggacctcctccagtgggaaactttggcgaccttgaggccgattgtaccacttgagggcagtgtcctactgttgggaaattaaacctatgtaggcttggacctggattagaaaacctttaaggaaccttctgtccctgagactccatgctcagccaaccagcaaatatatagtgtgtaccacataacgtatgcaaggcattgtgggagatatagaaagctattcatatctcctcattcaggtctcagttcaattgccacctcctcaggaaccttctccaatcatccaggctaacattgccactcccccaactctaatcattatttaggtcatttcttgttttattttcgtcataacacttatcatagtctaaagttgtcattttcttcatgtatttactctttgaatctggggccagatttcaaagggctttgaattacataaaaaagttcaaaagttaacctgtatcactgragagctttagaaggatttaaggctaggagtggatatggttagag

SEQ ID NO: 442062 - DNA, 583 bp, Homo sapiens
aattaattactgactttctttcaccgtctggcaagtgccatctaataccttctattgatcattccccacagccccctgcttgggcaagggtaacatcatygtcttcagacctgacaaccagagttaaataatttgtctgtcctctatctgcctgttattgaggatgacagtgagtgagctcctgcttccgtgagcactgttttaactccccaaggcccctggctgctccttcagcttttatcgctgcttaaagatgaaggaagagacgctatcagctaaggacccttcataatcctggatgatatatcctaggtaatgtctgcttacctacagacattgcacctacagtgcaagagagcacattggccacccaaaagttcgccagaacctgtcccatgggtgcaaggagcttggaacaagaaggaaacggggtaactcaagatgttagttagtttcatgggtcacgtgtctctaggaagagagaagcctctggatctggatgggcttttcaattccaacttccataaaacacacgtactcctttctttaaggaaaactcaacttgtcttcggccttaggactc

SEQ ID NO: 442063 - DNA, 631 bp, Homo sapiens
caatggttggaaatatttggggtttactttgaattttaagtgttaagatatgtcttcctactggttatttagtagagaaagcacttcaggctattacacatatcatgacagcagaaccaagaagcattggcagccagtcttaaacatttaacacttcttgagagtcttgtaagagagcataatccctcatttcctatgtttagtcggctctctgtatctgaggattccacatctgtgaattcaaccaactgtggataaaaaatattccaaaaaactcaaacagtacaacaataacaaataacacaaataaaaatacaatrtaccaactatttatatagcatttacattgtattaggtattataagtaacctagagatgatttaaagtacatgggaggatgtgcatacgttatatgcaaatacgatgccgttttatatcagggagttgagtatctgcaggaagttgagtattggtcctggaaccaatccccggtggatacttagggacaactgtatgtcttgtctctcacctagattgtaaaatccttgggggtgggaaccatgtcttatgtgataacaccttacctatcaggaatagctgtctggcagcatcaccgttctgcaacacacca

SEQ ID NO: 442064 - DNA, 564 bp, Homo sapiens
atgccaacagaacacactcaacatactggataaactgggcattacctctgccatagcttcaattttttttaaatatggttttctataaatattctgaaatggttgggggaaaaaaatacaagatagtttcagagaaataaagaaggtaaagaatactagcgaaataggaactggacaattccaattattattcacccaacgggttaataaatcatgcagttttattggtcctaaggatgcctagactaattattgaactatgaatggagacaagcacacattgtgaaataatgtatttggtcttcatccgtttccaacaatgcaactcctaaaatcctgggactcttccaagtgaaaagtgtctttctgcatgttaatgagttgactgatagctggcagtcaccagaaagaccacggcaggattagagggcttgggactttcagccacaacccccaacctcaggggaggggagaagggctgaaggtcgagttgayaagcaatggccaatgatgtaatcaatcttgcctatttaatgaagcctccataaaaacccaaaaggacag

SEQ ID NO: 442065 - DNA, 440 bp, Homo sapiens
ccatcatgtactgttttctttcagtgaatggaaaatgttaacagtaagaggagtttctaggcagaaattcaaaagaaggtggcagaagtttttttataccaatatgcagctgtagggccatatagatatctagcactgaaaagtaaaaaaaaaaaacaaaaaaaaamcaacttattttctgagcagtttctcatgcacttctttctttcaatgaatcaaagattttaacaccaagaggtgtttgtaggtaaatagaagaagactgtagaagtttctttccccatgtgcacatatagggccaaacagatatccggttatgaaatgttaaaacaaccttcctttctgaacagttcatcatgtactgttttctttcagtgaaaaaatcaaagacaaaaacaaacaaacaaccagtcttaacacctagggtagaaactgctttg

SEQ ID NO: 442066 - DNA, 547 bp, Homo sapiens
ctcacaagagtgaagcctacttgactgtggtcaattaactttttgatctgctgttggatttggtttgctagtatttggttgaagatttttgtgtctatgctcatcagggatattggtctgtgattttctttgttcactaagcctctgccaggttttgatatcagggtgatgctggyttcttagaatgagttagggaggagttcctcctcctcaatattgtggaatagtttcagtagaattggtaccaggtcttctttatatctggtagaattcagctatgaatccatctggcccatggctttttttggttggtaggttttttttttttaattactgattcaatttcagaactggatattggtctgttcagggttttgaattcttcctgattcaatcttgcgtgagtgagtgtttctaggagtttattcatctcctctagattttctggtttgtgtgcacagaggtattcataatagtctctgaggatcttttgtagttctgtgggatttctgtaatgtcacctttgtcatttctgactgtgcttatt

SEQ ID NO: 442067 - DNA, 587 bp, Homo sapiens
ctcccaagtagctgggactacaggcatctgccaactcgcccggctaattttctgtgtttttagcaaagacggggtttcaccatgttagcaaggatggtctgatctcctgacctcgtgatctgcccgccttggactcccaaagtgctgggattacaggcaggagccaccgcgcctggctgagatctttctaactttttgagagagttgtttagtgctataaacttccctcttaacactgcttttgctgtatctagatattttggtattttgtatctcctttcatttatttcaaataccttttgacttctgccttaatttcatcatttacccagaagtcatccaggagcaagtcttttaatttttatttaattgtatggttttgagagaacttctcaattttgatttctatttttatttctctgtggwctgagagaatggttggtatgatttaaatttgttttgaatttattgaggcttgtttaatgaccaagcatgtggtcattcttggagtatattccatatgcaaagaagaatgtacattctgtggttgatgagtggggtattctgtagatgtctgctaggtccaa

SEQ ID NO: 442068 - DNA, 544 bp, Homo sapiens
taacaagattgctatagaaaatgttgctgttagctttgcaggtgaaccctgcaggggcaacttagggaataggtgcttaactccataggttctctcagtgaaggctttctgctgcagatccctcctgaggcctcttggtacacccttacctcctacattaaccatacatctcaattttctttccctttcacagaccccctgccattgtttcaggtccttacccagaggccatcagcatcaatagattcttgttgtttagtgatcatgcagtcagttgaagtctctgtgtcctcagtggatgaccagcataaataacaatayttgagaatgataactctgcaaacatcttcagctaaagatgggactccctcaccttaaagcaagatcaggtgccaagatctgtagttcccaaatgatacaaattagtcatcaccttccttatccacacattttgcaatgggagtaaaaacactaccttggcaggaatgaatggctggggtttttattagggaagcctggtccaattagatgttcagccacctca

SEQ ID NO: 442069 - DNA, 618 bp, Homo sapiens
agttgaacaaaaattatatttttaagtccatatgtactgttatgtaacaatactaaaacacttattcagctggccatccactaaactgagaaagtctcaaagtcacttcctagttacacacccttccttctgaagaagaaaaaaacttcagcccacagacgggagctgggcagagcatgggagccatcccttgcttgtgaatgtgttattgtggggtgcgttgtgggaccacaggattttattccacagagtttagctttactgtggaaacaagctaaggaagaaaggaagggatactaggttatcttgttcacagtgtctgctgaaattctcccttaagtcttccccktctcccggccaaccctattccaggcattcctgttgtttcttttgtcttgttgtgtttaaataagaaacccaactacagaactatagacctaactttataaagatgaaggtgccacaactgacatcagaaatagattgttttggggtatgacttcatggtgtgaggccatgagccagcttttcagaggtgcctttgtgagggttttgcattctttgctactctttgagtccacccaataagaaaatttgcgttatcaccctatggaatat

SEQ ID NO: 442070 - DNA, 294 bp, Homo sapiens
ggtaacattcagggcttccacctggcagacagagactcaggccccacgcttcctcttgccaacctggtactggggtatgccctcgtggtcattgcgtttctggtaccccattgcccttcttactattgggtcttygtcaaaatcgcttattctgtctagacaggtttccatcacttttcgggaaaggggtgaggattttgatagatttttccaagaaggccccagaatctctaggcaatatgtgtcaccctccctagagctctgcatagcaagggatattgattgggacaggca

SEQ ID NO: 442071 - DNA, 623 bp, Homo sapiens
agtgaatcttggtatttgtggaacagaccaacagaatgatcgatgagcaaaaaatatacactggaaataattrttaaagttggtattgttttccatttcaaattttagagttttagtgacgggatagggtagattatctctgctaatttttgtgtttgtatgtgcaaagatgataagcattcacttagagtctccaattcaagcaattctccattttagaaggagactatagagttgcttgtatactttctgagcaagaagaagaaatcttttttatttctatcatcattcttaagtgagaaaaatgtcagcatttttaggattgtcatagcttcctgatatgtcatagaaaaagagggaagattacaaaggagcaacttagcacttatcttgctgtctcttccaaagtaatgcttctcacattaaaaagaggtagtttcagaagatataagtaaaatctacttttaaaaatgtacatactccatctgataacacttgtattttctagacacacctacaagaaatatagtctcattttttatattatttcttgaccaatcacattattacccaggttgaccatttcttgatctaaatgttttggttgctggtaattcccaaat

SEQ ID NO: 442072 - DNA, 623 bp, Homo sapiens
agtgaatcttggtatttgtggaacagaccaacagaatgatcgatgagcaaaaaatatacactggaaataattgttaaagttggtattgttttccatttcaaattttagagttttagtgacgggatagggtagattatctctgctaatttttgtgtttgtatgtgcaaagatgataagcattcacttagagtctccaattcaagcaattctccattttagaaggagactatagagtkgcttgtatactttctgagcaagaagaagaaatcttttttatttctatcatcattcttaagtgagaaaaatgtcagcatttttaggattgtcatagcttcctgatatgtcatagaaaaagagggaagattacaaaggagcaacttagcacttatcttgctgtctcttccaaagtaatgcttctcacattaaaaagaggtagtttcagaagatataagtaaaatctacttttaaaaatgtacatactccatctgataacacttgtattttctagacacacctacaagaaatatagtctcattttttatattatttcttgaccaatcacattattacccaggttgaccatttcttgatctaaatgttttggttgctggtaattcccaaat

SEQ ID NO: 442073 - DNA, 499 bp, Homo sapiens
caatctacccatctgacaaatggctaatatccagaatctacaaggaacttaaacaaatttacaagaaaaaaacaaacaacccatcaaaaagttggcaaaagatatgaacaaacatttttcaaaagaaggccaaattttttaattgtaggtttatactctagtcagctgaaaagcttttagaggtaatctagcacttcatccaatatgaagtctagatttaccatgagatatggatctggactatatctgtgtttatcttacgacaatgtaatataatttcttttctttttctttttctttttttttttttcaracagggtctcacactgctgcccaggctggagtgcagctcactgcaacctccacttcctgggctcaacctatcctccagcctcagcctccaaagtggctgggaccacagatgcatgccaccactcccagtaaatttgtttttcttagagatgggggtttgccatgttgcccaggctggtcttgaact

SEQ ID NO: 442074 - DNA, 553 bp, Homo sapiens
aacttagtggagtatttcctggatgaggaaaaaggcctggaaagggaacaggattttctacagaatatagactttccccacaagagacagctytgcagggacatttcaagatatggccaagaaacatatttagggttaaaatatttggattttcttccttatctgtcatgtgaagttacgccagagtaaggttggaaagagccgagttacacagggttagtaagacccctccaatgaggctttgtggtttgtagggtgacctccccaggccccttaggtaggaatttgggcaggagaagaaaaaggtcagagtttagtcctcaaggcacagacttatgttcttgaccctccttccatctggtggtacattcaggctaatggaaaaatcctacgtattccacgttcggtccgtcctccctcctcctgcctaaagggttctagatgtgtgtagtgatacagctgggatggttatttcttcaggaagcgtcatcctgttcttcttcttcctgtttatcctcctcttcctgcccaaatttctgcttctcacactgga

SEQ ID NO: 442075 - DNA, 553 bp, Homo sapiens
aacttagtggagtatttcctggatgaggaaaaaggcctggaaagggaacaggattttctacagaatatagactttccccacaagagacagctttgcagggacatttcaagatatggccaagaaacatatttagggttaaaatatttggattttcttccttatctgtcatgtgaagttacgccagagtaaggttggaaagagccgagttacacagggttagtaagacccctccaatgaggctttgtggtttgtagggtgacctccccaggccccttaggtaggaatttgggcaggagaagaaaaaggtcagagtttagtcctcaaggcacagacttatgttcttgaccctccttccatctggtggtacattcaggctaatggaaaaatcctacgtattccacgttyggtccgtcctccctcctcctgcctaaagggttctagatgtgtgtagtgatacagctgggatggttatttcttcaggaagcgtcatcctgttcttcttcttcctgtttatcctcctcttcctgcccaaatttctgcttctcacactgga

SEQ ID NO: 442076 - DNA, 464 bp, Homo sapiens
accccagggacttgaaaaccggatttgaaatgccaaataggtttagaattagagctacagaatgtcttcctcagagcccagacttcccgaggggtcctgtcaggcacagacagggctaycacaaaggaaaaagggacacattacattacattacatgaacctcagtcacttgttttcactgacatatacctgagtgagggcgggaagcaagcccagggttggggaaggtttgacaacatggtgtctagaatttatgccaattgcagtcagtagccgaagaggacaatgccacagagaagcagccaaaggccaactcgggtgtccccagggcccgtgaggccagcgcacgtgagactggttcatcagttaccatcaaagctgcacggtgggtgcatgaggctgcagcaccacaactccatggccaaaatggcgctgctgggatcatgaggacccacggcctgccc

SEQ ID NO: 442077 - DNA, 510 bp, Homo sapiens
tccttggagaataaaagaagttggcatgcataaaagagagtaggactgcctgacatatgacactcagttgaatttagtttgaatttcagtggagtcctgctgagaaaataagactacatgaattacctagaaaacattaccaggcaatccaccattcactgtgagattgtgtaataagcgatgttcttaaggaagtccatgagcacaagaagatgcttgctttgggagaattccagtgcctttacttcctctttagttcctatcactggccttttattgataagtattagtttgagatttcaaaacccaatctcatgtttcaaggtacagatgtaactgtacatttgatactcaaaagccgargatgaggtctcaggatcagcaaaactggccacctgccttgagagtggctcctaccccctgcaggctccccgtgagctcagatggtgccttcaaatcctttgtagaggctgggggaggggaaggaggagcacatttgttaatgagggg

SEQ ID NO: 442078 - DNA, 569 bp, Homo sapiens
aaataaatcactgttaaagccaccatgactcaaggtggtagataactggggcagttttctactctcattgtgcgcacaaaacttctgaagtaatgaacatgtttttaaaaaacaaaacaaattaaaataaaagygtcatttgttggtttttacaaaaccctccccaggaaagcctagagttagcacaggtgctgagagtggagggacaggaagaagaaacctacaacaatgacagctggcaggcagccacaggctcacacccattgcaaaaacatagactaccgagcccagcagtgcttggatctgtgttatgtggtttggatctatatctttttcttcataaaaaagttaaaaaaggctacttaacaaattacatcagcaaattctctagtagggacaaaaacacattttataggaggaagtacaagctgtgctgacaccttgaattttggagtttacgaagatgtcaaatggtgtatccttcaatgctcactgtatatgctaatacatttgggcatggggagtcactctgtgttattctaccccataaagtagctggcctgaaaatt

SEQ ID NO: 442079 - DNA, 630 bp, Homo sapiens
agttttctactctcattgtgcgcacaaaacttctgaagtaatgaacatgtttttaaaaaacaaaacaaattaaaataaaagcgtcatttgttggtttttacaaaaccctccccaggaaagcctagagttagcacaggtgctgagagtggagggacaggaagaagaaacctacaacaatgacagctggcaggcagccacaggctcacacccattgcaaaaacatagactaccgagcccagcagtgcttggatctgtgttatgtggtttggatctatatctttttcttcataaaaaagttaaaaaaggctacttaacaaattacatcagcaaattctctagtagggacaaaaacacattttataggaggaagtacaagctgtgctgacaccttgaattttggagtttacgaagatgtcaaatggtgtatccttcaatgctcactgtatatgctaatacatttgggcatggggagtcactctgtgttatyctaccccataaagtagctggcctgaaaattactctcccaaatagccaggagaacacctgttataaattatttttcagatacgaatcattttttcagatagttactatgtacagcacacaagctacagaaataggttaaagtat

SEQ ID NO: 442080 - DNA, 519 bp, Homo sapiens
aatatgacatggtgtttggctttctttgggctatatttgtgcaaatatgttattgacacatatttcaaaattatgtaaaacacctataattctaatatgacttartataagttatcagtaataattataattattatgttaaatgactgtgtgccacagaggtaacaaatttccttgccaattgtgtctttaactgtggctgccctaaaatgttttgtcatccacaggcaattgttgtctcatttggtcctctttttttctttttttttttttttggagatggagtttcactcttgtactcttgtcgcccaggctggagtgcaatgacacgatcttggctgactgcaacctctgcctcccgggttcaagcaattctcctgcctcagcctcctgagcagatgggattacaggtgtgtgccaccatgctcggctaatttttgtattattagtagagacggggtttcaccatggtggctaggctggtctcgaactcctcacctcaggtgatccactcacctc

SEQ ID NO: 442081 - DNA, 519 bp, Homo sapiens
aatatgacatggtgtttggctttctttgggctatatttgtgcaaatatgttattgacacatatttcaaaattatgtaaaacacctataattctaatatgacttagtataagttatcagtaataattataattattatgttaaatgactgtgtgccacagaggtaacaaatttccttgccaattgtgtctttaactgtggctgccctaaaatgttttgtcatccacaggcaaytgttgtctcatttggtcctctttttttctttttttttttttttggagatggagtttcactcttgtactcttgtcgcccaggctggagtgcaatgacacgatcttggctgactgcaacctctgcctcccgggttcaagcaattctcctgcctcagcctcctgagcagatgggattacaggtgtgtgccaccatgctcggctaatttttgtattattagtagagacggggtttcaccatggtggctaggctggtctcgaactcctcacctcaggtgatccactcacctc

SEQ ID NO: 442082 - DNA, 519 bp, Homo sapiens
aatatgacatggtgtttggctttctttgggctatatttgtgcaaatatgttattgacacatatttcaaaattatgtaaaacacctataattctaatatgacttagtataagttatcagtaataattataattattatgttaaatgactgtgtgccacagaggtaacaaatttccttgccaattgtgtctttaactgtggctgccctaaaatgttttgtcatccacaggcaattgttgtctcatttggtcctctttttttctttttttttttttttggagatggagtttcactcttgtactcttgtcrcccaggctggagtgcaatgacacgatcttggctgactgcaacctctgcctcccgggttcaagcaattctcctgcctcagcctcctgagcagatgggattacaggtgtgtgccaccatgctcggctaatttttgtattattagtagagacggggtttcaccatggtggctaggctggtctcgaactcctcacctcaggtgatccactcacctc

SEQ ID NO: 442083 - DNA, 519 bp, Homo sapiens
aatatgacatggtgtttggctttctttgggctatatttgtgcaaatatgttattgacacatatttcaaaattatgtaaaacacctataattctaatatgacttagtataagttatcagtaataattataattattatgttaaatgactgtgtgccacagaggtaacaaatttccttgccaattgtgtctttaactgtggctgccctaaaatgttttgtcatccacaggcaattgttgtctcatttggtcctctttttttctttttttttttttttggagatggagtttcactcttgtactcttgtcgcccaggctggagtgcaatgacacgatcttggctgactgcaacctctgcctcccgggttcaagcrattctcctgcctcagcctcctgagcagatgggattacaggtgtgtgccaccatgctcggctaatttttgtattattagtagagacggggtttcaccatggtggctaggctggtctcgaactcctcacctcaggtgatccactcacctc

SEQ ID NO: 442084 - DNA, 630 bp, Homo sapiens
ggatctgcagtggacctccagcaaactgcagcagacctacagaagagggccctgactgttagaagaaaagctaacagaaagcaacaacatcaatatcaacaaaaaggacccccacacaaaaaccccacccaaaggtcatcagccttacagatcaaaggtagctaaatccatgaatatgaggaaaaagcagcacaaagtgctggaaattccaaaacctagaatgcctcttctccaaatgaycacaactcctctccagcaagggcacaaaactggacagagaatgagactgatgaattgacagaagtaggcttcagaaggtgggtaataacaagctcctctgagctaaaggagcgtgttctaacccaattcaaggaagctaagaaccttgataaaaggttacaggaactgctaactacaataaccaatttagaggggaacttaaatgacctgatggagctgaaaaacacagcaggagaacttcatgaagcacacacaagtatcaatagccaaatggatcaagcagaagaaaggatatcagagattgaagatcaacttactgaaataaggcgtgtagacaagaatagaggaaaaagaatgaaaaggaactaacaaagcctccaagaaataagg

SEQ ID NO: 442085 - DNA, 630 bp, Homo sapiens
ggatctgcagtggacctccagcaaactgcagcagacctacagaagagggccctgactgttagaagaaaagctaacagaaagcaacaacatcaatatcaacaaaaaggacccccacacaaaaaccccacccaaaggtcatcagccttacagatcaaaggtagctaaatccatgaatatgaggaaaaagcagcacaaagtgctggaaattccaaaacctagaatgcctcttctccaaatgaccacaactcctctccagcaagggcacaaaactggacagagaatgagactgatgaattgacagaagtaggcttcagaaggtgggtaataacaagctcctctgagctaaagragcgtgttctaacccaattcaaggaagctaagaaccttgataaaaggttacaggaactgctaactacaataaccaatttagaggggaacttaaatgacctgatggagctgaaaaacacagcaggagaacttcatgaagcacacacaagtatcaatagccaaatggatcaagcagaagaaaggatatcagagattgaagatcaacttactgaaataaggcgtgtagacaagaatagaggaaaaagaatgaaaaggaactaacaaagcctccaagaaataagg

SEQ ID NO: 442086 - DNA, 630 bp, Homo sapiens
ggatctgcagtggacctccagcaaactgcagcagacctacagaagagggccctgactgttagaagaaaagctaacagaaagcaacaacatcaatatcaacaaaaaggacccccacacaaaaaccccacccaaaggtcatcagccttacagatcaaaggtagctaaatccatgaatatgaggaaaaagcagcacaaagtgctggaaattccaaaacctagaatgcctcttctccaaatgaccacaactcctctccagcaagggcacaaaactggacagagaatgagactgatgaattgacagaagtaggcttcagaaggtgggtaataacaagctcctctgagctaaaggagcgtgttctaacccaattcaaggaagctaagaacctygataaaaggttacaggaactgctaactacaataaccaatttagaggggaacttaaatgacctgatggagctgaaaaacacagcaggagaacttcatgaagcacacacaagtatcaatagccaaatggatcaagcagaagaaaggatatcagagattgaagatcaacttactgaaataaggcgtgtagacaagaatagaggaaaaagaatgaaaaggaactaacaaagcctccaagaaataagg

SEQ ID NO: 442087 - DNA, 598 bp, Homo sapiens
atttggctgtgaagctggaacagactcaagtaccttgacaaaggccagacacctcagtgctttggagctctcctgcgggttagctatctcggcatcacggctttcactggggtgaggtagcratgagtcactgactaaacagacccaggctaggcgggtgctacagaggccccaagcccaggcgtggacggccctcatctcaggagggtgcacactcctggtctcattagcagaccttgctcacacacgttcagagaatcacgttccaatgagatcattgcagttagcaaagatcacagtcaccaaacagccgtaacaacccatcagagaagagtgtccactacactcgctccatgttttttggccggggacccacatgaaaatccccttacattttgggacctagaaaacgaatctctttcttgatgctggcaggcctcttttcatcaaaactgactattttataatttgcatttatttttctgccgtggctgccagcaagctcagggctaatcttagaatgcaatagtaactgcagatgggcaacagatctgggtcagcggcaccctccctgtctcttcattatatgctcttaacg

SEQ ID NO: 442088 - DNA, 501 bp, Homo sapiens
atgtgtgacatcagacttttcagggatagtgcccagaaagctcagaaactttgcttaacaaactcttccaggtgattctgatattagctaaatctgaaaaccacagaattaaatgatgttagtttttttccctcgaaatttaagtttcatactgacccttgaactacttatactgaaaacatttcaaacattgatagttcattgatactagcaactgatctgaaattattactttgcctaaaaaaaackgacaatttcagaatattatcattccttagtagtttgcatttatgacattagatagttccaactccttcctccactttgtgcaaatgatttcatgtatcttatttctacatctgtcataaaccctgtttactatttttaatttagttaacaattttttttttttttttgagacagggtctcactctgttgctcaggctggagtgcagtggtgcagtcatgcctgactgcaacctcaccctcctgggctcaacc

SEQ ID NO: 442089 - DNA, 523 bp, Homo sapiens
ttacctgctagaattgagcataaagctttgagtatagtttaaattagctactttagggttgactaggaaaggcaaagtttgccttatactgcacagtagtttgttccaagtatgttcttcttgtagcttaataaagacagcaagtttaggagtcctagggagaggttaagaggcgcaaataaataaaagggcagaccaactacaacttgcagtggtctttaaatgtggcccaattttgagtgttagaaacaataggaaacaaacaaaaaagccacagagaccccagaatgagaatgttgtataaagacagaaaccacatcttttggtcatatgtgcctcaaacttgtgcagcatctgacctaaagcagtcatttagtgaggaaacagtcaataaatcaaagaactagacagggaggctgagcagcatagaaccttctaataaacctaagcacatcacagtcttgcttaaaaccttcacrgtttcccatcaccaagtaacagaattcaaattctatagttgggc

SEQ ID NO: 442090 - DNA, 575 bp, Homo sapiens
ttaaacctcttgaacaaacctctgctatcaaacttttcttctgcagcttccttacctcttgcagccttcataggattgagaagagttagggccttgctctggcttaggctttgacttaagaaaatgttgtggctggtttgatcttctatccagatcactcaaattttctccttattagcaataaggctattttacttttttttttaatcattcatgtatgtatttgcaggagaaggacttttaatttctttcagttttcctttgcattcacagcttggctaactgtttggagcaacaacmctcgctttcaacctgtctcagccttcaacacatcttcctaaaattaattatttctagcttttgctgtacaatgagagactagtgactcttcctttcacttaagcatgtagaggccattatagggttattaatttgactaattttaatattgttgtgtctcagagaagagggaggcctgaagagtaggagagagatggggaacagccagtctgtggagcactcaagaaaacacacatgtactgattatgtttgccattgtatacaggtgcagttca

SEQ ID NO: 442091 - DNA, 525 bp, Homo sapiens
ctcagggagaacctatttaaataagccctcttagcaagatctttcagaattaaaattacaccacaagcaatacttcatctaatatgtttccttctatagaattttattatgcctaaaataatgtttttgctgaattccattatgataaaattgttgatttgaggtgactttgatagtaaagaaattgtgtgttaaaagatcatcaaattatccttagtctttttaattgtagtgtctctgaatttgtaccattgcagctccttcctgcttccaatctacatacatagtgagaaaaacctaagggcattattctcagcttcattgcaaagaragaataagaagaaaaattgctgctggatatactaggtttcctaggcttctagtaaactagaacattatgctctttcttagtcatttaaagcgtattttactctactgtctggtagccattacaaaaaagtcttttatttctgatataataagtaatttgattttttaagatggggtaccgagctcgctctcgaa

SEQ ID NO: 442092 - DNA, 558 bp, Homo sapiens
gtgtttgggggcagacagtccccctttcccacttccacagtttgggcactcacagtatttggtgtgtctcccargtcctgcaggagcgatctcgtctgtgggttctcttggctttcctgaattgttcctgcagtagttctggagcaaaaattcatgatgcgagactccacatgctactctgtccatctgagtgggagctgaaatctagtcctgcctcccatccaccatgatcctcctttgtctattttttaattgagttatttgtttttctgctattgagttataagtgttcttcataaattttggatattaacccctcattagatatgtggtttgcaaatattttttccaattcataggttgccttttcattttgatgattgtttcctttgttatgcagaagtgttttagtttgatgtagtcccattcatttatttttttcttttgtagcctaagctcttgttgtgatagccaaagaattattgtcaagtccaatgttaaggaattctccctctgttccctactaggaattttttggtttcaggtcttacatttagg

SEQ ID NO: 442093 - DNA, 558 bp, Homo sapiens
gtgtttgggggcagacagtccccctttcccacttccacagtttgggcactcacagtatttggtgtgtctcccaggtcctgcaggagcratctcgtctgtgggttctcttggctttcctgaattgttcctgcagtagttctggagcaaaaattcatgatgcgagactccacatgctactctgtccatctgagtgggagctgaaatctagtcctgcctcccatccaccatgatcctcctttgtctattttttaattgagttatttgtttttctgctattgagttataagtgttcttcataaattttggatattaacccctcattagatatgtggtttgcaaatattttttccaattcataggttgccttttcattttgatgattgtttcctttgttatgcagaagtgttttagtttgatgtagtcccattcatttatttttttcttttgtagcctaagctcttgttgtgatagccaaagaattattgtcaagtccaatgttaaggaattctccctctgttccctactaggaattttttggtttcaggtcttacatttagg

SEQ ID NO: 442094 - DNA, 633 bp, Homo sapiens
ctcaataactgcttgttaaatctactttgcctttgtcaggtattcactgctataattataccggaattaatttcaaatctatacattttctttcttttgtattaaaaaaatttttttgagacagggtcgtgccctgtcatccaggctggagtacagtggtgtgatcatagttcactgcagcctcaacctcccaagctcaagaaaatctcccacctcagcctcccaagtagctgggacacaggcacacactaccaggcccaactaattttctattttagttttagtagagatggggtctcttatgttgcccatgctggtctcaaactcctgggcttaagtgatcctcctgccttggcctcccaaagtgctgggattacagtcatgagccactatgcccagcctgratttttttttgttttgttttttagatcaagttccatgagtgggatttaccatttttatggctcttggtacattttgttgagtagatttctaagagttgcattaatactatgataacaatgtataaatataatacttttgttgcactcttggcagaattggctattaacattaaagcatagtttttgttagtttaacactgtctatagaaaatggcatctcactgtttta

SEQ ID NO: 442095 - DNA, 491 bp, Homo sapiens
ggacacaggcacacactaccaggcccaactaattttctattttagttttagtagagatggggtctcttatgttgcccatgctggtctcaaactcctgggcttaagtgatcctcctgccttggcctcccaaagtgctgggattacagtcatgagccactatgcccagcctgaatttttttttgttttgttttttagatcaagttccatgagtgggatttaccatttttatggctcttggtacattttgttragtagatttctaagagttgcattaatactatgataacaatgtataaatataatacttttgttgcactcttggcagaattggctattaacattaaagcatagtttttgttagtttaacactgtctatagaaaatggcatctcactgttttaacgtgtattctttttttcttactatcctggtttaacacttcccttttttatttacaatttgttttctgtgaatcatctcttagttatctaa

SEQ ID NO: 442096 - DNA, 618 bp, Homo sapiens
atagtttttgtttgtaattctgtttatggggtgaatcacatttattaatttgtttatgctgaagcaaccttgaatcccaggaatgaagcctacttgattgtggtgagttaacttttcgatgcactgctgcattcagttaactagcatttctttgaggatctctgtatctatgttcatcacaggtattgacctgtagttttcttttttgttgtgtctttggcaggttttggtatcagggtgatgctggcttcacagaatgagatagggaggaccccctcatcctcaattttttggaatgtagaattaataccagctcttccttgtacatctggtagaatcatctgtgaatccatmtgatctggggctttattttggttgattagttttcaattactcattcatttttggaactcattattggtctgttcagggtttcgatttcttcctgacttaatctttggaagttgtgtgtttccagtaatttatgcatttcccctagattttctggtttgtatgcatagagatgttcctaatagtctgaggatcttttgtgggattgattgtaacgtcacctttgttgtttctaattatgcttatttgtgtctcctctttttcctt

SEQ ID NO: 442097 - DNA, 594 bp, Homo sapiens
cttgtgggcacaaactaatcagctgccagtgaatataaagcaggcagaaaaaagtgaaaasgagagacgggcctagcctcccagcctacatctttctcctgggctggatgcttcctgcccttgaacatcagactccaagttcttcagtttggggactcagactggctctccttgctcctcagtttgcagacagcctattatgggaccttgtgatcatgtaagtgaatacttaataaactcccctttgtattagtcctgtccctctagagaaccctgacttatacagtatgcaaatgagaaggatgtatatgtccggttgatgggtggagtgttctatacttgtctactaggtccagttggttaagtgttgagcttaagtccagaatttttttgttagttttctgccttaataatctattaatgctgacaatggggtgttgaagcctcccacaactattatgtggctgtttaagtctttttgtatgtttagacatatttgttttatgaatctgggtgttccagtgttggggggggtatatatttcaaatatttaagtcttcttgttgaattaaaccctttattattatgtaacat

SEQ ID NO: 442098 - DNA, 654 bp, Homo sapiens
tgatggtaggagttctctattccagtggaggtgataaaatactgatcttaagtagatgatgaagagttaagtatgttaagtgcaatccataggtgaccaaaaaaaatcacaatagatacattaaaaagaaatactaaaaaaaaaaatctaaataacccaaaatgggcagaaaagttgaaacagaagaaccgaaaaaaaggggaaaaaacagaaaaatgtaataaaatagtcaacctggatccaaatatattaatcacaacataaatgaaaatagaataaayacatccatagtaggacagagattatcagttggaaagtagtgagccaactacatgttatctacaagaaactcacctccaatataattatatgggcaggttcaaagtacaagaatggcaaaatacatgtaatacaaacactaataatacaagtctggattgtttgttcatattaatatcaaacaacgaaaatttcagaacaaagaaaattaccagggagaaagagggacattacataaggataaagatgtcagtttgcaaagaagacaaaatgatcttcacaatgtaacttcaaaatacatgctgcaaaaatcgatagcactgaaagtaaaaacagacaaatccacaatcatagctgaggatttcaacactcttc

SEQ ID NO: 442099 - DNA, 463 bp, Homo sapiens
ctagcatcatggctagacatggtagctcacgcctataatcccagcactttgggaggctgaggtggatggatcacttgaggtgaggagttcaagaccagcatggygaaaccccatctctactaaaaatacaaaaattagctgggtgtggtggtgcacacctgtagtcccagctcctcaggaggctgagatgggaggattgcttgatcccaggagttcaatgctacagtgaaccatgatcacaccgttgcattccagcctgggcaatagagtgagaccctgtctctaaaaaaagaataaataaaatataaataaataaaaacaagaagagttggtgaggatgtagagaaactggaaccttcatacattgctgattgaagaatgtaaaatggtgcagccactctagaaaacagtctgacagttcctcactaaggtaaataatattatcgtatgacctggcaaccct

SEQ ID NO: 442100 - DNA, 463 bp, Homo sapiens
ctagcatcatggctagacatggtagctcacgcctataatcccagcactttgggaggctgaggtggatggatcacttgaggtgaggagttcaagaccagcatggtgaaaccccatctctactaaaaatacaaaaattagctgggtgtggtggtgcacacctgtagtcccagctcctcaggaggctgagatgggaggattgcttgatcccaggagttcaatgctrcagtgaaccatgatcacaccgttgcattccagcctgggcaatagagtgagaccctgtctctaaaaaaagaataaataaaatataaataaataaaaacaagaagagttggtgaggatgtagagaaactggaaccttcatacattgctgattgaagaatgtaaaatggtgcagccactctagaaaacagtctgacagttcctcactaaggtaaataatattatcgtatgacctggcaaccct

SEQ ID NO: 442101 - DNA, 574 bp, Homo sapiens
cttgtggtggtctcatccctccctggtggctgtaagcccagggagatggactttgagcaagtggctgtcaactccatggataggtggaagtgatgargacacccaagtgagccaaccctgagtcatttatactgatgggcatcatggaggatggaaaaattaacagccacacagagcctcagaggtgtagagacacatatgctgggatccacatgttacacacccaaccttgccctttgcggttctctgttttgattccagtcagctttctgtcctttcatttcttaggaaggtcagtaccagcccagggatagtcccctgattcttcctactgccaagccctagttaaacttcatatccacttccttgggttgccctgtcaatcagtttaacatggggagtgacttcctgccctaggctacctttctggcatccttctttattgatgatcttaatgctgtgttttcttccaaatatgtacaactcatataatgcatgtgtgatcaaaattatacaaagaactaaacatatacttcccattatattctagaggcaccagttggtgttaaattag

SEQ ID NO: 442102 - DNA, 574 bp, Homo sapiens
cttgtggtggtctcatccctccctggtggctgtaagcccagggagatggactttgagcaagtggctgtcaactccatggataggtggaagtgatgaggacrcccaagtgagccaaccctgagtcatttatactgatgggcatcatggaggatggaaaaattaacagccacacagagcctcagaggtgtagagacacatatgctgggatccacatgttacacacccaaccttgccctttgcggttctctgttttgattccagtcagctttctgtcctttcatttcttaggaaggtcagtaccagcccagggatagtcccctgattcttcctactgccaagccctagttaaacttcatatccacttccttgggttgccctgtcaatcagtttaacatggggagtgacttcctgccctaggctacctttctggcatccttctttattgatgatcttaatgctgtgttttcttccaaatatgtacaactcatataatgcatgtgtgatcaaaattatacaaagaactaaacatatacttcccattatattctagaggcaccagttggtgttaaattag

SEQ ID NO: 442103 - DNA, 574 bp, Homo sapiens
cttgtggtggtctcatccctccctggtggctgtaagcccagggagatggactttgagcaagtggctgtcaactccatggataggtggaagtgatgaggacacccaagtgagccaaccctgagtcatttatactgatgggcatcatggaggatggaaaaattaacagccacacagagcctcagaggtgtagagacacatatgctgggatccacatgttacacacccaaccttgccctttgcggttctctgttttgattccagtcagctttctgtcctttcatttcttaggaaggtcagtaccagcccagggatagtcccctgattcttcctactgccaagccctagttaaacttcatatccacttccttgggttgccctgtcaatcagtttaacatggggagtgacttcctgccctaggctacctttctggcatccttctttatkgatgatcttaatgctgtgttttcttccaaatatgtacaactcatataatgcatgtgtgatcaaaattatacaaagaactaaacatatacttcccattatattctagaggcaccagttggtgttaaattag

SEQ ID NO: 442104 - DNA, 562 bp, Homo sapiens
atttttttaacattaattagctggctgtcaatttccttttcctatctcatcagagtttaaaaaaataacaattaaaaagttctataagctactaacaagaagaaaaagatgtcttgtcttatctaattttatttccactatgttgttataaaatcaactagtgaggccaggtacagtggctgacgcctgcaatccaagaactttgggaggccaaggtaggcggatcacttgaggccaggagttcaagaacagcctgaccaacatggtgaaaccccatcactactaaaaatacaaasaaaaaaaaaagccaggcatggtggcacgcacctgtaatcccagttacttgggaggctgaggaaggacaatcacttgaacccaggaggtggaggctgctgtgagcaaaatcatgccactgcactccagcctgggtgacagagtgagactctgtctcaaaaaacaaacaaaaaaacaaacaaaaacaatcaagcagtaaaataaccacaaaaacaggctacaacagaagaaacacagtcatcatcctaaaaatccacaactagatcaa

SEQ ID NO: 442105 - DNA, 613 bp, Homo sapiens
acatatatactgttaagtttatctccaagtatctcatactatttatgctattataatcggtttattttctacttgtgtattgctaatgtaaagacagaattgatttttgtatrttaaccttatatcctgcaaccttgatacatttgcttattaattctagcatttttttccctagatttcattttaccctgtcaggtaagactaaaatgtgaaagtatgaatgcttccactggtgggaggcagagacatagtatttggaaatgtgaactattaacaacctttttggaaagcattttgatagcatctattaaaatttaagtgaaaaaacacatttagtttcagctcagcaatctcactgctaggaatctattttatagccagcataaggatatatgtgcaaagatgttgattgcagtcctcatttgtaatgacagaaacctggaaatgaagtgaatgatcaataataggtgagtgcttaagtggtggtacatccacccttggtttcagctggcttgaatgggtttatcagactagtagaaataacccatttcagtaaaggactatatagtacaaaataatatttcatttttagatatggttatgtattgctgaa

SEQ ID NO: 442106 - DNA, 613 bp, Homo sapiens
acatatatactgttaagtttatctccaagtatctcatactatttatgctattataatcggtttattttctacttgtgtattgctaatgtaaagacagaattgatttttgtatattaaccttatatcctgcaaccttgatacatttgcttattaattctagcatttttttccctagatttcattttaccctgtcaggtaagactaaaatgtgaaagtatgaatgcttccactggtgggaggcagagacatagtatttggaaatgtgaactattaacaacctttttggaaagcattttgatagcatctattaaaatttaagtgaaaaaacacatttagtttcagctcagcaatctcactgctaggaatctattttatagccagcataaggatatatgtgcaaagatgttgattgcagtcctcatttgtaatgacagaaacctggaaatgaagtgaatgatcaataataggtgagtgcttaagtggtggtacatccacccttggtttcagctggcttgaatgggtttmtcagactagtagaaataacccatttcagtaaaggactatatagtacaaaataatatttcatttttagatatggttatgtattgctgaa

SEQ ID NO: 442107 - DNA, 537 bp, Homo sapiens
ggggaaaacaggctgattatttagttcttttttattaaaaaaactctataattataataaaaccctttttaatttatttacctaatatccccttgcctgaaatgtctttttttkttttgtttttgttttttgagacagggtctggctctgttgcccaggctggagcttggctcactgcaacctccacctcccggcctcaaattatcctcccacctcagtctcctgagtagctgggactacaggcatgaggcaccacacccaggtaatttttgtatttttggtagaaacaaggtttcaccatgttggccagctggtctcaaactcctggcctcaagcaatcctcccgcctcagtctctcaaagtaatccttcagtctaatcaccaaaagtaatagcttgtttctgctgtgaaggaaatctacaataataattatattgagtgttttcatacatttgattagtataaccaaataatttcaataagtataaagatttaaaatgaacatttccttaatgttgtttaacctgcattataggt

SEQ ID NO: 442108 - DNA, 519 bp, Homo sapiens
cagctctcaccaaatcacacttgtgtcctgccttcctttccacatccgcctgcactctcaccacccccaaagaagcacctttactgtatattacagatatgtttgatttctctaagcaaaatgttctcatattctacgtacaattgcattcaaaacctaagttccactatcttagagatgattgtgttgttgtgtttttgtttccttgagggaatattacctctgtaaaccatatggcaaagggacaagatggaacatgagtcacygtacacaagggaacaaacatccagacatgaaggcagcgtcacaacaactccagaggctggcagtttctgggcttcaaaaggaaaataacttttttttttaactctgcaaaccacagctacttgtgtggttgatgtgtagctaaaggccacgggtctcctatcacatgatctcacacagaactggagttcttccagtgagcaggtgttaacggtccctgaaaaccagtttgtaagagatcgtagctgtcatccc

SEQ ID NO: 442109 - DNA, 570 bp, Homo sapiens
atgcagcaaggctaggtcaaagctggtgtaagagggagagggtctgggattcaaaagcaatgtggaaatgttgaggctggcaagcagagagtgaggggatgcctaacttaccacttggttggagaatgctgagacggcagaggctgcaccaaatgtccaaggggtagggctggcccgaggccaagattcccctgggctctgtcccatggctgactttagggctgaattttcacctggggtgtgtgttggggtctgagtggagrtcttggggagatctttgctactgggtttctttagggtgtggccgcggggcacacatccagaggcaccgaccttgtgaagctcccgagggtgttctttgaactactgcaaacccaaccggcaggtttgctgaaaagtggccacgttccagtccaaaatgtgtgagcagagcgcgagcttagcactccccagccccagtcccagctctgccaggaaaggggagacttcaccgtggcactgggaattggattctaaactttaggatcaagcaatggaaggacctggaataagacaccttcttgacccccc

SEQ ID NO: 442110 - DNA, 609 bp, Homo sapiens
attttgtgcccattgaatagctcctttgggcttatttaaatatagatatttatgatacatcactcttgtgcatgcataaaaaagggaagaacaaacaaaataaattggccaaggtattcctaagacatctttrtgttaaagtctaaaggtattcctaagacatctttatgttaaagtctagctctcctgagttctttttccacatttttatacacatgatcatcctctgtggccatgtgtgtcagtgcagtatttcttttctttttttgagacaggatttcgctctgttgtccagggtggagtgcagtggcatgatcgtagctcattgcacccttaacctcctgggttcaagtgatcctcctgcctcagcctccaagtgggactacaggtgtgtgccaccatgcccggctaattttttgcttttgtagagatgcagtctcactctgttgcccaggctagtttcaaactcctagcctcaagcaatcctcccgcctcagcttgccaaagttgttaggattacaggcatgagccactgtgccttgccagcacagtatttcttaagggggtactccactattgaatctggtatttccttccaagtcagccata

SEQ ID NO: 442111 - DNA, 604 bp, Homo sapiens
tacacccaccttctgacttaatagaatttcaaaaaatgaaaaaaagaaaacggacaagtactctaagcatgaatgtatcagaatctaaaaatgatttatagcaaacagtatgctrctttcaataaacactagagattacagaagaggaaactctctaatacatgatctgtttttctcatgtacatttcattctagcatcataaatattattaggtacatctctaaaagattcatatttcttggttgcggttatcttagcagtttgtacttcaaggaaactggaagggtctgttgaacaaaattgtgcaatttttacttaggttagtgcccactgcccatcttcttcaagttcaggtgcggtggctcacgcctgtaatcccagcactttgggaggctgagacaggtggatcatgaggtcaggagttcaagatcagcctggccaacatagtgaaaccctgtctctactgaaaatacaaaactcagctgggtgtggtggtgggcacctgtggtcccagctactcaggaggctgaggcaggagaattgctttaacccaagagatagaggtcgcagtgagccaagatcgtgccactgcattccaccctg

SEQ ID NO: 442112 - DNA, 329 bp, Homo sapiens
gatagtgctaaactattcatgagaaatccacccccatgattcaatcacctcccaccagaccccacctccaccrttggggattacaattcgacatgagatttggtggggacacagatccaaacactatcacgtgtattcaccatggactttcttaaccccttttctgccattgtccttttgcgagaaagtgcttcttcaactatggtaaactgaaacaacagtgaataaggaaaatattaaaacaaattttggtgtatagtggacaaaatatgaagttacagaatctttaaattggaagagattttagttttcaaattctaaagtccaac

SEQ ID NO: 442113 - DNA, 329 bp, Homo sapiens
gatagtgctaaactattcatgagaaatccacccccatgattcaatcacctcccaccagaccccacctccaccattggggattacaattcgacatgagatttggtggggacacagatccaaacactatcacgtgtattcaccatggactttcttaaccccttttctgccattgtccttttgsgagaaagtgcttcttcaactatggtaaactgaaacaacagtgaataaggaaaatattaaaacaaattttggtgtatagtggacaaaatatgaagttacagaatctttaaattggaagagattttagttttcaaattctaaagtccaac

SEQ ID NO: 442114 - DNA, 634 bp, Homo sapiens
ctgttaattattatattactactttgtgacaccatttagagacagtatcttagtttcatgaaagatgaggaaacagaggctcaaagaagttaaataagtatctcaaatcaggccaatccgtagtaacagaacacaacaaattgcagacatttgtttttactccaaagtccacgatgttttcaaaatactgtgtggcctcaagctgacttggaaaagactgcctttgatagaagatgactcttgagaaatactcttaaagtaaacttataggccctgcatcatgctaaccttgactgacatccctgaagagcttagggtaaatcctgtttgattctcagaacaaccctgaaacacaggtgatgttgagggtgatgggatgagagcctgtccatgagcttgggctgcaataaaatatgtcagagaggagcaaagaccaagcagtgggatttactggtagccaggggttactgctcctggtgtgggtaagctctattctggggctatttctctggttcctgatcatctttcactcttggtgayggtttgacacatttccatgcttggtttctaggcactccctttttagagatctcagactaacacctctcatggtacagataagacccactcacaa

SEQ ID NO: 442115 - DNA, 587 bp, Homo sapiens
attctctttgactctacataagagtttcaaattgcattagatgttgattacttgtatttcasagtgtatagaaaccccagcaccatttcattttctccctctttgttatcagaatgtagtgtgtcctggtgtccagatttttacgggtttatcaagtaagagaggaatgtaaatggaatatttgtctggttttggtgaatacaattgtatctgctctagataatatggaaaaggaaaaaagccctcaggttttgcgtccaatgcatgaagactgtcttctcatatttgtcttaaatgtgtttcataaaataagctgagcgttttctggtggcttgccacagttccgtgcgttgctctcaaacaaaggcctttcagagcctgatgctgtttccatcacactaagaaaatgcagagcaatggtagtgactccacctgaaaatggcattcttcaccttcacatttgatctttatggtttccagattggagtgatttgggtagctggattctggaaaagtctctagctgaaatgctggagtgttaacctgctgcatcgagtcccttttgtttcttttggacaatgctactt

SEQ ID NO: 442116 - DNA, 594 bp, Homo sapiens
ccagcccttccactgcccctgtgctgttgcagccttatctcatgttattctaactggctggatcaagtcttctggtaggaaaattcatctgttcattcacttgggactgttttactatgagcaaaggttttatttgtttccacccaggaaaatgctctcctttaatttaactatggaaaaaggcattaattcaggcaattaagactaaaagaaaattcgtgagatttttcctgccttgcgctgttcttctacttgggtatttttattctttaccctaattttaaagtgttcaattgttatcctttgctcaaaatgtttcgttgctaccattttgtttttcgacagcatgaataaattatttgcaaagttttgyttttcagtggccagtgctaactttaaactaatagtcaacacaatcagaaatcatttcatattccttataattatataaaataatgaatctccaaaaagaaaagctattggatttaattattattactgagaaattataaactatctttctaatcattatggttataaaatatgaattggggaatagcataggtgtagcagctcatacacgggccaccagtc

SEQ ID NO: 442117 - DNA, 585 bp, Homo sapiens
gttgtatggaacacacttatactaaaaaaaatttggttttgcctgacattcaaatttaactgatgttttgtacttttatttgctaaatctgacaaccttcaatcacctcccctttttgaaatgtgtacatgagggagataggaagtttaaaacattcatcaaagtaccatggttcacttttgaaaaacaaatgcaaattttggtaaacaagtrtaggcacttgataagaatatgttggtaaaatacttattcattaaattaaaattataaaatctattgttagtattctaaaatattaaattctattaaattcttgttcctttttctcttaaatctggtgaaagcacacagagcctagagtttatatctttaaaaccagggaaatgaaataaagattattttgcgttgaatgatagtcccattctttccagatgaaatctaccactactgctttctgtaacttcaaattggcttctatgtgctgtttttcctggatgtagacaacatgttgatttaactactccaagcgccttcaggaaaaaagcaattcatgaaagacaatatgcctccatgaggcaggctgtg

SEQ ID NO: 442118 - DNA, 585 bp, Homo sapiens
gttgtatggaacacacttatactaaaaaaaatttggttttgcctgacattcaaatttaactgatgttttgtacttttatttgctaaatctgacaaccttcaatcacctcccctttttgaaatgtgtacatgagggagataggaagtttaaaacattcatcaaagtaccatggttcacttttgaaaaacaaatgcaaattttggtaaacaagtgtaggcacttgataagaatatgttggtaaaatacttattcattaaattaaaattataaaatctattgttagtattctaaaatattaaattctattaaattcttgttcctttttctcttaaatctggtgaaagcacacagagcctagagtttatatctttaaaaccagggaaatgaaataaagattattttgcgttgaatgatagycccattctttccagatgaaatctaccactactgctttctgtaacttcaaattggcttctatgtgctgtttttcctggatgtagacaacatgttgatttaactactccaagcgccttcaggaaaaaagcaattcatgaaagacaatatgcctccatgaggcaggctgtg

SEQ ID NO: 442119 - DNA, 539 bp, Homo sapiens
ttacaggtgtgagccacagcgcctgttggagaatattctttatagggaaaaaaccttcaaagtaaggatataaggacttaaagcaataagaaggaagtaaatatgtacaaaatgcctcctttatcacttcttgatggctggacttgctatataaactcttctagagacaatccatgaaagtwattgtatttttttttccctgaagaacagtggaaagttggcaaggagtaaaaattttctatgaaatagggaggtgaacaagttataaatgatgttaatatcttccagatggcacagttttacatgggaattgagtttattgtaattaaaggcatgtgaattttctacaaatactgaactttgcaagtctgacactagaagattccatcacttctggaacacagttgttttaagggaggcgttccttcccttccgtttaaaatgaatccttgggttttataatctgagctaaatcagagaaatattttcccatgtgaagggtggttttttaaaaaacaaaatcttcctggacaataaat

SEQ ID NO: 442120 - DNA, 363 bp, Homo sapiens
caggaactgagagaatatctcaaagggaaaacaattctttgtaatgttcaagttatctgtagatcagtaaaggggaacttttatcttgtaacagggtctacatgattctgaggcaacaggcagcaaaccactatgaggaagcaggctgacctcatgactaatgcagagtgtgcttcaagcttggcttatttttatttctcccccttccttctcccstgattaactctacagtttatacactttatagttttcatcaggggagaaggaagggggatggtttcactactgtatgttggattgtctagcacagaggacaagatagatgaggactctgcccccaataccccatggaaggctgtggac

SEQ ID NO: 442121 - DNA, 591 bp, Homo sapiens
tttctgacggtctcaaggatatatcagcaataacagcaagcagtctaaatagttccagacttacgacattcaaagacaagaggaccaatcatcaagattttacaaaacaattgtcagcaatagaaacacatcagaaaaattacactagaattgtggctaatatttgtaaatatttctctagattgttacaaagattttgaaatgatcattttgcctctakacagtggcaatttgatattataaatagcacaatataatagttttgaagcaaaaactacaggggtcactttgcaattgaccttatacttggatgcattattgttctattttttaaggctaaatgaaagtgcaaaaattattattgagtcacgaaaggaaaagtgtaggatattgataataaccttccaaatctactcttgacaatttaaaaatagcacattgtacatagccattttcacctaatagctaaaacattaaaacatgatttgagaaacaacagatgcatgcacttgttgcaattattttgtaaaatctttaagattggtcctcttgccttatctttgaatgttgtagtctgcaaatatttagaca

SEQ ID NO: 442122 - DNA, 591 bp, Homo sapiens
tttctgacggtctcaaggatatatcagcaataacagcaagcagtctaaatagttccagacttacgacattcaaagacaagaggaccaatcatcaagattttacaaaacaattgtcagcaatagaaacacatcagaaaaattacactagaattgtggctaatatttgtaaatatttctctagattgttacaaagattttgaaatgatcattttgcctctagacagtggcaatttgatattataaatagcacaatataatagttttgaagcaaaaactacaggggtcactttgcaattgaccttatacttggatgcattattgttctattttttaaggctaaatgaaagtgcaaaaattattattgagtcacgaaaggaaaagtrtaggatattgataataaccttccaaatctactcttgacaatttaaaaatagcacattgtacatagccattttcacctaatagctaaaacattaaaacatgatttgagaaacaacagatgcatgcacttgttgcaattattttgtaaaatctttaagattggtcctcttgccttatctttgaatgttgtagtctgcaaatatttagaca

SEQ ID NO: 442123 - DNA, 578 bp, Homo sapiens
ttgcagctgtagaaggagaaagtctactggccaaaaaaataaaaaagacctttaagtgaaactgctgactaataatcctgtcatgggaacctctataaaatgcttacattgaagtctaacagatcgcagaattctccagtgctttagggaatcgagttgttgaaagcatcctatcttttgtatttagaaggtcctctctctgttttaggctaaaaagtgtgtcaacacaacatgttgacaataagccaaaaaaagaaaagaaaagtaagcaaacagattaaaaaaatcactctcatagttcttcttttaaaggaatagcactagaaaacaaaacaaaaaatatcaaggccagagcacaggactaatctagctggatctgaaagggacatattaaaggtcaccattgtgtagggcacacgaactcaacaccaagaggatttgggaggcattcggctttgacttaatactgtaaaagtgtttgtgcttaattatgggagtccttgrgggcccttccttgcccccttcccatgtggggtgtcgtcagtaatggaaatcacctggttgtgagattaacaaag

SEQ ID NO: 442124 - DNA, 562 bp, Homo sapiens
actgggggaatgatggagcaggaacccaggctaggcgtatctgttcccatttgcaagagtatccagagaggcagaaaatttccagtagcaaaatagcacgaaatcggagaaacataaaaaggaacagccacattttgactcatattttcttgataagcctttttccttaaatttttaatttagctaactctcaaagatcttccatgaagtaaacactcttgttctcagctgaacaggaatattgacttgccttgtgttttagagcaatcaggcagagaagagttttggtgaggggtgtctgtgtttgcgttgtgctgtttccttgctttgttttctttgtggtttgatcatcccctgccactcctctgatagaacttcattttattatcatatttcttattgcaagctgacaatatgtacagrtagacataggacatggtatccatgtccacttcagagattcatggcccatgttaggaacacaaacaattcagaaagaaaatataccaagagcgtttcaaatatcagctgtgcaaaggagtcaatgtcagcataggagtca

SEQ ID NO: 442125 - DNA, 456 bp, Homo sapiens
gtgagcagaggggtgactttgaatacaatgggaggcaggtttgccctgagcagttcccagcttcacctttccctttagcttagtgatttgggcgccccaagatttattttcctttcccaccagcattggggsttgagatgtgcacacactcaggaaccactgcagcatcctcctgtcagataatcctgcctgattctgtccaggccgggcgggaggaactcgaactctttggaaatcctctcctggccgctgtccaaagtggagccttagagctcccacctgatgcagtgacagatttgtacctgagttctttctgacacagatgcactttgttgatggacatttgcatccttcactatgtttctccttccaggtggacactcttgaagtgtgtagaaattttattgctgttagaagaccaatgaaaataggagagaaggaactttcttgtcccct

SEQ ID NO: 442126 - DNA, 639 bp, Homo sapiens
ttaaattaatttttagagccagattgcgttacttaaacctaggatcctaatttgcgctgacaaaaaccrtcaaatcagcctgcagaggtgcctgaaacttactgcccagataatagctgacaatttgaacttggtagttttatggattggtttgtatctaaaaagcaggcagcttttaaaagccctgaataaaggttgctttctgtggacacctacggcgtgactatttataaaagcacccaatgatttttcccctcctaaaagtgctattggcagaatgaggcttggtatttaatccacaacccgctatgcactgccccctacagtggcaaagaacacgcagggctggaagaaagagatcaaggaagcattaaaaatgtcaggccacgagaccatgtttaaattattaggtgagatgccgtcttgcatttaacaatggccccacgcaccttgaggcccaacttcctctctccttggatgttttgacgggttattgcaatcttttctgaaattgaatttcagtttgcttcaatagcatttcccagtaaataggagtgactctggtatctcgtttgtgaatcttgatgtaataatcggaggtaattgaagcgtgcacaaaccacagagacttatgacatg

SEQ ID NO: 442127 - DNA, 639 bp, Homo sapiens
ttaaattaatttttagagccagattgcgttacttaaacctaggatcctaatttgcgctgacaaaaaccatcaaatcagcctgcagaggtgcctgaaacttactgcccagataatagctgacaatttgaacttggtagttttatggattggtttgtatctaaaaagcaggcagcttttaaaagccctgaataaaggttgctttctgtggacacctacggcgtgactatttataaaagcacccaatgatttttcccctcctaaaagtgctattggcagaatgaggcttggtatttaatccacaacccgctatgcactgccccctacagtggcaaagaacacgcagggctrgaagaaagagatcaaggaagcattaaaaatgtcaggccacgagaccatgtttaaattattaggtgagatgccgtcttgcatttaacaatggccccacgcaccttgaggcccaacttcctctctccttggatgttttgacgggttattgcaatcttttctgaaattgaatttcagtttgcttcaatagcatttcccagtaaataggagtgactctggtatctcgtttgtgaatcttgatgtaataatcggaggtaattgaagcgtgcacaaaccacagagacttatgacatg

SEQ ID NO: 442128 - DNA, 622 bp, Homo sapiens
agcattccagacaccagtggggtatgaaaaaaaaactcctgcagctagctcggtgtctgcccagatttgtgcttgaaacccagggcccttggggcataggcacctgagggaatctcctggactgtgggttgggaagaccttgggaaaaacatagtatctgggccaggtgacacagtccctcatggcacagtccctcatggcttcccttggctatgggagggagttcccccactccttgtgcttcccaggtgaggtgatgccccaccctgcttctgctcaccctccatgggctgcacccactgtctaactagtcccattgagatcaactgggtacctcggttggaaatgcagaaatcacccaccttctgcattggtctcactgggagctggagaccagagctgctcctattyggccatcttgcccaggagtctggggtgtattcttacagatattttaaaatgtgtttacatagataccaacataggcaaaaatagaagtaaacagttttgtgtagatttttaaatttagcatagtatattacataacatggtatttcccaacaatatgctttttaaatttaacagtatatgtcttagatatatttcagtgctcatatatatt

SEQ ID NO: 442129 - DNA, 500 bp, Homo sapiens
ccattgaaatgaggtgaattaaaaataaaaactttataaattaattagctgcaaaaatacttatttttgtttgtttttccaaatggttgcaacttacatagtgtaaaatacaattcatgaaagtggaaagatgcagaatcagaatggaaatgagaaccagcaacctgagagtaccacagaaatattcagtcacatctgtgtaaccaggggctgtacagtcttaggtggaggtattccagatttttgtttcttagtttctgtcagatgtaaaatgtgtatgtggaactattgtgcactttctttgtttggtagagacagtctctctgtgttgcccaggctagtctcaaattcctggcctcaagtgatcytcccacctcagcctctcaaagtgctggtactacaggtgtgagccaccatccccagcctactgtgcattttctattatttgaagcaaaattggggccacaaggaaggtcatctgtagtatgccaataacataa

SEQ ID NO: 442130 - DNA, 554 bp, Homo sapiens
tgtttcactcactgcatcttactccaaatccatttcacaacacaggaaaacagagtaaagatcacaaatgcagaaacaaattgaaaaatgctggtagagagaaaatgttatttttacccattttagtaagcattttattatactatgaagaataaacttaaagaccttaatgaagaatagttttattttattttcccaaagataatccttaatgaaaagaaaattccctaaggtgtcttatttatttccagattgtctgatggcagttaggttggaaagggaagatgaaaaataaagaaaaacacttataattattttgcratttgctttaatttaaatcagagtctaatttgttgtcacaatagattaagagaagctgcacaaacaaatataataaattcagtgtgcttcaaagccaaatgctaaacctgtgggcatgtaccatattttacttcatacatctagaaaaaaaatagttcttttaagtaataagcataaaccagtaaggactttaaaaataaagcaaatctcaaccttgttatacagatattcaa

SEQ ID NO: 442131 - DNA, 586 bp, Homo sapiens
tgttatacgaaaaagatatttgcacacatgtttatgaaagcacaattcacaattgcaaaaatatgaaagtagcccaaatgcccatcaatcaatgagtagataaagaaaatatatatatggaatactactcagccataaaaagaacaaaacaatggaattcacagtcacttggatggaatttgagaccattattctaagtgaagtaactcaggaatggaaamccaaacatcgtatattctcattcataagagggagctaagctatgaggacgcaaaggcataacaacgatacagtgaactttggggactcagggaaaaggttgggaggggatgagggataaaagacaacacatttggtacagtgtgcactgcacatgtgataggtgcaccaaaatcactaaatttactgctaaagaatttatcagtgtaaccaaacaccacctgttccccaaaaacctactgaaataaaaaattaaaattaaaattaaaaaagaattttccctacagttgttgttagctttaagttgttatgtcttttgctgtacagacttttcatttgtatctagttatctttccttttgttattt

SEQ ID NO: 442132 - DNA, 649 bp, Homo sapiens
ggatgaaggtgctgagaattaaggctaaggagacaagcagtggcttgatcaagaagtgtctcatagcaacattgctcagattgcactcatattctcagaaaatgggaaccaactgggggctttaagcagagaaataccatgattgctcttgaaaaaaaatcacaatggcagttccaatgtggagaatggattgttgaaggatgaagactaagatggggtgaccagttaggaggctgctgatagagtttggctttgtccccacccaaatctcatgtggaattgtaatccccataatccccccttgtygagggagggacccagtgggaggtgactggataatgggtgcagtttcttccacattgtttttatgatagtaagtttttatgagatctgatggttttataaggggttcttccccctttgctctctactctctcctgccgccacgtgaagaaggtccttatttctcctttgcctcctgccatgactgtaagtttcctgaggtctacccagttatgaggaactgtgagtcaattaaacatctttcctttataaattatccagtcttgagtactactttacagcagggtgagaatggactactgcagttactgtggtaactggggaagaaaataacagcctgcactag

SEQ ID NO: 442133 - DNA, 587 bp, Homo sapiens
tgagttctcactgtcttgggaataggttagttcctgcaagagcaggatggttaagaagagtctggctcctcaatttctctctcttgcttttcctcttggcacatgatttctacacamacctgatccccttccggctgctgagtggaagcagcctgaggccctcaccagatacagctgcccaattttggactttccaaccaccagaatcatgagccaaataaacctcttttctttataaataacccagcctcaagtattcagttatagccatggcaaatggactaagacagggaacaacgagagctttggtatctgagagtgctgagttggaaacctagctatgtctctttactcttagaaccctgtttcttccatcgtgcaactgagctaccactaactgtagtgctgcattgctggggagaactaataatgcaatgtggcaaggaagatgttgctggcttttatttaacagcactcaatcaatcaggtgatgccaggcctgcttctccatagtgcagtgtctttgatatttactgcaatgatgttggctataattctgttacatgataaaagagatttcaagagtt

SEQ ID NO: 442134 - DNA, 557 bp, Homo sapiens
aaatcctgttgcgtcgcagaggtcaacctccctgatcttcactgtcttcatctgcaaaatgggaaaattgtatccctccctcatggggcagttacgaggattagggacagtgtaaaccacacatcaatgtctggcacagagcagatgctgagaaaatcctgaaaactcagtcaaagaaatagaagaggccaggcgcggtggctcactcctgtaatcctagcactttgggaggcacgggccggcggatcacgaggtcaggagatcgagaccatcctggctaacatagtgaaaccccatctctactaaaaatacaaaaaattagctgtgcatggtggcacatgcctgtaatcccagctactcaggaggctgagacaggaacatcgcttgaacccggragatggaggttgcagtgagccgagatcacaccactgcactccagcctgggcaacagagcgagactccatctcaaaaaacaaaacaaaacaaaacaaaaaaagaaatataagaaaatggagcagaggctattttcccctcaaggatttacattgaggctttta

SEQ ID NO: 442135 - DNA, 582 bp, Homo sapiens
tgtgtgtgctttagccacctcctagacatcgtatctttttccttgatcagtccccaaatccctcaggatcttcttcttgtccaactaacaccaattcccaataaaggaccattcaaacatatttttacttctccgcttcatcataagccaaaatagaaccaagagacagaatagtcaatgtgttagttttctttagagttgcccagtagggggtatgaagtgccggctgggtataggaagattgtcagggttgccaaatatcccaaatgattatattctttccatcatctcttaaaaaaaaaatcatactgtgattttaggcacatctgtaggtactttgcaaaataactttgtctaagtccattcaggctgctgtaatgaaatagcatcaattgggtggcttatcaaaaatgcatttatttctcacagttctgaagctgggaagtcgaaggttgaggcagatttggtgtctggtgacaaactctccccctctgagtttccataaattttagatcttttactccattaccttcawagtatctgtgaggaccaccttttctggggtaaaggaaaccatgattt

SEQ ID NO: 442136 - DNA, 575 bp, Homo sapiens
acctgttgctgtatttaattcctttgaattatatagccttggccctttcaagagaagctaagcaaaatatgttaacctcataggggatggtgatactctacaattttgtggcatgtctctatcctacacgtagtctaggtcaaacataacataacatggttatgttacaaactaattgtaacaatgcattatttcacaactgcagacagagaaaactacttatgacatcacttaaaggaaccgggcctgtcttactgatctttccaagcctggcaggaggtagactgtgaagaaggcatgtgttgttcctggctttctgctctccctgcctgtgctcctccttactgggcagatagatctctgcttcctggcctcctccttcctccctcctccctcctgtacctgctagacacccacccccatccccaagaactctatttatgcaggctccttgttcctttctgcttttgtgtgaactgagccatattataaaaggcaacttacttytctcttttttctaggaatgtcatttagctacttcttgcctagtaaaggatcttacccttagcttattc

SEQ ID NO: 442137 - DNA, 473 bp, Homo sapiens
agcactcacttaatcttcctaacaacctagttgtagggactaatgatatcccattttcagatgaggaaactgaggcacgaagaggccacgtaatttgccaaagccaggataaagctcccatttgttttacttcctgccacttccccttcccaggacctcctccttctacyttccctgaatgtttgccctcaccaaggaagggtgactgattccccagctcggaacagccagcagggtaccgtgtggcagacacctctgcacgtgagccatggtgaagaagtctcacaacagccctgtgggaggctgcaaggtcacccagcaaaacagactgcctgtgtagcgccccctcctctgcagagcactcactaggaacagctcagtcccaatgccactacaccccttaatacacacacgagcttgcaaacacacgcatttgtgtgtacacatgtgcatacacatatatacacaagaac

SEQ ID NO: 442138 - DNA, 533 bp, Homo sapiens
gtctgactgtcaggcctatggactatctgttatctgacgacagggcaagatgattcaaaccccacagagttttaataaacgcactgactccatcytactgttaagtagcaaggacagcactggggcccaatgagcagccccaaaagctgttgatgccttcgagagtgagaacctggtcttcagtccctttcctctagaagggtccaccgaggttctggaatcagacaggccccaccatgtcccggctgtgtgatcctaggtgtgttacctaacatctctgagctgtcattgtctcctctgaaaaaagatgggcaaataattataggattcagtgagataaggcaggtaagcacatacatagcacatagaaacattcaataaacacgaatgattttgtgatgatgctcacttgagagctagtgaggttcttacatattatctcctccaatcccttcattatccagatgggaaaatggaagctcagagagaggaagggacttgcccaagatcacacagcaagttgaaagaccagg

SEQ ID NO: 442139 - DNA, 608 bp, Homo sapiens
acttgggccctcagccagagacacacacacacccagagacacacacctagacccttatgcaagcacacacacacttacacacctctactcttacacgcttgtagaagctccaggatcctgaacacgtatctgaaccccaccaccccgcacttatctcctcacacactgyagatattaacatccccctcctgccctggctcacagacacacacgtgcactcacacatatgagcacacgtggacacctctacaccctcccagacgcccccacaccctcctgaagcacaggcacatgaaggtacacccccacacgcctgtgtgaacccacacactcctcccgaacccacacaccatgggcacacccctcctcccagcggcagctctggacctgcctgtgcccacccccgccgtcgttccccgtaaatgtgcagccatcccgcgtccccgcgctgccgcagcccctcactcggggccctcaaagagcacgcttataaaaacattcttcccgtgatggagtgcttcctttgggcttcttcggcttgtaacagattaaaggcgaacaggcatttgtcatggggaagtgtacccagttgtgctggaaaatggact

SEQ ID NO: 442140 - DNA, 608 bp, Homo sapiens
gggagaagccttggcattcgccagcctggagcaggggcttcgggaacctccagatggaacagacaggctagtggcaaaaggaaggcagcctgagaaggtctcactccaggcggctgtaatggctgtaatctacagccatctttacttaaggacttcaaagggagatgagaagagcgagagaggcagttagatgctgaagcagcttgaatgtgacggagatcaaaggcaatggaaggtggttctgtgcatttccccaaccccttgccccagcctaagcatccacagagatgctgggatggagggatccctaggaaggaaaaagaggcaccaggaaacttgaatccagcagaaggggcacaagaagccccccatagaccagacagcccctcctgggtgggggtctgaggagcttagggttcctacattctggggccccctcctccaggcaaataatyaaggactcctaggaggaaataatgatccctttgagccacagtggtgtcccctgtgtgggtttgtgcgtgcccctagattcccctccagtccttcagaaagttatgaagttgtcgtggcagttggtatgtggcatgtaagtggggaaccaaacc

SEQ ID NO: 442141 - DNA, 608 bp, Homo sapiens
gggagaagccttggcattcgccagcctggagcaggggcttcgggaacctccagatggaacagacaggctagtggcaaaaggaaggcagcctgagaaggtctcactccaggcggctgtaatggctgtaatctacagccatctttacttaaggacttcaaagggagatgagaagagcgagagaggcagttagatgctgaagcagcttgaatgtgacggagatcaaaggcaatggaaggtggttctgtgcatttccccaaccccttgccccagcctaagcatccacagagatgctgggatggagggatccctaggaaggaaaaagaggcaccaggaaacttgaatccagcagaaggggcacaagaagccccccatagaccagacagcccctcctgggtgggggtctgaggagcttagggttcctacattctggggccccctcctccaggcaaataattaaggactcctaggaggaaataatgayccctttgagccacagtggtgtcccctgtgtgggtttgtgcgtgcccctagattcccctccagtccttcagaaagttatgaagttgtcgtggcagttggtatgtggcatgtaagtggggaaccaaacc

SEQ ID NO: 442142 - DNA, 503 bp, Homo sapiens
tgaaaatgctctgtatgatactataatggggatacccagagagaaccatgatgcaaactatggactgtggactctgggtggtgatgatgtttcattgtaggttcatcaatggtaacaaattcttttataccaaatgagttacagaggaatgctggtctaacagaggagaaaggtgcccagagagagggtcctaggaaaagcatctgcagagggagttgggtccagccctcttagctttggggaggacaagataagtaaacacaagaattcactaacccatycaatctcaattgccttgcagcacatccccctttttcctagctgtttgcagggtacttactgagctcagagtctcctggtgctctagtggggggcattgataatgggggaggccaggcatgtgtggggcagaaggcatatgggaaatctctgtaccttcctctcaacttggctgtgaatctaaaaacaaaaagtcttaaaaaataacaacaaccaaaacatag

SEQ ID NO: 442143 - DNA, 510 bp, Homo sapiens
aagaagatactcagccccattctctgggcctctgaatttcttgacccagtgtattagtccactggggctgccattgcaaaagaccacagacagtttaaatactaaaataaaataacataacagaaayttatcttctagctttcgagttctggaagctagaattccaaaagcaaggtgttggcaggttttgcttctcctgaggcctctctctttggcttgcagatgggaccttctctctgtcctcatggccttttctctgtgcacatgcacccctggtgtctctctgtgtgtccaaatttccttttataagaaagccagtcaggttaaattaaggcccaccctaacatctgcttttaacttagtcatctccttgaagtctctatgtcccaatctgagctattaggggtgagggtttcaacatatgaacttgaggggacacaattcagccaaaaaccctcagagaactaatagcaatagttatcattgttgttggacagctaacacatatgt

SEQ ID NO: 442144 - DNA, 599 bp, Homo sapiens
ctgaggtaaacacaatgcccagatgctcaaacattttagtaaaaaatattaatcaattattaaaataaatgtaaaattattgaagtactgttaataatagtccatcttagctcactaataagtttatgtcaayactaaacatttgagtagctttttgaaaaagatatattctgttacaatatttcactatattttggtctagcctcttatttccaagtattcagctcttaaattcttaatttttatataaatgtctactgcctcagtgatatggtttggatctgtgttcccaaccaaatctcatgtcaattgtaatccctaatgttggagttgggccctggtgggaggtgattgtatcatgggagtggatccttcataaatggtttagcaccattcctctggtgctgttctcatgatagagttctcatgagatctggtttcttaaaaatgtgtggcaccacatcacacttattctaaaattgaccgcataattggaagtaaaacactccttagtaaatgcaaaagaatgggaatcataacaaacagtctctcagatcacagtgcaatcaaattagaactcaggattaagaacctcacac

SEQ ID NO: 442145 - DNA, 354 bp, Homo sapiens
tcatgtcttacttatttgacatagttcccccaactctcagcagccttaaattcacatggtctaaaagacactgaacaaatattaaaggaattaaattgatgttattttaatttttaagaatattttgatagttaaaacaggaaccacagtggaaagaagactgggtgcaatgcctgcacacttttcctcacrtgtaaaacaagcaaggtattgatcaccatcacttttaaatcttgcttatgagaataaataattctaggaatttcttcctcagaaccatggtatacccaaaagtgatttttcaatgccagaaatgctaatttaccaaggctatatcatcaattgttgaagcac

SEQ ID NO: 442146 - DNA, 406 bp, Homo sapiens
ttgaatggatatatgggttaaagaaaaacgaatgaatggatgacagaagcaaaacaatttctgagaatataaatctatattggaaatgtcattttsagatgtgacattggaatatagaacatggtaaggaataagaagattatagattaacatatagactccgttcttatgaacaaactgctactattaatagagctatttatgttcaaagattaaaatagggattcacatcagctatataacttaagctggttgtataatttatctcagtgacaaaactaatgaattagtgatataaatggaatattagatatacaagttaaaatttcactgcatgttttatttaaacatgtgcaaataaatgtttaaaatgtggtcctaaatcagactgtaaataaaaatataa

SEQ ID NO: 442147 - DNA, 415 bp, Homo sapiens
acaagttaaaatttcactgcatgttttatttaaacatgtgcaaataaatgtttaaaatgtggtcctaaatcagactgtaaataaaaatataaagcatagcagtctgtaggactaaggagggaaggtgattaaatgaccatgggtattcatcttgcatgcaaaagaggggaagcttgaaatgagaaggacagagaaaggctaactaaaggaaragtagaaagaaacattttatcatagtctggtgtcaccaccatcaatatttattgtgcttggctactctgtactttgcattaaagtaggtgctatgagtaactgttctatcaacactggtgttgctgaatcatctgaaactgaattgggcccaggtaacagagaatttggttgtcctaaaaagttattttagctgtttataatg

SEQ ID NO: 442148 - DNA, 456 bp, Homo sapiens
tctttaatatttatatttatctacatawcttggatttaatttgttttttaaaaaaattttctatgatggaagcttaaataattgattttaaattgtttttaatcaatttaaattgattttaaatttaaattgattttaaattgttcttctttgctaatatcatttactgatacaaattttcctcaaagcaccactttaacatcattctactagtttttataagttgtttttattttattgtggtttgaaatatttttctcacttttcttatgacttcttctttgatgcatagattacttaatgtgtctgaaatttgcaaatatttaagaaatgtgttaggctgaatagctcccaaagatatctgcataataatccctggaaactgttaatgttaccttacatggcaaaaaaaagactttgcaagtataaagttaagggtcttagatggggagatta

SEQ ID NO: 442149 - DNA, 603 bp, Homo sapiens
taggttcaatttctggttccagtttaaacaactccttttatataatagcttcctagaacttaacagatgcttaaggcaggaatacaaatgaagagattcaagagctgtcggacacattggctcatacctgtaatcccaacactttgggaggccaatgctggaatatcacttgaggtcaggagtttgagaccagcctggccaacatggcaaaaccccatctctactaataaataaataaataaaataaaaaattaactggacgtggtggcttacacctgtaatcccagcacctcgggaggccaaggcaggcagatcacttgaggtcaggaatccaagaccagcctggccaacatggcaaaaccccatctctactwaaaaaaaaaaaaaaaaaaaaaaaaaaaaagtccaaaaattagctgggggtgatggtgcatgcctgttttcctagctacgtgggtggctaaggcatgaaaatcacttgaacccaggaagtggaagttgcagtgagccatgattgcacctctgcactccagccagtgcaacagagtgagattccattaaaaaaaaatatatagagagagagattcaagacctatttctacg

SEQ ID NO: 442150 - DNA, 563 bp, Homo sapiens
accttcctctggacttttcatttatgtgaaccaactatttctcttattatttgcttgtttatttaaagacatctaacatttaagttgttgttgctttaaagagccagataggtatattttaaagattaaagaaaaatctgtaaagcctaagatagtctctttaaatatgggagctataactcttaatgtggtagaatccttcttaattatagtgtcaagggaaaggaaaacaacagagsttataggctcattaataccctaggtgtttatggaatgtagtttgggaagcatttactttaattgacagtttgtttgagcctacataaaaatgagcaaggaggtttgacctcattttaccattaagttagagatcacattctagaaaatatgtttaatgaagtaacttaaaattaaaaaacatgtgtaacgagaagtgaggaaggccaatagcagtttatgccttatgatatattaaagtgtgaggataagttttaagaaattaaataggtggcagggaaaaagagccctatgttaattaaaattgatagaagactgaattgaat

SEQ ID NO: 442151 - DNA, 645 bp, Homo sapiens
agctaagtcatgtcttacatggcagcaggcaagagactgtgcagggaaactcccctttataaaaccatcggmtctcatgagacttattcactatcatgagcacagcatggaaaagacttgccctcatgattcaattacctcccaccagttccctcccaggacacgtgggaattaggggagttacaattgaaaatgagatttggatggtgacaccgccaaaccatatcgcacagactaaaagaataatataagaatatagtttaaacagataaagattatatcagaaatgcaaaggtaatacagtattaaaaatgttgtaatataacttatcattttaatatatctaaggtactggttttttttttttttttttttgaggtggagttttgctctcgttgcccaggctggagtgcgatggcacaatcttggctcactgaaacctctgcctcctgggttcaagcaattctcctgcctcagcctcccgagtagctggaattacaggctcccaacaccacactcggctaattttgtatttttagtagaaatggggtttcaccatgttggccaggctgttcttgaactcctgacctcaggtgatccgctcaccttggcctcccaaaatgctgggattacgggtgtgagcca

SEQ ID NO: 442152 - DNA, 722 bp, Homo sapiens
tgtcacagtgaataagaagagaataaataaagatttttaaagtctcttgaaggctcagaagattaggatcattatgaatctaataattctctcctgattggcaacaatgaccacatcaataacaatgagaacagaatgatattttcatacaatcattgcagacgcagctgagaaagctatatgccacattcttggaggtttcaatcatttatgaacaccctggatcaaatgaaaaaaaatctcatttgatcctagacaaactgtaaagttgactagaaagagtggtaatgggagaatggtaagtcatttaggagaaaagagaaaagttgactagaaagagtggtaaagggagaatggtaagctgtttgaaataaaaggagaaatatgtatataagaaagccctttgtaaatgataaattaataacaccttgataactttatttgtattctatatgtgggtagagacaaatgaaataataaaataatgctaataccttaatgaaacattataaaaatatataaaatacagtttaaacatgagtagatgtawttcaagatttagaagtgttttttgatctcaaacttaacaatatttttcaaggcaacatattttaaaataaatattgccgagcaacgttattttaattgcatgtttttgcctcatttttgatagctgattttttttcgtgttttacttaattaaacacattaagctaaacagg

SEQ ID NO: 442153 - DNA, 722 bp, Homo sapiens
tgtcacagtgaataagaagagaataaataaagatttttaaagtctcttgaaggctcagaagattaggatcattatgaatctaataattctctcctgattggcaacaatgaccacatcaataacaatgagaacagaatgatattttcatacaatcattgcagacgcagctgagaaagctatatgccacattcttggaggtttcaatcatttatgaacaccctggatcaaatgaaaaaaaatctcatttgatcctagacaaactgtaaagttgactagaaagagtggtaatgggagaatggtaagtcatttaggagaaaagagaaaagttgactagaaagagtggtaaagggagaatggtaagctgtttgaaataaaaggagaaatatgtatataagaaagccctttgtaaatgataaattaataacaccttgataactttatttgtattctatatgtgggtagagacaaatgaaataataaaataatgctaataccttaatgaaacattataaaaatatataaaatacagtttaaacatgagtagatgtaattcaagatttagaagtgttttttgatctcaaacttaacaatatttttcaaggcaacatattttaaaataaatattgccgagcaamgttattttaattgcatgtttttgcctcatttttgatagctgattttttttcgtgttttacttaattaaacacattaagctaaacagg

SEQ ID NO: 442154 - DNA, 565 bp, Homo sapiens
tgtctgctggtccagtttcatccsctcaggactcaagtatgccatcagaggcctaggaattgcccagcccatttctccactgttggcatccgatcactcctactgagatctgaagtcaagccaacccaacctactgacaccaccacagctgatagccacccacatgtgctaccagcctgccagggtaatgacttgctcaaactgttgcattaaccaccaacatcagcacggactgcctgggttcaggtaggttgttccactaccactactgccaacactcacaacacacaaactgcacagaagcctgagaacccaccaacatactcagcccaccactccctctatgaacatccaaaccagccacctgaaggcccaagaattgaccctctaggacctactaacacaatgccagcgtaagtcggtctggggccaaaaaacaggcatacatagccaatgactactacctctggaaccaaagactgaccgtgctggcatattagtctccaggaaacatcatcacagcctccactaataactgcaccctaaataaccaaggaaatcacag

SEQ ID NO: 442155 - DNA, 588 bp, Homo sapiens
cgcccctgcactccagcctgggtgacagagtgagactccatctcaaaaaaaaaaaaaaaaaaaaaaagggaaagaaaaagaaggaatcataagtataaaagccccaagaccaagaacacttgtccacaatttaggaaaaaacaaaggggcatgtctggctgactgactttggaggatgaggwgtgttatatgacacaaaatcacaccaattgtgtgatcagaccacagggagccttgtaaactatggagaaaaccttgaaccatactttgtgtgaagtgggaaacctttacaggttttaggcaaataactgacgtgacttgccttgcattttcattggaccattctggctgattgataggtggaaataagcaatagaagagtaagaggaaagcagagagaccagttcagaagctatcattgcattgaataaatgctattggattcaagcagatgactattccatttagctatgatataagggaaaaaaataaaaccattggccagcctattgtgttctctgatgtcacatttatcattaaaatatatgaatcattaaaaaatatacagtatcactgagttgtaggcac

SEQ ID NO: 442156 - DNA, 596 bp, Homo sapiens
tatattagaataatttgaaaattattgttgttcatattttaccacataaattaatttaaaaagtcaattacattatgtattttacatggatagtatatacctaaaatataaaaaatgttaatgtaaaatatttttctttaggtttttataaacagtggttctgtgtaattcttagaatgtttgctatattctagagagctataagataatgacataattcaattcatctgggaagagattttgagtactgatttttatttttagttttatcctttttttttttttttttggtggagtcttgctctgtcacccaggctggagtgcagtggcgcctccyggtttcaagcgattctcctacctcagcctcttgggactccaggcccaagtagctgggactccaggtgtgtgccaccacacccggctaattttttgtatttttagtagagacgggatttcaccatgttagccaggatggtcttgatctcctgacctcgtgatccgcccgactcggcttccaactatgcctgagattataggcatagttttgtccttttttaaactgacaaaagtcgtgtatatttatagctacaatgtga

SEQ ID NO: 442157 - DNA, 488 bp, Homo sapiens
cctagcaaaattcatgaaacttactgatccctctttagtcattaaatgtgcttgtaaaacggcttattttttgaatgcttctttgaaataggaaagaaaaatatagtatttttaaaagaataaagtgtcaagtaaacacactacaccaataataaaataattttaaaaccaatgagagataattaatttgttcatttaatttttgttagtcaaggtaggctaacctttacaacaaatagatcaaaaatgtacattcgttcaaacaraacagaagtatatttcttcttcagtttcagtaaaagacaaattctgcgcagacaggagagggttctgatctatgaagttactcagcaaccaatgctgataatcactctactgttattcacacaaatttcatggtaagtctgacggttatctctatgtaatccagccaataaaaggaaagaacatgactgcatggtttgaggttttcttaggccaggtttaag

SEQ ID NO: 442158 - DNA, 503 bp, Homo sapiens
tgttatatatgatgaattgcatgcattcatatgctacttaaacttacattttattcaatgggacatgtataaatatctgctttctttaaacataattttgaaaatttcaaagagtctgtataagatctccttatcaaaaattattaatgattttaaaaatatgtttctaagacattgcctgatcatgatgaaataaatggagcagcagaggcaattccaagatccacagacaagagccccaatraaacatgagtccacactccacgttcactaagagaaagagtgagtgggaaaacaggagtcagaatgggggcctggaagagatatgatgtctgagtttggcaaagagaattggcagaataatggtcagggtacccagaccgatgatcagggtccagaatttcaaagcctgcagcactgtcacttgaggcttcattggcatcaagctgactggcaacggccataacttaggattatgtacacccacaggtccagaggagaaa

SEQ ID NO: 442159 - DNA, 564 bp, Homo sapiens
ttcatgtttctaggatactggagattgacctttaagcacagctgagtctagggtccgaaataatattcagtatcagattattcctatatattattttcttttcttttcttttctttttctggttctgcttttctctgtattggctttagcttcaggtaggttcattactcatgaaaatccagatcctccccagcagcccaagagcttcttccttttaattcagyaacagagtagatactcttcatgccccgtcaacaaccccttggcactaattgttcccaaccatgccggtggcttcttataacaataatctgcagtctccctgcttggggactttctctgggtgcaagagagagggcatgctgaaagtctggaggagttaatgccccctggaacagccctcaagtttaagagttgttcttcaccattgtccagaagttctcaatgagaatgaagcccagattcccagagcactaatctcctttcctttcctgacttccccattcccctgccaatgttcttttggatcacctctcaaattaactactttccctcaagtttttg

SEQ ID NO: 442160 - DNA, 564 bp, Homo sapiens
ttcatgtttctaggatactggagattgacctttaagcacagctgagtctagggtccgaaataatattcagtatcagattattcctatatattattttcttttcttttcttttctttttctggttctgcttttctctgtattggctttagcttcaggtaggttcattactcatgaaaatccagatcctccccagcagcccaagagcttcttccttttaattcagtaacagagtagatactcttcatgccccgtcaacaaccccttggcactaattgttcccaaccatgcyggtggcttcttataacaataatctgcagtctccctgcttggggactttctctgggtgcaagagagagggcatgctgaaagtctggaggagttaatgccccctggaacagccctcaagtttaagagttgttcttcaccattgtccagaagttctcaatgagaatgaagcccagattcccagagcactaatctcctttcctttcctgacttccccattcccctgccaatgttcttttggatcacctctcaaattaactactttccctcaagtttttg

SEQ ID NO: 442161 - DNA, 564 bp, Homo sapiens
ttcatgtttctaggatactggagattgacctttaagcacagctgagtctagggtccgaaataatattcagtatcagattattcctatatattattttcttttcttttcttttctttttctggttctgcttttctctgtattggctttagcttcaggtaggttcattactcatgaaaatccagatcctccccagcagcccaagagcttcttccttttaattcagtaacagagtagatactcttcatgccccgtcaacaaccccttggcactaattgttcccaaccatgccggtggcttcttataacaataatctgcagtctccctgcttggggactttctctgggtgcaagagagagggcatgctgaaagtctggagkagttaatgccccctggaacagccctcaagtttaagagttgttcttcaccattgtccagaagttctcaatgagaatgaagcccagattcccagagcactaatctcctttcctttcctgacttccccattcccctgccaatgttcttttggatcacctctcaaattaactactttccctcaagtttttg

SEQ ID NO: 442162 - DNA, 564 bp, Homo sapiens
ttcatgtttctaggatactggagattgacctttaagcacagctgagtctagggtccgaaataatattcagtatcagattattcctatatattattttcttttcttttcttttctttttctggttctgcttttctctgtattggctttagcttcaggtaggttcattactcatgaaaatccagatcctccccagcagcccaagagcttcttccttttaattcagtaacagagtagatactcttcatgccccgtcaacaaccccttggcactaattgttcccaaccatgccggtggcttcttataacaataatctgcagtctccctgcttggggactttctctgggtgcaagagagagggcatgctgaaagtctggaggagttaatgccccctggaacagccctcaagtttaagagttgttcttcaccattgtccagaagttctcaatgagaatgaagcccagattcccagagcactaayctcctttcctttcctgacttccccattcccctgccaatgttcttttggatcacctctcaaattaactactttccctcaagtttttg

SEQ ID NO: 442163 - DNA, 569 bp, Homo sapiens
ctttcacagttaaagttaatgtctggcttcaaagtttcaagggatagattgactatcctgttaggggataatggaatggtgattttaaattgaagtcaatgtaattcaacattctgaaaattctaaagcccttagaattatgttaaatctactctgcctgtgctctrtaaatggaaaaataaggcttagagaacagcacatatatttacagtttggtttcctgaatattttaagcccactattgtgacttactgcactgagaaagatatgcctttcaaaatattactgctcattgacaatgtacctggtcaccaaagagctctgatggagatgtacaaggagattaatgttgttttcttgtttgctaacaaaacgctcattctgtatcccatggattaagaagtaattttgacgttcaagtcttattgtttaagaaagatatttcataaggctatagttgccatagataataattccactgatggatctgggcaaagtaaattgaaaaaccatttggaaaggattcaccattatatgccgttaagaccatttgtgattcatgggagaag

SEQ ID NO: 442164 - DNA, 569 bp, Homo sapiens
ctttcacagttaaagttaatgtctggcttcaaagtttcaagggatagattgactatcctgttaggggataatggaatggtgattttaaattgaagtcaatgtaattcaacattctgaaaattctaaagcccttagaattatgttaaatctactctgcctgtgctctgtaaatggaaaaataaggcttagagaacagcacatatatttacagtttggtttcctgaatattttaagcccactattgtgacttactgcactgagaaagatatgcctttcaaaatattactgctcattgacaatgtacctggtcaccaaagagctctgatggagatgtacaaggagattaatgttgttttcttgtttgctaacaaaacgctcattctgtatcccatggattaagaagtaattttgacrttcaagtcttattgtttaagaaagatatttcataaggctatagttgccatagataataattccactgatggatctgggcaaagtaaattgaaaaaccatttggaaaggattcaccattatatgccgttaagaccatttgtgattcatgggagaag

SEQ ID NO: 442165 - DNA, 556 bp, Homo sapiens
actccaatttttaaagaggttctactatagataaaatgctatcaaacagcttggcatcgtaaaaagaaatattttctgataggaagagtcaactgatgcarcaaacttcattattctcttattttaagaagatttcacagccacccagccttcagcaatcaccaccctgatcagtcagcagccatcaacattgtggacaagaccctccatgagcaaaaacattatgactctccgcaatcttcgataatcattagcatatttttggccataaagtattttagattaaggtatgcactttgatatctagaaatgcttttcatatgtaatagactacagtatagtggaaacataatatatatactaggaaatcaaaaatttgtttgaatccctttattgctgtatttgctttattgcagtggtctggaactgaacctgcaatatctctgacatatgcctgtatcagctccagtgtaaaatactgtaaatatctatgcaaattgtggcctttaataaaaacataggaggatgtttctttttattttgttttcattttttt

SEQ ID NO: 442166 - DNA, 556 bp, Homo sapiens
actccaatttttaaagaggttctactatagataaaatgctatcaaacagcttggcatcgtaaaaagaaatattttctgataggaagagtcaactgatgcagcaaacttcattattctcttattttaagaagatttcacagccacccagccttcagcaatcaccaccctgatcagtcagcagccatcaacattgtggacaagaccctccatgagcaaaaacattatgactctccgcaatcttcrataatcattagcatatttttggccataaagtattttagattaaggtatgcactttgatatctagaaatgcttttcatatgtaatagactacagtatagtggaaacataatatatatactaggaaatcaaaaatttgtttgaatccctttattgctgtatttgctttattgcagtggtctggaactgaacctgcaatatctctgacatatgcctgtatcagctccagtgtaaaatactgtaaatatctatgcaaattgtggcctttaataaaaacataggaggatgtttctttttattttgttttcattttttt

SEQ ID NO: 442167 - DNA, 497 bp, Homo sapiens
agttttatcaccagtgtcatctactaagatgtgttcacacagtgttaaataataaattatgatgaggaattggaacacagcatttgagtgagagctggaagacacagttttagttctgacacctctctttacttaatgtttcatctagaacaagttatttaatatccttggaccatgattcctcattggcaaaataaaacttttaggatgcagaatcaataaagctttttctaaattattaaatgcagatccacaattacagtgcacttagttttgtctaaaaataagtgatatgaacattttcagttcagtgggcaaataaacattattgctataaacacagagaraaaaaaaagttcattgtcattccattgacgtggtctggatctttggtaaggaccaggctggttcttaagaaaacaaaacaatagaagatcggaataccatcacaagaggacatatggaagcaataagaaaaacaaaatgggtcataggtt

SEQ ID NO: 442168 - DNA, 638 bp, Homo sapiens
cctgacttgctaaacctagaatcatttgggagtgacatataaacattacaataaattaatcaataggcttgggtacatagtatacttcaagtttcaaataggaagaccacagctgagggcgaaagttcctacagattctcatactctgggccatctgtgttggaagaatactgtaggcatcaacttccaagtagcaacacaatataggaattattagacattagaggcactctaaatattcaagtttcatatttttctgtagtattttctgtaaacaagagaaagtgggaatatgtaagtgaacgagaaaatgaagtaaagtatgtttgctgcaatgaaattttggtagaaatagagtcaggtgctctaaggctttgtaatggcatccctgtgataatgatcaacaagggttaagggagcgccctcctgggattcactgtgctctggcatatcttcctctgtcattaattagaagcayatcatctcatatgtgcagaaagaaaaaaggttaatagagtccccgggcatacataagtattagactttggtttagataaattatgctaacaaagttatcaaagcattcaagattttccagtgacaccattgcatctgtagaacaaaatccttgaatacac

SEQ ID NO: 442169 - DNA, 564 bp, Homo sapiens
tttcatgaggagaaactaaggttcaagtaaactgaaaattatgcgatgccacttgactctacagtgcagttaggattttaatcaaagtatcattctgaaatttaaatatttttccatcccactatgatagtgactagcaatcartgtatcctacacaactccttaatggtataaaaacattttgaagagtaggtccagtaaaataatttttaagctatgactcattagaaaacaaaaatagctgcagatgtggtaataaaacaactctctagaatgtatagaattgtcttttaatataaaaacatctggctcaaaaattaaatcttagaaaaacatcttaaagaccaaatgtctattatcaaagtgtttcactttcaaccagatatattatgatatattacaactgtgctgttagctctgtaacagcacattaccactgcattgctgctttggttaaaatagattctgttgctaggaaaaacttccagacttgttaaagaatgattcattttaattgatatctttattcctcctttgctgtaggccatatgtcacaacagaaag

SEQ ID NO: 442170 - DNA, 564 bp, Homo sapiens
tttcatgaggagaaactaaggttcaagtaaactgaaaattatgcgatgccacttgactctacagtgcagttaggattttaatcaaagtatcattctgaaatttaaatatttttccatcccactatgatagtgactagcaatcaatgtatcctacacaactccttaatggtataaaaacattttgaagagtaggtccagtaaaataatttttaagctatgactcattagaaaacaaaaatagctgcagatgtggtaataaaacaactctctagaatgtatagaattgtcttttaatataaaaacatctggctcaaaaattaaatcttagaaaaacatcttaaagaccaaatgtctattatcaaagtgtttcactttcaaccagatatattatgatatattacaactgtgytgttagctctgtaacagcacattaccactgcattgctgctttggttaaaatagattctgttgctaggaaaaacttccagacttgttaaagaatgattcattttaattgatatctttattcctcctttgctgtaggccatatgtcacaacagaaag

SEQ ID NO: 442171 - DNA, 564 bp, Homo sapiens
tttcatgaggagaaactaaggttcaagtaaactgaaaattatgcgatgccacttgactctacagtgcagttaggattttaatcaaagtatcattctgaaatttaaatatttttccatcccactatgatagtgactagcaatcaatgtatcctacacaactccttaatggtataaaaacattttgaagagtaggtccagtaaaataatttttaagctatgactcattagaaaacaaaaatagctgcagatgtggtaataaaacaactctctagaatgtatagaattgtcttttaatataaaaacatctggctcaaaaattaaatcttagaaaaacatcttaaagaccaaatgtctattatcaaagtgtttcactttcaaccagatatattatgatatattacaactgtgctgttagctctgtaacagcacattaccactgcattgctgctttggttaaaatagattctgttgctaggaaaaactyccagacttgttaaagaatgattcattttaattgatatctttattcctcctttgctgtaggccatatgtcacaacagaaag

SEQ ID NO: 442172 - DNA, 597 bp, Homo sapiens
attttacttccttaggaaataataaaagactagaaatatctgacgatttgtatcttctattttgctttaactttgaatatatataaagctaagagtgcagtttaaagcaaactataaagctctgtaaactgtatacatgtgcagtcacgtgtaacatgtctagcctrtcttgaggccgttctctaaagcagtggttttcaaaattccagtaatataatatgaccagttttattacattaacatgatatattattgttatcatacttcttgggttgccataacataatgccacagacttggtagtttaaacacagaaatttattttctcacagttctggaggctggaagtccatgatctaggtgccagccttattttctgctaaagcctctattcctggcttgcaggtggccatctactcactgtgttctcatctgacctttcctctgtgtgggtacactccttttgtaccttcctttcactataagaataccagtcctgggccaggcatggtggctcacgcctataatcccagcactttgggaggccaaggcgggcggatcacgaggtcaggagatcaagatcatcctggctaacaa

SEQ ID NO: 442173 - DNA, 597 bp, Homo sapiens
attttacttccttaggaaataataaaagactagaaatatctgacgatttgtatcttctattttgctttaactttgaatatatataaagctaagagtgcagtttaaagcaaactataaagctctgtaaactgtatacatgtgcagtcacgtgtaacatgtctagcctatcttgaggccgttctctaaagcagtggttttcaaaattccagtaatataatatgaccagttttattacattaacatgatatattattgttatcatacttcttgggttgccataacataatgccacagacttggtagtttaaacacagaaatttattttctcacagttctggaggctggaagtccatgatctaggtgccagccttattttctgctaaagcctctattcctggcttgcaggtggccatctactcactgtgttctcatctgacctttcctctgtgtgggtacactccttktgtaccttcctttcactataagaataccagtcctgggccaggcatggtggctcacgcctataatcccagcactttgggaggccaaggcgggcggatcacgaggtcaggagatcaagatcatcctggctaacaa

SEQ ID NO: 442174 - DNA, 597 bp, Homo sapiens
attttacttccttaggaaataataaaagactagaaatatctgacgatttgtatcttctattttgctttaactttgaatatatataaagctaagagtgcagtttaaagcaaactataaagctctgtaaactgtatacatgtgcagtcacgtgtaacatgtctagcctatcttgaggccgttctctaaagcagtggttttcaaaattccagtaatataatatgaccagttttattacattaacatgatatattattgttatcatacttcttgggttgccataacataatgccacagacttggtagtttaaacacagaaatttattttctcacagttctggaggctggaagtccatgatctaggtgccagccttattttctgctaaagcctctattcctggcttgcaggtggccatctactcactgtgttctcatctgacctttcctctgtgtgggtacactccttttgtaccttcctttcactataagaataccagtcctgggccaggcatggtggctcacgcctataatcccagcactttgggaggccaaggcgggcrgatcacgaggtcaggagatcaagatcatcctggctaacaa

SEQ ID NO: 442175 - DNA, 202 bp, Homo sapiens
cagtgggaagtcataaactgggaagttttagaaggggtragggttgaaaatttacctattgagtacagtgttcactactcaggagatggttgcactgaaagcccagacttcaccactatgcagtatattcatgtatcaaaactgcacttctacctcgtgaatctattaaaatttttaaagtaaattattttaaaaagcaaga

SEQ ID NO: 442176 - DNA, 202 bp, Homo sapiens
cagtgggaagtcataaactgggaagttttagaaggggtgagggttgaaaatttacctaytgagtacagtgttcactactcaggagatggttgcactgaaagcccagacttcaccactatgcagtatattcatgtatcaaaactgcacttctacctcgtgaatctattaaaatttttaaagtaaattattttaaaaagcaaga

SEQ ID NO: 442177 - DNA, 437 bp, Homo sapiens
aattgcagaacaataattgtagcaatgagccatcttatgctttataacatttttgtaaattgcaaatctacttgacttgcattaaaatgtataccaaagttactctgaggtttttttttttttaaaggagagactcatttttccccatgttacagaagtttatttaggctctgtcaaatgctggtcatcrtgtttggcactactgtttatgactgtaatcccaacagttagcatagtgcctgggaaatcatactcccctgattacttcttcatgcataagtgagtaatggcagtacttgggatcaggacagctgaacttaattgccagttctctcttgcctgggttatagaatcttttcttttacttttctgctcttaaaatgattagctgtaaattaattctgaaaataataatagctataccaaaatgtagacaa

SEQ ID NO: 442178 - DNA, 293 bp, Homo sapiens
gagtagtttatgcaaaaaagtaatataaataataaataacaatacacatgttgtgattatccttatctcattcatactawacagaataaaatgctacatttcatattataaaatgctgacaaagaaggccttaactttcccttcagtttgctaaacttcatacaggcttctttcagactcaaggccccttacctcttaggtaattttctgtaaaactttgtcgcttaaattctcttttttctttgagctgtaaatatttttgaaaagcctgtcattagtttcacatcccacaa

SEQ ID NO: 442179 - DNA, 293 bp, Homo sapiens
gagtagtttatgcaaaaaagtaatataaataataaataacaatacacatgttgtgattatccttatctcattcatactaaacagaataaaatgctacatttcatattataaaatgctgacaaagaaggccttaactttcccytcagtttgctaaacttcatacaggcttctttcagactcaaggccccttacctcttaggtaattttctgtaaaactttgtcgcttaaattctcttttttctttgagctgtaaatatttttgaaaagcctgtcattagtttcacatcccacaa

SEQ ID NO: 442180 - DNA, 293 bp, Homo sapiens
gagtagtttatgcaaaaaagtaatataaataataaataacaatacacatgttgtgattatccttatctcattcatactaaacagaataaaatgctacatttcatattataaaatgctgacaaagaaggccttaactttcccttcagtttgctaaacttcatacaggcttctttcagactcaaggccccttacctcttaggtaattttctktaaaactttgtcgcttaaattctcttttttctttgagctgtaaatatttttgaaaagcctgtcattagtttcacatcccacaa

SEQ ID NO: 442181 - DNA, 580 bp, Homo sapiens
ttttatttatatctgttgagttactggaacttctttcctagttactaaatagcctcctgcttatccctagatgtttagtaatcaacatccrttgtccctcttagttctgcctttcccatccagcctcacatgccagcctctttgctgtttacccagatcatataaaacttcaagaactctttaaatattacattcaaagaaaattgatgtaacatcagatgatgttttgatgaagatttgtggacctgagaaattactgtaaaagaggctttctatcaaaacccaccttttattctggtccaaattaggcttactcctttccacataagtcaatgtcagtttgattactactgacattgatcagtagttcgatgcatttttttttttaattttattttctctttttgctggggtatcatacattttttgaaatacactttgtagaataacactatcaatataaaactattttcttcctttcattaagtgcatttttatttgtctaaatatgataatcgtagtagctctgcaaagaaatttatatatattgttataattatgaaccattttgacaaaaaga

SEQ ID NO: 442182 - DNA, 580 bp, Homo sapiens
ttttatttatatctgttgagttactggaacttctttcctagttactaaatagcctcctgcttatccctagatgtttagtaatcaacatccgttgtccctcttagttctgcctttcccatccagcctcacatgccagcctctttgctgtttacccagatcatataaaacttcaagaactctttaaatattacattcaaagaaaattgatgtaacatcagatgatgttttgatgaagatttgtggacctgagaaattactgtaaaagaggctttctatcaaaacccaccttttattctggtccaaattaggcttactcctttccacataagtcaatgtcagtttgattactactgacattgatcagtagttcgatgcatttttttttttaattttattttctctttttgctgggrtatcatacattttttgaaatacactttgtagaataacactatcaatataaaactattttcttcctttcattaagtgcatttttatttgtctaaatatgataatcgtagtagctctgcaaagaaatttatatatattgttataattatgaaccattttgacaaaaaga

SEQ ID NO: 442183 - DNA, 607 bp, Homo sapiens
tgattactactgacattgatcagtagttcgatgcatttttttttttaattttattttctctttttgctggggtatcatacattttttgaaatacactttgtagaataacactatcaatataaaactattttcttcctttcattaagtgcatttttatttgtctaaatatgataatygtagtagctctgcaaagaaatttatatatattgttataattatgaaccattttgacaaaaagagcaaatcagcattttttaaccctaatgggacctaaactatatagtcattcatcagcatatataatcatacaatacttctactaatgagagttttaaaaattgtgtgggcttatacacaatttacaggagcatcaccctaaaaaaaaaaacgggaaaaaaaaaagtagctaactatttatcagatagcttattgtacaccaggcttggccatttaaaatcctgtttctcagatttttgaaatattcctactatggctctaaaatgactactaagcttttgtatttatctgtcttggggaaggaacttctttgggggtttcaagttatctagagattgtcacttgatgtattactttaatcattttgttg

SEQ ID NO: 442184 - DNA, 607 bp, Homo sapiens
tgattactactgacattgatcagtagttcgatgcatttttttttttaattttattttctctttttgctggggtatcatacattttttgaaatacactttgtagaataacactatcaatataaaactattttcttcctttcattaagtgcatttttatttgtctaaatatgataatcgtagtagctctgcaaagaaatttatatatattgttataattatgaaccattttgacaaaaagagcaaatcagcattttttaaccctaatgggacctaaactatatagtcattcatcagcatatataatcatacaatacttctactaatgagarttttaaaaattgtgtgggcttatacacaatttacaggagcatcaccctaaaaaaaaaaacgggaaaaaaaaaagtagctaactatttatcagatagcttattgtacaccaggcttggccatttaaaatcctgtttctcagatttttgaaatattcctactatggctctaaaatgactactaagcttttgtatttatctgtcttggggaaggaacttctttgggggtttcaagttatctagagattgtcacttgatgtattactttaatcattttgttg

SEQ ID NO: 442185 - DNA, 607 bp, Homo sapiens
tgattactactgacattgatcagtagttcgatgcatttttttttttaattttattttctctttttgctggggtatcatacattttttgaaatacactttgtagaataacactatcaatataaaactattttcttcctttcattaagtgcatttttatttgtctaaatatgataatcgtagtagctctgcaaagaaatttatatatattgttataattatgaaccattttgacaaaaagagcaaatcagcattttttaaccctaatgggacctaaactatatagtcattcatcagcatatataatcatacaatacttctactaatgagagttttaaaaattgtgtgggcttatacacaatttacaggagcatcaccctaaaaaaaaaaacgggraaaaaaaaagtagctaactatttatcagatagcttattgtacaccaggcttggccatttaaaatcctgtttctcagatttttgaaatattcctactatggctctaaaatgactactaagcttttgtatttatctgtcttggggaaggaacttctttgggggtttcaagttatctagagattgtcacttgatgtattactttaatcattttgttg

SEQ ID NO: 442186 - DNA, 523 bp, Homo sapiens
agattcatggcaacctgctccttcaaagctagcaacaaagaaagaatctgcttcttcatgtctttaacttctcttgtaaagagatcacatgattaggtcagacctactcgggatagtctcccctttgattaatttaaaatcaacagataggggccttaattatatttgcaaaatccttcacttttgccatacaatgtaaacacattcacagtttccacccactattggagagggcagaacccttccaagtttcaactattcttctgaaattggccaaatcaattcttccctatgttcctgctgactgttttgaggttctcttgttctcagctcctcagatcctcttccacttgatccttcctcttsccacaaagaatccataccatgcaggatttggactactggtggccaaattgcttctattttagagttcattaggacttaccacctggttctgttgtaaatgttgtttactgattgttggttttgctatcttgttcctctataattccttgtattgaca

SEQ ID NO: 442187 - DNA, 535 bp, Homo sapiens
tgtaaacacattcacagtttccacccactattggagagggcagaacccttccaagtttcaactattcttctgaaattggccaaatcaattcttccctatgttcctgctgactgttttgaggttctcttgttctcagctcctcagatcctcttccacttgatccttcctcttcccacaaagaatccataccatgcaggatttggactactggtggccaaattgcttctattttagagttcattaggacttaccacctggttctgttgtaaatgttgtttactgattgttggttttgctatcttgttcctctataattccttgtattgacaatttatgttttcttttttgttgttgttgatctgtgttactagaggcttatcaacygtaataattttaaagacaccatttggtttcactggttatttctattgttttctgtttcctaatccatttatttctgcatctgattatatccatccttgtacttactttgagtttaacttgctcatcttcttatacttaaaatgaaagttta

SEQ ID NO: 442188 - DNA, 535 bp, Homo sapiens
tgtaaacacattcacagtttccacccactattggagagggcagaacccttccaagtttcaactattcttctgaaattggccaaatcaattcttccctatgttcctgctgactgttttgaggttctcttgttctcagctcctcagatcctcttccacttgatccttcctcttcccacaaagaatccataccatgcaggatttggactactggtggccaaattgcttctattttagagttcattaggacttaccacctggttctgttgtaaatgttgtttactgattgttggttttgctatcttgttcctctataattccttgtattgacaatttatgttttcttttttgttgttgttgatctgtgttactagaggcttatcaactgtaataattttaaagacaccmtttggtttcactggttatttctattgttttctgtttcctaatccatttatttctgcatctgattatatccatccttgtacttactttgagtttaacttgctcatcttcttatacttaaaatgaaagttta

SEQ ID NO: 442189 - DNA, 632 bp, Homo sapiens
ttcttgggccatttgttgcatagagtgtcccaaattctttatttggccaatcaccttcttaaagtgattaacagtttaccacrtttttggtaaactggtaattgcatcaaggggattaattagatttaggttaattccccccacacacacacctgatttttagcaagagtactttataggcagtacttttcaacatgtttaattggtaaactctccctcatctttgcattctcttccacctgccaatcttcttcctctcaatccacagtggaacatctccagaaagttgttacctttgctttcataatttcttcacctttcactcatttttcaacccattcagatctggcttctgtccctgttattctcagaaacaacaatgacatccatacctccaaatcaaacagagatttattttttcaattcctatgtttttccaattaaaacatttggtagcttaaaatgggaatttattttatctctcatggttctgtggaatgactggatttagctgcacaattctcatttggggtctttctatgggttggattcatctgaaggcttgaaatccaagatggcttcttccttcatatggctggtatccaggttgaattactggaactggggtctgg

SEQ ID NO: 442190 - DNA, 632 bp, Homo sapiens
ttcttgggccatttgttgcatagagtgtcccaaattctttatttggccaatcaccttcttaaagtgattaacagtttaccacatttttggtaaactggtaattgcatcaaggggattaattagatttaggttaattccccccacacacacacctgatttttagcaagagtactttataggcagtacttttcaacatgtttaattggtaaactctccctcatctttgcattctcttccacctgccaatcttcttcctctcaatccacagtggaacatctccagaaagttgttacctttgctttcataatttcttcacctttcactcatttttcaacccattcagatctggcttctgtccctgttattctcagaaacaacaatgacatccatayctccaaatcaaacagagatttattttttcaattcctatgtttttccaattaaaacatttggtagcttaaaatgggaatttattttatctctcatggttctgtggaatgactggatttagctgcacaattctcatttggggtctttctatgggttggattcatctgaaggcttgaaatccaagatggcttcttccttcatatggctggtatccaggttgaattactggaactggggtctgg

SEQ ID NO: 442191 - DNA, 604 bp, Homo sapiens
aattaccgaaaaaattatagaaatgcagaaccaattaaaaacatttaaaaccacactttcttgaggtggtaattggattaatgggaaatttgacacacttaattaaaccctttttcccatataaggttatttccatttttattttattaagtccctatataattacttatattaattattagaggaacagacatagcaacagccacattgtggcatgaaatgcaaaatgtgcatgctgtattaaaatagatcataagttttcaaagaaatgttatgcttacagttgtttgctttgacagaaacatctaatacctcaaaggttgtgtacttttattccaatgggtattcctcagtagaaaaaaattcagaaggaagtctagatagcctccaagatcatatctagcaamaaactttagatttttttcaataaaaaatatgcttgtttcaagtgacagaaatgcaaataatacttgtttgaaagagaaggagctcaggaaaaatacagaggaatattagtttgaactgttgctagacatggaagctacgcaggggactcactgtcatttcttccctttgttctcaggccgcctctgtttgtgtctag

SEQ ID NO: 442192 - DNA, 630 bp, Homo sapiens
ggtagcatatttttaaggaagaaacttagaggcttataatgttaatgcactaagataaaattagcaatatattaaaaaaaagaaacctaagtagtggtacttaagtgtcttggaaatttatgcacatatctatcaatagaacttgaaaaatacactgtcctccatcctgttctgygactgatttttactatacctatatattaaatgtaataactcatcctgttctcttaacattcttggtatcattcgagctacagaggtttctgacagtttcaaggaccagcagaatatttcacaaatgaggtacttgctactcaacaacagtcagccctctgatatcaagaaatctttaggcttaccctatgtggtttagttgtattaatgagtcctaaataacattgtgtttctttctttgaataagtgcattcaacaaaattttaaccatgcttctttcttactgaagctaagtaacatgcagcaaaaacacagtcataaagaaagtgaaaaaataatttatatatcctttatcttatagaataagaaatctgaagaagataatgtttcttttgttctaaaaaacttctggacttttattaagagacaaaaaccacttcaatagtgtaaaaattg

SEQ ID NO: 442193 - DNA, 558 bp, Homo sapiens
tatctctgttgattctgctgatgttgcaaccattatccctttgtaagccaggatataaagaaaaatctcactgagtagtacctaatgggggctctataatgcaatacagggatggtattaacaatttsaacaaatcgtatcctttcagtaagtgaatattgtacaacagagccatattgtcatgggtaattatcattcttgaagtctctctcttttttatgctgcatataattctatcatacaacattctcctaccctacaatgtaactatcaactaactcagctgtactatcaacttagacactcagtaaagagctgtttattgaactgaatttgcatatacagactgtcaaattccattatgacgtaaaacctaaagaaaaatggaaacatttacaccaaaattattagcaaaattaacttttctgtcccattaaaaagataaacagttcctgtatgaaaatttggtatatatttatgaacaattcaaaccctaatgaacttggactctcaagtttatatttgaatcttgcatgtcacatataaatgtttgcacat

SEQ ID NO: 442194 - DNA, 555 bp, Homo sapiens
tgcaaccattatccctttgtaagccaggatataaagaaaaatctcactgagtagtacctaatgggggctctataatgcaatacagggatggtattaacaatttgaacaaatcgtatcctttcagtaagtgaatattgtacaacagagccatattgtcatgggtaattatcattcttgaagtctctctcttttttatgctgcatataattctatcatacaacattctcctaccctacaatgtaactatcaactaactcagctgtactrtcaacttagacactcagtaaagagctgtttattgaactgaatttgcatatacagactgtcaaattccattatgacgtaaaacctaaagaaaaatggaaacatttacaccaaaattattagcaaaattaacttttctgtcccattaaaaagataaacagttcctgtatgaaaatttggtatatatttatgaacaattcaaaccctaatgaacttggactctcaagtttatatttgaatcttgcatgtcacatataaatgtttgcacataaaagtatgtggtttaaaaaa

SEQ ID NO: 442195 - DNA, 558 bp, Homo sapiens
tatctctgttgattctgctgatgttgcaaccattatccctttgtaagccaggatataaagaaaaatctcactgagtagtacctaatgggggctctataatgcaatacagggatggtattaacaatttgaacaaatcgtatcctttcagtaagtgaatattgtacaacagagccatattgtcatgggtaattatcattcttgaagtctctctcttttttatgctgcatataattctatcatacaacattctcctaccctacaatgtaactatcaactaactcagctgtactatcaacttagacactcagtaaagagctgtttattgaactgaatttgcatwtacagactgtcaaattccattatgacgtaaaacctaaagaaaaatggaaacatttacaccaaaattattagcaaaattaacttttctgtcccattaaaaagataaacagttcctgtatgaaaatttggtatatatttatgaacaattcaaaccctaatgaacttggactctcaagtttatatttgaatcttgcatgtcacatataaatgtttgcacat

SEQ ID NO: 442196 - DNA, 568 bp, Homo sapiens
tatggacaagtctgaaagtgaaaaattccagggggacctaatcataagagggcttccatgattttttgagtttttcctccaggaactcaacccagtttcacaaactgaatattagagaaaaattatctcatgcttctggcagggggagaggaaagcagatcattcagaaatagaccagaactctctgttcttcttaacaaggcctgccctcagaataaactactttactagaacctattctactgtggttttatcacagtctagcaaaactggargaagggaaatatttgactccagctccttctagctatcctacgccaactaagtgcgggggcagaggatgaaactcattggtgaaggtcacagttcaggggcacatactcatcaaaaaactgagaccgaatcacaggactatagaatgcttcccctcactcctcacccaccacacaccttaacactacattaccaaagtcctatttactgcagttcttttacccagtacatcatgcacatttttcaacaaaaaattacaagacatactaaaaagcaaaaagcatagttggaggag

SEQ ID NO: 442197 - DNA, 643 bp, Homo sapiens
ctataacatatgggtaatgagaattcacaaaaaagaagagagaaaaaaagaagcaatatgtgaaagaataataattgaagatttcccctaattaaggtcacacatcaaatcacatatccaggaatctcagagaatatcaagcagaataaaggttaaaaaaaaaaaaaaactacacataaacataccatattcaaacctcagaacatcacagactaaaaaaaaaaaatcttgaaacaagaaagatgaaaaaaatttcacctaaagagggaaaattataagaattgtagctggcatctcagaaaccatgcagggaagaaaagaatggagtgaaatatttaaagtgttgagagtaaaatccaccaacctagaattctctgctatgcaaaattatccttcagaagtaaaggaaaaataaagactttctaagacaaaaattaaaagaattttttgccaatagacctcccttgctagaaatatcaaaggaagttgttcagaaagaagaaaaattatgtgggtcagaaaccagatctacataaagaaaggaagagcrtcaaagaataaataactgaagttaaaataaaattttattctcttgctcttaattgatctaacatacactgttcaaaataattatagcagcatt

SEQ ID NO: 442198 - DNA, 596 bp, Homo sapiens
agaagttaaaatcatttgctcttggaagcacactgttaagagaatgaaaagatgagggaggagttagaaataaggtactagcacaacatgtgaagctgcatagwattatgtgaaagtggactttgattacttgtaaatgtgtatgcaaatactagcacaattatttaaaaaattttaaagaagaataatagatttgctaagaaagaagaaaaaattgaataatataaaatactcaattaaaaccacaaagggcagaaaatggaagaccaaaaaaaaaaaaagtaatagtaacaaatatggtagagattaatttaaacacatcaataatcatcttaaatgtcaatggcctaagtacaccaattaaaagacagaaattgtcagagtagattaaaaactaacatctaactagatgttgtctatgagaaagtcattttaagtaaaaacagacataaagtaaagggatgagggaagatactccataataacactaatcaaaagaaagcatgagtagctgtattaatttcagacagaggggacttcaaagcatggaatgttactagggataaagagggacattacataatgttaaagatgtc

SEQ ID NO: 442199 - DNA, 596 bp, Homo sapiens
agaagttaaaatcatttgctcttggaagcacactgttaagagaatgaaaagatgagggaggagttagaaataaggtactagcacaacatgtgaagctgcatagtattatgtgaaagtggactttgattacttgtaaatgtgtatgcaaatactagcacaattatttaaaaaattttaaagaagaataatagatttgctaagaaagaagaraaaattgaataatataaaatactcaattaaaaccacaaagggcagaaaatggaagaccaaaaaaaaaaaaagtaatagtaacaaatatggtagagattaatttaaacacatcaataatcatcttaaatgtcaatggcctaagtacaccaattaaaagacagaaattgtcagagtagattaaaaactaacatctaactagatgttgtctatgagaaagtcattttaagtaaaaacagacataaagtaaagggatgagggaagatactccataataacactaatcaaaagaaagcatgagtagctgtattaatttcagacagaggggacttcaaagcatggaatgttactagggataaagagggacattacataatgttaaagatgtc

SEQ ID NO: 442200 - DNA, 497 bp, Homo sapiens
ctgtggcctgttaccttcttccctactctttgtaccctctgctctgacctgcacctctagaggccttgcacacccatggtggacaccctagcctgcacctcaaaggtccatccacacatacgctaccttcaaggcaaactgcttccctttggtacacccttcagagtggcccatccttgggaagacagatgcagagaagaggcccatgtgagttctggatgtgagcygggaccgttcaggagacaattcagagtcttgggaggtgaagcacagtcaggggacaggggtagggagcaggcaagtcaccttggcccaaagactcctcaccccttagaaaagagtgtgactagagcaaggccctataaagcccagggcccagtatgggggctgtgcttgcttgagtctaagatgagtaaaggcccataggaaagcagatgctgcatctaaagagggcagctaaactcaactctagctagttcccacctcctggaaatgtg

SEQ ID NO: 442201 - DNA, 540 bp, Homo sapiens
agctgggactacaggtgcacactaccatggccggctaatctttggatattttgtagagacagggttttgccatgtttcccagactagtctcgaactctttggcttaagtgatttaccttcctctgcctcccaaaatgctgcgactrtaagcataagcccccatgcccggctaatgaataatttttttaaaaagcaattgaaaaaaataagtaaaagcaggtcttaggagtttaaaactaacaaaataactcgttcataatgatgacccaagtcatcaagttagattatattcattatattgtcagaaaatctgaaagacttatactttaggaacattttaatcagtttttaaataaccttttgtatctaaggaagaaacctcagttacatgagaaatgtgcttatgtagtggaacacttaaagtgggccttttctgtcagagttaggcgttgtgagagaatatgaaaaaataaaagtaagtaggatactgtccctgcttttcaaatatttcccgtcttaatttcacttacttggaacttt

SEQ ID NO: 442202 - DNA, 540 bp, Homo sapiens
agctgggactacaggtgcacactaccatggccggctaatctttggatattttgtagagacagggttttgccatgtttcccagactagtctcgaactctttggcttaagtgatttaccttcctctgcctcccaaaatgctgcgactataagcataagcccccatgcccggctaatgaataatttttttaaaaagcaattgaaaaaaataagtaaaagcaggtcttaggagtttaaaactaacaaaataactcgttcataatgatgacccaagtcatcaagttagattatattcattatattgtcagaaaatctgaaagacttatactttaggaacattttaatcartttttaaataaccttttgtatctaaggaagaaacctcagttacatgagaaatgtgcttatgtagtggaacacttaaagtgggccttttctgtcagagttaggcgttgtgagagaatatgaaaaaataaaagtaagtaggatactgtccctgcttttcaaatatttcccgtcttaatttcacttacttggaacttt

SEQ ID NO: 442203 - DNA, 575 bp, Homo sapiens
ttctgttattattttaccttttgaaatatctttttgtttgctttttgtgatgcttaaagcagcaatgcatgtaatctataaataatttataaatatttatgatttttatattatctatatatattttcaagagaagtaggactaaaattcaggtctgctctttcagtttccaaaagctgattaattctcagaatgaattccaaattgggctactggtgtgtatattgcctttttcaaaggcggtaacatattttgaaagtcccaacacagatttttaaatttttagtatcaaaaatacagttttgaccacgcattgctatagatacaattttctctgttagataacatatctattctcaagaaagttatattttagaagggatctcattcatccatttgaggcaactgtgagaaatagcaattaacattagaaacagggagaagatcatctaagtggaaaggaatagaaaataataggaaattatgaaaagaactttagaraacgtcaaatattagtatgaatttttacctcttccaaaactgatttttaaatgatgatatttttgaaaacttta

SEQ ID NO: 442204 - DNA, 594 bp, Homo sapiens
agtttattacaaatcatttcccacttcctgttgctacaaaaagcagcctttcctttcaaaagatgttttccagggctcaggggaattgttaaccaagggagaaattttaagagatctaaattccaaccagcctctctgtggacaaatggaagttgaaaagtagacatttcaagcttaatgaagattgttaaaggtggagtaattcacatgcccaaagctcatatttaatgtcatttacatccctttgctttaaaatgaaaatagaatcactgaagacagaaagggaggtaattatgtaattaaatgcaatacttaatgcactattttacataattttgcctaaacttattagactgctgatctccaaactgrcttttctagatatatgaaaatctcaaaataagattttaatattaatttaaaaaataaatatggaaattaaataaaccaggaaatttaaacacgattccctctcaataaaaagtctcagaaactacaaaccactgatctaatcctagaggaatggaggcatagagtttgaatttgaaacttaccaagcaaaatgttcacagtgtctgagcacatgacattaag

SEQ ID NO: 442205 - DNA, 594 bp, Homo sapiens
agtttattacaaatcatttcccacttcctgttgctacaaaaagcagcctttcctttcaaaagatgttttccagggctcaggggaattgttaaccaagggagaaattttaagagatctaaattccaaccagcctctctgtggacaaatggaagttgaaaagtagacatttcaagcttaatgaagattgttaaaggtggagtaattcacatgcccaaagctcatatttaatgtcatttacatccctttgctttaaaatgaaaatagaatcactgaagacagaaagggaggtaattatgtaattaaatgcaatacttaatgcactattttacataattttgcctaaacttattagactgctgatctccaaactgacttttctagatatatgaaaatctcaaaataagattttaatattaatttwaaaaataaatatggaaattaaataaaccaggaaatttaaacacgattccctctcaataaaaagtctcagaaactacaaaccactgatctaatcctagaggaatggaggcatagagtttgaatttgaaacttaccaagcaaaatgttcacagtgtctgagcacatgacattaag

SEQ ID NO: 442206 - DNA, 526 bp, Homo sapiens
tactggtagctgaagtcatagtttgaacaccttaattatctaccttctaggctctggaaacaacggactctcaattaccttggttctgtcatacaacattccagaatcaaatttctttttcaaggctcaaccttcctgatagaattttgacttttttcctcacaaggaatactgcatatttctgtggattctttatgcccccttctgtctcccaatttctcctttctccctcaagtcaaatttcatgttctaaattttggggcaagcaagaaaggcagagtccttacccactgccctaaagggtaagttgaaagaccctctctgcctcacagagaaatgctcctctttgaaaccagagagaatttcacttcttaagaagcaagagtattcacttcagatttcttgtctgattttattttaaataactcttgytcttttaaacttgagttttctctttgtctccttaggttgtgcaaaaacatgaaatttcagtgccatcatataccatggtatgaggtccttgtta

SEQ ID NO: 442207 - DNA, 526 bp, Homo sapiens
tactggtagctgaagtcatagtttgaacaccttaattatctaccttctaggctctggaaacaacggactctcaattaccttggttctgtcatacaacattccagaatcaaatttctttttcaaggctcaaccttcctgatagaattttgacttttttcctcacaaggaatactgcatatttctgtggattctttatgcccccttctgtctcccaatttctcctttctccctcaagtcaaatttcatgttctaaattttggggcaagcaagaaaggcagagtccttacccactgccctaaagggtaagttgaaagaccctctctgcctcacagagaaatgctcctctttgaaaccagagagaatttcacttcttaagaagcaagagtattcacttcagatttcttgtctgattttattttaaataactcttgttcttttaaacttgagttttctctttgyctccttaggttgtgcaaaaacatgaaatttcagtgccatcatataccatggtatgaggtccttgtta

SEQ ID NO: 442208 - DNA, 601 bp, Homo sapiens
agactgaagcaatggctgcagattaaaatgaacagaaccatctctggatgcatacttcttaaaagatacctgtgcctttgttagctctggaagaaatcacaacagaattccatgcaacagggatgcccatgtgggacttctgtcgattagagaaaggtacctctttccttaaggtggacatcatcccactgcagggcacattccttggtgactggatccaaggccagatttctgtccccacccactcaaccctttagtttggctcccttgtgcagttaacaacctatgcaaccaggtgtggcagctctgtcaaacaatcagacatttctcatgtttttagctatcttctctgattctttcatgatatgtgactgcaattcagtgggagttttaggcytctaagatgcatagaattgcactttggaaccaagctggatacatatcttctactttggctgtaaatatacttctgaaggtaaaacatgaaaagaagcggatgatttcctgacaaaaccatcccatacagtatattaagaaagcatatacattgtaacctccggtgggttcagaaaaacaatacagcttcttaagactactaaaa

SEQ ID NO: 442209 - DNA, 677 bp, Homo sapiens
gctttcagcacactggctctgctttattgacattttacccacactaataatgttggcatgtgtctgatctcttcactgttggcacagcgtggatgttcacgctgggcattaagctttttagttgataaaagaagatcccacaattggaatctccgtagcaggtgtccatggttcgacacttgattgtcttaagcaagtatgttctttgcaatgcaaagcaaacctacaagctatattaccttttgttttatgcagagatgcagtttcctttaatgttacaatggtagaaaataagaagtagctgaagtattgaatccaagttaaaacacacaacaatgtgwacttataaaggacggaatgaaactagcaatgtaaagcccagttaggtgatacaacaaccattggtgcctgtttttttttccccatcaactctttcagcaaaatgtgatggttgtgtttggctgcattttcattcctctcctcaactcttatattcacatgaaattaatgaacattccaactctgaataatgtgaagagaccagggggtggaaaactgcttagccacatagacagagctcatttatgtttgggctttgaaacacttacttgaattctgatttgtggatatttcttcttggcagtcagtttatatttaatttttgtgcccgatgtgat

SEQ ID NO: 442210 - DNA, 677 bp, Homo sapiens
gctttcagcacactggctctgctttattgacattttacccacactaataatgttggcatgtgtctgatctcttcactgttggcacagcgtggatgttcacgctgggcattaagctttttagttgataaaagaagatcccacaattggaatctccgtagcaggtgtccatggttcgacacttgattgtcttaagcaagtatgttctttgcaatgcaaagcaaacctacaagctatattaccttttgttttatgcagagatgcagtttcctttaatgttacaatggtagaaaataagaagtagctgaagtattgaatccaagttaaaacacacaacaatgtgtacttataaaggacggaatgaaactagcaatgtaaagcccagttaggtgatacaacaaccattggtgcctgtttttttttccccatcaactctttcagcaaaatgtgatggttgtgtttggctgcattttcattcctctcctcaactcttatattcacatgaaattaatgaacattccaactctgaataatgtgaagagaccagggggtggaaaactgcttagccacatagacagagctcatttatgtttgggctttgaaacayttacttgaattctgatttgtggatatttcttcttggcagtcagtttatatttaatttttgtgcccgatgtgat

SEQ ID NO: 442211 - DNA, 639 bp, Homo sapiens
ttgtatggatatacagtcatccattttcaatctgtgattgaattcacacatgcagaatccacagatacagagggccgactgtaccataatttgtttacacatttaccagttgatggacacttgagttgtttacagttttggggaattatgaacattcatatgaagtttttcgtgtgaacatatgtcttcatttatcttgtttaaataggtaggaggaggattgttgagttttatggtgagtgtgtgtgtaactttataggaactgtcaaactgttttccagagcctcgtatcattttgcactcctatcagcagtataagagagccctagctcctccacgtcttcaatactctrctgtcagtcttgtaggtagagtcttaacctggttttcctgatccccagtgggttctcccttccagatttgctattacatagccagccccaattctgtttctctgtggtaaaacaatgatttatatatatatgtatatatatatatctgcaaattggtgacatccaggatgcagaccagctctagtgcccagctgaacttgctaatggatacaaaaaacagtgtcgattgtggtattaactagaccctcattggatttgaaatatcgcacataacaatgttttgttc

SEQ ID NO: 442212 - DNA, 558 bp, Homo sapiens
agtatgttttaataccaatctgtcctcttattgcctttgaggaagttaccaacctctgtagctctgtttcctcctctatatattgggactgttagtacccaccttagagttgttttgaacagtgaatgaaataaaacttacaaatcacttagactggtgcttagcatatagaaagcacttaaaaacatcaaacatcgatttgttggtgatggtaggtgctcatagatgaaggaagctgacaagctgaaatccgtcactttytgagctagcccctgaccttgtctggattctatgcattcagccaaggtgagaggggttctgaggggcattctaccttcctaccagcatatgcctatgtttgtaatggttttgtcttaatcacttctgcttacggttgattccttttgagatcagttttactaactttaatgaaatggaggcacgtttccttttttttttttgatatttttttttttttttttttactttttgcattgaacacaattttgtgaagctaagaaataagttaacaaataagaactaaactaaagcaaaatg

SEQ ID NO: 442213 - DNA, 558 bp, Homo sapiens
agtatgttttaataccaatctgtcctcttattgcctttgaggaagttaccaacctctgtagctctgtttcctcctctatatattgggactgttagtacccaccttagagttgttttgaacagtgaatgaaataaaacttacaaatcacttagactggtgcttagcatatagaaagcacttaaaaacatcaaacatcgatttgttggtgatggtaggtgctcatagatgaaggaagctgacaagctgaaatccgtcactttctgagctagcccctgaccttgtctggattctatgcattcagccaaggtgagaggggttytgaggggcattctaccttcctaccagcatatgcctatgtttgtaatggttttgtcttaatcacttctgcttacggttgattccttttgagatcagttttactaactttaatgaaatggaggcacgtttccttttttttttttgatatttttttttttttttttttactttttgcattgaacacaattttgtgaagctaagaaataagttaacaaataagaactaaactaaagcaaaatg

SEQ ID NO: 442214 - DNA, 558 bp, Homo sapiens
agtatgttttaataccaatctgtcctcttattgcctttgaggaagttaccaacctctgtagctctgtttcctcctctatatattgggactgttagtacccaccttagagttgttttgaacagtgaatgaaataaaacttacaaatcacttagactggtgcttagcatatagaaagcacttaaaaacatcaaacatcgatttgttggtgatggtaggtgctcatagatgaaggaagctgacaagctgaaatccgtcactttctgagctagcccctgaccttgtctggattctatgcattcagccaaggtgagaggggttctgaggggcattytaccttcctaccagcatatgcctatgtttgtaatggttttgtcttaatcacttctgcttacggttgattccttttgagatcagttttactaactttaatgaaatggaggcacgtttccttttttttttttgatatttttttttttttttttttactttttgcattgaacacaattttgtgaagctaagaaataagttaacaaataagaactaaactaaagcaaaatg

SEQ ID NO: 442215 - DNA, 247 bp, Homo sapiens
gaagtaagtgtttctgggagcgttctggctttccactatcagatatttaggtgtgaaactgccgacatgagactgaaaagtatcacttcccactttttctttcttccgtaggaagtttcattttgttttcatatttagctgtttctttttacattaaaaaaaaaaaaaaactatacttaggwgtttacattatgcgtgtgggacgtggcaacttgggaaagcgtcccaggtcctctcagtttcatgc

SEQ ID NO: 442216 - DNA, 583 bp, Homo sapiens
aaaatctcctaacacggtgcttggtatagggcargtgatcaataattatgcattcaataagctgatgcataattattccaagcttggttatggcttggaaaagaaactcctacctttcatgagaaatttaataacccattgacttgttaggtttcttcttaactaaggcattccagcatcttcaccttaattgcttagacaagttttggcaattcacagcctatttttggaatgctataatgaagtcaaccataaaacttttcctatgttgaaaatgatatcgagtttgggaagtggtttttgaaagtttccagttctgaatatcttggctgctctcatgtcttctctctacaccatattaagtttacacacatttatcgagtcacccctgagattaacaatgcaataattttcatgagtttacttccctacagaaaccagtcagccccatccacatagttactctgacttcttcaaaataaaatctctgttacctctgaatggtttgaatttgttttctaggtcaaattcttgtcttcctagtcgagataggtcgattcggagatcaggacatatagcatat

SEQ ID NO: 442217 - DNA, 583 bp, Homo sapiens
aaaatctcctaacacggtgcttggtatagggcaggtgatcaataattatgcattcaataagctgatgcrtaattattccaagcttggttatggcttggaaaagaaactcctacctttcatgagaaatttaataacccattgacttgttaggtttcttcttaactaaggcattccagcatcttcaccttaattgcttagacaagttttggcaattcacagcctatttttggaatgctataatgaagtcaaccataaaacttttcctatgttgaaaatgatatcgagtttgggaagtggtttttgaaagtttccagttctgaatatcttggctgctctcatgtcttctctctacaccatattaagtttacacacatttatcgagtcacccctgagattaacaatgcaataattttcatgagtttacttccctacagaaaccagtcagccccatccacatagttactctgacttcttcaaaataaaatctctgttacctctgaatggtttgaatttgttttctaggtcaaattcttgtcttcctagtcgagataggtcgattcggagatcaggacatatagcatat

SEQ ID NO: 442218 - DNA, 583 bp, Homo sapiens
aaaatctcctaacacggtgcttggtatagggcaggtgatcaataattatgcattcaataagctgatgcataattattccaagcttggttatggcttggaaaagaaactcctacctttcatgagaaatttaataacccattgacttgttaggtttcttcttaactaaggcattccagcatcttcaccttaattgcttagacaagttttggcaattcacagcctatttttggaatgctataatgaagtcaaccataaaacttttcctatgttgaaaatgatatcgagtttgggaagtggtttttgaaagtttccagttctgaatatcttggctgctctcatgtcttctctctacaccatattaagtttacacacatttatcgagtcacccctgagattaacaatgcaataattttcatgagtttacttccctacagaaaccagtcagccccatccacatagttactctgacttcttcaaaataaaatctcygttacctctgaatggtttgaatttgttttctaggtcaaattcttgtcttcctagtcgagataggtcgattcggagatcaggacatatagcatat

SEQ ID NO: 442219 - DNA, 583 bp, Homo sapiens
aaaatctcctaacacggtgcttggtatagggcaggtgatcaataattatgcattcaataagctgatgcataattattccaagcttggttatggcttggaaaagaaactcctacctttcatgagaaatttaataacccattgacttgttaggtttcttcttaactaaggcattccagcatcttcaccttaattgcttagacaagttttggcaattcacagcctatttttggaatgctataatgaagtcaaccataaaacttttcctatgttgaaaatgatatcgagtttgggaagtggtttttgaaagtttccagttctgaatatcttggctgctctcatgtcttctctctacaccatattaagtttacacacatttatcgagtcacccctgagattaacaatgcaataattttcatgagtttacttccctacagaaaccagtcagccccatccacatagttactctgacttcttcaaaataaaatctctgttacctctgaatggtttgaatttgttttctaggtcaaattcttgtcttcctagtcgagataggtcgattyggagatcaggacatatagcatat

SEQ ID NO: 442220 - DNA, 478 bp, Homo sapiens
atttgttaaggtttattttgtggcctaacatatggtctatcctggagaatgttctatgtatgctagagaagaatgtatattctgctgttgttggatgaatgtaggtttggtaggtccatttggtctgaagyatagttcaaatttagtgttgtcttgttaattttttgtctggttgatctctccattgttgcaagtggagtactgaagtcccctattagtgttatattgctgtatatttcttccttcatgtccactaatatttgctttacatatttaagtgcttcaatgttggatgcatatatgtttacaattgttatgtcctcttgataagatgacctctttatcattaaatcatgaccttctttgtctcttggaacagctttttactggaagtctgttttatctgatataagtataggcatccctgctctcttttggtaactgttttcatggcatatctccttctatccctttactt

SEQ ID NO: 442221 - DNA, 507 bp, Homo sapiens
agactccgtctcagaaaaaaccaaaaaaacaaaaacaaaaacaaaacccaaacattgaattgtacactaaaattacacatttgcatgctttatgcaaataaataaaccaaaaccaaaasaaacaaacaaaaaactatcctcatgaagcatttgatggggttcaggacatgctatcccaaaatatggcaactcaatatttgagaaaatggcagaatcaggaaggtcactctcaccttctctcctgaagcaggtcataaaacctaggaaagattttctgaccttccgctgatgcaggtcataagaccctcatttaagaggtgccctctctatacacagaggaaaagaacatccttaagtctgaatatgaagggtcacagagaaaaatctgaacaaacaggccttgctaagttcttcccagtttattattagatcatactgttttatctaattatgcttctccattaactatcctcttccataccataactaacagaaaacatacacagg

SEQ ID NO: 442222 - DNA, 507 bp, Homo sapiens
agactccgtctcagaaaaaaccaaaaaaacaaaaacaaaaacaaaacccaaacattgaattgtacactaaaattacacatttgcatgctttatgcaaataaataaaccaaaaccaaaacaaacaaayaaaaaactatcctcatgaagcatttgatggggttcaggacatgctatcccaaaatatggcaactcaatatttgagaaaatggcagaatcaggaaggtcactctcaccttctctcctgaagcaggtcataaaacctaggaaagattttctgaccttccgctgatgcaggtcataagaccctcatttaagaggtgccctctctatacacagaggaaaagaacatccttaagtctgaatatgaagggtcacagagaaaaatctgaacaaacaggccttgctaagttcttcccagtttattattagatcatactgttttatctaattatgcttctccattaactatcctcttccataccataactaacagaaaacatacacagg

SEQ ID NO: 442223 - DNA, 507 bp, Homo sapiens
agactccgtctcagaaaaaaccaaaaaaacaaaaacaaaaacaaaacccaaacattgaattgtacactaaaattacacatttgcatgctttatgcaaataaataaaccaaaaccaaaacaaacaaacraaaaactatcctcatgaagcatttgatggggttcaggacatgctatcccaaaatatggcaactcaatatttgagaaaatggcagaatcaggaaggtcactctcaccttctctcctgaagcaggtcataaaacctaggaaagattttctgaccttccgctgatgcaggtcataagaccctcatttaagaggtgccctctctatacacagaggaaaagaacatccttaagtctgaatatgaagggtcacagagaaaaatctgaacaaacaggccttgctaagttcttcccagtttattattagatcatactgttttatctaattatgcttctccattaactatcctcttccataccataactaacagaaaacatacacagg

SEQ ID NO: 442224 - DNA, 507 bp, Homo sapiens
agactccgtctcagaaaaaaccaaaaaaacaaaaacaaaaacaaaacccaaacattgaattgtacactaaaattacacatttgcatgctttatgcaaataaataaaccaaaaccaaaacaaacaaacaaaaaactatcctcatgaagcatttgatggggttcaggacatgctatcccaaaatatggcaactcaatatttgagaaaatggcagaatcaggaaggtcactctcaccttctctcctgaagcaggtcataaaacctaggaaagattttctgaccttccgctgatgcaggtcataagaccctcatttaagaggtgccctctctatacacagaggaaaagaacatccttaagtctgaatatgaagggtcacagagaaaaatctgaacaaacaggccttgctaagttcttcccagtttattattagatcatactgttttatctaattatgcttctccattaactatcctcttccataycataactaacagaaaacatacacagg

SEQ ID NO: 442225 - DNA, 467 bp, Homo sapiens
gggagacggttgagaagccatgactcattttaaaatgtgagaacatgagatttgggaggggctggggtggaatggtatggtttggctgtgtccccacccaaatctcatcttggattcccatgtattgtgggagggacccggtgggaggtaactgaatcatgggggcaggcctttctcatgctgtttttgtgatagtgaacaagtctcatgagatctgatggttttgaaaaggggagtttccctgcacaagctctcttctcttgtctgcttccaggtgagacatgcctttcaccttcygccatgattgtgaggcctctccagccatgtggaactgtaagtccaataaacctctttcttttgcaaattgcccagcaatgtgaaaacagactaatacagtgggagattacttctccataccctctttgtctgccaaccatatcacctctgctgtttcctctccccaaaag

SEQ ID NO: 442226 - DNA, 547 bp, Homo sapiens
ccggcctaccagtggtattacccagggatatgaatagctaagctatactttaggcacaaaccagcactattatcaagatgcaatatgtgaactcatctttcttctagcatcagttcagaattaattttaatctgtgtattgtatactgctgccaaaaactcattaaccacaattaaattatgaaagtacatgtgtaaatttatggatagcaatacacaatccaaaatatgagtttgctataaaaataaagcatatgggtagaatcatattaattataagtaaccagaactgttaataagaaattaatattaaaatatattgaatttgatatttccataactgaagtaaactaatttaataagcgaagctaaccagtctaaaatatcaaaggagaataagaataaagtttattattaaacatacaagctaatcaacwtactttcttatatttcttgataatatgttgaatttactttcgagcatgttttgaagaggtagttagtcaatctttatgtcccttttgaagatatgatgaaatagttacatc

SEQ ID NO: 442227 - DNA, 414 bp, Homo sapiens
cagatgaaagtttctatagctttccccaawtttagtaccaccatgaaaaagaaattcttcactcattcaaggcatacgactagaaaactaatttccatggcatcaaattaatttcctcctttggagataaaaccatgagatcttttccaaagcattaaaatcgccaagaaaaaaaaaaaaaagaaaaaaaagaccattaccagcattttaaaactgagtaagagaatgaagtaaacaaaaaagggaaagaaaaagcttcaaaagttcatttttctcctaatttcttgaactctctattccagaagtacctaatgtttttcttaaaagagaggctttcaatttttccctatgtctaaaggctgctttaagtagcttaagaccaaggacaggagagtgaaaacgaagagggttttg

SEQ ID NO: 442228 - DNA, 414 bp, Homo sapiens
cagatgaaagtttctatagctttccccaaatttagtaccaccatgaaaaagaaattcttcactcattcaaggcatacgactagaaaactaatttccatggcatcaaattaatttcctcctttggagataaaascatgagatcttttccaaagcattaaaatcgccaagaaaaaaaaaaaaaagaaaaaaaagaccattaccagcattttaaaactgagtaagagaatgaagtaaacaaaaaagggaaagaaaaagcttcaaaagttcatttttctcctaatttcttgaactctctattccagaagtacctaatgtttttcttaaaagagaggctttcaatttttccctatgtctaaaggctgctttaagtagcttaagaccaaggacaggagagtgaaaacgaagagggttttg

SEQ ID NO: 442229 - DNA, 201 bp, Homo sapiens
ttcttgaactctctattccagaagtacctaatgyttttcttaaaagagaggctttcaatttttccctatgtctaaaggctgctttaagtagcttaagaccaaggacaggagagtgaaaacgaagagggttttggctctcctcggtgggggtggaattgcagctactgcttagggatattttccagtggtcagctcttcaaa

SEQ ID NO: 442230 - DNA, 201 bp, Homo sapiens
ttcttgaactctctattccagaagtacctaatgtttttcttaaaagagaggctttcaatttttccctatgtctaaaggctgctttaagtagcytaagaccaaggacaggagagtgaaaacgaagagggttttggctctcctcggtgggggtggaattgcagctactgcttagggatattttccagtggtcagctcttcaaa

SEQ ID NO: 442231 - DNA, 623 bp, Homo sapiens
tttacaaaaccaatcacattttccaaacctgcttccaccactacccgacctgttgctcctccttcctgtatttcctrtacctcggagattagtctcacattgaatctacctcccaagagtcatgttgcttttaaaatccttcactaactccttgctccctacagaagaaaatccaaactatgtatcatggcattcaagaccctttgtggtaagttctctatctcttcagtcataccactttttctgtgctacataataccaagttttctagccattctaaaatattcaaaggtccctggaatacaaaatcttccttatacctggaaagttatccctaccctactccatctgtaaaaaccttattcattctttaagactcaggtcaatgactgccttctcggtcaatattttcctgactctttttcaagaaaagttgagcaatcattccctctattttcctattattatagaactctgtgcttttaaaattcttgtattaatattaatatctattatgttgcctttttgtttgtttgcttctgtttccccccaatgactgatctccttaaaggcagagtttttgccttatccattgcttatatagtccttaaaatgctatgaaa

SEQ ID NO: 442232 - DNA, 623 bp, Homo sapiens
tttacaaaaccaatcacattttccaaacctgcttccaccactacccgacctgttgctcctccttcctgtatttcctatacctcggagattagyctcacattgaatctacctcccaagagtcatgttgcttttaaaatccttcactaactccttgctccctacagaagaaaatccaaactatgtatcatggcattcaagaccctttgtggtaagttctctatctcttcagtcataccactttttctgtgctacataataccaagttttctagccattctaaaatattcaaaggtccctggaatacaaaatcttccttatacctggaaagttatccctaccctactccatctgtaaaaaccttattcattctttaagactcaggtcaatgactgccttctcggtcaatattttcctgactctttttcaagaaaagttgagcaatcattccctctattttcctattattatagaactctgtgcttttaaaattcttgtattaatattaatatctattatgttgcctttttgtttgtttgcttctgtttccccccaatgactgatctccttaaaggcagagtttttgccttatccattgcttatatagtccttaaaatgctatgaaa

SEQ ID NO: 442233 - DNA, 623 bp, Homo sapiens
tttacaaaaccaatcacattttccaaacctgcttccaccactacccgacctgttgctcctccttcctgtatttcctatacctcggagattagtctcacattgaatctacctcccaagagtcatkttgcttttaaaatccttcactaactccttgctccctacagaagaaaatccaaactatgtatcatggcattcaagaccctttgtggtaagttctctatctcttcagtcataccactttttctgtgctacataataccaagttttctagccattctaaaatattcaaaggtccctggaatacaaaatcttccttatacctggaaagttatccctaccctactccatctgtaaaaaccttattcattctttaagactcaggtcaatgactgccttctcggtcaatattttcctgactctttttcaagaaaagttgagcaatcattccctctattttcctattattatagaactctgtgcttttaaaattcttgtattaatattaatatctattatgttgcctttttgtttgtttgcttctgtttccccccaatgactgatctccttaaaggcagagtttttgccttatccattgcttatatagtccttaaaatgctatgaaa

SEQ ID NO: 442234 - DNA, 543 bp, Homo sapiens
tctgtactgagttaccctctcgagtgtttggaagtcttttcttcctcattaagcaaacacttacacagtgttaycatggctttgtaatcttagttttgaagacaggcaaatgtactagtcaaatatgccaaactaacttattaagagcattccaaacaacattttggatccaaatctttttaaatgcacttagatctttcttatatcagaatcaagcatatttgtcaattacttaatgtttattattaataactaaaatgatttgttattaataggaatagcttttttaaagtaccttgatctttgtgtttctaagatttgtcctagtccatttatggatctgaaataaataataaatgaggaagacaaagtttaaaagtaaaaattaactttttaaaaaagtatacaaagtatattgtttctaaaacgggaaataagcatacccaaatacatctggaaccagaaaaaaattaaaaacagaaaaacaaaacttgctttaaaaaataattatgattttccttcaaacaataaatcacatatatt

SEQ ID NO: 442235 - DNA, 543 bp, Homo sapiens
tctgtactgagttaccctctcgagtgtttggaagtcttttcttcctcattaagcaaacacttacacagtgttatcatggctttgtaatcttagttttgaagacaggcaaatgtactagycaaatatgccaaactaacttattaagagcattccaaacaacattttggatccaaatctttttaaatgcacttagatctttcttatatcagaatcaagcatatttgtcaattacttaatgtttattattaataactaaaatgatttgttattaataggaatagcttttttaaagtaccttgatctttgtgtttctaagatttgtcctagtccatttatggatctgaaataaataataaatgaggaagacaaagtttaaaagtaaaaattaactttttaaaaaagtatacaaagtatattgtttctaaaacgggaaataagcatacccaaatacatctggaaccagaaaaaaattaaaaacagaaaaacaaaacttgctttaaaaaataattatgattttccttcaaacaataaatcacatatatt

SEQ ID NO: 442236 - DNA, 543 bp, Homo sapiens
tctgtactgagttaccctctcgagtgtttggaagtcttttcttcctcattaagcaaacacttacacagtgttatcatggctttgtaatcttagttttgaagacaggcaaatgtactagtcaaatatgccaaactaacttattaagagcattccaaacaacattttggatccaawtctttttaaatgcacttagatctttcttatatcagaatcaagcatatttgtcaattacttaatgtttattattaataactaaaatgatttgttattaataggaatagcttttttaaagtaccttgatctttgtgtttctaagatttgtcctagtccatttatggatctgaaataaataataaatgaggaagacaaagtttaaaagtaaaaattaactttttaaaaaagtatacaaagtatattgtttctaaaacgggaaataagcatacccaaatacatctggaaccagaaaaaaattaaaaacagaaaaacaaaacttgctttaaaaaataattatgattttccttcaaacaataaatcacatatatt

SEQ ID NO: 442237 - DNA, 543 bp, Homo sapiens
tctgtactgagttaccctctcgagtgtttggaagtcttttcttcctcattaagcaaacacttacacagtgttatcatggctttgtaatcttagttttgaagacaggcaaatgtactagtcaaatatgccaaactaacttattaagagcattccaaacaacattttggatccaaatctttttaaatgcacttagatctttcttatatcagaatcaagcatatttgtcaattacttaatgtttattattaataactaaaatgatttgttattaataggaatagcttttttaaagtaccttgatctttgtgtttctaagatttgtcctagtccatttatggatctgaaataaataataaatgaggaagacaaagtttaaaagtaaaaattaactttttaaaaaagtatacaaagtatattgtttctaaaacrggaaataagcatacccaaatacatctggaaccagaaaaaaattaaaaacagaaaaacaaaacttgctttaaaaaataattatgattttccttcaaacaataaatcacatatatt

SEQ ID NO: 442238 - DNA, 591 bp, Homo sapiens
cacaagtctgatataaacggagggtaaaagccaaaagggtgtgtaatttaycaaattgcttctaccaaattcatttctagtactgttaacaagctggctaatagtcaatattgtcagtgtcagagatttagcttaggtctctataaggatataaaagtcaagtaataattatcattccttttatgccaaaaacgtttgctaaatagattgtgttcttcttagcaatcacaatggtgcacaagatttatgaagagaaacaagattagaagaccagtgtcaaaaaatgtaaaagcaatcttcattcatcactttctccttttcaaaatcagccatctttttctttcttcccttttttactataccttgaacttactatgtaagctaagaaaaaaattacataataatagctaacagagcacttactatgtgtcagcactgtgcaaagtttaccaacattgtctcatgtaatactcaaagcaaacttatgataggcattatgccttttacagaggaggctttaaaagggtaaataagctccctaagaagacaatgagaaacagaccaaggattagaacccaagcagattccaag

SEQ ID NO: 442239 - DNA, 591 bp, Homo sapiens
cacaagtctgatataaacggagggtaaaagccaaaagggtgtgtaatttaccaaattgcttctwccaaattcatttctagtactgttaacaagctggctaatagtcaatattgtcagtgtcagagatttagcttaggtctctataaggatataaaagtcaagtaataattatcattccttttatgccaaaaacgtttgctaaatagattgtgttcttcttagcaatcacaatggtgcacaagatttatgaagagaaacaagattagaagaccagtgtcaaaaaatgtaaaagcaatcttcattcatcactttctccttttcaaaatcagccatctttttctttcttcccttttttactataccttgaacttactatgtaagctaagaaaaaaattacataataatagctaacagagcacttactatgtgtcagcactgtgcaaagtttaccaacattgtctcatgtaatactcaaagcaaacttatgataggcattatgccttttacagaggaggctttaaaagggtaaataagctccctaagaagacaatgagaaacagaccaaggattagaacccaagcagattccaag

SEQ ID NO: 442240 - DNA, 628 bp, Homo sapiens
atattgtcctgattgtcctatgctgatcagccttggctatggacaaagaagatatamaagcaagctggaagacaatgcatggttgacagttaaggaagatgaagtcaacaagagttcagggaaaactgagaccacttgagtcagggaagacttcacataggaagcggggagagacagaataggctctatagaataaattaaaaaaaaaaaaacagaacaagaaagaactcagggattggcagagtgagaatacattatgagtaaagacaggaactgacaggatgcatccatgggaaagtgaattaaccatcctgggtaaagttagggaagactgacattaggaaagagtcaaagagaagacaggaaaagaaagatggagtgcgaagaccctgaatatcagtctattaactgtgaactatattctgcaagcactggggactaattttatgtattaccatttatataacaattagccatcaacaatatatgtgattccctaacgttcttgaagcaggtcaaccttataccttaagtttctacagggcaacaatcagagtaaaaaatattctgtgtatacaatatggatctgtaggcacttaacacacttatcattttgtacctaattgtc

SEQ ID NO: 442241 - DNA, 628 bp, Homo sapiens
atattgtcctgattgtcctatgctgatcagccttggctatggacaaagaagatatacaagcaagctggaagacaakgcatggttgacagttaaggaagatgaagtcaacaagagttcagggaaaactgagaccacttgagtcagggaagacttcacataggaagcggggagagacagaataggctctatagaataaattaaaaaaaaaaaaacagaacaagaaagaactcagggattggcagagtgagaatacattatgagtaaagacaggaactgacaggatgcatccatgggaaagtgaattaaccatcctgggtaaagttagggaagactgacattaggaaagagtcaaagagaagacaggaaaagaaagatggagtgcgaagaccctgaatatcagtctattaactgtgaactatattctgcaagcactggggactaattttatgtattaccatttatataacaattagccatcaacaatatatgtgattccctaacgttcttgaagcaggtcaaccttataccttaagtttctacagggcaacaatcagagtaaaaaatattctgtgtatacaatatggatctgtaggcacttaacacacttatcattttgtacctaattgtc

SEQ ID NO: 442242 - DNA, 628 bp, Homo sapiens
atattgtcctgattgtcctatgctgatcagccttggctatggacaaagaagatatacaagcaagctggaagacaatgcatggttgacagttaaggaagatgaagtcaacaagagttcagggaaaactgagaccacttgagtcagggaagacttcacataggaagcggggagagacagaataggctctatagaataaattaaaaaaaaaaaaacagaacaagaaagaactcagggattggcagagtgagaatacattatgagtaaagacaggaactgasaggatgcatccatgggaaagtgaattaaccatcctgggtaaagttagggaagactgacattaggaaagagtcaaagagaagacaggaaaagaaagatggagtgcgaagaccctgaatatcagtctattaactgtgaactatattctgcaagcactggggactaattttatgtattaccatttatataacaattagccatcaacaatatatgtgattccctaacgttcttgaagcaggtcaaccttataccttaagtttctacagggcaacaatcagagtaaaaaatattctgtgtatacaatatggatctgtaggcacttaacacacttatcattttgtacctaattgtc

SEQ ID NO: 442243 - DNA, 617 bp, Homo sapiens
aaatattctgtgtatacaatatggatctgtaggcacttaacacacttatcattttgtacctaattgtcgttcttaatttctttacatcttcttctggaaccaagtctgttttattaatgagaatgatatctgccaaagcaacttgcctaaaatagcaaacaaaaagaaatgttaagaaattttaaataatatacacgcatgcagattaatacatcaaaagagaaatgttaacaaattaaaaataaataaaaacacctcatgtagatcaatatatcagttaagrattatatagtgctctataggagtgattcagtttactcctaatccgctaatttttcaatgtgaatgaattgtattcattactatgcaagttcagatttcacattacccatttgcaaagtatttactaagttctgttacttgctactcttgtgctacaaagataagtctcaaaaagtttacaatcaaaaggatgattttaaactcataattttctttgtgaagaaaagcataaaattcagatatccaatatggtaaaaagaagaagagtttacctactaaaatactgtaatatttaccaaaattttcaaagaaatagaataacttcacttaatact

SEQ ID NO: 442244 - DNA, 617 bp, Homo sapiens
aaatattctgtgtatacaatatggatctgtaggcacttaacacacttatcattttgtacctaattgtcgttcttaatttctttacatcttcttctggaaccaagtctgttttattaatgagaatgatatctgccaaagcaacttgcctaaaatagcaaacaaaaagaaatgttaagaaattttaaataatatacacgcatgcagattaatacatcaaaagagaaatgttaacaaattaaaaataaataaaaacacctcatgtagatcaatatatcagttaaggattatatagtgctctataggagtgattcagtttactcctaatccgctaayttttcaatgtgaatgaattgtattcattactatgcaagttcagatttcacattacccatttgcaaagtatttactaagttctgttacttgctactcttgtgctacaaagataagtctcaaaaagtttacaatcaaaaggatgattttaaactcataattttctttgtgaagaaaagcataaaattcagatatccaatatggtaaaaagaagaagagtttacctactaaaatactgtaatatttaccaaaattttcaaagaaatagaataacttcacttaatact

SEQ ID NO: 442245 - DNA, 554 bp, Homo sapiens
ttattaatgagaatgatatctgccaaagcaacttgcctaaaatagcaaacaaaaagaaatgttaagaaattttaaataatatacacgcatgcagattaatacatcaaaagagaaatgttaacaaattaaaaataaataaaaacacctcatgtagatcaatatatcagttaaggattatatagtgctctataggagtgattcagtttactcctaatccgctaatttttcaatgtgaatgaattgtattcattactatgcaagttcagatttcacattacccatttgcaaagtatttactaagttctgttacttgctactcttgygctacaaagataagtctcaaaaagtttacaatcaaaaggatgattttaaactcataattttctttgtgaagaaaagcataaaattcagatatccaatatggtaaaaagaagaagagtttacctactaaaatactgtaatatttaccaaaattttcaaagaaatagaataacttcacttaatactaaaaactgtattaaacaggttttttaaaactatacttcagagctggg

SEQ ID NO: 442246 - DNA, 492 bp, Homo sapiens
agtttgtttttggttttcatcttagtgatttttctctttacrattagccagcaatcaatatatactttaaatatgaatacctagtagcttcattgataaggccatcaggtttctcttctgttaaatgctaaacaaaaaaaagtttgaataaagttactataatacaataaaaaatctaatgtcaacacaaaggattttactttagagacattttcttgcatttaataaaaacttcaacatgttctgttactgaatacacaaatccaaaactaacttttctagctgaaagcatttttcttccccatttgcaatttttttctacaagtgaacctgtggggttttatagggggaggaagagggcttaggatttcatactcctgaccttttcttttacttaaaaggaaaacccctttgattcacataatgtcataaaaacatagaagattacagttcagattttaggtattttccttcttacaaaactgttctggt

SEQ ID NO: 442247 - DNA, 492 bp, Homo sapiens
agtttgtttttggttttcatcttagtgatttttctctttacgattagccagcaatcaatatatactttaaatatgaatacctagtagcttcattgataaggccatcaggtttctcttctgttaaatgctaaacaaaaaaaagtttgaataaagttactataatacaataaaaaatctaatgtcaacacaaaggattttactttagagacattttcttgcatytaataaaaacttcaacatgttctgttactgaatacacaaatccaaaactaacttttctagctgaaagcatttttcttccccatttgcaatttttttctacaagtgaacctgtggggttttatagggggaggaagagggcttaggatttcatactcctgaccttttcttttacttaaaaggaaaacccctttgattcacataatgtcataaaaacatagaagattacagttcagattttaggtattttccttcttacaaaactgttctggt

SEQ ID NO: 442248 - DNA, 492 bp, Homo sapiens
agtttgtttttggttttcatcttagtgatttttctctttacgattagccagcaatcaatatatactttaaatatgaatacctagtagcttcattgataaggccatcaggtttctcttctgttaaatgctaaacaaaaaaaagtttgaataaagttactataatacaataaaaaatctaatgtcaacacaaaggattttactttagagacattttcttgcatttaatraaaacttcaacatgttctgttactgaatacacaaatccaaaactaacttttctagctgaaagcatttttcttccccatttgcaatttttttctacaagtgaacctgtggggttttatagggggaggaagagggcttaggatttcatactcctgaccttttcttttacttaaaaggaaaacccctttgattcacataatgtcataaaaacatagaagattacagttcagattttaggtattttccttcttacaaaactgttctggt

SEQ ID NO: 442249 - DNA, 566 bp, Homo sapiens
aaacccatacttgctaatctggcctctcagtgcaactgtttattttactgacctctccagagtcaggctaactccaaaaaatattttgacactgacttagagcccaagtggtagtttccatctctctggaggcaagytttgttgtctgtttttttttttccccctcataatcctgtttacatccctaacgtcatcaacatcacaagcttcttctctgggaaattacacttttaccctcattacctcaaacctcaatagaggttccctgtcacaataaaaagctggctactgaggtttagaggcaactagattatagtaatactctatatttgaagccaactttacaaatgaattaaatccttgaatctaactttataaattatatacatttttctcatttagctttcataataattatgggagatggctattttcatttataaaggaagaaactaaatctaacaccctcatcatcacaggatactatattttatatgcaatcacagggacttttttttttaattgaacacacacccatcaagtaaaatgaacataattttaaagcc

SEQ ID NO: 442250 - DNA, 566 bp, Homo sapiens
aaacccatacttgctaatctggcctctcagtgcaactgtttattttactgacctctccagagtcaggctaactccaaaaaatattttgacactgacttagagcccaagtggtagtttccatctctctggaggcaagttttgttgtctgtttttttttttccccctcataatcctgtttacatccctaacgtcatcaacatcacaagcttcttctctgggaaattacacttttaccctcattacctcaaacctcaatagaggttccctgtcacaataaaaagctggctactgaggtttagaggcaactagattatagtaatactctmtatttgaagccaactttacaaatgaattaaatccttgaatctaactttataaattatatacatttttctcatttagctttcataataattatgggagatggctattttcatttataaaggaagaaactaaatctaacaccctcatcatcacaggatactatattttatatgcaatcacagggacttttttttttaattgaacacacacccatcaagtaaaatgaacataattttaaagcc

SEQ ID NO: 442251 - DNA, 598 bp, Homo sapiens
ttccctgtcacaataaaaagctggctactgaggtttagaggcaactagattatagtaatactctatatttgaagccaactttacaaatgaattaaatccttgaatctaactttataaattatatacatttttctcatttagctttcataataattatgggagatggytattttcatttataaaggaagaaactaaatctaacaccctcatcatcacaggatactatattttatatgcaatcacagggacttttttttttaattgaacacacacccatcaagtaaaatgaacataattttaaagcctttgtgaaatcttttatgccacataaaatcagcctgtgtacaatgctacacaaatgtcaataaccatatatcagagccaaaccagtttcataattcatggggagatgatcattaggggtatctgaatagtttggaacctcagagcaagcaggtaataattttatttaacaagcttgattaggtctatagaagaaacattttttccttctaaaagttcagcaaattctattttgaggaaaacaaaactgaaataaaatcatggcaatgatacttctacttcaggcaaaatcttg

SEQ ID NO: 442252 - DNA, 598 bp, Homo sapiens
ttccctgtcacaataaaaagctggctactgaggtttagaggcaactagattatagtaatactctatatttgaagccaactttacaaatgaattaaatccttgaatctaactttataaattatatacatttttctcatttagctttcataataattatgggagatggctattttcatttataaaggaagaaactaaatctaacaccctcatcatcacaggatactatattttatatrcaatcacagggacttttttttttaattgaacacacacccatcaagtaaaatgaacataattttaaagcctttgtgaaatcttttatgccacataaaatcagcctgtgtacaatgctacacaaatgtcaataaccatatatcagagccaaaccagtttcataattcatggggagatgatcattaggggtatctgaatagtttggaacctcagagcaagcaggtaataattttatttaacaagcttgattaggtctatagaagaaacattttttccttctaaaagttcagcaaattctattttgaggaaaacaaaactgaaataaaatcatggcaatgatacttctacttcaggcaaaatcttg

SEQ ID NO: 442253 - DNA, 598 bp, Homo sapiens
ttccctgtcacaataaaaagctggctactgaggtttagaggcaactagattatagtaatactctatatttgaagccaactttacaaatgaattaaatccttgaatctaactttataaattatatacatttttctcatttagctttcataataattatgggagatggctattttcatttataaaggaagaaactaaatctaacaccctcatcatcacaggatactatattttatatgcaatcacagggacttttttttttaattgaacacacacccatcaagtaaaatgaacataattttaaagcctttgtgaaatcttttatgccacataaaatcagyctgtgtacaatgctacacaaatgtcaataaccatatatcagagccaaaccagtttcataattcatggggagatgatcattaggggtatctgaatagtttggaacctcagagcaagcaggtaataattttatttaacaagcttgattaggtctatagaagaaacattttttccttctaaaagttcagcaaattctattttgaggaaaacaaaactgaaataaaatcatggcaatgatacttctacttcaggcaaaatcttg

SEQ ID NO: 442254 - DNA, 598 bp, Homo sapiens
ttccctgtcacaataaaaagctggctactgaggtttagaggcaactagattatagtaatactctatatttgaagccaactttacaaatgaattaaatccttgaatctaactttataaattatatacatttttctcatttagctttcataataattatgggagatggctattttcatttataaaggaagaaactaaatctaacaccctcatcatcacaggatactatattttatatgcaatcacagggacttttttttttaattgaacacacacccatcaagtaaaatgaacataattttaaagcctttgtgaaatcttttatgccacataaaatcagcctgtgtacaatgctacacaaatgtcaataaccatatatcagagccaaaccagtttcataattcatggggagatgatcattaggggtatctgaatagtttggaacctcagagcaagcaggtaataattttatttaacamgcttgattaggtctatagaagaaacattttttccttctaaaagttcagcaaattctattttgaggaaaacaaaactgaaataaaatcatggcaatgatacttctacttcaggcaaaatcttg

SEQ ID NO: 442255 - DNA, 470 bp, Homo sapiens
ctattgttatatactctgcctctagagaatgaggctgctaacagaccttggaatggtgcctggcacamaggctcaagaaatatttgttgaatgaattgtaattaacacctcctgttgtggggatacataaaagatgttacatgaaaaatgccatctaacatgcagcaacaaatctcttcccattaagcagtaaatctacttaacaatgatatatttttggcaaggcatctgcctctgaatgatcctatagtactgaaaattctttttaaactgaaatatttttcaagatattatattattgaccttatgaaagcttttttaacatatgaaattggggttatttggctatgagtttgtgaggcataaaaatgatatgacagaagaattacagatttgtttttgcatttccatgcctaaatgtaactaatacaatgttagtttcacaaggtaatgtgcaatgttttaaatgc

SEQ ID NO: 442256 - DNA, 597 bp, Homo sapiens
caaaaatcattccatgccaaaagatcaagtttaatatttttttcataattcatcttggcctgaggctacaacaagtcctattgttatatactctgcctctagagaatgaggctgctaacagaccttggaatggtgcctggcacaaaggctcaagaaatatttgttgaatgaattgtaattaacacctcctgttgtggggatacataaaagatgttacatgaaaaatgccatctaacatgcagcaacaaatctcttcccattaagcagtaaatctacttaacaatgatatatttttggcaaggcatckgcctctgaatgatcctatagtactgaaaattctttttaaactgaaatatttttcaagatattatattattgaccttatgaaagcttttttaacatatgaaattggggttatttggctatgagtttgtgaggcataaaaatgatatgacagaagaattacagatttgtttttgcatttccatgcctaaatgtaactaatacaatgttagtttcacaaggtaatgtgcaatgttttaaatgcatttacctctccaaaatattagaattcttcactcaaagctaacagtggta

SEQ ID NO: 442257 - DNA, 485 bp, Homo sapiens
accttatgaaagcttttttaacatatgaaattggggttatttggctatgagtttgtgaggcataaaaatgatatgacagaagaattacagatttgtttttgcatttccatgcctaaatgtaactaatacaatgttagtttcacaaggtaatgtgcaatgttttaaatgcatttacctctccaaaatattagaattcttcactcaaagctaacagtggtagactaacgttttactacttccaggcagtcagaaagtatcaaatataaaaataaatgaaaatcaccccaaatgagagcctgccaatatttacagctgtattaaaattatatgtaatcatatacaattatagcagaagagataaatgtcctcttctatgcccataggaaagctatacaaatatttaaaaaaataagtgcatmttaacatttattttctttagatatcagccctgcatttccctcatgtgacttcctaccttcccaaat

SEQ ID NO: 442258 - DNA, 584 bp, Homo sapiens
attcaaaagaacattctccaataatacattatataccatttggtcattaagtcagatgactttcatttataaaataaaacaaaatggaaagtttggcattctattccacctgtataagtaaatgaagaaaaaawttttgcaaaatattttttaaatattttatattacatagatgtccaaagtattccttatctctgcttaacaactatggcttttgcttatatatcaaaaaagacaaaaataattttgatactaattaatccaacatattcaaaaggctaaggatcaaaaccccaatttaacttaccacaagaaacaaaggaaattaaaagggagtggtgtgagatgttggtcaaagaatacaaagtttgttatacaagatgcataagtcatggagagctaattacagcatgatgactgtagttaattctattgtatacttgaatctgctaaaacatagatcttaattgttcttaccaccccctctcaaaaaaatagcaatgtgaggtgatggataggttaactagctcgattgtttgataatgtaattcacacactgtataccttaaatatatatagttttt

SEQ ID NO: 442259 - DNA, 584 bp, Homo sapiens
attcaaaagaacattctccaataatacattatataccatttggtcattaagtcagatgactttcatttataaaataaaacaaaatggaaagtttggcattctattccacctgtataagtaaatgaagaaaaaatttttgcaaaatattttttaaatattttatattacatagatgtccaaagtattccttatctctgcttaacaactatggcttttgcttatatatcaaaaaagacaaaaataattttgatactaattaatccaacatattcaaaaggctaaggatcaaaaccccaatttaacttaycacaagaaacaaaggaaattaaaagggagtggtgtgagatgttggtcaaagaatacaaagtttgttatacaagatgcataagtcatggagagctaattacagcatgatgactgtagttaattctattgtatacttgaatctgctaaaacatagatcttaattgttcttaccaccccctctcaaaaaaatagcaatgtgaggtgatggataggttaactagctcgattgtttgataatgtaattcacacactgtataccttaaatatatatagttttt

SEQ ID NO: 442260 - DNA, 584 bp, Homo sapiens
attcaaaagaacattctccaataatacattatataccatttggtcattaagtcagatgactttcatttataaaataaaacaaaatggaaagtttggcattctattccacctgtataagtaaatgaagaaaaaatttttgcaaaatattttttaaatattttatattacatagatgtccaaagtattccttatctctgcttaacaactatggcttttgcttatatatcaaaaaagacaaaaataattttgatactaattaatccaacatattcaaaaggctaaggatcaaaaccccaatttaacttaccacaagaaacaaaggaaattaaargggagtggtgtgagatgttggtcaaagaatacaaagtttgttatacaagatgcataagtcatggagagctaattacagcatgatgactgtagttaattctattgtatacttgaatctgctaaaacatagatcttaattgttcttaccaccccctctcaaaaaaatagcaatgtgaggtgatggataggttaactagctcgattgtttgataatgtaattcacacactgtataccttaaatatatatagttttt

SEQ ID NO: 442261 - DNA, 558 bp, Homo sapiens
ttaaagtttccattatcctgacagtgtgtcagttttgtgtaggtataytgatttaataatttaagaggttttatcaaggtagcagaaggttaaacgtttactgtgtttgcattattcagaatgttgctttgtttttttggcctccgtcatgctgataatagattctatttaactcttctccatacccaactatacatataaaatttttcctataatcataaaatacataaacagtttgacttttagcatggcattttcagtctatcaaaataaaaaaaaaacaaaatgtcttagcagttatctgtcacataggtatatcaaattttgtaataaatttatggaagaggtagattcaaacatgcctataataaacattcaaaatgaataatttggggcttttttgctacctccataagcattttgcaagaaatatgatttccaacagtcattggaatttttctgcgtgaaactgtaatactgtatttgggatcattctttgattcttaaattatattcataaattcataaattgagattttaaactctaaaaaaggagtt

SEQ ID NO: 442262 - DNA, 321 bp, Homo sapiens
atacaaaacagacactaatttttaaacactgaatttaaacttctaagaacttactgctttgggccctatccatatgctcagattgggaacgggtcagtgggtgggatgatttcattctcttctgcctttagtggtatttcacctgggaagttgagaaacrtcattttactgtatgtaacaacatacttttaaagatcttactaaatgcattttataaattaaacctcatttaaatgcattctaggaccttagaagttaacaaaaacattcatagcaggatgtcttttacacttgatcttagccaaaagaccaagaagcgat

SEQ ID NO: 442263 - DNA, 411 bp, Homo sapiens
gatatgaggttggatacaaaacagacactaatttttaaacactgaatttaaacttctaagaacttactgctttgggccctatccatatgctcagattgggaacgggtcagtgggtgggatgatttcattctcttctgcctttagtggtatttcacctgggaagttgagaaacatcattttactgtatgtaacaacatacttttaaagatcttactaaatgcattttataaattaaacctcatttaaatgcattctaggaccttagaagttaacaaaaacattcatagcaggatgtcttttacacttgatcttagccaaaagaccaagaagygatgcaagatgccttttaatggagagagtcttcttactaatcctatgtgtatatcctgattttcttcaatatgtactttt

SEQ ID NO: 442264 - DNA, 411 bp, Homo sapiens
gatatgaggttggatacaaaacagacactaatttttaaacactgaatttaaacttctaagaacttactgctttgggccctatccatatgctcagattgggaacgggtcagtgggtgggatgatttcattctcttctgcctttagtggtatttcacctgggaagttgagaaacatcattttactgtatgtaacaacatacttttaaagatcttactaaatgcattttataaattaaacctcatttaaatgcattctaggaccttagaagttaacaaaaacattcatagcaggatgtcttttacacttgatcttagccaaaagaccaagaagcgatgcaagatrccttttaatggagagagtcttcttactaatcctatgtgtatatcctgattttcttcaatatgtactttt

SEQ ID NO: 442265 - DNA, 411 bp, Homo sapiens
gatatgaggttggatacaaaacagacactaatttttaaacactgaatttaaacttctaagaacttactgctttgggccctatccatatgctcagattgggaacgggtcagtgggtgggatgatttcattctcttctgcctttagtggtatttcacctgggaagttgagaaacatcattttactgtatgtaacaacatacttttaaagatcttactaaatgcattttataaattaaacctcatttaaatgcattctaggaccttagaagttaacaaaaacattcatagcaggatgtcttttacacttgatcttagccaaaagaccaagaagcgatgcaagatgccttttaatggagagagtcttcttactaatcctatgtgtatawcctgattttcttcaatatgtactttt

SEQ ID NO: 442266 - DNA, 588 bp, Homo sapiens
aatttcttaatgattattacttttgaaaaagtaagaaaatttcgactggtttttaaaaaggtgaaaaagggaaagagaaagggagaaaacatagtcgcttaactaagaaagtttctaatatattttaaatgaaggcatatcattgcccaaaagtgttcaggtaaataaagtaaggaggagtgtttaattcttatcttcaagaaaataaaagcaaaatatgatcctcatattgcctgaaggattaaaataaaaggctctagcattatattaagggcataatcaatcaacagaggatacagaaaacctacaaagcattttttttttaaacaaaaccttagtggaagcactaaattggaagttgagtgacatcgatttccaccactgtytggggttttttaatctatatgaacaaagatttcatcattaaactaaagtgtgaaaagaacaacaatgcaaggaattaaagttataatatgaatgaacaacaataagcttaaccataaagattttactaaaaaacaaaagaggcagggtgtggtggctcacgcctgtaatcccagcactttgggaggccgaggctggcggatc

SEQ ID NO: 442267 - DNA, 588 bp, Homo sapiens
aatttcttaatgattattacttttgaaaaagtaagaaaatttcgactggtttttaaaaaggtgaaaaagggaaagagaaagggagaaaacatagtcgcttaactaagaaagtttctaatatattttaaatgaaggcatatcattgcccaaaagtgttcaggtaaataaagtaaggaggagtgtttaattcttatcttcaagaaaataaaagcaaaatatgatcctcatattgcctgaaggattaaaataaaaggctctagcattatattaagggcataatcaatcaacagaggatacagaaaacctacaaagcattttttttttaaacaaaaccttagtggaagcactaaattggaagttgagtgacatcgatttccaccactgtttggggttttttaatctatatgaacaaagatttcatcattaaactaaagtgtgaaaagaacmacaatgcaaggaattaaagttataatatgaatgaacaacaataagcttaaccataaagattttactaaaaaacaaaagaggcagggtgtggtggctcacgcctgtaatcccagcactttgggaggccgaggctggcggatc

SEQ ID NO: 442268 - DNA, 588 bp, Homo sapiens
aatttcttaatgattattacttttgaaaaagtaagaaaatttcgactggtttttaaaaaggtgaaaaagggaaagagaaagggagaaaacatagtcgcttaactaagaaagtttctaatatattttaaatgaaggcatatcattgcccaaaagtgttcaggtaaataaagtaaggaggagtgtttaattcttatcttcaagaaaataaaagcaaaatatgatcctcatattgcctgaaggattaaaataaaaggctctagcattatattaagggcataatcaatcaacagaggatacagaaaacctacaaagcattttttttttaaacaaaaccttagtggaagcactaaattggaagttgagtgacatcgatttccaccactgtttggggttttttaatctatatgaacaaagatttcatcattaaactaaagtgtgaaaagaacaacaatgcaaggaattaaagttataayatgaatgaacaacaataagcttaaccataaagattttactaaaaaacaaaagaggcagggtgtggtggctcacgcctgtaatcccagcactttgggaggccgaggctggcggatc

SEQ ID NO: 442269 - DNA, 597 bp, Homo sapiens
ggctttgtgcacatcagacttatttttattttctcacctctttaatatgataatcattcaatcataaatagtgaattatcactctaaaggaaaaggaaaacaaaacatagataattccaaaatcacttgcccaaaaaaaatttacttgtaatctgtgtagaactagaagtaaaattatatactctatggcattactaattattcctcacactatttatttaggactgtataaaacctgggtcttaggaaaaatttttcctaaataataaattaaaacttgcttttgacagaaattggttcagtaccaaaccacataccctgattagtatgccacaacgcaagaaaaagaaaactgacagcaaggaaagtatttgatttttgaaagcatcacaggcccagttagtgacagggctgtctaaaagaatgagtgtaggagaaaaacaaggataatcaaactcattccaacgtctaaagctgtccacctgctctgacaagatgtggtcccccaagcatcactcwgtgtcaacaatgaaataccggtcagctgtttacagtgattactcatgcaagatatagcaagggccacaagatctaatg

SEQ ID NO: 442270 - DNA, 597 bp, Homo sapiens
ggctttgtgcacatcagacttatttttattttctcacctctttaatatgataatcattcaatcataaatagtgaattatcactctaaaggaaaaggaaaacaaaacatagataattccaaaatcacttgcccaaaaaaaatttacttgtaatctgtgtagaactagaagtaaaattatatactctatggcattactaattattcctcacactatttatttaggactgtataaaacctgggtcttaggaaaaatttttcctaaataataaattaaaacttgcttttgacagaaattggttcagtaccaaaccacataccctgattagtatgccacaacgcaagaaaaagaaaactgacagcaaggaaagtatttgatttttgaaagcatcacaggcccagttagtgacagggctgtctaaaagaatgagtgtaggagaaaaacaaggataatcaaactcattccaacgtctaaagctgtccacctgctctgacaagatgtggtcccccaagcatcactctgtgtcaacaatgaaatacckgtcagctgtttacagtgattactcatgcaagatatagcaagggccacaagatctaatg

SEQ ID NO: 442271 - DNA, 584 bp, Homo sapiens
ctttgggaaggagaaggtcaggtcacattctagggctcagaacaaagagaaatgagaggtctgaggtcgaatgatgtccccatacaaggcaaaggaattttattcataagcagttgggcagacccaagagtgaaatacttggtacttcaagagagcagagcctaaaagccacattgccccatttggctctctgaatcaccacttttcccttctctttccctccactccaacaatatacagctttcaaactagggctcaggagaaaaacaaacttgggtaaggagagtggagtattaaaaatatttcccatcagcaccacatagaagttctcccatatcaagaagaaacttgtatgcatatgtattacagcctgacaaaaagaaayacacacatacagggaataaaaagcaagaaagaacacaaaatgaagaaatgaatagggcatacaagtggcaaagaacccattctggaaggatacataacccaataaaaactaaagaaaattctcaacaacttcatcataatgaagaacttgaaaacaatacaaccttataataaacaagctcaaaagcaagaagcagaat

SEQ ID NO: 442272 - DNA, 584 bp, Homo sapiens
ctttgggaaggagaaggtcaggtcacattctagggctcagaacaaagagaaatgagaggtctgaggtcgaatgatgtccccatacaaggcaaaggaattttattcataagcagttgggcagacccaagagtgaaatacttggtacttcaagagagcagagcctaaaagccacattgccccatttggctctctgaatcaccacttttcccttctctttccctccactccaacaatatacagctttcaaactagggctcaggagaaaaacaaacttgggtaaggagagtggagtattaaaaatatttcccatcagcaccacatagaagttctcccatatcaagaagaaacttgtatgcatatgtattacagcctgacaaaaagaaatacacacatacagggaataaaaagcaagaaagaacacaaaatgaagaaatgaatagggcatacaartggcaaagaacccattctggaaggatacataacccaataaaaactaaagaaaattctcaacaacttcatcataatgaagaacttgaaaacaatacaaccttataataaacaagctcaaaagcaagaagcagaat

SEQ ID NO: 442273 - DNA, 572 bp, Homo sapiens
gacattctcaagcattaaagaaaacagcaagcattgaaactcagagactataatactcacaaattcttcctaataaaaggagaaaacattggacaaagaaatccagccaatcaaacactaggagattatggaacaacatttacaaagttgagggggaaaaaagtgtgactgataaattttatacckagccaagtaatccttcaagtaatataaaaacaaaagacaaatattttgaatcaatgaagtgtataagaacccaaagaatgcatgcagtacctgtaacttgaaaagactgcctgacaatgaaattcaatcaggagatggactaactcgggaatggagaagcaacagtactggtaatgagcaccaaaactattaaaacatagaactaaaagaattatgacagaaccatgacaacataaagaatatgatcaacatgaaactaggccaattaatatcctacaatggcctctaagtgttcaagtgaaaggaacagtcacctgtttctcactttaaatcaagagctagaaatgattatgcttagtgagaaagttatgttgaaagccaagata

SEQ ID NO: 442274 - DNA, 572 bp, Homo sapiens
gacattctcaagcattaaagaaaacagcaagcattgaaactcagagactataatactcacaaattcttcctaataaaaggagaaaacattggacaaagaaatccagccaatcaaacactaggagattatggaacaacatttacaaagttgagggggaaaaaagtgtgactgataaattttataccgagccaagtaatccttcaagtaatataaaaacaaaagacaaatattttgaatcaatgaagtgtataagaacccaaagaatgcatgcagtacctgtawcttgaaaagactgcctgacaatgaaattcaatcaggagatggactaactcgggaatggagaagcaacagtactggtaatgagcaccaaaactattaaaacatagaactaaaagaattatgacagaaccatgacaacataaagaatatgatcaacatgaaactaggccaattaatatcctacaatggcctctaagtgttcaagtgaaaggaacagtcacctgtttctcactttaaatcaagagctagaaatgattatgcttagtgagaaagttatgttgaaagccaagata

SEQ ID NO: 442275 - DNA, 572 bp, Homo sapiens
gacattctcaagcattaaagaaaacagcaagcattgaaactcagagactataatactcacaaattcttcctaataaaaggagaaaacattggacaaagaaatccagccaatcaaacactaggagattatggaacaacatttacaaagttgagggggaaaaaagtgtgactgataaattttataccgagccaagtaatccttcaagtaatataaaaacaaaagacaaatattttgaatcaatgaagtgtataagaacccaaagaatgcatgcagtacctgtaacttgaaaagactgcctgacaatgaaattcaatcaggagatggactaactcgggaatggagaagcaacagtactggtaatgagcaccaaaactattaaaacatagaactaaaagaattaygacagaaccatgacaacataaagaatatgatcaacatgaaactaggccaattaatatcctacaatggcctctaagtgttcaagtgaaaggaacagtcacctgtttctcactttaaatcaagagctagaaatgattatgcttagtgagaaagttatgttgaaagccaagata

SEQ ID NO: 442276 - DNA, 572 bp, Homo sapiens
gacattctcaagcattaaagaaaacagcaagcattgaaactcagagactataatactcacaaattcttcctaataaaaggagaaaacattggacaaagaaatccagccaatcaaacactaggagattatggaacaacatttacaaagttgagggggaaaaaagtgtgactgataaattttataccgagccaagtaatccttcaagtaatataaaaacaaaagacaaatattttgaatcaatgaagtgtataagaacccaaagaatgcatgcagtacctgtaacttgaaaagactgcctgacaatgaaattcaatcaggagatggactaactcgggaatggagaagcaacagtactggtaatgagcaccaaaactattaaaacatagaactaaaagaattatgacagaaccatgacaacataaagaatatgatcaacatgaaactaggccaattaatatcctacaatggcctctaagtgttcaagtgaaaggaacagtcacctgtttctcactttaaatcaagagctagaaatgattatgcttagtgagraagttatgttgaaagccaagata

SEQ ID NO: 442277 - DNA, 565 bp, Homo sapiens
acaaatgtccatttaaaatttctaatgacaatggaagaaattatttagactctctcctaaactattacaccatacatcattgcaaaacattttttttcattttgcccaacctccactcctgtcattccaccactcctatagtatctaaaatatagtttcttttagagagattggtgcaccactcaacttktcagcttgagggctttgaatggtgttttcttttttttttttaatttcatggcaagctgacttacaagtgactcaactgtaagctaagacttattaatagcatggtttaaccaccaaagataatgaattcaaacaatgttactcacagcctttaatgtcacagcccctaaaaacattgaaatgtacatttttcacctgctagtcatcttcagtattctggagaggaaatattctttcctgtccttacagtggttgtatatcttaaaagacgactatatgacacttgaatattgatattcaaccttaaccaaagcagtcacaagaatacaagccattgacctctggccttttagatatgttcccaacaagttcatgt

SEQ ID NO: 442278 - DNA, 565 bp, Homo sapiens
acaaatgtccatttaaaatttctaatgacaatggaagaaattatttagactctctcctaaactattacaccatacatcattgcaaaacattttttttcattttgcccaacctccactcctgtcattccaccactcctatagtatctaaaatatagtttcttttagagagattggtgcaccactcaacttgtcagcttgagggctttgaatggtgttttcttttttttttttaatttcatggcaagctgacttacaagtgactcaactgtaagctaagacttattaatagcatggtttaaccaccaaagataatgaattcaaacaatgttactyacagcctttaatgtcacagcccctaaaaacattgaaatgtacatttttcacctgctagtcatcttcagtattctggagaggaaatattctttcctgtccttacagtggttgtatatcttaaaagacgactatatgacacttgaatattgatattcaaccttaaccaaagcagtcacaagaatacaagccattgacctctggccttttagatatgttcccaacaagttcatgt

SEQ ID NO: 442279 - DNA, 583 bp, Homo sapiens
aagaatggagatggatcatttgtttcatgccttttacttacgtgtaaggaattatgagcaggtgcctatggattttggaatatgcttctctaacactataaaaattagaaagtgaaacttatagccacaaatgtccatttaaaatttctaatgacaatggaagaaattatttagactctctcctaaactattacaccatacatcattgcaaaacattttttttcattttgcccaacctccactcctgtcattccaccactcctatagtatctaaaatatagtttcttttagagagattggtgcaccactcaacttgtcagcttgagggctttgaatggtgttttcttttttttttttaatttcatggcaagctgacttacaagtgactcaactgtaagctaagacttattaatagcatggtttaaccaccaaagataatgaattcaaacaatgttactcacagcctttaatgtcacagcccctaaaaacattgaaatgtacatttttcacctgctartcatcttcagtattctggagaggaaatattctttcctgtccttacagtggttgtatatcttaaaag

SEQ ID NO: 442280 - DNA, 620 bp, Homo sapiens
acctctggccttttagatatgttcccaacaagttcatgtgtacccaatgaaaaatgttaaataaactgataaactttaaacatttaaaaatattttatttatttacttgccacagctagataagaggaactgggttaattttgaaactctcagyttcctttcctctaaaccagtagctattgctggccactagtatgttgtttcctttgcaggaagttgcaaaaatgagaaagaaaaaaacgaaaaacaaaaccaagttggtattatttttagctttcttcttatttggatatagctacagttctttttcttatggtgattaacataactattcaagagagaagaaccaagcaaaggggagtagtagggaattagtagggaattgtgccaaaggacatatggcaaggttattgtcagaaagctgagctgctgaaatccagacagtttaagagcttatctgctctgctctgctccacctaggaggactcctactacaatgcaaagactcaagtttcaccttaattaggtctttcccaggccaggtattagtgaccttgggaaaaaagtttaagcttctcagcttcagatcttcctctgaatattagcactgtggtaattgg

SEQ ID NO: 442281 - DNA, 539 bp, Homo sapiens
aaacttacagtctacaaagtttttaaaaaaacaaaagcagttatttcttatttttacataaaaggtcacgaagtggcccaagtctgtacctgtctctagcaacaactaggaatattatttcccggaaacagtattattttatttacatttcttaactttttccaaacttctaatacagtcatatatttgttctagcccttctatttaactgtaaggtttaaaaatatatttctcaaacttttccagtaagaaacttctagtstaagtgcataaaccgcccttcacgaaactaccaagttcacaaacttgtggtttcgagtatccctgtacactctaaacgttcttagtttgagaaatagtcttggaggacagagattttattcttacttcctacgcagtggtttacaaacagacctcaaaagaaaagtgtttaagataggagcacttcctgccaactggctggaggactttggctcctggggaaggggaatctgctgacgaaagccccacgtgtcgggcattttacagacgggacatcc

SEQ ID NO: 442282 - DNA, 539 bp, Homo sapiens
aaacttacagtctacaaagtttttaaaaaaacaaaagcagttatttcttatttttacataaaaggtcacgaagtggcccaagtctgtacctgtctctagcaacaactaggaatattatttcccggaaacagtattattttatttacatttcttaactttttccaaacttctaatacagtcatatatttgttctagcccttctatttaactgtaaggtttaaaaatatatttctcaaacttttccagtaagaaacttctagtgtaagtgcataaaccgcccttcacgaaactaccaagttcacaaacttgtggtttcgagtatccctgtacactctaaacgttcttagtttgagaaatagtcttggaggacagagattttattcttacttcctacgcagtggtttacaaacagacctcaaaaraaaagtgtttaagataggagcacttcctgccaactggctggaggactttggctcctggggaaggggaatctgctgacgaaagccccacgtgtcgggcattttacagacgggacatcc

SEQ ID NO: 442283 - DNA, 539 bp, Homo sapiens
aaacttacagtctacaaagtttttaaaaaaacaaaagcagttatttcttatttttacataaaaggtcacgaagtggcccaagtctgtacctgtctctagcaacaactaggaatattatttcccggaaacagtattattttatttacatttcttaactttttccaaacttctaatacagtcatatatttgttctagcccttctatttaactgtaaggtttaaaaatatatttctcaaacttttccagtaagaaacttctagtgtaagtgcataaaccgcccttcacgaaactaccaagttcacaaacttgtggtttcgagtatccctgtacactctaaacgttcttagtttgagaaatagtcttggaggacagagattttattcttacttcctacgcagtggtttacaaacagacctcaaaagaaaagtgtttaagataggagcacttcctgccaactggctggaggactttggctcctggggaaggggaatctrctgacgaaagccccacgtgtcgggcattttacagacgggacatcc

SEQ ID NO: 442284 - DNA, 503 bp, Homo sapiens
aaaagttctaatttaatttttttatagattatgagaaaaaagttttgctcactatcagctaggaaagctgtcttagcacaaccattcattcttgcacaaatcaaaatcaagatgagccagaaggctccattctgacagcttctaatggagaagctacatttactggacatggggaaagttgctgggctctaaggactgtgctcatttcttgaactagataaatggtcttggtgtagcataataccaaaacttcttgtcgcagccygtaaggacagaactcaatcagcctgaaaaggaagtcagtgactccgactcaacacaggaatgttctgtgattcctaaagaaggatgtaggagtgtggcacaattcaaccacagtctgtggccctgtgcctctgccttgacatgagtgggatatcccagctggtcattttcttcttatctaagacattgggaacaaattacttgacctcctctgggcttcagtactcccactcatcaaa

SEQ ID NO: 442285 - DNA, 503 bp, Homo sapiens
aaaagttctaatttaatttttttatagattatgagaaaaaagttttgctcactatcagctaggaaagctgtcttagcacaaccattcattcttgcacaaatcaaaatcaagatgagccagaaggctccattctgacagcttctaatggagaagctacatttactggacatggggaaagttgctgggctctaaggactgtgctcatttcttgaactagataaatggtcttggtgtagcataataccaaaacttcttgtcgcagcccgtaaggacagaactcaatcagcctgaaaaggaagtcagtgactccractcaacacaggaatgttctgtgattcctaaagaaggatgtaggagtgtggcacaattcaaccacagtctgtggccctgtgcctctgccttgacatgagtgggatatcccagctggtcattttcttcttatctaagacattgggaacaaattacttgacctcctctgggcttcagtactcccactcatcaaa

SEQ ID NO: 442286 - DNA, 503 bp, Homo sapiens
aaaagttctaatttaatttttttatagattatgagaaaaaagttttgctcactatcagctaggaaagctgtcttagcacaaccattcattcttgcacaaatcaaaatcaagatgagccagaaggctccattctgacagcttctaatggagaagctacatttactggacatggggaaagttgctgggctctaaggactgtgctcatttcttgaactagataaatggtcttggtgtagcataataccaaaacttcttgtcgcagcccgtaaggacagaactcaatcagcctgaaaaggaagtcagtgactccgactcaacacaggaatgtyctgtgattcctaaagaaggatgtaggagtgtggcacaattcaaccacagtctgtggccctgtgcctctgccttgacatgagtgggatatcccagctggtcattttcttcttatctaagacattgggaacaaattacttgacctcctctgggcttcagtactcccactcatcaaa

SEQ ID NO: 442287 - DNA, 503 bp, Homo sapiens
aaaagttctaatttaatttttttatagattatgagaaaaaagttttgctcactatcagctaggaaagctgtcttagcacaaccattcattcttgcacaaatcaaaatcaagatgagccagaaggctccattctgacagcttctaatggagaagctacatttactggacatggggaaagttgctgggctctaaggactgtgctcatttcttgaactagataaatggtcttggtgtagcataataccaaaacttcttgtcgcagcccgtaaggacagaactcaatcagcctgaaaaggaagtcagtgactccgactcaacacaggaatgttctgtgattcctaaagaaggatgtaggagtgtggcacaattcaaccacagtctgtggccctgtgcctctgccttgacatgagtgggatwtcccagctggtcattttcttcttatctaagacattgggaacaaattacttgacctcctctgggcttcagtactcccactcatcaaa

SEQ ID NO: 442288 - DNA, 534 bp, Homo sapiens
tgagcggtgtagagagagagggggcgggaggggactacaaacttcagaatatgagctgatcgtttataagttaaaaaaaaaaaaaaaaaagtcaaaagggagcccaggatggtgcaggaaaaaggagaagggaagatttccttgcagctaatcaggagagttcataagggctgattacatgtgtggaagccttcagttcttttttttaaaaatgtgaaagtttgcatgtatgtatgtatgtatagcttcgtgtattaccattattattgcaatcagcaaatggatttacttcctttatctcatgggctccttcccactcacttctggcagccctttttcctttctccttcatcccagaacaccaaagaacagatgcgcttcctaaccctggctccaggggactttatacaatgtaaacagtgcacctctaaagtggttcaccgcttagagaacatgtgtcccattttaaaactgtgactcctttatattttgcagtgctyattttaataagagacattggacttgtgacttatt

SEQ ID NO: 442289 - DNA, 547 bp, Homo sapiens
aacatgaggcatagcaggtagggggcactggtcaggacttggggtataaactggcagatgttaaggtgggtgattctggttaactcagaaactccaaagtcccgtgtggaagaattaactgcctgtactygcctagtaatgtatatccttggtcaaaaaaagatccagctgagaatgttggatgaagggaccaaatcaatattcatcattatgttgaaaacaagtcagattggctgtggtcttttgacagcaggtcagtggctaagtctatttgaacaaagttagggcaggttcaagagagaatcctgagatcggtattctttgttccatacaaccttgcctttcagtttcttctccccatgcctccaggatgtccctgcacagcccgtagggccccctccttcagtaccttgccttatgaaggggagaaaatgagttttccaatgttagcatatattgagccttccaaaatttctattttaggggagctctaggaaaatagcagattactctaaatccccaggtaaaaatctgaaatggtggaatt

SEQ ID NO: 442290 - DNA, 648 bp, Homo sapiens
tgtttatttcttttaagaatagcagctttattgagataaatttcacatatgatacaattcaccaatttaaagtgtacaagtcaatggttttcagtataatcagagttgtactaccatcaccataatcaattttagaacattttcatcaccgcccaaaaaccactgtagtctctccccagtcctccactcctgggaaccattaatgtactttctgtctctatagatttgcctattttggttattttatataaatggaatcatacaacatgtggtcttttgtgaatagcttttttcacttaccataatgttttcaagattgattcattttgtagcaggtatcagtcctttttcctgtttattgccaaataattttccattgtacggatagatcatattttgtttatccatttgtcacattttggttgtctatcagttgatagatatttgtggtgcatttaatttttggccaatgtgtaaaacttattttgctctcattgaggctacatactgttacaacaatgctatttggtcaacttgactgagctggcctcataggttacaggttgytcattgttagagatgagactttagaccagactggacaacatagtgagaccctgtctctaccaaaaagaaaaagaaaaatta

SEQ ID NO: 442291 - DNA, 648 bp, Homo sapiens
tgtttatttcttttaagaatagcagctttattgagataaatttcacatatgatacaattcaccaatttaaagtgtacaagtcaatggttttcagtataatcagagttgtactaccatcaccataatcaattttagaacattttcatcaccgcccaaaaaccactgtagtctctccccagtcctccactcctgggaaccattaatgtactttctgtctctatagatttgcctattttggttattttatataaatggaatcatacaacatgtggtcttttgtgaatagcttttttcacttaccataatgttttcaagattgattcattttgtagcaggtatcagtcctttttcctgtttattgccaaataattttccattgtacggatagatcatattttgtttatccatttgtcacattttggttgtctatcagttgatagatatttgtggtgcatttaatttttggccaatgtgtaaaacttattttgctctcattgaggctacatactgttacaacaatgctatttggtcaacttgactgagctggcctcataggttacaggttgttcattgttagagatgagamtttagaccagactggacaacatagtgagaccctgtctctaccaaaaagaaaaagaaaaatta

SEQ ID NO: 442292 - DNA, 609 bp, Homo sapiens
gagatctcttataatttgctgggaaaatgtatcaatttgtacaaacattttgaaaaataattgtgcattttcttgtgaagtaaaacatttgaataatctaggacccagcaattcaactcttagacactcaagaggaagttgcacacacatatgtcaggaaaaatgttcatagcagccctgttcataagagcaaaacctggaacaattgagaggaaatgaataaattgccgtgtagccacacaatagaatacaagacagcagtgatgctgaaaaatatagcaagcctcaggagtttatatattatatggataattttatgaagctcaaaaacacccaaaattaaacaacatattctctaagtacatacgtgggatatgtgataaaactaaaaagaaaacagggaakgatcagcaatccagaaccaattcatgactgttgttactatcttatggggcaggctgtggattggaagcgggggcggtgcacataggtacgtgtagcttactggtaatgcttttatgttaggaatgaggtcaaaggagttcactataaatttatattagaaagaagggctatctatggattagtgatgagagtgtcatgcaccag

SEQ ID NO: 442293 - DNA, 609 bp, Homo sapiens
gagatctcttataatttgctgggaaaatgtatcaatttgtacaaacattttgaaaaataattgtgcattttcttgtgaagtaaaacatttgaataatctaggacccagcaattcaactcttagacactcaagaggaagttgcacacacatatgtcaggaaaaatgttcatagcagccctgttcataagagcaaaacctggaacaattgagaggaaatgaataaattgccgtgtagccacacaatagaatacaagacagcagtgatgctgaaaaatatagcaagcctcaggagtttatatattatatggataattttatgaagctcaaaaacacccaaaattaaacaacatattctctaagtacatacgtgggatatgtgataaaactaaaaagaaaacagggaaggatcagcaatccagaaccaattcatgactgttgttactatcttatggggcaggctgtggattggaagcgggggcggtgcacataggtacgtgtarcttactggtaatgcttttatgttaggaatgaggtcaaaggagttcactataaatttatattagaaagaagggctatctatggattagtgatgagagtgtcatgcaccag

SEQ ID NO: 442294 - DNA, 609 bp, Homo sapiens
gagatctcttataatttgctgggaaaatgtatcaatttgtacaaacattttgaaaaataattgtgcattttcttgtgaagtaaaacatttgaataatctaggacccagcaattcaactcttagacactcaagaggaagttgcacacacatatgtcaggaaaaatgttcatagcagccctgttcataagagcaaaacctggaacaattgagaggaaatgaataaattgccgtgtagccacacaatagaatacaagacagcagtgatgctgaaaaatatagcaagcctcaggagtttatatattatatggataattttatgaagctcaaaaacacccaaaattaaacaacatattctctaagtacatacgtgggatatgtgataaaactaaaaagaaaacagggaaggatcagcaatccagaaccaattcatgactgttgttactatcttatggggcaggctgtggattggaagcgggggcggtgcacataggtacgtgtagcttactggtaatgcttttatgtyaggaatgaggtcaaaggagttcactataaatttatattagaaagaagggctatctatggattagtgatgagagtgtcatgcaccag

SEQ ID NO: 442295 - DNA, 548 bp, Homo sapiens
caatgtatacatatatcataacatcacatcatacctccgtaaatacatacaattttaatttgtcaattaacatttttttaaaagaatagtgtggccagtyggggaggtagtttttttttttcctctagtctctactcagtctccaagatcccatttcccataaagttcctgtcacccaggtggagtgcagtggcacaatcatggctcactgcaccctctccctcttgggctcaagcgatcctcctgcctacaggtacatgccaccacgcccagctaatttttgtagtttttgtagacatggggtttcaccatgttgcctaggctggtctcgaactcctcagctcaatcaatctgcccactttagcctcccacagtgctgggattacaggtgtgagccaccaagcccaacccataaagttcctaactttttatctccctgggagtgcacagcctacacacaccagtttctctttagaacatacttaagagtcttggcttagcatccaacagacagaactttaacacttctagggatctgtgcacctgtc

SEQ ID NO: 442296 - DNA, 576 bp, Homo sapiens
atttgagaatccagtatgaaattcagttaatcattacttccctgttactcaactaccttaacattgtcaggtttacctgaacataaacttcattttcttarttgttcttagaacgaagggatatgtttattgaaatcagtaattaagaatattttgggacagttatgatttacttagccagtgaagcagtttctattcccaaatccaggcaaagagaacaataagattaaacgtagcctaagagatttcctttttgtcaaataatgtgattttgctatgtatagaggagatgtctatatgtaagggcatatttatgaccagtagttcctaaaattaaggggactattattgtgttactcaaggtatcagttgtataggatacattatgtcatatttcaaacaatgtttataaagagattagtataattaacctgtatgtacttctcctctgggccaaccttgtgtcttctttatctgctgacagtcccctccccactgaattattttgaatcaaatcccagatagtctatcattgtattgtatttttgaatatttctctaaaagataataattcca

SEQ ID NO: 442297 - DNA, 576 bp, Homo sapiens
atttgagaatccagtatgaaattcagttaatcattacttccctgttactcaactaccttaacattgtcaggtttacctgaacataaacttcattttcttagttgttcttagaacgaagggatatgtttattgaaatcagtaattaagaatattttgggacagttatgatttacttagccagtgaagcagtttctattcccaaatccaggcaaagagaacaataagattaaacgtagcctaagagatttcctttttgtcaaataatgtgattttgctatgtatagaggagatgtctatatgtaagggcatatttatgaccagtagttcctaaaattaaggggactattattgtgttactcaaggtatcagttgtataggatacattatgtcatatttcaaacaatgtttataaagagattagtataattaacctgtatgtacttctcctctgggccaaccttgtgtcttctttrtctgctgacagtcccctccccactgaattattttgaatcaaatcccagatagtctatcattgtattgtatttttgaatatttctctaaaagataataattcca

SEQ ID NO: 442298 - DNA, 563 bp, Homo sapiens
ggtcactcctttgcactgagctcaaagcttctctgtagcatgggtcacaatgaatggtagccctgatagcctagagtagcctttcagccttctctgagcctctaaagacygaggattcttggcatgaaataggagcaactgatatatccttgcttcccctggggactctcttgctctcaaaaaggcatcagccatcatctccatctagagaatatactagctgactcagtttgaccagcctgtcccaaaatgagaatctgggtaaaataagtattgaaacacttcattccttgtagattcacaaaacacattagcatattaaagactatgaagttctgcaggaaaaaaaacctatttaactttaatccaacattgccaagttttatttgaccatggaagatgtgtccaaaacacttacaaacagatcaaggacattaatctttcatgaacactttagatccccagggtcctctccagctacatcattctgtgattttctttttatttatgatgcattaaaagattaatctctatcagacttccatttagaaattcaccagaat

SEQ ID NO: 442299 - DNA, 563 bp, Homo sapiens
ggtcactcctttgcactgagctcaaagcttctctgtagcatgggtcacaatgaatggtagccctgatagcctagagtagcctttcagccttctctgagcctctaaagactgaggattcttggcatgaaataggagcaactgatawatccttgcttcccctggggactctcttgctctcaaaaaggcatcagccatcatctccatctagagaatatactagctgactcagtttgaccagcctgtcccaaaatgagaatctgggtaaaataagtattgaaacacttcattccttgtagattcacaaaacacattagcatattaaagactatgaagttctgcaggaaaaaaaacctatttaactttaatccaacattgccaagttttatttgaccatggaagatgtgtccaaaacacttacaaacagatcaaggacattaatctttcatgaacactttagatccccagggtcctctccagctacatcattctgtgattttctttttatttatgatgcattaaaagattaatctctatcagacttccatttagaaattcaccagaat

SEQ ID NO: 442300 - DNA, 563 bp, Homo sapiens
ggtcactcctttgcactgagctcaaagcttctctgtagcatgggtcacaatgaatggtagccctgatagcctagagtagcctttcagccttctctgagcctctaaagactgaggattcttggcatgaaataggagcaactgatatayccttgcttcccctggggactctcttgctctcaaaaaggcatcagccatcatctccatctagagaatatactagctgactcagtttgaccagcctgtcccaaaatgagaatctgggtaaaataagtattgaaacacttcattccttgtagattcacaaaacacattagcatattaaagactatgaagttctgcaggaaaaaaaacctatttaactttaatccaacattgccaagttttatttgaccatggaagatgtgtccaaaacacttacaaacagatcaaggacattaatctttcatgaacactttagatccccagggtcctctccagctacatcattctgtgattttctttttatttatgatgcattaaaagattaatctctatcagacttccatttagaaattcaccagaat

SEQ ID NO: 442301 - DNA, 563 bp, Homo sapiens
ggtcactcctttgcactgagctcaaagcttctctgtagcatgggtcacaatgaatggtagccctgatagcctagagtagcctttcagccttctctgagcctctaaagactgaggattcttggcatgaaataggagcaactgatatatccttgcttcccctggggactctcttgctctcaaaaaggcatcagccatcatctccatctagagaatatactagctgactcagyttgaccagcctgtcccaaaatgagaatctgggtaaaataagtattgaaacacttcattccttgtagattcacaaaacacattagcatattaaagactatgaagttctgcaggaaaaaaaacctatttaactttaatccaacattgccaagttttatttgaccatggaagatgtgtccaaaacacttacaaacagatcaaggacattaatctttcatgaacactttagatccccagggtcctctccagctacatcattctgtgattttctttttatttatgatgcattaaaagattaatctctatcagacttccatttagaaattcaccagaat

SEQ ID NO: 442302 - DNA, 477 bp, Homo sapiens
tgtataaagggattaaagatttttaaaaaaatttatctctgagccttaggtctttcaactttaaaacgaagatmaaaaatctatgtctttggcttatgaggattaaaatgtgaaaacacattactccagtgcctggcacattataaacacataatacatggtagctattttaaatattttattataaacttatgtagtgctcatctggaggcctatgaaagtgttattgaaagtattttaaatcttagtatcttatatttatcatttatagggtatagtagattaagaaatacttcacgtattttgaaagattgggctggaaacatacccgaagaagcattctttttatctctcatgtacatgtggacattatacattttaattaagtgttattatatgagccaaattccctcctcatgggtgttagtaggagttgacctcgaaggagggaggatttggttgtggatttatgactca

SEQ ID NO: 442303 - DNA, 477 bp, Homo sapiens
tgtataaagggattaaagatttttaaaaaaatttatctctgagccttaggtctttcaactttaaaacgaagatcaaaaatctatgtctttggcttatgaggattaaaatgtgaaaacacattactccagtgcctggcacattataaacacataatacatggtagctattttaaatattttattataaacttatgtagtgctcatctggaggcctatgaaagtgttattgaaagtattttaaatcttagtatcttatatttatcatttatagggtatagtagattaagaaatacttcacgtattttgaaagattgggctggaaacatacccgaagaagcattctttttatytctcatgtacatgtggacattatacattttaattaagtgttattatatgagccaaattccctcctcatgggtgttagtaggagttgacctcgaaggagggaggatttggttgtggatttatgactca

SEQ ID NO: 442304 - DNA, 477 bp, Homo sapiens
tgtataaagggattaaagatttttaaaaaaatttatctctgagccttaggtctttcaactttaaaacgaagatcaaaaatctatgtctttggcttatgaggattaaaatgtgaaaacacattactccagtgcctggcacattataaacacataatacatggtagctattttaaatattttattataaacttatgtagtgctcatctggaggcctatgaaagtgttattgaaagtattttaaatcttagtatcttatatttatcatttatagggtatagtagattaagaaatacttcacgtattttgaaagattgggctggaaacatacccgaagaagcattctttttatctctcatgtacatgtggacattatacattttaattaagtgttattatatgagccaaattccctcctcatgggtgttagtaggagttgacctcgaagragggaggatttggttgtggatttatgactca

SEQ ID NO: 442305 - DNA, 604 bp, Homo sapiens
ttagatagaatatgttctttggtttgccaaggccccacctattccctattgaatcacatcacaactgcttcattyttgtaagctccttatctagccctgttggacacttgagtttgtttatgtatttatttatatataaatttttattatatatatatatatatatatatatatatatctgtataaccacaaccacagatgtgtgcatattaaaatttaactattttccatagttaaattttggcagggatactacaaattgatgttgtagtatcaattggcagggatactacaaattgatgttgccaaggccccacctattccctattgaatcacaccacaatagcttcattcttgtaagctccttctctagcctttctgacacttgagtttgttatttagccttaggaaagtaaagctcactaatgttaaagttacaggtatccttccccaacacataaatagcgaatacactaccatttctatcttcccacacttccaacgtttaattttggttagattatttctttttcattatcatgactatgtaaacaatatccacagatgagctttatagtatcctctgattcttttttcattccta

SEQ ID NO: 442306 - DNA, 604 bp, Homo sapiens
ttagatagaatatgttctttggtttgccaaggccccacctattccctattgaatcacatcacaactgcttcatttttgtaagctccttatctagcyctgttggacacttgagtttgtttatgtatttatttatatataaatttttattatatatatatatatatatatatatatatatctgtataaccacaaccacagatgtgtgcatattaaaatttaactattttccatagttaaattttggcagggatactacaaattgatgttgtagtatcaattggcagggatactacaaattgatgttgccaaggccccacctattccctattgaatcacaccacaatagcttcattcttgtaagctccttctctagcctttctgacacttgagtttgttatttagccttaggaaagtaaagctcactaatgttaaagttacaggtatccttccccaacacataaatagcgaatacactaccatttctatcttcccacacttccaacgtttaattttggttagattatttctttttcattatcatgactatgtaaacaatatccacagatgagctttatagtatcctctgattcttttttcattccta

SEQ ID NO: 442307 - DNA, 604 bp, Homo sapiens
ttagatagaatatgttctttggtttgccaaggccccacctattccctattgaatcacatcacaactgcttcatttttgtaagctccttatctagccctgttggacacttgagtttgtttatgtatttatttatatataaatttttattwtatatatatatatatatatatatatatatctgtataaccacaaccacagatgtgtgcatattaaaatttaactattttccatagttaaattttggcagggatactacaaattgatgttgtagtatcaattggcagggatactacaaattgatgttgccaaggccccacctattccctattgaatcacaccacaatagcttcattcttgtaagctccttctctagcctttctgacacttgagtttgttatttagccttaggaaagtaaagctcactaatgttaaagttacaggtatccttccccaacacataaatagcgaatacactaccatttctatcttcccacacttccaacgtttaattttggttagattatttctttttcattatcatgactatgtaaacaatatccacagatgagctttatagtatcctctgattcttttttcattccta

SEQ ID NO: 442308 - DNA, 416 bp, Homo sapiens
ccacagatgtgtgcatattaaaatttaactattttccatagttaaattttggcagggatactacaaattgatgttgtagtatcaattggcagggatactacaaattgatgttgccaaggccccacctattccctattgaatcacaccacaatagcttcattcttgtaagctycttctctagcctttctgacacttgagtttgttatttagccttaggaaagtaaagctcactaatgttaaagttacaggtatccttccccaacacataaatagcgaatacactaccatttctatcttcccacacttccaacgtttaattttggttagattatttctttttcattatcatgactatgtaaacaatatccacagatgagctttatagtatcctctgattcttttttcattcctactca

SEQ ID NO: 442309 - DNA, 416 bp, Homo sapiens
ccacagatgtgtgcatattaaaatttaactattttccatagttaaattttggcagggatactacaaattgatgttgtagtatcaattggcagggatactacaaattgatgttgccaaggccccacctattccctattgaatcacaccacaatagcttcattcttgtaagctccttctctagcctttctgacacttgagtttgttatttagccttaggaaagtaaagctcactaatgttaaagttacaggtatccttccccaacacataaatagcgaatacactaccatttctatctycccacacttccaacgtttaattttggttagattatttctttttcattatcatgactatgtaaacaatatccacagatgagctttatagtatcctctgattcttttttcattcctactca

SEQ ID NO: 442310 - DNA, 589 bp, Homo sapiens
gttgaattatatgatggttctatttttagtctttagaggaacctccatactgttctccatagtggctgtactacgctctgtggatattaataatagttttcttctcccagcatagtcttggttagttccaaattattttctttgtttgtttgtttgctttggtctctacctttcatgctggtagttccccttagatgtctgataatctttggtagtctattcaaatttaggagtgaggtactaaaagaccttattggaagttctgattccatgaatgaaacttcttgtccaccagcttcaactgggtcatctggctgggccatttagttgggtcattctcgacatcagcatctttatgtctttcctctggaagtggtcagataccccagagaataattttctaatctctagtggtctggaattagaatggggtaaaagacatggggttctgttagsttataaatgttccgataaattttcactaccccttcatttatattactgaactccatccccaaatgtgccaaatgttctccaggaagtaagtttctctatttaccttatctagcctctgccaggctgggagagg

SEQ ID NO: 442311 - DNA, 589 bp, Homo sapiens
gttgaattatatgatggttctatttttagtctttagaggaacctccatactgttctccatagtggctgtactacgctctgtggatattaataatagttttcttctcccagcatagtcttggttagttccaaattattttctttgtttgtttgtttgctttggtctctacctttcatgctggtagttccccttagatgtctgataatctttggtagtctattcaaatttaggagtgaggtactaaaagaccttattggaagttctgattccatgaatgaaacttcttgtccaccagcttcaactgggtcatctggctgggccatttagttgggtcattctcgacatcagcatctttatgtctttcctctggaagtggtcagataccccagagaataattttctaatctctagtggtctggaattagaatggggtaaaagacatggggttctgttaggttataaatgttccsataaattttcactaccccttcatttatattactgaactccatccccaaatgtgccaaatgttctccaggaagtaagtttctctatttaccttatctagcctctgccaggctgggagagg

SEQ ID NO: 442312 - DNA, 549 bp, Homo sapiens
taaagaagaaaaataaatcctaaagttaatattcaatacatgatgatgtcacccttactaaagccaaagagggcattatcctatcattctcatcgctaagaactcttctcctcttggcacatgcttattcagttaaagataagccaagcctttcttttgtattttttttttaagagaacaaatttactttggttttgagttttattcctggctctgggtagcttatttttttgacccttattttccccaatttataaaatgaaatagttatcttcactccccaggattgttgtgaagagtaagtcaaaagatacaatgaggtgactcaggcaaaagtacctggccctgtgtagtgagtacattgtatgtgttacatatattcttattcctgagaatccacgaaagaatgaattaaataatgaggaccctttcatcagggtttytgagtgagttttttaaaatacaaggtagtagtttgtgtaaatactaaatccattggtacctgtgcagaatgtaggaaatggagttgctaattccaaaaaaacagca

SEQ ID NO: 442313 - DNA, 522 bp, Homo sapiens
gtacctggccctgtgtagtgagtacattgtatgtgttacatatattcttattcctgagaatccacgaaagaatgaattaaataatgaggaccctttcatcagggtttctgagtgagttttttaaaatacaaggtagtagtttgtgtaaatactaaatccattggtacctgtgcagaatgtaggaaatggagttgctaattccaaaaaaacagcacatatgctgaggaaagtataatacstaatatatatggtttaagcaatgtaaaattccatgaatatgttcctttcatcttaaaatttgtgatttaaaaaacattgatattactataaagaattattattatttcccttgatttacagagtattgttacaatcacatttgaagtaccaggaaatgcaaaggaagaacatcttaatatgtttattcaggtgaatgcaatttttaactgattaatgatttatcaatggttttgttacatagttgttgctattagcgatggttggtcttattaaaatatgtca

SEQ ID NO: 442314 - DNA, 334 bp, Homo sapiens
cacctggcctcaagtgatccttccagcttggtctccctgaaatatcttttgtggctggtttgttcaaattagtttcttctaatcaagggacacacattgcatttgattatttagctcaagactttttttaacctggaaaataccctcactctttgtttatgtatttatttaatgaaattgattgttgaaaaactagtcagtkgtcctgcagaatatttccccttctggaattttctggttgctttttatggtgtcatttaacttttcactctgttttttcctggttaactggaagttagttctaaaggcttttaggcctgctataacaaaatac

SEQ ID NO: 442315 - DNA, 334 bp, Homo sapiens
cacctggcctcaagtgatccttccagcttggtctccctgaaatatcttttgtggctggtttgttcaaattagtttcttctaatcaagggacacacattgcatttgattatttagctcaagactttttttaacctggaaaataccctcactctttgtttatgtatttatttaatgaaattgattgttgaaaaactagtcagttgtcctgyagaatatttccccttctggaattttctggttgctttttatggtgtcatttaacttttcactctgttttttcctggttaactggaagttagttctaaaggcttttaggcctgctataacaaaatac

SEQ ID NO: 442316 - DNA, 605 bp, Homo sapiens
agctagctctctggggcctcttttataagggcactaattccaatcatgagggctctgtccttatgatctaatgaccscctaaaggccccaccttttaataccagcacctttggggttaggatgtcaacatattaattttgggaagacatacacgttcagcccattgcaaggtttagttagattcaggttcaacttctttttttaaagactatttcataggcaataatgtgtattcacatcccatcattagtgatggtgagatgatcgcaaggttagggcgatcactgcctatctcctctgttatattcccccttgggtcaagccagtagtctgtgacgtgaactttgtaccatgtgtatattcagttatattctgtatcaatatttacttgattgttttagcatttattaatgatccttgcttgagttgattatttcattaggggtttcaaaatggtgaatttctaattctctaattctatatacatgttttagctggcatttttctataagcagaccattttcttcacaactgggttatttggctaccctgaaacatagttccttccgggaaggcagaacatatgtttatttctgtcttttaaa

SEQ ID NO: 442317 - DNA, 605 bp, Homo sapiens
agctagctctctggggcctcttttataagggcactaattccaatcatgagggctctgtccttatgatctaatgaccgcctaaaggccccaccttttaataccagcacctttggggttaggatgtcaacatattaattttgggaagacatacacgttcagcccattgcaaggtttagttagattcaggttcaacttctttttttaaagactatttcataggcaataatgtgtattcacatcccatcatyagtgatggtgagatgatcgcaaggttagggcgatcactgcctatctcctctgttatattcccccttgggtcaagccagtagtctgtgacgtgaactttgtaccatgtgtatattcagttatattctgtatcaatatttacttgattgttttagcatttattaatgatccttgcttgagttgattatttcattaggggtttcaaaatggtgaatttctaattctctaattctatatacatgttttagctggcatttttctataagcagaccattttcttcacaactgggttatttggctaccctgaaacatagttccttccgggaaggcagaacatatgtttatttctgtcttttaaa

SEQ ID NO: 442318 - DNA, 546 bp, Homo sapiens
aaaattctacattgcttagaaagcaagtaagaaaatcagtggttgtagagaagttcttacatgaagtaataaaaataaaaattgttatgttaagcattttctattttcttttcctcccctccaaatgaaacagcatactattctgcatgtttttctacctaacaatgtatctttttaatgactcttgtattttaaacctaaaattttgattaagcttcacttaatattaaaaaagatagtataggtcacgatgttatttgatgcaaacgttggaaagacagaatcttcttgatccaagagcttttagaattcaaagtctgattctggttattactctgctcatttaagatagtgaaatgaacatttacattctggcaacctcagaagtacaaygaacaaaggacaccagccaggtagggcaaaggcctgtgcacccccttttgctgttacatgtttatcagatgcgtgctctgtttctgttatattacattacttttctcttcaatgtttactgaggaagaacaagtagctcctcaggcaaatcaa

SEQ ID NO: 442319 - DNA, 610 bp, Homo sapiens
gggccttggaattttgtttttggttttcacatacaagttggagggcagatgcgttagcctcttgaaatacccagaaaccacttgtttcctcatctaaaaatcaggtatgacaggatcatttaattatcctggaaatcagatgaagcactgcatatgaaagcactttgtaacatcgatagcactgggaaatgtaaagaccttttactgaaatataaaggtgtatggtcaactgaatatatctcagataattatgatttgactgtatrtattgaatataacctgtagtgggccccttggtaaacaacttacagttttgttgcaagttttagccaagagaaaatgtatttgttgactagtcatgccctttattggccacatgatgagcagcaatgatattaacacacagtgcaccttgcagaattcaagaatgtctcagtgtcttgtgaactaggaagctgaaatgcagtggtatgcagaaggctggctcagtaggagccttgggagtgtcctccagatagatgtttgtgcaggttgtatttgattccagttggccatgaaaagctggttgctctaaagaatgagaatatacttggttttgcatttactagaa

SEQ ID NO: 442320 - DNA, 594 bp, Homo sapiens
cttgtttcctcatctaaaaatcaggtatgacaggatcatttaattatcctggaaatcagatgaagcactgcatatgaaagcactttgtaacatcgatagcactgggaaatgtaaagaccttttactgaaatataaaggtgtatggtcaactgaatatatctcagataattatgatttgactgtatgtattgaatataacctgtagtgggccccttggtaaacarcttacagttttgttgcaagttttagccaagagaaaatgtatttgttgactagtcatgccctttattggccacatgatgagcagcaatgatattaacacacagtgcaccttgcagaattcaagaatgtctcagtgtcttgtgaactaggaagctgaaatgcagtggtatgcagaaggctggctcagtaggagccttgggagtgtcctccagatagatgtttgtgcaggttgtatttgattccagttggccatgaaaagctggttgctctaaagaatgagaatatacttggttttgcatttactagaactatctggggaacaaattcttggggtggaagaaagaagggagggagagaaagctgtgcttcaat

SEQ ID NO: 442321 - DNA, 610 bp, Homo sapiens
gggccttggaattttgtttttggttttcacatacaagttggagggcagatgcgttagcctcttgaaatacccagaaaccacttgtttcctcatctaaaaatcaggtatgacaggatcatttaattatcctggaaatcagatgaagcactgcatatgaaagcactttgtaacatcgatagcactgggaaatgtaaagaccttttactgaaatataaaggtgtatggtcaactgaatatatctcagataattatgatttgactgtatgtattgaatataacctgtagtgggccccttggtaaacaacttacagttttgttgcaagttttagccaagagaaaatktatttgttgactagtcatgccctttattggccacatgatgagcagcaatgatattaacacacagtgcaccttgcagaattcaagaatgtctcagtgtcttgtgaactaggaagctgaaatgcagtggtatgcagaaggctggctcagtaggagccttgggagtgtcctccagatagatgtttgtgcaggttgtatttgattccagttggccatgaaaagctggttgctctaaagaatgagaatatacttggttttgcatttactagaa

SEQ ID NO: 442322 - DNA, 610 bp, Homo sapiens
gggccttggaattttgtttttggttttcacatacaagttggagggcagatgcgttagcctcttgaaatacccagaaaccacttgtttcctcatctaaaaatcaggtatgacaggatcatttaattatcctggaaatcagatgaagcactgcatatgaaagcactttgtaacatcgatagcactgggaaatgtaaagaccttttactgaaatataaaggtgtatggtcaactgaatatatctcagataattatgatttgactgtatgtattgaatataacctgtagtgggccccttggtaaacaacttacagttttgttgcaagttttagccaagagaaaatgtatttgttgactagtcatgcmctttattggccacatgatgagcagcaatgatattaacacacagtgcaccttgcagaattcaagaatgtctcagtgtcttgtgaactaggaagctgaaatgcagtggtatgcagaaggctggctcagtaggagccttgggagtgtcctccagatagatgtttgtgcaggttgtatttgattccagttggccatgaaaagctggttgctctaaagaatgagaatatacttggttttgcatttactagaa

SEQ ID NO: 442323 - DNA, 480 bp, Homo sapiens
cgatgttatttgatgcaaacgttggaaagacagaatcttcttgatccaagagcttttagaattcaaagtctgattctggttattactctgctcatttaagatagtgaaatgaacatttacattctggcaacctcagaagtacaatgaacaaaggacaccagccaggtagggcaaaggcctgtgcacccccttttgctgttacatgtttatcagrtgcgtgctctgtttctgttatattacattacttttctcttcaatgtttactgaggaagaacaagtagctcctcaggcaaatcaactgttaactttgcagtttttatttaatctcccaggaatgtaacccttaactttaaagaatgtagtgaccataaaacttataaagcatgtttcttaaggaaattgtacctgtttatttaatctatcagatatgaatgttatagaaaattaaatttgtccacttaagctgtagatgaacttttc

SEQ ID NO: 442324 - DNA, 480 bp, Homo sapiens
cgatgttatttgatgcaaacgttggaaagacagaatcttcttgatccaagagcttttagaattcaaagtctgattctggttattactctgctcatttaagatagtgaaatgaacatttacattctggcaacctcagaagtacaatgaacaaaggacaccagccaggtagggcaaaggcctgtgcacccccttttgctgttacatgtttatcagatgcgtgctctgtttctgttrtattacattacttttctcttcaatgtttactgaggaagaacaagtagctcctcaggcaaatcaactgttaactttgcagtttttatttaatctcccaggaatgtaacccttaactttaaagaatgtagtgaccataaaacttataaagcatgtttcttaaggaaattgtacctgtttatttaatctatcagatatgaatgttatagaaaattaaatttgtccacttaagctgtagatgaacttttc

SEQ ID NO: 442325 - DNA, 480 bp, Homo sapiens
cgatgttatttgatgcaaacgttggaaagacagaatcttcttgatccaagagcttttagaattcaaagtctgattctggttattactctgctcatttaagatagtgaaatgaacatttacattctggcaacctcagaagtacaatgaacaaaggacaccagccaggtagggcaaaggcctgtgcacccccttttgctgttacatgtttatcagatgcgtgctctgtttctgttatattacattacttttctcttcaatgtytactgaggaagaacaagtagctcctcaggcaaatcaactgttaactttgcagtttttatttaatctcccaggaatgtaacccttaactttaaagaatgtagtgaccataaaacttataaagcatgtttcttaaggaaattgtacctgtttatttaatctatcagatatgaatgttatagaaaattaaatttgtccacttaagctgtagatgaacttttc

SEQ ID NO: 442326 - DNA, 627 bp, Homo sapiens
aagctgtgcttcaatacctagggcttctttcctggaatggatctgagaatctgggattgggtggctaatatctcatctctagaagggagaaagaactgggtggtgatggctttgtattttctactggagttcactacagaataggtgaatggaatgggctgctatgatccagacattagggaggacaggtttgtgatacattagaaracttgaatgagcccttctatgattctctcttccctctttctgcttccctttctgaatccccatccccaggttgtggaattagcaaatctattatgtgagcaatagcaaacttacaggagcccttggctccatctatctccctgtttgtgtcagttcattctggatgcttttagtctgtggtcttcattcactctttttatggggaagtaaaaggagtgggacagattatgagaacagctgggtcctcccagttgctggggtggttattttaagctttgtttaatgtgtccagagacccagatggcatttttaactaagctgctttattaaatcttgtgataaagcatagtgatgtttattgaaaaggcagacacacatcagcaacattatgcgtgaaacttgccctaagaattttctata

SEQ ID NO: 442327 - DNA, 627 bp, Homo sapiens
aagctgtgcttcaatacctagggcttctttcctggaatggatctgagaatctgggattgggtggctaatatctcatctctagaagggagaaagaactgggtggtgatggctttgtattttctactggagttcactacagaataggtgaatggaatgggctgctatgatccagacattagggaggacaggtttgtgatacattagaagacttgaatgagcccttctatgattctctcttccctctttctgcttccctttctgaatcmccatccccaggttgtggaattagcaaatctattatgtgagcaatagcaaacttacaggagcccttggctccatctatctccctgtttgtgtcagttcattctggatgcttttagtctgtggtcttcattcactctttttatggggaagtaaaaggagtgggacagattatgagaacagctgggtcctcccagttgctggggtggttattttaagctttgtttaatgtgtccagagacccagatggcatttttaactaagctgctttattaaatcttgtgataaagcatagtgatgtttattgaaaaggcagacacacatcagcaacattatgcgtgaaacttgccctaagaattttctata

SEQ ID NO: 442328 - DNA, 627 bp, Homo sapiens
aagctgtgcttcaatacctagggcttctttcctggaatggatctgagaatctgggattgggtggctaatatctcatctctagaagggagaaagaactgggtggtgatggctttgtattttctactggagttcactacagaataggtgaatggaatgggctgctatgatccagacattagggaggacaggtttgtgatacattagaagacttgaatgagcccttctatgattctctcttccctctttctgcttccctttctgaatccccatccccaggttgtggaattagcaaatctattatgtgagcaatagcaaacttacaggagcccttggctccatctatctccctgtttgtgtcagttcattctggatgcttttagtctgtggtmttcattcactctttttatggggaagtaaaaggagtgggacagattatgagaacagctgggtcctcccagttgctggggtggttattttaagctttgtttaatgtgtccagagacccagatggcatttttaactaagctgctttattaaatcttgtgataaagcatagtgatgtttattgaaaaggcagacacacatcagcaacattatgcgtgaaacttgccctaagaattttctata

SEQ ID NO: 442329 - DNA, 582 bp, Homo sapiens
gctggggtggttattttaagctttgtttaatgtgtccagagacccagatggcatttttaactaagctgctttattaaatcttgtgataaagcatagtgatgtttattgaaaaggcagacacacatcagcaacattatgcrtgaaacttgccctaagaattttctataaaacatctgttctctttgagccttttgtgaactctggaagtttgctagtttctatacagacttgaggacaagaagttggaacccacttttggagatgtccaagcataggtattggaatcattaatcctaaccctctcagttttaaggccccggatacccttctgttagacaacagtaacatgagcaagcactgtaataacatttaaacaagattatttggaaataatggacaagaaaaattagtataaattgtttggggattttaaaattaaagataaaaagctagggcttcaatgacctgtgccagcctatagccttaagagtcaatttgcaaacactcaagatttggccaatatgcctctactacttctacttaacacagtcaaagggaaatttttagattctttcatctgat

SEQ ID NO: 442330 - DNA, 582 bp, Homo sapiens
gctggggtggttattttaagctttgtttaatgtgtccagagacccagatggcatttttaactaagctgctttattaaatcttgtgataaagcatagtgatgtttattgaaaaggcagacacacatcagcaacattatgcgtgaaacttgcyctaagaattttctataaaacatctgttctctttgagccttttgtgaactctggaagtttgctagtttctatacagacttgaggacaagaagttggaacccacttttggagatgtccaagcataggtattggaatcattaatcctaaccctctcagttttaaggccccggatacccttctgttagacaacagtaacatgagcaagcactgtaataacatttaaacaagattatttggaaataatggacaagaaaaattagtataaattgtttggggattttaaaattaaagataaaaagctagggcttcaatgacctgtgccagcctatagccttaagagtcaatttgcaaacactcaagatttggccaatatgcctctactacttctacttaacacagtcaaagggaaatttttagattctttcatctgat

SEQ ID NO: 442331 - DNA, 582 bp, Homo sapiens
gctggggtggttattttaagctttgtttaatgtgtccagagacccagatggcatttttaactaagctgctttattaaatcttgtgataaagcatagtgatgtttattgaaaaggcagacacacatcagcaacattatgcgtgaaacttgccctaagaattttctataaaacatctgttctctttgagccttttgtgaactctggaagtttgctagtttctatacagacttgaggacaagaagttggaacccacttttggagatgtccaagcataggtattggaatcattaatcctaaccctctcagttttaaggccccggatacccttctgttagacaacagtaacatgagcaagcactgtaataacatttaaacaagattatttggaaataatggacaagaaaaattagtataaattgtttggggattttaaaattaaagataaaaagctagggcttcaatgacctgtgccagsctatagccttaagagtcaatttgcaaacactcaagatttggccaatatgcctctactacttctacttaacacagtcaaagggaaatttttagattctttcatctgat

SEQ ID NO: 442332 - DNA, 425 bp, Homo sapiens
gggcttcaatgacctgtgccagcctatagccttaagagtcaatttgcaaacactcaagatttggccaatatgcctctactacttctacttaacacagtcaaagggaaatttttagattctttcatctgatttgactctcttagttatgaataagaggatatctagaatatatatgtgacttgttaaaatgaaaatccaccttctctgagtcttcaaatatcttacatatcttacatttttagtaacatcaacttttgaagtcatgtccrtagttgtatgaaaagaaaaatttcaggaacattcaacctcaaaagttctttttcttagtctgaagtcgtagaagcatttgacttttactttctctttttaagtttgtactagtaggtattttgtataaatataatatttaattattgcctttgtat

SEQ ID NO: 442333 - DNA, 426 bp, Homo sapiens
aacttgtaaaaaagatgaaattacccagagttggtgtaggtgatggaaaattgtcatgtttgtatactgttcatagaagttaaattgacataactttttggtcaggcaatttggaagtatatatctaaattaatagagtagttttctaataacctgggaatctcttaatctaagaatctttactgtagatttttctagaacaaatgtacaaacatctatgtacaagggtactcactgcagcattttgctaaggaaaaactcagaaaaaatctatatgttcaacagagaacaggtacataatttatgacacaacygcacaatatacaccactaaaataaaggatataaatttatatgtagtatgaaaaagatgtgaatgatagcttgttggtgaaaaacagcaatgactggaatattgtgtgtaacg

SEQ ID NO: 442334 - DNA, 634 bp, Homo sapiens
acccccttttgctgttacatgtttatcagatgcgtgctctgtttctgttatattacattacttttctcttcaatgtttactgaggaagaacaagtagctcctcaggcaaatcaactgttaactttgcagtttttatttaatctcccaggaatgtaacccttaactttaaagaatgtagtgaccataaaacttataaagcatgtttcttaaggaaattgtacctgtttatttaatctatcagatatgaatgttatagaaaattwaatttgtccacttaagctgtagatgaacttttcacctttctgatcagaaattcaccatcttatagtataggttctgttattaatcagaatatttcatttagactctttctatccaactttttcttagaggctattcaaaataaaggtgcttctaacagtttcatatcgaaatacgatgcaaagccttgctcttccatggtatcctttgagtgagccaaacttatttagccattcccctatagttaaatagctaggatgtttccaacatctcacctttaaaacaatagtgctatgaatgtcataaatgtttgtatatgtaaatatgtgggataaatccctatcagtagaatttcaaaaggtatacgcaatca

SEQ ID NO: 442335 - DNA, 555 bp, Homo sapiens
gtgtgtttttgtcccagtagctttactaaccagaaagcgcctgctgatgtggtgatcacagttgctttggtgcagcttcctcttgacttttggcatttctccatgctgctagctaaggctgaggtggcgactgttgaaggtgtgagcttctccccctcccggcacacatttgtatgcgtactcacactcatgcacacasaaacacacacatgcacactctatcacagtacatgaggtggcagcagctgctccggcatagactttcacacaacataaaggacttttttggtgtggtctgtgcattatttcctgttaagcgtgagctgagtcagtgccctgcttttccatctgaaacctttctgaggctcaggctgtgttaagagcaaaccctctccccttcatgcccaccccatggccctctactgaagccagatcttaatctgctcatttcatgaggattttcaaatcgaatggactgggccatgtgagagattactgaaaggaacagaccaagcaggggctaagagactccacgctaatctgctgagtcgtctg

SEQ ID NO: 442336 - DNA, 555 bp, Homo sapiens
gtgtgtttttgtcccagtagctttactaaccagaaagcgcctgctgatgtggtgatcacagttgctttggtgcagcttcctcttgacttttggcatttctccatgctgctagctaaggctgaggtggcgactgttgaaggtgtgagcttctccccctcccggcacacatttgtatgcgtactcacactcatgcacacacaaacacacacatgcacactctatcacagtacatgaggtggcagcagctgctccggcatagactttcacacaacataaaggacttttttggtgtggtctgtgcattatttcctgttaagcrtgagctgagtcagtgccctgcttttccatctgaaacctttctgaggctcaggctgtgttaagagcaaaccctctccccttcatgcccaccccatggccctctactgaagccagatcttaatctgctcatttcatgaggattttcaaatcgaatggactgggccatgtgagagattactgaaaggaacagaccaagcaggggctaagagactccacgctaatctgctgagtcgtctg

SEQ ID NO: 442337 - DNA, 555 bp, Homo sapiens
gtgtgtttttgtcccagtagctttactaaccagaaagcgcctgctgatgtggtgatcacagttgctttggtgcagcttcctcttgacttttggcatttctccatgctgctagctaaggctgaggtggcgactgttgaaggtgtgagcttctccccctcccggcacacatttgtatgcgtactcacactcatgcacacacaaacacacacatgcacactctatcacagtacatgaggtggcagcagctgctccggcatagactttcacacaacataaaggacttttttggtgtggtctgtgcattatttcctgttaagcgtgagctgagtcagtgccctgcttttccatctgaaacctttctgaggctcaggctgtgttaagagcaaaccctctcccctycatgcccaccccatggccctctactgaagccagatcttaatctgctcatttcatgaggattttcaaatcgaatggactgggccatgtgagagattactgaaaggaacagaccaagcaggggctaagagactccacgctaatctgctgagtcgtctg

SEQ ID NO: 442338 - DNA, 614 bp, Homo sapiens
taagtaagagaatgagtttttgttttggggatatatatttatacgtatctatacagatagatatacacatacttaatttctgtctacctattaaggtgcagtgccagatggaaagtatttttaagcatttagatagyttattctatagcatatgtgtgcatatagcccccccataaagctttgtctcttttctggatatatttaacaagaggctagaacagagtccaaaatgtcagaaatgtttgaacattccatagaaatgaaggaggtgtttccaaatgacctatgtttctatggcaataaatagaacttgtgctgcgttggatgggtcaggagtaaggaatataaacagtgtaagtatgactattccaggcagaaatctaccttgtaagaacagctttgtgcagtgagctcaacaacattgatcagttagcagtccggttcagtacaacattgatcaggtagcaagccggttcggcagtgccagtcggagacacagatggggacaatcaaagaagatgcaggtcaggacaaggatgcagacatgtacctgtcactaccatggacttcagcagcttcttagtgagcaggtttatgattaaagaagaaagaca

SEQ ID NO: 442339 - DNA, 548 bp, Homo sapiens
tttgtctcttttctggatatatttaacaagaggctagaacagagtccaaaatgtcagaaatgtttgaacattccatagaaatgaaggaggtgtttccaaatgacctatgtttctatggcaataaatagaacttgtgctgcgttggatgsgtcaggagtaaggaatataaacagtgtaagtatgactattccaggcagaaatctaccttgtaagaacagctttgtgcagtgagctcaacaacattgatcagttagcagtccggttcagtacaacattgatcaggtagcaagccggttcggcagtgccagtcggagacacagatggggacaatcaaagaagatgcaggtcaggacaaggatgcagacatgtacctgtcactaccatggacttcagcagcttcttagtgagcaggtttatgattaaagaagaaagacatcgttgatatgtaagcatgttacaattaatttgctgtttagttattagcaaactacatccagtttttagtttttaggttttttttttcttttttcttttttgaaacaggttct

SEQ ID NO: 442340 - DNA, 548 bp, Homo sapiens
tttgtctcttttctggatatatttaacaagaggctagaacagagtccaaaatgtcagaaatgtttgaacattccatagaaatgaaggaggtgtttccaaatgacctatgtttctatggcaataaatagaacttgtgctgcgttggatgggtcaggagtaaggaatataaacagtgtaagtatgactattccaggcagaaatctaccttgtaagaacagctttgtgcagtgagctcaacaacattgatcagttagcagtcyggttcagtacaacattgatcaggtagcaagccggttcggcagtgccagtcggagacacagatggggacaatcaaagaagatgcaggtcaggacaaggatgcagacatgtacctgtcactaccatggacttcagcagcttcttagtgagcaggtttatgattaaagaagaaagacatcgttgatatgtaagcatgttacaattaatttgctgtttagttattagcaaactacatccagtttttagtttttaggttttttttttcttttttcttttttgaaacaggttct

SEQ ID NO: 442341 - DNA, 581 bp, Homo sapiens
ctgtaaactgggtcttggctgtgctacttgcttacatcctccatcatgtgatcttttagataacaaaatcgagatacatagggatttgggatcttgcgcaaagtcacccaggcagtaggtggcaaagtcaattcttacattctttcccatcgaacaccaaaatctcagcttacctcagggcactcaactctgctttcttgacccacacccaggtagacccaatggacacttgtagctcttatccagctggggtggtcacctcataaaatggcaacaagtggrgccctttcttgttctagtgagtcagactgtataccttaaagatttcagagcacttcctatgtactgaaatagcctcattaccaggaaggacatacttccaattttcaccacctccattttgcatccaaggaagattagatttcttgatcttctcaatgaaatcttgagaaatgggtgggccgattgaagaacaagacttgggccacacttctagatgcctgtgacttttcggcacttattcagatattaggaattgattatgaaatccatggtggtttgatgctcatgaactctcatcc

SEQ ID NO: 442342 - DNA, 569 bp, Homo sapiens
cgatgcaaagccttgctcttccatggtatcctttgagtgagccaaacttatttagccattcccctatagttaaatagctaggatgtttccaacatctcacctttaaaacaatagtgctatgaatgtcataaatgtttgtatatgtaaatatgtrggataaatccctatcagtagaatttcaaaaggtatacgcaatcagtattttcatacatatttaaaattttccatccatacaaaggttgctaacatatttatttaaaattttaaaaataattttatatgcctcttgtaaccagtaataggatgccaagtttttttttaaggtaacattgctcctcttcccccattgtctctgtcatctatagtactccctgaggtagttcatgttattgcaagggtgtgtatcatcacaaacatattgcttccacatacatatatcagcatacatatatatatatatatatgtatagcatatatatatatgagcacatattaatatatgcccatgcacatacaagcatgtttttgttaatttttactgaaatggaatcatactacatacttatgaa

SEQ ID NO: 442343 - DNA, 586 bp, Homo sapiens
gtcttcactctctccaattcacttggggagtgatagggattataacacagtgagcagaggatattggggaatgtcatgcttaattttcttttctttttttttcttaaatgacatttaaagctaaaagagaatcacaaagggtaagtctgatttaagacatttcacacatgaaagaaatcctgctttcatgcgtgttatgtcacaggaraaactcatttagagtcaacattctgcacctactccgaaattttagcctgagggtttaaatattacctcgctgctctctaggactttaatttgagctaattagaaatggaactcatactaaaactagtttaggaaagaagctgttgatgttctgaagaaaaacagctgtcagaaataagatcattaaaaaaccatagttgtatatggcacaaaatgtaaaggaatagaaatgctgggagaaagcttttatagaatgacattttatctttctttggacactggtctaaggcatgtgaaagggcatattgattcccttggcacctggtatgctcatttatggatgaaaaagcccaatgacataatttaggtgaggtttaag

SEQ ID NO: 442344 - DNA, 618 bp, Homo sapiens
cttctttcgcaggctcacaacatagtccctctgccccgtgccctttttgcaataatctgccagtcccctaagtcttagctctgcctatttaacagtagtggtgtctcagaacacacacacacacacacacacacacacacacacacacacacacacacacacgatccctgacatatttggcaagagyaggccctgaaggtttttattattttggttctttaacccagtggaattactgaatgatttatttaattagggtagggatggagtggatccatttgtttgatgctaaacagcctgagctcgcagttcccagggggcatatctctaaatggtctgaaatgagatttgcagtggttgtcttaatgcaattcccaacttctctccaaatgccttttggcatttgacaacatttcatgcctcttcccctttcggttttcatccttgttttctctcccttctcccacgacctcggtagtcttctgcaatccagattctcagacttcaggtttttctccctctgcccctttcctctctgtcctataactagaagcaccttttggcatagacccatatcccagtttcctctttcccaggtccagcagcatctcaaggaca

SEQ ID NO: 442345 - DNA, 618 bp, Homo sapiens
cttctttcgcaggctcacaacatagtccctctgccccgtgccctttttgcaataatctgccagtcccctaagtcttagctctgcctatttaacagtagtggtgtctcagaacacacacacacacacacacacacacacacacacacacacacacacacacacgatccctgacatatttggcaagagtaggccctgaaggtttttawtattttggttctttaacccagtggaattactgaatgatttatttaattagggtagggatggagtggatccatttgtttgatgctaaacagcctgagctcgcagttcccagggggcatatctctaaatggtctgaaatgagatttgcagtggttgtcttaatgcaattcccaacttctctccaaatgccttttggcatttgacaacatttcatgcctcttcccctttcggttttcatccttgttttctctcccttctcccacgacctcggtagtcttctgcaatccagattctcagacttcaggtttttctccctctgcccctttcctctctgtcctataactagaagcaccttttggcatagacccatatcccagtttcctctttcccaggtccagcagcatctcaaggaca

SEQ ID NO: 442346 - DNA, 618 bp, Homo sapiens
cttctttcgcaggctcacaacatagtccctctgccccgtgccctttttgcaataatctgccagtcccctaagtcttagctctgcctatttaacagtagtggtgtctcagaacacacacacacacacacacacacacacacacacacacacacacacacacacgatccctgacatatttggcaagagtaggccctgaaggtttttattattttggttctttaacccagtggaattactgaatgatttatttaattagggtagggatggagtggatccatttgtttgatgctaaacagcctgagctcgcagttcccagggggcatatctctaaatggtctgaaatgagatttgcagtggttgtcttaatgcaattcccaacttctctccaaatgccttttggcatttgacaacatttcatgcctcttcccctttcggttttcatccttgttttctctcccttctcccacgamctcggtagtcttctgcaatccagattctcagacttcaggtttttctccctctgcccctttcctctctgtcctataactagaagcaccttttggcatagacccatatcccagtttcctctttcccaggtccagcagcatctcaaggaca

SEQ ID NO: 442347 - DNA, 618 bp, Homo sapiens
cttctttcgcaggctcacaacatagtccctctgccccgtgccctttttgcaataatctgccagtcccctaagtcttagctctgcctatttaacagtagtggtgtctcagaacacacacacacacacacacacacacacacacacacacacacacacacacacgatccctgacatatttggcaagagtaggccctgaaggtttttattattttggttctttaacccagtggaattactgaatgatttatttaattagggtagggatggagtggatccatttgtttgatgctaaacagcctgagctcgcagttcccagggggcatatctctaaatggtctgaaatgagatttgcagtggttgtcttaatgcaattcccaacttctctccaaatgccttttggcatttgacaacatttcatgcctcttcccctttcggttttcatccttgttttctctcccttctcccacgacctcggtagtcttctgcaatccagattctcagacttcrggtttttctccctctgcccctttcctctctgtcctataactagaagcaccttttggcatagacccatatcccagtttcctctttcccaggtccagcagcatctcaaggaca

SEQ ID NO: 442348 - DNA, 543 bp, Homo sapiens
tggcctgtccaatacttgttgtgggtcaggatatttttgaagctacggttgttgatttgcatgggaaaattattatgtcttattatttcttgtcccactttaccataaggrctcctcagcttcttacttcaatgggtcttctatgacaaacacactttattaactctaagagtggaatttattttaacagataattagcataggtcaatatatgcttaaaatagggtcaaattaaacctactagctgttataaaggacagatgacaaattaaaatccacatagaagcatcgactcttaaataatctgaaagtactacttctaagaggggtgggcatgggtgaagggaatggtggacatgtttcagaatttcaaacagccaactttaaccaatcttttcctcattttgttcaccttcttgggggcttatgctaaagtgaagtgaatagccataaggctggcttcaggagaaaggtggtctaaaagaactggataattataagcaaaattggtcttgaatgattgaaaattgatgagaatgtgct

SEQ ID NO: 442349 - DNA, 543 bp, Homo sapiens
tggcctgtccaatacttgttgtgggtcaggatatttttgaagctacggttgttgatttgcatgggaaaattattatgtcttattatttcttgtcccactttaccataaggactcctcagcttcttacttcaatgggycttctatgacaaacacactttattaactctaagagtggaatttattttaacagataattagcataggtcaatatatgcttaaaatagggtcaaattaaacctactagctgttataaaggacagatgacaaattaaaatccacatagaagcatcgactcttaaataatctgaaagtactacttctaagaggggtgggcatgggtgaagggaatggtggacatgtttcagaatttcaaacagccaactttaaccaatcttttcctcattttgttcaccttcttgggggcttatgctaaagtgaagtgaatagccataaggctggcttcaggagaaaggtggtctaaaagaactggataattataagcaaaattggtcttgaatgattgaaaattgatgagaatgtgct

SEQ ID NO: 442350 - DNA, 543 bp, Homo sapiens
tggcctgtccaatacttgttgtgggtcaggatatttttgaagctacggttgttgatttgcatgggaaaattattatgtcttattatttcttgtcccactttaccataaggactcctcagcttcttacttcaatgggtcttctatgacaaacacactttattaactctaagagtggaatttattttaacagataattagcataggtcaatatatgcttaaaatagrgtcaaattaaacctactagctgttataaaggacagatgacaaattaaaatccacatagaagcatcgactcttaaataatctgaaagtactacttctaagaggggtgggcatgggtgaagggaatggtggacatgtttcagaatttcaaacagccaactttaaccaatcttttcctcattttgttcaccttcttgggggcttatgctaaagtgaagtgaatagccataaggctggcttcaggagaaaggtggtctaaaagaactggataattataagcaaaattggtcttgaatgattgaaaattgatgagaatgtgct

SEQ ID NO: 442351 - DNA, 554 bp, Homo sapiens
tactgaacttggatcccaaaggctttggtcttttttgatatcctattggatactcataagcaggctagaaaaatagraaactagaatttattctctttgaactgacaaatctaaccagtgggctgcattctctatatctgaaaaatcttggttttgattgaaaaagttaattttacaaagcaattttctttttttaaattaaatttcattttttttgagactgggtctcactttgttgcccaggctggagtgcaatggcacagtcttggctcactgtagccttgacctccccagattcaggtgatcttcccacctcagcctcctgagtagctggggctataggtgcatgccactatgcacagctgatttttgtgtttttactactcatagggtttctctgtgttgcccagtctagtctcaaactcctgatctcaagagatctgcctgccttggcctcctaaagtgtcatgaaccaccatgcccagcctacaaagcaatgttctaggaaaaactacagttactctttgattatgtaattgctggagaagaaaaac

SEQ ID NO: 442352 - DNA, 554 bp, Homo sapiens
tactgaacttggatcccaaaggctttggtcttttttgatatcctattggatactcataagcaggctagaaaaatagaaaactagaatttattctctttgaactgacaaatctraccagtgggctgcattctctatatctgaaaaatcttggttttgattgaaaaagttaattttacaaagcaattttctttttttaaattaaatttcattttttttgagactgggtctcactttgttgcccaggctggagtgcaatggcacagtcttggctcactgtagccttgacctccccagattcaggtgatcttcccacctcagcctcctgagtagctggggctataggtgcatgccactatgcacagctgatttttgtgtttttactactcatagggtttctctgtgttgcccagtctagtctcaaactcctgatctcaagagatctgcctgccttggcctcctaaagtgtcatgaaccaccatgcccagcctacaaagcaatgttctaggaaaaactacagttactctttgattatgtaattgctggagaagaaaaac

SEQ ID NO: 442353 - DNA, 554 bp, Homo sapiens
tactgaacttggatcccaaaggctttggtcttttttgatatcctattggatactcataagcaggctagaaaaatagaaaactagaatttattctctttgaactgacaaatctaaccagtgggctgcattctctatatctgaaaaatcttggttttgattgaaaaagttaattttacaaagcaattttctttttttaaattaaatttcattttttttgagactgggtctcactttgttgcccaggctggagtgcaatggcacagtcttggctcactgtagccttgacctccccagattcaggtgatcttcccacctcagcctcctgagtagctggggctataggtgcaygccactatgcacagctgatttttgtgtttttactactcatagggtttctctgtgttgcccagtctagtctcaaactcctgatctcaagagatctgcctgccttggcctcctaaagtgtcatgaaccaccatgcccagcctacaaagcaatgttctaggaaaaactacagttactctttgattatgtaattgctggagaagaaaaac

SEQ ID NO: 442354 - DNA, 554 bp, Homo sapiens
tactgaacttggatcccaaaggctttggtcttttttgatatcctattggatactcataagcaggctagaaaaatagaaaactagaatttattctctttgaactgacaaatctaaccagtgggctgcattctctatatctgaaaaatcttggttttgattgaaaaagttaattttacaaagcaattttctttttttaaattaaatttcattttttttgagactgggtctcactttgttgcccaggctggagtgcaatggcacagtcttggctcactgtagccttgacctccccagattcaggtgatcttcccacctcagcctcctgagtagctggggctataggtgcatgccactaygcacagctgatttttgtgtttttactactcatagggtttctctgtgttgcccagtctagtctcaaactcctgatctcaagagatctgcctgccttggcctcctaaagtgtcatgaaccaccatgcccagcctacaaagcaatgttctaggaaaaactacagttactctttgattatgtaattgctggagaagaaaaac

SEQ ID NO: 442355 - DNA, 440 bp, Homo sapiens
cattccgtcatatgtttatactttcaacagagggctgtgtggtccagcaggaggggccaggagctagaggtagctctgtcaccctgtcctccctgggcacttgggatgaaacctgtttgtccctaggccttgtcttctagtctttacaaggggaagaggttagaccagtgttctttaaactacttgagccatggaactcccattttatttacttttttttttttgtagagacagggtcttgctctgttgccctgtctagagtgcagtggcgtgatcacattataattcactgcagcctcaaattcctgggctcaagtgatccagaaccgtcatttaaatgaaaattttcaggcaagcccaacatttgtattattattatgattattattttgaggmtgggcgtggtggctcacacctgtaatctatctcaaaaaagtttt

SEQ ID NO: 442356 - DNA, 488 bp, Homo sapiens
ttaattaaaatgacaaagacgggtgggccaggagctgaatgtcctgtttccctctggcccttagagagaaaggaacaggacatctggatttaggaatccagtcctcaccgggggcccaaagtcagrcttcctcttggggagcaggggacgtccccacttctttccctccaggagccctgaggccaggctgtgagggaccccgcaccatgctcctggcccctttcccgcctcccccgctctgtctccctccttcccttcccctttctgggcctgggtggatcttttccagaatcctcttccttctccaaaatgatggcggtccccggagaaaagccccagtgccactttggggtttggttcatgttatgggctgggtgtctgtgttcccccaaatttgtatgttgaagtcctaggcccccaggacctcacaatgtgagagtatcagagatagcgtcttttcagaggtcactaaggtaaaatgaggtctt

SEQ ID NO: 442357 - DNA, 591 bp, Homo sapiens
ttgctctcgaacgccttcctttccaattgggacaaacggctatgaatacggcacaccctgttttgcattcaaactgttgggaaagttttgcggctgtaaatatcatgctcttggtgctcaagacagaattattattactttttccttagttcttggaaccagtgataaattaaacatttcttttgcccccccttgcagccggcaggcaatgtggagctgattgctttgcctctgtcctgacccatgtgccccatcgggagaggaacaagacgacagtgacttgccaggggcacaggcacatggatggggagcaggtctaaatgggggagggggcacgtgcagggggggctttyctgagatagggcttctctttggtgttttccctgcacaatcttccaatgatgtatagagtttaccctcaacgctcagaggctgacatttgacatagagggaaactgaggcacaatggaggtctccagaagattctgtccccacacactgttctctttccatcgtctgctctgggtcagatcctgggaagtggtgtttttcctctggggcgggcgctgggcgtgtggaggtgggaaagcc

SEQ ID NO: 442358 - DNA, 591 bp, Homo sapiens
ttgctctcgaacgccttcctttccaattgggacaaacggctatgaatacggcacaccctgttttgcattcaaactgttgggaaagttttgcggctgtaaatatcatgctcttggtgctcaagacagaattattattactttttccttagttcttggaaccagtgataaattaaacatttcttttgcccccccttgcagccggcaggcaatgtggagctgattgctttgcctctgtcctgacccatgtgccccatcgggagaggaacaagacgacagtgacttgccaggggcacaggcacatggatggggagcaggtctaaatgggggagggggcacgtgcagggggggctttcctgagatagggcttctctttggtgttttccctgcacaatcttccartgatgtatagagtttaccctcaacgctcagaggctgacatttgacatagagggaaactgaggcacaatggaggtctccagaagattctgtccccacacactgttctctttccatcgtctgctctgggtcagatcctgggaagtggtgtttttcctctggggcgggcgctgggcgtgtggaggtgggaaagcc

SEQ ID NO: 442359 - DNA, 591 bp, Homo sapiens
ttgctctcgaacgccttcctttccaattgggacaaacggctatgaatacggcacaccctgttttgcattcaaactgttgggaaagttttgcggctgtaaatatcatgctcttggtgctcaagacagaattattattactttttccttagttcttggaaccagtgataaattaaacatttcttttgcccccccttgcagccggcaggcaatgtggagctgattgctttgcctctgtcctgacccatgtgccccatcgggagaggaacaagacgacagtgacttgccaggggcacaggcacatggatggggagcaggtctaaatgggggagggggcacgtgcagggggggctttcctgagatagggcttctctttggtgttttccctgcacaatcttccaatgatgwatagagtttaccctcaacgctcagaggctgacatttgacatagagggaaactgaggcacaatggaggtctccagaagattctgtccccacacactgttctctttccatcgtctgctctgggtcagatcctgggaagtggtgtttttcctctggggcgggcgctgggcgtgtggaggtgggaaagcc

SEQ ID NO: 442360 - DNA, 591 bp, Homo sapiens
ttgctctcgaacgccttcctttccaattgggacaaacggctatgaatacggcacaccctgttttgcattcaaactgttgggaaagttttgcggctgtaaatatcatgctcttggtgctcaagacagaattattattactttttccttagttcttggaaccagtgataaattaaacatttcttttgcccccccttgcagccggcaggcaatgtggagctgattgctttgcctctgtcctgacccatgtgccccatcgggagaggaacaagacgacagtgacttgccaggggcacaggcacatggatggggagcaggtctaaatgggggagggggcacgtgcagggggggctttcctgagatagggcttctctttggtgttttccctgcacaatcttccaatgatgtatagagtttaccctcaacgctcagaggctgacatttgacatagagggaaactgaggcacaatggaggtctccagaagattctgtccccacacactgttctctttccatmgtctgctctgggtcagatcctgggaagtggtgtttttcctctggggcgggcgctgggcgtgtggaggtgggaaagcc

SEQ ID NO: 442361 - DNA, 588 bp, Homo sapiens
ttggtggaggtctcgtaggtgctactgcagctcccgcttctctctgtggaacttcctattgacacaggcagcagctgggcctgcagctgctccatttycccagattctccttcaccttctccaacccctgagccaggtaccttctttgctagagaccacccacatcattgaggtggaaagagctgagagactgacaagagctctagtccatccccatggtcttgctcctgctggtgggtcccagcttgtccttgctgtccccactttgatgctctgtcccttccaactgtttcaacaccaggcacaaagaccatctcaccggctcccacaagggcccaagggcaaatccctctcatatgccctcataaatgcctagttgttctgctttgggacagcagtgaggaaattctagccaataaatacagacggaatcacggaattagaaagtcatccttttccagcccttaatgatcatcagtggttaatagaaccatcaggtgaaagactgataaggaactgtagaatggatgggtcaggctggcaataccttaagccactgatcaacattaacctcaaacaatggctatc

SEQ ID NO: 442362 - DNA, 553 bp, Homo sapiens
ccaaaacaatctttcaaaaaggggtgaagttgaaggcctcatacttcctgattttgaaacttactgcaaagatacagtaatcaaaacagtatggtactggcataaagacatacacatcaaccaatggaatagaatagaggtcttagaaatacagttacgtggctgggcctggtgcctcacacctgtaatcccagcactttgggaggctgaggtgggggggatcacctgaaatcaggagttcaagacaagcctggccaacatggcaaaaccccgtctttactaagaatacaaaaattagttgggcgtgatggcatgtgcctgtaatcgcagctactcaggaggctgaggcaggacaatcacttgaacctgggaggcagaggttgcagtgagctgagatctcatgactgcactccagcctgggcaacagagtgagactctgtctcaaaaaggtaagaaagaaaaaaagaaagaaagagagagagagagagagagaragaaagaaagagatacagttatgcacagcatatgatattttggtcaatgactgactgca

SEQ ID NO: 442363 - DNA, 579 bp, Homo sapiens
gtaattgtttgtatttttagtagagayggagcttcagcatgttggccaagctggtctcgaactccgggcctcaagtgatctggccgcctcaccctcccaaagtgctaggattacaggcgtgagccacttcacccagctgtaaacgtgtatcttttcgagccacctaattctactgaaaggaaccccaatatatgtgcattctatgaggggcagtagggatagtcgagccttttcctaactcatagggtaagaatcacctgagggtaaatcagagttacagattccagggctctgctgcaaagatactgagtaggaatctccagagaagtgaatggagaatctggacttcaaatgtcttggacgattctttggcttaggaaggtttgctttcagaggcagatttacctgggtttaaattcttgctctgtcactttagctccatgatccttgagcctcagtttctccatttgtaaaactaagatgcttctttactcagggaactcgtaagaattacataaacatattaagttcagctgccagcacagttcctagcatgtagtcagagcttaattattatta

SEQ ID NO: 442364 - DNA, 579 bp, Homo sapiens
gtaattgtttgtatttttagtagagacggagcttcagcatgttggccaagctggtctcgaactccgggcctcaagtgatctggccgcctcaccctcccaaagtgctaggattacaggcgtgagccacttcacccagctgtaaacgtgtatcttttcgagccacctaattctactgaaaggaaccccaakatatgtgcattctatgaggggcagtagggatagtcgagccttttcctaactcatagggtaagaatcacctgagggtaaatcagagttacagattccagggctctgctgcaaagatactgagtaggaatctccagagaagtgaatggagaatctggacttcaaatgtcttggacgattctttggcttaggaaggtttgctttcagaggcagatttacctgggtttaaattcttgctctgtcactttagctccatgatccttgagcctcagtttctccatttgtaaaactaagatgcttctttactcagggaactcgtaagaattacataaacatattaagttcagctgccagcacagttcctagcatgtagtcagagcttaattattatta

SEQ ID NO: 442365 - DNA, 543 bp, Homo sapiens
tatcacacacatatccactagtacagagagagaacagtagaaaagtcatgtgtgcagaagaaaggacagaaagaagagctgcaattaaaaacagtcaccttttatctccatttttttctatcttctgatgttactaagataagagattttaaaaagtggtcaaaatatatgaagtacttgttatttttaaggtgttactcacacttgcttaatcccatcaactgtcctgtgcatagatattatcattattctcatttcacaaagagaaaatgtaatcagaaaggtttttttttcttgattgtttaaaggttatgtgtgtktgtgtgctttatttattttttgagatagggtcttgctatgttgcctagtctggtcttgaatttctgggatcaagctatcctcctgcctcagcctctaaagtagctggaactacaggggtgtgccaccatgcccagctttatatatgcatttcaaattaaaaatccatccaccattattaaaatgtgattggtccaggtctaagaaatacattcagcattctat

SEQ ID NO: 442366 - DNA, 534 bp, Homo sapiens
ggtttttttttcttgattgtttaaaggttatgtgtgtttgtgtgctttatttattttttgagatagggtcttgctatgttgcctagtctggtcttgaatttctgggatcaagctatcctcctgcctcagcctctaaagtagctggaactacaggggtgtgycaccatgcccagctttatatatgcatttcaaattaaaaatccatccaccattattaaaatgtgattggtccaggtctaagaaatacattcagcattctatgagggcctctatttcctgagaaactaataattataattttgtgaaatattttcctatatgatttctatgtacttttctatacccggcttccagagaaaatgcacatctcaaatgcaatgcttttattataagtctagttctcatattttccccagatccaactgagccgttagttttttcttttagaaagaatcatagttatgtgatgcgcattttccctggaagatggatcagtatattacttgaattaggttgcacaaataaatgagaaat

SEQ ID NO: 442367 - DNA, 534 bp, Homo sapiens
ggtttttttttcttgattgtttaaaggttatgtgtgtttgtgtgctttatttattttttgagatagggtcttgctatgttgcctagtctggtcttgaatttctgggatcaagctatcctcctgcctcagcctctaaagtagctggaactacaggggtgtgccaccatgcccagctttatatatgcatttcaaattaaaaatccatccaccattattaaaatgtgattggtccaggtctaagaaatacattcagcrttctatgagggcctctatttcctgagaaactaataattataattttgtgaaatattttcctatatgatttctatgtacttttctatacccggcttccagagaaaatgcacatctcaaatgcaatgcttttattataagtctagttctcatattttccccagatccaactgagccgttagttttttcttttagaaagaatcatagttatgtgatgcgcattttccctggaagatggatcagtatattacttgaattaggttgcacaaataaatgagaaat

SEQ ID NO: 442368 - DNA, 534 bp, Homo sapiens
ggtttttttttcttgattgtttaaaggttatgtgtgtttgtgtgctttatttattttttgagatagggtcttgctatgttgcctagtctggtcttgaatttctgggatcaagctatcctcctgcctcagcctctaaagtagctggaactacaggggtgtgccaccatgcccagctttatatatgcatttcaaattaaaaatccatccaccattattaaaatgtgattggtccaggtctaagaaatacattcagcattctatgagggcctctatttcctgagaaactaataattataattttgtgaaatattttcctatatgatttctatgtacttttctatacccggcttccagagaaaatgcacatctcaaatgcaatgcttttattataagtctagttctcatattttccccagatccaactgagcmgttagttttttcttttagaaagaatcatagttatgtgatgcgcattttccctggaagatggatcagtatattacttgaattaggttgcacaaataaatgagaaat

SEQ ID NO: 442369 - DNA, 580 bp, Homo sapiens
attttttcagttcctcctcctccttctctccctctccctcctcctcctcctcttcttcttcttcttattcctcctcctcctcctcttcttgttcttcttcttmctcctcctcctcttcctcctcttcttcttcttcctttcagaggtggagcctttctctgtggcccagcctggagtgcagtggcatgatcacagctcactgtaacctcaaaatcctaggctgaagtgatcatcctgcctcagcctcctcagtagctgggtctataggcatgtgctaacacacctggataatttttaaaaatttattgtagagatgaggttcttgctatgttgcccaggctgatctggaacttctggcctgaagtaatccttctctttcagcccctcaaagcactaggattataggtacaagccactgtgcttaaccagaaattacttttaaaataactagtagatatgaatgtgagcattctaaacggatcattagattagtagccactgagtctgagccatgtttctctgtgacctgaataagaattatggtagaaagccttgtaaagccttgactaggagatgaaga

SEQ ID NO: 442370 - DNA, 671 bp, Homo sapiens
tgtgatgatgcgtctgttaagcagcagtagaaaacaaaagcctgtagaaagcacaggtggtctttggctgcttgggagaagtagagacaaggccagagtgttgaggctgtagacacatcttaacaccttgggtcccaatgggtagaggagatggaataggaggaaaaagacagagaagagagcgaaagtagtggggctacttagctggatgagagacacgaaggttcaggaaaaacaaatgggaaaaacattgcttttctcctacctaagactctcctccttcctgcctttcacaacgaaaattaggaaaaaaatagaattatgaaataattttgaatgatgaaaaacatatttaagacaagtggtttacctggctttgaattccccaaaagaatttttaaaattgttcaataggaaaattcattttgaaacaccttatttccattcattacatgccaacataatggtaaacagcactattagaattttccagtgaggtactagacatatttctctctcaagggactaccacatggtactgtggtacagtggtactgtgtggtactatggtacagcggtactgtgtggtactgtggtacagtggtactgtgtggtactatggtacagyggtactgtgtggtactgtggtacagtggtactgtgtggtacta

SEQ ID NO: 442371 - DNA, 395 bp, Homo sapiens
tggggatacaggtgaataagatgggcaggctctgatgcacggaacttattttctagttggcatgtgtatgacagagagagaaggaggaggagggyaggtgattcagttatgaaaaaatgaacaagataatttcagattacataaatgttgtgaagaaaattaaacaggggaaagtacttaggagtggggatctaagtgaaactgaggctgggaagatgacttgatccgagcctggttggcaaagggaagctcctgctttttctctgaacatttctgccctggctcactcctctggcaatgagcttcctgtggttccttaaacatcccaggcaggctgcttcttcagggatccttcggtgtagaaagcactcctagttaaattttcatgccagtca

SEQ ID NO: 442372 - DNA, 603 bp, Homo sapiens
agctgctgataattagtttcaggtgtttccatccattgggagactgcctttccatggtgctggctgtgaccaatgattatttaagagagacaggtaacagctgcatgaccatcacctgatggtcacctgacattcctcgtttggggtggggtcttgggggaaccctctcctaccctgctcatgcctgactagctgtaacacttggggcttggaattttctccatygccattttaacagattattcttccgctaatataagaagaagctaagtagagttatgatacatgagacaagagaagaggtacaagatgccgcactttctcgtgtattaggcttgctcacgtcctcttctttcacatccagtttgtcaataacttgtaatatcttctatgtcaataatacaaagacattccaactccccccttgtcctcccttttggcccccatacacccttgacacttttgaggcagatgggatgagggaatttaattctttgataattttctcaatttctgctatggcttttgattgatttacattttctgcacattttctctgtcattcttggccatttctatttcatctaaaagttatccatatta

SEQ ID NO: 442373 - DNA, 603 bp, Homo sapiens
agctgctgataattagtttcaggtgtttccatccattgggagactgcctttccatggtgctggctgtgaccaatgattatttaagagagacaggtaacagctgcatgaccatcacctgatggtcacctgacattcctcgtttggggtggggtcttgggggaaccctctcctaccctgctcatgcctgactagctgtaacacttggggcttggaattttctccattgccattttaacagattattcttccgctaatataagaagaagctaagtagagttatgatacatgagacaagagaagaggtacaagatgccgcactttctcrtgtattaggcttgctcacgtcctcttctttcacatccagtttgtcaataacttgtaatatcttctatgtcaataatacaaagacattccaactccccccttgtcctcccttttggcccccatacacccttgacacttttgaggcagatgggatgagggaatttaattctttgataattttctcaatttctgctatggcttttgattgatttacattttctgcacattttctctgtcattcttggccatttctatttcatctaaaagttatccatatta

SEQ ID NO: 442374 - DNA, 215 bp, Homo sapiens
gtgattaattactataacaaagcaatgtgcaatgagccatggggaccttgggggactcaagatatattagcccagaggggctgggaaaggaggcatgagtcytgagtttatgagctcagggatcagtcaccgtgtcagagatgctggaagcaatattggaattaaggagatccacttcctcttctttatctcttagcatgacaccattggctcat

SEQ ID NO: 442375 - DNA, 583 bp, Homo sapiens
ggacattttgttgtgttgtggttattgttgttcttgttgttgttgttgttgttagattctgagaaacttaaatctggttctgccwtttactgtacaattaaaaagaaaaaccaaaatagccaaagttaatagacagattgtcagtttggttccaatttttcctacagaaataaacttctttttcttttccctttctgaaaccatcctgagaaaggaaaatatactcactacagacgaagtgttctgcctaaaagattaaatctgtcttgaagtaagtccaaagatagctaacggtggggaaagttagctgtccatttcttgttgtgagattgtgagcttgataacataatacaaattaaggaacagttttatgcttaagaagcattcttccactgaaaaactcacactagcaatattgcattaaacaatagaacttttatcgtttcttggccttttggctaagaacaagtgtagtaacaatagaacttactcataagtgggtgataaaaatgggtggacatggacacagagagtggaatgataggacaggtagggtgaagggtgggagcaggatagataatga

SEQ ID NO: 442376 - DNA, 583 bp, Homo sapiens
ggacattttgttgtgttgtggttattgttgttcttgttgttgttgttgttgttagattctgagaaacttaaatctggttctgccttttactgtacaattaaaaagaaaaaccaaaatagccaaagttaatagacagattgtcagtttggttccaatttttcctacagaaataaacttctttttcttttccctttctgaaaccatcctgagaaaggaaaatatactcactacagacgaagtgttctgcctaaaagattaaatctgtcttgaagtaagtccaaagatagctaacggtggggaaagttagctgtccatttcttgttrtgagattgtgagcttgataacataatacaaattaaggaacagttttatgcttaagaagcattcttccactgaaaaactcacactagcaatattgcattaaacaatagaacttttatcgtttcttggccttttggctaagaacaagtgtagtaacaatagaacttactcataagtgggtgataaaaatgggtggacatggacacagagagtggaatgataggacaggtagggtgaagggtgggagcaggatagataatga

SEQ ID NO: 442377 - DNA, 586 bp, Homo sapiens
atttaaaatttctcacctggccttgcttgggcaagaaccagcttggaaacctgcaggagtggatggggtgtgatgagcctctctgtgattttttttttttaatctggctctttctcttctcctccttccctccctctgctgactctggcttctccgtgtttcaaatgagatgaggatttggagaaaaaggtatcatagaccttttacatagagagtaagtcatcttatagctagttcaccagactggcttaccttgggagcacccaaacatgcctgctgtctgcgatgtttttaaagaagtacatttagccaacatttgtgrtaattcaccaagagaggtctggtagacttccactctagacttccaggttatgctgtgggtttgtctggtaccttaggaaactcatggaaggaaaacagagttctcccataaacatgtggttaaatctgagagatgaccatatgatagcctccccccgccatacctgacccttttcagacacaaggtgactagtatttccttgttcagggcagcatgtagggcattcactgataaaactgtagcaagggatgttgcttcttccag

SEQ ID NO: 442378 - DNA, 546 bp, Homo sapiens
tattatctatgtcttgtataaaatataatttttaaattactgcatgtaatgttgtcaaaaataatcagcacaaacctggataatcataacatgtagactttcttcaacaaggaatcctagagtatttcctctcattttctaaatctgtatcttatttgatataatttaaagacgytttcagtttcttaagaaagagttagctttgagacgggtagcacagacagacagaagcacaggacattacacagcagcaaagccaagactagaatcctggtcttctgataagtaattaagtgatcctgggaaaagcttgtaatcattttgagtcacagtttttataccctctaaaatgggatataacatatctaagaatgtcacaagtataaagtgaaatgtaaaggaaagagcactttgaaatgtcaggtgtacattaaatcaaaacttatataaacagtagaattcactattcataataagagcaataggtaatttcatcatgaaatgaggccattgaacctcttttccagtcataactgttttaatacc

SEQ ID NO: 442379 - DNA, 561 bp, Homo sapiens
aaatgcaatcgctgagtcatctttactaataattcctatcttgccagaatccagacctcagtagrctcttcctaatgttcaaaaataaaagtaaagtcaggcaaatttataaagtatatacttgctcagccaactaatatttatggactgcctactgtgtgtagtgtgtgctctaggttctagagactccgtagtgaacaagacagaaatttatcttttattctagcagagtgaacaatagcaaacaaataaacaagaagatgtcaggttgtaacacttcctttccacatcattagaaaaggccatgccatggaagaaactgggtgatcagggacgtcctctctgaagtgacattataacctaaaacttcagtgacaggaaggatcaagaagcttaccctatctctcttcctttactcagctcctttccgtctccctttcctctaccgtagatctgggatacttatactgcaacagccttccaaggccaggccttccactaagcaggccattcccttgacttctagtttcatttattcaacagactgaaaaagggtggtag

SEQ ID NO: 442380 - DNA, 494 bp, Homo sapiens
taaagtaattttaaagattgtttaaaattttcctctcttgtttagcttaattgcaaggcagatgcaaatgtcccctcttgctcatcaggtcacagcagaaaagtattagaaaggaatatatcaaagctcagaggctggaattttaaaaatgagattcagatgtgtctataaatatgacagggagatgcaaggagacccttgaagccagtgtgggcaaagcatgcctggaatttggtctgtgacctcacctggccatttgcttcattaaatctcctgctttcgggcacacatgggtctgggggtcagctggtatgttttcatcccatttacaatatgcaatattgtttgctcgccttaggggctgctgagccttctgcctcctgctcaagtgtcatgactcaaccaaactgaagaggcaggaaacagagctggatggatcactggtttgatctcatgacaaaaatyccttgttgtgacttctttcagaggcagga

SEQ ID NO: 442381 - DNA, 589 bp, Homo sapiens
gagggaaaagacttcacctcttgaggggcagaacagcattgtgtgtacagagggaaggaaagtgaaggacggcagaatacacatcagccatgtatgtccctctccttygggtcactgttgcaattttacatttgtttgtgatttatttgagaagagtctcccagatggcagggaccgtgactacacatgctcactgctgtatctctcgtgtctagcatggtgttgatcacattgcagaatttaaaatgcatttgttgaatgaatgaatatccccttcaagatgcagtagccacagtcacattgaactgcttcagagactgaaatgcttccatttttgtgtggtgaaagtttgataaagggtttttagagggagtgggatacagaaagctttgattcagcgttcttgctggcagaagacctagttttgcttgaaggctctagaatgcatattttggcactggatcccagatgtctgtgggaggccttagggtgggggagaactgaagtgagagaaaaggacttaatacaataggattccccccatgcctcccctgttttatggatgttcttagcacccagcacagatttc

SEQ ID NO: 442382 - DNA, 589 bp, Homo sapiens
gagggaaaagacttcacctcttgaggggcagaacagcattgtgtgtacagagggaaggaaagtgaaggacggcagaatacacatcagccatgtatgtccctctcctttgggtcactgttgcaattttacatttgtttgtgatttatttgagaagagtctcccagatggcagggaccgtgactacacatgctcactgctgtatctctcgtgtctagcatggtgttgatcacaytgcagaatttaaaatgcatttgttgaatgaatgaatatccccttcaagatgcagtagccacagtcacattgaactgcttcagagactgaaatgcttccatttttgtgtggtgaaagtttgataaagggtttttagagggagtgggatacagaaagctttgattcagcgttcttgctggcagaagacctagttttgcttgaaggctctagaatgcatattttggcactggatcccagatgtctgtgggaggccttagggtgggggagaactgaagtgagagaaaaggacttaatacaataggattccccccatgcctcccctgttttatggatgttcttagcacccagcacagatttc

SEQ ID NO: 442383 - DNA, 583 bp, Homo sapiens
tgattctgactgtcgctcaagctcctggtggttctcaaggctgcccagactacaatggaaagcatattaatcagacaggctattgcttcaaccaacaatttcaaacacaacagaccttataaagttccaagaggggttcctggtcagtgggaagctctcatccacacagcaattcagggacccaggcactttctttttgtggccctgccattccctagggtctcagagtcctctgctgcaacctctaacatctgaccagccgtcaaggaagagagagagggcctggaggatggggctgacagcctttakggcccagacagctctgtgaataccttcagggtctgcacaaattgcattacagcagggggcccaaggcaagagcttttgcttccctgagaacttcaagcataaatatataggctctataggtttgcacactgagtctaacttgatcttcattttaatttccatttgccatgagttccttttattcagtttattctcttttagtgtctcaattaagctattctgtatctttttttttttttggcatggggagaaataattaaataaaatgtaacgt

SEQ ID NO: 442384 - DNA, 521 bp, Homo sapiens
gccaccttgtggtccctgatgtccagccgctcacgtttgacccaagctggagccgacaagcacaggctgaacaagcccagccggcaaacactaaattctaactaggaaaaaatggtggggagggaggaggagaaatgaatttaagttakaaaaaattcttgaataccagctgatatctttccgaggagtcttacagacacattggagggcacaaacttatgtgtttctttcgatatttctaacctactgctaatatttttttcatcagggaaacatttcgtcttgtaaaagctggatgtcatgaactgtggttttagaaaacaaactagagacaattggaaggccacacatacttaaaactgcacgccctctcaccgcaaacgaagtcatatattactgcacccccctcctcccccacatagggtcctttcagaatgtcaatcataacattgaatttgcctcccgtaagttctccattattgccgcatttcacataaaatgatgactaggaaatgataaga

SEQ ID NO: 442385 - DNA, 506 bp, Homo sapiens
atacagaatgttggtttatacgttgagtcagtgactgcatggaagccacaagacaggctgtgatctccctcccatgttcttgatgtccttgtcacaccctgttatgggctgaactgtgttctcccaagatttatacattgaagtcctaacctgaatctctcagaatgtgactrtatttggagaaagggcccttaaagatgtgatcaagttaaaatgaggctgttagagtgggccctaatccaatatgactgatgtccttaccagagatgctagaacagagatgaaaggccatgtgaggacagtgtagaggcagtgcaagccagggagagatgcctcaggagaaaccacacctgctgacactgtgatcttggatttccagcctccagaataaccacacctgcacacaccttgctgttggacttccagcctctcactgcctccagtgagaggcagtgcaagccagggagagaggcctcgggagaaaccacacctgctgacaccttgat

SEQ ID NO: 442386 - DNA, 506 bp, Homo sapiens
atacagaatgttggtttatacgttgagtcagtgactgcatggaagccacaagacaggctgtgatctccctcccatgttcttgatgtccttgtcacaccctgttatgggctgaactgtgttctcccaagatttatacattgaagtcctaacctgaatctctcagaatgtgactgtatttggagaaagggcccttaaagatgtgatcaagttaaaatgaggctgttagagtgggccctaatccaatatgactgatgtccttaccagagatgctagaacagagatgaaaggccatgtgaggacagtgtagaggcagtgcaagccagggagagatgcctcaggagaaacmacacctgctgacactgtgatcttggatttccagcctccagaataaccacacctgcacacaccttgctgttggacttccagcctctcactgcctccagtgagaggcagtgcaagccagggagagaggcctcgggagaaaccacacctgctgacaccttgat

SEQ ID NO: 442387 - DNA, 506 bp, Homo sapiens
atacagaatgttggtttatacgttgagtcagtgactgcatggaagccacaagacaggctgtgatctccctcccatgttcttgatgtccttgtcacaccctgttatgggctgaactgtgttctcccaagatttatacattgaagtcctaacctgaatctctcagaatgtgactgtatttggagaaagggcccttaaagatgtgatcaagttaaaatgaggctgttagagtgggccctaatccaatatgactgatgtccttaccagagatgctagaacagagatgaaaggccatgtgaggacagtgtagaggcagtgcaagccagggagagatgcctcaggagaaaccacacctgcygacactgtgatcttggatttccagcctccagaataaccacacctgcacacaccttgctgttggacttccagcctctcactgcctccagtgagaggcagtgcaagccagggagagaggcctcgggagaaaccacacctgctgacaccttgat

SEQ ID NO: 442388 - DNA, 598 bp, Homo sapiens
ccttcatgcagcagcatcacaagctacaagtacattgcctgggacttgagatatgatagggggaaagaaaatctgcattctcaagtggcaggaattaatgagctgagaagcagtgatgtgggttgtgtcactctccctaattgggtctagttgagggcagggataatttttgcctagaaacctttgtgattctgaatgctcaggtattcactccaccccacaccccttcttctcacacacacctctctccctggagttgctctggcttggaattccgccaaactcccacccgactcccaattaaatatatcatgcaaggtctggcctgatggagaaagccctcacttgctaaggggcttaaatcacttgacatgtgcatgccaattttctcctccatatcacgtttactgattagccttttctttgtccctttttaagaaaatgactgtgactcattatttttaaagaagcctygatggggtttggctaagatacaaaacaatatttctaccaaaggcaaagaacatggattcttccaagggataaaaggaggagccacctaaagccacctaagtcaaggtgaactaatactactcca

SEQ ID NO: 442389 - DNA, 598 bp, Homo sapiens
ccttcatgcagcagcatcacaagctacaagtacattgcctgggacttgagatatgatagggggaaagaaaatctgcattctcaagtggcaggaattaatgagctgagaagcagtgatgtgggttgtgtcactctccctaattgggtctagttgagggcagggataatttttgcctagaaacctttgtgattctgaatgctcaggtattcactccaccccacaccccttcttctcacacacacctctctccctggagttgctctggcttggaattccgccaaactcccacccgactcccaattaaatatatcatgcaaggtctggcctgatggagaaagccctcacttgctaaggggcttaaatcacttgacatgtgcatgccaattttctcctccatatcacgtttactgattagccttttctttgtccctttttaagaaaatgactgtgactcattatttttaaagaagcctcgatggggtttggctaagatacaaaacaatatttcyaccaaaggcaaagaacatggattcttccaagggataaaaggaggagccacctaaagccacctaagtcaaggtgaactaatactactcca

SEQ ID NO: 442390 - DNA, 464 bp, Homo sapiens
ggaaagggaagttcttccagccattcattgctacataacaaaatatcccaaaagtgcagtggcataaaacagaaaagactcatattattattattatcattattattattttgggagacagggtcccattgtttcacccaggctggggatcagtggtgcaatcatagctcactgcaacttcaaataaaagactcatataggccgggcacaatggctcacgcctgtaatcccagcgctttgggaggctgaggcaggtggatcacctgaggtcaggagtttgagaccaacctggccaacatactgaaacctcatctctactaaaaatacaaaacttagccaggcctggtggtgggcgcctgtaattctagctacttaggaggctgaggcacgagaatctcttgaacccaggaggcrgaggttgcagtgagccaagatcgcattactgcactccagcctggacaaca

SEQ ID NO: 442391 - DNA, 621 bp, Homo sapiens
gtcacatggctagtgatcacttaaaatgtgactagtgcaactgaagaatamattttacattttatttaatgtcaactaatttaaacagcagcgtgtggctagtagctacattgaacagcatgactgtaaggttacttcttctttcagactttgcagttagtacttacacagaagtaaaacaatagaatttttttatggcagtttcaatttaggtgcaaatactatgtttaaattataagagtgtcactgtcttttagtaatattgtttgaaaggatttgtgcttaactggccttgactatagaagcttggctgctcccaataaagaggaaaagtatcacgtcttctctctagggcagacttatttaacaggacatgtctctggtctgggctgatgatagaattgctgaccttctgctgaacagtgccaccaccacatcccacctaagtgatggtggggagtggggataacatttattctcccctcagctagggagggacccttcaatattccaaacccacctagtagagggagggcaggaggtggctttaaggcttgctttgtttaattcacacacggagaatgtgctctctgtttaaggaagagcccagtgggtttgcca

SEQ ID NO: 442392 - DNA, 621 bp, Homo sapiens
gtcacatggctagtgatcacttaaaatgtgactagtgcaactgaagaataaattttacattttatttaatgtcaactaatttaaacagcagcgtgtggctagtagctacattgaacagcatgactgtaaggttacttcttctttcagactttgcagttagtacttacacagaagtaaaacaatagaatttttttatggcagtttcaatttaggtgcaaatactatgtttaaattataagagtgtcactgtcttttagtaatattgtttgaaaggatttgtgcttaactggccttgactatagaagcttggctgctcccrataaagaggaaaagtatcacgtcttctctctagggcagacttatttaacaggacatgtctctggtctgggctgatgatagaattgctgaccttctgctgaacagtgccaccaccacatcccacctaagtgatggtggggagtggggataacatttattctcccctcagctagggagggacccttcaatattccaaacccacctagtagagggagggcaggaggtggctttaaggcttgctttgtttaattcacacacggagaatgtgctctctgtttaaggaagagcccagtgggtttgcca

SEQ ID NO: 442393 - DNA, 586 bp, Homo sapiens
ctcccttcttctattcaatctgacaatggtctggcttttattagtcaaatcacccaagcagtttctcaggctcttggtattcagtgaaaccttcataccgcttaccgtcctcaatcttcaggaaaggtagaacagactaatggtcttttaaaaacacaccacaccaagctcagcctccaacttaaaaaggaaaactctgtatatttttaaatgaagagtgttgtttttacctaaatcaatctggcctggtatatgacaacataaaaaaaaaaaaaaaaactcaagggcagagcccaaaaactcaccaaccaagcaaataattacactgaacccccttaggcactctctaattggatgtcttgggwccacccaattcttagtcctttaatacctgtttttctccttctcttattcgggccttgtgtcttccgtttagtttctcaattcatacaaaactgcatctaggccatcatcaatcattctatacaacaaatgctccttctaacaaccctacgatatcaccccttaccataaaatctttcttcagtttaatctctcccactctaggttcccatgctgcccctaa

SEQ ID NO: 442394 - DNA, 579 bp, Homo sapiens
cacacttccagcctcaatcatgttttcgttacagtaataatatttacatgattagcaaatagtcaattcatactctggtgtggacctaagctgtgtttgggacttcccaaagcagatgtccttgacaggtgtaaagatataggcttttttcacagtaagagtcataagcaagatcttctgctcatttgtcaatgaaaaattatgtttggatcaacaaatattmgttgagcactgacctattctaagtgccagtcattatatttccaaggcccccatacaccctcactagtcatgttagacatctcagttttgttatcctttttctttctttcattatatatttcttttatatacaaatttatctatttagatgcatagattaggaaaagtcattctacattagacattcaaagttttaaaaggcatttacaaaggtctctcaagtgattttcatgcaaaaaccagaaatacatagccttaatgatactacaattaagtaagcttgggatgttaaatgacccccaagatgtgaaaggacattgaaggagcacagagagtttcaccccaaaatatggctcc

SEQ ID NO: 442395 - DNA, 564 bp, Homo sapiens
gggacaggacctgcaaagaatgcacaggaaaagaagagactgttggaaaagaaggaaggaagcactgggcattacccaccacaatgtggaaccaactttcacaaaggaaatgtttgataattattagaattctctcagatttcactttgtggagcctttgtttacttttcagtaaaatgggaataatatctggtctcacagacactgtttaaaggattaaatgagggaaaatggtgaaagttcctaggagagtgccagccacgtggtcagcacttaactaagcaatgcagactgagctacacccacgaacctgaggctgcacatagactaactacatagcaatagtcaagatttgtgttaggctgtaagacaaatcttgattgygaattgtgttacaatcctgctaaattccagaaaggaggagctaaatagttttgtcaggtatgactgatcttttaattaacttattgattgaatgactggttttactttgggttcaggactcaatcaacaaattcaattgtacaagaagtgaaactttatttttctgtaaccacttaacta

SEQ ID NO: 442396 - DNA, 636 bp, Homo sapiens
tgcatccatcaacctatcacctaggcattaaacccagcatgcagtagctatttttcctgatgttctccctcctgctgccatacacaataggccctggtgtgtgttgttcccctccctgtctccatgtgttctcatcattcagctctcacttataagtaagaaaatgtggtatttggttttctgttcctgagttagtttgctgaggatgatggttcccagytccatccatgtccctgcaaaggacatgatctcattcctttttatggctgcatagtattccatggtgcatatgtaccatgttttctttatccagtctatcattgatgggcatttgggttggttaatgggatctaattaaatgggatcattgatgggcaattgggttgattccatgtctttgctactgtgaatagtgctgcagtgaacatagtgtgcatgtatcttcataacagaatgatttatgttcctttgcgcatatacccagtaatgggattgctgggtcaatgatatttctggttctagatctttgaggaattgccacactgtcttctaaatttacattcccatcaatagtgtaaaagcaatcctatttccctgcaacctcgccagcatctgttgtttcttgacttaataatc

SEQ ID NO: 442397 - DNA, 615 bp, Homo sapiens
acccatattttcaacctttgctacaatgaataaactttcaaaattataaaagcaataatttttaaaaagatttgatgagttaggtgaataaggatagagtttcggggggtagagaaaaaaaatattttgttagataagttccctaaatttgcattgcttacacactaacaggagtaccatgtccacagatgactagaaactagaccagtggttctttgttctctaattttctactgagactaaataatacccttttccaaattttcaagaagaattaaatttagggacaacatttaaagttttgtccctgtatattttctttaaatcttagatatttgcctctacttgtttccagaaagactacaaaaaggcaaaataaataactgaaytagaagcaaataagtatttgggaaaaacttggacatctaagtagattacttaatttgtaggattggtagtcatacaataatattattttctttttggatgattgaattaaaaacaagtacttcaggacttccaaatacagtgacagctaaacaaggttgaactagattgagttcaagggcaggccctgcacctgatttttctttataactcccatcaattggcatg

SEQ ID NO: 442398 - DNA, 601 bp, Homo sapiens
tggtacatatacctcatggaatactatgcagccataaaaaagaatgagatcatgtcctttgcaggggacatggatggagctggaggcattattccttagcaaactaacagaggaacagaaaaccaaatatcgcatgttgtcacttataagtgggagctgcgcaatgagaacacagggacacatagagggaaacaacatacactggggcctatcagasgtgggaatggaggaaagaggggatcaggaaaaataactaatggatactaggttcaatacctggtgatgaaataatctgttcaacaaccaaccatgacacatggttacctatgtaatagacctgtacatcctgcacatgtatccagaacttaaaagtttaaaaataaaattatttcctttgtgttgactttagatcgcctgatgactatacaccttggtgttatctttttgcaatgaatctctcagaagttctttgagcttcttgtatttggatgtataaatctctagcaaaacaaggaaagttttcttcaattgttccctcagataggttttccaaatttttgctttttctttcccttcatgaacgctaattattcttaggttt

SEQ ID NO: 442399 - DNA, 601 bp, Homo sapiens
tggtacatatacctcatggaatactatgcagccataaaaaagaatgagatcatgtcctttgcaggggacatggatggagctggaggcattattccttagcaaactaacagaggaacagaaaaccaaatatcgcatgttgtcacttataagtgggagctgcgcaatgagaacacagggacacatagagggaaacaacatacactggggcctatcagacgtgggaatggaggaaagaggsgatcaggaaaaataactaatggatactaggttcaatacctggtgatgaaataatctgttcaacaaccaaccatgacacatggttacctatgtaatagacctgtacatcctgcacatgtatccagaacttaaaagtttaaaaataaaattatttcctttgtgttgactttagatcgcctgatgactatacaccttggtgttatctttttgcaatgaatctctcagaagttctttgagcttcttgtatttggatgtataaatctctagcaaaacaaggaaagttttcttcaattgttccctcagataggttttccaaatttttgctttttctttcccttcatgaacgctaattattcttaggttt

SEQ ID NO: 442400 - DNA, 601 bp, Homo sapiens
tggtacatatacctcatggaatactatgcagccataaaaaagaatgagatcatgtcctttgcaggggacatggatggagctggaggcattattccttagcaaactaacagaggaacagaaaaccaaatatcgcatgttgtcacttataagtgggagctgcgcaatgagaacacagggacacatagagggaaacaacatacactggggcctatcagacgtgggaatggaggaaagaggggatcaggaaaaataactaatggatactaggttcaatacctggtgatgaaataatctgttcaacaaccaaccatgacacayggttacctatgtaatagacctgtacatcctgcacatgtatccagaacttaaaagtttaaaaataaaattatttcctttgtgttgactttagatcgcctgatgactatacaccttggtgttatctttttgcaatgaatctctcagaagttctttgagcttcttgtatttggatgtataaatctctagcaaaacaaggaaagttttcttcaattgttccctcagataggttttccaaatttttgctttttctttcccttcatgaacgctaattattcttaggttt

SEQ ID NO: 442401 - DNA, 600 bp, Homo sapiens
caatgcagacatggctgcggtggccaaaaacatagataacaatacccaagtccctttgaatatctgaaaagccttctccagaaggatgggtataaaaaaagccaagactgcaaagactacaataaatacctaactctccaatgcccagacaccagcaaacatctataaacatcaagaccatccaggaaaacatgatctcaccaaatgaactaaataagacaccagggaccaatcctggagagccaaatatgtgacctttcagacagataattcaaaatagctgtgttgaggatcacagacaaggatttcagtatgytatcggataaatttaacagagactgaaataattaaaaagaatcagacattctgaagctgaaaaatgcaattgatatactgaagaatgcatgagagtctcttggtagcagaaattaccaagcagaagaaagaattagtgagcttgaagacagactatttgaaaatacagaggagacaaaagaaaaaagaataaaaaaacaatgaagcaggcctacaaaatctagaaagtagcatcaaaagggcaaatctaagagttactggccttaaaagggaggtagagagtga

SEQ ID NO: 442402 - DNA, 287 bp, Homo sapiens
cagagcttccctgcggtcaaggcaggaagaagagggcaagccaagctgtggtagccatagggaggaagaaggtgttggtcctgtggcaggaagaggaagccaggggccctgctaagaggctgactcaccccacattcacttattttggggctgggtctaccacttgtttatttgagaatggcagaagkggggaaatgggaggactgcctgagaggtgcagaagaacctgctatgcagaggtctgaattggctgacctcagtcacagaaaaaaagcaggtgccctttt

SEQ ID NO: 442403 - DNA, 574 bp, Homo sapiens
ttgttttataaatttgggagttccagtgttaggtgcatatatgtttaggactgtgatattttcctgttggacaaggccttttaccactatataatgtccctctttgtccattttaactgctgttgctttgaagtttgttttgtctggactaagaacagctactcctgcttgcttttggtgtctgtttgmatgaaatgcctttttctacccctttactttaagtttatgtgagtccttatgtgttaggtgaggttcctaaaggcagaagatagttggtttgtgagttcttatccattctgctgttctgtatcttttaagtgaagcatttaggccacttacattcaatattagtattgaaatgtgaggtacttttgcattaatcatgctctttgttggctgtctactttgattttttcgtttttttgtttttgctttttaacttgtatttttgttttataggtcctgtgtgatttatgctttaaagaggttctgttctgatgtgtttccaggatttgtttcaagatttagagctccttttagcagttcttgtagtcgtggcttggtaatgctgaat

SEQ ID NO: 442404 - DNA, 603 bp, Homo sapiens
agaaaaatattagttgaccatatagattttcttgaataaatatgtcttcatttcctgtatgcccttaggaaatttacagagactttaaataggtgctagtttttaaaaataattttcaccagttaaagctgttttgtatgggagcagctttgagctcctcacactgtcattccagaagttgtatctctccaattatctgtagaagaaatttaactgattagggtaaaataaacaaattaatgtaaatgcaaagagaacaaacctgaagtctaactaatttggtcattaccagtaattattatttacagatagatttatttgtagttcattaactgcaaacttgcttcatttgtgtgctgtaactcattaatcagaamgctgcattgagtgatgggactctaatgtggtttgactttttaaataaatttcaagatttgaatatcaaatttcagtggagcattaaataagcactttaggggatggaagaattggtgattatataaagcaaatacttcagtatcttaagtttcagtgtgcttatatacccaggttttagtatgtctgcactgtaccatatcttatgtttgcaggattagcatagta

SEQ ID NO: 442405 - DNA, 545 bp, Homo sapiens
gaagtcacatataaggtgagagctgaagaatgagaaaccagccaattttttcactttgttttgttggcttttaatttttgtcggtatayagtaggtgtatatatttgtggggtacatgagatattttgatagaggcaatgcaatacataataatcacatcagggtaaataaggtatccatcacctcaagcatctatcctttgtgctgcaaacaatataattataccctttcagttattttaaaatgtacagttaaattattattgactatagtaatcttgttgtgctttcaaatactagttcttattcattctaatttttgtacacattaaccatctccacttctgctaaccccttcacccccactacccttcccatggttctatgttttctcacatattatataggggcaatcataaaattcacttagcatcattctgacactcctccttgctcatgcttctctagttacattatgtagttcctcagcatgccaaactcttcccttgccatgattctgtgttgtttttcctctgcctgaaacac

SEQ ID NO: 442406 - DNA, 583 bp, Homo sapiens
aaggagtacaggagaaccggcgctgctgcagtgattctgaagcacgaagttctaagagaagcctcaagattgtaggtcatggtggaagtgcccaccgtggagtctgcactgctaggaagcattcccaggaagggaagaaccttctattccacgaacccataacatgggtctccattaccctgaaagggtttttcctgtctggaaaaggaacctgcagagataatctaatagtgaaggagggaaaactttttgtttttacctcttctacctagaacatgagttaagtttggcttgacactacaatcacccattaaaaaaaaaaaaaaaaaagaaagagtacattttggtttgaaatagtatttcctaaaacagcaagtcacagtactaaaaaytgacatttaattacaggtaactgacatataaataaagggataaatatccctgttgtgctctgaaattaaatgaataaaaaaggattctgccaaataatcattaaaaagatgaaagagaaggcatgcaggttgcccgcataaggataacacttaagtgaggcctgaatttgtctgagctgcacatgatgttt

SEQ ID NO: 442407 - DNA, 488 bp, Homo sapiens
gggcatcgtgggagaaactttgtccacataatcataaaaattctcataattctaagccaggaattattattatgatacccattttaaacataaagaaactgaaactcactgtaaaacatgtttaaaatcacaaggctaatgtgaagcagagctgagattaaaaatgaggtctgtttgaatattaaatctataccttttccccatatctgcatcccagtgttcattgcagytttattcatagtagccaagaaatggaaccaacctaagtgtccatcagtggatgaactgataaagaaaacatgttctatatacacaacataatactattcagccttaagataaaaggaaattttgtcatttgtaacaacatgcacaaaactcgaggacattatattaagtgaaataaaccaggcacagaaagacaaggcaccatctcacctatgtgtggaatctaaaaaattgaaacccctaagagcaaagagtagaat

SEQ ID NO: 442408 - DNA, 599 bp, Homo sapiens
gtacattttaaaataacttaaagagtataattgggttgtttgtaacacaaaggataaatgcttgaggggatggatactcaagcctccgtgatgtgattttgacacattgcatgcctgtaccaaaatatctcatgtacctcaaaaatatatacatctactatgtactcacaaaaattaaaaacaaaacaatgtttaaaaaataataatctgataggagacacaatccagaacacattccagtcataatgaaataaaaaactaaaaagaaaatcatgcattgggaaaattattcgggattaatagcctttgcacttaaataactattayaaatcattaagaaaaataaaaatgttctgatagaaaagtttattccctcaaagaagaaatttaaatggcaaaagacaaattttaaaatgttcaatcttactagttattaaaatgcgaaataaaacaatggaactccatttgtttttgttcatcaaagtgtcaaaggcgttttttaatgaatgtgggtgcagattggtcctgtgaaattactgttagtgataatgcattctattattaaaactttcctaaaggacaatatgactgattataat

SEQ ID NO: 442409 - DNA, 599 bp, Homo sapiens
gtacattttaaaataacttaaagagtataattgggttgtttgtaacacaaaggataaatgcttgaggggatggatactcaagcctccgtgatgtgattttgacacattgcatgcctgtaccaaaatatctcatgtacctcaaaaatatatacatctactatgtactcacaaaaattaaaaacaaaacaatgtttaaaaaataataatctgataggagacacaatccagaacacattccagtcataatgaaataaaaaactaaaaagaaaatcatgcattgggaaaattattcgggattaatagcctttgcacttaaataactattacaaatcattaagaaaaataaaaatgttctgatagaaaagtttatwccctcaaagaagaaatttaaatggcaaaagacaaattttaaaatgttcaatcttactagttattaaaatgcgaaataaaacaatggaactccatttgtttttgttcatcaaagtgtcaaaggcgttttttaatgaatgtgggtgcagattggtcctgtgaaattactgttagtgataatgcattctattattaaaactttcctaaaggacaatatgactgattataat

SEQ ID NO: 442410 - DNA, 599 bp, Homo sapiens
gtacattttaaaataacttaaagagtataattgggttgtttgtaacacaaaggataaatgcttgaggggatggatactcaagcctccgtgatgtgattttgacacattgcatgcctgtaccaaaatatctcatgtacctcaaaaatatatacatctactatgtactcacaaaaattaaaaacaaaacaatgtttaaaaaataataatctgataggagacacaatccagaacacattccagtcataatgaaataaaaaactaaaaagaaaatcatgcattgggaaaattattcgggattaatagcctttgcacttaaataactattacaaatcattaagaaaaataaaaatgttctgatagaaaagtttattccctcaaagaagaaatttaaatggcaaaagacaaattttaaaatgttcaatcttactagttattaaaatgcraaataaaacaatggaactccatttgtttttgttcatcaaagtgtcaaaggcgttttttaatgaatgtgggtgcagattggtcctgtgaaattactgttagtgataatgcattctattattaaaactttcctaaaggacaatatgactgattataat

SEQ ID NO: 442411 - DNA, 356 bp, Homo sapiens
aagggttaagagtaatataaaaaattttcttcaaatttccaaatgaytgtcaagagaaagaggtgttagacttattcttagcagttctaaaaatagaacaagaaccaatgtacagaaattgcccagatagcttctagggacaagacaaactgttccaacaataagactcactccacaaaggcagaggaggtgaaacacaacagaggtcttccagcaggggcttctaatgactcattagggctgttgcaatatagattccagccttggtaagagactgtagtagacaccaggtctctaagacctggcaactcaaagtgcagtccatgactggcagcactgacatcacctgggaactt

SEQ ID NO: 442412 - DNA, 356 bp, Homo sapiens
aagggttaagagtaatataaaaaattttcttcaaatttccaaatgactgtmaagagaaagaggtgttagacttattcttagcagttctaaaaatagaacaagaaccaatgtacagaaattgcccagatagcttctagggacaagacaaactgttccaacaataagactcactccacaaaggcagaggaggtgaaacacaacagaggtcttccagcaggggcttctaatgactcattagggctgttgcaatatagattccagccttggtaagagactgtagtagacaccaggtctctaagacctggcaactcaaagtgcagtccatgactggcagcactgacatcacctgggaactt

SEQ ID NO: 442413 - DNA, 600 bp, Homo sapiens
tagggccaaaaagctgattcgcagagtattctagactaaaccgagggtgggatcctaagtgattcgcagtctagtcttctttccacatggctgccagttcatgatctgtttgcaaatgaaaggatttgcatcatttggtcctaatcttagtaatttatttttacctgagagatgatgctccccacagtccaccaaggccacatctgctctggcaagraagtgcacaaagcacatttgctttgtgaaggctgagctgttacttcacagcttgtcacttggctctgtttcccaacttcacttgtgcattgcaacaaaatgctaagccactaaaaggtcagtagagagatgatctaaacatgcaaaaaatatcagcagagacagagagaaacacaaaagggagggaagggagaaaaaacagctttgaatgggaaaatacacaaacataaaaagcaatcaaattaaaatcagaatattactgagaaaccacaaaataagcatcaggtgtattttaaatgatgggagtaacttgaaagagtagcatttttatagccttggatcacagatacacaaactaacagaaggaagttcgttaacgtttgt

SEQ ID NO: 442414 - DNA, 600 bp, Homo sapiens
tagggccaaaaagctgattcgcagagtattctagactaaaccgagggtgggatcctaagtgattcgcagtctagtcttctttccacatggctgccagttcatgatctgtttgcaaatgaaaggatttgcatcatttggtcctaatcttagtaatttatttttacctgagagatgatgctccccacagtccaccaaggccacatctgctctggcaaggaagtgcacaaagcacatttgctttgtgaaggctgagctgttacttcacagcttgtcacttggctctgtttcccaacttcacttgtgcattgcaacaaaatgctaagccactaaaaggtcagtagagagatgatctaaacatgcaaaaaatatcagcagagacagagagaaacacaaaagggagggaagggagaaaaaacagctttgaatgggaaaatacacaaacataaaaagcaatcaaattaaaatcagaatattactgagaaaccacaaaataagcatcaggtgtattttaaatgatgggagtaacttgaaagagyagcatttttatagccttggatcacagatacacaaactaacagaaggaagttcgttaacgtttgt

SEQ ID NO: 442415 - DNA, 554 bp, Homo sapiens
ttggtattttgtggttttgtgttcggggtgtaggaaaaccaaacccaggatttctaaatggcaggttgggtacttctaggcaaccttactcttctaagtggaacaatcacgttcctcacatcccatcactcacacaagaaatctaacatctattataattatagtggttccaatggccagcaagttcaagtgttagagaaaagaaaactggattgtctaccagaggtgagtggatatcccatttcacaggcaacctgttagatgttggggtggtagcattctgacacttttgctctgggttaagccagacayacaaggaatgcaggacattgtgacctttgagggatcttctagccctgtgatctcatgtgactgcttcactgataagtatcacttgaaactgatgtcaggtatgaccagcccagggcccttgcaggcttcctgcctctctgcagggtctctacacaggggactctcaagcactagacaatgtcaacaggggcagtcataacttgagggggcaactggagcgtggtcctgtagcatttgtgtgc

SEQ ID NO: 442416 - DNA, 579 bp, Homo sapiens
ctgtacctcattgaatatatactttcctgccaaaggaaatagggagataagcatcctactctataatagaattttatcattgcaaaccagggtcaccttcttaagtagctgaacagctggcttagcatcaagtatactaaagcaaaactcaacatactttgcaaacatatatccaccattyacatggaaactgcttgtatcagtcaggatcccagtgagacagaacactcatattaggataattcaaagaaggtttatttaataaggaactttttacaagggtgtattcaggatgtaatagaaccacaatggtttgcaggcaaaaagcaaagattagaagctgaagtgcttacaccacccttatgcacaaggagacaagaaggagttgccagaattgggaagaagaaagtcatgttgagaggactacctagaaatgagacacagcccaaggtgggctcccaaggagtgagccaggtgaatcaataccctgattttacttacctccctcacttcagtttcctcccaggacaccccgttgttcacacccgattacagatggaaaaaagagtgcccattaat

SEQ ID NO: 442417 - DNA, 311 bp, Homo sapiens
ttttatcattgcaaaccagggtcaccttcttaagtagctgaacagctggcttagcatcaagtatactaaagcaaaactcaacatactttgcaaacatatatccaccatttacatggaaactgcttgtatcagtcaggatcccagtgagacagaacactcatattaggataattcaaagaaggtttatttaataaggaactttttacaagggtgtattcaggatgtaayagaaccacaatggtttgcaggcaaaaagcaaagattagaagctgaagtgcttacaccacccttatgcacaaggagacaagaag

SEQ ID NO: 442418 - DNA, 523 bp, Homo sapiens
gtctgtccaccccactgagccccctgcctggatggcagcagaaacaaagaaaaggtggaatgaaagcatttgatgtgtgtgcatccctgcccccaacactgtgaggatgctgaggagggcaagggatggagctgagttcccggrcaatcctcttggggggccagaggcctcttgagaggcagacaccagacaccctgcagcaagtacgtccacatggaaagctccagaaagaagagaggttccaggatccgatttccagacccttcagagaatcctctggacctgggcttattttgacaatgagagtcttttgaaaacagtttttgtcaaaaccagggggcatttcttccaagaaggaaagaagccagagggtggcattcaggcagcaggagggcggtttgcatggtccttgcggtgggaggatgaccccctgctgaaggccagtccactgagctggcacctgcagaggggggcctggagtgttcacaggcgagcagcctccagccagggctgtaggagggca

SEQ ID NO: 442419 - DNA, 598 bp, Homo sapiens
cgtggaattttcctccctttgaacaatcgatgctggagctgattctgttcgtcgcttccctcctgagccgccaacgcaggcgtttttgctcaagtccctcagagtcaacatgacaaccttccagtgagtaaaaaaaggctgtcgccgctcttgattacttcagagagggtttttcaattgtgctattggcttaaaattgcattttacattactggggtgaaggctcccacgctgccgtggtatccagtgaaaaatactgtcagaaatcgatgcttaaaacctactaaatctcttggctggggttcatggaaaagcacatttcaagatggttagaaactgttcttattgcaagacaaataatgattgcacatatttcaacaacctgttgctacttttctgcacaatttcgccacggacgtcaacatccactccaccgacatccctggagcacccaccacgtgctggggacccaaggggaacaggatatgcctggcccccattttcaccaccaacgtccccrgagcatccaccacgtgttgggggcccaaagggaagatatgcctgtcccccaccttcaccagaccagccagggcttcca

SEQ ID NO: 442420 - DNA, 469 bp, Homo sapiens
tcccaatatttccctgcatctattgtgtcccctgccaacaccttaggggcacacaggcatgcacgcacacacacacacacacacacccctccaaatcccatgaacacaacaaatcgtctcctatacacccttgtgtggaattagcacagcctgacatttggaaggctggatgratggataaatggagggtggatggaaggatggatggttggtaagatggaagaaaatggattagatggatgagtgaatggttggatggtgggtgggtagataaatgaagggtagatggatgagtggatgaatggatggtaggtggataggtggatggatggatggatggatggatggatggatgaatggatagacagatgatggagggttggtggatggatggtggattagtggatggatggatggatggatggatggatggatggatggtagatgagtgcacagatggatggatgtt

SEQ ID NO: 442421 - DNA, 469 bp, Homo sapiens
tcccaatatttccctgcatctattgtgtcccctgccaacaccttaggggcacacaggcatgcacgcacacacacacacacacacacccctccaaatcccatgaacacaacaaatcgtctcctatacacccttgtgtggaattagcacagcctgacatttggaaggctggatggatggataaatggagggtggatggaaggatggatggttggtaagatggaagaaaatggattagatggatgagtgaatggttggatggtgggtgggtagataaatgragggtagatggatgagtggatgaatggatggtaggtggataggtggatggatggatggatggatggatggatggatgaatggatagacagatgatggagggttggtggatggatggtggattagtggatggatggatggatggatggatggatggatggatggtagatgagtgcacagatggatggatgtt

SEQ ID NO: 442422 - DNA, 547 bp, Homo sapiens
acttacgacctgggatattacatttcagtttggttctggccaggcaccatggctcacacctgtaatcccagcactttgggaggctgaggcaggcagatgacaaggtcaggagttcgagaccaggagttctggccaatatggtaaaaccccatctctactaaaaatacaataattagccgggcgtggtagcaggcacctgtagtcccagctacttgagaggccgagacaggcgaatcgcttgaacccggggggcggagcttgcagtgagccgagatcacgccactgcactctagcctgggcaacagagcgagactccgtctcaaaaaaaaaaaaaaattggttctaacaagtaggcaagtcgcctcatgacttatattactggttactgaaagattgagtaacaagattgcagttaatgaaataatatgagscttttgatgggtgtttatatgaatagtaggtaaagaaaatggttttaagagaatgagcatcaaaagtctttctctaaaatcctttgtggcatgttgtcagaggaacattaataatg

SEQ ID NO: 442423 - DNA, 547 bp, Homo sapiens
acttacgacctgggatattacatttcagtttggttctggccaggcaccatggctcacacctgtaatcccagcactttgggaggctgaggcaggcagatgacaaggtcaggagttcgagaccaggagttctggccaatatggtaaaaccccatctctactaaaaatacaataattagccgggcgtggtagcaggcacctgtagtcccagctacttgagaggccgagacaggcgaatcgcttgaacccggggggcggagcttgcagtgagccgagatcacgccactgcactctagcctgggcaacagagcgagactccgtctcaaaaaaaaaaaaaaattggttctaacaagtaggcaagtcgcctcatgacttatattactggttactgaaagattgagtaacaagattgcagttaatgaaataatatgaggcttttgatgggtgtttatatgaatagtaggtaaagaaaatggttttawgagaatgagcatcaaaagtctttctctaaaatcctttgtggcatgttgtcagaggaacattaataatg

SEQ ID NO: 442424 - DNA, 463 bp, Homo sapiens
tttgtatttgtttctgtggacaatgtcacatattgcatgtccccccggttttccagacttgaaagagaggaaagatttattgatttcagcaggtagtgcacttcaagtcacgacacccagtcttcaaaataatgcagcgtaggggtgccaaagtctggaggaggaactgatttcaagctggcatcataccagagaaattctgtrtgcagagtgcaccggcgctgccctttggacagtgttcctggaccttccaccacacagttccttctgatttggtcagctagccagttaccactgctgttacgcatgataaatttatcaaggaaaactaattggctttctggaccataaaatcagttgtaatttgagtcctcaatagccacagtcctttgaaaccctggcaggatggttctatacataaatgcaaagtgttgtttaagccacggatggccaacatgaagtg

SEQ ID NO: 442425 - DNA, 555 bp, Homo sapiens
tgacagcaagagttgaggctctggagcaaattcagggcccagtgagtcattgcggtcttgttggaaatcacagtggaaatccatggaaagatttaaagctaagatgtgatttgatctgctgtgtattttagtggtcacttgggctatataarggagtgagttagagggaactagagaggaggatggaagttcaatgaagaggagagaggaggatggaagttcaacgaagaggcccttgaaatcaggacctctcatacaggaataatcagattgcaaatttgacacattgtagaatgatttgagaatgtctattaagtcaaagatgtgtattatttgtgattcagaaattctattcacaaggagctctgtacaagatacccataactacgttctttgaaattaaaaaaaattgaagcaatctaaatgcccataaatgggggaatggataaaaaggatacataaaacatggtatatttatacaatgggatgttatacagtagttaagatgaatgaagcaggcctagatttagcaaattgaaaaacctcaaaaccata

SEQ ID NO: 442426 - DNA, 555 bp, Homo sapiens
tgacagcaagagttgaggctctggagcaaattcagggcccagtgagtcattgcggtcttgttggaaatcacagtggaaatccatggaaagatttaaagctaagatgtgatttgatctgctgtgtattttagtggtcacttgggctatataaaggagtgagttagagggaactagagaggaggatggaagttcaatgaagaggagagaggaggatggaagttcaacgaagaggcccttgaaatcaggacctctcatacaggaataatcagattgcaaatttgacacattgtagaatgatttgagaatgtctrttaagtcaaagatgtgtattatttgtgattcagaaattctattcacaaggagctctgtacaagatacccataactacgttctttgaaattaaaaaaaattgaagcaatctaaatgcccataaatgggggaatggataaaaaggatacataaaacatggtatatttatacaatgggatgttatacagtagttaagatgaatgaagcaggcctagatttagcaaattgaaaaacctcaaaaccata

SEQ ID NO: 442427 - DNA, 605 bp, Homo sapiens
ccactgtagccacactgcctctctagattcctcctctatgggtagggcatctctgaaagaaaggcagtagccccgtcaggggcttgtagataaaactcccatctccctgggacagagcacctgggggaaggggtggctgtgggcrcagcttcagcagacttaaaggttcctgcctgctggctctgaagagaacagtggatctcccagcacagtgctcaagctctgctaagggacagactgcctcctcaagtgggtcccagacccctgtgactcctggctgggagacacctcccagcagggattgacagacacctcatacaggagagctctggctggcatctggcaggtgcccctctgggacaaagcatccagaggaaggaacaggcagcaatctttgctgttttgcagcctctgttggtgataccaggcaaacacggtctggagtggatccccagcaaactccagcagacctgcagcagagggtcctgactgttagaaggaaaactaacaaacagaaaggaatagcatgaacatcaacaaaaaggacatccacacaaaaacccatccaaaggtcaccaacatcaaagatcaaaggtagataaatc

SEQ ID NO: 442428 - DNA, 513 bp, Homo sapiens
aattagaatagtttgtataggtgatttttaagataaaaaataatgaatataaaaatatcaagtccagtttaaaaggcatttaaaattattttgaagtactaataagtcttctcttggctttcccttaagtcagctcaaggctctcctttggctttcttgaaacatattgatatatgtccatccaccacaggctatagcagacattcttacaatatcaacctaaaattaaaagactccagaaaatgtacttgtactgaatttatcatcagtaagtgttatatctctawtggtttataactgatacacaaaatttgcattgcaagttcttttgaatcaattagaacatatttagccaatagttcttaaaatcaagtacattatgccgtcactataagtaaatcaattactcaataattgcttcatcagaaagaagaattaagttttacggttagggtaaaagtttctgacaagaaggatgtcttatctctgtaattagaagcatggtaatttatg

SEQ ID NO: 442429 - DNA, 513 bp, Homo sapiens
aattagaatagtttgtataggtgatttttaagataaaaaataatgaatataaaaatatcaagtccagtttaaaaggcatttaaaattattttgaagtactaataagtcttctcttggctttcccttaagtcagctcaaggctctcctttggctttcttgaaacatattgatatatgtccatccaccacaggctatagcagacattcttacaatatcaacctaaaattaaaagactccagaaaatgtacttgtactgaatttatcatcagtaagtgttatatctctaatggtttataactgatacacaaaatttgcattgcaagttcttttgaatcaattagaacatatttagccaatagttcttaaaatcaagtacattatgccgtcactataagtaaatcaattactcaataattgcttcatcagaaagaagaattaagttttacrgttagggtaaaagtttctgacaagaaggatgtcttatctctgtaattagaagcatggtaatttatg

SEQ ID NO: 442430 - DNA, 478 bp, Homo sapiens
ggaggttgaggaaggttaaraaaacagatggggtaaactgggggcgtaaaaccaaatgctgtctttttacagttttatctaaagccaaccctgagtctgtgtccttggtaagcatgactcaagaaagagctacttaaacaccttgattaaggtaaaaattgtttgattaataagtttttagaaatgaaaaattaaaatcatatcctcaagcattaaacaaattctaattcaagatatatagaaaatgttctagctagctgtagtaacaaatatgagaggcaagacttgtaaggatttccttatttatactgtaaatattccccggacttgaactggttactggttacctgtttgaaatagtcatcatagcaaaaacaaacaaacaaaagatcaggctatttataattctaccatataaaggctactttattttttattgttgaaatttcaacttttagattcgggggtacatgtgcag

SEQ ID NO: 442431 - DNA, 478 bp, Homo sapiens
ggaggttgaggaaggttaagaaaacagatggggtaaactgggggcgtaaaaccaaatgctgtctttttacagttttatctaaagccaaccctgagtctgtgtccttggtaagcatgactcaagaaagagctacttaaacaccttgattaaggtaaaaattgtttgattaataagtttttagaaatgaaaaattaaaatcatatcctcaagcattaaacaaattctaattcaagatatatagaaaatgttctagctagctgtagtaacaaatatgagaggcaagacttgyaaggatttccttatttatactgtaaatattccccggacttgaactggttactggttacctgtttgaaatagtcatcatagcaaaaacaaacaaacaaaagatcaggctatttataattctaccatataaaggctactttattttttattgttgaaatttcaacttttagattcgggggtacatgtgcag

SEQ ID NO: 442432 - DNA, 478 bp, Homo sapiens
ggaggttgaggaaggttaagaaaacagatggggtaaactgggggcgtaaaaccaaatgctgtctttttacagttttatctaaagccaaccctgagtctgtgtccttggtaagcatgactcaagaaagagctacttaaacaccttgattaaggtaaaaattgtttgattaataagtttttagaaatgaaaaattaaaatcatatcctcaagcattaaacaaattctaattcaagatatatagaaaatgttctagctagctgtagtaacaaatatgagaggcaagacttgtaaggatttccttatttatactgtaaatattcccckgacttgaactggttactggttacctgtttgaaatagtcatcatagcaaaaacaaacaaacaaaagatcaggctatttataattctaccatataaaggctactttattttttattgttgaaatttcaacttttagattcgggggtacatgtgcag

SEQ ID NO: 442433 - DNA, 559 bp, Homo sapiens
ggcactgtcaggcagtttcctttgagcaaagggctgtttgcaatgcctgaatctgggtgtattggatggctaccatttaagcagaatacacccaagcactgtgggctgtgttagccattgtccatatgcaggaggcaaattcatcctcaaattatttcttggacagtttgcctctagtaattaagaggttaaaattttctcacatttccgttggaaagtttctttttatttgattctcccaggtgtgaaataatttaatactagtctctgtctccaagcctctctgctggggttctgagctcagtcagataatatttggaaagcactttgttctcagaagaaaggtcacacttagaagggttggtatcatccacctgactgcaccaggggcaaatgttgtccctagctaagcttctgccttcagatgctgtataccaaaagcatatgtaataaagagaaactcacytttcaagcttgagtacaaaagaataaagcaactcctgtgcctgagggagtcttggaagccaggtgaaataaagcagaaagcagtggttagtct

SEQ ID NO: 442434 - DNA, 508 bp, Homo sapiens
ctagtgtcatcagttgtttttacgtttgttttttttttttttttcctgcaatttagactaaccctgcttattcttgtgaactaacaagtaatctctgggtgctgctcagaagaaacaaaaacgaaagggaatgggtaatgcaacaatctggattaatactctaaattctgggcacatattggaatcagctagtgactccatatcaggttggttccaacaattgcccagttcctggaaagccttcttatttagtttacttggaataattttcctttactgttgkggaatatatttgctgttgtactctttgtgtaggaatgccagataagcttactgaatattttcttaaattgaacacttattattcttccagatatcatcttttgccagatctgagagttatgaatgacccttgccatatgtatgctttgtaactgagctcctctctaccctgagtaccagagaccctaataattaggaatatcatcacccctattcaaccagaagc

SEQ ID NO: 442435 - DNA, 554 bp, Homo sapiens
ttgtggtaaaacacacataatacaaaacttaccatcttaaccattttttagtgtatggatcaatggtattaagtactacacatgagtgtgcaaatatctctttgagactctgctttccattcttttgcgtagtccagaagtggaattgctgaaccatatggcaattgtgcttttaattttttgaaaaactgtcatactgttttccacagaggctgcaccattttacatctccaccaagagtgcagaagtgttccagtttttctacatctttgccaacacttgttattttctctttttwaaaaaaaaaaatccaaatggatatgaagttctttgtgattcttgaaggagcattgctctttgaatggccctgcttgcacactgggtaggccaatgggtgtctgacacaaaggccaaagcactttgatttgagcttgttatagagtcaagatcacaagcatgctgttgagagagtgaaaagacaagccacatactaggagaaaatgtttgcaaatcatatatttgagaaagggattgtatctggtaagaaaaactct

SEQ ID NO: 442436 - DNA, 462 bp, Homo sapiens
gtctgttttacagctatattgctccaccaaaactgacccaaatcaccaaaaccaaaactgatcaaaaccatgaaaaaaaatgaccactcagtcactagttgagtagatatagaaacattctttttgataacaacttctcccacctctctctgttttaatatttacattatcaaataaaaacaggctgggcatagtgacacaaacctgtagtcccagttactggggagcctgaggctggaggatcccttgagcccaggagttagagggtgcagtgacctatggtcatgccactgccttctggcctgggtgacagagcaagaccttgtctctacaaaaataaaataaaataaaaacagatacagaaaatcgcagagaataagcrtataacagtgattattacaaattagacatcctggtaaacatcactcaggccaagaaatagaactatgcctgccaccccag

SEQ ID NO: 442437 - DNA, 586 bp, Homo sapiens
gtttagcatgttactctgtcctccttatttcctgcaaattgccagctgggcytaaaacacttggtcagacttgggtgtgatttctttggcaagaccataggtggtggtgtgttctttcatcaggatgcatattatgtctggttgtttatctttttgtactattaacagccattgattctcaacacctatatccattagatcactggggtctgcaacatggttatattctaatctgtcatttctttttatttattagtttgaaacgtttttaaaagagacacttttgcccatctgtttggttagtggaggaaaagctggataaatccttgattcatttctttataagttttcaaggtaatgacttagttctctgttgtcttctgaagataatcaactgcttgaaaaaatattattatgaacccatgaatttaaacatatttagtttcaatatgttataaatcttatatttattgaatatcaagttgctccacctctgactagtttgagccttcttaggttagatcctgagtctttttaacatggctagtggtctttaatttctttcttgctatctggtagaccaaga

SEQ ID NO: 442438 - DNA, 576 bp, Homo sapiens
ttcagccacctttttaagaggaaattgctgggcaggttggggagggctactcatggaatgaaactgtaaactggaccgggtgtgaggaggggaggtgataaagagattatagggtggaggagcggaggctgaggaagaattgggacctagctcggcctggggaggaggggagaggtcagatgggtctgtagaaaaggaagattagaaagactcagcgatgcttggggttgggactgaggggacaggtgggagggaaagaaggaagatttgggatgagttgcactgggcacagagactrgggagggactgatgtgtaaaagagtgcctggacatcaggcacctcagaccattttcctatttttcgacaaaaattatttaggtcttggaggatggagaaatcgaaagtgccattttctggccatttagaaccactgtcaagtttgtattggggtcaagcggcattgtagaagaaaataaggcatttaagttttaggtcaggtgagagttgaagagttttatgttcttaagaacacaggctaagggagaagaaggaggaatggagggtggaaggttgcc

SEQ ID NO: 442439 - DNA, 576 bp, Homo sapiens
ttcagccacctttttaagaggaaattgctgggcaggttggggagggctactcatggaatgaaactgtaaactggaccgggtgtgaggaggggaggtgataaagagattatagggtggaggagcggaggctgaggaagaattgggacctagctcggcctggggaggaggggagaggtcagatgggtctgtagaaaaggaagattagaaagactcagcgatgcttggggttgggactgaggggacaggtgggagggaaagaaggaagatttgggatgagttgcactgggcacagagactggggagggactgatgtgtaaaagagtgcctggacatcaggcacctcagaccattttcctatttttcgacaaaaattatttaggtcttggaggatggagaaatcgaaagtgccattttctggccatttagaaccactgtcaagtttgtaytggggtcaagcggcattgtagaagaaaataaggcatttaagttttaggtcaggtgagagttgaagagttttatgttcttaagaacacaggctaagggagaagaaggaggaatggagggtggaaggttgcc

SEQ ID NO: 442440 - DNA, 584 bp, Homo sapiens
cgtgccgctgccctccagcctgggcgacagagcgagactccgtctgaaaaaaaaaaaagaggagagaaaaggatccccgttacacatgctccccacctggctcccgttctccctcctgtcctgactcctcagtgccacttccgccacatgcaccgcagcaaagactcagcaacttctctctccacrgggatttcctctggttctttgttaggttctaggatctatcagcctcccctctcctgtggcatctacctctttgggcacgtgggaaggagccagcagcctttattagctcttgcctttaatatttgtatgattgaaagatgtcaatatcctggacatccccccagtaaaaatcagctctgtcacaatacatgcatcttccacggttgctattcaatagttgagtaaaggatctcacaaataagcttgggttgcttaaaacttcaataaaaccatctgaagaggatcaatatagaaaggggtcattaaaacaggggttagatcccaccgcgaggtgacatcaaggcagatagcctggtgaagcatttgaaaaatcagaaaaatcctcaagtggaaactaa

SEQ ID NO: 442441 - DNA, 651 bp, Homo sapiens
cgtgtaaaaacactctttacaatagtggtatgtaataatacgcttattttctgtccactctaataattcaaatacattttatttatttcatctttgttatttattaaataaatatttaagaataaaataaaagaacattgaggtcttttctctacatactaatggtagatcatttttaaattgttgcctaaaccactgcaaaaaaaaaawaaaaattgacagctgatcattttgaaccaaagaaatttctagctaaattactgcaggtctcaagcacatgaaccatttcagatataagtcaatttgaaaatgaggttggaaatcagtaccctgaagaggcagcgcagaacatttaaatcgcatggcctttggtttccaaatttggtgtgtaaatgttactgcctttagatgtgactttagagaagtcagtttccatctctgaattgtggctttgtaggttccagagcatttatttgtccagggtatggtttgtgatgaggagtgtgggtgagttcttcctgtgagtctatttacttctcagcccggggcattcctttgtggcatgtggggtcttttccattgaatgtgcgtgattctctaactttgatacggttcccatttaaccccagcagagcacagagagataggatc

SEQ ID NO: 442442 - DNA, 596 bp, Homo sapiens
ttctttgcagactagtgtattatccttttaaaagtatttcaagggcatatacacacatacctacacacatattaatgaatccaagtttattggatgaatggatttcacttagaaattgattttggagactctaaaaataagtctgacagcatttgaaggtarccatgtctgctttgtgttttagagactcacacctgacagactgtgcagtctatttgtaacaatggttgtgatcacacttacagaagaagtctgtctgcaagctagggtgcccaaggttctaatgacatgcaaggaaacaaaagaagttcagggagtattttcaatgtgtttaaaagtgtgatgggtatattacatcatctgcaggaaagctcacaagaaaattgtaccagttacttattggcaacagccatatcacaaacaaacaaccgtctagctctgttatttcatagagatgtgtttaccctatggagtcagccttaggttaaccaggagtcttgctcatcttgtccgagctcactcatgcattgggagttggctggtctaggcttgccgtgactgagataacgggcaactcaggtgtggtggataggtct

SEQ ID NO: 442443 - DNA, 596 bp, Homo sapiens
ttctttgcagactagtgtattatccttttaaaagtatttcaagggcatatacacacatacctacacacatattaatgaatccaagtttattggatgaatggatttcacttagaaattgattttggagactctaaaaataagtctgacagcatttgaaggtagccatgtctgctttgtgttttagagactcacacctgacagactgtgcagtctatttgtaacaatggttgtgatcacacttacagaagaagtctgtctgcaagctagggtgcccaaggttctaatgacatgcaaggaaacaaaagmagttcagggagtattttcaatgtgtttaaaagtgtgatgggtatattacatcatctgcaggaaagctcacaagaaaattgtaccagttacttattggcaacagccatatcacaaacaaacaaccgtctagctctgttatttcatagagatgtgtttaccctatggagtcagccttaggttaaccaggagtcttgctcatcttgtccgagctcactcatgcattgggagttggctggtctaggcttgccgtgactgagataacgggcaactcaggtgtggtggataggtct

SEQ ID NO: 442444 - DNA, 505 bp, Homo sapiens
ctgttttccataatgcttgtaccattttccattcctaccaacagtgtacaagagttccaatttctccacatcttcgccaacatttttttacttatatatatgtatctatgtgtatatatatatatacacacacacctatatatacgcacccacataaacacacgcacacatatgaaatagtcactctaagggatgtgaaataaatttcatcatggttctgagttctgatttgtatttccctgatgatgagtgtgatatcaactgtttcatatacatgctggccatttgtatgtcttctttggagaaatgcgtattccatttctttgcccggttttcaatctggttattttgtttttctgctattgagttgtaaaagttcctcagatactatgaakattaatcttctatcaaatatatgattttcaaatatcttctcccattctgtaggttgcattttcctttcgttggttgtttcctttgctgtacagagcctttatagtttgat

SEQ ID NO: 442445 - DNA, 581 bp, Homo sapiens
aacaattgaattaaaatttctcagaaataagtgcaggaattggtattaattttaaatgtccaagatgaaactttaccagaagataagctccatgaatgtaaaaaaattgcttgctgtgttcactgctgaatccctaggtcctaagacagagcagatataaatagattgaatacatctttcaaatgaaattgtacatatgcttgaagatggaaatcagaggtaaaacttattttttcatattcatattactgagcattcggggcttgaaatgctggaatttgtattcaaattttccacattttatttttagcaagtttgaatcataccttactccttgactctgaggcctaaatgttttcaatcttctcaactgctaagtatccattgcaaaaatggggtgctttcatgcacaacaggtgaagtgaacattcattttcrttaacagtccatcagttttattttaaaaaaactcaatgtctacttagcttttatctctaaaagataaaagattaatccttatctatcattctgtggctgtcctaagttcctattgtgatctagctcatgcaaagtgtcaaaga

SEQ ID NO: 442446 - DNA, 589 bp, Homo sapiens
tttcctgtggaggtcggggtgggtggggaaaaggctgaagaagctggaagaagaattaagacgtctcttaaagtattcgtgtaatgaagaagtgacctgtggtcagtttcctggagggttgtatgtggcccctcgagtgtgattagccatggaaagcaggaataaaaacctcgtggtaatgacttgctcaggaaggcaactactgagattctagaaaaatagttaaaatggttgcttcataagctgaatacaaactctgacaagaggaaatgctgaaagtcgaaaagaaattggaatggcttgagggatgtctagaagatactcacaatccacccagaactgatcttgaggctccacstctaccaagaacttggtagccaaatatctttgggttttttatgctttttatttttagttgacacatgataattatacatatgtatgggatacatagtgatatttgtgtactcaatgtataatgatcaaatcagggtaacaaatccaccagctcaaacctttattatttctttgtgttgtgaacattcaaaatcttcttttctacttctttgaaaatatacaataaattatt

SEQ ID NO: 442447 - DNA, 589 bp, Homo sapiens
tttcctgtggaggtcggggtgggtggggaaaaggctgaagaagctggaagaagaattaagacgtctcttaaagtattcgtgtaatgaagaagtgacctgtggtcagtttcctggagggttgtatgtggcccctcgagtgtgattagccatggaaagcaggaataaaaacctcgtggtaatgacttgctcaggaaggcaactactgagattctagaaaaatagttaaaatggttgcttcataagctgaatacaaactctgacaagaggaaatgctgaaagtcgaaaagaaattggaatggcttgagggatgtctagaagatactcacaatccacccagaactgatcttgaggctccacgtctaccaagaacttggtagccaaatatctttgggttttttatgstttttatttttagttgacacatgataattatacatatgtatgggatacatagtgatatttgtgtactcaatgtataatgatcaaatcagggtaacaaatccaccagctcaaacctttattatttctttgtgttgtgaacattcaaaatcttcttttctacttctttgaaaatatacaataaattatt

SEQ ID NO: 442448 - DNA, 477 bp, Homo sapiens
agtggggcagtaatattctcccatttcctaaattctgcgactcattatttctacagaaaaatgtggtctagcctgggcaacatacaaagatcctgtctctacaaaacttttttaaaaattagctgggtgtgtagccccaggcactctggagcctgaggagggctgatcccttgagcctaggtcttcacggctgcagtgagctgtgatcacagcactttaatccagcctgggcgacagagcgagaccctgtcacttaaaaaaaaaaagtgatcagagttccaaggttcaatgccagcaacacctctctttagtaggaataggggttctcttccttgctcagtgcccctrcagacagcactgggagcacactgtctccatggaacaggcttcagaggattggacgttcaggctcagcaaagggaggaacagggacatcggtaagtcacatgcacaaaatgagacagaaaatgaaccctg

SEQ ID NO: 442449 - DNA, 567 bp, Homo sapiens
tattcagaagaaaaacatatcatcttcattttgaggaacataagcaaatttttcagtgacctcttttaccccagtaaacccataaaaatctcacagaagaatgagctataaacagttgccaggtccatggcaccattttatggcagcagcaatcagataaaatgtttctcaccccttccttacatctcctccctcttcaccacccttgaccatgtccaggtcagaaacctggcaagcaaaacagagaaatagagaagaataaaacccattttcctccagcccctatgctgctgccactataggtcggcagaggcaaggggttgaagatgtcatgcratgtcaacctggagttgtgtatcatgtggactgagcattatggtttcctaatttattttgcttttgaatcctaaagtgttggtagtattttctattacaaaacagtgaccagacagtcttggagatggcctgatttttcatccaggagcaaaggagggatacctctaaacctctttgagaaggtttcaaagggtagtagaagaaaagtaaacattgctttcatgatttcac

SEQ ID NO: 442450 - DNA, 567 bp, Homo sapiens
tattcagaagaaaaacatatcatcttcattttgaggaacataagcaaatttttcagtgacctcttttaccccagtaaacccataaaaatctcacagaagaatgagctataaacagttgccaggtccatggcaccattttatggcagcagcaatcagataaaatgtttctcaccccttccttacatctcctccctcttcaccacccttgaccatgtccaggtcagaaacctggcaagcaaaacagagaaatagagaagaataaaacccattttcctccagcccctatgctgctgccactataggtcggcagaggcaaggggttgaagatgtcatgcgatgtcaacctggagttgtgtatcatgtggactgagcattawggtttcctaatttattttgcttttgaatcctaaagtgttggtagtattttctattacaaaacagtgaccagacagtcttggagatggcctgatttttcatccaggagcaaaggagggatacctctaaacctctttgagaaggtttcaaagggtagtagaagaaaagtaaacattgctttcatgatttcac

SEQ ID NO: 442451 - DNA, 567 bp, Homo sapiens
tattcagaagaaaaacatatcatcttcattttgaggaacataagcaaatttttcagtgacctcttttaccccagtaaacccataaaaatctcacagaagaatgagctataaacagttgccaggtccatggcaccattttatggcagcagcaatcagataaaatgtttctcaccccttccttacatctcctccctcttcaccacccttgaccatgtccaggtcagaaacctggcaagcaaaacagagaaatagagaagaataaaacccattttcctccagcccctatgctgctgccactataggtcggcagaggcaaggggttgaagatgtcatgcgatgtcaacctggagttgtgtatcatgtggactgagcattatggtttcctaatttattttgcttttgaatcctaaagtgttggtagtattttctattacaaaacagtgaccagacagtcttrgagatggcctgatttttcatccaggagcaaaggagggatacctctaaacctctttgagaaggtttcaaagggtagtagaagaaaagtaaacattgctttcatgatttcac

SEQ ID NO: 442452 - DNA, 632 bp, Homo sapiens
ggtgagtataactaactgacaataccattgttgctaacaatgtattgtattcttaaaaattgctgagttacttttaagtgttctcaccacaaaaataagtatgtgagataatgtatatattaattagcttgatgtagtcattccacaatctatacatatatcaaaacataatctacatgacaggtatgtacaatttttatttgtcaattaaaaataaattgaagaagtaagtaaatcaaaaaagaaagaagataggtgagtggatactgggttggcagtgcttgaatcccaataattcccttagcaaaaaaatccaggacttctcactagttcctctctctctcctttcacatttgagcacatacacacagtcatgcactcatgcatgmaaccagtatctccacttcggtcgtggtatcttggatccattcctcatcctctttgctgaacttttcgggagttaccagtgtcctcctctcatttgtctttcttcaatactgctgctagagatacttcactaagcgacactttgctaaggtcatattgctcttctgatttaaaagtttccattatttcccgctcgtgaaagaagaaaatccaaataccctagattgtctacatcacaaaccctt

SEQ ID NO: 442453 - DNA, 632 bp, Homo sapiens
ggtgagtataactaactgacaataccattgttgctaacaatgtattgtattcttaaaaattgctgagttacttttaagtgttctcaccacaaaaataagtatgtgagataatgtatatattaattagcttgatgtagtcattccacaatctatacatatatcaaaacataatctacatgacaggtatgtacaatttttatttgtcaattaaaaataaattgaagaagtaagtaaatcaaaaaagaaagaagataggtgagtggatactgggttggcagtgcttgaatcccaataattcccttagcaaaaaaatccaggacttctcactagttcctctctctctcctttcacatttgagcacatacacacagtcatgcactcatgcatgcaaccagtatctccacttcggtcgtggtatcttggatccattcctcatcctctttgctgaacttttcrggagttaccagtgtcctcctctcatttgtctttcttcaatactgctgctagagatacttcactaagcgacactttgctaaggtcatattgctcttctgatttaaaagtttccattatttcccgctcgtgaaagaagaaaatccaaataccctagattgtctacatcacaaaccctt

SEQ ID NO: 442454 - DNA, 617 bp, Homo sapiens
catctactccctgaaaaggaggggaaggagaagaaagtggaggaggtagtcagcatgatcgtatgggttaaacaacaacttaacaccagagagagactctccggagaggcacttgggccttaggtagggtgcatataagamcctcaactgggtgatttactggccttcttgatttccaacttgacataaaagtaatagcttggaaagtaatatgagataaggaggaaagtgacatcggggtctattaaaatagtatttgttgtattttttttctgattaaaatgatacacataaatagtaagaatttcagaaaataaagacaaagaaaatattaaatcactagcatttctaccacatagatataaaagtgtatttgtttcatatacatacatgagtacatgggtatgtatgtatatttatttatatggatctttttctgtattgtaagattcatttttaaaataaaactgagataaaatatagaagagatatttagcttcctttttgcattgaacaaatatggtaaacatgttcccatgcctctgaatattttttgcaacttgattttcaacggctagatacaattccgttgcatggatgaaataaacattcctttg

SEQ ID NO: 442455 - DNA, 551 bp, Homo sapiens
aactaactaactaacttgtttttaattttactggctagtaggcagaaagaacttgctttgtctcagatgagactttggacttggacttttgggttaatgctagaatgagttaagacttttggggactgttgggaagtcgtgattgtgttttgaaatgtgaggacatgagatttgggaggaaccaggggcagcccctggttggaatgatatggtttggctgtgtcagcacctaaatctcatctgaaattgtagttcccataatccccacctgtcaagggagggacctggtgggaagaactgaatcatggtrgtattacctccatgctgctgttctcatgatagtgagtgagttctcacaagatctgatggtttttaaaggggctcttccctcttttacctggcacttctctttcctgccgtcatatgaagaaggagtatttgcttcccattctgccgtgattggaagtttcctgagacctccctagccatgcaaaactgtgagtcaaccaaacctctttcctttataaattagccagtcttgagaatgtcct

SEQ ID NO: 442456 - DNA, 574 bp, Homo sapiens
ctcttctttctagatttgtagttcaatagctcaggttgctgaaggagcaacctgatgtttctatagctcaggggtgagcgaaaatctagcctactgcctctttttgttcaataattttcatggctgcctttgggctacatgggaggaggtcagcaattgatatggagaactcagggccccagaggcctaaaatatttcctaytgggccctttacagaaagcgtctgtcaacccctgacacatatataattaactagcatcttaactaaaagccaaaatacaacaaggtagtctgttgcaggtcatagattctcaataagtatctgtctcaggaaatgtcaccattcacagacaaacctcataaacaggtaaatggaaaagaactaatatttgtaccaccaaaaataattctcacctcatgctctgaactccctgaagccacctttctgggccacgctgtcactgccagggaacagcggctttgcctctggccaggagcctcctctatgatcaaaactgaggccaggagaaactgaagaaaagaacaaccaatggagggatgagaacttagtcac

SEQ ID NO: 442457 - DNA, 461 bp, Homo sapiens
tggctgcttctttctaggcatggcaagcaagaaggaacccattttgcacacatctgcggggctttcagtctcctcctctgatgtactcaatcggccttgagagagaagggtccctgcagaaaagaagagactttgcctgcagcagccgtgggccrtggatccgctgtcccctgaagtctgtaaggttttgctaccttagaggaagctgaactgctcttccatagcttccatcaagcccccgggagcctggggctctgccgggccaattctggaatgctggcagggagatgtggggcagaacaacaaaaaaacattagttatctttacaaggctcttaatgatggggtaagcatgttcaggctgcaatctaatatgtaagggtaattacactgagttatgccccacctccatggcacccctcacgttaactctttccagccctagtgggtagccagtaatgt

SEQ ID NO: 442458 - DNA, 558 bp, Homo sapiens
tgaacaatttatattgctacatcatcaattaactaatcttttctcttgccatgtctcatgtgtcattacattatagttagcaaaactatactttttgtctgtagaagttcaatctggacttttttatacgtttcattgatttttaaaattaattttggaacatttagaacatgattataataaccgttttaatatctttgccaattctaatatatgtcagttctgggttggtttcaattaattgattatttactctattaataattatgttttcctgcttttgcataggtctgttaatctttgttggaaactttactttgttgggtgctaaatattcttgtatttacttttactattagcaattggaaataaggcccatccacaatcttcatcattcacctgtccaaactgcagcatcagctctaagcatttctcattataggtggagccgatggaagcaactggttaaggaaagagcttctgttgcttcrgtgttctgtgtctttaagagatgtcgttcatttcttcaaaaaatacttaactgtgcaaggtgggata

SEQ ID NO: 442459 - DNA, 641 bp, Homo sapiens
ggatttttgcaattcacttgattatacacagccataagctattttttaaaatcctgtttgctggccgggcgcggtggctcacgcctgtaatcccagcactttgggaggccgaggcggatggatcacgaggtcaggagatcgagaccatcctggctaacacagtgaaacccgtgtctactaaaaatacaaaaattagccgggcgcggtggcgggcacctgtagtcccagctactcgggaggctgaggcaggaaaatggcttgaacccgggagggggagcttgcagtgagcagagatcrtgccactgcactccatcctgggtgacagagcaggactccatctcaaaatgaatgaataaataaataaataaataaataaataaaatcctgtttgctgtagataaagaaagtcatattatttaaggtaatcacaaaatgccacactgcactgcagacaaaacttagtgtctcgctcagccaggttctgagttgctttgtgtttatcaaacaggagggcattcggtgctcctgctcatatacctacttgtaaacgtctccacagacccagttcatgcccccatctcaaggcatgtttgtgtcctgttaaagtggtgaccttatctttgttaagtgtacgcatatgg

SEQ ID NO: 442460 - DNA, 572 bp, Homo sapiens
tttctctggccagatgactaaggttttacaaccctgtcacatcatcctgaatagaaggaagaattttcttttatttaaagaactatagccaataacaataagttgattaatttaatataatccatatttaaattgagctggatgataattcttagtcttgcagtataacaatgtaactgaagggcgtagattactgtttagaagggaactttatattacatagataaaataatttactggtaattttaaacagtcatataaaggagatatgaaaagtactttttgtttttttttttaaagaccacacrttcatgcaatgtgtatgcgtgtgtgcacatgtgtaaaattctggtagaataaaatacatatataaaaatttctttaacaaaatgataattccaccctatggagatctcttgtacagcatggtgcctatagttaataataatgtatcgtactcttgaaatttactcagagcagatcttaagtattctcatctctagtattctcatctctctctctctctcacacacacgcacacatgcgcgcacacacacacacggaaactctgt

SEQ ID NO: 442461 - DNA, 567 bp, Homo sapiens
ggagtatttcctgtagggactgaaatggcattaagtgctctgtttctaaatggacttggtcctggacttagctgtttaattaaaaaacataagctgggatgagaagttacagatatgactgaattggtggccttggctgaacattttgagaggactctacagcaaaaaagaactcaaaaggctaacatgcttataacccttcaattattatacagcagttacaaagggaccaaagggaccttccckttctcattttaaatcacaaccaagaggtcctaaaacaagaaattctttaccccaagatgtctgcctttattgcaaacagtcaggacactagaaaagggatgtccacttttctatcagtccaccaataagcctccgtttaggccaaactgtttaaccacagaaggagcccaagacaccttagtcctcctgataataacaggacaaggctctgagggattctccagtaaattgctccctgtattagctttaaatgaacatgcagaaacagaagttaaaataaatagggagccacgtacagtcctggtggataccagagctact

SEQ ID NO: 442462 - DNA, 595 bp, Homo sapiens
tcatcacctataccacagtgaagcttcagggccttgaatcttgggtccatgtctcacaactcaaaagggctcctttcaaactcctggaactgtacacctgttggagactttcaggtaaagctgaccagggaaatctctccccagaagcagacagcatcctagcagtggacagctttcccaagatcatggatcaagactttgctaccaccataaacccttacgtatttttctgttttcctcatgttttgttgccctaatcctttcctagaggaaaamccatggctttagcttgagcttatgctgtagaacaaaaccagagtaactgttgggtttgtgggctaatgccaaaaaaatcaggaaactatttcactgatgcctatccctctttgtgttcccaatgagagtcaccctgaaactccaaggaaagaatgaaaagcttttttttttttggagacagagtattgctctgtcacccaggctggaatgcaacggcacgatgttggctcactgcaacctctgcctcccaggctcaagcaattctcgtacctcagccttacaagtagctgtgactatgggcatgcaccaccatgcccag

SEQ ID NO: 442463 - DNA, 595 bp, Homo sapiens
tcatcacctataccacagtgaagcttcagggccttgaatcttgggtccatgtctcacaactcaaaagggctcctttcaaactcctggaactgtacacctgttggagactttcaggtaaagctgaccagggaaatctctccccagaagcagacagcatcctagcagtggacagctttcccaagatcatggatcaagactttgctaccaccataaacccttacgtatttttctgttttcctcatgttttgttgccctaatcctttcctagaggaaaacccatggctttagcttgagcttatgctgtagaacaaaaccagagtaactgttgggtttgtgggctaatgccaaaaaaatcaggaaactatttcactgatgcctatccctctttgtgttcccaatgagagtcaccctgaaactccaaggaaagaatgaaaagcttttttttttttggagacagagtattgctctgtcacccaggctggaatgcaacggcaygatgttggctcactgcaacctctgcctcccaggctcaagcaattctcgtacctcagccttacaagtagctgtgactatgggcatgcaccaccatgcccag

SEQ ID NO: 442464 - DNA, 468 bp, Homo sapiens
ggaggcccaaatgatcaataactgaaattagcactggccttgaatgagacaaagataagctagtttccactgaggaaagattctggtgggattcctgggagctcactcttggtggtagtgaggtaccatttgtatggaatttaaagctaactcataaattgggaaaatcattggattctgtagccaaccagacctcccagsgtttcaggcaggtagaagctactctctaaaaggtagatgacaacacatatattcaacaaaaacacttaatgaaacatgatgcagctttagatcttctttttgctcaagctggagacctgtgtttggtgttaaacaaaactgaatgttgtacttacttctccccttattttgttactatggaaagcctaatttaaaaggtggctgatactgctgtttccttagacactgccaccaaatagattaaagaaacctctcaagagaaaggaa

SEQ ID NO: 442465 - DNA, 596 bp, Homo sapiens
atttatcattgaactgcatacactttatacaatatattactttgataacatacacatttaaaatttttttctagttggtaactttttactattttttgtttgaaatatatttgttattaaatrtacatttagttgaagaggtctcaaactatttgatgtcttaaaaattttaatattctcttaaaaattattgaggattccaaagagctgcttttcttctactgttgtattacatctatccatagttatcacattctcaattaaaattgagaacttaaaaaactattaatttatttgaaatgacaataataaacccacaacacattaacacatatgtttaataatgtataatatatatatttaaagatattttctgaaaaacttagaagagtggcattctttttcatttttgcaaatctctttaatgttgggcttaatgaaagacacctggattctcacgtctatttctgcattcaatttgttgcaatatgttgccttatttgaagaatatggagatattctggcctcaattagctatataactggacaaaagatgagtattctaatagccttgtcagctgattgtgaataatcta

SEQ ID NO: 442466 - DNA, 560 bp, Homo sapiens
tcatattgggtgccttagtttgtttttgctgcaataacaaaatgcctgactgggtaatttatagtaaatagaaatgtattgastcattgttttggaagctggaaaattcaagattgaggggctggcatctggcaaggacctttatgctacgtcatctcatggctaaggcaagaaaggcctgaatgcatcctcttacaatggcattaattccacctgtggggctgcacccctcttgacctaatcaccttttaagggcatcatctcttaatactattacaatggcaattaaatttcaacatgagttttggagggaacaaacattcaagccatagaattgagtaaaaacttcttgaggttccttataccagtgtcctccttacagaccatcatcatcctcagactcaatcaaatacagcaaaactgacttctttcttttctgttcctaatggaaaataacagtgaagtactgtttaaaataagtcactcaatgacaaaagtcaatcataaacacagagagaacatcttaatattatgactcaaaataacaatattgataaaat

SEQ ID NO: 442467 - DNA, 560 bp, Homo sapiens
tcatattgggtgccttagtttgtttttgctgcaataacaaaatgcctgactgggtaatttatagtaaatagaaatgtattgactcattgttttggaagctggaaaattcaagattgaggggctggcatctggcaaggacctttatgctacgtcatctcatggctaaggcaagaaaggcctgaatgcatcctcttacaatggcattaattccacctgtggggctgcacccctcttgacctaatcaccttttaagggcatcatctcttaatactattacaatggcaattaaatttcaacatgagttttggagggaacaaacattcaagccatagmattgagtaaaaacttcttgaggttccttataccagtgtcctccttacagaccatcatcatcctcagactcaatcaaatacagcaaaactgacttctttcttttctgttcctaatggaaaataacagtgaagtactgtttaaaataagtcactcaatgacaaaagtcaatcataaacacagagagaacatcttaatattatgactcaaaataacaatattgataaaat

SEQ ID NO: 442468 - DNA, 577 bp, Homo sapiens
aacaaaataactggtgaatgtagaccaaaatggcaggggtgattggctatgcagacagcatcttacccaaatggtacatggtctcattttctactctcagtagagaggcttttttgtcctcctttgaaagtgcatattctcagtaaaaactatgaattctatgaggatagaatccaccaatagaaggattaattccagtttcccattgtattttcactgactttcaatggagaccctgtacccagctagaatgctggatgtttgggtgatcatyagtgctaatcatagctatttccttcttcactggcttcctccctctaggaacatggtgggactgtattttctggctcttttgagcttgggcaaagacatgtgactaattctggccaattacttatggacagaaacaatgtgtgtcatttcattccagagaataaaggctacattagcatcttagatcctgttggaggagtgccccagctaaggaacagaggaaaagcagcaggacaagaaatgaaattttgttgtttttaggcactgatatttggggctgtttgttatcaccatataacatagg

SEQ ID NO: 442469 - DNA, 556 bp, Homo sapiens
tcacttatgccatgctttgctcatacttcatacacaattaagatgatgaatcagttagggtttatacagggacagaacaaatggaatatatatatatatatatatatatatatatatatatataatataaaggggagtttattaattattaagtcacatgatctcaagatcccacaatagactatctacaggctgaggagcaaggagagccagtctgagttccaaaaccaaagaacttgaagtccaatgttcaagtgcaggaagcacccagcacaggagaaagatgcaggctasaaggctaggccagtctctcttttcaagtttttctgcccacttatattctagccttgctggcagctgattagatggtgcccacccagattaagggtgggtctgcctttcccagcccactaactcaaatgttaatctcttttggcaacaccctcacagacacacccaggaccaatattttgtatctttcaatccaatgaagttgactctcagtattaaccatcacagatgctaaattaatgtccaaggcccaaggcactgggat

SEQ ID NO: 442470 - DNA, 556 bp, Homo sapiens
tcacttatgccatgctttgctcatacttcatacacaattaagatgatgaatcagttagggtttatacagggacagaacaaatggaatatatatatatatatatatatatatatatatatatataatataaaggggagtttattaattattaagtcacatgatctcaagatcccacaatagactatctacaggctgaggagcaaggagagccagtctgagttccaaaaccaaagaacttgaagtccaatgttcaagtgcaggaagcacccagcacaggagaaagatgcaggctagaaggctaggccagtctctcttttcaagtttttctgcccacttatattctagccttgctggcagctgattagatggtgcccacccagattaagggtgggtctgcctttcccagcccactaactcaaatgttaatctcttttggcaacaccctcacagacacacccaggaccaataytttgtatctttcaatccaatgaagttgactctcagtattaaccatcacagatgctaaattaatgtccaaggcccaaggcactgggat

SEQ ID NO: 442471 - DNA, 516 bp, Homo sapiens
ttcagcaagcgctgcatttggacatactaagtaacattaagtacacgtaatatagatctccacccaaggttcacaatctttttttttttccaaagttaccagttcattactcaaagtagagaagtgctgtttgggaggaaatatttcagatactgggcagctgctaagggtaagggaataagggggtgaagtccagaggcaagcccccttctgtggatggggkggggtttcatgaagagttgacggagacattctgacaaaggcagcaaccaagccaggctaggaaatgaggacgctttctatgaaacaatctcctttagttgccccaattgttcaataatgtctgatatggaatcaaaacacacagttgtgtcagggattatgtcaacaatgaagggacaaggcagtggtggccccttcccctttcctgccagaataccaatttcacaagctgtggcaatgtgcccagctcacagctgaccctctcccttcccattcctctacaaattaaggcta

SEQ ID NO: 442472 - DNA, 635 bp, Homo sapiens
atgtgctctcatcttttcataaggttgtcacatctcattgcctagtcacagtcttttattggtcctattaatatatgcctaccaaattagaagctcctaagtcaaaggaagaatggctcattatgagtgacagtcagtggttgattattttggcaggcagttctgggcactatgattaaaaatggacccagaaagggggaaagacctctcagtggaccctgttttcagtgtttacctaatggtagccaaagagcatgacatacccaaaagccagaggttaaaatttcaacgaaaagatggcagcaaatggattcttactctagtcacttatttcatttggctttagaaagtgtctcctcatgctctttttttcagcgtttggatacactcttaaattattcacaatatggcattgtttcatttctctaacaaatttggaaaaatcgtaaaatattagggaaatgctgatgattgaaccattttaccttctcatgaaatcttgatgtcctatctaagacagagatyggcagtttactaatcatgcttttttattttctgtatttctgatgctttgatatctggatgaccctggaggcatcctatgcagattagcctacttttaaaagcagtaaatg

SEQ ID NO: 442473 - DNA, 580 bp, Homo sapiens
gcaattgctctgcaaaataaagcagcatgtgatctggcatttaagtaaaatcctcccttttcatrccagtcatcatgagtccccgctggacctgaccccagtgtactttctcagcccatatcctctattaaaaaataaacactaattaaacaaataacaataacggaacatcttcttatgtggcgtggattctctgttgaccgctcatatgttccaccagcatatgatgagctgatccaagcatgaaacagaatcagctaacaccctattgctgtgctcttccacattgtgtgcttttaatgttacatgatatccaacaataaggaaaggaattttaactaaagaccaattgttctttctccctgagaaattttgcaaaaaactttgagtttggtttcataggtctctgttatattacttatgtctctttctgctacaaaatgtataacttgggttatttatcttcttttaaaaactcatttatttcaaattttgcacagtattactttgcatttgttctgttaaaaaataagatcttgattggtgtaccagtagtggtagaagtttaatgaattgataa

SEQ ID NO: 442474 - DNA, 546 bp, Homo sapiens
gaacattaataggattctgtaactatttttcactgcaggagtaggtagtaggactggacccactgagagaaggataatcttctttcatcaaactttgctaattgaagaataattttctgtcagtaacatttggatcttacttttttccggagtttttttttttttcctctaactcttagctgccaattttgatatttcaatttgtctcctttcagccatttcatgtgctggtataaacaatactaataaattatttcagatggtattaaaatttctgaattcatggcctctcacttgattgatagagtcctgaatgcagcccaagttcaaattctttcttcttcagacgttatttcatttttaagtttagcatccaggcttgttaaygtaaaatccaaagccagtatgattatctttcctttgtaagaaatttgtgtttttcctttctctttggaagagttagagttttctctctaaccttggatttatgaagattcacaaggatccattcgaaattgctttttgagggctgggcggggagagacg

SEQ ID NO: 442475 - DNA, 608 bp, Homo sapiens
acagttgttcctttgtatctgcgagggatcgtttccaggacacctgtgaataccaaactttgtgacactcaagtctcttatatgtaatggagtagtacttgcctataacctatgcacatcctcttggatactttaaatcatttctaggttacttatcatacctaatacaacttaaatgctatgtaaatagctgttatgctgcatcatttaggaaataatgacatgagaaagaaagtctacatgttcagtacgggcacaaccatcttttattcccatttttttttcaactgattgaatctgcagatgcggatgccacagatacagaggggccaaccctattagaagttacacacagagctttgctaaatagttaggcaaaagtacaaatgttcccaataaacctcagctcatttatgatttgctagaatgattctctttcaacaataagatactttgatacatatattcttctttcagtgcttayttatgcacttacctctgttctttttctctctctctctcctactccctactcgaatatcaatatctttgtctcagtcaatagcaacaggaaggcagggacttttggttcattctccagcacttcc

SEQ ID NO: 442476 - DNA, 640 bp, Homo sapiens
tcagctgtgtgggctattgagcactggaagcacagctaatccaaattgagatgtcttgtaagtcgtcagcaggcatttaaaaaggtaaaatatcttaccagtattttgtatggattatatctaaatggtcattttttatatgctggcttaastatatcattaaaattaatttcagctgtttctctttacttttccattacgaccattaggacattttaaactgtgcatatgactcacacatttcaattctattgtacagtacagatttataagaaaacacttcactgcatttaggagacagctataaggaatctctttcctaaatttgccagtggctgagagcaaagaaggagagaatgagggagcatttgtttttattacttcatagagtccttccccgtcagtgaggagaggcttgcaagccatgtcatataatgaaaactaaagcattatttgacaccagttaaataactttcagttcatgtttaaatatgtatgaattagtaaatttaactcttaaaaagccatcagcaattttgacaacataagaaccatcgtattcccttttgattgagcagctgttttcctggaaaaatcataaccaaaatcagtgtcctacaaatcagttctgctcttaaaa

SEQ ID NO: 442477 - DNA, 640 bp, Homo sapiens
tcagctgtgtgggctattgagcactggaagcacagctaatccaaattgagatgtcttgtaagtcgtcagcaggcatttaaaaaggtaaaatatcttaccagtattttgtatggattatatctaaatggtcattttttatatgctggcttaactatatcattaaaattaatttcagctgtttctctttacttttccattacgaccattaggacattttaaactgtgcatatgactcacacatttcaattctattgtacagtacwgatttataagaaaacacttcactgcatttaggagacagctataaggaatctctttcctaaatttgccagtggctgagagcaaagaaggagagaatgagggagcatttgtttttattacttcatagagtccttccccgtcagtgaggagaggcttgcaagccatgtcatataatgaaaactaaagcattatttgacaccagttaaataactttcagttcatgtttaaatatgtatgaattagtaaatttaactcttaaaaagccatcagcaattttgacaacataagaaccatcgtattcccttttgattgagcagctgttttcctggaaaaatcataaccaaaatcagtgtcctacaaatcagttctgctcttaaaa

SEQ ID NO: 442478 - DNA, 576 bp, Homo sapiens
cacgtttatttcctgacattgataaacaattttgtcaaagacgcgttgattaaaaaacasgtgaatcagcaagaaaaaatattaatggctaacaattctgtgcaggcatttttaaaagtgcttgagcataacattgatccatgttaagtttaaactacagactgaaggaagatttcttctcttggttatattactcattcttttgtaataccaaatatgctaaaagacttgagcaaaattaatattctgtagttctttacatttgatttttgttgtagaatcctatttatctgttttaatcccgtcttcactttctaaataattaaaacatgttaacctttgaagttcatttccatagtaaaattctgccctgctattcacaggaaatatgctttttaaaaatcatacttaaaaactacgcattttacaacttatagtcaagaaaacttattttattccccagttcatcctaattctggccttgatcctacagccattggaatataaaaataaaaatacactctttttactaaagtcatttaaggctacttcaacaaacctgcccctacactaatg

SEQ ID NO: 442479 - DNA, 567 bp, Homo sapiens
gctgggccatggcctggttttctgattctgtaggtccggggtggggtccctggtaatgctgatgctgcttagagcaggaatccagatgagctatgccactcaggtcatgcagacaccagcagcaaatggtagtgggctattcaatcctcaggtggaagaagtataacggtcctccattttgtaaagtaaatcaatccagtgtcactccttttggggaagccccatccttctccacagtctcacggatgcactttccccagagtctttaggtggctgtaaaaagagcctcttcagccgagttcctgctttgctctcacagcttaggactctgcaagcttacacttggcccttgtgcaaatgagaagatgtcccctctcttggtggacacaacccttccctctgctcagacagtgcgtggcttgaggggcagaagaccctttgtgcaaagaacttcctggacaggtgcagacactctggatacccagctgggtgagggatgcacctgmtgagccccaggccactctcaccctctgctggtcaccttgaatgttatacaaactgcacatc

SEQ ID NO: 442480 - DNA, 547 bp, Homo sapiens
acataactgctacctccctcactacctagactctaaagcaataaagaatatacacactaatatacaggaatcaaaatacttgagcaagatggcaaactaggaactccagtttcttgttccatgtagaaatatcaagcaataacagactgagagaacagcttagtgaaagttctagaaaccagtcaaggatctgtagcaaccaagtgaatgcccaataaagaaaaagcaaacyctaaatagtagaaaatggcaatgtgtttgtgctcaccttgccccattccctccctagcagagtgccaaaggaagccactcaattcctgggatctttcttgggaaagaagtaaaagaatataacttgtttgcagtgttctagcttgtctggggaccgtccaaggaaggggtttctgtctttcctgactcagcaatcacacaagaataatggaagtttggatagtaggtcaggggatattgaaagcagcgatgtgtgttggaatgcctgaaaactacaggggaacttcagacccatagatatctggaaggaagatat

SEQ ID NO: 442481 - DNA, 595 bp, Homo sapiens
aaggaagccactcaattcctgggatctttcttgggaaagaagtaaaagaatataacttgtttgcagtgttctagcttgtctggggaccgtccaaggaaggggtttctgtctttcctgactcagcaatcacacaagaataatggaagtttggatagtaggtcaggggatattgaaagcagcgatgtgtgttggaatgcctgaaaactacaggggaacttcagacccatagatatctggaaggaagatattacaggcagaggaccacaatatgacaactaaggccagggaagaagaaggggtgaaacccctaggaaaatcaggacatgtaaaaatagtcatgtatataggggtactgggaaaacggtacatacacagtcctagggaagatgcatccccagaagagccacagaacaccttacatcrccatgccaagctgattaataaggatctatcctgcacagaggcagtctgcaaagtctgcagtgtggctgtttttattcaaatgcccaattttcaacaaaaattcacaaaggatacaatgaaacaggaaaatatggtccattcagaggaacaaaataaatctataaaaacagat

SEQ ID NO: 442482 - DNA, 578 bp, Homo sapiens
aacaaaatattatggagcaaggcaggaaacattgcacggtgtcctactcacagaagaaattaacaaaccctgccctgaagaagcacagattttggacttactaaatcaactctgaaatcttcttataaagctcaaaaaggaattgtggacaaatagctaaatgaactaggagaatgaggtatgaacaaatagtgcacatgaataaagatacagaaaaatgaaccagatattttggaactaaatagtacaataatggaaatgaagaatgtaccccaggatttcaataccagatttgagcatgcagaggaaagaataagtgaattagaagaagaaagttcagttggaattactgagactgaggagcaaaaaggaagattcaagaaaaaaaagcaaagtttaagagacctgtgaacattaagtgtactaaatacatataataggartcctagaagagtgaaaaaagcaaagggcagaccaatattagaatataaatagttgaaaatttcaacaatgtgaaaacaagcatgaatctgtaatccaaaaatatcaacaaactctgaaaaggaaaaacacaaaaa

SEQ ID NO: 442483 - DNA, 591 bp, Homo sapiens
aaaaagttttagaacattttagggtatattaacttttgaggttaagctagctccagttcaaaaagttttaagcaatttgaatcagataaatttactttgtacaataacctcaaaaatcaagtggaaattgaaggtaataccattaaacccatttcaaagtggttcaaacaaatccgattttagtaagaaaaaatatataaagtaaaattatttttcttttgttggcagtgtctttatgactgtagtattgaggtcatttaaactaacagtggctaaaaaagaaagataagagtgttcagctttttaaaataatggaaaaaactgtagctttacattggattttatattgaaatactttagtcaaagttcgctttgaaggtaatggaggataaactaatctcccatygagaactgaccatgtgaaatcataacatatgaacttagtaattttaaatctactgaagcataaccgcagagtgtaatttaaaatctaaaccttggcagagatcaggaaagagggagagaaagcaagattagaatgaatgatagcgaactctgtagagaggaaaagaggtgagaatatcaccctac

SEQ ID NO: 442484 - DNA, 594 bp, Homo sapiens
gagttgtttcttttagaaaacattcttgtttgtctacagaagataaaatcatcagtaaatatgagaccaatcacaaaataaaagagctgacatattagakttgatagtcttcttcactgatcctcaaaggcaagtttatgtctgtctgagtcacattccagacacatgggccaatgcatataattgtctacttggcaagctccagatgaaatatggaagagttagaagattagcattagaattctccttctaatactgacttctttcaaagtgatgttcgaaattcatctcatgcagcatacttccctgacacttctggcagagagaactgtctctcctttttcaaatgttactgttgataaatgtattttcttttcaaatttacataaaatcttcataaaagaaagacataaaagcagggagagaatcaatatagataaaggaaaaaataccatagaattattccctatgtggagactttatacttggtatctgtcctggtaatatagttgtctatagccattcatagacacatataaatatgtgtaaacttactttactttttctttttacactgtaagcattggaagggca

SEQ ID NO: 442485 - DNA, 594 bp, Homo sapiens
gagttgtttcttttagaaaacattcttgtttgtctacagaagataaaatcatcagtaaatatgagaccaatcacaaaataaaagagctgacatattagagttgatagtcttcwtcactgatcctcaaaggcaagtttatgtctgtctgagtcacattccagacacatgggccaatgcatataattgtctacttggcaagctccagatgaaatatggaagagttagaagattagcattagaattctccttctaatactgacttctttcaaagtgatgttcgaaattcatctcatgcagcatacttccctgacacttctggcagagagaactgtctctcctttttcaaatgttactgttgataaatgtattttcttttcaaatttacataaaatcttcataaaagaaagacataaaagcagggagagaatcaatatagataaaggaaaaaataccatagaattattccctatgtggagactttatacttggtatctgtcctggtaatatagttgtctatagccattcatagacacatataaatatgtgtaaacttactttactttttctttttacactgtaagcattggaagggca

SEQ ID NO: 442486 - DNA, 594 bp, Homo sapiens
gagttgtttcttttagaaaacattcttgtttgtctacagaagataaaatcatcagtaaatatgagaccaatcacaaaataaaagagctgacatattagagttgatagtcttcttcactgatcctcaaaggcaagtttatgtctgtctgagtcacattccagacacatgggccaatgcatataattgtctacttggcaagctccagatgaaatatggaagagttagaagattagcattagaattctccttctaatactgacttctttcawagtgatgttcgaaattcatctcatgcagcatacttccctgacacttctggcagagagaactgtctctcctttttcaaatgttactgttgataaatgtattttcttttcaaatttacataaaatcttcataaaagaaagacataaaagcagggagagaatcaatatagataaaggaaaaaataccatagaattattccctatgtggagactttatacttggtatctgtcctggtaatatagttgtctatagccattcatagacacatataaatatgtgtaaacttactttactttttctttttacactgtaagcattggaagggca

SEQ ID NO: 442487 - DNA, 594 bp, Homo sapiens
gagttgtttcttttagaaaacattcttgtttgtctacagaagataaaatcatcagtaaatatgagaccaatcacaaaataaaagagctgacatattagagttgatagtcttcttcactgatcctcaaaggcaagtttatgtctgtctgagtcacattccagacacatgggccaatgcatataattgtctacttggcaagctccagatgaaatatggaagagttagaagattagcattagaattctccttctaatactgacttctttcaaagtgatgttcgaaattcatctcatgcagcatacttccctgacacttctggcagagagaactgtctctcctttttcaaatgttactgttgataaatgtattttcttttcaaatttacataaaatcttcataaaagaaagacataaaagcagggagagaatcaatatagataaaggaaaaaataccatagaattattccctatgtggagactttatacttggtatytgtcctggtaatatagttgtctatagccattcatagacacatataaatatgtgtaaacttactttactttttctttttacactgtaagcattggaagggca

SEQ ID NO: 442488 - DNA, 603 bp, Homo sapiens
gtctgggaaaaccaagcccagcatatgtgtggtgaactcttcactcgttacacagagttaattatttttatagaccctagttcagcaaatgcctacattccttacagcctcttctgtctcatcttgattgtctccttcttaaatcccayaaatggtagataacgacctccaaattgggatgcaagtaactcagtcagtattcaagaaaatacaagtcattgtgggaaaaccatttgaacatttatttactcttttaaaatttatattttggtatatcttttataatgtccaaatatatttagattgcataccaatgaatgtataatattaatagatgcatgcttatttatttgttttgtgtatttgtgtgatcatagttgagattaactgggatactcgaagttcaggtttttcaaaaaacaaaattagatttaaacatctgttgaaatgctaggtggagaaagagatacaaagggagtccataaatagaattttattgctacattgcctagtatttcctctcactctcagtattctactttttatagcaactctcttcatccttgtttggcaaggataatactggtagatactgtacagata

SEQ ID NO: 442489 - DNA, 589 bp, Homo sapiens
ccccttgcaattctggcaagatcttagttctcaggatgtggtactttcaaatgggatattatcatcatctctgcatcaccatttattcaccaattgtgggtgaggggcggggggagggaacaccttataagtgagaacatgcgatatttgattgtctgttcttgtgttagttcacttaggattttgatgtctttttagatattatctcaacacttacagtatgwgaatttaagtctgtcattacttgataaatacagtaaaaataatcttttattgcattctccagatttaagtgtcttttctgccactgtgcaggtccagctgcgacttggccctccccagacatattttgcatggataatgcatttgcattttaagattcatctgttattttgattctctcttccacagcagtttatttgatttcttgtctagtgaaatcatcctcatcagagttctttttattctagtttctgcattattttactagcaatgaaaatttgcttattgagacatcttgtcacccttaggacagaaaaaaggctgtagatttttaggcagcagcagatcaatcattcttccatttacc

SEQ ID NO: 442490 - DNA, 503 bp, Homo sapiens
ctctgcatcaccatttattcaccaattgtgggtgaggggcggggggagggaacaccttataagtgagaacatgcgatatttgattgtctgttcttgtgttagttcacttaggattttgatgtctttttagatattatctcaacacttacagtatgagaatttaagtctgtcattacttgataaatacagtawaaataatcttttattgcattctccagatttaagtgtcttttctgccactgtgcaggtccagctgcgacttggccctccccagacatattttgcatggataatgcatttgcattttaagattcatctgttattttgattctctcttccacagcagtttatttgatttcttgtctagtgaaatcatcctcatcagagttctttttattctagtttctgcattattttactagcaatgaaaatttgcttattgagacatcttgtcacccttaggacagaaaaaaggctgtagatttttaggcagcagcagatca

SEQ ID NO: 442491 - DNA, 598 bp, Homo sapiens
gaaatgcctttctatcttgtactgaaaatgcaccttctacacaggtgcagaattgctatgaaaagacatatttacagattctaatgtgattctagaaaaagtgaaatcattgtatgacaacttaatgctaaaggaaggtggaggatccaaatctggataatttaatgccagcaaaggatggcttgatatttttaaaaagaggcctggcttcaaacatgtaaagataacaagaggaagcaaacaaatccccagaagccattaagaaagtcattgaggacaaaggatatcttcctgaatcggttttttgttttgttttttttaattttaatgaagacaaaagtgccacaaagggcatctgttgctaaggaagagaagcaagcaccaggatttaaggcaggaaggaataggccarctctactgttttgtgcaaatgctgtcagactgcccttatctataaagctgctaacctctgagtcttctaggggagagataaataccagctgccagtctttagttgcacaacaagaaggcctggacaatgagaacccttttactgaactgattccgtcaatgctttgtccttaaagttgggaagtgc

SEQ ID NO: 442492 - DNA, 504 bp, Homo sapiens
caaatttccttccagatatgtacaaattataggaccgtgaatagtgtaaagatgtagttgtatcttgtctttttatcctttccatttttgattattagatcaagtagatcaactattttagctgttatttttctaattttaaaataatcttttttgaggcatttatgttctttataatttttctctaaacagtaagttaattctcttgttgatggaaattttaatggtttctgatttttctctaaaactggttatgaatcacgtcatgtttcaaaacatttgacttgtcttcagcaaaatgatagccgtttatagcaaactggaagttgtacagcaaatgctttggtttctaaaaccaggctttttgagttstagattctcagaactcagttttacatttcaaaagctctgtctgatagtccagggttttcataaagtatcacagagtcattccagagcagtagtaaggcaagtacatgctgtattatgaaaaatgaaaattcc

SEQ ID NO: 442493 - DNA, 599 bp, Homo sapiens
ataaatgcaaaaagcattctagagtctgaaatgataaaaataagttaaaaaagcatattggacttaaaaataatttctttgaccataagagtcattatgctataatagtattctgtaagtactagaagtgacagcaatgtggaaatggccacatttactatagaaaagatgctagaatgcatttcatatagaaaatatatttccattataactatactgtattcttgaaaaattctaagaaagttggtgttaagcattctcgccacaaaaacaataactctgtgaggtaacgcatatgtgaattagctagacttaaccatttcacaatgtatatatacttcaaaacatcatttacacaatacatatgtacaattttatctcacaattaaaaaataaaattaaaaaaataaaatttcaagtcttccatwtgttaagaaaagagttaagctgctgttcaattatgtcaaataaataaattaaccattacatttcaaaaataagaagatatatttcttttgtctaaatcacacaatctatgttcagtgaagtatttctcacatttttacaataatgtacctttcgaaaattgctttagaatg

SEQ ID NO: 442494 - DNA, 590 bp, Homo sapiens
gtcctggcaacaggacaaccccttaatccttccaatcctgaaactaayataaggagcttccagaagacagtaggacaaaactactccaaagagggagctcatgctgtatctgacaccctttctaagcctaagcagctacagcaaggtgccactgtccagctgggcttttggccaactgcccactgtcctgggacccagaagtactgggaccaaggcattacaaaaactcaggctgccactactgagactggggggtgagctaagagtgctcctgtagccaaggctaagaagcaagtgaggcataggctgcagctgacagtgctgggaagtgaccacaactgggactgagagggggatgcaactggaatgtgaggtgctgttgggacttgatcaacagggaggtgggggaccccgcagccaggcaaggggtgctagctaggcatgggttaccaccaccagggcaagctctgctgagactgggacataagaggcatgtgtgtttctcacccaccaacgcaggctgtggacatcaaggatggccttaccctctccagtaacagggcttcagtgtgattgctaccgcccgcaac

SEQ ID NO: 442495 - DNA, 608 bp, Homo sapiens
ctaagcctaagcagctacagcaaggtgccactgtccagctgggcttttggccaactgcccactgtcctgggacccagaagtactgggaccaaggcattacaaaaactcaggctgccactactgagactggggggtgagctaagagtgctcctgtagccaaggctaagaagcaagtgaggcataggctgcagctgacagtgctgggaagtgaccacaactgggactgagagggggatgcaactggaatgtgaggtgctgttgggacttgatcaacagggaggtgggggaccccgcagccaggcaaggggtgctagctaggcatgggttaccaccaccagggcaagctctgctgagactgggacataagaggcwtgtgtgtttctcacccaccaacgcaggctgtggacatcaaggatggccttaccctctccagtaacagggcttcagtgtgattgctaccgcccgcaacttgagcactttgcctggagtctgaggattgcctcactgtcatccaccaaggctggggtctgctctcacctttggggagcttgaaaataagcccactcagtcaagcttcgccactcccatcctcgagacagagcgcaaag

SEQ ID NO: 442496 - DNA, 599 bp, Homo sapiens
acacactctatctcttgataatacatgcacacacatatttactatacatatttatatgtacatatttttgcatataatatagctatataatcatcggtatcatttacctctcaaagtcactgaagctttatgaatcacagtctcacgtgtttaaaataagtttgcgtatgattgctgagcctccatctctgctcatcttgatggctgtaggcagaattgactcccatcaactcagcatcattgccactcactttagcttttagttttgcatagcaggaagaaccctgaaattacagtctcctgaaacctctttacacttaaacaataagaatgaaaggcagtgaatgaggagagctccggtcaggtagcttagatcattggtgataagtgctttcgacttctcaatttcttcttatccattttggtcctgcagacccttatggtcatcagaggcagctcctgtcaattattgaaaatcctgatgtcccgaaagcagtctyctggccttcaggtgcccagctcctccaattgttatgtagtctttgattgcctatattaagtttgtctctaccagaaccaactagagtgactttgaattt

SEQ ID NO: 442497 - DNA, 599 bp, Homo sapiens
acacactctatctcttgataatacatgcacacacatatttactatacatatttatatgtacatatttttgcatataatatagctatataatcatcggtatcatttacctctcaaagtcactgaagctttatgaatcacagtctcacgtgtttaaaataagtttgcgtatgattgctgagcctccatctctgctcatcttgatggctgtaggcagaattgactcccatcaactcagcatcattgccactcactttagcttttagttttgcatagcaggaagaaccctgaaattacagtctcctgaaacctctttacacttaaacaataagaatgaaaggcagtgaatgaggagagctccggtcaggtagcttagatcattggtgataagtgctttcgacttctcaatttcttcttatccattttggtcctgcagacccttatggtcatcagaggcagctcctgtcaattattgaaaatcctgatgtcccgaaagcagtcttctggcmttcaggtgcccagctcctccaattgttatgtagtctttgattgcctatattaagtttgtctctaccagaaccaactagagtgactttgaattt

SEQ ID NO: 442498 - DNA, 491 bp, Homo sapiens
agcaccaacacaggtgccagtgcacgccactctggggtaaaaacataggcacatttagcccactgctacctctgctagggcctgaagactggcccacctggaatcctacttcccagcacaacttctccacaacttccactaataacctcatcctaacccatcgagaaaatcacagatgccrctaatgttgtttacagccgaagaaatcatacagagagtacactactgcacacatgcatatttagaaaagcaagaacaaactaaacccaaaattagcaaaagaaaagacattaataaagattagagcataactaaaagaaatagactaaaaatacaaaggatccacaaaataaaaggtaggtgttttgaaaatttaaacaaaattgataaactgctccctagactaacaaagtaaataagagagaagacccaaaataaacaaaatcagaaatgagaaaggacacattacaactgatgccacagaaatacaa

SEQ ID NO: 442499 - DNA, 614 bp, Homo sapiens
ctgaatataactgcataagaatggcaaatataataaatgtatccgtgctattctatagttccacatatcatttattaatttcctatcaaatttcccaaagtagcttctccaaaaaacaccgcacgttgtgcacatgtactctaaaacttaagtataataacttaaaaacaaacaaacamacaaacaaatatttaacctcagtctcccaaagtttgattctcagctcttaggagaaatatctttttgtctcttacttaaataaggcagtagatgtcatccagaaaaacctatttaagttttcttcttctcacctcaaaacacttattcagctcatctacttttttatcttctttctcctctgctctggtagatatgtgtctgtcctctttaaggcaaactctcatttaagtattcttagttccgtctcagccaccttaccttcttctaaacatatcacttccatttagtcttccattttcccctactttgtctcccttcctgtgcactaacgtgttccagtgttgtttatcaggttaatattcttcgtatggtttatgtgtcttcctttgttatacccaaacttgaaatgagagaatcacgcactcactgcctgt

SEQ ID NO: 442500 - DNA, 590 bp, Homo sapiens
atttgttaaatgtaatgggatttgtcattgtgtctttatggatctaagtatatcaaaatttgttagggaacttgtttcttgtagtgaatgtgaaagaatctatcagttggccaggtgtggtggctcacgcttgcaatcccagcactttgggaggccgaggcgggcrgatctcgaggtcagtagatcgagaccatcgtgaaaccccgtctctactaaataatgcaaaacattagccgggcgtggtggcgggcgcctgtagtcccagctgctcgggaggctgaggcaggagaatggcgtgaacccgggaggcggagcttgccatgagccgaggtcacgccactgcactccagcctgggcgacagagcaagactccgtctcaaggggaaaaaaaaaagcaaaagaatctatcagtcatctgtttattgatctatcgatctattagctatctatccagctacacatcaatctatctatattggtttaggacaaagcaaattttcgtgaagtataaaaatggctgtctttgaaatagcagtaatgtgaaggtaaatcataaactttataaattaaatgtatttcttctcacccta

SEQ ID NO: 442501 - DNA, 590 bp, Homo sapiens
atttgttaaatgtaatgggatttgtcattgtgtctttatggatctaagtatatcaaaatttgttagggaacttgtttcttgtagtgaatgtgaaagaatctatcagttggccaggtgtggtggctcacgcttgcaatcccagcactttgggaggccgaggcgggcagatctcgaggtcagtagatcgagaccatcgtgaaaccccgtctctactaaataatgcaaaacattagccgggcgtggtggcgggcgcctgtagtcccagctgctcgggaggctgaggcaggagaatggcgtgaacccgggaggcggagcttgccrtgagccgaggtcacgccactgcactccagcctgggcgacagagcaagactccgtctcaaggggaaaaaaaaaagcaaaagaatctatcagtcatctgtttattgatctatcgatctattagctatctatccagctacacatcaatctatctatattggtttaggacaaagcaaattttcgtgaagtataaaaatggctgtctttgaaatagcagtaatgtgaaggtaaatcataaactttataaattaaatgtatttcttctcacccta

SEQ ID NO: 442502 - DNA, 609 bp, Homo sapiens
acagcacattaaaaaagataagacacaacgatcaagtgggacttatctcaaggatgtaaggatgattccacaaacacaaatcaataagcacgattcatcacagctacagaatgaaacacaaaaaccatacgatcacctaagtaaacacagaaaaaaatttgataaatcatccctgcaatatacctgcatgataaaaactctcaacaaaccagggataaaaggaatrcgcctaataacagtaaagaccatatacaacaaaccacagctaatgttatactgaatggtgaaaattaagtcattcctctaagaactggaataagaccaggatgtccgctttcaccactcctgttcaatatgctactgaaagtcctagcaagagcaatcaggccgagaaaagaacaaaagacattcaaaccggaaatgaagaagtcaaattatccctctttgctaatgatataatcttatgcctgaaaatacctaaagactccaccaaaaaactctcagatttgatatataaattcagtaaagttgcaagatacaacatcggtgtccaaaaatcagtagcatttttatacaccaataatcatctagccataaaagaaatgaaga

SEQ ID NO: 442503 - DNA, 609 bp, Homo sapiens
acagcacattaaaaaagataagacacaacgatcaagtgggacttatctcaaggatgtaaggatgattccacaaacacaaatcaataagcacgattcatcacagctacagaatgaaacacaaaaaccatacgatcacctaagtaaacacagaaaaaaatttgataaatcatccctgcaatatacctgcatgataaaaactctcaacaaaccagggataaaaggaatgcgcctaataacagtaaagaccatatacaacaaaccacagctaatgttatactgaatggtgaaaattaagtcattcctctaagaactggaataagaccaggatgtccgctttcaccactcctgttcaatatgctactgaaagtcctagcaagagcaatcaggccgagaaaagaacaaaagacattcaaaccggaaatgaagaagtcaaattatccctctttgctaatgatataatcttatgcctgaaaayacctaaagactccaccaaaaaactctcagatttgatatataaattcagtaaagttgcaagatacaacatcggtgtccaaaaatcagtagcatttttatacaccaataatcatctagccataaaagaaatgaaga

SEQ ID NO: 442504 - DNA, 609 bp, Homo sapiens
acagcacattaaaaaagataagacacaacgatcaagtgggacttatctcaaggatgtaaggatgattccacaaacacaaatcaataagcacgattcatcacagctacagaatgaaacacaaaaaccatacgatcacctaagtaaacacagaaaaaaatttgataaatcatccctgcaatatacctgcatgataaaaactctcaacaaaccagggataaaaggaatgcgcctaataacagtaaagaccatatacaacaaaccacagctaatgttatactgaatggtgaaaattaagtcattcctctaagaactggaataagaccaggatgtccgctttcaccactcctgttcaatatgctactgaaagtcctagcaagagcaatcaggccgagaaaagaacaaaagacattcaaaccggaaatgaagaagtcaaattatccctctttgctaatgatataatcttatgcctgaaaatacctaaagactccaccaaaaaactctyagatttgatatataaattcagtaaagttgcaagatacaacatcggtgtccaaaaatcagtagcatttttatacaccaataatcatctagccataaaagaaatgaaga

SEQ ID NO: 442505 - DNA, 529 bp, Homo sapiens
cagttttcctgtacagcttcttattaaaacttggtgaaagtagagatatcctaattctagatttgattgagcaacagtggagttactttttatctaggtacatcaaacaactttgaagtatctatatgtattataaagtgttttagtattcttttgtaatcaaattacaatcaaattacaatctttcrgattcagatatctttggaatcagattcttccaatatttattgcatatctactatgcacagatatgctggcttcttaactattaagaaaatattcacaaagacatatacctttggagaaactccttaactcatcaataaactattcaataagtaaatggtcagattatttaaaaatacactcggccaaaagatgcataatgtcagctaagcacttgtgaagattctcaacatctgcagtgaaatgaaaattaaaactcagatgtcgctacaaccccaaaatagctgctttatttatttattttcaaatgtagttgggaatgtgagcaactggaaagctccta

SEQ ID NO: 442506 - DNA, 489 bp, Homo sapiens
gccaacaggtatgtgagtgtgtgaaatgcaatgtccctacccataaagaaacataaaacaaatttaaataagctgaggtgaaaaacaattcacttctttaatcttttatccttatagtgtttaaagtgacctcaaagcaaagcataattatgggcatatactcaatatagacacaaataaaactgataagtgcttgagggaaattatattctgctagctagaataagaataatggttttcctatttggtgttttttaaaagtgctttctttcctctgattaaaattaatttaagatgaatagatgtatttggaatttattaatgagtgaatatcatatatataattctgttgatattgtttggttctgtgcctccacgtaaatctyatcttgtattgtaatcttcacctgcggagggagggacctgtaatccccacctgtcaaaggaaggaggtgattggatcatggggggcagcttccctcatgctgt

SEQ ID NO: 442507 - DNA, 605 bp, Homo sapiens
caatttctctgtgagaataaggactgacctggtgatgagagggagtttatagtgttgcatattgcttrtgggcacagtttccctacatgagcatagctctgtcccaggaccctcgctcggttcagtctcttttctagtgatgcctagtgttacatttccaccctgtgtctctgccctgagtccacatgtctgactgcctactcaatgacttcacttggacgtcacgtagaagcctctgagttcacttgtacaaagaacaactgatttttcccaacagttgtacaaacttttccttccccagtcgtgtgtgtttcagcaaatgatgtcacaattcactgcgatgctcaagccagactcacatcacatgtagcatccatcaggcttccttttcttaacattaacattgtttccacattgtggggatgtgagggtaatgctatggtacttttgggtgaacttttactttttgtagtgcttccaatttctctgtgacaaaaggactgatttggtgaggaaggggaatgacatattaataatgtgtcactgactagccaatgcgatcaatgtcaccttcacaatgtagcagaaattcgcttacttcttgc

SEQ ID NO: 442508 - DNA, 589 bp, Homo sapiens
tctgactgcctactcaatgacttcacttggacgtcacgtagaagcctctgagttcacttgtacaaagaacaactgatttttcccaacagttgtacaaacttttccttccccagtcgtgtgtgtttcagcaaatgatgtcacaattcactgygatgctcaagccagactcacatcacatgtagcatccatcaggcttccttttcttaacattaacattgtttccacattgtggggatgtgagggtaatgctatggtacttttgggtgaacttttactttttgtagtgcttccaatttctctgtgacaaaaggactgatttggtgaggaaggggaatgacatattaataatgtgtcactgactagccaatgcgatcaatgtcaccttcacaatgtagcagaaattcgcttacttcttgcatttcccctgttattaccttactccaaagcatcaccatccaaccaaagaacctcacctggtttactgcatcatactcagcctagtctctttgcttctgttttattacacaacatcgcgttctccagacagccatcagaattatgcatagctttgatcagtcgagaaaaggcc

SEQ ID NO: 442509 - DNA, 573 bp, Homo sapiens
tttcccaacagttgtacaaacttttccttccccagtcgtgtgtgtttcagcaaatgatgtcacaattcactgcgatgctcaagccagactcacatcacatgtagcatccatcaggcttccttttcttaacattaacattgtttccacattgtggggatgtgagggtaatgctatggtacttttgggtgaacttttactttttgtagtgcttccaatttctctgtgacaaraggactgatttggtgaggaaggggaatgacatattaataatgtgtcactgactagccaatgcgatcaatgtcaccttcacaatgtagcagaaattcgcttacttcttgcatttcccctgttattaccttactccaaagcatcaccatccaaccaaagaacctcacctggtttactgcatcatactcagcctagtctctttgcttctgttttattacacaacatcgcgttctccagacagccatcagaattatgcatagctttgatcagtcgagaaaaggccatgggacctgactcacttactatttagactattgatccattggagtgacacaggttattagg

SEQ ID NO: 442510 - DNA, 573 bp, Homo sapiens
tttcccaacagttgtacaaacttttccttccccagtcgtgtgtgtttcagcaaatgatgtcacaattcactgcgatgctcaagccagactcacatcacatgtagcatccatcaggcttccttttcttaacattaacattgtttccacattgtggggatgtgagggtaatgctatggtacttttgggtgaacttttactttttgtagtgcttccaatttctctgtgacaaaaggactgatttggtgaggaaggggaatgacatattaataatgtgtcactgactagccaatgcgatcaatgtcaccttcacaatgtagcagaaattcgcttacttcttgcatttcccctgttattaccttactccaaagcatcaccatccaaccaaagaacctcacctggtttactgcatcatactcagcctagtctctttgcttctgttttattacacaacatcgcgttctccagacagccatcaraattatgcatagctttgatcagtcgagaaaaggccatgggacctgactcacttactatttagactattgatccattggagtgacacaggttattagg

SEQ ID NO: 442511 - DNA, 608 bp, Homo sapiens
aagcaataagaaagaaatgacatcttacctttaaggacaaaacagttcaaaagacaacagacttcttacaggaaaccatagaaaccagtaggaaatggcacaatatttgtccagggttgaaagaaaagcacgatccttctgaccaaataaacaaatgaaaaaataatttaggaaattattatttttaagccttgtgtacttgatggtattactttgtgagtattattytgtgagtctcaaggagccaattattcttccaatcttaggtagccaaacatgttaatgagagctcagaggtttagtctaatatctagattatttccaatgtgtataatcttcatattgcaataaaaggaagctcagagtagatgacagagcattaacagctgtactcaaatccttgttcaaccacttactatgtgaatttggacaggatcttttgtctctgagccttacttttttcatctgttaaatgggacaataatatctgttgcataactaacaatggggataaaaaaggacagtatatgacagtttcagattgaatttagttatgggattatatagagatgtggatcatttcattcactaaaatatattaagaataa

SEQ ID NO: 442512 - DNA, 528 bp, Homo sapiens
ttttctaaacagtaaggccatagaaataaaaacaccaggatagttctggaataaagtataaaacttactattgtgtcatgctttagctaaagaagaacatacaataatatgagcagtgatgactgggaattgcctgctattgatcatgaagaaggttagtggtttttgtctttaataaacaatgtttgaaggatctaaatgagtctaagttttgagacacgtttattgtagtaaagttgtgtgcttttgagaaatccctagaacagaaattttaattgaagggtccaatagattgattagcttttgtgcacagggatctgccaatttgatgtttaaagcaacatgctccatgctatcaactgaatgtttgtgttacccccaaattcatatgctgaagctgtaaactgccagtgtgattgcagttggagatgggactttggaaggtaattggggctmgatgaggtcatgaggatgagcacctcatgatgggattagtgtgttgatagtaagagccagcacagagctcac

SEQ ID NO: 442513 - DNA, 603 bp, Homo sapiens
cagagtgtatctatatttgcatctttcttatcaatgccctttagtaaaagtttgtgaatttttmccaatggtattttattatacatttgaagaggtttactttcccagtacttttattgtttctgtttttttttctttttgaatggaattatttttctaccatatttttaatttgattattgttgctgaaagtttccaccattttaaaatatagttggtctattaaacctaacaagttttaattaactaactctcttgagtttttaatgtagacaaccatatcatttaatggtgatttttctcattttatctcaaactttttgtattctttttaatgtatttttcagttggctaagttgtctggtgtaatgttgaatggtggtattatttttagacattctttttttttttcctgactgtcaaagaatgcaacagaaattactttttaattttttttttttttttttttttggccaacaccattgtcaggttaatgactatcgtgtccagttctagtcaaatgctttatagtgaatatttaaattttataaaacatatttgcatatattaagatggtcaccttttaaaggtattgagagcata

SEQ ID NO: 442514 - DNA, 603 bp, Homo sapiens
cagagtgtatctatatttgcatctttcttatcaatgccctttagtaaaagtttgtgaatttttaccaatggtattttattatacatttgaagaggtttactttcccagtacttttattgtttctgtttttttttctttttgaatggaattatttttctaccatatttttaatttgattattgttgctgaaagtttccaccattttaaaatatagttggtctattaaacctaacmagttttaattaactaactctcttgagtttttaatgtagacaaccatatcatttaatggtgatttttctcattttatctcaaactttttgtattctttttaatgtatttttcagttggctaagttgtctggtgtaatgttgaatggtggtattatttttagacattctttttttttttcctgactgtcaaagaatgcaacagaaattactttttaattttttttttttttttttttttggccaacaccattgtcaggttaatgactatcgtgtccagttctagtcaaatgctttatagtgaatatttaaattttataaaacatatttgcatatattaagatggtcaccttttaaaggtattgagagcata

SEQ ID NO: 442515 - DNA, 608 bp, Homo sapiens
aagcaataagaaagaaatgacatcttacctttaaggacaaaacagttcaaaagacaacagacttcttacaggaaaccatagaaaccagtaggaaatggcacaatatttgtccagggttgaaagaaaagcacgatccttctgaccaaataaacaaatgaaaaaataatttaggaaattattatttttaagccttgtgtacttgatggtattactttgtgagtattattttgtgagtctcaaggagccaattattcttccaatcttaggtagccaaacatgttaatgagagctcagaggtttagtctaatatctagattatttccaatgtgtataatcttcatattgcaataaaaggaagctcagagtagatgacagagcattaayagctgtactcaaatccttgttcaaccacttactatgtgaatttggacaggatcttttgtctctgagccttacttttttcatctgttaaatgggacaataatatctgttgcataactaacaatggggataaaaaaggacagtatatgacagtttcagattgaatttagttatgggattatatagagatgtggatcatttcattcactaaaatatattaagaataa

SEQ ID NO: 442516 - DNA, 647 bp, Homo sapiens
agatcatgtaattttactcactttttttctcagaagataaaatccttttcgtgtgtgttcttaccatattttcccttcattgtattactaggctttttgaatttgtaaccgctttttgttttgctgatgatttggggttttttttttgataatttgttttacttatatttattttttaatttcatgttctcactcattttatttgagtttactatatttttctcttcctcttcaagctaaayatagcttaattacctttatgtctcttgttttataatacaatttaaggctataattttcatttatttccagttttagctgaacgtaaccacattttatataaagttgctctgctaacatgggtgggactggaggtcattatcttaagtgaataattcagaaagtcaaatacttcatgttctcacttataaatggctgctaaacaatgtgtacccacggacattcagagtggattcataaacattggaggctccaaacagtgatagggtgggtgagggggtgaaggatgagaaattattaacacctattggatacagcgttcgctatttgggtgatgggaatactaaaagcccagatttctccactagacaatatatacatgtaacaaaactactcttgtaccccat

SEQ ID NO: 442517 - DNA, 510 bp, Homo sapiens
ttactttgtgagtattattttgtgagtctcaaggagccaattattcttccaatcttaggtagccaaacatgttaatgagagctcagaggtttagtctaatatctagattatttccaatgtgtataatcttcatattgcaataaaaggaagctcagagtagatgacagagcattaacagctgtactcaaatccttgttcaaccacttactatgtgaatttggacaggatcttttgtctctgagccttacttttttcatctgttaaatgggacaataatatctgttgcataactaacaatggggataaaaaaggacagtatatgacagtttcagattgaatttagttatgggattatatagagatgtggatcatttmattcactaaaatatattaagaataatatttccagtcatgggagaacaaagaggcccatctctttttcttagggtagacagttaatttgaaagacagacagacttgtacacattcaataagaggcaagcaggggag

SEQ ID NO: 442518 - DNA, 510 bp, Homo sapiens
ttactttgtgagtattattttgtgagtctcaaggagccaattattcttccaatcttaggtagccaaacatgttaatgagagctcagaggtttagtctaatatctagattatttccaatgtgtataatcttcatattgcaataaaaggaagctcagagtagatgacagagcattaacagctgtactcaaatccttgttcaaccacttactatgtgaatttggacaggatcttttgtctctgagccttacttttttcatctgttaaatgggacaataatatctgttgcataactaacaatggggataaaaaaggacagtatatgacagtttcagattgaatttagttatgggattatatagagatgtggatcatttcattcactaaaatatattaagaataatatttccartcatgggagaacaaagaggcccatctctttttcttagggtagacagttaatttgaaagacagacagacttgtacacattcaataagaggcaagcaggggag

SEQ ID NO: 442519 - DNA, 510 bp, Homo sapiens
ttactttgtgagtattattttgtgagtctcaaggagccaattattcttccaatcttaggtagccaaacatgttaatgagagctcagaggtttagtctaatatctagattatttccaatgtgtataatcttcatattgcaataaaaggaagctcagagtagatgacagagcattaacagctgtactcaaatccttgttcaaccacttactatgtgaatttggacaggatcttttgtctctgagccttacttttttcatctgttaaatgggacaataatatctgttgcataactaacaatggggataaaaaaggacagtatatgacagtttcagattgaatttagttatgggattatatagagatgtggatcatttcattcactaaaatatattaagaataatatttccagtcatgggagaacaaagaggyccatctctttttcttagggtagacagttaatttgaaagacagacagacttgtacacattcaataagaggcaagcaggggag

SEQ ID NO: 442520 - DNA, 592 bp, Homo sapiens
catttatattggatgttatctaaggaagaggctttcaattttcatacaatgtgggagagagctaataagtaaaaaggaaagagttgaaacaatatctctaacaatattggttcatagggaataataagaaaatgggaattgtttgtggaaaaatgctatcacataggttgacctaaaattttawataattaaactcttttgatacacttttgtttctatcttttccccaaatgaccagcataaaaacctattgattaagcaaatcaagtttgttagactgtagcagtagggaaaaaaaacaaccttgacagagtctcattggagtctctaagtagtgatactattgaagtatatagatgctttagagcctgggatatgtgatttaagggtagatatttcaaggtgtggagctagttggaattgggaaaattttatataataaaatacctttggttttgcaggcacagcaaagaagtgagaatcttgaagtaagccctaattagcaaacttggtttaatagacaagtggtttagttggttcatattcttattttccaggaacaagtaattcctggaacaataatacaagttat

SEQ ID NO: 442521 - DNA, 592 bp, Homo sapiens
catttatattggatgttatctaaggaagaggctttcaattttcatacaatgtgggagagagctaataagtaaaaaggaaagagttgaaacaatatctctaacaatattggttcatagggaataataagaaaatgggaattgtttgtggaaaaatgctatcacataggttgacctaaaattttaaataattaaactcttttgatacacttttgtttctatcttttccccaaatgaccagcataaaaacctattgattaagcaaatcaagtttgttagactgtagcagtagggaaaaaaaacaaccttgacagagtctcattggagtctctaagtagtgatactattgaagtatatagatgctttagagcctgggatatgtgayttaagggtagatatttcaaggtgtggagctagttggaattgggaaaattttatataataaaatacctttggttttgcaggcacagcaaagaagtgagaatcttgaagtaagccctaattagcaaacttggtttaatagacaagtggtttagttggttcatattcttattttccaggaacaagtaattcctggaacaataatacaagttat

SEQ ID NO: 442522 - DNA, 570 bp, Homo sapiens
tggtgatgtcatggtctgcagggatcccatccacatatgctgcatgcaatttcctattatgtactccacataattgaatgatgctctcaccatttgttttccaataaatatcactcatgatgaccttgaaaataccttttctccttcagatattctttttgaagcsccagtcattaatcaaaagaactaacatagtaatgtttatgttactcagaaaagtagcaaaaatagtgtaaacaagatattcaggtcaagttgtttttttccaacactgtattaaatgatactttgttagaataaatatatctctctctattaacatgtatgtatctacatgaatacacatgtttatacttaataatagtatctaataactattgacagtcgctatgggacagaccctgtattaagcactttacatttgtgatattattttcatccatagaggcaggtagtattattagacccatttgacagatgagtaaaatcaagcttagagggtttaatggcactgctcaaagtcaggaaagaaaggtggtggatttagcaaatcgcaaatctgacacaaag

SEQ ID NO: 442523 - DNA, 560 bp, Homo sapiens
ctgtgagccatattgtgcttgttaagaacgttgaatatgttaactcatggatagaaagtagtcagttatgcctgatagatttttaaaatctttcatttacattatagaggccaggtatgaaatttgcaacaggttgatcttgttgtgagacctgcataccaacgtatttaagcacttgtatgaaatagtggataaagcagtgtattgctcttttatgtattcaaaactgagaatataactgaatacaactgaattcacaagaatgactgaacacatccagaggaaactaatggtcatttctttagtcagtaaccttacatgttttatttgttcataactaaagctcccgcagtgcctgtcacctgagaaaaccaatctctaagacattctataagagttwgtagttttctttcagggaatcccagctatgtcacagaacattgaaaatgtatctgttgcatgttcccttgtgaatttgttatcaattaaagagtttggtgtaaatgttaagggttaaacttgccattaaaggctttctctcatgagacattcaaccagaa

SEQ ID NO: 442524 - DNA, 462 bp, Homo sapiens
tttaaaataattattttactgaagtaataaatttactccagtgtaccctagagaaagaaaatctccaatgcttagttattgtctttacttctatatggatattctcagcactttcaatgtttcaaagaccacaacattatatatgtatctacgtgcctgtattatacctataggacaatttttctcatgaacatgtactaaaaatcttacctatgaagattaagttgtaataatttgccctttatttattgtcaatattttggtaagatcaagatgatctttataaactgtagaacctttaaacaatatgaagtatagtagttttaaaaatgtaacccatctttgtgcttccrtctagttgaaaaattaaaattaaaatatcaaacctatatctcttacaagaagaaaaccagttgtctaaaactagcctgaggagggtataatgaagaacagagaaaggag

SEQ ID NO: 442525 - DNA, 602 bp, Homo sapiens
gaaatataagccacaccatgtcacaatgctgccactcctctcaatgatttcctattgataaaggcctttcccaacctcattttttactcctccatgtcttgttcaccacactcattcacaaggtccttttctctgtgctgataaatcaccaggttcctcccatttcactcctactctgttcttgcatggagtgtccttttaccagagccctaagtcctagcccaaatatcgtttcttaaaaaaggacttaataactttcttatataaagttttcctttattgtcaatatctctttagcttttatcatgtttctttatgagttccttcttaacatttaacattatctgaaaatattttctagtkcttgatagtcagaaggttttcaataaatatttattgagtaaatacatgaataactattcaagagttatgttcttccagcaatgcaaacatgataggactggaaaagtatatgggtataaggacagaaggcatataatacatgcatacacatatgtatgtgtatatatgtgtgtctatgtatatctacccgaaacagaattcttttcgttgaaagtgaaagaaggaaaaacaaaaggggg

SEQ ID NO: 442526 - DNA, 602 bp, Homo sapiens
gaaatataagccacaccatgtcacaatgctgccactcctctcaatgatttcctattgataaaggcctttcccaacctcattttttactcctccatgtcttgttcaccacactcattcacaaggtccttttctctgtgctgataaatcaccaggttcctcccatttcactcctactctgttcttgcatggagtgtccttttaccagagccctaagtcctagcccaaatatcgtttcttaaaaaaggacttaataactttcttatataaagttttcctttattgtcaatatctctttagcttttatcatgtttctttatgagttccttcttaacatttaacattatctgaaaatattttctagttcttgatagtcagraggttttcaataaatatttattgagtaaatacatgaataactattcaagagttatgttcttccagcaatgcaaacatgataggactggaaaagtatatgggtataaggacagaaggcatataatacatgcatacacatatgtatgtgtatatatgtgtgtctatgtatatctacccgaaacagaattcttttcgttgaaagtgaaagaaggaaaaacaaaaggggg

SEQ ID NO: 442527 - DNA, 453 bp, Homo sapiens
ccccacagaaagaagtaaaatatggttagatgacacatttctcaagaagcaatgctactgaaatttcaaattgcacaattcagaaaatatctggggccaagatggctgtctctatgcagccaggtggaacagctgccatggaaggaccaggatgactggcggcacttctaacagatcttcagatggaaagcactgagagtggacagagggaagatacagaagctgggtgaaggaggaggaagtcgggagccctggacggggctactgtgcactggtactcattgctggctcccaataattcctggagaactggcaaagarcaacctacttacacctctgcactctggaaccctggaaggaggagaccccttgaccaccagagataattgagttggcagggagagctccttagacaagtagtaggggcagctgaccagctgttgaagagcgagg

SEQ ID NO: 442528 - DNA, 453 bp, Homo sapiens
ccccacagaaagaagtaaaatatggttagatgacacatttctcaagaagcaatgctactgaaatttcaaattgcacaattcagaaaatatctggggccaagatggctgtctctatgcagccaggtggaacagctgccatggaaggaccaggatgactggcggcacttctaacagatcttcagatggaaagcactgagagtggacagagggaagatacagaagctgggtgaaggaggaggaagtcgggagccctggacggggctactgtgcactggtactcattgctggctcccaataattcctggagaactggcaaagaacaacctacttacacctctgcactctggaaccctggaaggaggagaccccttgaccaccagagataattgagttggcagggagagctccttagacaagtagtaggggcagctsaccagctgttgaagagcgagg

SEQ ID NO: 442529 - DNA, 570 bp, Homo sapiens
atgagattatgggtaagtggcttaaactgtctgaaagatagtgtgcatacaagtaaaatggatacctaataacattacttacaagagtaaaaattatattgtggatcattgtaataattatcatcatagtcatcagttataaatggtaatgttagctactcaattaatagagcgaaatggagacagagcagtaagaatatactataggctatttagaagctatcatttgtaggacttgattataatggatgtgagagtctgaaagagggaactctaagaatgaggtctgtagatatatttaccaaggtaaaggagaaaagccaatttgcataataagtaatgatcagagattcagagatctttgaaatgtctgtgtgagataacccaatgaaaacatcaaacaagcaattgcacatatcaatctggagactgggaagagatttggtaagtgtagattagaaattcatcacagatagatgcaaaattacataatgaaagctcattgacaaataaacagaaagagaagaaagggaatrctggcagaaaactagagaaaatgaagacaggcgt

SEQ ID NO: 442530 - DNA, 615 bp, Homo sapiens
aattatgtgaattttagtactgcctatgccayattttggcaatgtgatcttgaggaagtgtctgatattgtcaagaggtttctaaatgtctaatcttatttcttcaagagattaaccagttttaattaaattacttattatcaagacaagatataccaatttaaacaacgtttaatgtggattttaattttaaaataatcaatgtaaacatttcattaattctgttcatattggaaaacttttatggtttaagtgtgcattgtctaaacagaataaagtgtttacaacactataataaaatataaaatatgcatatgttaatgtttacataacttaattgtatacatttattttaagctttttcttctctaaatagggactgtgaattgcagaataatatttttttctgaaactattaattatggaaaaggtaaaaattttacatcaaattttggaactgctatgcctgggagaaaaatacatttaattaacatcaacaccagcatttccgttgcataagccaagtagacataaagtactgaatgtctcagctataacttctttaagaacattattgtattttcttgaataactacatgatttacagagtgttag

SEQ ID NO: 442531 - DNA, 615 bp, Homo sapiens
aattatgtgaattttagtactgcctatgccacattttggcaatgtgatcttgaggaagtgtctgatattgtcaagaggtttctaaatgtctaatcttatttcttcaagagattaaccagttttaattaaattacttattatcaagacaagatataccaatttaaacaacgtttaatgtggattttaattttaaaataatcaatgtaaacatttcattaattctgttcatattggaaaacttttatggtttaagtgtgcattgtctaaacagaataaagtgtttayaacactataataaaatataaaatatgcatatgttaatgtttacataacttaattgtatacatttattttaagctttttcttctctaaatagggactgtgaattgcagaataatatttttttctgaaactattaattatggaaaaggtaaaaattttacatcaaattttggaactgctatgcctgggagaaaaatacatttaattaacatcaacaccagcatttccgttgcataagccaagtagacataaagtactgaatgtctcagctataacttctttaagaacattattgtattttcttgaataactacatgatttacagagtgttag

SEQ ID NO: 442532 - DNA, 615 bp, Homo sapiens
aattatgtgaattttagtactgcctatgccacattttggcaatgtgatcttgaggaagtgtctgatattgtcaagaggtttctaaatgtctaatcttatttcttcaagagattaaccagttttaattaaattacttattatcaagacaagatataccaatttaaacaacgtttaatgtggattttaattttaaaataatcaatgtaaacatttcattaattctgttcatattggaaaacttttatggtttaagtgtgcattgtctaaacagaataaagtgtttacaacactataataaaatataaaatatgcatatgttaatgtttacataacttaattgtatacatttattttaagctttttcttctctaaatagggactgtgaattgcagaataatatttttttctgaaactattaattatggaaaaggtaaaaattttacatcaaattttggaactgctatgcctgggagaaaaatacatttaattaacatcaacaccagcatttccgttgcataagccaagtagacataaagtactgaatgtstcagctataacttctttaagaacattattgtattttcttgaataactacatgatttacagagtgttag

SEQ ID NO: 442533 - DNA, 593 bp, Homo sapiens
tattacctttaaacgtaggtatatgcttatgaaaccatcaccaccatcaaggtaataggcatattcattacctctaagagtgtccttgtcctctgttttgttttcaggttttctttgttaacatgatttcawcaagtttttaactgcatcatacattattgttaactataggcactgtgttgtataacagatttctagaatttattcatttatataactaaaaatttatacccatgaaacagtaatgccccatttatcctccctacaaaggcccagatgcctactattctatcctctgcttctatgagtttgcctattttagatacctcattatatgtggaatcatactgctttttgtatttctatgactggcttatttcacttagcatgatatcctcagggttcattcatgttttcacaaatttcataatttccttctttttaagactgaataatatttccttttataaataaactacactttcatcaacctttgtagaataagtatgttctatgaaatatttgagatatacttaaattcatttttatctggaatttaaatttagccaggtattttatattttacctggcaa

SEQ ID NO: 442534 - DNA, 589 bp, Homo sapiens
ttacctctaagagtgtccttgtcctctgttttgttttcaggttttctttgttaacatgatttcaacaagtttttaactgcatcatacattattgttaactataggcactgtgttgtataacagatttctagaatttattcatttatataactaaaaatttatacccatgaaacagtaatgccccatttatcctccctacaaaggcccagatgcctacyattctatcctctgcttctatgagtttgcctattttagatacctcattatatgtggaatcatactgctttttgtatttctatgactggcttatttcacttagcatgatatcctcagggttcattcatgttttcacaaatttcataatttccttctttttaagactgaataatatttccttttataaataaactacactttcatcaacctttgtagaataagtatgttctatgaaatatttgagatatacttaaattcatttttatctggaatttaaatttagccaggtattttatattttacctggcaatccttgtctattatcttatattttctataataggcagtctgtcatgatctagagaaattgcct

SEQ ID NO: 442535 - DNA, 508 bp, Homo sapiens
gattctccgcatccaaatctaattttgaattataatctccacaatccccagaatccccacatgtaaagggagagaccaggtagaggtaattgagtcataggggcagtttccccacgctgttctcatgatagtgagtgagttcttatgagatctgatggttttataagtgtttggtatttcctcctgactttgttctccttcctgccgccctgtgtagaaggtgtcttgcttccccttcaccttccacggtgattgtaagtttcctgaggcctccccaccctgtctctggtagttctttatagcagtgtgaaaatgaactaatacagaatccttgtcctttgaatttttattccaagggatcttactataattttgaacttgaatattggtttgcatcattttaatatttattcattgccatttatagaaagactrtggatgcagacttaaagaaaaagacttacaatatcatcttcaagctgaaatgtttaatatgaacacatgttta

SEQ ID NO: 442536 - DNA, 598 bp, Homo sapiens
ccctttcaaaataattacattagaagttctgtgtttgcccttctcttaatttcttccagatgaccaccatttcaaatgccttcacggtgcatgttttacagcacagctgaaagttataagaccatgatgatcatccttcttggatgactgacctatcaatcattttgggaaatgcatcttagaaaaatttggttatgagactgtatccatttgcaaagtatctatttggacttttttttaattataaacttctcagggaaattgttgctactgcttattrtgaaaaattacagttgttatgagtatgaatatgcaacatgcaattagcagagattgcagcagatatttagagttgtgaatattcatattgtatacgcattttataaagaatataccatttacattttaatcatagaatttttaagtgacagtaaagttaataaaaccatattctgcttgctaaaatgttcctggcaataaaaatgctgctgcaatactaaaactatgctaatgattgagtaaaattaatttattataccctttaccttcaattttatgttcttcagggagtaatataaaagtgaaaaggaaaaacttc

SEQ ID NO: 442537 - DNA, 585 bp, Homo sapiens
ctgtgctttacagatgaaagtcccttgtaggagactttgttgctatctgagtcttcaaaacattcataaccttwggatatatttatataaggagtgatatctagaaatgtgtagctctcaagagaagctaaccaactttgaaaatggataacagaaagaaattacaagcctaaagaaacctaaattatcgaatgtgttttaatctgttggattaagcacttgccctatctcaagtcttgttatagtagatgataaacctccatagaagttgtcactaatatttgtgtctgttatttgctgccagaaacatgctaattcaaataaaatgtaatatacagttctatcccatgtaaaaatttataaccgattaaagtcacacaattgaatgtaagagcaataagagcttagacttgtaaatgactacaaataccaagtggtttaatattgttccaaattcagacatgatatttacaatggatgatagagtgcagagccaatcatgaatttgaaaatatgtaggatattgatttaagttttttgagtaattttaacttatgatatacaaatgttagacatagcctctct

SEQ ID NO: 442538 - DNA, 626 bp, Homo sapiens
tttacaatggatgatagagtgcagagccaatcatgaatttgaaaatatgtaggatattgatttaagttttttgagtaattttaacttatgatatacaaatgttagacatagcctctctctatatagtgaataacacagtgcaaataaagttgcaattaagtgaagttttagaaaagcccttctggccgggtgcgatggctcaggcctataatcccagcactttaggaggccgaggtgggcggatcacctgaggtcaggagttcaagaccagcctggccaaaatggtgaaaccccatgtctactaaaaatackgaaaattagctgggcttagtggcaggcacctgtaatcccagctactcaggaggctgaggcaagagaatcgcttgaacttgggaggcagaagttatagtgagccgagatcatgccattgcactccagcctgggcaacaagagtgaaactccatctcaaaacaaacaaagaaaaaccccttctgtatactatttactagtctttcgatattataaattccacaacaggctatgttagaatgaataatatttctttttaatagtgccaattacgcttatctaaactgcaagagttttaacagcattgataaaatgtg

SEQ ID NO: 442539 - DNA, 548 bp, Homo sapiens
agatgttatttccatttagttttaaggctttctatggtacatatggtcaattaggattatcaaaaaaatagttttgctcaccaatgccactgtcactactattaaatatcaaaacatcacaggaattgagtaggctccaaatgttaaaatcggtgtatcactaaacgctgatcttttttaggtcttctaatcatatttgctatggatgaatgaaaagttatagctgcttaataatagcaatatamccaagatactactaaaaaggaagaaaaaattttgaataaatgcaacatcagtgtgcacttttgaataccattttttattgacacataaataattttggagtgttcaaagtttacagatgtcaatagacatatgggaatattcaatatcttgttaccaccaagcacaaaaattgactttttcttcatagcattgatttgttatggacttggaaataattactgaataatgatccagattaagtgctaataaaagtcatatatttatgcataaaaatttgtgaggatatgcacataaagttgttt

SEQ ID NO: 442540 - DNA, 571 bp, Homo sapiens
aatcaaatttcaaacataatcttcacagaacttaaagtttaaattgaaaactcacaagtaggaatacatagcaaaacaaaatagcatttttagaaaagagtaaytggtactggataaatcttaaaacacatttattttgagtgaacaaagctggttgcaagtgttttaacacttgaaaagtcataattgttcacatattaatgtatgtgaatttaaacaatgtgtgcaacctgctagaaaatcaaacatagctaaacgattccccgtctgaccacagaaaataatttttttaagaaaaagaaatgggagggagaattataattaactccttaatcaatctgtaattcaagtaactaataaatgtttgcttcttttgtgctgcttacacaaggcctttaaactattgaacatataaatatgttagctctaattatatatggtaattaacatctaattttccccttctgacatattactaagatccaaagttaatattcttagagcttttgtatacagaattacatttcaacattgtatttctacaaatatgtgagagtaagcaatctaagtt

SEQ ID NO: 442541 - DNA, 571 bp, Homo sapiens
aatcaaatttcaaacataatcttcacagaacttaaagtttaaattgaaaactcacaagtaggaatacatagcaaaacaaaatagcatttttagaaaagagtaactggtactggataaatcttaaaacacatttattttgagtgaacaaagctggttgcaagtgttttaacacttgaaaagtcataattgttcacatattaatgtatgtgaatytaaacaatgtgtgcaacctgctagaaaatcaaacatagctaaacgattccccgtctgaccacagaaaataatttttttaagaaaaagaaatgggagggagaattataattaactccttaatcaatctgtaattcaagtaactaataaatgtttgcttcttttgtgctgcttacacaaggcctttaaactattgaacatataaatatgttagctctaattatatatggtaattaacatctaattttccccttctgacatattactaagatccaaagttaatattcttagagcttttgtatacagaattacatttcaacattgtatttctacaaatatgtgagagtaagcaatctaagtt

SEQ ID NO: 442542 - DNA, 571 bp, Homo sapiens
aatcaaatttcaaacataatcttcacagaacttaaagtttaaattgaaaactcacaagtaggaatacatagcaaaacaaaatagcatttttagaaaagagtaactggtactggataaatcttaaaacacatttattttgagtgaacaaagctggttgcaagtgttttaacacttgaaaagtcataattgttcacatattaatgtatgtgaatttaaacaatgtgtgcaacctgctagaaaatcaaacatagctaaacgattccccgtctgaccacagaaaataatttttttaagaaaaagaaatgggagggagaattataattaactccttaatcaatctgtaattcaagtaactaataaatgtttgcttcttttgtgctgcttacacaaggcctttaaactattgaacatataaatatgttagctctaattatatatggtaattaacatctaattttccccttctgacatattactaagatccaaagttaatattcttagagcttttgtatacagaawtacatttcaacattgtatttctacaaatatgtgagagtaagcaatctaagtt

SEQ ID NO: 442543 - DNA, 475 bp, Homo sapiens
ataaattattatttattcaagctsttactagcagaactcggaaactcaagattactcaattcccttcgattctcttgcagtttacctattcacaccacttgccttttgtaggaggttatacagagcttttccccacataaaggagaatctgcttgctgatacttcaaagagtaaagcctcataatggcactatttttaattttttttttttgactgggctcaggcaggatgtgaaagagatacgcagagttataatgtcttagaaagattatggggcagtttctacataaatggatttcttctgtacccttcgcctcttacaccactctgccccttattctgccctgcaaacatggagtacatttcctggttgaggtattgtttcacagtgctcaaccgagtggggcaaatctgctaaaagttttggacaaaggtaatttggtttcccttctccatcttccaccacctggttatg

SEQ ID NO: 442544 - DNA, 475 bp, Homo sapiens
ataaattattatttattcaagctgttactagcagaactcggaaactcaagattactcaattcccttckattctcttgcagtttacctattcacaccacttgccttttgtaggaggttatacagagcttttccccacataaaggagaatctgcttgctgatacttcaaagagtaaagcctcataatggcactatttttaattttttttttttgactgggctcaggcaggatgtgaaagagatacgcagagttataatgtcttagaaagattatggggcagtttctacataaatggatttcttctgtacccttcgcctcttacaccactctgccccttattctgccctgcaaacatggagtacatttcctggttgaggtattgtttcacagtgctcaaccgagtggggcaaatctgctaaaagttttggacaaaggtaatttggtttcccttctccatcttccaccacctggttatg

SEQ ID NO: 442545 - DNA, 499 bp, Homo sapiens
tttatgccttcctatgcagatatattaaaaaagctgaagtttaacttgtggtcatttagagagtacttggatttaagtaccaaggaatcaggcagaattgaaggtgatttcttgcaatgtgtagggtttggagaaattaccaggtagttaggatgcaaaatatggaagctttattcacacaagtaggtattaagacaactggasaataattaaaggaatcctggaatcgattttatttatgcattttattaatacattcttctaatttatttcagagctcttttggcggaaatcttcaatagcagtttttcactagccatcttaggccaatgctcaaaggagaagttcttcataaatgtgggatggactgctctgatggactctgctgttagtctactttgagagcaacagatcattcatggttaagcatagatttaaaggcttagctcaaggatataaaggaaaaaagtcggccgggtgtggtggctcacgactgtaa

SEQ ID NO: 442546 - DNA, 499 bp, Homo sapiens
tttatgccttcctatgcagatatattaaaaaagctgaagtttaacttgtggtcatttagagagtacttggatttaagtaccaaggaatcaggcagaattgaaggtgatttcttgcaatgtgtagggtttggagaaattaccaggtagttaggatgcaaaatatggaagctttattcacacaagtaggtattaagacaactggagaataattaaaggaatcctggaatcgattttatttatgmattttattaatacattcttctaatttatttcagagctcttttggcggaaatcttcaatagcagtttttcactagccatcttaggccaatgctcaaaggagaagttcttcataaatgtgggatggactgctctgatggactctgctgttagtctactttgagagcaacagatcattcatggttaagcatagatttaaaggcttagctcaaggatataaaggaaaaaagtcggccgggtgtggtggctcacgactgtaa

SEQ ID NO: 442547 - DNA, 615 bp, Homo sapiens
ataagtcagagaggaaagaatgcataaggaaagaggccaaagggatttatggtagagaaggatagagccaacgaatgagggaatcaggaatatggagtgggaagcattatgacagaagtccagaatgagactgatcttatttacatgcttgagatgaggacaatagcmaaaattgctctaacaggtatgttttaaagaagtagaaaaataagtgggtgccaatttcacttctacatggcacttgctacccttttcctgtgatgaaaatagaaatcaacgtaccctgaatctccttttcttttcccctatttatataattatcaaggtttcattgattgaatacatttactgaattaacttttaatttgtacattaacgtagtcaaatcagacatctaaataaaattaagttaaatcacatatagaataatagcattttaataatattaaatttatacttttttaaatttcctatttaagaaattgttgaaaattcatataatcataacatattttccccttattttgtatctttaaaaatctgggggaatatttttatctgtgaatatgttcatttattctgtcagtgaaaacaaactactttggatttttatta

SEQ ID NO: 442548 - DNA, 615 bp, Homo sapiens
ataagtcagagaggaaagaatgcataaggaaagaggccaaagggatttatggtagagaaggatagagccaacgaatgagggaatcaggaatatggagtgggaagcattatgacagaagtccagaatgagactgatcttatttacatgcttgagatgaggacaatagcaaaaattgctctaacaggtatgttttaaagaagtagaaaaataagtgggtgccaatttcacttctacatggcacttgctacccttttcctgtgatgaaaatagaaatcaacgtaccctgartctccttttcttttcccctatttatataattatcaaggtttcattgattgaatacatttactgaattaacttttaatttgtacattaacgtagtcaaatcagacatctaaataaaattaagttaaatcacatatagaataatagcattttaataatattaaatttatacttttttaaatttcctatttaagaaattgttgaaaattcatataatcataacatattttccccttattttgtatctttaaaaatctgggggaatatttttatctgtgaatatgttcatttattctgtcagtgaaaacaaactactttggatttttatta

SEQ ID NO: 442549 - DNA, 559 bp, Homo sapiens
tctttatgtattattctagtagattatattttaagttatctattcactttaaaagggaatattatggaaagttcaccaactttcaaaagattcgagcgatgtataaaatctcttgttttactaggtgtggagttttgtaaaggcctgaatttcagtggaaaaaaatgtttaaatatgcttttttccaggaagccactggaatctctaaagtgttcctggctaactgggaaaaaattgcagggaaccaagagtagcagatggaaagacagttggccaaacctactgcccatactacacwgttgccaaaacccttgaaagtaatagtccattttggaaatatttgctgggagaacaaatgtttgctaatgaaacaaacatttgaagtgttaggaaatacccaaataaaacagttttgtagcagaaataaatattttacttgagaaatcattgccagagtaaatatgccatttcaaggtaaaaacaaaacaaagcataaaagctattagagacagatcacaaaatgtataaagaatgcagatttaatggactttgtgtatct

SEQ ID NO: 442550 - DNA, 559 bp, Homo sapiens
tctttatgtattattctagtagattatattttaagttatctattcactttaaaagggaatattatggaaagttcaccaactttcaaaagattcgagcgatgtataaaatctcttgttttactaggtgtggagttttgtaaaggcctgaatttcagtggaaaaaaatgtttaaatatgcttttttccaggaagccactggaatctctaaagtgttcctggctaactgggaaaaaattgcagggaaccaagagtagcagatggaaagacagttggccaaacctactgcccatactacactgttgccaaaacycttgaaagtaatagtccattttggaaatatttgctgggagaacaaatgtttgctaatgaaacaaacatttgaagtgttaggaaatacccaaataaaacagttttgtagcagaaataaatattttacttgagaaatcattgccagagtaaatatgccatttcaaggtaaaaacaaaacaaagcataaaagctattagagacagatcacaaaatgtataaagaatgcagatttaatggactttgtgtatct

SEQ ID NO: 442551 - DNA, 559 bp, Homo sapiens
tctttatgtattattctagtagattatattttaagttatctattcactttaaaagggaatattatggaaagttcaccaactttcaaaagattcgagcgatgtataaaatctcttgttttactaggtgtggagttttgtaaaggcctgaatttcagtggaaaaaaatgtttaaatatgcttttttccaggaagccactggaatctctaaagtgttcctggctaactgggaaaaaattgcagggaaccaagagtagcagatggaaagacagttggccaaacctactgcccatactacactgttgccaaaacccttgaaagtaatagtccattttggaaatatttgctgggagaacaaatgtttgctaatgaaacaaacatttgaagtrttaggaaatacccaaataaaacagttttgtagcagaaataaatattttacttgagaaatcattgccagagtaaatatgccatttcaaggtaaaaacaaaacaaagcataaaagctattagagacagatcacaaaatgtataaagaatgcagatttaatggactttgtgtatct

SEQ ID NO: 442552 - DNA, 514 bp, Homo sapiens
aaggaatttaaaatcaatgtagttcaatctgctcactaattacagatgggcaaattgagttctagaaaggttaagctattagcccaaatcatataacaaattagtcacactaccaggacaagactctcagtctcctaattcttagagcaaaatttttaaatgtaaggttattattttgttttgtccttctttatgccattttctctacattctaggagatcagagtaaaatttcatgtgacagtatattaaaattagatatatacactttcaagattttttgatcattgttatctactttataaactgatgaggaagtacaattaaatctaaaacagtgaaataatgaaattctctttaaattttcgtatttaacactctttcagaaaaataatgaagctctggatttaatgcaaacttcrtaaatgttttttcttgtttcatttgaacatacacatacaatgtataattcagtaaattaagtttaaggtcctgtgaagtacaaaattaatatt

SEQ ID NO: 442553 - DNA, 627 bp, Homo sapiens
gttctgtgatttctttagcaagttaccaaacctggggataattttgggaacctctgtacttgtggtttgtgtcagaagtgagggtgctgtcggggattcccaaacttgcggttggcatccaaagtgggagtggtcttggggactcccaaattatgcaggtactaaatataaaagagttcaactactttcaaatggaaattctacaggaataaatgtttaaattacagtgaaaaagacaaaaaaaaaactttaacactgttaagctagaagagttacactaactgccgtcagaatttgcttctgtgaaaagcactactgctaaaaactaaaackcaagcacaaacaggtttggttgttacttaggaaatattccatgatggccaaattaaattagcatattgggagtctgaaatacctattgatgttcctttaatactgatattaaaaatgatgaagtacatgaatgtgttcataaaagtggagagtcaatcaagaaaattattctttagcattttaaatatttaacattttaacatattcccgaggagcagcagcaatattttaacatatttaaaattcacaaagttccatttgaatatccccaaaaactttatgactagctctaac

SEQ ID NO: 442554 - DNA, 608 bp, Homo sapiens
tttttttttttttttgaggggtgggggctgagtagtatttggagttttctcttgctttacaagatcttctgkgcatataaaattatttttattgacatttatcctgtatgtgatacagcaggtggattttcatattatctcaaccatcatatttctagaagtagaggtcttaagtgatattttgacaaatattgagtaattattacttcaagactgatggttagagtcaatgcctaaagaaatacctagaaaactattgttacacagccaattgcatagaaaccacatggcttaaggatccagttaagaacagggttaacatgattttattaatgacaagcctaactagcaaatctacctgagaagtcatttactcacttaagtctgagttgagctaagacactatatgctgaatgcatcataataatccccagataattattttgcatgaaattcagattgcataagaacatcctcaagcaaagcactgcaattttagttttatacttttaagcccatcccaacaccaattatgacatgaggattctcacacagtctttttcaaaatagtcttaataaatcattctattaaaaaaatggtttagtta

SEQ ID NO: 442555 - DNA, 608 bp, Homo sapiens
tttttttttttttttgaggggtgggggctgagtagtatttggagttttctcttgctttacaagatcttctgggcatataaaattatttttattgacatttatcctgtatgtgatacagcaggtggattttcatattatctcaaccatcatatttctagaagtagaggtcttaagtgatattttgacaaatattgagtaattattacktcaagactgatggttagagtcaatgcctaaagaaatacctagaaaactattgttacacagccaattgcatagaaaccacatggcttaaggatccagttaagaacagggttaacatgattttattaatgacaagcctaactagcaaatctacctgagaagtcatttactcacttaagtctgagttgagctaagacactatatgctgaatgcatcataataatccccagataattattttgcatgaaattcagattgcataagaacatcctcaagcaaagcactgcaattttagttttatacttttaagcccatcccaacaccaattatgacatgaggattctcacacagtctttttcaaaatagtcttaataaatcattctattaaaaaaatggtttagtta

SEQ ID NO: 442556 - DNA, 571 bp, Homo sapiens
acaagagatactagggataatattcgatggtataagttagaacagaaagaatttagaggagtagatctgagcaggcagtgaaaaccacatacaagagggagaccacctaattaaaatgagagtcagtgatgagactgtcaatcttgttaggtcttttagaaattattctgttcattaggactttttattccagacttgtaatgggtatatcttttaataataactgaaaatatttttaaaatgaagatcactctattcctaatttaaattaatattgaaatcagcctcctgcataagcataattgtttagtgaaaatatagaagtttctcattgtttaaagcatttctttatacctgtgagaaatgaaatgaattgaaatgtctttccaaagacaagaagcaaaatgtgaatatactggtagaggacacacattcctagagtgactrgggtcgtttatagtagaagtggctaccacaaaccaatttggtggaatcagtaatgctaactgggtctgtcctcagctaattaagacatagggtcactttccctttatgtttttccattaggcgt

SEQ ID NO: 442557 - DNA, 642 bp, Homo sapiens
caaatgttatatcttcacagttcatataacttctgttgtactatttttaaaaatgtactttattgatgcttttaattacctgttactctaagttgttttctttttcttgaagagataggcttactttatgctcttttgagaaacttaaaaataacccaagttagataagttacacttcaattgcctgttgttccttaaagtaaaaacttcatgaaaatgctgctacttcagcctacaattcaaacaatcacacaagttcttctcctgacacagaagtgctatatgcagaattctcatttttatacaacaaaccttaaaacaatgtttactcagggaccaggaataaakgaaattaaataaataataattattaatatttttctgtttaataaattttcaccaaaagtacccttaaaggaaattagtatttttctcctggaactgcttaggggtaaggaattcaatgactgccatggctgtttggtttcattgccttggtacttggtaagctgctggtagttttactcaccactgtttttgcacccatcatagtgaaaacaaaaatattgtcttagtagtacaaggaaaattgttttcaccatgcacccctggaagtgcccagctgacaagcagggatttgct

SEQ ID NO: 442558 - DNA, 642 bp, Homo sapiens
caaatgttatatcttcacagttcatataacttctgttgtactatttttaaaaatgtactttattgatgcttttaattacctgttactctaagttgttttctttttcttgaagagataggcttactttatgctcttttgagaaacttaaaaataacccaagttagataagttacacttcaattgcctgttgttccttaaagtaaaaacttcatgaaaatgctgctacttcagcctacaattcaaacaatcacacaagttcttctcctgacacagaagtgctatatgcagaattctcatttttatacaacaaaccttaaaacaatgtttactcagggaccaggaataaatgaaattaaataaataataattattaatatttttctgtttaataaattttcaccaaaagtacccttaaaggaaattagtatttttctcctggaactgcttaggggtaaggaattcaatgactgscatggctgtttggtttcattgccttggtacttggtaagctgctggtagttttactcaccactgtttttgcacccatcatagtgaaaacaaaaatattgtcttagtagtacaaggaaaattgttttcaccatgcacccctggaagtgcccagctgacaagcagggatttgct

SEQ ID NO: 442559 - DNA, 575 bp, Homo sapiens
catatcaaagcttgcttccctaattttcttttcccgataagactcagacttatttttgataaagcatgctgaccaaatactgagactataatagggccatattatctcagtcatcgggaaggaaaaatcctttcagaagtataatgagacagtatttcttatttcctgtctagctccatttttaaagaaacttgttctcactgtattgttacaatataaagctttatgatgtaaaattttgcactgaaccctctaggtctgtaaaatatcttctattgtaagactccaacatctatagaaatatggatagttaaaagctatgtctattaactttaaatgacacarttgcatctttttttaacatatcaacaatggtaaacaaatgcaaataggcagaatatgcctattttatataaactgaaatatatctaaaaactattctaactaaacttaatcctctagttatactcaagcatacagaataaatataccctttaatgaagtggctattaaaaactggatgtaggatgtcatcatcttattataagtgatttcagtactgctcatccattagc

SEQ ID NO: 442560 - DNA, 537 bp, Homo sapiens
agtgaattggtaccacacaacgtggggtgatactctaaagatacaygaaaatgtggaaacaactttgaaactaggtaataggtcaaggtcggaacagtttggagggatcagaaaaggacaaaaaaaaattggaaaagtttggaatttcctagagagttgcagggctcagaagatgtgggaaagtttggaacttcctggagacttattgaatggtttgaccaaaatggtgacagtgacatggacaaagaagtctaggctgaggtggcctcagatggagatgagaaacttcttgagtactggagcaaaagtgactcttgctatgctttagcatagagactggtggcattttgaccctgccctagagatctttgaaacttcaaatttgagagagatgatttagggtatctggtagaagaaatttctaagtagcaaagtggaagagaaagcagagcataaaagtttggaagttttgcagcctgacagtgtgatagaaaagaaaaaacccattttctcagaagaaattcaagaaggctgtag

SEQ ID NO: 442561 - DNA, 633 bp, Homo sapiens
tctttctacttttctttcttctttcctctctctcttttcagtcttctaccaaaatgcagcttgcattttatttcttgaacatattaatgaaagttattttaagtccatgattgataactacattatattttcctctgtaggtctgctatggtttggatgtgatttgctcccaccaaagctaattttgaagttacatccccagtgtggcagtgttgcgagaggtggggcctagtggaaagttctgagtcttggggacagatccctcctgaatagatttatgccttcctgtgtgagtgaatactggctctaaagataatggattcgctcttgtgagastgagttgttatatattgagcttcctccttctgtctggttctttttcacatgtaacagttcaccctttcacattctgccattttattaagcagcacgaaagtcttcaccataagccagtgccgtggccatgaacttcccattcaccagaaatgtgagctaaataagcctcttgtatttataaattacctagtttcaggtattctgttacagtaatacagaacagacttagacagagtctatgtattttctgttgtttctttggttttacatcattttttgttttgtttatttatatgg

SEQ ID NO: 442562 - DNA, 568 bp, Homo sapiens
tgagtaaaagaatttaaaattgccctgtcattatggcttatctttctttaccaccacatccamaataaaatcttgtatctcaataaaatgactactccaattaagggagctgttcactaacagaaaatggattaattgccagcctttaggactttttaaaaaaaacctattacatttgctttataagtaattattatttcaagtagtaatggagaatgataatgtagaggacagaaagtttttacaaaaattaaggaggtcttcaaataccaatcctaattcaaaatgaattatattctgagagaatgtgacaaaccatgtgtttgaaatttaatcaatatttatgtctttaataaaggctgatgtttgctttgaagcattaagatagtaatctaatataatgaatacaaatagcaatgaggtacctagatttggggggtaaaaaaagaaaaaaaacatagattttctaaagaaaaataaaaactattccagttattgggtcatgatcatatttgtgtatctcatttagtaaagaaagttattagcgttatactgaaatcagcatgtt

SEQ ID NO: 442563 - DNA, 578 bp, Homo sapiens
cagagcaatcagacaagagaaagaaataaagggcatccaaatcagtaaaaagaaagtcacactgctgctatttgctgatgatataatcgtacacctaaaaaacactaaagactcctccaaaaagcttctagaactgataaatgaattcagcaaactttcaggatacaaaattaatgtacacaaatcagtagctctgctatacaccaacagcgaccaagctgagaaccaaatcaagaacttaaccccttttgcaatagctgtaaaaawataaaataatatacttaggaatatacctaaccaaggaggtgaaagacctctacaaggaaaactacaaaacactgctgaaagaaaccgtagatgacacaaacaaatagaaacacattccatgatcatggatggatagaatcaatattgtgtaaataaacttactgccaaaagcaatctacaaattcaattcaattcccatcaaaataccaccactgttctccacagaactagataaatcaatctgaaaattcatatggaaccataaaaaaaagcctgcatagacaaagcaagactgatcaaaaagaacaaaa

SEQ ID NO: 442564 - DNA, 578 bp, Homo sapiens
cagagcaatcagacaagagaaagaaataaagggcatccaaatcagtaaaaagaaagtcacactgctgctatttgctgatgatataatcgtacacctaaaaaacactaaagactcctccaaaaagcttctagaactgataaatgaattcagcaaactttcaggatacaaaattaatgtacacaaatcagtagctctgctatacaccaacagcgaccaagctgagaaccaaatcaagaacttaaccccttttgcaatagctgtaaaaaaataaaataatatacttaggaatatacctaamcaaggaggtgaaagacctctacaaggaaaactacaaaacactgctgaaagaaaccgtagatgacacaaacaaatagaaacacattccatgatcatggatggatagaatcaatattgtgtaaataaacttactgccaaaagcaatctacaaattcaattcaattcccatcaaaataccaccactgttctccacagaactagataaatcaatctgaaaattcatatggaaccataaaaaaaagcctgcatagacaaagcaagactgatcaaaaagaacaaaa

SEQ ID NO: 442565 - DNA, 578 bp, Homo sapiens
cagagcaatcagacaagagaaagaaataaagggcatccaaatcagtaaaaagaaagtcacactgctgctatttgctgatgatataatcgtacacctaaaaaacactaaagactcctccaaaaagcttctagaactgataaatgaattcagcaaactttcaggatacaaaattaatgtacacaaatcagtagctctgctatacaccaacagcgaccaagctgagaaccaaatcaagaacttaaccccttttgcaatagctgtaaaaaaataaaataatatacttaggaatatacctaaccaaggaggtgaaagacctctacaaggaaaactacaaaacactgctgaaagaaaccgtagatgacacaaacaaatagaaacacattccatgatcatggatggatagaatcaatattgtgtaartaaacttactgccaaaagcaatctacaaattcaattcaattcccatcaaaataccaccactgttctccacagaactagataaatcaatctgaaaattcatatggaaccataaaaaaaagcctgcatagacaaagcaagactgatcaaaaagaacaaaa

SEQ ID NO: 442566 - DNA, 578 bp, Homo sapiens
cagagcaatcagacaagagaaagaaataaagggcatccaaatcagtaaaaagaaagtcacactgctgctatttgctgatgatataatcgtacacctaaaaaacactaaagactcctccaaaaagcttctagaactgataaatgaattcagcaaactttcaggatacaaaattaatgtacacaaatcagtagctctgctatacaccaacagcgaccaagctgagaaccaaatcaagaacttaaccccttttgcaatagctgtaaaaaaataaaataatatacttaggaatatacctaaccaaggaggtgaaagacctctacaaggaaaactacaaaacactgctgaaagaaaccgtagatgacacaaacaaatagaaacacattccatgatcatggatggatagaatcaatattgtgtaaatraacttactgccaaaagcaatctacaaattcaattcaattcccatcaaaataccaccactgttctccacagaactagataaatcaatctgaaaattcatatggaaccataaaaaaaagcctgcatagacaaagcaagactgatcaaaaagaacaaaa

SEQ ID NO: 442567 - DNA, 594 bp, Homo sapiens
tacaatgaattatcactagctgcttttgagtcacaattgcattttgtaatgttaacagatacctgaccaaatgccgaaatgaaaaaaattagaatgaagaggctgttatgctgaaatcttgctttatcttgatttgatttacaatgcacacaatgtgccaagataaatttattttgaatcttccccaattgcaaatccttctatatattttctttctctgaaacaatgtggcatgagtatcaatagcccacaaaaagattttgaaaagatttatgaataggcaggattttttaaaaaaatttatccttcaagtgtactattgatgaataactcagatagaatatagtagtacctcaggatacatttagtcttgacaacaatttttgaagtggaaatgttattttcaatgtatagatgaggaatcttttgttcagaaaggcttaaataattcacataaaagyagtaaaatatgtgtttttggatacaatataagtattcagtatatatcatatattaatctctattctttccaatcagctcctcaggtgggagtttctatttagttctatcatgtgttttcagaaagaatagttg

SEQ ID NO: 442568 - DNA, 617 bp, Homo sapiens
ttagttatactaagcagaagccattgttttgggcatttatctatttttggactatattttttagagctattttttttcccagaaatctcaagrcaacttcagccatgtcttatttttctctcaaattaaaactattgaacacatacagactgaaaatgacactaggatataacctataataagtgaagcaatttggtttaagtataaaagctttttgcagcttttggaagttaagaagttgtattctgaaattcaatgaaacaaaaaattagaagactgtaacttcacggtactataacacttataactcactggcaagcttgctgaagtttcaggggttgcaaggaaggggcaagacagcagtggtgaggtcgaggaagaagctggaaggaactaacctgactgtggacctcttaaagagaaccagatattgcaaaactcactgggggtaatattttgacacatgaggagatgattttttggttatcaagatttcttattattccatgactcttcacacctcagccctcagtgagggcattgtggtttactggctctaagaaggaatgatgcagcaagaaaaaagcattcagtgtgtggcaggtataacagaattg

SEQ ID NO: 442569 - DNA, 610 bp, Homo sapiens
catttggaaaccaaggcacatcaaaaatttaatatatgttatatatccagttccaacatttggaagccctaataaagtaggatttatacatctaaaacttgtctttgtagtaaatcctggcatttgtgacaataagaataaacttggaagacatactaaacgaaataaaccaaacacagaaagacaaatactgcatgatgtcatttttatgtggaatctaaaatagtccaactcagaaacagtagaatcgtggttacmaggggctgaggcttaagggaaagggaagaggttggtcaaacagtataaactatcagttatgccaaatgaataaattctggcgatcgaatgtacagcatgatacatttacattattaaccatagttaatatatagcttaaatttgctgaaaatatatcttaaatactctcaccacacaaacatacacacacacagacacacacacacacacaataactatctggggataaatgtgctaattagcttgattgcagtaattatttcaaatgtacatgcatatcaaattaccacattgtataccttaaatagatataattttaatttgtcaaccatacctcagtaaagctggaaaa

SEQ ID NO: 442570 - DNA, 610 bp, Homo sapiens
catttggaaaccaaggcacatcaaaaatttaatatatgttatatatccagttccaacatttggaagccctaataaagtaggatttatacatctaaaacttgtctttgtagtaaatcctggcatttgtgacaataagaataaacttggaagacatactaaacgaaataaaccaaacacagaaagacaaatactgcatgatgtcatttttatgtggaatctaaaatagtccaactcagaaacagtagaatcgtggttaccaggggctgaggcttaagggaaagggaagaggttggtcaaacagtataaactatcagttatgccaaatgaataaattctggmgatcgaatgtacagcatgatacatttacattattaaccatagttaatatatagcttaaatttgctgaaaatatatcttaaatactctcaccacacaaacatacacacacacagacacacacacacacacaataactatctggggataaatgtgctaattagcttgattgcagtaattatttcaaatgtacatgcatatcaaattaccacattgtataccttaaatagatataattttaatttgtcaaccatacctcagtaaagctggaaaa

SEQ ID NO: 442571 - DNA, 592 bp, Homo sapiens
aaaatatgcctataacaaatgtgaaaatataaatttagttacaattaaaattctttactaaatctgtgaaaatataacatcttgccttaatacattctattcaaaatatcaaatattaattaaacatttttctaaatcagcattgtcaaactggctgcacatatgacttacatggggagttaatttttttaaaaggccccaggacttcayccccagagattctgatcaaataggttgggccagagcctagggcatcactatagttcatatgattctaatgcacagccagggtcaagacctgctgttctaaatgtacataatgtctaacaagaaatgactgtcactggactcaactgactgcttgaaaaattttctgagtcaggtcaagacagctgcaatgtaagcctggtaaagtcacttatttctctagacctagcttctgatctataatcctgggataaaaattcccatctccagtgtctgagtggctccacaggtagtcactggaccactcttcactcaggaaggagctaataaaggtcagataccagtagaaatgtctgaacaactatcagttctaaagaagagagtt

SEQ ID NO: 442572 - DNA, 584 bp, Homo sapiens
aaggaggttgagtggaagaaattatgcagaagaaacaagaaggtcttaggccagaaccaccacaggtgcactaaaaaacactagaaatttacaaaacactcccctgccccacatcttgccacacaccaacaagtttcattatcataatagtgaattacagmtaaaagaccttcaaagcacagactctgtctgaagagaaatacttaaggcagcccaaagacaacaggggagacaaaaacaaagacattagaggaatatgcaccctctgacacctatagccaaggtaaacattaagtaaagcccaactcctaactaaatcaacacaaattctaacaatagaggcttattcacctgagcacctattacccgaaacatgtatgacatttaacaagaaactataaggcacactagaggcaaagagaaaacacagactaaacagtgaaaagcagtcatgaaaaatagggtcagatgagacacagatattaaaattatcagacagactttcaaaatatttaaaataggattaatatattaaaatctctgacaaaaaagtagacaaaatataagaaaatatgtaaaatata

SEQ ID NO: 442573 - DNA, 596 bp, Homo sapiens
ttcatgcaattcactgtttcactgagttctgagttctaattaaaacaattaaataaaatgatgtaagacaataactcttaaatggaggaggaaaccttgtctgttttctaaatctcagagtcatgtctcaacattattctactttaaaaggtgccacacgttaaattagaatcctaatattctcagtgagggaaatagagatgagaattagattatttttaaaattttaaatatctgtttagtttactgcatagctactgataactacattttgctaatcttgaagagtaaaaataacctctttttttycaaaaagataaacaccgaacatgcttaaaataatagaaatttctgaaaatacaatcatcatcagaatttatcttgacaaattctgctgtatatagcatggggactataattaatgacaatatgttatattcttgaaaatgtaaagagagtagatagtaagtactctcaccacaaaaatgataactatgttaggtaatacatttgttaattaggtagattgaatcatttcacaatgtatatatacttcaaaccatatgttgtacatgataaatatattcaattttatt

SEQ ID NO: 442574 - DNA, 603 bp, Homo sapiens
aataaaatcatttttacgtgatttaaaaagtagaagcacaggaaaatatgggttattctaaataataatgtattgtatattttaagatagtgagaagagatttttgcatgttgataccacaataaaggataaatgtttaaaatgatgaatatgataattatcctgatttgatttttatactatgtgtacatgcatcratatatcacactatagcacataaatatgtataattactaggtaccaaatataaacttaaaaataaataagtaaatatgataaaacttgtagtgatattagtagacaagattatggcaactaaagcatttgctagtgtaaactgaaatacaaggaggtaccacgagtaatatgattcacagtgttctttgaaaacacagctatgaaaagtattgaagcttaaaagaaaattctcctgtgggtccacaatacggtgatgaattattgtcctcaacaattttacagaaattccaacatatatattacattttttaattttaaaaaatcaatgttacttgtataagaaaaaatgaattaaatccaaaatacaaattacactattataaacaatcactttaaaattaaatg

SEQ ID NO: 442575 - DNA, 487 bp, Homo sapiens
tttggtatgcagctattgcacagtgggggaaatatgagtcaaaagacttgctcttatattccatcttccccctcattgcctgggtgtctttggaccagttaatctttgagcctcagttatctagaaaatggggacactgctactttatatatttttttttagtgggacctagataaggtaatataaataaaggggctttatttatatattgaatggcatgatgttaggattacyaaaaggaaatagctattctacttacattacaatgtggtttgaggatcaaattcaataaaatatgtgaagagggctttgaaaactagaaagagctaagcaatgcaaaatgcgtcgctgcacttgaatgtaatggctggtgtcatgtcagctggattaactgtggtcactagttctcatatatccatttgctagagtagctgagtcctctggactacgaaaaagggcacagaagctacagatacgagatctggta

SEQ ID NO: 442576 - DNA, 578 bp, Homo sapiens
ccttttattcaagtttttattactgtctgttaggagtgttttgatattttccatgtataggttttcatacctcaagttaaatttattcataagtacttactatattttgatgctatttaaatggtgttttttytaccattatgtcctgtttattgtttgcttatatgaagttattgatttttatgttgattttacatccttcttcagtaaattattttattttttgaattggctttattattgattctctgggattttccacatatattatatcatctgcaaatatagaattttaccactcatttagtcactcttctgcctttcattgatttctcatatctaattgcactggctaatatctctaacagtatcagagatagtagaaatttatgtattgcttctgatgttgatagaaacatctctattgtttctccattaaataagataatgacttcaggactatgaaaccccaaaatttgagacaggtatcagttaatttagaaagtttattttgccaagattgaggatgtgcacctgtgacacagcctcaggaagtcctgatgacatgtgcccaaggt

SEQ ID NO: 442577 - DNA, 578 bp, Homo sapiens
ccttttattcaagtttttattactgtctgttaggagtgttttgatattttccatgtataggttttcatacctcaagttaaatttattcataagtacttactatattttgatgctatttaaatggtgttttttttaccattatgtccygtttattgtttgcttatatgaagttattgatttttatgttgattttacatccttcttcagtaaattattttattttttgaattggctttattattgattctctgggattttccacatatattatatcatctgcaaatatagaattttaccactcatttagtcactcttctgcctttcattgatttctcatatctaattgcactggctaatatctctaacagtatcagagatagtagaaatttatgtattgcttctgatgttgatagaaacatctctattgtttctccattaaataagataatgacttcaggactatgaaaccccaaaatttgagacaggtatcagttaatttagaaagtttattttgccaagattgaggatgtgcacctgtgacacagcctcaggaagtcctgatgacatgtgcccaaggt

SEQ ID NO: 442578 - DNA, 578 bp, Homo sapiens
ccttttattcaagtttttattactgtctgttaggagtgttttgatattttccatgtataggttttcatacctcaagttaaatttattcataagtacttactatattttgatgctatttaaatggtgttttttttaccattatgtcctgtttattgtttgcttatatgaagttattgatttttatgttgattttacatccttcttcagtaaattattttattttttgaattggctttattattgattctctgggattttccacatatattatatcatctgcaaatatagaattttaccactcatttagtcactcttctgcctttcattgatttctcatatctaattgcactggctaatatctctaacagtakcagagatagtagaaatttatgtattgcttctgatgttgatagaaacatctctattgtttctccattaaataagataatgacttcaggactatgaaaccccaaaatttgagacaggtatcagttaatttagaaagtttattttgccaagattgaggatgtgcacctgtgacacagcctcaggaagtcctgatgacatgtgcccaaggt

SEQ ID NO: 442579 - DNA, 578 bp, Homo sapiens
ccttttattcaagtttttattactgtctgttaggagtgttttgatattttccatgtataggttttcatacctcaagttaaatttattcataagtacttactatattttgatgctatttaaatggtgttttttttaccattatgtcctgtttattgtttgcttatatgaagttattgatttttatgttgattttacatccttcttcagtaaattattttattttttgaattggctttattattgattctctgggattttccacatatattatatcatctgcaaatatagaattttaccactcatttagtcactcttctgcctttcattgatttctcatatctaattgcactggctaatatctctaacagtatcagagatagtagaaatttatgtattgcttctgatgttgatagaaacatctctattgtttctccattaaataagataatgacttcaggactatgaamccccaaaatttgagacaggtatcagttaatttagaaagtttattttgccaagattgaggatgtgcacctgtgacacagcctcaggaagtcctgatgacatgtgcccaaggt

SEQ ID NO: 442580 - DNA, 597 bp, Homo sapiens
ataccctattgtcttaaaattagtagcctgcttgcacttattaacactgtctagcccaattcagaaggcatctgtggttgcaacaatcatccctgtgatttggactgacaagctcttcgagattaattacactgagtcctctcctaaagaaggtagaaacttgtctttgtacttctttttgccatcacctattagcactgtgctttctataatagatgcttactaaatatttgtgaatacaaatttaaattcagtttatcaaatctgtatcaagtatttataacgttctaggcactgtgctaatggttagggttacaataaggaggtagttcctgtcctcttggacactatgctacaggtggacaataatgatgatgagagccagccatcttaaaaatagcagtgtcttcmatttttataggtttttgtttctaaacatatattagcccatttattgctatgatgtttggcatacatttacttttgaaaactagtggctattttttagtttattccaaatggaacaagttggaagagattattggttaaccacaagattttgaggtttgatttcacggggtagtaaatgatgaatta

SEQ ID NO: 442581 - DNA, 574 bp, Homo sapiens
gtaatctctgagccattgaagttttctttatctttgaagataaagcaaattgatatgtagcactccattgcatctttaaagaaaacctcagtggcccagagagatggcatatttcttagaaaatataaggaaaggcttttgtttggaacctttctacacatcaaatgaatagcttttccataaaatagatagtagtaagaatacaggggctcttctgggttttgatctgcaggatggtgtgggacaggggtaggggtgtagtggctccatcacaatttgcttggaagaatgaaagtggttggcttaggcttcactactccagcttgagtccacattcttagrggatgagctaaaggctgcattctggatctttctgtgtaagaagtggagaaatccgctgccaagtatgggagcactggagccttaaaatggaatccaaatactggttgtggatttggaacagtgccttatatggcatcattgttcagagccacttcaaggagttagggtatcattgtggcattgcctacaatgccacaatcaagggctgtctgagattcaggagatgaagcaa

SEQ ID NO: 442582 - DNA, 542 bp, Homo sapiens
ttttactttcatatttctttttttaacttttattttaggttctgaggtatgtgtgaaggtttgttacacaggtaaacccatgtcacaggggttcgttgtacagatcatttcatcacccaggaatgaagctcagtacccgatggatatttttgctgctcctctccgccctcccgccctccatcttcaagtggaccccagtgtctgttgtttccttctttgttaaactgttaaagtgtaatgttttcatactcttgtgtgaaatagatacatacatatrtgtgtatttgcagcagtcccctcttctccatgtttttgctttgcacggtttcagttacccatgctcagccacggtctgaagatattaagatattttctgagaaaaatagcgagagagaaagaaatcacattaaaataacttttattacggtatatttttataattgttctatttttagttttttaaaataacttactgtgcctaatttataaatttaatttatcataggtatgtatatgtaagaagaaatatagaatgtgtagag

SEQ ID NO: 442583 - DNA, 542 bp, Homo sapiens
ttttactttcatatttctttttttaacttttattttaggttctgaggtatgtgtgaaggtttgttacacaggtaaacccatgtcacaggggttcgttgtacagatcatttcatcacccaggaatgaagctcagtacccgatggatatttttgctgctcctctccgccctcccgccctccatcttcaagtggaccccagtgtctgttgtttccttctttgttaaactgttaaagtgtaatgttttcatactcttgtgtgaaatagatacatacatatatgtgtatttgcagcagtcccctcttctccatgtttttgctttgcacggtttcagttacccatgctcagccacggtctgaagatattaagatattttctgagaaaaatagcgagagagaaagaaatcacattaaaataacttttattacrgtatatttttataattgttctatttttagttttttaaaataacttactgtgcctaatttataaatttaatttatcataggtatgtatatgtaagaagaaatatagaatgtgtagag

SEQ ID NO: 442584 - DNA, 638 bp, Homo sapiens
tagtatcagataactctaatagtaaacttgtttgttgtaagctccctcttctaacaacaattttccttaaagaaggcacaactcaaggttttacactttaagaatttccagatgtgtttcttgaaaagaaaatggtacatgtctttgtcatcctgtctttcttctgggagaaagaagtccatgaaaatttgctatgagttagctcatatttgagcacgtttttatttcatgcccttacccttaatgcaacaagaccattggagttatatgctgagtgaatgtcctgatgaggccttagacgtggctttggatttctctrcttatagcataggcaataaaatccagtggccattcatgtacacctctgtacaaattaagggtaagaattgcttcataatttctaatcagtacatcaattaacatttcctgaatactgactatgtgtgtgagaggataaaacaagaataacaacaataaaaagataatatatgtcctatgcactcttgtactttgcagcagaaggaaaatgttatctaatgagctatgctaataaactggcaataattagaatatttgtattcatgtgctagattcagagaaactcaaataagacataaaatgtaggacagctcacacaa

SEQ ID NO: 442585 - DNA, 541 bp, Homo sapiens
actccctgggtgatgggttcagtcacaccccaaacctcatcttcatgcaatatacctccataacaaacttgccttgaacatatacccactgattgtgaaataaaagttgaaaaagaaaaaataaattttagaaagagagaggagaatgttggtttctgaggactggggaaagagggaaatggagagttgctgttcaataggtatgaagtttgagttatgcaagatgaataaattctagagctctcagtgcaacattgtacccacagttgatagtgctgtgctgtgcccttaatattttctgagaaggtagatctcatgttaagtgttcttaacacagtaacaagatactttgattcattggctaaataaaaatacattttatagtcaggtaatattacaataaaatgtgttcacagtaggaaaatcaccttgttaatgargaaaagttattcaattagcaagagacactctccatctctagataagcattttgtataagttgtattaaaagaaaggataaaaaatagtctggataatccag

SEQ ID NO: 442586 - DNA, 505 bp, Homo sapiens
ggtcacaatcctactgaaactacaccaaaaactcaatgaggagggactcctccctaactcattctatgaagccaacatcagcctaataccaaaatctggcagaaacatgacagaaaaagaaaacctcaggccgatatccctggtgaacatagatgcaaaaatcctcaacaaaatactattcaatcaaatccagcagcacatcaaacaggtaatctatcatatcaagtaggctttttcaaggttggtttaacacatgcaaatcaataaatgtgattcaccacagaaacagrattaaaagcaaaaaacatatgatcatctcaatagatgtagaaaagtcttgtgataaaatccaaggtaccttcatgataacaaccctgaaaataataaaagccatctgtgaaaaacccatagccaaaattatactgaacaggtgaaagctgaaattatttgacttgagaactggaaaaaggcaaggatgtccactctcagcattcctaccgaatat

SEQ ID NO: 442587 - DNA, 657 bp, Homo sapiens
attttctcacttgaagacttagagggtgctgtaagattacaaattggcccaattttaatattgttcatctcaggaaatagaaaggctcaagaagtgggagagaggtgggggaatggctggccagcagagcagtgagaacacacaccacatttattgatgaagttcacagtcatatgggtggaggtttgcagctccccaaacaatcacaacaatgccaccaaagatcagtgatcacagaacatgataaaaatatcataataatgaaaaagtttgaaatattatgagaattaccaaaatgtgacasaaaatcatgaagtgagcacataatgtgggaaaaatagttccaatagatttgccaaacaccaggttgccacaaaccttcactttgtaaaaaacacagtatctgcaaagttcaataaagcaaagtacaataaaacaaggtattccagttgatcagaaagggacattgaaaacatttttaagatagtagttttagttttagtattgacatccttaatgcttatatattacatattagcaataattttttaaatgggaggtatttatttataattataagcaggatcctggcatatgaatacctaagtcatgatcattacttatatgattaacaaaaacagagtcttattagaccgt

SEQ ID NO: 442588 - DNA, 615 bp, Homo sapiens
gttgtctaaattgataacatgttttcattttttttatgagacggaacctcgttctgtcgcccaggctggagtgcagtggcacgaccttggctcactgcagcctccgcctcccaagttaaagccattctccttcctcagccttcagagtagctagaattagaggcgcccgccaccacacccagctaattttttatttttagtagagatggggtttcaccatgttggccaggctggtctccagctcctgacctcaggtgatccgcttgcctaggcttcccaaagtgctgggattacaagcgtgagccacagtcccgggccagataacattctttttaaagtacatctgagtactcagtcatctaatcacatttatgatcatttaaaaatatacattcaccaytgacagtatttacaggaaagaactcttctctatgtaaataagcaatgctatttaacactgatttctgtacaacaaatgggtagaataacaataaaagtcaatgaaataacattgtgatttacattaggtgccgacattttactaatttgaggtcctgtgaaagttttgattatttaaaagatatcacagtccaaaaacagagaactgtaaagttc

SEQ ID NO: 442589 - DNA, 574 bp, Homo sapiens
aacatttcataattgctcaaacctgaataaccagcattaaggataggggttgggacatagcagacattcattatgtatgtgataaatgaatgaaatcagtacaatcacatcgcaatgaaattaaacaaaaatgcttgcaggaagatagtaacacatatatgaatttatttttyggtatcttcaaatagttaaaatttctcttttattaaattcacagaaatgatcaaaataaggaataatcttggaaataatttttatgttacttttgtactcttactttttatattatggtgataattatcatctccattattttgaatcttaaatatttgataataaataataaattgttactgtaagattctctttttaaaaaattttatgttaatttttgtggttacacactaggtacatatatttatggggtacaggacatgttttcatagaggcatgcaatgcgtaataatcacatcatgtaaaatggggtatccatcccctcaagaatttatcctttgtgttataaacaattcaatgataatgttttagttattttaaaatgtacaattaaattact

SEQ ID NO: 442590 - DNA, 574 bp, Homo sapiens
aacatttcataattgctcaaacctgaataaccagcattaaggataggggttgggacatagcagacattcattatgtatgtgataaatgaatgaaatcagtacaatcacatcgcaatgaaattaaacaaaaatgcttgcaggaagatagtaacacatatatgaatttattttttkgtatcttcaaatagttaaaatttctcttttattaaattcacagaaatgatcaaaataaggaataatcttggaaataatttttatgttacttttgtactcttactttttatattatggtgataattatcatctccattattttgaatcttaaatatttgataataaataataaattgttactgtaagattctctttttaaaaaattttatgttaatttttgtggttacacactaggtacatatatttatggggtacaggacatgttttcatagaggcatgcaatgcgtaataatcacatcatgtaaaatggggtatccatcccctcaagaatttatcctttgtgttataaacaattcaatgataatgttttagttattttaaaatgtacaattaaattact

SEQ ID NO: 442591 - DNA, 501 bp, Homo sapiens
aagtctctgctcccataagattataatggaactgaaaaatttctattgcctggtgacattgtagctgcattaggtcatagtgcaacacattactcctgtgtttgtggtgataatgatgtaaatgaacctactgtgccaccagtcttataaaggtatagcacatacaattatgtgcagtatgtaatatttaataatgataacaactatgttactggtttatgtatttattatactgtacattttattgttattttgagtgtactctttctacttatagatgttaactrtaaaacctccccaggcatgtccttcaagaggtattccagaagtcattgttgtcatagagatgactactccatgcgtggtattgcctctggagatgcagaggtagaagacagggatttttttttttgttttttttaaatagtaaatgaaatttcttggaagttcaaaaaaagatctttcaaatcttttcatcacaatagagtggaaatccgtcag

SEQ ID NO: 442592 - DNA, 501 bp, Homo sapiens
aagtctctgctcccataagattataatggaactgaaaaatttctattgcctggtgacattgtagctgcattaggtcatagtgcaacacattactcctgtgtttgtggtgataatgatgtaaatgaacctactgtgccaccagtcttataaaggtatagcacatacaattatgtgcagtatgtaatatttaataatgataacaactatgttactggtttatgtatttattatactgtacattttattgttattttgagtgtactctttctacttatagatgttaactataaaacctccccaggcatgtccttcaagaggtattccagaagtcattgttgtcatagagatgactactccatgcgtggtattgcctctggagatgcagargtagaagacagggatttttttttttgttttttttaaatagtaaatgaaatttcttggaagttcaaaaaaagatctttcaaatcttttcatcacaatagagtggaaatccgtcag

SEQ ID NO: 442593 - DNA, 486 bp, Homo sapiens
taatttcacagtgttcccttgaaagtcgcttgactagttaagtagagagctgtgcggttaccaaaggcaagtcagtgcagctcatcctgtcttttaagtagtcttttccatctctgaacaagactaaactatgaacayttttacgctctattagggagatggatcgcttcagacaaatggcagcaccttacttccctgagcgccccaggctccgattcagaaattaaaaggcaggcacttcctctcacccgaacttccctgaggaatggcagctgtgtgtctgccaggcgcaggggccaatcgggactctgccggccgcctccacccacgacttaaacaccatctcaccaattgcaaccggatcgtgggtgggacttccgctatcattttaggcttaactaccaccatctcctcgcgggcagtgggggcaaccgcgaagacagaatttcacaaactttcagctccagcagtttcaaggaaatgtca

SEQ ID NO: 442594 - DNA, 552 bp, Homo sapiens
atagagcattttccctcacacgatgggtatcagggtggtttcttgtcctttcaatgcctctgcagaacttgaccctagtttttcaaattggactcaagaatgatcttagtgttggtggttttgtggttttctttgagactttgttattgacagaacagcttctggaaatctgaaaagaaaaaaaaaaaggtagtttatatattagtttggaatatgaaatgtattttgtcatggtctccagagtccraatattgatctctgtggagctctcctaccctctgctactgctgataactcatagtactggagagatagcagagcctgaagaccaaaaaactcaactgccgatacacggctgcagtgtggtcagttactgatctaccatttatgaagcaggcctacagatgtgtgtgttcttctgggtaatttaaattgacaattaattaacagggctggtgctaggtaaacattataggttagaatccctagtgtggattaatttgctctcttccatgatcgcagactccctgcttagctccagtctgctggtct

SEQ ID NO: 442595 - DNA, 603 bp, Homo sapiens
tttttattaaaaacaagacttgcaacttcttatatttctagcctgcaccacatttaaagtagtaacttctctgcttctccagattattccgttcctttgtcccctattagtgtgaggtagttaaaacaaaaacaaaatcaaaacaaagaatttggaataaaaatccttacctttgaaacccagctctatatcctggccaatccatttttctgcctgaaccttagttacctcatatgttaaatragggcaataagagtgctattatgccttttcatatcacttcttttggtgagatttagatcaaaaatcatggggccaagtgtgctgtaaactctgagatcctctatgtgagtcagtaataagtattattatttttaaactttatggtatatttcataccttcgactttggtgagcaccttccttttttaagtctttataccttttccaattttagaattttaatcaagcttctcaaaatttacttctccatgtagtgaaaatttgttttttagttaatcacacttgttatttaaggaagcaattctatctgactaattctttattcaacaaatatttatcatgcatataaaatgtgtaagtt

SEQ ID NO: 442596 - DNA, 603 bp, Homo sapiens
aataaaccttccatgtactcctactgttagttagcatgttgcaaattatggttgcgaatgaagtttacatacaatgttaactgcaccctgggtaattatgttacctttgttacttttttttttttgagagggaatctcactctgttgctaggctggagggcagtggtgggatctcggctcactgcaacctatgactccctggttcaagtgattctccggcctcagcctcccaaatagctggtattacagacacatgccaccatgcctggctaattttcatacttttagtagagatgaggtttcaccatgttggccaggatggtctcgatctcctgacctcgtgatccacccacctcaacctcccaaagtgctgggattacacgtgtgagccrccacacctggcctgttagttcttttttaatcttcaaaaatcactacagtgtatgaagatttggtactatgaaatatacaaaagatatcacatctagcatataataggtgttcaataaatgcctttcaggtgaacaaaaccaagaaagaggtttaccaaacctaatttagaaaaaatatcaaagaaactacacagagaaaaaataagagtat

SEQ ID NO: 442597 - DNA, 617 bp, Homo sapiens
cataaaagaataaccattagctcatggatctgcagttcagctgaggggactcttcttcatgcagcatctctgttggttacttggagtgcctgtgttccacttgggtttattctggagcccagggacagcagttgcatgaggaaaactctgctcctgaagaygacagaagctctaggggacaaaccccattgaaaaagcacattttaagcccctgattatgtcatgtttactgacatcccattggccaaatcaaatcacatggccaagttcaaagtcaagaggcagagagatgcatttgccttttgtgagagaaggtgcaaatatgtatggggaaggacacggctacaaaattaagaattgggggctacacttacaagatagtggttcagaaaagtatccagacacctgcttctgccccttcccagctatgctgtaactagatatggctatgaatgaactgagaaatggctcttccaattctgattttgctactaagtagctgtgggttatttaaaaagttaattcataacactttgtctgaaaaattggaataatgatgcttatccctggagtaagaccaactggattcagtcttttgatgattcattgatttaggg

SEQ ID NO: 442598 - DNA, 373 bp, Homo sapiens
aagcagctgggtaactatcatcaataataacttgactgtacattgtaaaataactcaaagaacataattgatttgtttgtgactcaatggataagtgcttgtggagatgaatacctcattctccatgatatgattattacacagtkcatgcctgtatcaaacacctcatgtaccccataaatataaacatctactatgtacccataaaatgtaaaattttttaaattttaaaagagaaaaaaaagaaagaactcaaaacagcatacagaataatagttacgtgaattgacactgactttttatcagatactgcaaaaaccagaagataaccagacagcatctttaaggtgatgaaaggaaaaacaacaaacaa

SEQ ID NO: 442599 - DNA, 373 bp, Homo sapiens
aagcagctgggtaactatcatcaataataacttgactgtacattgtaaaataactcaaagaacataattgatttgtttgtgactcaatggataagtgcttgtggagatgaatacctcattctccatgatatgattattacacagtgcatgcctgtatcaaacayctcatgtaccccataaatataaacatctactatgtacccataaaatgtaaaattttttaaattttaaaagagaaaaaaaagaaagaactcaaaacagcatacagaataatagttacgtgaattgacactgactttttatcagatactgcaaaaaccagaagataaccagacagcatctttaaggtgatgaaaggaaaaacaacaaacaa

SEQ ID NO: 442600 - DNA, 614 bp, Homo sapiens
ttgtcctagtgtaccggaaaaatgggatcacatgtaggcttagagcatgagtgcaacattttactgagtggtggaggtagctcccagtgagatggatgsggagccagaagggggatggagtgggaaggtgtttttcccctggagaggggctacccagcggctagactctcctctgactgcccgcagacgaattcccctcagagttcatgtcattctgccattgatggtctgccagtgtctgctagtgtctgttggtgtgttctgctcctctcgacagccgcttgtgtgtggtccactgtggttctgggtttttgtgggcacagtatggggggcgtggtagaccaaaagtcaactttttgggcttgaaaacagttatgcttgtccttatttaggtctgtgggcacaggccagaggtggaaccttcaccaaggacctcgcccttctctacccagtacttccctgccccactcccatatcattatgaccataaagagcttatcccatgaattcagtttggttttatattctctgaattgtcattttaaaatggttaattttatagtatgcaaatttcgcttcaacaaaaaatgcatgtaattcatcatattaacaca

SEQ ID NO: 442601 - DNA, 614 bp, Homo sapiens
ttgtcctagtgtaccggaaaaatgggatcacatgtaggcttagagcatgagtgcaacattttactgagtggtggaggtagctcccagtgagatggatgcggagccagaagggggatggagtgggaaggtgtttttcccctggagaggggctacccagcggctagactctcctctgactgcccgcagacgaattcccctcagagttcatgtcattctgccattgatggtctgccagtgtctgctagtgtctgttggtgtgttctgctcctctcgacagccgcttgtgtgtggtccactgtggttctgggtttttgtgggcacagtatggggggcgtggtagaccaaaagtcaactttttgggcttgaaaacagttatgcttgtccttatttaggtctgtgggcacaggccagaggtggaaccttcaccaaggacctcgcccttctctacccagtacttccctgccccactcccatatcattatgaccataaagagcttatcccatgaattcagtttkgttttatattctctgaattgtcattttaaaatggttaattttatagtatgcaaatttcgcttcaacaaaaaatgcatgtaattcatcatattaacaca

SEQ ID NO: 442602 - DNA, 465 bp, Homo sapiens
catttcattttggactttatgtgttctacacccttgcgttattagagttgaggaagctaatgtcaaatgtcactcctgacttccttctctaattattttaggacattctgtgtctctccggccatgccaggcatgttcccactttcaacccatccttcagcacttcaagggtctgagatccatttccaggattcatggacagaagattccygttggctcacagtgtagtcattggtcatgccattgtgtgtcgatcaccttccttgaaacataagattttccttatcacaaaacacatgaatacctttgaactgaaatggtttgtgaatttaatttgtcatttttttgcatcagaggctgtctttctggtgagatataggtgtgggagccaaaagaagttaaactcgccactgtgtgcattggagcaggtcatccttgaaaccgtgtagggtaaagagactagag

SEQ ID NO: 442603 - DNA, 465 bp, Homo sapiens
catttcattttggactttatgtgttctacacccttgcgttattagagttgaggaagctaatgtcaaatgtcactcctgacttccttctctaattattttaggacattctgtgtctctccggccatgccaggcatgttcccactttcaacccatccttcagcacttcaagggtctgagatccatttccaggattcatggacagaagattcctgttggctcacagtgtagtcattggtcatgccattgtgtgtcgatcaccttccttgaaacataagattttccttatcacaaaacacatgaatacctttgaactgaaatggtttgtgaatttaatttgtcatttttttgcatcagaggctgtctttctggtgagatayaggtgtgggagccaaaagaagttaaactcgccactgtgtgcattggagcaggtcatccttgaaaccgtgtagggtaaagagactagag

SEQ ID NO: 442604 - DNA, 543 bp, Homo sapiens
gaacatgtgtcagctgcagcctgccagggagcataccaggctgaggggcaaaaatgcaatggctactccctaaatgtaggatggaaaggaaaatgtacatacctttgctggtgagtgtgtgtggtgtgggggcttaaataagaacagggtttggggaaaaattagggtttcaccaataaatattcatcgatacctttgtgtttgtcaggataatatgctagttggtaaggatatagcaaagaagatagaattcatgttggagactggcactaatgtgatcacacaaatatcataaactgtgtttaatgaaggaaaaaattctatgaaggtatgaatgtgtayaagaagaagttctgatttagcttgagcagggagccattgcaggcaggaggcgggagcaaggcatgaggagaaagtgttccagtgtgttctaagcctattgtgcaaaataaggccagtgaggctgggggagagaggggaataacccagggatggagaggtgggtgagaatcaactcaggcagtgctctgtgggctacaatga

SEQ ID NO: 442605 - DNA, 516 bp, Homo sapiens
ggtaacactggcttcataaataagttgggatctattccctttctcctgattcttgaaagagtttgtcagtattggattaatttttcttcagatgcttggtagaattcaccaataaagtaatgtaggattgttttttattttaatgaaaagactttactttttaaaggatattagatttacagacaaactgaccagaaagttaaaagaatttccatayacaccctgcccccatacacccagagcctccccagatatcagcattccataccagatggtatatttgctacaactgataaagctacattgacacatcattattgcgtaagtccagtttacattagggttcactttttgtcttatatatttctataggtttcaacacatatatataaacttatttcttttcagtttgtaaatgttttattttattttcttatctttcattaactaggacaatcagtatgatattgaaaaggagttggggaagaggacattcttcccatgttcctaatctta

SEQ ID NO: 442606 - DNA, 516 bp, Homo sapiens
ggtaacactggcttcataaataagttgggatctattccctttctcctgattcttgaaagagtttgtcagtattggattaatttttcttcagatgcttggtagaattcaccaataaagtaatgtaggattgttttttattttaatgaaaagactttactttttaaaggatattagatttacagacaaactgaccagaaagttaaaagaatttccatacacaccctgcccccatacacccagagcctccccagatatcagcattccataccagatggtatatttgctacaactgataaagctacaytgacacatcattattgcgtaagtccagtttacattagggttcactttttgtcttatatatttctataggtttcaacacatatatataaacttatttcttttcagtttgtaaatgttttattttattttcttatctttcattaactaggacaatcagtatgatattgaaaaggagttggggaagaggacattcttcccatgttcctaatctta

SEQ ID NO: 442607 - DNA, 523 bp, Homo sapiens
  misc_feature (1)...(523): n = A,T,C or G
gggttggtgctctgcaaatgctttaaaggtgtggcacatgacattgagccagtgcatccaggtggagcntgggacagacataaaaccntaggttggtaaacacctgtcacaggaagcctcatcaaggaattcttggggagtggaacagtggagcaccctgcaatcctcacaggcagcagccatagtaagcaatgttcagcatttgctgtgcctcagagacacacacagcataaccctacttcagcagctcactgcagaaaatgaaccatatcccaccaaacgagcagtcaagtgcttgctaaaggacgttcccawagagtattgttctgagcccaaggtgtgggctgttgggttcaggtgtgagaaacagacagaggcagggcaaggctgttggtatatactgttccaggaacaaatctttcccaatttaaggcactttatattgcagccaataaactcttttagtagcatccggttttgcttcatgagtgacttctgaaataatgtgtgctatttttaatac

SEQ ID NO: 442608 - DNA, 572 bp, Homo sapiens
ctttgattatgtatcaatttatcaggaaagctcttcttaccctttctcactctaaatgatgatcctgtttcttattctggttcacactattttaacatcatcgttgtcctcttgacacttacctaaatttgtaattctgtatttatttaggcttatttrttgctctctctctctctccctccctattattgccaagcctcccaagaccaagaaacatgtttattcttctcatccctgaaatgtcagtccatagcacagtgcctggcaaagtagtgaacactgaggaagattttttttgttcgctttaaaaaaaaataaatgtataatcattgagtccaaacatcaggaataactgccataaagcgcagaatatgcatggtctttcccaaaggggctttggggaacttgtgcatttaagtaaatcagtgcttttgtcacccctctgggggaagagtcactttagaaccatgcaatgtccagagtgctacaaacagcatccaacttaacggtttcaaattctcttttagtcatgagcctgtttctcagccaaagctgtgtccaaaccccaacat

SEQ ID NO: 442609 - DNA, 572 bp, Homo sapiens
ctttgattatgtatcaatttatcaggaaagctcttcttaccctttctcactctaaatgatgatcctgtttcttattctggttcacactattttaacatcatcgttgtcctcttgacacttacctaaatttgtaattctgtatttatttaggcttatttgttgctctctctctctctccctccctattattgccaagcctcccaagaccaagaaacatgtttattcttctcatccctgaaatgtcagtccatagcacagtgcctggcaaagtagtgaacactgaggaagattttttttgttcgctttaaaaaaaaataaatgtataatcattgagtccaaacatcaggaataactgccataaagcgcagaatrtgcatggtctttcccaaaggggctttggggaacttgtgcatttaagtaaatcagtgcttttgtcacccctctgggggaagagtcactttagaaccatgcaatgtccagagtgctacaaacagcatccaacttaacggtttcaaattctcttttagtcatgagcctgtttctcagccaaagctgtgtccaaaccccaacat

SEQ ID NO: 442610 - DNA, 515 bp, Homo sapiens
tcatgcttgattttcaaaaggaacaatgtaagttactttaccatattcttcacttcaaggaaagtatgaattgcatgttatttttgtttcgcaaatggagaacttgaggttcaggcaagataaggaacctgtgcagaaccaaatagttcttatgcacttctaacaaactctttaaatagaartccaccaaaatctgctatcttctacctatgttatttaacttattttttctctttacacagaccccttgttccagctgataagtcacttacctattccttgagcacacagtgacatattcctttcctgctctggcatctatgctgttcttttgatctagggtgtgctgctcctctcctcatccagttcaaatcctacacatgcttcaactcaagctccacctgcactaggaaaccttccctggccctttcagaaggactactcaatggtgtattcaacaatctcaagtggtacacagcttccatgtactttgcctcatgctaggcagtggtcat

SEQ ID NO: 442611 - DNA, 552 bp, Homo sapiens
gtggcttctcatcatcacctcaactgctctactcttcaatttttgttcatttgtatttgctccaaggtacaacagcatgttagttttcccttgtgtatgcattgtaggtagtgggrttcaatctgatattgtctgatcaattcttttttattggctgatagaagaaccctttcactaacttcctaacttgaatttttacctccattcttaccccgcacacctatattatgtttcacccagctgcactatctttctgaaacaaagattccttttacgcattagctaaaaacctgtcatctactcaatttcttgaatgtgacatataaatgtccttgaaaactcttcctaaatggctcttccagctttgcttccttgaagtcacaccctaactgcacattcagcctcaactaccccatccctggcccatcctgggcagaccactgctctctggattcagtctctgcacctctgctaaggattgtttccttagaccatcataaccatcctcctgaagtttttctcatccaaatatcacccatccttcaagttctg

SEQ ID NO: 442612 - DNA, 552 bp, Homo sapiens
gtggcttctcatcatcacctcaactgctctactcttcaatttttgttcatttgtatttgctccaaggtacaacagcatgttagttttcccttgtgtatgcattgtaggtagtggggttcaatctgatattgtctgatcaattcttttttattggctgatagaagaaccctttcactaacttcctaacttgaatttttacctccattcttaccccgcacacctatattatgtttcacccagctgcactatctttctgaaacaaagattccttttacgcattagctaaaaacctgtcatctactcaatttcttraatgtgacatataaatgtccttgaaaactcttcctaaatggctcttccagctttgcttccttgaagtcacaccctaactgcacattcagcctcaactaccccatccctggcccatcctgggcagaccactgctctctggattcagtctctgcacctctgctaaggattgtttccttagaccatcataaccatcctcctgaagtttttctcatccaaatatcacccatccttcaagttctg

SEQ ID NO: 442613 - DNA, 652 bp, Homo sapiens
ttttctttgaaaaatgatgagcttatctgtgtccttcttttgctcagacctaccctaggttcggtaaatctttttcccagggcaagaatacacatccatcgttccccaaagcctcccgcttctggtaacaaatgcctgtcactagccaacaatgttgaatatctacaccacatcttcttgttcaaggatttcatcgagatctatttgagattaaggatcatactaaactttgatataacagctgatgtctggggagacagyccaattggcagaagaatcctccctttctctaaattattgaggttttctgcatttttatgttagataaacagaaagagaggaatagagggaacgacagaaagtaccctggatatctagaaccatttcttattcccagttcttacacaatcttgcaaatttgatcaaaacaactctctctctctctcagctagagagttgccactctaactcacatcctgctgtcatcacaaaggtggttctgtgcagcttaagcaaaaaaatatgtgtgaaagtgctttaaaaattttaaagtgccagcaaacttaaggttggtctcttctatattgggtttctgtgattcacttgaagtcttaggcctgatcctatgtaattctaccaaattttcacctct

SEQ ID NO: 442614 - DNA, 511 bp, Homo sapiens
gggcagcaattgctgacagtgttgaggaaaggatatcatttggctggggtgagtagttcagaatgaggtcaaggaggagctagggctatgatattgatgaaaaactttgaccaacttcgtgattctctagaattatccttgatgataaatcaatgtacataatggttgttatatttgcatacatttctctagcctctgcaattatatcttatataccaacacttgtagaaatacataaacacattaacaaaaagtcagaagacttggattctagcaccaacactgtcattaattctggtgaccatgagcaaacagctagaccgctttgggtctaaatttcttcacctataaaatgaagacatcaaagcagaaattctcaaatttctttctagtttaatatcatactcatatgaytctatatttgaatagcaaagaaggaaaattgcacaagaaaaaaaaatctacacctctgctagctgtaactttctagtgtaaaacctttttgctatag

SEQ ID NO: 442615 - DNA, 493 bp, Homo sapiens
taattctggtgaccatgagcaaacagctagaccgctttgggtctaaatttcttcacctataaaatgaagacatcaaagcagaaattctcaaatttctttctagtttaatatcatactcatatgactctatatttgaatagcaaagaaggaaaattgcmcaagaaaaaaaaatctacacctctgctagctgtaactttctagtgtaaaacctttttgctatagcacaaacacaattttttctttctggcaaaaaaaaaaaaaaaatcagtttttaaaatatgtcctaaatgttcattaggtttcaatgacaatattataaacgaatatctagtaacagtcttgtcacctattaatagcttataattttagacaggtggaattctgggatttatgcaaatgaaagataggatcctctgttatactttcttggtaaacctccaatatgctgacttaatagctacaatgtactggaaaaaaagagaagacactcata

SEQ ID NO: 442616 - DNA, 493 bp, Homo sapiens
taattctggtgaccatgagcaaacagctagaccgctttgggtctaaatttcttcacctataaaatgaagacatcaaagcagaaattctcaaatttctttctagtttaatatcatactcatatgactctatatttgaatagcaaagaaggaaaattgcacaagaaaaaaaaatctacacctctgctagctgtaactttctagtgtaaaacctttttgctatagcacaaacacaattttttytttctggcaaaaaaaaaaaaaaaatcagtttttaaaatatgtcctaaatgttcattaggtttcaatgacaatattataaacgaatatctagtaacagtcttgtcacctattaatagcttataattttagacaggtggaattctgggatttatgcaaatgaaagataggatcctctgttatactttcttggtaaacctccaatatgctgacttaatagctacaatgtactggaaaaaaagagaagacactcata

SEQ ID NO: 442617 - DNA, 493 bp, Homo sapiens
taattctggtgaccatgagcaaacagctagaccgctttgggtctaaatttcttcacctataaaatgaagacatcaaagcagaaattctcaaatttctttctagtttaatatcatactcatatgactctatatttgaatagcaaagaaggaaaattgcacaagaaaaaaaaatctacacctctgctagctgtaactttctagtgtaaaacctttttgctatagcacaaacacaattttttctttytggcaaaaaaaaaaaaaaaatcagtttttaaaatatgtcctaaatgttcattaggtttcaatgacaatattataaacgaatatctagtaacagtcttgtcacctattaatagcttataattttagacaggtggaattctgggatttatgcaaatgaaagataggatcctctgttatactttcttggtaaacctccaatatgctgacttaatagctacaatgtactggaaaaaaagagaagacactcata

SEQ ID NO: 442618 - DNA, 610 bp, Homo sapiens
ttctttctagtttaatatcatactcatatgactctatatttgaatagcaaagaaggaaaattgcacaagaaaaaaaaatctacacctctgctagctgtaactttctagtgtaaaacctttttgctatagcacaaacacaattttttctttctggcaaaaaaaaaaaaaaaatcagtttttaaaatatgtcctaaatgttcattaggtttcaatgacaatattataaacgaatatctagtaacagtcttgtcacctattaatagcttataattttagacaggtggaattctgggatttatgcaaatgaaagataggatcctctgttatactttcttggtaaacctccaatatgctgacttaatagctacaatgtactggaaaaaaagagaagacactcatatatattataagatataatgaattattattctaaaagtaggcttgttgcactcatttgcatataatgtttaatttttaccaaatgcttcattttaatacatgaaaaaatgatcacaaactataaaaatatgctaatgaactttctattgcaaatatattgttgcccrtgattctggaggtttattataaaaaaatgaaaattttcaatggt

SEQ ID NO: 442619 - DNA, 624 bp, Homo sapiens
cagcaatgtttttgagaagtatggatgtgaagaaaagcagagaaatttgtcaacagctggagggaaatatgttgctatctaattgttatggatatatctgctgtgttaccttgggcaagttaattaacctctctgtttagacaatataaaaggaaaataaggcgtatttgtcaactgctgagaagaccaaaatggagaaggagaggttgatgatgaagaacagaggttgaatgacaagtggaactggctggagggaatgggagtacagagcacaggcagagggagtggtcgctggcatgagagactgtttctgctgcattggagagaagaagtgaagaactggagcaggcacaggtagggtgcccatgtgagttagagaaaacctgacctgaaggccacttgtgattcaaaacccagtgaatatgaggaattaagaaatgagctagggaagaaytgaagacaaatgtgactgatgtgactgatttctgagtcactcctctggtccatgtggtgggtaggtccacactgtttgtgggtggaagccccaggccagaccccgaaggtttgagacacaagtgagagcactgtcagtgcactgaaatcagagacaagatcccatcaaat

SEQ ID NO: 442620 - DNA, 588 bp, Homo sapiens
tgtgacacaatccattggcagatgagctgttaaatgaaacactggccactcagaactgctttagaaatgtgctgtcttattcataaggaagatgtctttcgtgcagtggactcaggattagaggaccttgggtgcttgttctgattttgacaattttcccttctctgagcttctacttcttacatacacaaaatgaggcatttgggctagatgtggtgtttccaaagtgttcggtggcatttttgtagtttacaaaacacatcttaagagggttccataataaagtagagtgggaaaatacagggttgagaaactcaacaagttttgttttttatcatgagacatctcagaaccatcagtatgttaacttgaattgtgaatatttgatcaaacaagcatgttttaaaacagacctttttgatcaaatctgggagctgctgggcaggacgaatccyggagatcccttcaaatccataactgcctagagcagttagaaaccagtgggaattagagacagagggaaaactgcaaaaaactgaatgaggagtcagattaactgatttcaggggcaaagattgggcctctgct

SEQ ID NO: 442621 - DNA, 563 bp, Homo sapiens
atgatggacagtagagaaacccgttctggaatattaagagtaagatctaataacagtgattattgtagattatttatcctcacctatttgatgaatatattcaagactttgcttcctgacaagctctgcactgaactctctggatactgcaatgaacaagacagaaacaatttctgttctcatagaacttacatttgtgcatgtgtgttggggaagtgggaatagacattgatcaattaaataaacaagcaaggtgacttgcgatagtatattggtgagcaaatggacttgatggcggtaatagcaactgcatttaacattagctcatacgtgataaaaagtttgtttttaatcatataagagccyagacataatgaatcccgggctgctataatgattccataatgtcaggaaaactggttcctcctcattgctttatcatctctaaggtgcttcccttatctgcttagctaaagatgtaaccattattttgaccttctagccagtaggaaggaaagggaatacgttttttaccagtttataatggtgagaagtgccaaatt

SEQ ID NO: 442622 - DNA, 358 bp, Homo sapiens
tgccacctgcctgaggtctggaaaatgtggctttattctgtgcagccattccttagcaaaaaattaagggttctgttatgattgaaggaagaaataatagatattgaggaaaaacaatcattttaatagataataacaagtaatgcaaagagtgtatcagccagattaggctaggtgatgctgcaataacaaacaatgccagaatcttagtggcttgagattcaatgttgyttatcttaagtcatgagggtggggcaggggaatctcttcccatcttaatcacttagagacccatcttcagtactgccagttatcctgtcacagggaagagagatctctggaagttattgtattggaa

SEQ ID NO: 442623 - DNA, 603 bp, Homo sapiens
atctcttcccatcttaatcacttagagacccatcttcagtactgccagttatcctgtcacagggaagagagatctctggaagttattgtattggaaatacaatgctcaatgtaattaatgktatttttgctcataactcattgaccagaactgggcatagattcccacctaacaagaagaaacgaagcatgtaatcctatccagttcaaagaaggagataaagctgaaaatctttggtaaacaacactggctactaaccccaaaaagtaatgggacagagattggcttggatagagagaagttctacttaaaatgtcatggctgctggaagattttctgagcagttagtggagctgagacttgaatgatgagaaataggtcataagcatgtgaaaaatatctggaaagaacacagttgttgtttaactcactggttgctattatacatagacgggtacaagataatcaaggagataagcaaggagatgaattggcagttattgtcaccttaaggcaacgttaataggtaagcattattactatctcagctttagagatgagtaaacagaggcatcaaagggttaaataatatgatgcaaatca

SEQ ID NO: 442624 - DNA, 583 bp, Homo sapiens
tttaggattagtcaattagggtatcacataaatttggagaagaggcacaggagtcaaaggagcccaccagaggcctgcatggctccctggggtcatcaggaggcttctccaaaaaggctctcttgtgagtagatgtttgttaagtggagaaggagtacggaatacacartcccagcagaggaaacaggatctgcaagtgctcatagacttcaaatgtggttggagagaaagggctatagagagaaagtggcagggaataagcatgaaaggttagttggggccaatttctcccaccaagaataatgaagaaaatgcaacaattattctttccagttacaatctcattacaaagtgttcctgttttactataagaaagccaggcccccacatacttctggggctcatcagtgaaaacaacaagcgtctcacagacccacccaggaaagcagagtcatcagcagggacctgacttgagctaaaatggacttgggctcagtatagggggagagaaataaatccaggcgtaaaatacagggccctgtgagtccacattgtgacattcagccttattaactgtcactcc

SEQ ID NO: 442625 - DNA, 570 bp, Homo sapiens
gcatgaaaggttagttggggccaatttctcccaccaagaataatgaagaaaatgcaacaattattctttccagttacaatctcattacaaagtgttcctgttttactataagaaagccaggcccccacatacttctggggctcatcagtgaaaacaacaagcgtctcacagacccacccaggaaagcagagtcatcagcagggacctgacttgagctaaaatggacttgggctcagtatagggggagagaaataaatccaggcgtaaaatacagggccctgtgagtccacattgtgacattcagccttattaactgtcactcctgtcttgtacagtaaggcctggagaaagaagttcacagttggagtcagccgacttcgagaccactgagcaagagcacagaaggaaycatcatcaggccacaggcggctgtcacatcaggagaccaccaacaccagagggatctggcagaatacaggcaggaccaaggactccaacacgcttaccctggcctccaaggctttgtcacagacccagcccaactccctaatgggtttaatttctcaccac

SEQ ID NO: 442626 - DNA, 617 bp, Homo sapiens
caaacaacagggtaataggcatgccatgaacatcagctccctaccctgtcttcctcaggccctggtgtgcccagtgagacctcaactcaccatctatttccatggtccttagatgctggtcagcctgatgccctagtctccctcccaggtgtggaagctgaatctttcctcccaacccagaggcaactcggctcaggaagcaaactccagtgttctgaaccctccatcatcctcctggcattgaggcygtgcctcctttggtcaagagctaggccacctttcaagtctaatagggtgagagtcaggcaggccaggccaaagtcaaattgagcagaaggtggagtctgtaggcaggctgctttgactcctacaccccaggcacccagttgtgagacgtccatgtctaagagactcctagcatcagatcataccaaccgagagcctatccctcactttcatctctgtaacagagggtgggggctgatggtgaatcagatataggtatccatcctagagctgcttactctattatctcccctaggtaatttggttctgtaagcaaattcaacaaccaaacaaaaagtctaataaatagaaacagaactatggttaccaga

SEQ ID NO: 442627 - DNA, 566 bp, Homo sapiens
ggaagcaaactccagtgttctgaaccctccatcatcctcctggcattgaggctgtgcctcctttggtcaagagctaggccacctttcaagtctaatagggtgagagtcaggcaggccaggccaaagtcaaattgagcagaaggtggagtctgtaggcaggctgctttgactcctacaccccaggcacccagttgtgagacgtccatgtctaagagactcctagyatcagatcataccaaccgagagcctatccctcactttcatctctgtaacagagggtgggggctgatggtgaatcagatataggtatccatcctagagctgcttactctattatctcccctaggtaatttggttctgtaagcaaattcaacaaccaaacaaaaagtctaataaatagaaacagaactatggttaccagaggttgggggcggggaaggaaacaggtgaaagggtacaaatttgcagttagataaaatgaataagtctagtgattgaatgcatggcatgaggactatagttaataatggataactatggaaggtaatggatatgttaatttgttt

SEQ ID NO: 442628 - DNA, 575 bp, Homo sapiens
agccacaataataagcacttggctgacacatagtaagtcctcaatacatatttatgtaacaaggggttgaataaatgactaattacaactaatatttttaagtgattaccatgttccagtgccatgttaagcacytttgcatttaattctcacaagagccctgtgagataggtactattttcattactctatttcacgtaagaggtgactgaaacttggaaaggtcaagttattcgctcaggttcacaaagctaggaaacagtttgcagttgcacctgtgtctgtctgcttccaaagctcatgctctcaaccatgatctataatcagaaaacaagattatatcatcataatcttcttcctggttagctttgcccatgaccactgcctggaaacttctgcagcattataagaaaccctggattaggtcatcacaaataacagctcagagcaagactgagttttctccactcttttggccactatactttggactctcagaaagctcatttttaggccaatgtgatacctaatgagctctctttagctgtgatcccatcagtttcttcagtcttcat

SEQ ID NO: 442629 - DNA, 491 bp, Homo sapiens
tcactcaaatgtagtcatgtgattattaacagtagagcgaaggcaatttgatggggaaaagacaaacttttcaacaaatgtgctgaaacatctggacttccacataaaaaggaatctaaacatagactttacacattttataaaagttttctgaaaatggatcatagacctaaatgtaaaacacaaactatagaactcatatagacaatatagaagaaaatctagacaaatttgggtttgttgatgatttttttggatttaatgccaaaagctcaatctatgaaggaaaaaactgatgatggatttcacaaaaattaaaacctttttatctgtgcaatayactgctaagataatgaaggcacaagttaaaaatagggagaaaatttttgcaaaaacacatatctgataaagacccggtatcccaattttacaaaaaactaataacaataagaaaacaaacaactgaattagtaaatgagcaaaagatctga

SEQ ID NO: 442630 - DNA, 597 bp, Homo sapiens
ataattaatttcatctatttcattttgctttttgtaatgtggctaggacaagctcttcgaacagatttgggaagaagaacggtcacatagataaaagtcgttgagagtggaagggaagggtcacttagtcttgaccctagagaatgagtagaaggtaaataataaacactctcatgtttactctcacattaatacccagaacgactctatgtggcatcaaaaattgcattcccatttgaaatgtcatctcactgaggccagtaacgtagaggtggtgtgctataaatctagccacaggagaaggtaaaatggggagcgtaaacacagttctttccactgtcaaatctatgttctttctccaataycaaactgcacctctctaaaatgtatttactttactatagccagtgggctgaagattttcagttctgattcttcatcttctcttcttatctcctttgacccatcactctcaggactgcaaacaggatttagtattgttattttatttgcaacaaccatttctggtccctgcactctgcttgatgcagtacaaaaatagtttgccctttgggaagataatgcttgggtctgttc

SEQ ID NO: 442631 - DNA, 563 bp, Homo sapiens
gagccaggttaaaattgtaaatgttttcacaactccagataatgcatcatccccactgcctgaaaggaaatagactggagaggattaagcataaacttggcrgaaactcgtgtagcgacaacgtactgctggagttcaaacctatgacttgaaagcccctattttcttgtaacatcagaccgatgcatggagcacacaactggttgctgcaactggagaagaatatgctgatagagttgtggtctgagaaccacaggactgagtgccaaaccagccttaccaccaaatctctgttaatactggcctggggacagaacctgtctctccctgagtctcagttcaaggctctgtctaatgaagtttatgccctggaaaaatgttttaaaagcaagatatatgtatcactggtagaagcatagttggttttaggaggtgcacagagaggctgtttagctatatatagctatttataaataataaggatgttatgattatagcaaaatagctatatgtttattttatatggagacaatttataacatacatatcatgatcatgttttc

SEQ ID NO: 442632 - DNA, 563 bp, Homo sapiens
gagccaggttaaaattgtaaatgttttcacaactccagataatgcatcatccccactgcctgaaaggaaatagactggagaggattaagcataaacttggcggaaactcgtgtagcgacaacgtactgctggagttcaaacctatgacttgaaagcccctattttcttgtaacatcagaccgatgcatggagcacacaactggytgctgcaactggagaagaatatgctgatagagttgtggtctgagaaccacaggactgagtgccaaaccagccttaccaccaaatctctgttaatactggcctggggacagaacctgtctctccctgagtctcagttcaaggctctgtctaatgaagtttatgccctggaaaaatgttttaaaagcaagatatatgtatcactggtagaagcatagttggttttaggaggtgcacagagaggctgtttagctatatatagctatttataaataataaggatgttatgattatagcaaaatagctatatgtttattttatatggagacaatttataacatacatatcatgatcatgttttc

SEQ ID NO: 442633 - DNA, 563 bp, Homo sapiens
gagccaggttaaaattgtaaatgttttcacaactccagataatgcatcatccccactgcctgaaaggaaatagactggagaggattaagcataaacttggcggaaactcgtgtagcgacaacgtactgctggagttcaaacctatgacttgaaagcccctattttcttgtaacatcagaccgatgcatggagcacacaactggttgctgcaactggagaagaatatgctgatagagttgtggtctgagaaccacaggactgagtgccaaaccagccttaccaccaaatctctgttaatactggcctggggacagaacctgtctctccctgagtctcagttcaagsctctgtctaatgaagtttatgccctggaaaaatgttttaaaagcaagatatatgtatcactggtagaagcatagttggttttaggaggtgcacagagaggctgtttagctatatatagctatttataaataataaggatgttatgattatagcaaaatagctatatgtttattttatatggagacaatttataacatacatatcatgatcatgttttc

SEQ ID NO: 442634 - DNA, 486 bp, Homo sapiens
gacacaaatccaggtctattacttactagccacgtgaccttgaacaggttattcactgyacctgagtctcatttttaaagtggtaataataatacctaacttatagggttgtggtgtgtattgagggggttaatacatagtaaagtgtttaccccagtgcctgacagataataaatgcacactaaatttgtattatccatattttgtctcatgtacaaacacactctaccaatagttccaaatatacatgcacaaatccaatagttatttttaactcctgatttgtttatctggagtggtttcaaaactttcctttgtttcaaaactctcagtcaattgatagcttcctcagaagaaccaacaagtcccaagatattgctcatgagctgacacagaccttcttgctcataagtaaaggtcttcttagttttcttatttcttttacagcttctcctgaatattgattgtctatggcagccagtggac

SEQ ID NO: 442635 - DNA, 519 bp, Homo sapiens
attctccataacctgagcctcatgcgattagttgagaaccttaagagcaagactgtytttcagagacagaagaaatcccaacaatgaactgtagtttctatacaagaatttccagtctgctggttttccaatagagagagagagagagatacgtgtgtgcatgtgtgcatgtgtctgtgtgagcatgtgtgtcctactgactctgctttagtctgctttcgctacttctgtacttgaaccctgactgatacaaggagctttactgaaacactttagtatgtaggggaggattccagaccccaagacagggctgaaagtgaagacattcatggaaggggagcctttgactcctctcacctgctgctatggaagaagctgctcctctaagcccagggctggccacagccacattgctgggatagcggctgccttacatcagaacagagtccatgcactcataagactgtgcgcatagggggagccatgcccttcccatgctctcaggagagaagccactct

SEQ ID NO: 442636 - DNA, 615 bp, Homo sapiens
aatgggtagccaaaggcaggagaagcaatgaaggcaggctccaggaggrtttttttatttcatatctctagaaatatgtccccattggctttattgaaagccaccccaaggctggtgggggaggtgagaactgttagaagatgaatgagagatggctctctgggaaaatgtccccagctctcactggccagctgggttttaaaagccatttcagcaattgttcggagctgtcagatgtctctgtcagatcgataggttactgtggaatttgcccagactgttgcccaatcaaaatgtaaattccagataaatttaatacataaaccaacttgtcttcttcaagccattttgaaagtcatgaaaagtaatttgacttttcctcatgactgtcatccaggagacacattttctcccagtgttaagcatttatttcacctcaaaactcattgtgagtccagtggaggtaaggaaggtgtggggtatatatgtgagtatagttttatcatgcatgtgcttcatggagagctggaaagctcaattatttgagtgtccattatgagacgtgtattaattaatatgaagatgtgtagtgtctatatgtgcacgaggctgata

SEQ ID NO: 442637 - DNA, 572 bp, Homo sapiens
atgtgagtatagttttatcatgcatgtgcttcatggagagctggaaagctcaattatttgagtgtccattatgagacgtgtattaattaatatgaagatgtgtagtgtctatatgtgcacgaggctgatagatttgctagtgggatgtgtgattaaaaagtcatgaacttcctatttatgtctctcatgggcagtctcwttttctagaacatccaagatgtgtctggatgcatgactatgtatatgcatgttgcaacctatcttttccaacaagaaccataaatctttacattgaaagaaaagatttatagctcagccaggttggctctgggccctatggggaagtatgctttagagacatgtcctaatttttcacattgaaaaaagtcataatgggcaaagcatgtaggcaagaggtaagtctttgaactcagaatgtctaagtgcggatttttcattgaatcatttatcctgtggtcattatattgcagatgtctcagatgccttacttctatgcaaatgctagtttataaaacactttcacatccagtctgccatttaatccccacagt

SEQ ID NO: 442638 - DNA, 589 bp, Homo sapiens
ggcatagctcttagttataacaaataatactcatgcagagcttcctttgattcaagagttgctaagccttgatatgtattaacacgtgattgtgatcttattaaacataacaggtaggtgtatttttaatcttatttgacagaagataaattaggataaaaaaggtaaaacagctcacccaagatcacctctttgagacatgaggaagtcaaaattcaaatctcacaggctgactccaaagccagtgctctcaaccactgccattcttcctctgctgcatcccacactgctccccatccacagtgaatgacactggttgagcctagtacttctttcctgcttattactgctggcatgctaaagacaggatgtgttctgccmagtggcaccttaaacgctccagggtcttgattatggtttcctcatgtctatgcagctcggttcctgcctctgccccagtctaagaagggggcaggcagatactgaggccctgtctttatttctgtgtctgagcctgaccaggcagatagaatccaaagttaggggtcctgcaagtcctctctggtccagtgatgaagtgagagtcgga

SEQ ID NO: 442639 - DNA, 611 bp, Homo sapiens
ttggttggttaattactcgattggttagtttgttggtttgtttgttagctttcaatttggagtagaatttctgaccttagggcccaggaatgttgccacacccctcccgtccccaggtattgtcatgttttcatgggtggccaaatctaagagctgcttctctggggcacgaaggatgttcacaaatagttgatgaataagtgaatgaataaatcaatgaaacttaccagcccagcctcactactcgcacccacccccaacgacsagccagggttcatccacagaggggtgtacctgtccaggtgtccccaggtgtgggcagacccagtaactttactctttcatcggccccaccgcctcttaactcctcagagaccagcaggaagaaaccctcggaggtcgcagcttctggctgttctcaggggcaggccccgtccatcgggtgctgtgtctactcctaagacctggttctgagtatggaacacctggagagggaaggggccgaggagggggagtcactcggctgtgtcaggctccgcccctgccttcctgaagcacacagtggggaggggacacacccgtcattaaccgaagaagccactggggaaaac

SEQ ID NO: 442640 - DNA, 520 bp, Homo sapiens
gatgttcatttggaacctggtgttcacctaggacatgggtatccacctggatcctgattttcaagtggggagtggatatagacctgggaactgatggccacctatgctataagtaacccaaccaccttgggcctggtgttcacctgtggcctgatatccacctggtacctgtgtgtcaatctagtgcctggtgtccacttgaggactaggcagacacctggggcttggtgttcatcttgcacccagtgtccacctggaycctgtgtatcaacctgtggcctaggtggccacttggagctttatgtgcacctggggcctgagaggttcctaggatctgatgaccactggggcccaggtatccacctgggatatcaggcttcaagtgtacacccaggctccatgtggacaccaggccaggagaacgccagcccttatctgaacatcaggtcctagatggactcccaggctccatgtgtacatcaggccccaggtatacacgggactccaggtggacaccagc

SEQ ID NO: 442641 - DNA, 520 bp, Homo sapiens
gatgttcatttggaacctggtgttcacctaggacatgggtatccacctggatcctgattttcaagtggggagtggatatagacctgggaactgatggccacctatgctataagtaacccaaccaccttgggcctggtgttcacctgtggcctgatatccacctggtacctgtgtgtcaatctagtgcctggtgtccacttgaggactaggcagacacctggggcttggtgttcatcttgcacccagtgtccacctggatcctgtgtatcaacctgtggcctaggtggccacttggagctttatgtgcacctggggcctgagaggttcctaggatctgatgaccactggggcccaggtatccacctgggatatcaggcttcaagtgtacacccaggctccatgtggacaccaggccaggagaaygccagcccttatctgaacatcaggtcctagatggactcccaggctccatgtgtacatcaggccccaggtatacacgggactccaggtggacaccagc

SEQ ID NO: 442642 - DNA, 520 bp, Homo sapiens
gatgttcatttggaacctggtgttcacctaggacatgggtatccacctggatcctgattttcaagtggggagtggatatagacctgggaactgatggccacctatgctataagtaacccaaccaccttgggcctggtgttcacctgtggcctgatatccacctggtacctgtgtgtcaatctagtgcctggtgtccacttgaggactaggcagacacctggggcttggtgttcatcttgcacccagtgtccacctggatcctgtgtatcaacctgtggcctaggtggccacttggagctttatgtgcacctggggcctgagaggttcctaggatctgatgaccactggggcccaggtatccacctgggatatcaggcttcaagtgtacacccaggctccatgtggacaccaggccaggagaacgccagcccttatctgaacatcaggtcctagatggackcccaggctccatgtgtacatcaggccccaggtatacacgggactccaggtggacaccagc

SEQ ID NO: 442643 - DNA, 520 bp, Homo sapiens
gatgttcatttggaacctggtgttcacctaggacatgggtatccacctggatcctgattttcaagtggggagtggatatagacctgggaactgatggccacctatgctataagtaacccaaccaccttgggcctggtgttcacctgtggcctgatatccacctggtacctgtgtgtcaatctagtgcctggtgtccacttgaggactaggcagacacctggggcttggtgttcatcttgcacccagtgtccacctggatcctgtgtatcaacctgtggcctaggtggccacttggagctttatgtgcacctggggcctgagaggttcctaggatctgatgaccactggggcccaggtatccacctgggatatcaggcttcaagtgtacacccaggctccatgtggacaccaggccaggagaacgccagcccttatctgaacatcaggtcctagatggactcccaggctccatrtgtacatcaggccccaggtatacacgggactccaggtggacaccagc

SEQ ID NO: 442644 - DNA, 510 bp, Homo sapiens
attttttaacactgggactaacaaatggaaaaatattggaggactttagaggagaggaagatcaatattattaggctatctgtatttgctaacagtccttatcaaagttgagctcctgccctcccacagagattgggagacaggggctctacctttcctgattacatttcatacagatgggtcacaggtccttgagaaagattttcctgagttgtataaatttacatctgaaaggggcagaaaaagaatttacaatttcaatttttctaaagtaaacactctaagaaaagggcggtcaggggcttatagttgggaaaagcttctaaagtttaatcaagctgagggagacactggactagattggtcaatgccaacaacctccaataaaaacatacctgaagctcctccctttgccttttctatgatamagctttcctatttccctgcctacctttctgtctctgcaaaacacaagcattagtgttgcagggcttttccttagttcagctg

SEQ ID NO: 442645 - DNA, 304 bp, Homo sapiens
tcccaagcgatcgctctctgaatttgaccctcaggaaccatcaatctcaccagaaaaccatcacctgggccacctgatcccccgacacagcacttttcagctcatccatcagaaaggatgatttaataatgaacatagagatagggcatgctggccagcccatgaggccagcggacccctcccaggccaccagggctgttccctctccacccctgccccactgcagaatccyacggctttagctcttcagacggcagcaagaacgctccatgggacacacacacacacacacacacacacacac

SEQ ID NO: 442646 - DNA, 304 bp, Homo sapiens
tcccaagcgatcgctctctgaatttgaccctcaggaaccatcaatctcaccagaaaaccatcacctgggccacctgatcccccgacacagcacttttcagctcatccatcagaaaggatgatttaataatgaacatagagatagggcatgctggccagcccatgaggccagcggacccctcccaggccaccagggctgttccctctccacccctgccccactgcagaatcctacggctttagctcttcagayggcagcaagaacgctccatgggacacacacacacacacacacacacacacac

SEQ ID NO: 442647 - DNA, 500 bp, Homo sapiens
ggaaaagttgaacaagaaccagttaatagattgtatgtcataaggagttatccttaataatgttagatgtattagttgcattgtggttatgttagaaaaaaaagcctatctgttagagttgctttctgaagtattactggtgcagtgatatgatgcctgggattttctttaaagtgttccaagaaaaaaagagagagagagagaaaggggggtggggagatgaaataaaaatggcaaagtgttgcaactgttcgaactggataatgggtgcacagggactcattccatttcgtgtatgtttgaaacgttccataatamaaagttaaagttttaaaatgcatgccatgcttaaacattttaaactgtagcctgtacctgattaaatgttgctttcctcagaatcttgctttgctcacttccttgtgtgtggagggtctgtgtgtgggaatgttctttctactcagtcagacataagattcttgaggacaagggcccctttt

SEQ ID NO: 442648 - DNA, 620 bp, Homo sapiens
atgtaagtttctactgaaagcaagcaggtcacctaagctcattcattcatctgctgggactacacatgcaggggtaccatggatagctataagatttttattaaaacattggttataatatattatgaaactttcctcatgaaataaattcaaactggaatggaaaagaacttactttgcagatgaaatggtgcacacacccaaacccaagaaaaatgacacagcacggcctccctgaaggtgtgyggaaaccggtgtttgttctgctcttatttaacatccttaataatgatctggaagatgagtcaacagcacgctaatgaaatttgcataagatccttaattgggaggtgttgctatcaccaagaagggcagagaggtaatgcagatgtctcaaagagggttaaagataccaatggaaaataacaaaataggatttggctcagaggggagaaaggcaaattcaattgggaggaaagtctaaaccaggatattccctggagagaagaacaatgcaaaaataatactgaaagaggttcaggcagagagcgatcttagctggaggtgtgatgtggtgaaaatggccaagattatggaatacatttgaaaaggagatatac

SEQ ID NO: 442649 - DNA, 570 bp, Homo sapiens
aagcacccactacagtgccaggcatccaatctgacaggtgcctgccctcttggagtgtacatgctaggaaccatactgggccttggtggccacctgcctctccaggaacagaaagcagggtgggaacatgattaaattcctttctaggaagatatcctccagacgattgtacaaatccaaaacactgtacacagaaaaaataaacaaacaggtcagcaggtgacaggcaatgattaaagaactwgggagaggatctagaatgatgaagataaataataagaacaagaaagtaacgtgtggatcaccagcatgttctaatactctgatgctagaacaatatttttaaatgatggcttccaggctggtggctgtttggagtctcaagtccatgattcagtgataaggacaaccagccattgacttcaagtcaactggttaactttgagttagtggacctttggtgttagcagactgagctttgagttcaagcttcaatattcactagctgtgtgaccttgggcaagtcacttaacctctctgtgactcagttttctcctccgcaaaatggga

SEQ ID NO: 442650 - DNA, 588 bp, Homo sapiens
tggaactccagctctgcatgtttattataagcctcaggacrcaaatgactcccgaccatttcgctcctaacacctcagggactttgcatgatgactaaacagtaggttcctccccagacatttaatgatcagccttttctgggactcctggtccagttctttctcagcagtgcccatccagactctcctgtagtgcaaaaagctagaggcagggtcctcaccaagccctgtctctttgtccaagcctcccacccccagcgcttgcagtgccccctcatagatgaagccaggtatttgcaaacagcttcagcacacatgcacgcaatcaatatcacaaaagataaatctgctgcaattgactccaggctgtactgtcactaagtgacgatgaaaaatgatcagcacttgaatacattgcatttttatctttaaatctttctacagaagtggtgtcaatatcagagtactaaataatctctagatagcaggaagatgcaagaacatttttttttcttcatggaagatggatgtagctttttcgaaggccttaaatactgaaacaaggaattagctctctaaatgccctac

SEQ ID NO: 442651 - DNA, 567 bp, Homo sapiens
tttactgcatcttcttcctcaggccaagcttagtgagttgatgggggaaatcgaggcaaggggaagagtcttgtctaaccaaagtcacataggaactcaattttctaccagagtggacacctatcatccttcagaaggggacagggccaatttctcttggggctataaggtaaaagttacataagcaaccaggtaaccggttaccatcatcaaatacttgctgggctctattaaccgtaagacactgatagacattagaaatgtagagaaatcagccttactcttttgagcttttaaggcatggggggaaggatatttgcttagycacaataaccactatacattgatcagtaacagcaccagacactgtgccaagaaccctacatgcaccctctcggcagagtgagcctcacagtagtcctgcaaggtggatatcattaaccccgttttaccaaggagacaatattgccagtggcagagccagggaaggcagaagacctgggcttgagtcccagttctgtgtgtcctggggcaagccagagccatctttagcccctcataagcaaa

SEQ ID NO: 442652 - DNA, 460 bp, Homo sapiens
ggaggggtcagagtgcttctagtagcctctgccactgcctagaggtgtcaccttggggaaggcaggttccccctgcgcctaccttggcagtagaaggggccccaggatgtcttgaatacccctagatggtcctgggcacagcatcttaccacctccctaacagctgcgtctcaactgctcaaggtcaaggggacaaagagtttgtcgaagaatcaaaatcgtggcctggcataagtgaacagagtgagcgaggagaggggtgagaacttggtagggggtgtcctttgagcttgcacttgacttaaatcagcaatgtgagctcatttcttctgtctgtctgtctgtctgcatcaggacttgcctyctcttggaagtccccagagggcctggacctcatctgttacctctcgttacaaagctagtagattatttttgcttgtgactttataatttcctgtta

SEQ ID NO: 442653 - DNA, 574 bp, Homo sapiens
gataaggtaacttgtttcccgcggtgggtggacgggttagrgggggtcctgcgcttgctttggggtttgcatagttgctagaaagggaacggaggggagcttccgggttgctctcgccgcggcagcctgagccctgccgccttcaggaccctggacagtgctcggtccagccagacattccctggcagggcctgcaagggacgctttgaccagtgagttgcaattccctgacccgctttgctctttcaacctccctcctctgagttctttacccatacacacacatacacacacacacacacacacacacacacacactcccttccactcgagtccccaccgcccctccgccctcattctcatcaccttgcaccgcttgtgcaggtatatatccaaacccacccgcttggggacagaggcgccaaatctcagccgcctgcggggctgaagttggctccctctcccgttcctcccctgctccttttctcaaggtgagagtcgacgaaaagggggctatgggagcgggcgaggagagcacaggaggtgaggcagaaaaaggagaaagaaaacccag

SEQ ID NO: 442654 - DNA, 574 bp, Homo sapiens
gataaggtaacttgtttcccgcggtgggtggacgggttagagggggtcctgcgcttgctttggggtttgcatagttgctagaaagggaacggaggggagcttccgggttgctctcgccgcggcagcctgagccctgccgccttcaggaccctggacagtgctcggtccagccagacattccctggcagggcctgcaagggacgctttgaccagtgagttgcaattccctgacccgctttgctctttcaacctccctcctctgagttctttacccatacacacacayacacacacacacacacacacacacacacacactcccttccactcgagtccccaccgcccctccgccctcattctcatcaccttgcaccgcttgtgcaggtatatatccaaacccacccgcttggggacagaggcgccaaatctcagccgcctgcggggctgaagttggctccctctcccgttcctcccctgctccttttctcaaggtgagagtcgacgaaaagggggctatgggagcgggcgaggagagcacaggaggtgaggcagaaaaaggagaaagaaaacccag

SEQ ID NO: 442655 - DNA, 534 bp, Homo sapiens
tgacttcctctagtagccacttaagttcaattttagataagcccattagagtgtgataagctctaaatgttactttcctagaatattccagagatatagtgaatgtgcaaagatttctgtgcatatayaccccttaattatgattttcagcattaaagaaagtaatgtctctgaagtccacatttagtgtcaatatgtgctcctaaagctgaacatctttaatatatcacattgctgtactgaaggaataattaaatgttcagatttattggttctcaaattcattttacagtccaagtaaaaactacacattcaggctggctgaaactaatcattttaaagacgatgaatttgaggattataacatgccagatgcatgcatatacaaaaagtgttaaagaaaaaaaatttcaaatgtattaatttgaaatgatcaattaaatttattgataattatttaagagctaactatagaaggtaccaggacaaaaacaatcaaagaagaaggcattgagacaaaagaagacaagatca

SEQ ID NO: 442656 - DNA, 547 bp, Homo sapiens
tacttatattcatttttccttaagctttgaactgatgctcttctcagaaaatgcttaagtaataaagaaaatgaatttgaattcctttcccttgggcatttcatctgttgagggcataaacattacaggtgattgttctatttgcttaaaatagccgtcttttataacagttctaataaaggcagtaacctacttgcacagtctcacagccaacttttgaacaattaagcaagcaaagtatctaaattttcaaattccataaaagccttcagtaaaaaagactttcctactgcagtttcacctacacaaccaattaaattattattcctgtttaaacagaaatatattgtattcctacttcactgcaacagaaaatctacaacatagttgttatacaatcagcacaccaccaaaatattgccctacctgaaacacatcctttatcctttttatcaaccrgagaatagataaacaaaatgtcatatcatcacacaatggatcactactccacaataaaaaaaaacaaattacagattcatgcaacaaa

SEQ ID NO: 442657 - DNA, 572 bp, Homo sapiens
ctaaagaagtcaagaagaaaaggaacctcaagaagaaggaatgagtaagttgtatggaatgttgctgaaatgcaccaattaaaattacaacagaaaagaatgccctggatttagcaaaatagggaaaattggtagccctagcaagagcaattttggtcaagtgttgggagtggaagactgactggggtgggttgaatactgaattggatacagaataacccaagagactttacagrctaatttttagaattaacaagagagttcagcagaggttctacatataaatccaatataccaaactgactgcattcctaaatactaataagtagtaaaacataatctaattttaaaatgctgtttgaatctggaaaaagaagaaaaatcaaacatattcatttacttttgttcccttaataaatttattgtattgtcattaaaatgataatgaagaggtttttaaggcttgaatctataaggtaaagagaaaaggaaatcagaaaacaggggaaaagtaagccaaaaacacatatgataaaaaggtgactgcttgagaagattcaagcaaggtgaat

SEQ ID NO: 442658 - DNA, 585 bp, Homo sapiens
agaagataatatgggagataattaataacagaagaggcttctactttggacagaattatgttctggtttgcccagaacagattcagtgtatacctcttatagattcattcatggctttattttgtagcactccctttcactctcaaaagtgccctgatttgaacgaccaatgtccccaaggatagaagggaaggtaaatttagtccacaacacagcttggagaaagactttaaaatagtcctgacagtattcttctgtggcccagggattacaaggtaaattcagacttcttttgtcttctgattagtagatgtcaaattcagtacgtgtatctgcaacagtaaaagtgagcaactataacatctttatgggggagtgaccatcttaaggaaatagggccartgctctctgagagatttttatttctactgattcaactctagcaagcattggttacataggacatccccattttaaattttgattgagattatattatatttaaaaatgaccttaaaaaaaatctgtaactgtttccccttattcttccctattagtgtgaatgagattaactcttatcgcatt

SEQ ID NO: 442659 - DNA, 371 bp, Homo sapiens
agctaaatgataagaatttatgaacacaaagaaggaaacaacagacactgcagggagagagacacaagggagaggagcagaaaaggtaactattgggtactgggcctaatacctgggtgatgaagtaatatgtacaacaagcccccatgacatgtgtttacctatgtaacaaaccttcacatgtacccctaaacctaaaataaaggtttttttaagtcttaaaayataaaaccatttatagagataatgttagccaaaatggtggaatagctagcttcaagggcccatttcagcatagaaaaaccaaaaaatcaagtaaaactgtcaaaatcaactttgtcagaactctgaaaaacagataacaatttata

SEQ ID NO: 442660 - DNA, 424 bp, Homo sapiens
ggcctgtagatttctttttttgatgtgtctttggtttttggtatcagggtaaaactggcctcaaagaatgagtttaaatgcattccttcctccctatttttcaraatagtttgagtaggattggtattagaacttctttaaatgtttggtagaattcagcagtaaagccatcaggtcccaggcttttctttatttggagacgttattatggctttgatcttgttatttgttactggtctgtttgggttttgaatttcttcctgattcaatcttggtaggttgcacgtgtctaaaatttgtccatttcatttggattttccaatttattggcatatagttgctcattgtaaccactaatgatcctttgaatttctgcagtattagttgtaatatctcctttttcatctcttattttatttatttg

SEQ ID NO: 442661 - DNA, 579 bp, Homo sapiens
gccctgtgattcttatgagcattttaagatgaggaaattgaactatagagaaacaaaataacatacctaaagtcaaaagcaattacttttcaaatctgtaggtttgaaggaggttactcagttttctctctcaaatagcaattgtctcaatcagatttttgacctgaactataatcttagtatctgaaagtgtagattttmtgggttgtttgaaagaattttcatgtcctgtagtccttaggtaagcctttgataaaccttatatccacagtattggaatgatcactgaacaacaaacttgaacactaaacatctaatctaaatttcttattatttgtgtatttttgatccttaaaatggggatagcaatgcaaatttgcagagctcttacaagaattaaatgaaaatatatgtagtttatatagtctatttgttggatgaataaatgaataaccccatcacccaaacacaactaatattataattttaatacattcctttctatccagtctgatgcttatagtattagaataatacaatttgaaaatcagcctgcttttacttactattgtacaataa

SEQ ID NO: 442662 - DNA, 583 bp, Homo sapiens
tcagtaactaggtacttcttgcctggtttgatttcagtttgattccttatctctaaacatctagtttggcatagttaaataaccatacaaaacagcctatgagraaatacaaaataaatgccttaaataacaagcatttacagaaaataactctagactggttttgtcaggaacagcttttaggaaggagggagacttgaatggagccttggaaagtgggtcttctgattcattgagagaaggagctaggtgagcacaaacagatgggaagccacatgccatctgtgggatagtagggtgtattagtacattttcgtgctgctgataaagatatatctgagactgggcaatgtacaaaagaaggaggtttattggacttaacagttccgtgtggctggagaggcctcacaatcatgatggaaggtgaaaggcacatctcacatggcggcagacaagagaagagagcttgtgcagggagactcccatttttaaaactatgagatcccatgagactcattcactatcatgagaacagcatgggaaagacccacccccatgattcaattatcttccaccaggttcc

SEQ ID NO: 442663 - DNA, 330 bp, Homo sapiens
ggtcttctgattcattgagagaaggagctaggtgagcacaaacagatgggaagccacatgccatctgtgggatagtagggtgtattagtacattttcgtgctgctgataaagatatatctgagactgggcaatgtacaaaagaaggaggtttattggacttaacagttccgtgtggctggagaggcctcacaatcatgatggaaggtgaaaggcacatctcacatggcggcagacaagagaagagagcttgtgcagggagaytcccatttttaaaactatgagatcccatgagactcattcactatcatgagaacagcatgggaaagacc

SEQ ID NO: 442664 - DNA, 582 bp, Homo sapiens
tgagttgcatttaaagagaatttccattaatcaagtggtgttctaatcacattttacaaaagagataattccccctaaataaatgttaccaccccatgacaaaatacaaattatgcttaatgaygcattaaacctttttagaattatgacttgaaagaaaacaatttccaaatacagaacattttatatgtacagaccaaattctattataacaatgccctagaccctgtttagaatcttaggtaacaagatttgctttatgagatattgctcaaaggtactgagtggaattatcactagactgagaggtgagagacccaagctttagttaggctttccactaactgtgtgacctgggtactgacattgagtctccaagcctgtggagtcccaatctgtcaaataagcaagttaaatgaactaccttaaaggtctcctgttattcttaatttcttgactctaaagaaattttgaagtgtggacttcaaaattctgtttttaatgaagttaaatgtgtcatattttgctgtatcaaaaatatcacaaaatacatatactatgctaaaactataaaaacactaa

SEQ ID NO: 442665 - DNA, 577 bp, Homo sapiens
caaatcaccatccccaatgaaaattataaagctgcctctgactaataatttcttgaagatgctccgagtccttcggccaccaaaatctcacacttacctactttattggtgacaatctgccagtgcatgctcactttaaaattatgggttgtcactggggcaaacctatagtgaagaattctgaaagccttccaagccccattttcactgaagagratgagagcaaaatacaaaatgaaatccaggcatcttttaaacctttaacaacctcttaacccatccatagtggtaaagagatatggtggatttgcctgcacgggcaatgaaaatgaaaattccactgatagttcctctacaacgcctggctttatgaaacatcagtctggttttcatttttgacatttcatgagccactaatgttctatattctcgtgattgaaaagacaaggctctttcattgactgcttaggaagaaaaagacatttcaataccttggagtacttgctctccatgcccaggtaccatacaaaatgggaggagggaggttcgacacactctcatctgtaccaaagttttc

SEQ ID NO: 442666 - DNA, 578 bp, Homo sapiens
gatctcacatatcacacatccgaggtgctgaatggaatgttgcctttaaactaaaaatcacttctgaaaccgcatgctgctcaacctaatgtccagcccacgggcattgcaacaaatgcttctgggcaaccacagtgataatgattatggtattgagacagccaagtaaaaagggctcccctgatcatctccaactggcctgtgcactgggaagacagggtgatgcctcaggaagttcatgagatttgcagggagcagggaggaggagcctggcccctccggttcctgtgtgctaacctgggattcaatctgtgagatgggggcctgttaacaggaacccctcccactttgtggagatttttcctttttgcccaataaactscattctcccccacccttcaaagtgtctgcgagcctcatctttcctggtggtgtgacaagaacctggtttttcctacaacagtggggatggtggggatgggaaagggaaggccagaaacagcctatttacagagagaggagaacacaccgttgtctatgttctaacagtatcgtaaaattacaagaacaaactacat

SEQ ID NO: 442667 - DNA, 477 bp, Homo sapiens
tggcgcacctttatcgggctgtctacatttccttccttttctcagcttcacatctactctggttctgccatcttcattagctgccctcctggctcacctgaagcagcagagccagcattgagttgcctctgccctgtcttgacctcttagaccaagtccttccaccaaagtgaaatagagaattacctctatgcccataccagggcctggtgtatgagggcatttagcaaatacttgtggaaatgaatgagctagataawttagaaataatctttaaagataaggaaatttattctgaattgcctggtaataaacactaagtaagattttcccccttcactatccagataaaaaattaattttccaatatttgtaatcagtcggtaattggctattatttttttcctttccaaagttcagcagaaatctgttgacatctgtgatgctcagtccagctagtgcttgttctaccacacc

SEQ ID NO: 442668 - DNA, 572 bp, Homo sapiens
aggaaatttattctgaattgcctggtaataaacactaagtaagattttcccccttcactatccagataaaaaattaattttccaatatttgtaatcagtcggtaattggctattatttttttcctttccaaagttcagcagaaatctgttgacatctgtgatgctcagtccagctagtgcttgttctaccrcaccactctgcttcataatttgtctttgtgttgaggaaaatgtctgtctcctgagtgctgaattgaagatgggaaagggaagttcagaaaaagcagtgtaaggagaggagtgcagaagggtgcctctggaacaaagcagccactgactgaaaccaccaaggtggagctaaccatcctgtaccaccaggaagtgccccatccaaataaaatttggaaggaatagaggtgttgcatgtatctgtctgtgtgtgcgttagcaatggtggtacacatagctcatgtttgtatttgaaccagaattcacagtggtcttcaagtctagtgattggaaaatcaggccccaaatatttttgttttgaatatgtatccatcactccatac

SEQ ID NO: 442669 - DNA, 572 bp, Homo sapiens
aggaaatttattctgaattgcctggtaataaacactaagtaagattttcccccttcactatccagataaaaaattaattttccaatatttgtaatcagtcggtaattggctattatttttttcctttccaaagttcagcagaaatctgttgacatctgtgatgctcagtccagctagtgcttgttctaccacaccactctgcttcataatttgtctttgtgttgaggaaaatgtctgtctcctgagtgctgaattgaagatgggaaagggaagttcagaaaaagcagtgtaaggagaggagtgcagaagggtgcctctggaacaaagcagccactgactgaaaccaccaaggtggagctaaccatcctgtaccaccaggaagtgccccatccaaataaaatttggaaggaatagaggtgttgcatgtatctgtctgtgtgtgcsttagcaatggtggtacacatagctcatgtttgtatttgaaccagaattcacagtggtcttcaagtctagtgattggaaaatcaggccccaaatatttttgttttgaatatgtatccatcactccatac

SEQ ID NO: 442670 - DNA, 492 bp, Homo sapiens
gtgggattgctggatcatatggtagttatacttttagttttttgagaaacctcctttcagtatgggaacatttagggttgtaaatagtaaagattacaaggttcaagaatatattgggagctgttactgtaccatagggtgatgtgaacatagtctataggagccaacttgacgtttgtgtgtccagattgccacgcttagtccatctgatggatttcaatccatggaaggggactcttgtcctgggatgtcattaaagttcctcttccattctgctggcatggattatttgcrttgaatatcagcaactgtgtatgcctgctgctttgttcctgggcctttgactttaagggtacagagccccctcatagtgttagggaattcatgaggaaacttgatttcctaaaattttaattgagtcatcttctgcctgtagagaagcaaaatgccagatacttctttaatctttgcgtcactttactacatgcctca

SEQ ID NO: 442671 - DNA, 492 bp, Homo sapiens
gtgggattgctggatcatatggtagttatacttttagttttttgagaaacctcctttcagtatgggaacatttagggttgtaaatagtaaagattacaaggttcaagaatatattgggagctgttactgtaccatagggtgatgtgaacatagtctataggagccaacttgacgtttgtgtgtccagattgccacgcttagtccatctgatggatttcaatccatggaaggggactcttgtcctgggatgtcattaaagttcctcttccattctgctggcatggattatttgcattgaatatcagcaaytgtgtatgcctgctgctttgttcctgggcctttgactttaagggtacagagccccctcatagtgttagggaattcatgaggaaacttgatttcctaaaattttaattgagtcatcttctgcctgtagagaagcaaaatgccagatacttctttaatctttgcgtcactttactacatgcctca

SEQ ID NO: 442672 - DNA, 538 bp, Homo sapiens
gtggtaaatgtatgtcctgaaaataatcagcagtgcctttcaagaaaactccataatagaggccattatagtttctgcaggaaatggcaaggtaacctcctcaaacaggaggagagatgctgcttatactagcaaagactcagcaaaattttgggttttccatgttcccagcttcctaaacattttcccccatgtcctcattctagttttsaggattacatttctttctaatcaaagccctcatttaaacagtagtcaactcataggttgggaattcaatttgtattctaaccctgcctcttgcaagataagactctaggtatggttttcagagatttcaatcctgtggctataggaaagaagggtttctttcggggcagacctagaaacttttaggtaatttatgtggagctagacactgagctcatccaattattcctctactttctccagtgcagttatgagcacccaatctatctcattatatactttagtttgactaaaatgttccaaggtacaaatatatgccactcaaatt

SEQ ID NO: 442673 - DNA, 546 bp, Homo sapiens
tttatagctaaaattgggaaaagacatattgttatacctttatgggcagaatttattgcatcgtgttgtctgctaatttggaactgtgaaatatagagtgagaatatttaatattaatataaaaattacttatggctctatattgggtatatggattccaaatctatgaccaaaatgtcaagtaattgactcccttatttcttaactttctccatttgtctcttccctccataagcattcactgtggcctgtttagtagattcaaattttatgtcagttataaaagtgtgactcatgctactggaggatgtgaaagaatcactcaactctgcagcctggattgcaaataagatcactgaaaaatgcataccccattggccttatttcacacaatttkcctgttttatattagaatgtgttagagagaaaaggaaggcagaagctaaggagatattgggatagaagcaagagatgaaatgtccggtgaaagaagttacttattatcaaaaaagactgtgatgttctgacagtaatacagaagaagat

SEQ ID NO: 442674 - DNA, 631 bp, Homo sapiens
aaatgaacataaaaacaaacagcaaaaccatgaatgctgaaattaagagtgaatgtcatcaaatctcatttaattttcctcataaacaaaaaaaattgatcaatctttgactgatgaggagccaagtatttctctcttggaactctgtattgtctcgttcaatagttcaaaatcactgcatgcttaatgtgttgttaagtagtgggtaagtacaaataatacaacctggctgctccttgctactgctccctaccagtgctacaaaagagtggccacaaaagttattggcacatgctggggtgtgctgttactgaatacagcatagacttaccaggggatttcaaaagaaattgaggaatcacactcaaatgtcagcatgacaataggaagcatgcttggatttcaaagacaacttactatccttcaccacttccagttggktgcataccatttaataaggcatggacaagcttagaactattttttcttactaaagtatcccaaaacaaccagctaaaaatagtctatatgctagaaaggcatatttggcaactaacttggctacattagaggctttcccgtcgtttatttatttactttttaaaactacattactgaatgtggggtggag

SEQ ID NO: 442675 - DNA, 349 bp, Homo sapiens
aaactaaaaataattttgaaatgaatrataactgtaacataagttatcaaaacctctgagatacagcaaaagcagtgataagtggacagcttacagcactaaatgcctacaccaaaaagtctgaaattagcaatctgatgtcacacctcaaagtactagagaaacaagaacaaactagcagaagaaaacaaacaacaaagatcagaggaaagctgaatgaaattgaaacagaaaaaaagaagacatcaatgaaacaaaaagttgattatttgaaaagataaatagaattgatccagcactagatagtttaacgaagaagagagaggattcatataagctcaattagaaa

SEQ ID NO: 442676 - DNA, 555 bp, Homo sapiens
  misc_feature (1)...(555): n = A,T,C or G
atgataaaagattgaagtgtggtatgtgatacagagatatttactggttgaaaaaagttaaatagcaacatgtttgggtacagagnttttattncgcactacngtaagactttttnaccncagttttnnnnnnnnnnnnnnnnnnnnnnnnnnnnnnnnnnnnnnnnnnnnnnnnnnnnnnnnnnnnnnnnnnnnnnnnnnnnnnnnnnnnnnnnnnnnnnnnnnnnaaaacctaaatttcaaaaaaaatttcaccatttgtattasttatctattgccatgaaaaagttactcacaaactcagtagcttaaagtaacaaacatttattaactcacacttcctgtgggtttggtatctgggcacggctttgctgggctttctggctcgcgttttctcacaaagtgtcagcctggtagcagtctcattctaaggttcaactgagataggatccacttccaaggtcactcaacaggctgttggcatgattcagtccctcatgggtggttggcctggagcctcatttcctcacctgctcttggttgaaagcctccctc

SEQ ID NO: 442677 - DNA, 503 bp, Homo sapiens
agcaaacttctacctggacatccagacctttccctacatcctctgaaatctatgtggaggttctcaaacctcaattcttgacttctgggcacctaaaggcccaacatcatgtgaaagccatgaaggcttggagcttacactgtctgaagtaacttcctgagctgtatgttggcccattttagccactgctgaagaagctgaagcagctggaacacagggcaccatgtcctaaggctgcacagagcaggggcccctgggtycacccacaaaaccatttttctctcctacacctccaggcttgtgaaggcaggggctgccatcatggtctctggcatgccctagaggtatttccccactgtcttggtaaataacatttatctcctcgttatttatgcaaatttctgcagtggacttgaatttcttttctgaaaatggggttttcttttctgtcacatcatcaggctgaaaattttataaattattatgctctgcttcctcttgac

SEQ ID NO: 442678 - DNA, 482 bp, Homo sapiens
tccctggtgccagccatggaagctgcctgtggtacacctggtccagctgcaacctcgcagggaaccaaagcttatgctggtggctggagctgtttgccctgacaagtgcagcctgctaggctgaggggcagaatgagtccaatgggcctgagtaaaactcaggcaaaggcaccaccccagccacagaggtttccagctggaaaagccacacctcraagattctgtgacaatatcactggtttaaatttccattaattcatttctcaaatcttccctgagtatctacttgtttcaggcaagtttttagacattgggctttaaggagtatctttcctaaggggggatacacagttgtataaataggtaggtagataaactggcagatattgaaagaggctagaaaaaagtagatgattaaataatgacaagataactaattttaaaagcgcataaagcattattttatttttctagagatgagg

SEQ ID NO: 442679 - DNA, 592 bp, Homo sapiens
taagccttttcttatgtttttacactcctatataacactttcacatcaaaagatactctgatgtgagaatttggggaaagagttgtctaggtatgtaaatagcttgtgcaaaagtcctaagaaagagacaagwtttatgtcttctaggaaaataacagaggccagtgtgacttaagcatagtgatcagagggtggaatatctggagttgtcttcagagaagaggtgggggccagataagtgtagaaacataggagcaacagtagataattaaaatttaattttaaatgtgaaaggaaaacaatcaagacttctgaacatcagagaaaagaataattgagcaatgagaagatatcttggtgtggagaaagataagaacgtacattattagtttggtatgggatcatcaattaaaaatgtttaggagacatacaacatggaagccttggataagcggtaatcctgacataatttcgaaagaaaagcagtggagttccttttctagccattatggattccttggtattggactttctaaaactaaaaacaactaaaaaattgaattacacaaagaaaaaataactgtcaggcatt

SEQ ID NO: 442680 - DNA, 592 bp, Homo sapiens
taagccttttcttatgtttttacactcctatataacactttcacatcaaaagatactctgatgtgagaatttggggaaagagttgtctaggtatgtaaatagcttgtgcaaaagtcctaagaaagagacaagttttatgtcttctaggaaaataacagaggccagtgtgacttaagcatagtgatcagagggtggaatatctggagttgtcttcagagaagaggtgggggccagataagtgtagaaacataggagcaacagtagataattaaaatttaattttaaatgtgaaaggaaaacaatcaagacttctgaacatcagagaaaagaataattgagcaatgagaagatatcttggtgtggagaaagataagaacgtacattattagtttggtatgggatcatcaattaaaaatgtttaggagacatacaacatggaagccttggataagcggtaatcctgacataatttckaaagaaaagcagtggagttccttttctagccattatggattccttggtattggactttctaaaactaaaaacaactaaaaaattgaattacacaaagaaaaaataactgtcaggcatt

SEQ ID NO: 442681 - DNA, 599 bp, Homo sapiens
cagttaaattcctcaggttttatcccttcctcttcatttctaattgtagtcactttccaggcagttttatttgggtctttcatttatattcatatatatgcttaataataaacttattttaaaaagaaatatatactttgtaattcaaattatagtataaaacatttttccaatatgtatataataaatatatttttatatctacctacaattttatataagctgatagacttattttatttaaaaatatgaagatttatcatatccaaaaacctcctttaatatataaatcagaatatttaatattatgaaaagttttcttacatacaattttatacagcaatggataataatctgataatttctaaaattaatgtagtttaatttaattaacgttaaaataaacacttttgactaygtgccttgaatcattgtattatgttaagaaacaatttttcaacatatttaaattataatatataatgaatatatgtataatttggaagattataaatgtatatgttattagtaaagatttatcttatcagcctcagattttacataactaagaatgagtatactatatcttactttttaaa

SEQ ID NO: 442682 - DNA, 399 bp, Homo sapiens
gcttaataacttaattacacataggaaggagcatatatttcacctacattatatatgtatataggtaatttgcaaagattaaactagttgcttctaatttctttcaactaaaagccatttgttagaaagcacagtaggcaaacaatgttactccaaaagtgcataaaattttatacaataaacaggtagtattttctttttctaatttataaatttataaatcaattgagctsaggatgcaaaacataaataatagtaaaattgatagtgctgtaaaataaatggtcagttgtgttacatgtatagactaagaaagcttgaaattattatttctagcatgaaagtctagaagaatctttcttggtcaggtgggtttgaatcatctgatctgtggtcatg

SEQ ID NO: 442683 - DNA, 558 bp, Homo sapiens
gacaatatttaaatgtgaggctaaataatagttttcttcagctaatatttgaactgtacagatatatctgaatttgtatgtaaagtattttaccatgagttttttgttatttcaattttcagattctctgtgaaagtaaaataaagacragatatttaggaaagagtgacactttcataaagtaaatacaaatagtcatcttattctcctcccaagatttaataatgctttatgtctgttagaaatgagcattttcttaatgtagcctgaaaagtaaagctgggtgagggatttgtaactttgttttaacacacaaatataataatattaaatcttcctcacacatcatatttatttaaattaagcagtcaggcataggtgatgctaccacaagttatagctgggttgcttatattttactttgctatctttgtgaactctgaaaattggagacagttctcagttaatttagaaatttcattttgccaaagttgaggatgcgtgctcatgaaacggcctcaggaggtcctgacgatatgtgcccaaggtggtcaaagc

SEQ ID NO: 442684 - DNA, 597 bp, Homo sapiens
acattagaaacaggactgtgctcagaaaatacaataaataaagatctaaaaaaagctaaaaattatttttgaaagcatatttggtaatatctatactagtttttttcatactaccccttagttttacttcatacagaatagtctacaacttattcagaaatgtaatgatgaaacatcttagcctgayatcaaaagatatgtttctttatttatctttcagattaagaggataaacaattgtagattatatttgtgaaaaagaatatcaaaattacctaccaaacaaaaaggtgaggtcatcacagaaatgttggctactctctttctatgcacaaaatatcattaattcaaataggataaatgttaatacaaatcatctttagaaataataaaacagagaaacaccatttcactgaagaaagtaagctcacaaattctcacttggataaaacaaaagaaataatgtcttcaaaatattcaacaatttttaatgttttctcctggagtaataaggagaaacttattactaaacaaacaaacaaaaacaaatgaaagtcctatatgtaagtagcacggaaaattgcaacacatgattaa

SEQ ID NO: 442685 - DNA, 602 bp, Homo sapiens
agcaagctagacttggacaggaagcaagctagacttgagaaagaaaattttgcactgtgaggtctttatggatattgttcacattgaaatattaaattattatcttgccattcatactgtcagtctgctatttctcatcactaccctgaactggctttcatcgagctaataattgttacctcatcatacatttcaaaatcctcaattccttgacttccaaccaatataaaactgtgctgactattccttttttcttactttttaattttgctgtgataagaacaattaccaatacaagatgtactctcttaacagatttttaagtattcaatatgtgtacagcattagctcgagacacaatgttgtacagcagatttctagaacttgtttcatcttacataactgaaactttatgccyaatgtttggcaacttcctgtttcctcttttcttgtcaacacttgcaaccaccatttaactctctacttatagaagtttgactattttagatgtctcatataagtggaatcatgcagcattttttctgtggcagtcttatttcacttagcttaaagtgctcaagcttcactcatgttgttgcaca

SEQ ID NO: 442686 - DNA, 538 bp, Homo sapiens
atttccttaaatgaatcccattgacattcacatttcacaaaagaagtgtgtatayggctgtgatataactaaacttgatactcataacttgttttatactgcacacaggacactgtcttagcaatgtactgtcttagtttatgtccacacagagtgtagaagtttgtgattaaaccttcttatgctgtaatctattggttgataataattttctcagggcatgtgaaaatttaagcagaatggaaaacacagcctatacactgccaatcaaatggtagttgtcacttgttacctaaattaagacatgtaattattctttaggttgttgtcaccagagaatccatatggagtcttcagatacagagaacatgtagatcagtggataatctgcttccttcacagacaagtcaacatgtctttcaatattagtcattatcagcaatagatctgagatagtttaccttagagtttcactctcttgttccaaatcattcctgtgaaaataattagaccccattttgaaactcaaattcactta

SEQ ID NO: 442687 - DNA, 598 bp, Homo sapiens
ttaacttccaataactagtatataaaatacacaagaacgagggcaacaaagagaaggaataaaagattgattagtacataaaataaatgcgtgaatataacaagcagtagggaaacacacaagctattacacttggtgtttctgtagttggtcatggatcctagataatatctagactttgctcttcaaagacctatttcaatttgttgttgttgctctcagccagaacctcagcttctcttccaactttagctgatgtagtaattgaatcattcccaactctttattctggaaaggagaagtgggggagagatagaaaaagagagagagagagagagagaattaatacattaacatttgtataattggggaacctacataggggtggtatatgtgtattcaccatatgaatcttttaattatcagttgttgaaaatgttagttaagaagttggcaaaaataraaacgatatagttatgggaaaataaaatctgtgtataaagccttaaagacatccaaatacaaatgtcattacatttgagtgtatttccacctttcctctgctccaattagaaaaaaagtgaataaattggaccag

SEQ ID NO: 442688 - DNA, 618 bp, Homo sapiens
catgcaagaatatgtggggcattcattatgtgccaaacaaacatctaggctccaggaataaaaagataaatgggacagggtgtctagttttaaatgaaagatttctactaggataagaaagcaaccatattgaatatgaagtctagtaagagtatgtgtgatgtgaaacaaatctggtctttctcagtacaaataaaaaaattattcccaataaatattaattaaattgggatcaagaggataaatctgtttatttaagagaataggagtactagaaaaaacagatacaccatcttcataactaggtcaatatggaaaataacttacaggattaaagttacttttcgtattcgagtaagcaaggaaatgctaaaatattttaatcaaggatgggatttgatcagatatttgcttcagaaatattcatcaggaagacagaaaaatttgcttagaaccctttaataatggagatcagttactactgtaatgtaataaagatattttaataacctactcagatggtgaagctgtcctagattaaatcataggcagctgggatgaaamagaaccaacttaatgtaaaagtcttaaataggaagattttggctgggcgtggtg

SEQ ID NO: 442689 - DNA, 591 bp, Homo sapiens
actccaaggacaaattgaacaaattggctaaaaatcctaccacaggaagccaaacatattctatagtctgaagaacagagtaacatttttgctgaatagagcacttacggcttttcacaaaaacatgattctttaatacacatctaataatgcacaatcwatcaatatacacataagaaagcttttcaaattttagcatcccacatggtctctgctgtgagagacaataacgcacttgtaaaatggatgacataaagccctatgcatatttcaaatgagacaagaagatatttatatagttgatgatgtttgctattgtaataatggcattattttttcaatacaccactcgagtgctattgagtatacaattccctcgaagccttttcttgtgttatagagactattgcaggacctactttaacacttacaataatttgaaattataaaagaaacacattctgaaagctttattaaatacacagtacaagccactctatgttgaaacctatttttccacaactggcactggaagagtgatatcattgatacataatatgcaaaggatgaatttcatcttgagaatgagtt

SEQ ID NO: 442690 - DNA, 583 bp, Homo sapiens
gctcttgatctcagccaaaggccaaaaagtgatctgtagggagtgtagagatatgaagcggagtgaatactgtccattcaaacstgctttattacttgactaaggttgtgaatttcagataacaaagtacaaattttaaatgttgctatttaataaattgtgtttaaatgtctatgtgggccgggcgtggtgactcattcctgtaatcccagcactttgagaggccaagggcggcggatcaactgaggtcaggcattcgaaaccagcctggccagcatggtgaaaccccgtctctaataaaaatacacaaattagcggggagtggtggtgggcacctgtaatcccagctattcgggaggctgagacaggagaatcacttgaacccgggaggtagaggttgcagtgagccgagatcgtgccactgcactccagcctgggccacagagctagactctatctcagaaagaaaaaaaaaaaaaagaaaaagaaaaagaaaaaaaaaagagtatatgtgaaattgttggccaggtgaggtggctcacgcctgtaatcccagcactttgggaggccaaggcgggcaaat

SEQ ID NO: 442691 - DNA, 583 bp, Homo sapiens
gctcttgatctcagccaaaggccaaaaagtgatctgtagggagtgtagagatatgaagcggagtgaatactgtccattcaaacgtgctttattacttgactaaggttgtgaatttcarataacaaagtacaaattttaaatgttgctatttaataaattgtgtttaaatgtctatgtgggccgggcgtggtgactcattcctgtaatcccagcactttgagaggccaagggcggcggatcaactgaggtcaggcattcgaaaccagcctggccagcatggtgaaaccccgtctctaataaaaatacacaaattagcggggagtggtggtgggcacctgtaatcccagctattcgggaggctgagacaggagaatcacttgaacccgggaggtagaggttgcagtgagccgagatcgtgccactgcactccagcctgggccacagagctagactctatctcagaaagaaaaaaaaaaaaaagaaaaagaaaaagaaaaaaaaaagagtatatgtgaaattgttggccaggtgaggtggctcacgcctgtaatcccagcactttgggaggccaaggcgggcaaat

SEQ ID NO: 442692 - DNA, 556 bp, Homo sapiens
cattttccaaaagaagacatacaaatggccaacaagtatatataaaaatactcagtatcactaatcatcaggtaaaggaaaatcaatagaatgactattatcraaaagataaaaaataacaaatgctggtgaggatgtggagaaagagaaacattcctacattgttggtggaaatgtaaagtagtaaaatcattatagaaaacagcatggtgttccctacaaaaactaaaaatagagcaattgtatgatctagtaatcccactgctgggtatatattcaaaggaaaggaaatcaatatatcaaagagacatcagcactcccatgtttattgcagcattattcacaattgccaagatatgaatcaaactaagtgtccatcaatagattaattggtagaaaatgtgatatagatacacaatagaacattactcaaacataaactaggaatgaaatcctatcatttgcagcaacatgggtggaaatggaggccattacattaagtcaaatatgccaggcacagaaaaacaattattgcatagtctcactcttatattca

SEQ ID NO: 442693 - DNA, 446 bp, Homo sapiens
aaatttctctgttttctatacgtatctctaccaactccttctttctacttattttgggattgttaattatattctacatatatttttygagacagggtctcattctttcatccaggctgaggtgcagtcatggctcactgcagcctcaactttcccaggctcagatgatactcccaccccaccctcccaagtaaatgggactacaggcacgcaccaccatgctgagctaatttttgtattttttgtagaaatggggtttcaccatgttgcccaggctggtgtggaattcctggctcaagtgatcctcctgcctcagcctcccaaagtgctggaattacaggtgtaagccactgtgcctggccatgtattgtatattttaagactgaatgtaagatcatcgttttttgatatttcttcattgctattttaagttttaaagtatgtta

SEQ ID NO: 442694 - DNA, 606 bp, Homo sapiens
attcataattatggaacaggagtgaatttcctaaataagggacagaaaacacataaattatgaaaaaaggatacatttttcactgaaattgctaagatatgtttataaaaggcagcataaagtcattgaaagataaactgagattacacataaaattggcaactagagtacccatgcacactcacacatatatgtagacacgcatacatagttgtgtgcttgtagtctgcaatttaagagaaaaagacaaaaacattgaaaaattgggcaaatgcttgaatagccaattttgaaaagagcaataaagagtcaatagctatatgaaaaaagtatttatcctatacattaatcaratgttatccaatctagtagacaagcaaaaaattaaaggccatagaattcccagtggtaatatagagcaagatgagtaacttcttcattgcttgcaggagtattaattagtacaaccatttgaggaaccattttacattcacaatatgacccatcaattatactactttgtatgaactacagaaaaacacttctcaatatacataaaaatgttcacatgaacactcttcagaagagaaaacaactgaaatgtcc

SEQ ID NO: 442695 - DNA, 518 bp, Homo sapiens
aatgactaaaaagttattttaatattcagtatcaacactcccattttaccattaataactagaatagctaattcttaagtagcctttgcagttgtaagagcccaagaggtaaatggaaaagagaaaggaatacccaggattcacacacattttattttttaggaaggctgaggaaaatgaccctcagtaatgttttagccgtatcatttttctatcacaacacaaagcgaggggtgatacatccacacgatattattgtgccataaacacaaattccaaaaggatatttctaaaatttaagactcccaagtatctcttcatcctcaaattagtttaagatagaacttacagtaatttacaaattattgatagtaattaacaaatcaaaaaacaacttggttgaaaacgaatacaaygttaaaactatttgccagtgaagaactggatgtactattggttttgtacatctttcccaagttaatgtgtgccaaaaatatttgtgaaagcaggtataattt

SEQ ID NO: 442696 - DNA, 579 bp, Homo sapiens
gtttatgccagtgcatggagtaacgtgcaagggtatgaacaattctgggaaaactcatctcctccctggataaacagtacaaacccaatcccatttccagtgatgattaaaaataatctttgtacaaaaagggtaacctaccactattaatacagttacaccatttatttaaaaagaaatagagtttktgacatggggaaaatggcattgctatatccacaaggcacttaaattcactgtttttgttgttgttgttgttgtttgtttgttttagcaagcctgatatctttggacagaaggagaaatgagaaccgaagcaggactgctctgtttgtgcagcagaatcctccatttttggtggaaaagtgtctgccatttgatgaacactgaaacactaatattttcatttgcggttagatttagggtcagtcatgcagtcatggcctcatgccatctgtgccatgtcactccaactcaggtacaaaaatgcaattctggtattggaaacccaggtgttggagctaggacatttctctgaaatgctagcaccatttccccttcagcaagctgtgtgtgtcc

SEQ ID NO: 442697 - DNA, 644 bp, Homo sapiens
gtgtatacttatagcttaatgcaccctgattgggagagccttgtgaaatatcactttactgggggagggaggagtagtcacatatgatggtccacagttaaacacacagctatgcctacctatacaagataaagatgaagcacatggaacatttccttggaaatgtgaaagggaatgaccccagcttaacctgagtcagttttgtattcaaatagtccctctgtgtacattttctcctttctctcaaacttgaatgagctctaaaataaatatctatttacattgaagccattgagcatttatctacctgaccatagcctagaaataagagtgaataagaaaaaggaaaaagtttacgctttgtattttgtaaatgtatgctagatttctatacagatattttcaagggccttgacattttcaatggcttatgagatattctaagaccttcatataacatttgagtccttgaaatcaaatttattggctttggaatacaaaaaagaacccataaaatcaaaatgaataaatgtttaattaaatgtctgcaagacataacattatgtaaacgtcattaattattaaatttagtattcataaaagttttaytgaatttgaaaacagtttgctggatatattttttc

SEQ ID NO: 442698 - DNA, 612 bp, Homo sapiens
ggaacatcaacaattgcctttgattgttgagacgctatgtaacagaatgggagagggaaagtccatggttcaagtccaggccttataattttctcttaactgtatgacttaccatttctgaacttcactgccttcttcattttccttcattgcactaacatacctttcagtgttatgaccctatagttttactcatacattgaacaacactttacctcaaggaactaatgttaaaggaaggatgtatgggacacaaaggaatgggttctgatcttgtattcaatctactattagggtcacagataagtcatttagccttactggattccaatattcttattcatacaatgatgttatgaataaatctttatgttccccaaattcrtatattgaaattccaacacccaagatgttgatattaggaggtgggggcctttgggaagtgattagataataagggcagaaccctcatgaatggattgtatcctaataaaatagaccctagtgagctcccttgccccttctgccatgtgggagcacagcgagaaggtgccatctgtgaaccaggaaggcggctgtaacaacaccacaccacactgagtctgtgtggct

SEQ ID NO: 442699 - DNA, 635 bp, Homo sapiens
ggatagtaccaaaccctatatctattgtgttttttcctatacatatatacctaggattaagcttaccttatatattaggcacagtaagagattaacaataataaatgataataaaatagaacaattataacaacgaactttaataaagataaaatgagtgcttgaacacaagcgttataatagtgcaacagtgaaygtaataacctagacagctactaagaggtaggtagcatgtatagcatggatgcatcatgtcacaggtaggaaggagcaagactgtctgagatttcatcactctactcagagtgatgcaatttaaaatgtatacaatttttattgctagattttttcatttaatatgttcaaactgcaggtgacttcagctaacacaagccacagtaagtgaaacctcagataagtggagactactgcattttaaaagggtgaggtttttatacttggcatgtagggacagggaacacattgtctttgattgttgagagaccatgtaatataatggggaaagggaaacgtccatggttcaaatccatgccctatcgttttctccatgccttatggtgtaacatttctgaactttactgccttcatcttccttcattgcattgcatactttt

SEQ ID NO: 442700 - DNA, 500 bp, Homo sapiens
tcctagcccccggtaaccattcttctactctctatgttcatgatttcaactgttttgatgtttaggtcccacaaataagtgagaacatacgatgttagtctttctgtgtctggcttatttcatgtatcataataatctccagttccatccacgttttcacaaatcacaagatctcatttgtttttatggctgaatagtactccattgtgtgtatgtcttacattttatttatccatccrtctggtgatggacacttaggttgcttttaaatcttagctgttgtaaatggtgctacaataaaaataggagtgcagatatctcttcaatacactgatttcctttcttttgggtatataccccagcagcaggattgctggatcatgtgttagctctatttttagttttttgaggaacctccaaactgctctctgtaatgattgtactaatttacagttccaccaaaagtgtacacgggttccattttattcacatcctcacca

SEQ ID NO: 442701 - DNA, 557 bp, Homo sapiens
atcatgtgttagctctatttttagttttttgaggaacctccaaactgctctctgtaatgattgtactaatttacagttccaccaaaagtgtacacgggttccattttattcacatcctcaccagtatttgttattgcctgtcttttggatatcagcccttctaactagggctgagaagatatcacattgtagttttaatttgcatttctctgatgatcagtgatgtcaagcaccttttcttatgcctgtttgccatgtgtatgcattttttgagaaatgtctattcaaatattttgcccatttttgattgggcaaatattttctcccattctgtgaggtttcttttcacttttttgattgtttcctttgctttgagaatggtttttaacctgaggtgatccaatttgtccatttctgctttgkttgcttggtttgtgggtattcctcaaaaaatttttgcccagaccaatgtcctgcagagcttctccaatgttttcttttagtagttttatagtgtgaggtcttagatttaagtcatgattttcatatatgattgg

SEQ ID NO: 442702 - DNA, 444 bp, Homo sapiens
tcatgtaaacttcagtatttcagccatcagcacatttatcccattgaagatcaataaaactcaggaaaaaggaagctatattcagaaaagtaaccatcatttcactgtcaaaataagtggcttaatatcctaagagctatttaaacttctctcagctttagttttttcatctctaaataatatttttttgtgggattattttaaggataacaaaacagcttctatttaatgaaatcttaggtgtgtcaggcactatgctacccacttgacatctyacataattcccacttttctggaaggttatactataattagtccttattttacaggtggggaaactgttgagaccaatattacacagactagatgcttaattacatttagtatattatatatggattatcacatataatataaaaatgaggatttttaatggattttgga

SEQ ID NO: 442703 - DNA, 493 bp, Homo sapiens
ctgaatattggtatcaataatccctgactcaaagtccaggaaatcagctgagtctaggtcatgttcctgtgccctacttacaaaggaggctgggaaaccaagtatctggcattttcaacttctttagaatatggtcagtagaaaatggattatgtctgccaccagaggtcataagatacatgattccctaaaagcctcctaaggaggctcagatgttgaatagmccaaaaaaaaaaaaaaagaaaagaaaaaaaagaaaaaatgctaagtggctagtattttctctcagggcaaaacaagtcttaagtgactctaatttctcatctggcacctgctgttttccctgcctggcacatcttttctcctttctctggtgacaaccccaattttcggggagacctgcatctctcatacttcaaatgtgactccaaggtgacctgccagtctaactgttctcctgcctcctggcacgtgatcccagttggaattgtcc

SEQ ID NO: 442704 - DNA, 538 bp, Homo sapiens
tctacactccaatataaatgtgcagaatttgttttaaaattytacacctttaaaatctctaggattttctaacttaattcatgtttactaaagaacaacagtacaccttggtgggaggaaaagaccaaggcatatggtgttgctttcttaagcccatcaccagaagactctgccaggcagtatatgtcatgtgaaaataccatagtgtaaaagtatctgaatctgagcacctgctttcaaatcctgattttgctaacaaattactgtggtcttaccttttccaagcctccaattccacatcagtgaaagcataaacttgagtttcatagccctttccccttgcatgggcttgtaaagattaaatggcattacttaaggaacatctgtgagcctagcacagagtagatcctcaataaatattagttttatttttcctttctctgaattgtagcttcctcatctgtaaagtaggaattttttaaatgctgccagaaaaaaaaaaatgcacaggaagttccaacattacacagagaaaata

SEQ ID NO: 442705 - DNA, 554 bp, Homo sapiens
atgtaaacaaatggcaatggttgtgttccacaaaaaaccttatttacaaaagcaggatggtgggctggatttggtcccactggccttagtttgtaggcctctgtgttcgatgattagagtcatcgagataagtatgtggagtacacctaccttcactgcagatctaattagctgcagaattagatctgcagatggatttcatacctgggttctaaagctagtgaacccatcccttaaatggggtaggaattcctccgctaccaatgtttgtttctcagcatctcatatttccattgctagctaacagtccttctgattgacaagttctcytcataaatacaaataacttcaattatattccaggtttggccttagcctggaggtcattcttcctgtttaaggtatagctttgtatagctatccatgtgtatagcttgttgtatgaaatgtatacagctatgcttaaattctttttttgtttcatagcttaactctgaaaacacaaccttgttttattttctactttaatattttgtgggagataggggtgctca

SEQ ID NO: 442706 - DNA, 584 bp, Homo sapiens
ccacaagcttatgactctgataatcactagaaaacatgtaacartgccttgcacagtgcttgtacaaaatgaacagtaaataaatcttcgttgaatctgagttcaagttagattctgggtggtttccaagaggaacctcaaccatgttattactaattagtgtttccctcaacattctctcgtctttctttacccctttttatttctccactgatttcttccattggtttcaccattatattattgaaaagctgtcctttaagttttattctgaacttccatgtttgagatcctcaaatcgaaaatctctctcaaatatgctgtcagtagagatctgttcaagatggcacgtaattttttatatgccttcatacttgtcttatatcctgttttccatgaaatgctcattcagttttctagattaatctatgtgtgaaatcaatatggacaaaaaggaatatacacaaggcaaaatgtgactccatgtaacattctaacatagtgtttaaaagtgtgggctaaataacttaagatcacttcactttcgtcaagtccctgctacgtaagatttcccatgtgcaaaa

SEQ ID NO: 442707 - DNA, 529 bp, Homo sapiens
tcctggtaaagaatcctcagagttcaattagcggttgagagagtaatttttagagcacagcacggaagttttaccatgtaatcgtgctctgtcctagagcaaactatctttgccatccattatatttataaagcttagtactgctgaaaagttcaccctggagaaggtcatcttaatggttgaaacattaaggtgaggtttgctaacacaaactattgtctctatatcctttkttcattctattttagtccttcctcagactctttataggattaaagtgacatataaacatacattttgcgaaacttttgacaaatcagggaacctccctgagcttcagtttccctaccataaaatggaggatttggactaaattatctctaaaatcctttccaactcccacattctggatttgttttagcctgagatacacattgttaggctctgtagtttggcctagatttaattccagattccaggcacggagtgagttacttcctgttattaacgggtttcttaaatggacata

SEQ ID NO: 442708 - DNA, 517 bp, Homo sapiens
atcatgtatccttaagttgctgttggctatgacaattaagaccctatatttttaacaatcacttcctttttgtctcagtgtcttcacttgcttattttattttatttatgtaagctgtcttaaattcttcctctacttagaagagcactaattatttactcttttgtttaggaaatgttctggaaatccctagtttccatacaacctgccaagtttttttttttttttaattttctgaaaatttgcaaatgaggagggcaatcctatccagaggccaataagaatttatgattatwgaagcaagactttccttggatggcaaaaggagaataatctttattagtgagtcagtcagttgaaagtcttaaatcttacacacttgaaaaataacctagtgaagtttcaaaagaggtaggcacattagttgaatgcttataggtacacaaataaataggtaagaatgattaagcacattagtatttaaaaacattaacacttcagctactagcattagtct

SEQ ID NO: 442709 - DNA, 529 bp, Homo sapiens
gctaactgggtgtatccagaggagagaggaagcgggtggggttggggtggggggaacaccctatgacgggagggaggtttataacttggagcatggcgcragctgatgttaggctcctgccttcccatggaaaattgtaggatgggggcaccttcccctttgatatttacatttcaaagagatgactctcaggtctttgagaaagacattcctcaataataaagctgacagaaggcttatttactgtctagaaagatacatttcaaaaagacagagaaggtactttatatacaggttttctacagtacacgttctgacaaaaagggaggaaaggaaaatagctcttattttaagcaggaggaattaagcctcctgtttttcattcctttacatccttacactaggcaaagatttcttttttcattcatgcaaaagtgttcactgagcagaggaccacacaccatgtgccagactctatgctagacactatgaatacaaatatttagtgagatgcaaaaaatccaatccc

SEQ ID NO: 442710 - DNA, 567 bp, Homo sapiens
ctttctgtctctgaaatcttcgtctgcctctctcttacaagcatatctgagatcacatttagggtccactcaagaacccagaataatctcccccctctcaagttccttaatttagtcacatctgcaaaactttttgttgttgttgttgttggtcatatgaggtcacattcataatttccaggattaagacatgactatcttttgggagaccatttttttagcctactaaataactaagaaattttattccaattaatttgaaaatttaattaaaagatggccaaatttttagaaaaacacagactaccaaaatgaacacaagaaaagataggaaatatgacttgtcatttcttttagagrttaaatatgttttttaaaacattctcatgaaaaaaaaatgcctggccaaggtgactttaccccagtgatttcttccaaacataagaagtaacaccgatcctacacaaaatcttccagggaataaaaaaaggacccatcctaattgattttatgagagtaggataacattaatatcaaaattttagtacacatacaaaagaaataaat

SEQ ID NO: 442711 - DNA, 582 bp, Homo sapiens
attactactttttttaccttctgctttccccacatattatagrtgtttccttatttcttactttggaaaccttcacaaaactattttccccagccctgacaagtatgttgacattacccttctacaccaacccttcgttcttactctgcattataaaatctcaaaatcaacagtcaggaaaaattggagaggagaacctaaataggcaagcaggattttatttagaagaaatagaggaaagtttaggaaccttaatagaatagtgatagttttgctacatggaatcaatttgtaggcccttgcatactatgagttagtagagtcataaagaagcttcatggagcatttattctaactcatgaatgaaaaactttggtcagaaaggttaaatggcctgccgcagatcaaatattaatattcgtactgaatctggggagcaattgtcccagctacatactcattatttgagcactgtgcccatagtagcagtcagcaaactgtagaccttggatcaaatctggcccactgcctgtttttgccaataaagtattattaggacacacttatttctttacctattat

SEQ ID NO: 442712 - DNA, 582 bp, Homo sapiens
attactactttttttaccttctgctttccccacatattataggtgtttccttatttcttactttggaaaccttcacaaaactattttccccagccctgacaagtatgttgacattacccttctacaccaacccttcgttcttactctgcattataaaatctcaaaatcaacagtcaggaaaaattggagaggagaacctaaataggcaarcaggattttatttagaagaaatagaggaaagtttaggaaccttaatagaatagtgatagttttgctacatggaatcaatttgtaggcccttgcatactatgagttagtagagtcataaagaagcttcatggagcatttattctaactcatgaatgaaaaactttggtcagaaaggttaaatggcctgccgcagatcaaatattaatattcgtactgaatctggggagcaattgtcccagctacatactcattatttgagcactgtgcccatagtagcagtcagcaaactgtagaccttggatcaaatctggcccactgcctgtttttgccaataaagtattattaggacacacttatttctttacctattat

SEQ ID NO: 442713 - DNA, 582 bp, Homo sapiens
attactactttttttaccttctgctttccccacatattataggtgtttccttatttcttactttggaaaccttcacaaaactattttccccagccctgacaagtatgttgacattacccttctacaccaacccttcgttcttactctgcattataaaatctcaaaatcaacagtcaggaaaaattggagaggagaacctaaataggcaagcaggattttatttagaagaaatagaggaaagtttaggaaccttaatagaatagtgatagttttgctacatggaatcaatttgtaggcccttgcatactatgagttagtagagtcataaagaagcttcatggagcatttattctaactcatgaatgaaaaactttggtcagaaaggttaaatggcctgccgcagatcaaatattaatattcgtactgaatctggggagcaattgtcccagctacatactcattatttgagcactgtgcccatagtagcagtcagcaaactgtagaccttggaycaaatctggcccactgcctgtttttgccaataaagtattattaggacacacttatttctttacctattat

SEQ ID NO: 442714 - DNA, 471 bp, Homo sapiens
tctggtttttaacccttcatgagatgtgatgtacagtttacaaatattttcttccattctgtgggttgtctcttcactatgttgaatgtttcaaagatggttttattaatgaaaaaataccatgggtgtatatttctccatagttcatagaagcagaatggggatgaattcaggtgactgaaaatgttattatcttgaataagcttaatggatctatttcctaatgtagtaagtcttttccattgctaactttggtgatttttattattaaacaaagtcaatataagatgtggttggttcatctggattaaaatacatacacatgccagaatctattactccttttttatgtttatasagatccacaaaaattgatgtgaagagccagttttctaaaactaatagcggagagtgtcatgcaaagatttgtgactaaatgtgtatacttatagcttaatgcaccctgattgg

SEQ ID NO: 442715 - DNA, 571 bp, Homo sapiens
ggacaacattatccataagactttttgagttactgatgcacattgacatgctataggatattccattctcaccttttatccccctgctctgtgtctggtgagttcaacatttattgactgcatcagctaggctctcttgctttgtggcttcttgttagttcaggtaatgggaaataccagcagaatattagaagataaaaggaaagaggagttctgttatttatttccctggctctctatctgccagtgcacatgttttcacatgttgcttttctgcacttgaggttaggttcttactgagtggccctcttcaacagtgcagatctttctgggttctgataaccttatcaasccaaagtgtggaagttgcttccagttaacccaggatgatccttgatcctttcatcttgtccatccctctgtaaatagtcaatttattaagctctcctctattaagaacactctttttgagtgtgccatcagttgctgacaagatcttgggtgataaacatgcactggattgtcatgtgatcatttttacatgtgagatgggctagtgattggcagacaa

SEQ ID NO: 442716 - DNA, 571 bp, Homo sapiens
ggacaacattatccataagactttttgagttactgatgcacattgacatgctataggatattccattctcaccttttatccccctgctctgtgtctggtgagttcaacatttattgactgcatcagctaggctctcttgctttgtggcttcttgttagttcaggtaatgggaaataccagcagaatattagaagataaaaggaaagaggagttctgttatttatttccctggctctctatctgccagtgcacatgttttcacatgttgcttttctgcacttgaggttaggttcttactgagtggccctcttcaacagtgcagatctttctgggttctgataaccttatcaagycaaagtgtggaagttgcttccagttaacccaggatgatccttgatcctttcatcttgtccatccctctgtaaatagtcaatttattaagctctcctctattaagaacactctttttgagtgtgccatcagttgctgacaagatcttgggtgataaacatgcactggattgtcatgtgatcatttttacatgtgagatgggctagtgattggcagacaa

SEQ ID NO: 442717 - DNA, 471 bp, Homo sapiens
tctggtttttaacccttcatgagatgtgatgtacagtttacaaatattttcttccattctgtgggttgtctcttcactatgttgaatgtttcaaagatggttttattaatgaaaaaataccatgggtgtatatttctccatagttcatagaagcagaatggggatgaattcaggtgactgaaaatgttattatcttgaataagcttaatggatctatttcctaatgtagtaagtcttttccattgctaactttggtgatttttattattaaacaaagtcaatataagatgtggttggttcatctggattaaaatacatacacatgccagaatctattactccttttttatgtttatagagatccacaaaaattgatgtgaagagccagttttctaaaactaatagcggakagtgtcatgcaaagatttgtgactaaatgtgtatacttatagcttaatgcaccctgattgg

SEQ ID NO: 442718 - DNA, 595 bp, Homo sapiens
caatgggcgttttctcttttgcccccacagagctctactctatggttataaaaaacaatgtatggtggcctagtagtgatgtgtattatagataatgaatcataaataaccaaataattttctccaagacactgcgactattagtaagattatcatcgcaacaaagaccctttgttgygatgataaatgattaatacataatagccacccaaacccatgaacaacagcaacaaccataaacgaacaaccatacttttccaagtgctgctaaaaaggaatttttacttgttttatctttatgccaatgaaaagaaaggtcatcttgctgaatttttatgattcattctttggatagaaaaactcaattctacaggttccttggtaaatctgtgtattacagttgagatcagcaccactgttaatctttcctttgccagcaaatagcaattacaggataactacagggtaattctagggctttgtgtctttgaacgccggagtaatttgaaccattctaactgtaaatttgaattgtttaacatatgctttccgcagagtataaatacattttaatgatttatttcacctccttaaa

SEQ ID NO: 442719 - DNA, 570 bp, Homo sapiens
taaagtacatctcttaaataaacatatcttttgttacataaacaccttaaaaatcaaattagaaatgaagtacagttatgtgctgcataacatatcagtcagcaatggactgcatatatgacagtggtttcgtaagcttataacagagctgaaaaattcttatcatctagtgatgtgatagctgttgtaatgttatagcacagtgcattactcatagcacatacaattatgtatggtacatcatatttgattggtacaaaagtaattgcagtttttgccattaaaagtaatggcattartacttgataataaatgatcaatggtattaatacttgataatcaatgactatgttactggtttatgtatttgccatactatgctatacttcatgtcattattttagagtgtactctttctacttaaaaaaaatgttaactacagaatggtctcaggtggtattccaaaataaggcattgctgtcgtaggagatgacagcttcatttgtgttattgcccctgaagatcttctagtgggacaagatgtagatgtggaagagagtgttactgatg

SEQ ID NO: 442720 - DNA, 436 bp, Homo sapiens
atccagaaccacactgtcttactagggtgaggcagttactttcaagtaaggccagctgaaagtactgggacaaagtccagtagaatgttatataaaataaacctttcaataatagttaatggtcaggggatccaaacagagttacctaacgtattctgaaaggggcgatgatccagtggtgtgtttgttgataagtcagctctccaggcattaaaagcatttcatgatttctttgggttaaatacttctacggtgattaatttccagcagtagtcccactcacaaaattsttgaacatttaacaacaggctattgcaagccagtaagagcttggtccaacataccactgaaagtaaaatctaaggagggagatagcacaaggaagcgttggtacattgtggtgacccttacttgatgggtgcaatgagcagggctc

SEQ ID NO: 442721 - DNA, 542 bp, Homo sapiens
ctcttgtgcaaaaccattattacagatgctgaagctacacacagagcctccagttacccataaaagcagcatttggacagagtgtaaatttgccaccaggactctggcatatggaaactaatatgtctgatcaggaaatgaaactcattggaatatttacactgcttctcagatactttgaccctagtttagccaggcttttagaaaattgttgagaggatttatttttctttatctgtcaacaccccatccccctgttccacaaagctcaatctacagactgcggtcatcaaaatagaaatctacatttctgaaaattaagattgttttgagcatatttttcttgtttctgtagaatccaccaggcctggctctggtggaaaaacaaagtagcaatatcagttacaaaggactatcgaaatattcccagccatgttaacacatctgtagaggaaataatactgattatttatttttamaagcatacctcggagatattaaaggttcagttccagaccaccgcaataaagcaatatcacaaa

SEQ ID NO: 442722 - DNA, 592 bp, Homo sapiens
cccttgactctggctgctttcatttagtgtattgcatttgacatcctaccatgttgttgtgtgtatcagtagttcatttttgtttttattttttaactgaaaagcattccaggtatggatgtaccacaattcacttatccattcaccagttgaaggaattttggattgtttacagtttggagtgattatgaattaaagttgctgtagtcatttgaatataggtttttgtgagaacctaagttttcttctttcctgggtaaatamcttggagttttgggagtggcatttttaagttgcatataaagtgtatgtttacctttataagaaactgccaaactgtttttcaaaatagcattcctattttgaattaatatcagcaatattttatggttcagtcattccattatgacaactgtaactccttatgatcatttattaattgctacagatatattgtactagaagtacgtttactaaaaggaagagactttgctctttgaactttttctgtaatgtcacattgtgtcagtttgcccctcagctcatggaaatagacttttatacttcataacatggtaaaatataaactagt

SEQ ID NO: 442723 - DNA, 506 bp, Homo sapiens
accagtgaaaacattttgggctagccttacaaaagtgaatacatatgcaacttacacatataatttactgatatataggaaagtaaataaattttcaaggtgattctgttaatgattaactaactcacataacttggacttcaattttctttttaagtaaggatcacttccagaacggcaccaaatcgaattgaagtgtgacctmtatacatttttcactaaagatgacttttgaaaatattctaaatctatgggtatagaatactgaacctccttctgactggtactattcattgagactaattcactgagagtgagaagcatagtagttttagttttgatatggagatgtttggtttaatctagaacgcatgctgttcattatgggcagcctattgtgtcatgccacactttgggacagttactgggggaaatgaagagaaaagctgtccctcttaagaaggctaggagcctaaagactgatttctgtctcacatcacccttta

SEQ ID NO: 442724 - DNA, 553 bp, Homo sapiens
ttacagatgaaaaaaccgagattcagtgactgtcattggatgaatgtataaggaaaatgtggtatatatacacaatggaatattattcagccatargaggaattaaatcttgtcatttccaggaacattgacggaactggaggtcattatagtaagtgaaataaaccaggcacagtaaaacaaatatcacatattctcactcatatgtgggagctaaaatagatttcatagagatagagaatagattggtgattactagaggctgagaagcaaaagcggaaggaggaatgaagagaaattggttaaggggtatgaaaatacagttagaggggatcagttctagtattcaatagtagagtagggaagttatagttaaagtagtgtgttgtatatttcaaaacaagtagaagagaattgcaatgattccaacataaagaaaagataaatgtttgaggtgatgaatatccctaccctgatttgatcattacacattgtgtacaggtatcaaaatatcacatgtgccccccaaaaatatatacaactatcatatagc

SEQ ID NO: 442725 - DNA, 528 bp, Homo sapiens
taatgatgactgaaaaaaaacttcaataactgcaagagtggcttgagatgggcactctcaaactctgccagtagaaataattcgtttgatattagcatgcaaaaacatttaaaatgcttacacatttgtatctggcacttcccaatctagttaatcaggctaaaaagtgagcatatatttttcaaagtttttacaaaatttgtgttctaagatgttcaccgcaattatttatgagggctaaatataggaatggttctaagtattaaaaattgtcaaaacataagaagggatactgtataactctatatatttattttaaattaacaaargtagatttttatgataaactgttgaatgaaaagtaaagatactaaactatttatgaggtatataaaataagaaaaaaatatgacatatatgcatataatatatatattttaaaacacaaaaaattatacaaaatgaaaacaactgttaactcttgatttgtattttagtggttctgttttcttctctacatttttaacc

SEQ ID NO: 442726 - DNA, 546 bp, Homo sapiens
caacatcttaaaacagtctggaactaaagatttgtctctaatgacctgaatctayacctgagtctaaatcaggccacaaaccacaaaggaaactagttgtcaaactgatcccaaatttcttttatttttgctcaatgtcttcggtattactaacagaggcacatatattttgcccatcttatatattaatacatgttttatgaataccagtaaacatgttcaaaattaaaaccacaaaattttttatctacatctaaaagctaattttttttaaataatctgtctagaatgcaaattataaattggtctgctagttcactggcaaccttcattattcttttattttgcatcctagtaaggaaactttccatattttgactggatattaaagtgcttcagagcaattgtattttttaaattaaaaaaacagtaatttattaaaaaatgaactcctgtagagtggtgttctctatttctgcccagtttttgtggaggtagaaacatggagattcatgttttaaataaatttcctataaaattgcccat

SEQ ID NO: 442727 - DNA, 546 bp, Homo sapiens
caacatcttaaaacagtctggaactaaagatttgtctctaatgacctgaatctatacctgagtctaaatcaggccacaaaccacaaaggaaactagttgtcaaactgatcccaaatttcttttatttttgctcaatgtcttcggtattactaacagaggcacatatattttgcccatcttatatattaatacatgttttatgaataccagtaaacatgttcaaaattaaaaccacaaaattttttatctacatctaaaagctaattttttttaaataatctgtctagaatgcaaattataaaytggtctgctagttcactggcaaccttcattattcttttattttgcatcctagtaaggaaactttccatattttgactggatattaaagtgcttcagagcaattgtattttttaaattaaaaaaacagtaatttattaaaaaatgaactcctgtagagtggtgttctctatttctgcccagtttttgtggaggtagaaacatggagattcatgttttaaataaatttcctataaaattgcccat

SEQ ID NO: 442728 - DNA, 546 bp, Homo sapiens
caacatcttaaaacagtctggaactaaagatttgtctctaatgacctgaatctatacctgagtctaaatcaggccacaaaccacaaaggaaactagttgtcaaactgatcccaaatttcttttatttttgctcaatgtcttcggtattactaacagaggcacatatattttgcccatcttatatattaatacatgttttatgaataccagtaaacatgttcaaaattaaaaccacaaaattttttatctacatctaaaagctaattttttttaaataatctgtctagaatgcaaattataaattggtctgctagttcactggcaaccttcattattcttttattttgcatcctagtaaggaaactttccatattttgactkgatattaaagtgcttcagagcaattgtattttttaaattaaaaaaacagtaatttattaaaaaatgaactcctgtagagtggtgttctctatttctgcccagtttttgtggaggtagaaacatggagattcatgttttaaataaatttcctataaaattgcccat

SEQ ID NO: 442729 - DNA, 487 bp, Homo sapiens
ccattaaacctctttcttttgtaaattccccagtctcggggtacgtctatatcagcagcatgaaaacggactaatatacctgccatgggctctgtactttcctctctccactctagctaccacatcatctccttactattccttaagttcatctggtatgctcccgccttggggcctcggtgcttgctaattcctctgtcttgaayacatttcctatacccacaaaataaagacatgaattcatatgtaataactgcaaatagctgtaagcgctatgagtatatttaaagcacatacatcttgtgaaaaagcaggatgtaagaaagagtaaggtgatttgcagtgaggtctttggcctagatgagtcagagttcagggtgttggaggaaaatcgacgaaacagaactttaaggagatgatgagaccctgcaatctgctccatgctgcacaaaggaagacaatgttggacattaagtaggataagaca

SEQ ID NO: 442730 - DNA, 507 bp, Homo sapiens
ttacaacgcgtctgtgttcaaggtcaccttccgtttatgtagcaatttagattttgccaaatgccaggcatgtaacaaaatgtgtccagtctactgattgactgtaaagaaaactgtacaataataacaacatcaagaaatattttgttagtccaaaggaatactttgtatcaataaatgaggctgagaggacaatagagaatggttaaactgattatggcctgtgccttggctgttggtaaaaattggatttctaaagaaatrtgtccacatattcctcttaaagcagagaaggctataaaaactctgattcaataaatgttttcagttgatatttacagaaactgaagaatcaaaagaaagtatgtaaaattacagccattctcccctgacaggaatactgaactgtctcaactgatataatatgttgaattaaagatcagaagtcatctaatccagtcatccatctgagcttgaatgcgctttgcaacatttctggcaagcaaa

SEQ ID NO: 442731 - DNA, 620 bp, Homo sapiens
attttgccaaatgccaggcatgtaacaaaatgtgtccagtctactgattgactgtaaagaaaactgtacaataataacaacatcaagaaatattttgttagtccaaaggaatactttgtatcaataaatgaggctgagaggacaatagagaatggttaaactgattatggcctgtgccttggctgttggtaaaaattggatttctaaagaaatatgtccacatattcctcttaaagcagagaaggctataaaaactctgattcaataaatgttttcagttgatatttacagaaactgaagaatcaaaagaaagtatgtaaaattacagccattctcccctgacaggaatactgaactgtctcaactgatataatatgttgaattaaagatcagaagtcatctaatccagtcatccatctgagcttgaatgcgctttgcaacatttctggcaagcaaatgtccaggctctccaagaacatctcattctttcttggacctgaatgttaagtttttgtttttaagctattagaataaaatctmtttgctataggtcctacccattggttttgtgtttgaatttccctcctgtgcaattaaagaataacgcctcgaatgagggt

SEQ ID NO: 442732 - DNA, 579 bp, Homo sapiens
atcttaccataaaacctgagctcttaactttcatgctatgctgccacatatttttatatggcacatgcttcgtagacttgtgcaattccttccttgcttccaatggtaagaacatggagtatgcttacattctacacttggctctggcattaattagctgcaggaaagttacttaacctttctcttgcagattgttccaccaaaaatgcatatccatktgttctattttaagcattctgatatccacagaaaatatactttctctgcagtgaagcagctagtcacagcacaggacaatccaggccatcctcttgtctgtgcttggaggaagcacagtgctcaaagtggctttctttctaataacttttgagtattttaaggccctagaacttaacaggactcagatgttacctggtgtattctttaagtaagtcatttgacacaatatttcagagggacattgaaataattgattttaccagtttgacaggaagcaccaggaaactataaccaactcatgccattaaccctacaatggaaatcctggagtgtggctgagctttgtaagtgtaaagtaaa

SEQ ID NO: 442733 - DNA, 572 bp, Homo sapiens
gccagtgtatgaagaaaaaatatccagtgccattactcttccagattgttgtcccaagcttattttgaactcttccaaatgttctgcaggcacataagtaattctggaacaaaccagaatccatggaagtgaagggaaataatattttgcctaattgttaggaaaagcttctaaaataaaggaaacaaatcatattgtccctttctccctactttttcatacaactcatttaatcagtatattcagcagagaatccaaacttcaataggataaagtattctatagggaagagtaacaacagaaactaagtttttaaatsctgctgattaactatgtgtttaccaatcatcatgcagagaaggaaaacaattatttatattatcaaatgaaaaggctaacaacaattttttttaaattaggaagatctataaatccctagaataatgattgtcagcaataacattaattttgcccaaagatttctgggatctctagcagaaacaaattaggtatactctattaaaatgctgaatatcacaaattactttgcatctttctataatacataatta

SEQ ID NO: 442734 - DNA, 399 bp, Homo sapiens
aggatgattttagtttatttttatcattactcaatgagttaagctataagcatttgaatcagagtatctttaaggcatgtgagaagaaatcaacgtgttttgaatgtctgcatgtgtgtttacrtacacgagagagagactcactgactgaatgaatggatgactgatttccagaggagggaaggttgtacgatttttcttctttttaaaataatttaagattctatagtacattttgcctcctgagatcctaaagcaagtacttatgaagctagctctctagatacccttcatagtcataataaagcttctgcccacatgatagggtaaattctgctgaatcagtgggagaggggaaacggaaatacacaacaaaaaaatgaggaaaggggaaaaaag

SEQ ID NO: 442735 - DNA, 523 bp, Homo sapiens
ctgactctacccctttaagggttgagtaatttcagagaaactcctgagtctgtctatgtttctgtatctaatcagtgaagggaagataaagacttcctttcttttcccctgaagaaccttgtttttttaccttcaagtccaaacaccacatyattaagcaagggaccacagacttatcaaaaagcatcaagattagaatttttcaaaggtcactatatgcacgtgtatatttattaatgtatctgtatttctgtatatattttcactctaaatttaacaaaattcaaaaacccaaatgattcatgaaatcaaaacaatggattatgacagcctttacagaaagctgtcatttattaataacttcttctggtcatcactagacaaagaaaaaattagccacaaagctaaaactgcaaacaactgcatatagctgattaaggggagactatgaatctaagaaaatgagctcattgatagacctcttcataatatacttttccactagcacaaacccagcctctat

SEQ ID NO: 442736 - DNA, 588 bp, Homo sapiens
aacaaacctgtaaaccatttcaaaaaaataatgaggacatagaaataaaaactacaggaaaatttctaccatctgttctcttatctacagcataaaaaattgaaatttaccatgttcaatatttccccttgtcaagggggttgaggagtaggtatatgaggaaaatgagaaacttacctaggctagaattgccttttgctatattaatagtcctttcaaaagattctttagatacattttgaagcatgacacactcagcattacaggccagggagctctgttcaagcaggtactcagagccctttaagaaagaaaaagaagtcacaagtcacatggaaagggaaactagactttggagcgtgatttcaacatcacgcatgttctctaattgattgtgctttattttgcaagaayctgcaaccaaaacaagttcataggttgccttctgaaaatcttagtgtcaagaagcactcattccaaatgaagagattagccagaataaccttacttcactattccctatctcatcataaaacacaaaccatatctttaaaatattacctttccagctgaatcgggtagcacaga

SEQ ID NO: 442737 - DNA, 612 bp, Homo sapiens
tgtatcacttgagtgctttgggaaagcagttgcttcataaactgctgttgaataaacatatcagttttcccttcaattctttcattgatagtttcaatgtataaaagtagcatatgaacatactattgcataaaggattcaagatacagacatatactgtgtatgcatatagaatacaatatgaagagttttcgctatggcttctacttccattcgcttccccagtaaraatggctagcatcagttaggtgtttatccatcaaatttttaatgcatttgcataatatatacatataagtacacatgcacacactcacacatacaagcagatatacatatatatttttaaaaactaaacacagccatacaataaatagcacttttactttttttgcagtatcttttcatcttgatgtgagaaatttccatgtcagtttaaaaacaagtcaacttcaattttcttatggctgtaagttattcctaagtatgaaagacagtggtgtgtagactgtgaaccaggatgcctgagttcaaatcctggctcaacactaattaaatgttagagcttggacaagttacttaaacactatgcctaattggggaaattaatag

SEQ ID NO: 442738 - DNA, 394 bp, Homo sapiens
catatatgtgagtttagtatttattaagcctcactttgggaagtagaggtatttatcatatgctgcaaggcatactgaatttaaaatatcaaataccgtcataaaagaaatttattttggaactatacagaaaaaaaaaagactgmttctgaataactggtatggtttcatcttaaggacagtaaaactaaaaggtatattgagtcatgtttgccatttctctctgtccaacagaaagaccagaaccaaatgcataatccaatcttaataaataggtagagtccctgatagcctatctttattcttacattcccatccatagtgctcttttgtcataatttttacaagcctggttcgatttcagattggattaacatattcttcaatcatcctg

SEQ ID NO: 442739 - DNA, 576 bp, Homo sapiens
ttcccacagctagtgtcaagtctgattcaaacccagatttgtctgactttaaattctatcctccaagccatgggcgatgtgagtaaatcaaataccaaattgaaaaatgcttaaaaaattttaagccatttagcctttccattatatatgtaggttagcctcatgtatgcaaatctgataccttttctgttagctcaatatcacataagtccaggctatccaattctgattgggtggtgggtggcacagttcgacgacagcacaccattgtcacttctataggcagttcttttaagatattcaccacatcttggtgattttccccaagtaaagttatgccatttacctgtgaaaaaagatacattgtccaasaaacaacacttcataatatgaacattcttttgaacacaatttttttattaaatataaattttactatagtcattaccacagtttactgtgctcagaactatagtgagacctgtggaaatactatctaaatttatgtgcaagtttagagtattgttggaattggagcttctaaagcactcaaagaaaaaccactagctttcatct

SEQ ID NO: 442740 - DNA, 604 bp, Homo sapiens
ttttgaggaacctccataatgctctccctagtggctgtactaatttacattaccatcaacagcattatgagggttcccctttctccacatccttgtcagcattcattattgcttgtcttttggataaaagccattttaataagggtgagatgatatctcattgtagttttgacttgcatttctctgatgatcagtgacgaacattttttcatatacctattggccatttgtatgtcttcctttgaggaatgtctattcagatcttttctgcatttttaatcagattatttgattttttttctattgagttttttgagctctttatatattctggttattaatcagatgggtagcttgaacatattttctctcattctttgggttgtctatttatattgttgttacctttgctgtgcaggaaagctttttagcttgatgtgatcccatttgtccattttggctttggttgcccgtgcttttgtgawattacataaaaaatctttgcccagacaaatccaatgtcctgaagcattttcctaacgtttccttcagttcttatatttaggtctttaatctctctctctgtgtgtgtgtgtgtgtgtgt

SEQ ID NO: 442741 - DNA, 492 bp, Homo sapiens
caaggaatcctcccaccttggcctcccaagtagctaggactacaggcagacaacatcatgcccagcaattcagcaatttgttttttttttttttttttttttttagagataggatctgcctgtgttgggattacaggcatgagccaccagctcagtgaagacacccagctgtcttcaatttttctatgtgcactgtgaattcatacaagactatattgtaggcagttttcccttaaacttatttgataaggaagttttgttgcarggtctcttgaatttctgtttcaggctgcagtctggggagtccggtatcaactgaacactgaaattaaagttgggctcttctgtacagtgccttgaatagccatgtttaaaacacattgatgttacaacgataacaatgatagcttgaactaattacaagaagctaggttttttttttttcattcttatatatcctcagggctgaaagcagccgcggccataaagcca

SEQ ID NO: 442742 - DNA, 577 bp, Homo sapiens
acattctaaaatgacagcagttaggagtggacaaatggaaggagtagccgcatacggggggactcaatgggggaatttagctttctcttttttttgtgtaaggaaactgtatttttataatggttttaaattatgcatgtaaaaagcagctgggttgaaatatttatgcataaaatgatataatgtccacaatttgcttcaaaaacttccaggaaagggacaagggaaatgtctgagacaagagaagaaacaagactgaccatgaactagtagttgttaaaacagaatgatggatatatgaggattcactgcatttatgtacatttgaaatttttcataataactattacaaaaataaggcagccgatatgtgaaaatgttaacaatatctagttttagaggctaggactagagatgattagtgcaatatttttcaaatcctccttrtccttgtttggcaaaaaaaaaaaaaaaaagatttcgcctaaaactataatactaacttattcgggaaaaaataatgttaacattggtaaattctcccagaacaataatttattcagctagactacctaat

SEQ ID NO: 442743 - DNA, 621 bp, Homo sapiens
aacaaatgttacattaccattaaattactttgtcaaataactataatttaaaaatatataggayagtaaaaatgacaaaagatttcagctgattcatgagtgttaaaagctgtttctttctcccttctttgcttaatttttactcccagagccatgtaataatggggttaggagtgccaggcttagtgtaatatgtcactcaacatcatttgtaacaatggcttcctcaagagatgtgttcaaggatatattctatggggaactcacaaattcatggttagaagtattaacaaaaataataataataactcacactgtggtaagcactttgtataaattctttcatttaatccttccaatagtatctctaatataaagggattttcctcatctcaggaggaaagtgagacccagacaagttaaacggtgtagaaaaacagcctgttgtatggcaggagtgacaccaccttgaagcgaaaccgccatggtgaccaatgtttgactcctgcataccaaggtgttctgtagcgagccctgtagcataaataatccttcataaagatgtttacctaacctctccactgataacaagtttcagcaagaaattctgagacgtgacca

SEQ ID NO: 442744 - DNA, 507 bp, Homo sapiens
gactaaatataaataattatttattgctacctgaatcctctctccatatgattctcttaacaaatccaggacagcaagtatcacacatgcaggcttgtctaccagagagccagtttgttagcacagagcacacactcggatgtgagcggcatggttttaaggacaacaccagctttcccttgccaaggcagatcrcaagataaatgaggaaacacaggagactccttaatagaaagccaaagcatggcatactggctgtcacttagggtcataggtcctatttcgaaaaaaaaaaaaaaaagtacttggcatcatcaagttcttatattgcaaaaataattgcagtttttgccattaaaactccaattacttttgcactaacctaatgttacagatgatcaaacaatgttagagtttgaaaggtctttaagttgctgagttcattttattcactttgcagatgaataaacctttggaacctgaggctacaagaaatgaaagtttttg

SEQ ID NO: 442745 - DNA, 530 bp, Homo sapiens
tttagtgacaggatcctacttaatcttcccattttacagatgaggaaacagaagctcaaattgcttaactggtccaagatcccaagagacttaaaccagggatgtctggtgtggaggcccaagcaccttcagtttcacttcactgcttgggactggtactccctcaggtcacaytgggactatgcccacatgaaccacctttgcaagattatggtggtaagagaaatctgacatagctgacgccatcttgcttctgacctctaagctgtccttgatgattcctgcgcataggccaagctaactttgggagaagtttagtttatagtttaacttgaaggcaaagatgaccatagtctctccctaaaattaacgccctccttgtttagggactgaaaaccacctttgtgagtctaataagagagcatgagaataggattatgggaagggcatgaactctgctaaaatgtaagtatagtttctataatcccttactgctcagaagtcctgtagccaggagtcacaaggtttgt

SEQ ID NO: 442746 - DNA, 627 bp, Homo sapiens
tactttcttttctctccattgaagagaaagtgattttcccaagctcaggaggaaagagttacctccctactctctcccatagtctcacctacaacaagatgaaaaagtgaaataatcccactttatagattcatgaattctgcttttgcttgtggtgtgatcatctaaaaatacctacttaactttctcattggatgtttaatataggcttatatcaaactaaaactcaagagaatatggaagtactatwctgttcaattctttttttttaaatttcttaaactaatgggctcaagtgatcctcctgcctcagcctcccaaagtgctgggattgcaggtgtgacatgaggtcttgattggccccaagagttcctgaagtgaccccggtaggtgtctgtttgcatgacaggcagaggctaggtctcagcctcagtaaagcatgccttgaagctcatgggggcacatttccaaggccaccataatatctgtcactctaatttcattcacccaagttcccaagggctcaaacagcagtccgaggaagaagctatagtaaagacctgagtgacaaaggaaagagctattttcctaacactcctatatcacatgccaggacttgtggccatg

SEQ ID NO: 442747 - DNA, 542 bp, Homo sapiens
ccagcctttgtttatatctgaatttcattgcattcaatctttgttgtaagcgggtctaatgaatgtatatatatgcatatttttctcccccatttcactcttattcatttaattagttcagatgatccctgacttatgatggtttgacttaacaatttttcagttttgcaatgggcttattaggacataaccccatcrtaagttgaagatcatctggacttacaatggttcaacttacaattttttggctttgtgctgggtttattggggcattaaatgtgtcttcaacttatgctattttcaacctagggtgggttgaaattgggacattgccccattgcaagttgagaagcacctgcctttgttgaaaaggtactaagtaagcagcactgtgcgagctgccctggggtcttctatggtttggatatgttccccataaagcatgtgttggaaacttaatctcccatgcaacagtgttgagagatgggacctttaaaaggtggttaggtcaagggtttagtcctcatgcatgcattaatgcc

SEQ ID NO: 442748 - DNA, 574 bp, Homo sapiens
atttgatattttggagcaattattttttggtaattggaagagaacaaaggtcaacaaaaccttctgatggaagtgattctcaggcaggtgggatacattccttcagtgaacgcattggaaaccctcacaggagaagggagaaacttcccctgctttttgttagcaaagcagagagggttacaaaggaaacactgtaaactaccayatgtaaattcacctccgggaggactacagttcatatttgcaaatgtgtcaggattccattagaatacagtagtaaataatagtaactcaagtggacttgtaatctgacagatcctagtgtatatctttgactctgccattcttttgctgtgtgatcctagacaagttatttaatgtctttgagtctcagttttatcatttataaaatgtgattcatttgttgtcatttcgcatatgaaaatctagtcccagaaaacactcaatagatggcagctattattgttaataaccatcctgaacatttagaaccatcttttgatttcatcagttaccccaaatttctctcccattcttaaagaaatcagagatt

SEQ ID NO: 442749 - DNA, 574 bp, Homo sapiens
atttgatattttggagcaattattttttggtaattggaagagaacaaaggtcaacaaaaccttctgatggaagtgattctcaggcaggtgggatacattccttcagtgaacgcattggaaaccctcacaggagaagggagaaacttcccctgctttttgttagcaaagcagagagggttacaaaggaaacactgtaaactaccacatgtaaattcacctcygggaggactacagttcatatttgcaaatgtgtcaggattccattagaatacagtagtaaataatagtaactcaagtggacttgtaatctgacagatcctagtgtatatctttgactctgccattcttttgctgtgtgatcctagacaagttatttaatgtctttgagtctcagttttatcatttataaaatgtgattcatttgttgtcatttcgcatatgaaaatctagtcccagaaaacactcaatagatggcagctattattgttaataaccatcctgaacatttagaaccatcttttgatttcatcagttaccccaaatttctctcccattcttaaagaaatcagagatt

SEQ ID NO: 442750 - DNA, 583 bp, Homo sapiens
ctttgactctgccattcttttgctgtgtgatcctagacaagttatttaatgtctttgagtctcagttttatcatttataaaatgtgattcatttgttgtcatttcgcatatgaaaatctagtcccagaaaacactcaatagatggcagctattattgttaataaccatcctgaacatttagaaccatcttttgatttcatcagttaccccaaatttctctcccattcttaaagaaatcagagattctgaatctgtgtgtgtgtgtgtgtttgtgtgtgtgtgtgtgtgtgtgtktaagtattctggtttgaaacgcaggtgacatttgcctacacctgttgtgagagaaaagtctccagtggttttgcctaccaccaaactgtccacaagagacaaatgagaatccctgtgcctccaggaagtcctcacagtctctggaaggcaagagagtcaatttccttgaatgacaaattatggagaacaatcactgggcagaaaaaccaacagggcacagctatgttcatattcaaggctgctgcttgcaaaacataagtttggctcattttccaaattcagataaaga

SEQ ID NO: 442751 - DNA, 583 bp, Homo sapiens
ctttgactctgccattcttttgctgtgtgatcctagacaagttatttaatgtctttgagtctcagttttatcatttataaaatgtgattcatttgttgtcatttcgcatatgaaaatctagtcccagaaaacactcaatagatggcagctattattgttaataaccatcctgaacatttagaaccatcttttgatttcatcagttaccccaaatttctctcccattcttaaagaaatcagagattctgaatctgtgtgtgtgtgtgtgtttgtgtgtgtgtgtgtgtgtgtgtttaagtattctggtttgaaacgcaggtgacatttgcctacacctgttgtgagagaaaagtctccagtggttttgcctaccaccaaactgtccacaagagacaaatgagaatccctgtgcctccaggaagtcctcacagtctctggaaggcaagagagtcaatttccttgaatgacaaattatggagaacaatcactgggcagaaaaaccaacagggcacagctatgttcatattcaaggctgctgcttgcaraacataagtttggctcattttccaaattcagataaaga

SEQ ID NO: 442752 - DNA, 584 bp, Homo sapiens
acacaatacaccaacatttatgggatggagcaaaagctcttctaagagaaaagtttatagcaataaaggccaacactaaaaaagagaaaagatctcaaataaactacctaaawttacacctcaaggaactttaaaaaaaagaacaaactaagcccaaagaagaaaggaaataatacagagcagacataaataaaatagaggctagaaaaaacaaaataaaagatcaagaatactaagaatttgttttttggaaaagtaaacaaaattgacacccttaagctagactaagaaagagagaatactcaaataaataaaattataaatgaaagaaaagacactacatctgataccagagtaatacaaaggatgataagagtctactatgaacaattacataccaataaattggataacctagaagaaacggataaattcctagcaacatacaacctaccaagactgaatcatgaagaaatagaaaatctgaacaaatcattagcaagcaaggagattgaatccataatttaaaaaatctcccatcaaagaaagcccaggaattctaccaaacattttttaaattaata

SEQ ID NO: 442753 - DNA, 584 bp, Homo sapiens
acacaatacaccaacatttatgggatggagcaaaagctcttctaagagaaaagtttatagcaataaaggccaacactaaaaaagagaaaagatctcaaataaactacctaaaattacacctcaaggaacttkaaaaaaaagaacaaactaagcccaaagaagaaaggaaataatacagagcagacataaataaaatagaggctagaaaaaacaaaataaaagatcaagaatactaagaatttgttttttggaaaagtaaacaaaattgacacccttaagctagactaagaaagagagaatactcaaataaataaaattataaatgaaagaaaagacactacatctgataccagagtaatacaaaggatgataagagtctactatgaacaattacataccaataaattggataacctagaagaaacggataaattcctagcaacatacaacctaccaagactgaatcatgaagaaatagaaaatctgaacaaatcattagcaagcaaggagattgaatccataatttaaaaaatctcccatcaaagaaagcccaggaattctaccaaacattttttaaattaata

SEQ ID NO: 442754 - DNA, 584 bp, Homo sapiens
acacaatacaccaacatttatgggatggagcaaaagctcttctaagagaaaagtttatagcaataaaggccaacactaaaaaagagaaaagatctcaaataaactacctaaaattacacctcaaggaactttaaaaaraagaacaaactaagcccaaagaagaaaggaaataatacagagcagacataaataaaatagaggctagaaaaaacaaaataaaagatcaagaatactaagaatttgttttttggaaaagtaaacaaaattgacacccttaagctagactaagaaagagagaatactcaaataaataaaattataaatgaaagaaaagacactacatctgataccagagtaatacaaaggatgataagagtctactatgaacaattacataccaataaattggataacctagaagaaacggataaattcctagcaacatacaacctaccaagactgaatcatgaagaaatagaaaatctgaacaaatcattagcaagcaaggagattgaatccataatttaaaaaatctcccatcaaagaaagcccaggaattctaccaaacattttttaaattaata

SEQ ID NO: 442755 - DNA, 588 bp, Homo sapiens
agcaagttcagagggtggctctaggaccacatatctgggaaatcaagtcttcttccctaaaagagccataagaagctgtgcttccttcaaaagcttatatttgggtgggcatggttgctcatgcctgtaatcccaaggaaaccaagggaggaggatcgcttgagcccaggagtttgagactagactgtacaacatagtgagacccctaactatacgcaatttaaaaactaactgggtgtagtagcatgcacctgtagtcccarctattcaggaggctgaggcaggaggattgcttgagcccagaagtttgaggctgcagtgagctatgattgcaccactgcactccagcctgggtaacagagcaagacctcatctcttaaaaaaaaaaaaaaaagagtttctattttatagcactagttctaaaattgagaaagggagtgtctggatggggtggagagagcataatggaatcaaaaaggagtcttttcagataacatctgcccactcttggaagctcaggtcttttggtagagtatgggaaggagggtgaaaagatggagagggatgaccaggaggagagtttgaaaa

SEQ ID NO: 442756 - DNA, 525 bp, Homo sapiens
tgtcaagttaaatgtaactacagatattggccaacaggtcactccaatccttacacagcttcttgtagctctatttctggggtttctaagggtgagggggaaagtaattaaagaatggctaagcttggctgggtgcagtggcttacacctgtaatcccagcacccaaggtgaggaattcgagaccagcctggccaacatggtgaaaccccatctctactaaaaatacaaaaaattagccgggcatggtggtgggcacctataatcccagctactccgggaggmtgaggcaggagaatagcttgaacccaggaggcggaggttgcagtgagctgagatcacaccactgcactccagcctgggcaacaagagcaaaactccatttcaaaaaaagaaaagaaagaaagaaagaagaaagaatggctaagctaaaactttgttttctactttggattcaatcctaactatttgaaccccaaatcaaaagatggagagtctgggagctttggtttcccctactcaaaagt

SEQ ID NO: 442757 - DNA, 525 bp, Homo sapiens
tgtcaagttaaatgtaactacagatattggccaacaggtcactccaatccttacacagcttcttgtagctctatttctggggtttctaagggtgagggggaaagtaattaaagaatggctaagcttggctgggtgcagtggcttacacctgtaatcccagcacccaaggtgaggaattcgagaccagcctggccaacatggtgaaaccccatctctactaaaaatacaaaaaattagccgggcatggtggtgggcacctataatcccagctactccgggaggctgaggcaggagaatagcttgaacccaggaggcggaggttgcagtgagctgagatcacaccactgcactccagcctgggcaacaagagcaaaactccatttcaaaaaaagaaaagaaagaaagaaagaagaaagaatggmtaagctaaaactttgttttctactttggattcaatcctaactatttgaaccccaaatcaaaagatggagagtctgggagctttggtttcccctactcaaaagt

SEQ ID NO: 442758 - DNA, 585 bp, Homo sapiens
tcagactgagtgtgatgggaagaggggcctcaatgctggggggatggtgagacatccttagggagatacgtgaaccatgtcgttcaaggccagtgggaacagggaattgatggtgacatgggtgttccttaggcaaggacagaagcccagaagtacaagttcttggttagttcaatttatatatttagagggctcccccagtttgcccaactacacttaatttttttgcttcatttctttcactgtctgcaggtcctttactctggttcatgtgcttagctttatctcccttttcaatttggctttagatggagaaagaaaggggaagtaaagacagtacaaagtgggttcacaaaccagtgaagagtacagataattacactttgaagccctccgcaagatagaacatacttaggcttaacagctagctggcttaatctcatgaatgyctgaccatgccataactgaatttgccttgccttgaaagcaacgcgattaatatctcccttcaattttcctggtcatcttaactacaaataaacacagttatactgctgatattaactttagaggtctttctttggt

SEQ ID NO: 442759 - DNA, 428 bp, Homo sapiens
gttaaattacaaaaatcttccttctctctttctgtgtgtatacatctatataaaacattcatatatatatatatatgtatacatacatatatatatatatatgtatacatacacatatatatatataaaattaaaccaaactgatttyttttcccaagtcctttggatcagatcaatagcattataaggaattctggccaagaaatagttggtcacagcatttttgttaataatgccaaatgttcttgcccaagggagagaagaatgatttccagacataaacccttctacagtatatatagtgaggctataatggttccttttgtgtcttgttaccaaaagcaagaaggaacctcatttcatccatgttgacaaaatagaggtgctgcctctttcatgtttttgaagcaatcaatttcaggtggtca

SEQ ID NO: 442760 - DNA, 563 bp, Homo sapiens
gcattataaggaattctggccaagaaatagttggtcmcagcatttttgttaataatgccaaatgttcttgcccaagggagagaagaatgatttccagacataaacccttctacagtatatatagtgaggctataatggttccttttgtgtcttgttaccaaaagcaagaaggaacctcatttcatccatgttgacaaaatagaggtgctgcctctttcatgtttttgaagcaatcaatttcaggtggtcagtgctagttcaatgggtgtagaaaaatcatatacaggagccatgctttctaatagtcacacctactattgaaaaatatatgggctctgaagtttttagaactggatgatgtataacagacattaattgcttctctatagtttctaaaagaaagaaagggtgaggattaggatttgtgagctacaaattagaaggaacccatttggagtcttctatctaaacctggtataattagtgcaacatttttctatggatcagattttggtagcattaacttataagtcaagaattattctgaccatctctaatgtctc

SEQ ID NO: 442761 - DNA, 563 bp, Homo sapiens
gcattataaggaattctggccaagaaatagttggtcacagcatttttgttaataatgccaaatgttcttgcccaagggagagaagaatgatttccagacataaacccttctacagtatatatagtgaggctataatggttccttttgtgtcttgttaccaaaagcaagaaggaacctcatttcatccatgttgacaaaatagaggtgctgcctctttcatgtttttgaagcaatcaatttcaggtggtcagtgctagttcaatgggtgtagaaaaatcatatacaggagccatgctttctaatagtcacacctactattgaaaaatatatgggctctgaagtttttagaactggatgatgtataacagacattaattgcttctctatagtttctaaaagaaagaaagggtgaggattaggatttgtgagctacaaattagaaggaacccatttggagtcttctatctaaacytggtataattagtgcaacatttttctatggatcagattttggtagcattaacttataagtcaagaattattctgaccatctctaatgtctc

SEQ ID NO: 442762 - DNA, 503 bp, Homo sapiens
tgggagttcccctgcacaagctctcttgcctgccagtatgtaagacgtggtgttgctcctcctttgccttccaccatgattgtgaggcctccccagccatgtggaactgtgagtccattaaacttctttcctttataaattacgcagtctcaggtatctcttattagcagcatgacaataggctaatacagggaaagaacatggaagctctgcattcaagaccctttcaggccttgtctgatgtgtctcttcatgtggctcattctgatttgtacttttttgcaataaaactgaccaaaaaagtagcactttcctgaattctgtgagttgttccagtgaattattaagcctgtggggccatgggaactccctggattwgttgccagtagacaaaagtttgggtgacctggggacactgcttgtggctggcatctcaagtaagggcagtctgtgtaccatgccctttaacatgtggatctgcacttaactccaagtagttagcg

SEQ ID NO: 442763 - DNA, 571 bp, Homo sapiens
tggaatgcaccattctgccccttcattgcaatgctcgacagagctctttttcagggttgagacactggactttgttgagaggtgtatagaactcagtcttttaaaattcattattgaccaggcatgctgggtggctcatgcctgtaatctcagcattttgggaggctgaggcaggaggattgagaatgcaaaaaatctatatctctagatgtatatctgtaataaatctgcctctatgatccaatcaagaccagcctgggcaacatggtgaaatgtgtgtgtgtgtgwatatatacatacacatatatattatatatataatatatatagtatatattttagaaaccccatctctaatatatatatattatatatctctagatatctatctaatatatattttatatatataaaatagaattataaatatatatctctaataaatctgcccctatgatccaatcaagaccagcctgggcaacatggtgaaatatgtgtacatatatatctctagtagagatagggtttctaaaatatacatatattagagatacatatacatgtaatagat

SEQ ID NO: 442764 - DNA, 463 bp, Homo sapiens
gttgattcgtatgtaaatattacactgaaattaggtgagcttcccaacatgtttttcttctttgtcaaattaaagggaaattatatattctaggtcctctgcattttatttcattttagaaccaacatctcaatttctaccaaagcctactgggattttgattgggattatgttgaatctatagagccatttggggagaatagtattttaataatcttgaatcttccawtccatgaatgtggtatatctctctatttaggttttctttaatttctcttacatgtatttcataatttttaatgtagagatcttatacaatttttgtcaaatttatttctgagtattttcttttttttgacgctattataaatgttttatgaatttaattttccaattatttgctgctggtgcttttttgtaaattgaccttgtattcttcactagaggggagaagaatcaccta

SEQ ID NO: 442765 - DNA, 463 bp, Homo sapiens
gttgattcgtatgtaaatattacactgaaattaggtgagcttcccaacatgtttttcttctttgtcaaattaaagggaaattatatattctaggtcctctgcattttatttcattttagaaccaacatctcaatttctaccaaagcctactgggattttgattgggattatgttgaatctatagagccatttggggagaatagtattttaataatcttgaatcttccaatccatgaatgtggtatatctctctatttaggttttctttaatttctcttacatgtatttcataatttttaatgtagagatcttatacaatttttgtyaaatttatttctgagtattttcttttttttgacgctattataaatgttttatgaatttaattttccaattatttgctgctggtgcttttttgtaaattgaccttgtattcttcactagaggggagaagaatcaccta

SEQ ID NO: 442766 - DNA, 463 bp, Homo sapiens
gttgattcgtatgtaaatattacactgaaattaggtgagcttcccaacatgtttttcttctttgtcaaattaaagggaaattatatattctaggtcctctgcattttatttcattttagaaccaacatctcaatttctaccaaagcctactgggattttgattgggattatgttgaatctatagagccatttggggagaatagtattttaataatcttgaatcttccaatccatgaatgtggtatatctctctatttaggttttctttaatttctcttacatgtatttcataatttttaatgtagagatcttatacaatttttgtcaaatttatttctgagtattttctttwttttgacgctattataaatgttttatgaatttaattttccaattatttgctgctggtgcttttttgtaaattgaccttgtattcttcactagaggggagaagaatcaccta

SEQ ID NO: 442767 - DNA, 463 bp, Homo sapiens
gttgattcgtatgtaaatattacactgaaattaggtgagcttcccaacatgtttttcttctttgtcaaattaaagggaaattatatattctaggtcctctgcattttatttcattttagaaccaacatctcaatttctaccaaagcctactgggattttgattgggattatgttgaatctatagagccatttggggagaatagtattttaataatcttgaatcttccaatccatgaatgtggtatatctctctatttaggttttctttaatttctcttacatgtatttcataatttttaatgtagagatcttatacaatttttgtcaaatttatttctgagtattttcttttttttgacgctattatraatgttttatgaatttaattttccaattatttgctgctggtgcttttttgtaaattgaccttgtattcttcactagaggggagaagaatcaccta

SEQ ID NO: 442768 - DNA, 449 bp, Homo sapiens
  misc_feature (1)...(449): n = A,T,C or G
nnncaactgtattgatttttttttttttttggatggtttagattggaygactgattattggacagaatggcagcttgttaacacctgcggtctgctgcattatcaggaagatcaaggcagctggtggaatcattctaacagccagccactgccctggaggaccagggggagagtttggagtgaagtttaatgttgccaatggaggtatgtggttcagtatatgccttaataatcacgatttccttcctcttatattattatagtctcacagtgaccctttgatgatagacaagcaaggtgcagaggacctagctcagaaaaatttagtgaggtgcccaaagtgatccaacaaagaagtggcatgatgggctcatgaacccatttgggtggtctcttggtcccctgtactcttcagcataaactattgaatagttgatgcttatctgata

SEQ ID NO: 442769 - DNA, 449 bp, Homo sapiens
  misc_feature (1)...(449): n = A,T,C or G
nnncaactgtattgatttttttttttttttggatggtttagattggatgactgattattggacagaatggcagcttgttaacacctgcggtctgctgcattatcaggaagatcaaggcagctggtggaatcattctaacagccagccactgccctggaggaccagggggagagtttggagtgaagtttaatgttgccaatggaggtatgtggttcagtatatgccttaataatcacgatttcyttcctcttatattattatagtctcacagtgaccctttgatgatagacaagcaaggtgcagaggacctagctcagaaaaatttagtgaggtgcccaaagtgatccaacaaagaagtggcatgatgggctcatgaacccatttgggtggtctcttggtcccctgtactcttcagcataaactattgaatagttgatgcttatctgata

SEQ ID NO: 442770 - DNA, 601 bp, Homo sapiens
tcctgtcactcatggctcagaactaacctgacagtgtgccaactaccctacatcatggggttgtgtcacctgccccggtagcccctgggaaagacaggttcctggccctctgtgcttgtgtgagttcctaagtgatgggaggtgcccatctgtaagttctgtccatcttacttgcagcagcaggaaagcattgggaacccaggaagacccaagttagctgctggtggtagaagagggaaaggcgtccaagacaaagcctgtccagtagcaagcaagagaggcttgggacaggtgaggcaaaggggatccaggaaggagacacactgggacttgcagagaggtcatttttacaaaggaaagtggtgttttacttatgcattagggggaaagtcttgtgtggcctgggtcattgagcagcacaagtcctgcactgggaaccatcccagacagccaggagcaggaacagaagcaaaaggaactctggagcagcatagcccaagtacagacactccctgaaggccaaagtcacgtcggyttccactgtggttaaactgttcaagtcaaattccacttgcttctagtctccagctggctttctctc

SEQ ID NO: 442771 - DNA, 492 bp, Homo sapiens
tacttacctactctgtgaatgttctaggatataatattagatacatcatcacttcggccctggggacagatccttcatcctgtggtttagtggtgtcctaatcaccaggaggagctaaagagttgttttctaagctggtatctcagatacctttcacacttcctctgatttccaagttagatggtaacaatgaatgatgcacagatataatacatacacaatctaaaatactccaagtaaatataggagcattcgatttcaaaattcagcataaagaataagtttccaggttgagagaaytcctccagcatcactgcctggggtggctccaggcacgttctttacctgtcttgaaggtcgagttgtctttaaagaaagacatttactacaacggctttgaaattccatgaaattattcaaaatgcagaacaaggtcagaacacgtgaaggggagggtagattatgcaggacagccctggatttctagacaat

SEQ ID NO: 442772 - DNA, 479 bp, Homo sapiens
cttctggagtgaaaggccaccatggggcttatgatatcgtgatatactaagaaaaagatatttggtccttgccttagtccattttgcattgctataaaagaatacctgaggctgggtagtttctaaagaaaggaggtttgtttgcctcacagttctgctggatgtagaagaagtagaagcaggtcaggagattagtgggtgtagtactctgaatactccagcttttccactctttcactcttgccatttcttccttttttttttaattattatttttttcagtggcagagtcttgctatgttgcccagattgrccttgaactcctgggctcaagcaatcctcctgcttcaacctcccaatgcacaccaccacacctggctatactcttctcatttcaaacaacaagccctacccgccttttcccaaactgatactcattattcctgtttcatacttgacaatctttcattgaaaagtag

SEQ ID NO: 442773 - DNA, 509 bp, Homo sapiens
gttctacaggaaggccagaacaaggaagtgcagaaacatctcaatatatctcaaaaagttatttaacatggacagtgtcatttagtatctttaacatctttatcaaacggatgctattattatcccccttttacaggatattaaaacttacatactgtaaatagccagctgaaagtcatatagcatggaaaatacaataagcatacaragaagcaatggcatttagaagtggaggagggtgaaggattaaatgggctaaacttagtttggttaagaaaaatgaaaactaggaggtggcaaactcttgttggaaaggggaaggatttgggcagagcaaggtagtggagtcgatctctccagtaatcatacccctatggacacatctatatgaacaactatccacatatgaaattacctttacaagagctaatgaaccctgaatacatgagtgagtctatgaagcccctttggactgcaaagaggagtaaaaccatgcttggacagtaagg

SEQ ID NO: 442774 - DNA, 443 bp, Homo sapiens
tgctattattatcccccttttacaggatattaaaacttacatactgtaaatagccagctgaaagtcatatagcatggaaaatacaataagcatacagagaagcaatggcatttagaagtggaggagggtgaaggattaaatgggctaaacttagtttggttaagaaaaatgaaaactaggaggtggcaaactcttgttggaaaggggaaggatttgggcagagcaaggtagtggagtcgatctctccagtaatcatacccctatggacacatctatatgaamaactatccacatatgaaattacctttacaagagctaatgaaccctgaatacatgagtgagtctatgaagcccctttggactgcaaagaggagtaaaaccatgcttggacagtaagggaaacagtactctgtgactgtgatacttttccccctggacataaa

SEQ ID NO: 442775 - DNA, 443 bp, Homo sapiens
tgctattattatcccccttttacaggatattaaaacttacatactgtaaatagccagctgaaagtcatatagcatggaaaatacaataagcatacagagaagcaatggcatttagaagtggaggagggtgaaggattaaatgggctaaacttagtttggttaagaaaaatgaaaactaggaggtggcaaactcttgttggaaaggggaaggatttgggcagagcaaggtagtggagtcgatctctccagtaatcatacccctatggacacatctatatgaacaactatccacatatgaaattacctttacaagagctaaygaaccctgaatacatgagtgagtctatgaagcccctttggactgcaaagaggagtaaaaccatgcttggacagtaagggaaacagtactctgtgactgtgatacttttccccctggacataaa

SEQ ID NO: 442776 - DNA, 539 bp, Homo sapiens
  misc_feature (1)...(539): n = A,T,C or G
atatttgtttaacataacaaaactggtgcatgtttcactttggctgatgaacggcactttcaaaactgtccccagtgggttttttaaatcractttatgcagtttatgcccccattggattacaaaattgtgtaatttaaactgcacgtttatggtttaataactggaaaaagtgaagtactttatagaagctattgtgagatttggatggctctgcagaagaaaatagatttcaattggatccccaaattatatgacaagtttttaattaggtgtgatcaaagcttctaaaagtgaattgcaagttgttaacagtaaatattaaatcttccattcagccnagctcatttgccagaaaattcaggtgagtggattggccaggccatatggcaatgatgaaaattttagtttaaaaatgtgtcatttgtctgtattggcattccttccacctgataaaattccaggagcttttgataaattaaaaccacaattgcctgaagaagccagaaatattacatactggtttgaaaataatgatg

SEQ ID NO: 442777 - DNA, 539 bp, Homo sapiens
  misc_feature (1)...(539): n = A,T,C or G
atatttgtttaacataacaaaactggtgcatgtttcactttggctgatgaacggcactttcaaaactgtccccagtgggttttttaaatcgactttwtgcagtttatgcccccattggattacaaaattgtgtaatttaaactgcacgtttatggtttaataactggaaaaagtgaagtactttatagaagctattgtgagatttggatggctctgcagaagaaaatagatttcaattggatccccaaattatatgacaagtttttaattaggtgtgatcaaagcttctaaaagtgaattgcaagttgttaacagtaaatattaaatcttccattcagccnagctcatttgccagaaaattcaggtgagtggattggccaggccatatggcaatgatgaaaattttagtttaaaaatgtgtcatttgtctgtattggcattccttccacctgataaaattccaggagcttttgataaattaaaaccacaattgcctgaagaagccagaaatattacatactggtttgaaaataatgatg

SEQ ID NO: 442778 - DNA, 574 bp, Homo sapiens
ccatcctgcccaggggggagttggttggtaaagagggaggagagttgctcacagtggggagactgacagcgggagcacatgtgcattcaggtcattaggtaggaagcaggaagatgaaatgacaaagtagccaatagcatatcctttcattgtcttttattcggaccccattgccagaatcaagaacaaagaacctggaagctcctggatttatctcacctggtagactgagtggactccaatgatagggtgtcttagtccattttgtgtggctataaaggaatacctgaggctgggtaatttattaagaaaagaggtctgtttagctcatggttctgcgggctatacgggaagcctggtgccagcatctrttcagcttctggtgaggccctcaggctgtgtccactcatggtagaaggtgaaggagagctggcatgtgcagagatcacatggagagagaggaagcaagaagatggggagataccagctctttgtgacaaccagctctcatgggaactgagtaagaactcacctccaagagacagaattaatttattcaagagggatgtgtcct

SEQ ID NO: 442779 - DNA, 574 bp, Homo sapiens
ccatcctgcccaggggggagttggttggtaaagagggaggagagttgctcacagtggggagactgacagcgggagcacatgtgcattcaggtcattaggtaggaagcaggaagatgaaatgacaaagtagccaatagcatatcctttcattgtcttttattcggaccccattgccagaatcaagaacaaagaacctggaagctcctggatttatctcacctggtagactgagtggactccaatgatagggtgtcttagtccattttgtgtggctataaaggaatacctgaggctgggtaatttattaagaaaagaggtctgtttagctcatggttctgcgggctatacgggaagcctggtgccagcatctaytcagcttctggtgaggccctcaggctgtgtccactcatggtagaaggtgaaggagagctggcatgtgcagagatcacatggagagagaggaagcaagaagatggggagataccagctctttgtgacaaccagctctcatgggaactgagtaagaactcacctccaagagacagaattaatttattcaagagggatgtgtcct

SEQ ID NO: 442780 - DNA, 574 bp, Homo sapiens
ccatcctgcccaggggggagttggttggtaaagagggaggagagttgctcacagtggggagactgacagcgggagcacatgtgcattcaggtcattaggtaggaagcaggaagatgaaatgacaaagtagccaatagcatatcctttcattgtcttttattcggaccccattgccagaatcaagaacaaagaacctggaagctcctggatttatctcacctggtagactgagtggactccaatgatagggtgtcttagtccattttgtgtggctataaaggaatacctgaggctgggtaatttattaagaaaagaggtctgtttagctcatggttctgcgggctatacgggaagcctggtgccagcatctattcagcttctggtgaggccctcaggctgtgtccactcatggtagaaggtgaaggagagctggcatgtgcagagatcacatggagagagaggaagcaagaagatggggagataccagctctttgtgacaaccagctctcatgggaactgagtaagaactcacctccaagagacasaattaatttattcaagagggatgtgtcct

SEQ ID NO: 442781 - DNA, 534 bp, Homo sapiens
tacataatatctagcaaccaataaaaaagtagtagagatgatgaagcaggaaaatacgacccaggagcagaagcagtcagtagaaacagagatgatggaattggcagaaaaggatctcaaagccacgactacatttatactcaaggatttaaargaaaaaaactaataagagaaatggaagatataaaacaactatttgagatgtctaggggtaaaatgtacaatctctgaagtgaaaattttgctgcatttatttacttcagaaattgtaaattttggaagtaacagcagattaggtactgtagaagaaaagtttagtgaatctgaagacacagaaatagacaccgtggaaaccagagtacacaaagaaaaaagacctaaaaactataacgaacagagcctcagtgacctgggtctattgtatatacatattatcaagtggtccagtggatataacagtagaagtggggaaagaaagaatattttaaaaagtaatggccaaaacttccccaaattgagtgaaaattaattttt

SEQ ID NO: 442782 - DNA, 567 bp, Homo sapiens
tgtagggcaaacctctgactgtggtcttactgggcttaagtcaaggtgttgtcagggctgtattgctttctggaggctctagagagaatccatttccttttccaacttttagatgctgtccctattccttggatcatgggaccatccctccatcttcaaagctagtaatgtgggatgtctgtggccattgctctgcccccatatcaccttctgactgtagctagggaagattmtctgattttataaacacatgcaattagattggctcccaagataatcaaggataatccccctaactcaagggttaatcacatctccaaagtcccttttgccccatgtaaagtaatatggtcacagattccagtgactagaacatctttatggggtcattattttgactgtcacaaaggcaaagtcttggacttatgcatatctagattttctttgcttaatttcagagcctagaacacattagactctaaataaatgtgagtgagtgataaatattatatttacagattgctgccacattgcaattctgtcctcccactggtggtggaatcctat

SEQ ID NO: 442783 - DNA, 567 bp, Homo sapiens
tgtagggcaaacctctgactgtggtcttactgggcttaagtcaaggtgttgtcagggctgtattgctttctggaggctctagagagaatccatttccttttccaacttttagatgctgtccctattccttggatcatgggaccatccctccatcttcaaagctagtaatgtgggatgtctgtggccattgctctgcccccatatcaccttctgactgtagctagggaagattatctgattttataaacacatgcaattagattggctcccaagataatcaaggataatccccctaactcaagggttaatcacatctccaaagtcccttttgccccatgtaaagtaatatggtcacagattccagtgactagaacatctttatggggtcattattttgactgtcacaaaggcaaagtcttggacttatgcatatctagattttctttgcttaatttcrgagcctagaacacattagactctaaataaatgtgagtgagtgataaatattatatttacagattgctgccacattgcaattctgtcctcccactggtggtggaatcctat

SEQ ID NO: 442784 - DNA, 567 bp, Homo sapiens
tgtagggcaaacctctgactgtggtcttactgggcttaagtcaaggtgttgtcagggctgtattgctttctggaggctctagagagaatccatttccttttccaacttttagatgctgtccctattccttggatcatgggaccatccctccatcttcaaagctagtaatgtgggatgtctgtggccattgctctgcccccatatcaccttctgactgtagctagggaagattatctgattttataaacacatgcaattagattggctcccaagataatcaaggataatccccctaactcaagggttaatcacatctccaaagtcccttttgccccatgtaaagtaatatggtcacagattccagtgactagaacatctttatggggtcattattttgactgtcacaaaggcaaagtcttggacttatgcatatctagattttctttgcttaatttcagagcctagaacacattagactctaaataaatgtgartgagtgataaatattatatttacagattgctgccacattgcaattctgtcctcccactggtggtggaatcctat

SEQ ID NO: 442785 - DNA, 451 bp, Homo sapiens
accaccttgccagccaagtgactgagccatcttgcagtggatcctccagcccccatcaagccccaactaagccactaagtttcatggtaatttcttacactgcaataaataactaatactggaccagtgagaaaaggagtcaagaataatctcagctttctacctttaataacttaatggatagtggtgctattaatcaagtcaggaaagagaaaggacaataattacacctatagtattacccaaagtcatgataaattattttccatatgctcttgctaaaatttatgtagtcattcaactcattttattgaatatctaccatgaaacyggcaatatggaagaaccttctgatatagaactgaatataatttagtcactgccctcaagtaataagtctggagaatcaagaatctgaaaaatgtttgtagcttttgttcaaaattttctc

SEQ ID NO: 442786 - DNA, 533 bp, Homo sapiens
tccccaagtgcatagattatttctctgtgccacacagccactgccaggggaaggaaagaggcatggagttagtgattcaagactgtcttttctaccctcttctgtgcctctttcagggataaaaagttaaaattaggtactgtgattactcacctagtttttggttttttgaaagtgcttttctatttgcagatgggggacaattagtggagacttttattctgccaccttgctccaccctctgtaactcaatyttttaaagtattatttctccaattctatccttttattactgaaggagagacaaatagacaagaatttagaccgtgataagatcctgtgatggttcatattaggtgtcaacatgatagaataaaggaatgcctagagaatcggtaaagcattacttctgggtgtgtttgtgagggtgttccagagaggactggcatgtgagttgtagaactgagtatggaagatttatcctccaaataccatcaaatcaaccggagacctgcatagaacaaagccagaga

SEQ ID NO: 442787 - DNA, 555 bp, Homo sapiens
ctgtcagtgaccaagtgaccacacatgacagagaatacagtctttacgaaaccagtttagaaaagtgtttaaacaaacagctaaaactgacgatgataatcagctctagggcggggcagaatctgacttccagaattaaaatattataatattcaatatatccaattttttacaaaaagaaaatatgaactataaagagaaacaagaatgtatagaccactcataagggaataaagaaaaggaattactagaaaatgtatgggaggaaccccagacattaaactatctagacaaatattttatatcaggtatctttactattcttaaagagttaaagaaaatcaatgaaatcaactaaaaaaaaacaacaacaacaaaaaagggggaacaatctcaccaaatatagaatcccaayagaaagagaacttataaaaataaatccaaatagaaatcctagaataaaacattttataactgaagtgaaaaatttactagaatttaacagcaaatttgagtatacagaagaaataagtaaacttaaaaatacattaatta

SEQ ID NO: 442788 - DNA, 620 bp, Homo sapiens
gtaaagaaagaacaaatatggagggatcacattattggacttcaaattatactacaaggttatagttaaaaaaacagcatggtactagtataaaaacaggcatatagaccaatagaacagaatcaagaacccagaaataaagctaaatactttgacataaaagccgaatactttgaattaargccaactgatccttgacaaagcatacaaaaacataagttggggatggacaccctatttaatgaatggttctgggaaaactggcaagccacatgtagaagaataaaactgaatccctatctctcaatttatacaaaaaacaattcaagatggatcaaagacttacatataagacctgaaaccacaagaagtctagaagacaacattggaaaaactgttctagatatcagtctagacaaagaattcatggctaagacccccccaccaaaagcagcaaaaacaaaagcaaataaatgagacctaattaaactggaaaacttctgcacagcaaaagaaataatcatcagagtaaacagacaacccacagaatcggagaacatatttgcaaaacatgcatccaacaaaagactagcatacagaatctgcaaggaactcaaaca

SEQ ID NO: 442789 - DNA, 317 bp, Homo sapiens
tcctcttcttctatattttggaagaatttaagagatattggtattcttttktgaatatttcatagaaatcagccatgaagctgtatgatcctgcacttcagtttgttgggagatttataaattactacttcaatttctatatttgctatttgtctgctcatgctatttatcctaattcagtcttggtagattttcttaaaaacctaacctcaggaaatttttctacatctttatcaacctcccttacatcatccaatttgttggcatataattcttcaaaatattcccttctaataatttttgatttctgagacatc

SEQ ID NO: 442790 - DNA, 579 bp, Homo sapiens
tgtgaatccaaaattcttaagattctagttttatcaccatcaactagttgtttygtgactttgggcaagtttcttaatatcttttactctcagttcttataaaatgggaataatactagtaaactatgctaaaggggcttatgaaaactgaataaaatagtacatataaagtacccagaaaatcgtctgaaacataataagcactcaaaaattatcagttgtagttattttatttattaatatatgtaagatagccttatttcaaatagctacataattatagccatggattttgattgattcctttaattcaaatagtgtttttagattggaacatgaaataatttacataaagaaactatgcttaatatgaatactattataaagattcacctctaaaataatttttaaaggtttaatatttttaatgtattgtattcacaacttagagaacattagaatcttgaaactatcaatttatactctgtacttttaaagctactgtgtcagtcatccccaagaccactattaggctcaaggatttgctaataaggacccacaaggctaggaaagctgtta

SEQ ID NO: 442791 - DNA, 533 bp, Homo sapiens
tgcctactgttttcaaatctcatatgtacttatttttactacatcactgtttagttcttagcatattataaaactgtcctgtccaacactgtagtcactatttaaataaactggaataaaataaaataaaataaatttaaaacttcagttcctaattctggatgttctatcatttatttctacattcacctactaaaggrcatcttggttacttccaaattttaggtaattaagaacaaagctgctacaaacatccatgcatagagtttttggggacataggatttcaatacgtttggataaataacaaggagtgctatttttcagattgtatggtaaggagtatgtttagtttcacaagaaactgccaaactattccaaagaggctgtgccattttgcatttcaatcagcaatgaaaagagttactgtgggtccacacccttgtcagcatttggtggtgtcagggttctatctcgtggttattctaatggcgtgtactggtatcttcctgtttgttttaatatttatttgat

SEQ ID NO: 442792 - DNA, 542 bp, Homo sapiens
tgaatcactcaccaattagatgttaatgaatctcttgtggtaggtgaagtaatgaaaacctgggtatcctgttatgctgaagatttgcagttgctaagaatctcacttatgttgaactaggatacacccatgccttgctttcccacacacactgcatttgaaaggtatggtagggatacatctgtggaggaatgggtatttgttgcttagtatccttgatgcattgaagagagaaaacaattactcaggtaggtcaattaccaatgtaaggcaaagtgtgaaagtatagtgcatccaaactatcatataaaaactttcagattatcaggagctggagggcacataaggagaaggatgagttttcaaccttatgataaaaaaggaragaaaacctgagacttgttagatgcatgtatactgcatgcataatatgcatactgcactttgcagtagaaaattcaactctcagattaccctgaaccttttgggagtagactttgagagtgctggaataggggacagagttggaaaaaagtaaagtt

SEQ ID NO: 442793 - DNA, 488 bp, Homo sapiens
agaatgtgggtttgggagaggggatgaggaagaagaaatataatggttttgcactcatagactaatttctcccttccttcttgaagccagaatgggactcccatatttaaatgtttatgtaaaaataaggctactgatatccttttaaaatatagattaaggtcatttagtattctatctgcagttggtatactttgtccaaagacagacctgtccttttccacatgtgtcctgcaggaacaagaatgcaatttattgtcaatttagagtctaccctgtagttgaagctgccataactttttatacytttttaggaacagtgtctctccatgttggtaaatctggtcttgaactcctgggctcaagtgattattttgccatgccctcccaatatgctgggagtagaggcgtgagccaccacacctagctgccataactttttagagaagatatgggtacatttttctttttctttcattggtcagtaa

SEQ ID NO: 442794 - DNA, 575 bp, Homo sapiens
acactttatgttttgtttcaaattttggaattagttgtctacatttgcggtctttatcactttccattctcttctttgaagtaccatttgtcaattgcctccatgacatcaaacccaatagggtgtatctggtctcatcttgttcaatagctcaaccatatttggtcactgtttaccactcccattcttgaagtgctcttctttggccataataccatggcctcctaattttcctcccacctcactgaacactagacagaatatctcttgtgtcagcaacttttactctgctcaactcccaaatgttggagttctccagggctccatggtggaatctcttccattttttttcattataatatattcacgtatttttactattttttttatttccatgggttattggggaacagatggtgtttggttacattaataagttctttagtggtgatttgtgagaggtttgtacacccatcagctgagcartatacactgcaccctatttgtactcttttatcccaaacccccttcccatcctttccttgagtccccaaaatccactgtgtcattctcac

SEQ ID NO: 442795 - DNA, 467 bp, Homo sapiens
aatcctagttgttagtgaaacaccaagtctgtctctaacagccatgggctatgaaaccttcctttttccaaaaagacattctgacagatagaatcaagccattcaagtgtcccccagatactgcaaatgttgatcctcaaaaccccaggagctttctttccttattcccctagagcaatagttttcaagtgtgatcctgaacttgttagaaatgcaaattcttgggccccaccccagacccactgaatcagaaactctgggagtagggccsagaaatgagtttttcacaagcctccaagggattctgatgcacggtaaaatttgaggaccaccaatgcagatggattataatcttcttgagggcaaggaccaaacttgttgaaggttaaccctggctcgtgactcacagtaggtgttcagaatgtgttgaatgaataaatgatctgtacacttttccagaaagctct

SEQ ID NO: 442796 - DNA, 467 bp, Homo sapiens
aatcctagttgttagtgaaacaccaagtctgtctctaacagccatgggctatgaaaccttcctttttccaaaaagacattctgacagatagaatcaagccattcaagtgtcccccagatactgcaaatgttgatcctcaaaaccccaggagctttctttccttattcccctagagcaatagttttcaagtgtgatcctgaacttgttagaaatgcaaattcttgggccccaccccagacccactgaatcagaaactctgggagtagggccgagaaatgagtttttcacaagcctccaagggattctgatgcacggtaaaatttgaggaccaccaatgcagatggattataatcttcttgagggcaaggaccaaacttgttgaaggttaaccctggctcgtgactcayagtaggtgttcagaatgtgttgaatgaataaatgatctgtacacttttccagaaagctct

SEQ ID NO: 442797 - DNA, 475 bp, Homo sapiens
taacgatttattaagctgtcaccaaatgccaagcataatggcaggcattttccatggattattttattaaattctcacacataccagtgaaaccttataaagtyagtaggattgttgtgcccatttgacaaatggagaaattgaggcacaggaggctgggtacttgcccaaggatacccatactagcaagtggtcaagtgagagtcgtcacaaatgcagtgactccaaagctttaacttgaattattttttaaaaccagtgacttaaaactcagtgcttctttaggtctttgtacttccttatcttatgtcttgagggcattggtttgtatcacttttctttgtttcttggttttctttgtttctggacgccaaggcctctccaaatagcacgcgaaagcaatttctcatgcccctgggagagaggtaggcgtggctttatggatgtgataggcagaggacttaatattctgcat

SEQ ID NO: 442798 - DNA, 610 bp, Homo sapiens
gcccaggcacccagttgcattggctgtggccactgagaaaggattgagtcaggctgagccatgggcaatgacagaggagaggggatcagcrgagcctacctgaaagcaaaggagaaatgggtcggtcacctcatcgcagaatttacagatgaaggggacaaacttgttacctgagggtttccttcatgccttggagtttctctgaaagaaaagacagctgagcatttgccctgtttttgttttaccatttttacactttcgaagtcatgccatcaagttttaagctagtaagaggaccatataccgaatggtacaatatcatagttcttgtagcagctacattttgatgaataaaatttcttttaaaatctcttttttaaaaatgaagagacttcttctaccaggcagcaaatgtttctttcctatgtaaacttagcttgcaaacataattttaaacagctttatcatgactatatatcttgctaatttattatcttttttttttctttctttcagagtcatggtcttgctatatcacccaagctggagtgcagtggcatgatcatagctcactgcaaccttgaactcctgggctggagcaagcctccca

SEQ ID NO: 442799 - DNA, 599 bp, Homo sapiens
tttcagtggcatcgatgatattaaaatttgaygattagttgaatatggcactatcaatattttccaggagcagtgttggctttgtactggcacggccatacactttactggttgtctataccagcttgctcctgccagggtgcatttatggccacaggacatcttgagagcaatgggcccacacaaggtttctattttgacaggatgatatggtgagtaataggcactggaattgaatagacttgggtgcaaatcccagctctgctacttactagctgtatgatcttgggcatgtttttaaacctccatgcttcaattctctcagctataaaatggaggggaccacagggttgtaaagattaaactttttttaatgtttaaaattatatagaccccttcaatcccataatttagaaaacctcaagtgcagttaaccttgagtttttcttcatattttaatcttatatgaaggcagtgattgcaaatctagtgaattttttgttgttgttgttattgttgttgtttgagacagagttttgctcttactgcccaggctggagtgcagcggtgcaatctcggctcactgcaacctacacctc

SEQ ID NO: 442800 - DNA, 542 bp, Homo sapiens
acccccctgtacacaactcactccttttaaagaaaaaaattgaaatgtaaggctgtgtaagatttgtttttaaactgtacagtgtctttttttgtatagttaacacactaccgaatgtgtctttagatagccctgtcctggtggtattttcaatagccactaaccttgcytggtacagtatgggggttgtaaattggcatggaaatttaaagcaggttcttgttggtgcacagcacaaattagttatatatggggatggtagttttttcatcttcagttgtctctgatgcagcttatacgaaataattgttgttctgttaactgaataccactctgtaattgcaaaaaaaaaaaaaaagttgcagctgttttgttgacattctgaatgcttctaagtaaatacaattttttttattagtattgttgtccttttcataggtctgaaatttttcttcttgaggggaagctagtcttttgcttttgcccattttgaatcacatgaattattacagtgtttatcctttcatatagttagctaataa

SEQ ID NO: 442801 - DNA, 572 bp, Homo sapiens
ttaacacactaccgaatgtgtctttagatagccctgtcctggtggtattttcaatagccactaaccttgcctggtacagtatgggggttgtaaattggcatggaaatttaaagcaggttcttgttggtgcacagcacaaattagttatatatggggatggtagttttttcatcttcagttgtctctgatgcagcttatacgaaataattgttgttctgttaactgaataccactctgtaattgcaaaaaaaaaaaaaaagttgcagctgttttgttgacattctgaatgcttctaagtaaatacaattttttttattagtattgttgtccttttcataggtctgaaatttttcttcttgaggggaagctagtcttttgcttttgcccattttgaatcacatgaattattacagtgtttatcctttcatatagttagctaataaaaagcttttgtctacmcaccctgcatatcataatgggggtaaagttaagttgagatagttttcatccataactgaacatccaaaatcttgatcagttaagaaatttcacatagcccacttacatttaca

SEQ ID NO: 442802 - DNA, 378 bp, Homo sapiens
aaaatagggtatattttcctatattacggtttgcccctttataaatccaagtagataggargaaagaagacaaactttgcatctcagtatgaattattcaatttatttgaatgatttttctttacaaaacaaactcattcattagtcatgtttatctgcttaggagtttagggaacaatttggcaattttgtggttttcgagattatcgttttcttaaagtgccagtattttaaaatagcgttcttgtaattttacacgcttttgtgatggagtgctgttttgttatataatttagacttggattctttccatttgcatttgtttatgtaatttcaggaggaatactgaacatctgagtcctggatgatactaataaa

SEQ ID NO: 442803 - DNA, 378 bp, Homo sapiens
aaaatagggtatattttcctatattacggtttgcccctttataaatccaagtagataggaagaaagaagacaaactttgcatctcagtatgaattattcaatttatttgaatgatttttctttacaaaacaaactcattcattagtcatgtttatctgcttagsagtttagggaacaatttggcaattttgtggttttcgagattatcgttttcttaaagtgccagtattttaaaatagcgttcttgtaattttacacgcttttgtgatggagtgctgttttgttatataatttagacttggattctttccatttgcatttgtttatgtaatttcaggaggaatactgaacatctgagtcctggatgatactaataaa

SEQ ID NO: 442804 - DNA, 378 bp, Homo sapiens
aaaatagggtatattttcctatattacggtttgcccctttataaatccaagtagataggaagaaagaagacaaactttgcatctcagtatgaattattcaatttatttgaatgatttttctttacaaaacaaactcattcattagtcatgtttatctgcttaggagtttagggaacaatttggcaattttgtggttttcgagattatcgttttcttaaagtgccagtattttaaaatagcgttcttrtaattttacacgcttttgtgatggagtgctgttttgttatataatttagacttggattctttccatttgcatttgtttatgtaatttcaggaggaatactgaacatctgagtcctggatgatactaataaa

SEQ ID NO: 442805 - DNA, 378 bp, Homo sapiens
aaaatagggtatattttcctatattacggtttgcccctttataaatccaagtagataggaagaaagaagacaaactttgcatctcagtatgaattattcaatttatttgaatgatttttctttacaaaacaaactcattcattagtcatgtttatctgcttaggagtttagggaacaatttggcaattttgtggttttcgagattatcgttttcttaaagtgccagtattttaaaatagcgttcttgtaattttacacgcttttgtgatggagtgctgttttgttatataatttwgacttggattctttccatttgcatttgtttatgtaatttcaggaggaatactgaacatctgagtcctggatgatactaataaa

SEQ ID NO: 442806 - DNA, 571 bp, Homo sapiens
agaaaatgatgttacctccaatatcgcagggggtgtacatcctcctgtgatattgtttcttatattcagggggagaggataatattagtcccaatatcgcaggggttgtacacacctcctgcgatayggggagtaagagccagcccctctccgcccctggatcttaggacccccatcgcaagggggtgaggcccctgtgatgcaggcatgcatatcacccccctctccccccctggctatgacgatccacattgcaggggggcgggcgctccccgcgatgcggggagtcatatcacccccctctcccccgctggatatgacgatccacggtggtcacacagcgtgttcacgttattgtcaatagtatcttctccgcctctggaaattaccaactatgtcacagacgggtgcacatcctctgcactctttggagtaatagcatcctctttccccttgatattaagaacaatatcacaggagtgtttttacccctaggggcattccgtgtagtatcatcctctcccacgttgaaattaggaacaatatcactgggggcgtttccaccccgtgc

SEQ ID NO: 442807 - DNA, 571 bp, Homo sapiens
agaaaatgatgttacctccaatatcgcagggggtgtacatcctcctgtgatattgtttcttatattcagggggagaggataatattagtcccaatatcgcaggggttgtacacacctcctgcgatacggggagtaagagccagcccctctccgcccctggatcttaggacccccatcgcaagggggtgaggcccctgtgatgcaggcatgcatatcacccccctctccccccctggctatgacgatccacattgcaggggggcgggcgctccccgcgatgcggggagtcatatcacccccctctcccccgctggatatgacgatccacggtggtcacacagmgtgttcacgttattgtcaatagtatcttctccgcctctggaaattaccaactatgtcacagacgggtgcacatcctctgcactctttggagtaatagcatcctctttccccttgatattaagaacaatatcacaggagtgtttttacccctaggggcattccgtgtagtatcatcctctcccacgttgaaattaggaacaatatcactgggggcgtttccaccccgtgc

SEQ ID NO: 442808 - DNA, 571 bp, Homo sapiens
agaaaatgatgttacctccaatatcgcagggggtgtacatcctcctgtgatattgtttcttatattcagggggagaggataatattagtcccaatatcgcaggggttgtacacacctcctgcgatacggggagtaagagccagcccctctccgcccctggatcttaggacccccatcgcaagggggtgaggcccctgtgatgcaggcatgcatatcacccccctctccccccctggctatgacgatccacattgcaggggggcgggcgctccccgcgatgcggggagtcatatcacccccctctcccccgctggatatgacgatccacggtggtcacacagcgtgttcacgttattgtcartagtatcttctccgcctctggaaattaccaactatgtcacagacgggtgcacatcctctgcactctttggagtaatagcatcctctttccccttgatattaagaacaatatcacaggagtgtttttacccctaggggcattccgtgtagtatcatcctctcccacgttgaaattaggaacaatatcactgggggcgtttccaccccgtgc

SEQ ID NO: 442809 - DNA, 571 bp, Homo sapiens
agaaaatgatgttacctccaatatcgcagggggtgtacatcctcctgtgatattgtttcttatattcagggggagaggataatattagtcccaatatcgcaggggttgtacacacctcctgcgatacggggagtaagagccagcccctctccgcccctggatcttaggacccccatcgcaagggggtgaggcccctgtgatgcaggcatgcatatcacccccctctccccccctggctatgacgatccacattgcaggggggcgggcgctccccgcgatgcggggagtcatatcacccccctctcccccgctggatatgacgatccacggtggtcacacagcgtgttcacgttattgtcaatartatcttctccgcctctggaaattaccaactatgtcacagacgggtgcacatcctctgcactctttggagtaatagcatcctctttccccttgatattaagaacaatatcacaggagtgtttttacccctaggggcattccgtgtagtatcatcctctcccacgttgaaattaggaacaatatcactgggggcgtttccaccccgtgc

SEQ ID NO: 442810 - DNA, 613 bp, Homo sapiens
gtactttatagagggatttgagcattcatagattttggtatctgcaggggtcctagacccaatctctcacaaacaccaagggacacctgtattttattttaatacttttttgtcctctacattgtgctacctgatctttcttttccctaacaatatatacagtttgtaaggagatttttagtcttttttgatcactttattcatccttaaaatgataaaatgatggagctctctccaggtcagtgggatgaagacagggtctttcagaacacctccctcaccctttgagcttctcctctgcaggtggcaggcaaggtatctatgttagggatatagctgtggctttaaaactcatgcccatgggggtgttctgaaaaatatattgatcytaaacccttctgtattacacctgggcaacagatttaattttaattgaaaagttgtagattttatatttttatgtgattcagctgagacaactaaaattcaggggccatgtccttttctgtacaggtgcttgaattgggcagggttgttaccaaaacaccaggcgttccgtctaggtcctgctccttgccacacaggaagccaatgactgagacaatgagtattg

SEQ ID NO: 442811 - DNA, 586 bp, Homo sapiens
  misc_feature (1)...(586): n = A,T,C or G
atagaatgacacaaggagagattgtgaaatactgagaagaagtagggacaaatagctttaacagaaagttattcacrtaagcccagagaagacttatccctagaaaggctttgagaggtctccagaacctctagctgggtttatttttgagggcctatcccttctacaaaacccgtcagggagaggtggctttttaaaaatattcaaatctaaacaaaagatcacaaagtatataaagaaacagagagaagtagccaaatcaaagaaacaaggtaaaactccaggagctgaccctaaaaaacctaagaactatgaagtacctgacaaagaacccaaaatgcttatcataagtatgctcaatgagataaaagagaacataaacaactaaatgaaataaggaaaataatgcatgagcaaaatgagaatatcaacaaagagtcagaaactatacaaaaaaataaccaaatagaaaatctggagctgaatgataaaataactgacataaaaatgtaatagaggagtcaacagcagatttgatcaagcaggatcagaggaaagaaacagaanacttgaagacagatcgttt

SEQ ID NO: 442812 - DNA, 586 bp, Homo sapiens
  misc_feature (1)...(586): n = A,T,C or G
atagaatgacacaaggagagattgtgaaatactgagaagaagtagggacaaatagctttaacagaaagttattcacataagcccagagaagacttatccctagaaaggctttgagaggtctccagaacctctagctgggtttatttttgagggcctatcccttctacaaaacccgtcagggagaggtggctttttaaaaatattcaaatctaaacaaaagatcacaaagtatataaagaaacagagagaagtagccaaatcaaagaaacaaggtaaaactccaggagctgaccctaaaaaacctaagaactaygaagtacctgacaaagaacccaaaatgcttatcataagtatgctcaatgagataaaagagaacataaacaactaaatgaaataaggaaaataatgcatgagcaaaatgagaatatcaacaaagagtcagaaactatacaaaaaaataaccaaatagaaaatctggagctgaatgataaaataactgacataaaaatgtaatagaggagtcaacagcagatttgatcaagcaggatcagaggaaagaaacagaanacttgaagacagatcgttt

SEQ ID NO: 442813 - DNA, 586 bp, Homo sapiens
  misc_feature (1)...(586): n = A,T,C or G
atagaatgacacaaggagagattgtgaaatactgagaagaagtagggacaaatagctttaacagaaagttattcacataagcccagagaagacttatccctagaaaggctttgagaggtctccagaacctctagctgggtttatttttgagggcctatcccttctacaaaacccgtcagggagaggtggctttttaaaaatattcaaatctaaacaaaagatcacaaagtatataaagaaacagagagaagtagccaaatcaaagaaacaaggtaaaactccaggagctgaccctaaaaaacctaagaactatgaagtacctgacaaagaacccaaaatgcttatcataagtatrctcaatgagataaaagagaacataaacaactaaatgaaataaggaaaataatgcatgagcaaaatgagaatatcaacaaagagtcagaaactatacaaaaaaataaccaaatagaaaatctggagctgaatgataaaataactgacataaaaatgtaatagaggagtcaacagcagatttgatcaagcaggatcagaggaaagaaacagaanacttgaagacagatcgttt

SEQ ID NO: 442814 - DNA, 592 bp, Homo sapiens
tgcatgtctgtatctatataaagatctatatcaagatctacatgtatactgacagaactaactttggaattagaagctatgctgctgacaggttacatatttctggaaagttatttgctaattagtgccagatatgatgttaacatatctgacaaaaaaaagtgsgtttttttttctttatacctgcaggttttacacttggcttagaaatgaaagccaaggttataaatttgagttataagtacctgaccggggagaaaaacacagaagtgttcagagaagaaggatgaaaaccaggagccgagagtcctaagaaccagggaagggttccattaagcagagaggaagtggtgatccatgacaaagccagggcccaggaggcagggctgagaactctgcactgggcagctggtggcatgcacagagagaggaacctggcagagagattaacgcaggagcagattcagcaggataggagagcggcagctgaggaaaccaaggcagccaacgtgggtcccttgctcaagaagcagggcggaaggaaacagttcccttccaggctgaaaggactatctgaaagatcaggaagaag

SEQ ID NO: 442815 - DNA, 592 bp, Homo sapiens
tgcatgtctgtatctatataaagatctatatcaagatctacatgtatactgacagaactaactttggaattagaagctatgctgctgacaggttacatatttctggaaagttatttgctaattagtgccagatatgatgttaacatatctgacaaaaaaaagtgcgtttttttttctttatacctgcaggttttacacttggcttagaaatgaaagccaaggttataaatttgagttataagtacctgaccggggagaaaaacacagaagtgttcagagaagaaggatgaaaaccaggagccgagagtcctaagaaccagggaagggttccattaagcagagaggaagtggtgatccatgacaaagccagggcccaggaggcagggctgagaactctgcactgggcagctggtggcatgcacagagagaggaacctggcagagagattaasgcaggagcagattcagcaggataggagagcggcagctgaggaaaccaaggcagccaacgtgggtcccttgctcaagaagcagggcggaaggaaacagttcccttccaggctgaaaggactatctgaaagatcaggaagaag

SEQ ID NO: 442816 - DNA, 591 bp, Homo sapiens
tgaagccaaaagaaaaacccaactgatgatgaaggactttgaaaaaaataagattatgacaagaatacatgcaaagtttctattttgctagactgacaatcaattcagggacaagtacacagtatcttttgataaaaatactggccttcatcttctgtaagtaaacactatgtaagttttaggattcctaaatgtgttaccactatcattagtgttttttccagcactatgactgttcttcttttaagaaaactatgaccctggtcggatgaattctacattcaaaggtaaatgcagttactaaaatggaagaggctgtgaaagtctctgaataattgccacaattatttttttaaatccataatgagaagaaatatgtaaaaagtatgtctctgcttgtaactcagatcaacattaagaatttgcatcttttattatgcatrtaaatcttattttcccaataatgttaaaatatctaccacatgctctaaaactgtaaatcttttacaaatggaattatttaaaggggatgcatctaaatttatattacctatgataaaatgtacaaggtatttttatgtaaaagtaaca

SEQ ID NO: 442817 - DNA, 606 bp, Homo sapiens
cccctgctggcactcattctctctcctgctgccctgtgaagaggtgccatacaccatgattgtaagtttcccgaggcctcccaagccatgtggaactgttagtccattaaacctttttccttcataaattatccagtcttaggtatttcttcacagtagcatgagaatggactaatgtaattctcaattctacttctattttttttttttttgagaaccctgaaaaaatatatatttaggtaatttttctctctcrgtgttccaagcacatagtttagccaataaaataacagctggattaatacattgtttgtatcgtctaaatgtatggatataaaaattatcattagagttatttgaattgtggggccaagcattgaatttataaacaaatttcttagaactcagaaaatatttgaggaagaagttctgaggacaggatggcaatttactcacaatgtattaaatctagccaacaaatattaaattctttaatttgagatccaaattgtgcagggaaaaagccctaattttctgtgtttttttctgttattttatgtacaaatatacatatttatttgtaatctctaggtcaactagggtagt

SEQ ID NO: 442818 - DNA, 615 bp, Homo sapiens
tcacgcacagactaaacggaaaaaccaagaggataagaatgtgaaaataggtctatctgatttcaaagctggtgctgtttaacactgtgctacgctaaaatagaagaagttgagaccgtttatacatatataaagataaaagatatgtttaataaatttttaagagtatttctattattgagaagataattgtggaaattaattctttcattgtcttagcaaatcacataatttatcttgccataaaaaagaagaccaaactgacaaatgtataggaaaakttgagtcctccgtattatttattctagcagattgtttcataaacatcaatcttttaaaaagtagggttgtaacgctgtaataaaactaaaaattcccatttttctccattaatattagtagatgtttattagagaactacgctttctgggcactacagtataatgagaggccccttgagaagttatgagtctctccttatgcttggtccatcataggtgcttgataaatgtgattacataaatgatggcaggatctttgactatggcaaacatagagggctcagcaatacaataatccaagtttaataaatgggttctgatatttacctgaata

SEQ ID NO: 442819 - DNA, 573 bp, Homo sapiens
ctaatgtgcatgcataggcctctcgaaatagcatggtgtgagctaatgatgtgcattgctaaatatttttacatcagggtgacatttataaattatattttaatattacaattattttagatgattgccccaaaagcccttttatttttagaaaatacgaagcatgcctggcccacagacactcaaaacctaagatgtttcaaattagactcattatctttccacccccgccctaaagttgctgctcctctgtgttcccttgctccagtaatggggccagtctcctcccagtcacacaggctagaaaacttcaatcatctttgacttcgacctctcctaaccctttaaatccagtcaaccaagtcttctcaagtttatctttgaaatgtctttrgaatttgtcttatgcttcatcctccacacttcttccgtgattccggtcctcatcatcaaatgctctcagttattccatgagcccattccctaagctcccgggagctcatgcattctgtctccaaatacgctctttacattgctaggcttattcttttaaaacacaaacatgaatatata

SEQ ID NO: 442820 - DNA, 533 bp, Homo sapiens
tttagagagagagagagagagagagagagagagagagagagwgtgtgtgtgtgtgtgtgtgtgtgtatgaaaagagttattttatggaattgcctcacaagactatggagcctggcaagtccaaaaatctgcagagtaggctggcagactgaaattccaggaaaaaagcccatgttaccattcaagatcaaaggcttcctgtaacagaatttactcatgcttggtggagctcaattttttgttctatttaggtcttcaactgattgaatgaggtccactcatactatggaggtaaaatctgccttattcaaaattcacagattgcaatgtcaatctcatcaaaaaacacccttacaaatacatccagaataatgtttgactgcagtatttggggaccatggtggagccaagttgacatgtaacgatcaaccattacagaagtttttaatgtcttttacatagtggctctttataaataatagtaaaattggaacattaatttactacataatcatttcttcataagtggtaag

SEQ ID NO: 442821 - DNA, 698 bp, Homo sapiens
agtggctctttataaataatagtaaaattggaacattaatttactacataatcatttcttcataagtggtaagaaaacacaattaccctgtggtagacatggttaactatactttatgctaatctctgtgttctatttggcttacctaattaactctacatagggccccagacatagctttgctgcaggaagactttgggcagtcttttgaattcctaagagagtcagatgaayaacaaataattgaataccaaagaaatcaaaatgttagttctctcccaagaaaagagatttgtgaaattaagactagtggttctttaacagttatccattcatttgcctacatttgcctttatatgctgtattcatcctaggagtactaaatcattgaaaaaaaatcatatccagcaatcccactactgggtatctatccaaaggaaagtaagtcattatatgaaaaagacatatgcatatgcatatgcatgtttacagcagcacaatttgcaattgcaaagatatggaaccaatctaagtgcccatcagccaacgagtagataaagaaaatgtggcatatacacaccatggaatactactcatccataaaaagaaacacagtaatgccttttgcaacaacttggatagagttggaggccataattctaagtaaggtaactcaggaatggaatactaaatatcat

SEQ ID NO: 442822 - DNA, 698 bp, Homo sapiens
agtggctctttataaataatagtaaaattggaacattaatttactacataatcatttcttcataagtggtaagaaaacacaattaccctgtggtagacatggttaactatactttatgctaatctctgtgttctatttggcttacctaattaactctacatagggccccagacatagctttgctgcaggaagactttgggcagtcttttgaattcctaagagagtcagatgaataacaaataattgaataccaaagaaatcaaaatgttagttctctcccaagaaaagagatttgtgaaattaagactagtggttctttaacagttatccattcatttgcctacatttgcctttatatgctgtattcatcctaggagtactaaatcattgaaaaaaaatcatatccagcaatcccactactgggtatctatccaaaggaaagtaagtcattatatgaaaaagacatatgcatatgcatatgcatgtttacagcagcacaatttgcaattgcaaagatatggaaccaayctaagtgcccatcagccaacgagtagataaagaaaatgtggcatatacacaccatggaatactactcatccataaaaagaaacacagtaatgccttttgcaacaacttggatagagttggaggccataattctaagtaaggtaactcaggaatggaatactaaatatcat

SEQ ID NO: 442823 - DNA, 612 bp, Homo sapiens
tctattatttgatcaatttgctttgaaaatctattgtgcctagagaaggatatttggttttgttattttgtgttgtttttcctctatatttttaattaccttgtttgttttatgctactaacatggtgctatatcattcctattagtgtttgcaagttgaagcacacgtgtgtcacaaatcctggcagtaaataattaaagtatttaaataaacttgtgtatatgctacagttctctggttgaacaaatttgtagagcaagatcttattttgatctataattatagctgccagtgactggcaagatccttactgagtcagattaatttacacattaagcagccatctgtagaaattttcatagtacctcgtttgcaatgctatgtatcacatgggaattctgaaactacgttgccactagggagcttttaacrccgtggttgtaggcttatagctatgaacaaattgttccagacatttacatttttttctccttattacaaggttgcctaatgatccaagaaaaagtatacaacagtttagacccctaatgacagaacaattgataaattaagagcattcattttattttctttaaaaatatgcccttggc

SEQ ID NO: 442824 - DNA, 541 bp, Homo sapiens
tgaaggagtatttccaaaaactaataataattatagcatcagcagaattggttaaaaatgaaattgctgttactcttcgcattatcccctaacatgttgcttttattgcttgtttatttgaaaccctctgttgttcagataaataattagtatgacatgcattgttatttttaaacaggatatcagattgttctttggttttgaattaactgaagatccttaagaaatagatattgaaggttttgtgaaactttcactgtagttttatcaagaattgttcaggagatctgaaatgggcaaagtaattagaaatagagaatataaatcaccactaatctcttctgacaaactcttatatcaaaawtagtttcacagggaagccaaaacaagtgcatgcttttagatatcactggctactgacttttatactacctagagagggaattttataaatataataaaattgcctctctatgctgctatttttaattctaattttaatacaattagtaaatggtgtcttctccaatggctacaagtt

SEQ ID NO: 442825 - DNA, 550 bp, Homo sapiens
tataaaaggttgtttgctatttcctgaacatgycacatgccatcaggcctctgtgactttgtgcttgtaattccactggtaagaaaacacattttttttttttcctgcctggtgaactttaaattttcgtatagagatttaactaagtcatgatcagttcggtgaagacttctctggctctttactgcaaagttaactcttccttcattatattctgttgtcctttatacatgtccctcctagagcacttattatatcaaagttacttcttcatccacctatccctgaaaagatgatgagcttcatgaggatagacaatatgacctggctgattttataccctatgccttgagctatactgcatcacagattagatattgaataatcaatatcttttgttaaatgaataaacaaaaataattttaacatgaagatcttatgtttaatagttgttcaaacataaattgaaaatgtaagcccctaagaaatttagagtggtatagtagataggaaaatagttcttatatttatatttgctttcaagaaatat

SEQ ID NO: 442826 - DNA, 550 bp, Homo sapiens
tataaaaggttgtttgctatttcctgaacatgccacatgmcatcaggcctctgtgactttgtgcttgtaattccactggtaagaaaacacattttttttttttcctgcctggtgaactttaaattttcgtatagagatttaactaagtcatgatcagttcggtgaagacttctctggctctttactgcaaagttaactcttccttcattatattctgttgtcctttatacatgtccctcctagagcacttattatatcaaagttacttcttcatccacctatccctgaaaagatgatgagcttcatgaggatagacaatatgacctggctgattttataccctatgccttgagctatactgcatcacagattagatattgaataatcaatatcttttgttaaatgaataaacaaaaataattttaacatgaagatcttatgtttaatagttgttcaaacataaattgaaaatgtaagcccctaagaaatttagagtggtatagtagataggaaaatagttcttatatttatatttgctttcaagaaatat

SEQ ID NO: 442827 - DNA, 573 bp, Homo sapiens
ttctaaaagagaaatgaaaacatatgttcatacatataagtaaagacttatataccaatgtttagagaagctttatttacaatagccaacagtggaaatagcccaaatgtctatcaacagttgaatagataaccaaaatatgctatacccatacaatgggatactactcakcagtaaaaagcaatgaactaatgatacatgcaacaacccgaataagtctcaaaatttatttcttccttccttaaggaaggaagacagaccaaaaatagagtatctactatataattccatttatgttaagctctagaacatgcaaaataatctataatgataaaaaagaagctcagggtttccctgcggacacagtgaagggagtaatggattacaaagagtcaagcggaaacttttggaggcggtagaaatgtcattatattgattgcattcatggtctcactgcatacacatatgtcaaaagttaacaaactgtgcattttaaatacatgtgttctattgtttgtcaattgtacatcaataaagtcataaattttttaaatagtgaaataataaaaaagg

SEQ ID NO: 442828 - DNA, 615 bp, Homo sapiens
tgagttatactgcttccattcattttaaagtattttaaagagatgggtgaagtgcatatccacatgaacacaattatcaaaatttatrttaattaaaagccatttacacatattctttttttgtgttctgaattctacatgagttttcagagattatgaaagttggagcaatttttttttctaaagcaataacatcagagcaaagtgttttatgcaagctattcagtgtcaacttgttggacaagtcaactcagagccaccatcacatggatgcacctgccttgtctttgcaggagctgccttagctaattacttagcagtaagaatgccagcagctacccaagttttcaaagaggcatggagataaaaatcctacattaattccttcattgtgctttttaaggaattaggaacgggtttctttggggcatgaagcaaaggagcagaattcttattactatggctcatcttataacaaagttaagattcattttccttagaaagagctggaagatagtataatccgtatctatttttttcaaaactgaaaatcatgagggatttctgattccatcaattatttttagaaatttttaaaatgtagatgttaaagaa

SEQ ID NO: 442829 - DNA, 615 bp, Homo sapiens
tgagttatactgcttccattcattttaaagtattttaaagagatgggtgaagtgcatatccacatgaacacaattatcaaaatttatgttaattaaaagccatttacacatattctttttttgtgttctgaattctacatgagttttcagagattatgaaagtwggagcaatttttttttctaaagcaataacatcagagcaaagtgttttatgcaagctattcagtgtcaacttgttggacaagtcaactcagagccaccatcacatggatgcacctgccttgtctttgcaggagctgccttagctaattacttagcagtaagaatgccagcagctacccaagttttcaaagaggcatggagataaaaatcctacattaattccttcattgtgctttttaaggaattaggaacgggtttctttggggcatgaagcaaaggagcagaattcttattactatggctcatcttataacaaagttaagattcattttccttagaaagagctggaagatagtataatccgtatctatttttttcaaaactgaaaatcatgagggatttctgattccatcaattatttttagaaatttttaaaatgtagatgttaaagaa

SEQ ID NO: 442830 - DNA, 548 bp, Homo sapiens
ctgctgtgagccacagtcgtgccactgcactccggtctgggtgatagagagagatactatctccaaaaaacaaaaacaagaaagagaattaattctttaaagttttaacttttccattatgtaattttactatttttaaatttaatcccctgttactagaaataactagttggaagtgttgaacatgtttccttgccaatgtgtgtgaatttctccagagtattactatactcagtagtggaagcttgtgtcatagagtatatacacattcaaactattattgtccacaaaatcaccccacaatggctgtaccaaatatagtcacaacagtgtttctcttctttatctgcttttgttcattccaatttcctttcctgtaagttgcctgwtcataaatttagcccattagcttgttgctttttttgcccgctcagattttctctaccatgacagtttcctagtgttgaagagctgcttttcccaaacatcctcaatatcttactgttcccatccaatctgacacacaacttagtcatatgttatgttgg

SEQ ID NO: 442831 - DNA, 566 bp, Homo sapiens
gacagtcctaaccatcagtatgtagcagaaaggatgtctactttattcagacatgaccccaaagatactgcttacatatgatttttcccgctagttggatcggagatgattcacaaattggccagatgtattatagaaaatgtcactgaaggcagtactgctataacaaaaaaaacagttaagcagcaggtggcgctaaaactggtatctgaggctggacaactacaatccttgtgcagtacaaatatctggaaaaytgtctgagataacttggaagcatgccttacatgttgagcgagagctctaggggaagtggctgggaagagccacagtattgtccaccattgactagtctaagcaagctacttaagaataaggcaagaatggaaacaaagttccagggatcaagggccatatagatttcgaaatccaactacttctgcgctccatacaaagactgaaaaaagtctccagtgaccaacagtttctagtttcatttctcaggtaaacaaagtcactccaccttccctgaaagatcgcattaacgctattcccttaccaggtct

SEQ ID NO: 442832 - DNA, 566 bp, Homo sapiens
gcatccaactcagtcaagtttctgcattctattttggcaggtggaatttctagtacatcataacctcgtttctctacctggcatagaataaaactggctattcaagcttgactctatcagaattggctcttgatatgttaatggagcttaargaatttagaaaatcctcttttctctcagtaatgcatagctttccagaataattgtctaacaaaggactcagaaattcatagtggccttaatgactaatttgacagtcaaaatctagtaatgatttcatcgctttaattggtatatccatctttccaagatgtaagcctcttggcttgcccttaagaacaggctataggggaaaattattcaggagaaatacaaaataaatctggtaaatattttccaaatatgctgtaatagatatatcaattgacaatgaaaaacaaattccactgaataatatttattttttgtaaataaacgcatgcttatactactgagtaaatgctatatcataatttaattttaatatccctaattgaatagagtaacgtctttgtaaaattttactc

SEQ ID NO: 442833 - DNA, 566 bp, Homo sapiens
gcatccaactcagtcaagtttctgcattctattttggcaggtggaatttctagtacatcataacctcgtttctctacctggcatagaataaaactggctattcaagcttgactctatcagaattggctcttgatatgttaatggagcttaaagaatttagaaaatcctcttttctctcagtaatgcatagctttccagaataattgtctaacaaaggactcagaaattcatagtggcyttaatgactaatttgacagtcaaaatctagtaatgatttcatcgctttaattggtatatccatctttccaagatgtaagcctcttggcttgcccttaagaacaggctataggggaaaattattcaggagaaatacaaaataaatctggtaaatattttccaaatatgctgtaatagatatatcaattgacaatgaaaaacaaattccactgaataatatttattttttgtaaataaacgcatgcttatactactgagtaaatgctatatcataatttaattttaatatccctaattgaatagagtaacgtctttgtaaaattttactc

SEQ ID NO: 442834 - DNA, 543 bp, Homo sapiens
gccaagaatgtaggtatttagtaattaattggttttgtggctgtaagatgtatagggagagagagacattgaaaaataaaagatgctgagagggcacctagaaagtaggcattggaattctagggaaagtctggtaagaaatgatcaagaccacatatttatctttgaatttaatgttaccataccctttgggatgtcccaggatgaccctgcactaggcctgaacacaggtaacagcaacagagcccttaaaataaaaccatcatgcagttcctgagctttacctagaagctacactggtgaaaaagatatgtatggtagttctgaatttgtaagaggccaggcttactttctggtaaggtgaatatgtaagtgaayataaaaagatataatgttggaagtacaggcacaaatttgaaaatttaggtttaaacaccctgagatagcataggcactgatttctttttactttgcaacttgaagaagttctgcagcaaggacagaggcagcaatcagaacagatagctggagaggaggaaacat

SEQ ID NO: 442835 - DNA, 607 bp, Homo sapiens
ctcaggtaaacaaagtcactccaccttccctgaaagatcgcattaacgctattcccttaccaggtctattgtttcaggtagcctcttttagagaaattgagagggaaagggaaagagaaagggagagttgccgggagggaggcccagtctgaactgctatgaaatctcagtctctaacccgttgtgccctcaaaagtcttctctcattctagcaaaggcattagtggtttttcttctgcaatcccagaccatttattttctacaacatatttggcaattgcatttgattttttataagtttaagaagacactgtgtgttgtcttcctgtctgggtgtaaccttctttaaatcagagcctgtgtctgttgaacctctaaagctcctaaaaaagtactttgaatatagagtaatgtagttttgatacattaataaattgccagtgyctccaagcatcctctgctttgtttcgttttctgtaattagtaactgatttgaccccaccacctacttcttgagacttcagggaccccatttcctgaaactccacaactaaaatatacacctctgcctcaaagctttctaaaatccctaccaatctccaaaact

SEQ ID NO: 442836 - DNA, 564 bp, Homo sapiens
ggaagggaattgaccaatctatctttagagtcaaaaaagtttgtccacaagttaaacaacattttgagcataataaaatttcaattacaattcagaggaaatcacacaaatttttttaaaaattcaaattgcctaataaagtcacttttgaaaattattagattttagtggaaactttatattattagtggaaagttatataatatataaaaatatatgtataaatttaaattttataattatatttataatatatgatatgtgtaatatatatataggaagactatcaagtaaaacaatatatattttggcatgtcattcatgacatgatcctatgggaaaaatgagaaaattayaattatttttaataacccactaagaaaatccattcttttttctgtctaatatttattcttattttgtagaactcagatttattttctttttggatacagaaactatatctgttctgaaaacatttggctagtcagtttaggctgaaaaaccatcatgaaaagaatgttagctgccagtgctctagactttgtctgaagcagaaggttc

SEQ ID NO: 442837 - DNA, 551 bp, Homo sapiens
catttgattttgtcttgtttagaacaaaaacttgttttttctccattactataaatckgtggtgttcaaatctgtattggacatagaaatacttccttaacaatagcgtaaatgggaatcactccccaactgctccgttattttatgcttcctcttttggattaaagggtgcttcaaaaaccagtagaataaaacaggattcaaaaatcatgccttggattattcaaagtaaagtcccaatttgttatatgagaatggtaagatttaaaaagaaaggacacttttagaattggcaggggcatggaacactgattgtctagtatgacacaggtggaagtgtaaattaggatatctactttaggaaaattgtttgacagtatctactgaagctgtatacattcattcaaatagccagcaatttctctttatttacaaactcatgggaaatgtgttaatatgttcatcaaagacatgtacaagaatcatcttagtggtgccctttgcaatatttttgactggaaattacacaaataccaaaatgtaataaatta

SEQ ID NO: 442838 - DNA, 588 bp, Homo sapiens
cacaaatatggtatattttttatgtcatcttctctgataatttgtctatattatgaacacaaatataactaatttttaagtgtattattaggaacatgtaggataatattgaacatggtggaagagcaagtacaaggaaaaatgttggttgatgtttaacagatatttgacaattttcaaagtgttataatactcattatttaatttgttctcagaataaccatgagaaagggcaggacatatagccttttttttctaacgatgataaagcagtctcagtgacatgagttgaatccctagcttatgagaggcagaagttatctagaaaaagggctttttacagcaatttcagagttttttctatattatgtataaaatagaatatgtaaatttattctmtgtttctatataagtaaaaatttctaagtgtgccttcaatttatttcacatggatctattcacctggttaataaagattatgagaaatatctgtgacaaataatttggaacaaagttaaaagtatatttgttcatacagatgactaataccctttctcttatgcatcattctatataaccacaaccttt

SEQ ID NO: 442839 - DNA, 556 bp, Homo sapiens
caaactgggtggagcccactgcagcttggcaaagccgctctagccacactgtctctctagattccacccctctgggcaaggcatctctgaaagaaaggcaacagccccagtaagcgccttatagataaaactcccatctccctgggacagagcacctgcgggaaggggtggctgttgggggcagcttcagcaaacttaaaccttcctgcctgctggctctgcagagagcaatggatctcccagcacagtgctcgagctctgctaagggacagactgcctcctcaagtgggtccctrtcccccatgccttttgactgggagacatctcacagaggagagctccactggcatctggcaggtgcccttcagggaaaaaagcttccaggggaaggaacaggcagcaatctttactgttctgcagcctccgctggtaataaccagacaaaaagggtctggagtggacctccagcaaactccagcagacctccagcagagggtacagagtgttagaaggaaaactaacaaatggaaagaaatagcatcatcatcaacaaaaa

SEQ ID NO: 442840 - DNA, 581 bp, Homo sapiens
tgaaaacttacgttcacataaaaacctgcacaaagatgtttatagttgttttattcataattgtcaaagcttggaagcaacaaagatgtcccatartagatgaatggataaataaactttggtacatccggacaatggaatattactcagtgctaaaaatgaactatgaaatcatgaaaatacaagaaggaaattaaacgcatattactaagcgaaagcagccaatctgaaaaagctacatactgtttggaaatggcaaaactatggaaacagtataaggagcaatggttgccaggaactaggaagaagagagagatgaaaacatagaatacagaagaatttttaggacagcgaaaatactctgtatgatgctataacaatggatgcatgtcattataacttcgcccaaacccatagaatgtacaacaccaagagtgaaccctaatgtaaactacagtgggcattgggtgatatgggaaatttctgtaccttgtctcaatgttttttctctgaatctaagattgttctaaacagataatatctttacaaatgagtttatgagtgaaaaattcactactatt

SEQ ID NO: 442841 - DNA, 574 bp, Homo sapiens
cttgtcaaaaataacaaaaaatcttattagaagaacaatatttccagtttcacatttcgcttgttactctgaacttccatttaaaaatactttttagtaaaccaattgaaccctagttgaatgtttaattatatttgttttaaatctktattgatatctattggtcaactagataactttaccaacaaattgcctacaaaaactactcttcaatatgatttttttaaggcataataagtcccaatgtgccttctatctgtctcattgcttccagagttgcccaaagtacttctgtctttctttctttaaggcccaactgttcttgacaagccattgtcagtactttcatttagatctcctgttactgttttgttgccatttcataacatcttattaaagagacagtactcagagttacatgcaggaagttgataggaaactgccattgcttggcatttgtagcctaaggcaactttcaatctatatttgaacagctaccaggatccctgcagcttggtaagtgagttctatatccatatatcccaacctgaaactgtaataattgcatatttca

SEQ ID NO: 442842 - DNA, 614 bp, Homo sapiens
cagaaccttagactgaatcattggtcatgtcagtgcaccctgctatccaagcttgtgaaagcctatttcataacttcacataccacatatccctataagagtatgcytttggggccgggtgtggttgctcacacctgtattttgggaggctgaggggggtggatcacttggggtcaggagttcgagaccagcctggccaacatggtgaaacccagtctctaccaaaagcacaaaaattagctgaagtggtggcacatgcctgtaatcccagttactcaggaggctgagccaggagaatcacttgaacccgggaggcggagattgcagtgagccgagattgtgccactgcactctagcctaggtgacagaccgagactctggtctcaaaaaaaaaaaaaaaaaagagtatgctgtttgatgttttcaaaaaatatagctatttttaataaacttgttttagaaaaatatttgatttactgaaaaaaaaaaagaaaaataaccaaaagtagtaaagagagtttccatgtacctcacactcagtttccactgttatgaatgtcttatattcataacagtgtaagtatggtacattttccataactaatgaaacaaca

SEQ ID NO: 442843 - DNA, 614 bp, Homo sapiens
cagaaccttagactgaatcattggtcatgtcagtgcaccctgctatccaagcttgtgaaagcctatttcataacttcacataccacatatccctataagagtatgcttttggggccgggtgtggttgctcacacctgtattttgggaggctgaggggggyggatcacttggggtcaggagttcgagaccagcctggccaacatggtgaaacccagtctctaccaaaagcacaaaaattagctgaagtggtggcacatgcctgtaatcccagttactcaggaggctgagccaggagaatcacttgaacccgggaggcggagattgcagtgagccgagattgtgccactgcactctagcctaggtgacagaccgagactctggtctcaaaaaaaaaaaaaaaaaagagtatgctgtttgatgttttcaaaaaatatagctatttttaataaacttgttttagaaaaatatttgatttactgaaaaaaaaaaagaaaaataaccaaaagtagtaaagagagtttccatgtacctcacactcagtttccactgttatgaatgtcttatattcataacagtgtaagtatggtacattttccataactaatgaaacaaca

SEQ ID NO: 442844 - DNA, 614 bp, Homo sapiens
cagaaccttagactgaatcattggtcatgtcagtgcaccctgctatccaagcttgtgaaagcctatttcataacttcacataccacatatccctataagagtatgcttttggggccgggtgtggttgctcacacctgtattttgggaggctgaggggggtggatcacttggggtcaggagttcgagaccagcctggccaacatggtgaaacccagtctctaccaaaagcacaaaaattagctgaagtggtggcacatgcctgtaatcccagttactcaggaggctgagccaggagaatcacttgaacccgggaggcggagattgcagtgagccgagattgtgccactgcactctagcctaggtgacagaccgagactctggtctcaaaaaaaaaaaaaaaaaagagtatgctgtttgatgttttcaaaaaatatagctatttttaataaacttgttttagaaaaatatttgatttactgaaaaaaaaaaagaaaaataaccaaaagtagtaaagagagtttccatgtacctcacactcagtttccactgttatgaatgtcttatattcataacagtgtaagtatgstacattttccataactaatgaaacaaca

SEQ ID NO: 442845 - DNA, 500 bp, Homo sapiens
tatgtattggaaacaattcctattacaagtgttgagaggtgaggcctgctggaaggtgcttatgtcataagggcttcattctcatgaatagcttaatgtcactataacaaggaattatggrttgggtgcggtggctcatgcctataatcccagcactttgagaggccgaggcaggtgggtcatctgagttcaggagttcgagaccagcctggccaacagggtgaaacccagtctctactaaaaatacggaaaattagctggccatgccaggcacggtggctcacacctgtaatcccagcactttgggaggccaaggtgggtggatcacttgaggtcaggagttagagaccagcctggccaacagggtgaaacccagtctctactaaaaatacgggaaattagctggccatgccaggcacggtggctcacacctgtaatcccagcactttgggaggccaaggtgggtggatcacttgaggtcaggagttcgagaccagctt

SEQ ID NO: 442846 - DNA, 500 bp, Homo sapiens
tatgtattggaaacaattcctattacaagtgttgagaggtgaggcctgctggaaggtgcttatgtcataagggcttcattctcatgaatagcttaatgtcactataacaaggaattatgggttgggtgcggtggctcatgcctataatcccagcactttgagaggccgaggcaggtgggtcatctgagttcaggagttcgagaccagcctggccaacagggtgaaacccagtctctactaaaaatacggaaaattagctggccatgccaggcacggtggctcacacctgtaatcccagcactttgggaggccaaggtgggtggatcacttgaggtcaggagttagagaccagcctggccaacagggtgaaacccagtctctactaaaaatacgggaaattagctggccatgccaggcacggtggctcacacytgtaatcccagcactttgggaggccaaggtgggtggatcacttgaggtcaggagttcgagaccagctt

SEQ ID NO: 442847 - DNA, 545 bp, Homo sapiens
gcagatgacactatccaaaagctcaatagttttttacatctaatggttgacatctaatcagaaatctaacagcccttccaagagagaataccacaaaaggaaaaaaggagggaatagaaacagtcagaaatgacacctatagtggagttttcatatatataatttaaaatagtgtgattaatacattccagatggagatgacaagatagagaatctcatcagagagctgaaatctataactaagaatcaaatggccaatctatatttgaaatcaagaacagtgtaattggaaacagcatgaaaagagaattagtgaatgagaagacaggtgcatagaaaattacaatccgaaagacagaatttgagaaattgaaatacagaaaagggtgtaagagaygtgtgggatatggtgaaatgtctaacttatgtgtatttaaactagtaagagaggaagagtgcgaaaatggaatatatgcaaactttgaagagataatcgttaggaatttcccccaaattttgaaagactttaaaccacagatttaagt

SEQ ID NO: 442848 - DNA, 390 bp, Homo sapiens
ctaattacaaatggagaatttattataaaacattttcaactattataaaaatgaaatttaacatattaaaaggtgtggaaggaagctaaatctgtgcttaaagaaaaatccgtagattctaatgaatgtattataaaagctgaaagataaatacacttctccatatttaataatatagagttagggaacaaagagagaatgagagaacaaagaaaatcargggcaaaaagtaaacaaaggaaatgaaaattcctatgagataaaaagtacaaaatatattcagactggttaaatatctaaatatgcgacttctaaaagccacagatttgaggaaagcattttcaactgctctcattagcaaaggatttctacctagaatatattaggtca

SEQ ID NO: 442849 - DNA, 524 bp, Homo sapiens
actacacgtcaagtttgataacatttaaaatgaattttaaaatgtccaactctgttttagcattgaaacacaaaatgttattgtgtatgcagagacagagaagcagaaccccggggcataaatgtgacattagtgaagcaaatatttactggtgaaggaatggccrcaattttaaatttccttgaaaataaaaagcaatgcctttatgggacatgaaaaaagaagacacttccaagtagagaggttatcctgttttattaccctaaaacatgcaaaagtattttcaatcactggccatgggaaaaaaatgaggcagagaaaattgtcccattcctagtaatatttgaacaagacaaaaaaatagaaacagagagaggctattgtaaacaatttatatatttaggttatcagtttgatatctagtatgttatctgataacttcccagagactgtactgaaccagcttaactttcagaaacatgtaattaccttgaggaaaataaacatagtcaaataaaatatac

SEQ ID NO: 442850 - DNA, 491 bp, Homo sapiens
accagcttaactttcagaaacrtgtaattaccttgaggaaaataaacatagtcaaataaaatatactgttgtaatacaagcattacaacttgaaaaaaatgggtttcattgactgcaagaaaactttggacacaataattaaatacatatctaaaaatgctggataaacaatattcttgatcgtatacaataccatattgtgtagaaacaaaagattgttgattattattggaaaaatatagaagatttagactatgaataagaggggaggtttagatatttcttactcagtttttcatgtatatttattctgtttttatatgtgccccaaattgatattttttaaactctacgaaatttaaaatagttcattcagtaagtataaaatctccatccaaatgagtaagtgaaaacacatgtatacaaacactgctggtgaagcatttatttgtgaaatttcacagacataggagcagtagcagaaatgtagg

SEQ ID NO: 442851 - DNA, 491 bp, Homo sapiens
accagcttaactttcagaaacatgtaattaccttgaggaaaataaacatagtcaaataaaatatactgttgtaatacaagcattacaacttgaaaaaaatgggtttcattgactgcaagaaaactttggacacaataattaaatacatatctaaaaatgctggataaacaatattcttgatcgyatacaataccatattgtgtagaaacaaaagattgttgattattattggaaaaatatagaagatttagactatgaataagaggggaggtttagatatttcttactcagtttttcatgtatatttattctgtttttatatgtgccccaaattgatattttttaaactctacgaaatttaaaatagttcattcagtaagtataaaatctccatccaaatgagtaagtgaaaacacatgtatacaaacactgctggtgaagcatttatttgtgaaatttcacagacataggagcagtagcagaaatgtagg

SEQ ID NO: 442852 - DNA, 491 bp, Homo sapiens
accagcttaactttcagaaacatgtaattaccttgaggaaaataaacatagtcaaataaaatatactgttgtaatacaagcattacaacttgaaaaaaatgggtttcattgactgcaagaaaactttggacacaataattaaatacatatctaaaaatgctggataaacaatattcttgatcgtatacaataccatattgtgtagaaacaaaagattgttgattattattggaaaaatatagaagatttagactatgaataagaggggaggtttagatatttcttactcagtttttcatgtatatttattctgtttttatatgtgccccaaattgatattttttaaactctacgaaatttaaaatagttcattcagtaagtataaaatctccatccaaatgagtaagtgaaaacayatgtatacaaacactgctggtgaagcatttatttgtgaaatttcacagacataggagcagtagcagaaatgtagg

SEQ ID NO: 442853 - DNA, 598 bp, Homo sapiens
aggactatattatatattgttaaatgtaattaaaatatgtaagttagacttcttcattacctgtggctattgtagtgagtaaagtatattaaatggaaattgaatctatagatgaaaaaaaaccacagatacctatgggatatatatatctaagatatagcctattaagctttatggtagaaaaaaaatactaaaccttaagcaagatccaattatatatcactattctgttttagaatatgtttattccatcttttaacktaaatatgaaggatgtgactaaatccgttccacagttcaaattttgtgctttaaataagcaaagtacttgtaagtcaatgtcatgagcacatttggaatgtcttgccagtgtggtgaagtcaactcagtttgtagaagtctaatcctgatagtaatttcattatcccctggaaaacgaatcatacttctgggaatcacatatcattctcagccaaagttgagtggctaatagggttgtgtatcattttttcagactgaataaattttttcttcctaattaatcatcttaatgaatgcccaggtctcttcaccttcagttctgaatatgaatcaattt

SEQ ID NO: 442854 - DNA, 582 bp, Homo sapiens
cttgttttggccaaattgaataaaactctctctgctcctaggagctgaggtgtcagtttttggtttactatgtatcaggaacattaacctaaattgggggattctacaacattttgaaccaagtatatgtgtttcccaaaattgtttattacttcataatttttctattcagacagtgatgattgctaaaaactaaggtgtccccaagtgcaacattgtttctagatcataaacccaatgtgaagcagaatagtatgtgttttgctcaatattttacccctagtccctagacactgcttagcctgtagtcattaaagggacatcagtggaaggacaccaacaacaacaacaacaaaaaaaaaaaaaaaaaaaaaaaagaggaagargaagaaggaggaaagaaggaaagcagaaaggtgaggatgagccaggttagatattgggttgtcagtcaattaatacaatcatgtctaacacttctaaaaacacagaaagaaaatttacaagtctcaacattaggtactattgctcattttctctttgacctgcatgaaattaagaacttgttaaaattcttgggat

SEQ ID NO: 442855 - DNA, 463 bp, Homo sapiens
gaatcagacaaaaggtgttggggtgggggggggggcggttaacggaagcaaggagagtgcatgactcactggaaccgctaaaccaggaatcagtaatttgacggcagtgtccttggcttcctcctggctttaatgggaatatkttgaatgtttcaccattaaccaagatgttggctgtaggtgtctcttagatgtttaagttgagttagttcccatcttttcagagtttgataaatgttgtattatgaacttttgtattttgtattttattaggtaggctgttgttggctggttttcactcctttgtaaacgtccaaataaaatacagataactttttacatcaaagatttttctcttgtgtactcaatccttctaaataaacctttctcttcagacttattttatagaacagttctttcactaaactttcacaaatcgcaaatacaaaatgtgtttactaaa

SEQ ID NO: 442856 - DNA, 535 bp, Homo sapiens
tgtccgcctcttcagtccagatctgatccattgcacaccccttccttccgtcctgggtttcccccaagcccctttccccctttgcgcctcccacttctcctagattgagagtcagcttggttctttcctttacatccattagtgagggtcaggctcttttgttatgtttttttttcttttgtataacttaattatttcarggttcggggtgggcgctcgccccttgcccagtcacactggtgtgtgtgcgactcctacaaagttaacagtttctccaggtcaaggggtgggatccaggcttggtgatgtgcacaatttcttttgtccacttgacacatctctgcgtcctgattctgctcagggacggacccaagaacaaagcagccatttaccgcctccggaggggaggccagccctgtggcacatccagggccttggaacacctagagacagatttctctccctcgccttggctcctttccactctgcagctagtgtggaaaagaaaccagaaataaacagcaccaaagaacag

SEQ ID NO: 442857 - DNA, 576 bp, Homo sapiens
gggtggatagagccctctgtactatctttgcaacttttttgtaaatctaaaactattctgaaatagaaagcttatttaagcctggttgcagtggcccacccctgtaatcccagcactttgggagaccgaggcaggtggatcacctaaggtcaggagttcaagaccaacctggccaacatggtgaaacccccrtctctacttaaaatacaatacttagtcgggtgtgatggcgcgggcccagctacttgggaggttgaggcagaattgcttgagcctgggaggcagaggttgcagtgagccaatatcgtgccactgcactccagcctgggtgacacagcaagactccctctcaaaaaaaaaaataaaagaaagaaagaaagcttatttaagtacctttagtgccccctaccataaatctatgtttttttttaagtgtatatatggagagaaataaagagaaagcaaattgtaagctaggcgaggtggctcacacttgtaataccagcactttgggagaccaagggaggctctcttgagtccctggagtttgagaccagcctgggcaaaatggaaaaa

SEQ ID NO: 442858 - DNA, 560 bp, Homo sapiens
agggagggccatgcccggcagcttaagggtcctgcagagccttttggtctctgaccccaaatccactggaacaatctcagtccttttaaggkgccagcctctctcctgtgtcctgtggttcccccagcctggatctctgtaggtcccacccaccttgcctttcacctggttaataccttaactcaacccgctggaatccagctaaggagtctcaatctcccacagccttctccaagcccccactctgggcacagtgctcctctaccaagcatcctggctgccccatcagggcagaactgggtgagcacatggaccctggagttccatcctggcttctccgcttctgagctgcatgactttgggcaagtaacttggcctctctgggcctccatttcctcatctgtaaaatggggatgacaacagtgccgcattgcgctgctgtgagcattaggtgaaataatacttggcttctcgatgtgtatacagaccagcagattgggcatcccctgggaggttgctggtgcagcatcccaggccccaccccggaactacagaaccag

SEQ ID NO: 442859 - DNA, 404 bp, Homo sapiens
catcaggacaaacacgtggatacatggaggggaacaacacacaccagggcctytcagggggacagggggtaggagaccatcaggacaaacacgtgggtacatggaggggaacaacacacaccagggcctctcagggggacaggggtaggagaccatcaggacaaacacgtgagtacatggaggggaacaacacacaccagggcctctcagggggacaggggtaggagaccatcaggacaaacacgtgggtacatggaggggaacaacacacaccagggcctctcagggggacagggggtaggagaccatcagtacaaacacgtgagtacatggaggggaacagcacacaccagggcctctcagcgggacagggggtaggagaccatcaggacaaacacgtgggt

SEQ ID NO: 442860 - DNA, 404 bp, Homo sapiens
catcaggacaaacacgtggatacatggaggggaacaacacacaccagggcctctcagggggacagggggtaggagaccatcaggacaaacacgtgggtacatggaggggaacaacacacaccagggcctytcagggggacaggggtaggagaccatcaggacaaacacgtgagtacatggaggggaacaacacacaccagggcctctcagggggacaggggtaggagaccatcaggacaaacacgtgggtacatggaggggaacaacacacaccagggcctctcagggggacagggggtaggagaccatcagtacaaacacgtgagtacatggaggggaacagcacacaccagggcctctcagcgggacagggggtaggagaccatcaggacaaacacgtgggt

SEQ ID NO: 442861 - DNA, 404 bp, Homo sapiens
catcaggacaaacacgtggatacatggaggggaacaacacacaccagggcctctcagggggacagggggtaggagaccatcaggacaaacacgtgggtacatggaggggaacaacacacaccagggcctctcagggggacaggggtaggagaccatcaggacaaacacgtgagtacatggaggggaacaacacacaccagggcctctcagggggacaggggtaggagaccatcaggacaaacacgtgggtacatggaggggaacaacacacaccagggcctctcagggggacarggggtaggagaccatcagtacaaacacgtgagtacatggaggggaacagcacacaccagggcctctcagcgggacagggggtaggagaccatcaggacaaacacgtgggt

SEQ ID NO: 442862 - DNA, 404 bp, Homo sapiens
catcaggacaaacacgtggatacatggaggggaacaacacacaccagggcctctcagggggacagggggtaggagaccatcaggacaaacacgtgggtacatggaggggaacaacacacaccagggcctctcagggggacaggggtaggagaccatcaggacaaacacgtgagtacatggaggggaacaacacacaccagggcctctcagggggacaggggtaggagaccatcaggacaaacacgtgggtacatggaggggaacaacacacaccagggcctctcagggggacagggggtaggagaccatcagkacaaacacgtgagtacatggaggggaacagcacacaccagggcctctcagcgggacagggggtaggagaccatcaggacaaacacgtgggt

SEQ ID NO: 442863 - DNA, 626 bp, Homo sapiens
gtatacatatgtaacctgcacgttgtgcacatgtaccctagaacttaaagtataataaaaataaatattaaaaaaagaagcatcatctttattaaaacatttaatggtcctactattccttatgctataaatttcttataatttaataaatatttttccrtaattgtgactctcttctatagctcttgttactcccgatattcttctaattatcaggcagtagcacaaagctgcttacacctctttacacatctctttattttaggcctccttgcatttgctcatgctgttcctttttgtttgaaaaacttacacatttcttcatttggttaatccttgcacactttcaagattcatttgaggcctcattgactttggaaaccttccctgtaatcttgtattattaatttatcttagttttcacttattagctcttattagattactgtccttacgtgtgtaactctcccactagacagtaagcttttggacggcagagatgatgtctcattcatctttgcatctttagcgcccagcctggtttctggtttcctatagtcactcagtgttgagctaaaccatatttttggagcaatgacttgacaatgcagtatcatgatggaact

SEQ ID NO: 442864 - DNA, 626 bp, Homo sapiens
gtatacatatgtaacctgcacgttgtgcacatgtaccctagaacttaaagtataataaaaataaatattaaaaaaagaagcatcatctttattaaaacatttaatggtcctactattccttatgctataaatttcttataatttaataaatatttttccataattgtgactctcttctatagctcttgttactcccgatattcttctaattatcaggcagyagcacaaagctgcttacacctctttacacatctctttattttaggcctccttgcatttgctcatgctgttcctttttgtttgaaaaacttacacatttcttcatttggttaatccttgcacactttcaagattcatttgaggcctcattgactttggaaaccttccctgtaatcttgtattattaatttatcttagttttcacttattagctcttattagattactgtccttacgtgtgtaactctcccactagacagtaagcttttggacggcagagatgatgtctcattcatctttgcatctttagcgcccagcctggtttctggtttcctatagtcactcagtgttgagctaaaccatatttttggagcaatgacttgacaatgcagtatcatgatggaact

SEQ ID NO: 442865 - DNA, 626 bp, Homo sapiens
gtatacatatgtaacctgcacgttgtgcacatgtaccctagaacttaaagtataataaaaataaatattaaaaaaagaagcatcatctttattaaaacatttaatggtcctactattccttatgctataaatttcttataatttaataaatatttttccataattgtgactctcttctatagctcttgttactcccgatattcttctaattatcaggcagtagyacaaagctgcttacacctctttacacatctctttattttaggcctccttgcatttgctcatgctgttcctttttgtttgaaaaacttacacatttcttcatttggttaatccttgcacactttcaagattcatttgaggcctcattgactttggaaaccttccctgtaatcttgtattattaatttatcttagttttcacttattagctcttattagattactgtccttacgtgtgtaactctcccactagacagtaagcttttggacggcagagatgatgtctcattcatctttgcatctttagcgcccagcctggtttctggtttcctatagtcactcagtgttgagctaaaccatatttttggagcaatgacttgacaatgcagtatcatgatggaact

SEQ ID NO: 442866 - DNA, 410 bp, Homo sapiens
aatttgaatattggcctgccttgctaggttagggaagttctcctggataatattccgaagagtgttttctaacttggttccattctccccatcactttcaggtacagcaatcaaacgtagatttggtcgtttcacatagtcccatatttcttggaggctttgttcatttcttttcattcttttttctctaatcttgtcttcttgatttatttcattaagttgatattcagtctctgatatctttcttccgcttgaycgaatcagtgcttgatccttgtgcatgctgcatgaagttctcatggcgtgtttttcagctccatcaggtcatttatgttcttctctaaactagttattctagttagcaagtggtctagccttttttccaggtccttagcttccttacattgggt

SEQ ID NO: 442867 - DNA, 410 bp, Homo sapiens
aatttgaatattggcctgccttgctaggttagggaagttctcctggataatattccgaagagtgttttctaacttggttccattctccccatcactttcaggtacagcaatcaaacgtagatttggtcgtttcacatagtcccatatttcttggaggctttgttcatttcttttcattcttttttctctaatcttgtcttcttgatttatttcattaagttgatattcagtctctgatatctttcttccgcttgaccgaatcagtgcttgatccttgtgcatgctgcatgaagttctcatggcrtgtttttcagctccatcaggtcatttatgttcttctctaaactagttattctagttagcaagtggtctagccttttttccaggtccttagcttccttacattgggt

SEQ ID NO: 442868 - DNA, 410 bp, Homo sapiens
aatttgaatattggcctgccttgctaggttagggaagttctcctggataatattccgaagagtgttttctaacttggttccattctccccatcactttcaggtacagcaatcaaacgtagatttggtcgtttcacatagtcccatatttcttggaggctttgttcatttcttttcattcttttttctctaatcttgtcttcttgatttatttcattaagttgatattcagtctctgatatctttcttccgcttgaccgaatcagtgcttgatccttgtgcatgctgcatgaagttctcatggcgtgtttttcagctccatcaggtcatttatgttcttctctaaactrgttattctagttagcaagtggtctagccttttttccaggtccttagcttccttacattgggt

SEQ ID NO: 442869 - DNA, 410 bp, Homo sapiens
aatttgaatattggcctgccttgctaggttagggaagttctcctggataatattccgaagagtgttttctaacttggttccattctccccatcactttcaggtacagcaatcaaacgtagatttggtcgtttcacatagtcccatatttcttggaggctttgttcatttcttttcattcttttttctctaatcttgtcttcttgatttatttcattaagttgatattcagtctctgatatctttcttccgcttgaccgaatcagtgcttgatccttgtgcatgctgcatgaagttctcatggcgtgtttttcagctccatcaggtcatttatgttcttctctaaactagttattctagttagcaaktggtctagccttttttccaggtccttagcttccttacattgggt

SEQ ID NO: 442870 - DNA, 462 bp, Homo sapiens
tgtggaagcccctccccccaccaagctctagtgtcctaggtcaatctcagactgctgtgcaagaatttcaagccagtggatcttagcttgctgggctctgtaggggtgggacccgccgagccagaccacttggctccctggcttcagccccctttccaggagagagaatggttctgtcttgttggcattccagttgccaytgtggcatgaaaaaaaaaaaacctcctgcagctagctcggtgtctgcccaaacagctgcctagttttgtgcttgaaacctagggccttggtggcagaggcactggagggaatctcctggtctgtggattgtgaagaccatgagaaaagcatagtttctgggtggagtgcaccgttcctcatggtacagtccctcggggcttcccttggctaggggagggaattcccccaaccccttgcacttcctgggtgaggcaacgcccc

SEQ ID NO: 442871 - DNA, 669 bp, Homo sapiens
ggggtaaaactgcctactcaagccttggcaatgtggaagcccctccccccaccaagctctagtgtcctaggtcaatctcagactgctgtgcaagaatttcaagccagtggatcttagcttgctgggctctgtaggggtgggacccgccgagccagaccacttggctccctggcttcagccccctttccaggagagagaatggttctgtcttgttggcattccagttgccactgtggcatgaaaaaaaaaaaacctcctgcagctagctcggtgtctgcccaaacagctgcctagttttgtgcttgaaacctagggccttggtggcagaggcactggagggaatctcctggtctgtggattgtgaagaccatgagaaaagcatagtttctgggtggagtgcaccgttcctcatggtacagtccctcggggcttcccttggctaggggagggaattcccccaaccccttgcacttcctgggtgaggcaacgccccattctgctttggctcaccctccgtgggctgmacccactgtccaaccagtcccagtgagatgaaccaggtacctcagttggaaatgcagaaatcacctgcattctgcattgatctcactgggagctgcagactggagctgttcctatttggccatgttgccagcaaattctgagatt

SEQ ID NO: 442872 - DNA, 578 bp, Homo sapiens
gtacctcagttggaaatgcagaaatcacctgcattctgcattgatctcactgggagctgcagactggagctgttcctatttggccatgttgccagcaaattctgagatttttttcaaaagtgcaaagaaagacatctgaggggtgctgacatattcaggtcacctcaagccacatgccagcttgcttgccyctgttggattcagcagagggagataggccttgccatacctgtggtgtctgccaaagcttcctcctggcaattcttgggagtgctgatacctgggccacagttagtccaagtttatcactgaagatcctatcaaagttttgtctgaaattccacttttgccttttgtcctaagtggttgtggacatttccaggggctgataccaaggactaggaacagctgagggaggcagaaaggttcagagtacatctctatttacagggaacagaacaccggcctccgagagtccatggagcaatgggaaaattgcagtgattactcatcactgtgaaacttctactttgaatacagtatcttctggcaagcataggggactgcagtcgacaatg

SEQ ID NO: 442873 - DNA, 569 bp, Homo sapiens
atacaataaattaccttgagagggccatctgtgctccagatgtgagagttcatgtgaatagaatggccgcaattcaaagaatcttcacaggaaaacagggctcagagctcatccasaatggacagacagggagggaaacaggtggaggttagttcaccacttcctcataagaaggtaataaatagtttggtgaaataaaatggtagcactgagtaattgcgggcttctggataggcagtcaggttgatttcatgttgctactgctggacttgagggctggcttggctgtggtggcagacacagcagcagctcaggatgatggtgatggtccatgccagccagaaccaccaatgttcatagtagtagttacaacactgagactgcccatagcagtgtcctgttgtgtcacagatgtagctttgattgttggtacacacacaggcttccttatcctgtgggggttcagccctggctgacacagggctgggcagtgcctagaggtgcaagagctccatgccacccaggagtcttccctccatactcctcctgctcctccgacccagcgtggg

SEQ ID NO: 442874 - DNA, 568 bp, Homo sapiens
ccgcaattcaaagaatcttcacaggaaaacagggctcagagctcatccacaatggacagacagggagggaaacaggtggaggttagttcaccacttcctcataagaaggtaataaatagtttggtgaaataaaatggtagcactgagtaattgcgggcttctggataggcagtcaggttgatttcatgttgctactgctggacttgagggctggcttggctgtggtggcagacacagcagcagctcaggatgatggtgatggtccaygccagccagaaccaccaatgttcatagtagtagttacaacactgagactgcccatagcagtgtcctgttgtgtcacagatgtagctttgattgttggtacacacacaggcttccttatcctgtgggggttcagccctggctgacacagggctgggcagtgcctagaggtgcaagagctccatgccacccaggagtcttccctccatactcctcctgctcctccgacccagcgtgggcacctccctccacccttgctgcacttctcctctaccctcttcttccttcttttgttcttttcctg

SEQ ID NO: 442875 - DNA, 636 bp, Homo sapiens
acatctctatttacagggaacagaacaccggcctccgagagtccatggagcaatgggaaaattgcagtgattactcatcactgtgaaacttctactttgaatacagtatcttctggcaagcataggggactgcagtcgacaatgctgctgaatatacctgagtacataggaagacatttgtttggtaaacagtcaatgcatacaataaattaccttgagagggccatctgtgctccagatgtgagagttcatgtgaatagaatggccgcaattcaaagaatcttcacaggaaaacagggctcagagctcatccacaatggacagacagggagggaaacaggtggaggttagttcaccacttcctcataagaaggtaataaatagtttggtgaaataaaatggtagcactgagtaattgcgggcttctggataggcagtcaggttgatttcatgttgctactgctggacttgagggctggcttggctgtggtggcagacacagcagcagctcaggatgatggtgatggtccatgccagccagaaccaccaatgttcatagtagtagttacaacacwgagactgcccatagcagtgtcctgttgtgtcacagatgtagctttgattgttggtacacac

SEQ ID NO: 442876 - DNA, 626 bp, Homo sapiens
tcctctgtatttctgtggtattagttgcaatatttcctctttcatttctgattttattgctttgagtattctctcatttttctagtctagctaatggtttgtcagttttatcttttcaaagaacaaattcttagtttcattgatctgttctattttctttcacagtcttttttgtatttgaaggacttgtatttgttaactggctcaagcctggacatttgttgaggtgctatgagtctctattgctctcatttctcttcactagacatagaaattttctgattacacgaatcaaataagactaataagcttcccagggatgaatcccacttaagcatggygaatttttttgctgtgtttttttaaaaataatatttgctaatatttggctgaaggtttttccatccaagttcatcaggagtattggtctgccatttatttttattatagtgtccttctctggttttggtatcagggtaatgctggttttgaaaaatgaatttggaagtattcctcttcttcattttttttggaagagtttgggaaggattggtgttagtcatctaagtgtttgttggaattcagccaccaagccattcaatcctgggtctttcttttatgagaga

SEQ ID NO: 442877 - DNA, 585 bp, Homo sapiens
taatagagattattttagaagttgctgaggtacaaataaaactgctatgctgacatcatacttttttgcaccaacaactccagttcttctgacacaaaggaccatcttcctagtgccataatttatcttagaccccaaaactcacagaggcacacatcatatctctaatacttgctcaccaccactggcatgagtctctctctatcctcttctacgtgaagtgattatactgtcacctctggagctaactgtccacagtctcaagatgcacactttttacaaccagaagcctatggactgggtgagggagcagaaacagccacaggtactgcccatcagggtaatgtaagtcagcatgcaaacaactgatcagatgaacatgaatagcaaggtgctgaggcactgggaagagggaccggaaaactctataattgttgaaaaagactcaagcccttgggaagggaaatgcctacgaaattatataaagrccattttatccaagttggtcatcattcagatgaaaaccatgaggcccagaaaagtaaactgagtttccagaattcacacaattgatagaataggaac

SEQ ID NO: 442878 - DNA, 479 bp, Homo sapiens
aggatgaaatacagtagtctctgtttctgagaacacaggttaaaaagaacataaataaaataaatttatcacctttaatacactcattcaaggatgctactgagtttgactttgggaatttctcacctttaatacactcatctggggatgctacggactktgacattgggttgcatttaaagggggagagaaagggcagttgcttctattatctgcccttttggactcacagagtttctttgaaaagcacagatgataataaatggaaatattgccttttatactatacaataatatacacatgcaattcactggaaaaagtatacttgttactatgatttgaggatactaccatatactaatcaagagaaacacatgtacagaacaaagaaggcacatgaaatttttactagtgtgtgttttccttgtgttctaccaccccaggagcagcttctgctactgaagatcacagtagagtt

SEQ ID NO: 442879 - DNA, 479 bp, Homo sapiens
aggatgaaatacagtagtctctgtttctgagaacacaggttaaaaagaacataaataaaataaatttatcacctttaatacactcattcaaggatgctactgagtttgactttgggaatttctcacctttaatacactcatctggggatgctacggactttgacattgggttgcatttaaagggggagagaaagggcagttgcttctattatctgccctkttggactcacagagtttctttgaaaagcacagatgataataaatggaaatattgccttttatactatacaataatatacacatgcaattcactggaaaaagtatacttgttactatgatttgaggatactaccatatactaatcaagagaaacacatgtacagaacaaagaaggcacatgaaatttttactagtgtgtgttttccttgtgttctaccaccccaggagcagcttctgctactgaagatcacagtagagtt

SEQ ID NO: 442880 - DNA, 606 bp, Homo sapiens
agggcagttgcttctattatctgcccttttggactcacagagtttctttgaaaagcacagatgataataaatggaaatattgccttttatactatacaataatatacacatgcaattcactggaaaaagtatacttgttactatgatttgaggatactaccatatactaatcaagagaaacacatgtacagaacaaagaaggcacatgaaatttttactagtgtgtgttttccttgtgttctaccaccccaggagcagcttctgctactgaagatcacagtagagttatttccaaaagttgtgggtctgcagggtggacttatcacatagctgtttgccaaaattcaaaagtccagaaaccatttccaaattttcacctcttttatcttcaaatcctaaaactatgaaaattcacaaacttagctccatayattatggtagaaaggttaataatttggactttgaggttgaccaggcctgatttttgaataaattcacaaacttacctccatacattatggtagaaaggtcaataatctggactttgaggtcgaccaggcctgatttttggatccaggctgcaacactcacttgctgtgttaacgt

SEQ ID NO: 442881 - DNA, 577 bp, Homo sapiens
  misc_feature (1)...(577): n = A,T,C or G
cccaaaacatgtacaactatgatacatcaataaaaaacaacaaaaaaaccaaaagaatagaaatcaaaaataaatacataaatacataaaatagggataataatccctccctagctagcttgctnccctgctccattggtaagaaataagtgatataatataggtaaaaatacttaacctcatrcctaccacatagtatagcacaataaacgttatttattataatctgaggcctacctacataagtgactttcaagtatagaaaattatttctcaaattttaaatactccctgattctcaggtatggtaattagacctggctttaggtaaagctctcatgtctacacttggatttaatcacttaagtatatttcccagcgccccccccaaaaaaaattgctcctaggtggacacactaatcaaagacttcctgagaaatgcaggaagaagttttgtcctctgaccacgctacgccctttccttgatggtaagccccataatctaaagccataagtttcaattcctcacataaaaagaaaaaaaatgtcttttatgaccacttcagataacactgga

SEQ ID NO: 442882 - DNA, 577 bp, Homo sapiens
  misc_feature (1)...(577): n = A,T,C or G
cccaaaacatgtacaactatgatacatcaataaaaaacaacaaaaaaaccaaaagaatagaaatcaaaaataaatacataaatacataaaatagggataataatccctccctagctagcttgctnccctgctccattggtaagaaataagtgatataatataggtaaaaatacttaacctcatacctaccacatagtatagcacaataaaygttatttattataatctgaggcctacctacataagtgactttcaagtatagaaaattatttctcaaattttaaatactccctgattctcaggtatggtaattagacctggctttaggtaaagctctcatgtctacacttggatttaatcacttaagtatatttcccagcgccccccccaaaaaaaattgctcctaggtggacacactaatcaaagacttcctgagaaatgcaggaagaagttttgtcctctgaccacgctacgccctttccttgatggtaagccccataatctaaagccataagtttcaattcctcacataaaaagaaaaaaaatgtcttttatgaccacttcagataacactgga

SEQ ID NO: 442883 - DNA, 539 bp, Homo sapiens
ttaagtatatttcccagcgccccccscaaaaaaaattgctcctaggtggacacactaatcaaagacttcctgagaaatgcaggaagaagttttgtcctctgaccacgctacgccctttccttgatggtaagccccataatctaaagccataagtttcaattcctcacataaaaagaaaaaaaatgtcttttatgaccacttcagataacactggatatttcccttgtcattaggaatgagaaatgggaggaaggtaaacttgtagacaggagaattggtagatgcttgaaaggatttctgaaaactgtgcctatccaggtgtacaaatgtgttgaccagccaaggcaaagcagtcaaaccatacaataccttatcctcaggaaaatggacttttctcccaaattgctttttcatgaaaaaataaaatttccattaaacctcatgttaatttcacatgtgaagaaaacagtcatgcacatcatgaaaattaaatggcgagtcaagaccaaattcctagtcacagttatgttctgtttcca

SEQ ID NO: 442884 - DNA, 539 bp, Homo sapiens
ttaagtatatttcccagcgccccccccaaaaaaaattgctcctaggtggacacactaatcaaagacttcctgagaaatgcaggaagaagttttgtcctctgaccacgctacgccctttccttgatggtaagccccataatctaaagccataagtttcaattcctcacataaaaagaaaaaaaawgtcttttatgaccacttcagataacactggatatttcccttgtcattaggaatgagaaatgggaggaaggtaaacttgtagacaggagaattggtagatgcttgaaaggatttctgaaaactgtgcctatccaggtgtacaaatgtgttgaccagccaaggcaaagcagtcaaaccatacaataccttatcctcaggaaaatggacttttctcccaaattgctttttcatgaaaaaataaaatttccattaaacctcatgttaatttcacatgtgaagaaaacagtcatgcacatcatgaaaattaaatggcgagtcaagaccaaattcctagtcacagttatgttctgtttcca

SEQ ID NO: 442885 - DNA, 625 bp, Homo sapiens
taattgaatgatggggtggctcccccatactgttcttatggtcgtgaataagtctcatgagagctgatgactttacaaggggcttcccctttcactcagctctcattgtctcttgtctgctcccatgtaatgcatacttttcaccttctgccatgattgtgaggcctccccatccacatggaactgtgattccatgaaactctttttattcataaattacccrgtcttggatatgtctttatcagcagcatgaaaatggactaatgcaagcagaataagcagaattcttcgatactgactcagcaccccacacacgttggttccaagatgtagaaatggaagcttcaaggcttttaacatctggacatcaaaactggaagttttactttcactgtattttattggtcaaagcagtcaaagagcccacccaggttcaaggagaaagaatatgtccccacgttttcaatgggatggtgccacaaaatttctactcatcttaattcaccacagatagaaatatgaagagctcatttgttatgttatttgtgaatgcagactaaagatatttgttggtttatatagtagtgggaaaataagaacttttaaaatattcaacttttagccc

SEQ ID NO: 442886 - DNA, 611 bp, Homo sapiens
gtcaaattattcttctgcttagtagtcttggatttctcattctcttaggaagcatcttccactacttatttcagcattatctgcacaatgcttcccctcacttcctcacaatgtggtttcaggcacaactcccaaggccccactctggcctcggggagcagattgttccccctgcaggaaaacctttgttctccactcagttaactgctgtttaccctttagatctcagcttcagtgttgctttcttaggggaaacttctctgactcacatcaaatccctctcttatagtaattttcattgtatttcagagtaatttttatggttgcaattttacatttgtgtgattgtttgattaatctctgtctcctccacgaaaactccaagatgcaggaactatatcttactggcattcagcacaatacctggcacataggtgttcaaaaaatactaatagggtaaataaatgaattaattttatgcttttattttaatattttcatggtattaatatttatgtgatattttgtatgtacmtattttcttttaatttgaagatttatagtttattttagttatgtgctgtataaattatatttagttctttaatttt

SEQ ID NO: 442887 - DNA, 546 bp, Homo sapiens
taatttttgtgttatttccaagggtcctctccattgactcttttaatatagttccactttacccctttaacccactttcctctcccaccttcgtsattcaactttatttgattttgttatttttaatttttctaataatgacctttatcttttaaaataatatttaatcacccataacataatttgttgattctctcccactgtgaaagttgaatggaccagaatatatttctactatctttctcttcttatttttgttatgaatataattagtctttatacagttatggtttgtaacatttgcattctgttctttaaccgcaaaccccagaacattttgatattaggcttcaaaatgctcacttgtatcatgtgatctatattcatttttagtggatagttttcttttttaagtttttctgatagagatggggtcttgctatgttgcccaggctggtcttatcttgaactcctgggctcaagtgattctcctgccttggcctttcaaagtgttgggactgtaagtgttagcccctgcgcctggcc

SEQ ID NO: 442888 - DNA, 515 bp, Homo sapiens
tgtaattttccctttttcttctagtatttttataaaggtcatcaagttttatttttgtaatacaattattataaataattatataatattattagtctttgaatattctagatacttgtgaaaggatattgtggaggaggagctgggggtagtaagtatgatggaaggcagacgagttttggaatcttgtctccaaaacactctcatctgttagaatgactcctaggctataggattgactatggcttagagtggattcatagttgttaatttcrtcatgtgacttgtgacttatccttttcttttcataatagaatgaagattgccatctgtctggcttcttccccatctttttgccttctttcattacaccacacacgtgtcctaattattccaaaggtgatacatttgcatgtttccctttaaactcctttccctctgtcactctgtggagggttcacatgctgcaatatttctgttccaagtaaagatcacaggttttgatcctcagtcct

SEQ ID NO: 442889 - DNA, 586 bp, Homo sapiens
ctgggggtagtaagtatgatggaaggcagacgagttttggaatcttgtctccaaaacactctcatctgttagaatgactcctaggctataggattgactatggcttagagtggattcatagttgttaatttcgtcatgtgacttgtgacttatccttttcttttcataatagaatgaarattgccatctgtctggcttcttccccatctttttgccttctttcattacaccacacacgtgtcctaattattccaaaggtgatacatttgcatgtttccctttaaactcctttccctctgtcactctgtggagggttcacatgctgcaatatttctgttccaagtaaagatcacaggttttgatcctcagtcctcagtatacacacctcttttagggatttctgggcttcttgactagctcaagctcttcagaggcatgcactttatcttggtgttcagtcttgactggtttaaacttttgatgtccagaaggttttcttcatgtgttgttgtgtggaattgtaaatattttctagctttagtaaggttgtggctcatatttatatttctcctggtttgaaagaaga

SEQ ID NO: 442890 - DNA, 603 bp, Homo sapiens
aacagaacccagaaataaatccacgtatttacaggcaactgattttggacaaaggtgccaataacatacgttggggaaaggacaccctcttcaataaatggcactggaaaaactggatagccaatggagaagaataaaaccagacaccatataccaaaataaactcacaatggattaaggtcttaaatgtaaggccccaaactatcaaactactagaagaaaacataggagaatgcctcaggacattagtctgcaycaagattttatgtgtaagacatcaaaagcaaaggcaaaaagcaaataatagaccactaatatccagaatgtacaaggaactcaatgtgacagtaaaaaaaaaaagggtaaaagatctaaatagacttttaaaaaagacatacaaatgatgatgaaatatataaaaaagatcaatgtcactaattgtcagggaaatgcaaataaaacccacaataagatataatcgcactccagttcaaataaatggttatcattgaaaagacaaaaaataacaaatgccagtgagtttgcagagaactcatatgctgttggtaggaatgtaaattggtgcagccattatagaaaatg

SEQ ID NO: 442891 - DNA, 463 bp, Homo sapiens
tgatagcaaaacctgtaaaagcattctgggaactgacagtaaacactgaatggtccttaaggagactgaaaacttgaaagagcttaagaagtctactggaaagggctttaaggataatgagaaaaaatcatcagtggagrctgaggaaaacgcaccaaagtcatattctgatgggagagttagaaaacgcttgcctggaatgatataaaaaataggaaaaataccgaaaaagtttgtggatctggctggggagatttttggtgtcaactaaagaaaaaaattaagcttttaagaaattaaagttagatttatttaggggtctgagaacaagagactgaggattacagcctaggagaagtctttcagagaggttctgtcagactgctctgggtgaaggtctttagcccacagtttatatgcaggctgtacatatacaccatggaatactatgccgccattaaaa

SEQ ID NO: 442892 - DNA, 614 bp, Homo sapiens
tcactctaatataatataaacttaaactatgtggcattggctttggaatcagacaatggatagaagccagaaggatttcacaaagactgttagtgaaaagtgaacagacttcaaggaaaatgatagcaaaacctgtaaaagcattctgggaactgacagtaaacactgaatggtccttaaggagactgaaaacttgaaagagcttaagaagtctactggaaagggctttaaggataatgagaaaaaatcatcagtggagactgaggaaaasgcaccaaagtcatattctgatgggagagttagaaaacgcttgcctggaatgatataaaaaataggaaaaataccgaaaaagtttgtggatctggctggggagatttttggtgtcaactaaagaaaaaaattaagcttttaagaaattaaagttagatttatttaggggtctgagaacaagagactgaggattacagcctaggagaagtctttcagagaggttctgtcagactgctctgggtgaaggtctttagcccacagtttatatgcaggctgtacatatacaccatggaatactatgccgccattaaaaaatgatatcatgtcttttgctggaatatgga

SEQ ID NO: 442893 - DNA, 546 bp, Homo sapiens
atcatctacctggtaatatgaaaaacacaaatctttcattcattcctttcaactgatgaggaaamtgaggcatcgggagttagtaaaagtccacattgagatatgagacccaccactggctggacgcagtggctcacacctgtaatcccagcactttgggaggccgatgctggtggatcacctaaggtcaggagttcgggaccaggctggccaacatggtgaaacccccatctctactaaaaatacaaaaattagctgggtgtggtggcaggcacctgtaataccagctactagggaggctgaggcaggagaatcgcttgaacccaggaggtggagtttacagtgagccaaaatcacgccattgcactccagcctgggcaacaagagcaagactctgtcggggaaaaaaaaaaaaaaaaccaccaccatcattttgcaagtgttaccactattgtgtgttaatattgtagaagtattcctaattatgatttctttgtattcctaattgtaatagctttgtatttgaaaaattattgattcatactc

SEQ ID NO: 442894 - DNA, 546 bp, Homo sapiens
atcatctacctggtaatatgaaaaacacaaatctttcattcattcctttcaactgatgaggaaaatgaggcatcgggagttagtaaaagtccacattgagatatgagacccaccactggctggacgcagtggctcacacctgtaatccmagcactttgggaggccgatgctggtggatcacctaaggtcaggagttcgggaccaggctggccaacatggtgaaacccccatctctactaaaaatacaaaaattagctgggtgtggtggcaggcacctgtaataccagctactagggaggctgaggcaggagaatcgcttgaacccaggaggtggagtttacagtgagccaaaatcacgccattgcactccagcctgggcaacaagagcaagactctgtcggggaaaaaaaaaaaaaaaaccaccaccatcattttgcaagtgttaccactattgtgtgttaatattgtagaagtattcctaattatgatttctttgtattcctaattgtaatagctttgtatttgaaaaattattgattcatactc

SEQ ID NO: 442895 - DNA, 546 bp, Homo sapiens
atcatctacctggtaatatgaaaaacacaaatctttcattcattcctttcaactgatgaggaaaatgaggcatcgggagttagtaaaagtccacattgagatatgagacccaccactggctggacgcagtggctcacacctgtaatcccagcactttgggaggccgatgctggtggatcacctaaggtcaggagttcgggaccaggctggccaacatggtgaaacccccatctctactaaraatacaaaaattagctgggtgtggtggcaggcacctgtaataccagctactagggaggctgaggcaggagaatcgcttgaacccaggaggtggagtttacagtgagccaaaatcacgccattgcactccagcctgggcaacaagagcaagactctgtcggggaaaaaaaaaaaaaaaaccaccaccatcattttgcaagtgttaccactattgtgtgttaatattgtagaagtattcctaattatgatttctttgtattcctaattgtaatagctttgtatttgaaaaattattgattcatactc

SEQ ID NO: 442896 - DNA, 546 bp, Homo sapiens
atcatctacctggtaatatgaaaaacacaaatctttcattcattcctttcaactgatgaggaaaatgaggcatcgggagttagtaaaagtccacattgagatatgagacccaccactggctggacgcagtggctcacacctgtaatcccagcactttgggaggccgatgctggtggatcacctaaggtcaggagttcgggaccaggctggccaacatggtgaaacccccatctctactaaaaatacaaaaattagctgggtgtggtggcaggcacctgtaataccagctactagggaggctgaggcaggagaatcrcttgaacccaggaggtggagtttacagtgagccaaaatcacgccattgcactccagcctgggcaacaagagcaagactctgtcggggaaaaaaaaaaaaaaaaccaccaccatcattttgcaagtgttaccactattgtgtgttaatattgtagaagtattcctaattatgatttctttgtattcctaattgtaatagctttgtatttgaaaaattattgattcatactc

SEQ ID NO: 442897 - DNA, 611 bp, Homo sapiens
  misc_feature (1)...(611): n = A,T,C or G
aaaaaaaccaccaccatcattttgcaagtgttaccactattgtgtgttaatattgtagaagtattcctaattatgatttctttgtattcctaattgtaatagctttgtatttgaaaaattattgattcatactctatatgttattattttgtatgcgatgacaacagaatatattatcatgctccttttgtgaatctcattcataatataaagtataaatttgtgattttgctttaatttgaaatattaayttcaaatatgttatcacaatttgatacctactattgacagtaaatctgtggattaagtaatgtgcttagtaggcattggggaaaatttgaatctagaaacatgaaaaactattgtcattgtttatttcaaagccagttaaaattctgcaaagcagtgtacataaaaataatttcaagaaatttataaaataccagattatggtgtataaacaactttagattctttgtttaagaaattactgccagtttgtaatatatgcttcattcagaagaagctaagggctgtactggnctaatagtaggcacntaatattgttgaaaaggaatactgagtagctgggacctcctgagtagctggga

SEQ ID NO: 442898 - DNA, 552 bp, Homo sapiens
  misc_feature (1)...(552): n = A,T,C or G
gtgtacataaaaataatttcaagaaatttataaaataccagattayggtgtataaacaactttagattctttgtttaagaaattactgccagtttgtaatatatgcttcattcagaagaagctaagggctgtactggnctaatagtaggcacntaatattgttgaaaaggaatactgagtagctgggacctcctgagtagctgggaccacacacatttaacctgtatttatanaattactgtttagagaataacatttgatggaatcatgcttttactttctgcttatgactcaattgtttgtactgacattaacatcccaaatccttagcatggcctacaaggccctgagcaatgtggcacctgctgaagcctgctgcctcatttaataactctttgtctctttcccagatccagccactctaacattttttagctcctggaccaagacaagctcttcccagaacctgacctttgtacctgttctttattcctggagtatttttcccctgacaaattacttatcatctatcataattcaggttaaatggca

SEQ ID NO: 442899 - DNA, 452 bp, Homo sapiens
gaaggcttccctaactgcctcccttctccaaccaaattaggaacaattatatggccacakagtatcgaatcaagtttataattttaaaataattgggagattttgttgtttaacacttgttttcactataagactgtaattacatgcaagtaagaaccatgcctgtttgttcactcctgccacagtcagaatagtgcctggaatatgcagtaagggctgaacaaacactaaataaatgaacaagtgaataaatggatattgtatcatttttagaacagagtgctgaaaggatatttttacactatcttgggatgtcacataggggatatacaagggcttcagttgcagctcaaatttacctttatctggatacaggtcttgataggtctcttgatgtcatttcatttcagattcttctttagaaaacttggacaatagcatttgctgtcttg

SEQ ID NO: 442900 - DNA, 452 bp, Homo sapiens
gaaggcttccctaactgcctcccttctccaaccaaattaggaacaattatatggccacatagtatcgaatcaagtttataattttaaaataattgggagattttgytgtttaacacttgttttcactataagactgtaattacatgcaagtaagaaccatgcctgtttgttcactcctgccacagtcagaatagtgcctggaatatgcagtaagggctgaacaaacactaaataaatgaacaagtgaataaatggatattgtatcatttttagaacagagtgctgaaaggatatttttacactatcttgggatgtcacataggggatatacaagggcttcagttgcagctcaaatttacctttatctggatacaggtcttgataggtctcttgatgtcatttcatttcagattcttctttagaaaacttggacaatagcatttgctgtcttg

SEQ ID NO: 442901 - DNA, 594 bp, Homo sapiens
taagactgtaattacatgcaagtaagaaccatgcctgtttgttcactcctgccacagtcagaatagtgcctggaatatgcagtaagggctgaacaaacactaaataaatgaacaartgaataaatggatattgtatcatttttagaacagagtgctgaaaggatatttttacactatcttgggatgtcacataggggatatacaagggcttcagttgcagctcaaatttacctttatctggatacaggtcttgataggtctcttgatgtcatttcatttcagattcttctttagaaaacttggacaatagcatttgctgtcttgtccaaattgttactaagaatcaagagagatatctgacatgaaatgacattggaaaacattaaacatgagaaataatgctagccaatatggttattattagaaaccaattacattttcaacttaaaaatagtaatacttattgcagactcaaatgtgcttattctaaaacaagtaaatgtttgcctatggtctgagattctaatccacggagttcattctaatccacattcaacactatcatgtaccagtgggcctcataacccacctagc

SEQ ID NO: 442902 - DNA, 594 bp, Homo sapiens
taagactgtaattacatgcaagtaagaaccatgcctgtttgttcactcctgccacagtcagaatagtgcctggaatatgcagtaagggctgaacaaacactaaataaatgaacaagtgaataaatggatattgtatcatttttagaacagagtgctgaaaggatatttttacactatcttgggatgtcacataggggatatacaagggcttcagttgcagctcaaatttacctttatctggatacaggtcttgataggtctcttgatrtcatttcatttcagattcttctttagaaaacttggacaatagcatttgctgtcttgtccaaattgttactaagaatcaagagagatatctgacatgaaatgacattggaaaacattaaacatgagaaataatgctagccaatatggttattattagaaaccaattacattttcaacttaaaaatagtaatacttattgcagactcaaatgtgcttattctaaaacaagtaaatgtttgcctatggtctgagattctaatccacggagttcattctaatccacattcaacactatcatgtaccagtgggcctcataacccacctagc

SEQ ID NO: 442903 - DNA, 574 bp, Homo sapiens
acttgttttcactataagactgtaattacatgcaagtaagaaccatgcctgtttgttcactcctgccacagtcagaatagtgcctggaatatgcagtaagggctgaacaaacactaaataaatgaacaagtgaataaatggatattgtatcatttttagaacagagtgctgaaaggatatttttacactatcttgggatgtcacataggggatatacaagggcttcagttgcagctcaaatttacctttatctggatacaggtcttgataggtctcttgatgtcatttcatttcagattcttctttagaaaacttkgacaatagcatttgctgtcttgtccaaattgttactaagaatcaagagagatatctgacatgaaatgacattggaaaacattaaacatgagaaataatgctagccaatatggttattattagaaaccaattacattttcaacttaaaaatagtaatacttattgcagactcaaatgtgcttattctaaaacaagtaaatgtttgcctatggtctgagattctaatccacggagttcattctaatccacattcaacact

SEQ ID NO: 442904 - DNA, 574 bp, Homo sapiens
acttgttttcactataagactgtaattacatgcaagtaagaaccatgcctgtttgttcactcctgccacagtcagaatagtgcctggaatatgcagtaagggctgaacaaacactaaataaatgaacaagtgaataaatggatattgtatcatttttagaacagagtgctgaaaggatatttttacactatcttgggatgtcacataggggatatacaagggcttcagttgcagctcaaatttacctttatctggatacaggtcttgataggtctcttgatgtcatttcatttcagattcttctttagaaaacttggacaatagcatttgctgtcttgtccaaattgttactaagaatcaagagagatatctsacatgaaatgacattggaaaacattaaacatgagaaataatgctagccaatatggttattattagaaaccaattacattttcaacttaaaaatagtaatacttattgcagactcaaatgtgcttattctaaaacaagtaaatgtttgcctatggtctgagattctaatccacggagttcattctaatccacattcaacact

SEQ ID NO: 442905 - DNA, 588 bp, Homo sapiens
tgaacaaacactaaataaatgaacaagtgaataaatggatattgtatcatttttagaacagagtgctgaaaggatatttttacactatcttgggatgtcacataggggatatacaagggcttcagttgcagctcaaatttacctttatctggatacaggtcttgataggtctcttgatgtcatttcatttcagattcttctttagaaaacttggacaatagcatttgctgtcttgtccaaattgttactaagaatcaagagagatatctgacatgaaatgacattggaaaacattaaacatgagaaataatgctagccaatatggttattattagaaaccaattacattttcaacttaaaaatagtaatacttattgcagactcaaatgtgcttattctaaaacaagtaaatgtttgcctatggtctgagattctaatccacggagttcattctaatccacattcaacactatcatgtaccagtgggcctcatracccacctagccctgtgatttttcaggttcacttttctaaacttgtgaattaaatatttattttcttagttcagaagaggaaaaaaactcttgt

SEQ ID NO: 442906 - DNA, 585 bp, Homo sapiens
attattagaaaccaattacattttcaacttaaaaatagtaatacttattgcagactcaaatgtgcttattctaaaacaagtaaatgtttgcctatggtctgagattctaatccacggagttcattctaatccacattcaacactatcatgtaccagtgggcctcataacccacctagccctgtgatttttcaggttcacttttctaaacttgtraattaaatatttattttcttagttcagaagaggaaaaaaactcttgtaattgttgcccatttcaggagaaatcttgcatatgaaaacaagagataaatatacacagctgagggctgtggtttaaacaaaatcttgagaatgttttttgaccttatacatttgtgctttagtataacaaaatgatatagacaaaggtaacttttaatagaaccagtcactacattaaaaaaatgacaaattcttctgcttagctaagcaacagagaaggtaaagtactaattcaattcatcaatttaagcaatactcattaagagccaagtatgtgcttactgaataagctgctaaggtttggtggttacagagtgtgcggt

SEQ ID NO: 442907 - DNA, 497 bp, Homo sapiens
gaaaacattaaacatgagaaataatgctagccaatatggttattattagaaaccaattacattttcaacttaaaaatagtaatacttattgcagactcaaatgtgcttattctaaaacaagtaaatgtttgcctatggtctgagattctaatccacggagttcattctaatccacattcaacactatcatgtaccagtgggcctcataacccacctagccctgtgatttttcaggttcacttttctaaacttgtgaattaaatayttattttcttagttcagaagaggaaaaaaactcttgtaattgttgcccatttcaggagaaatcttgcatatgaaaacaagagataaatatacacagctgagggctgtggtttaaacaaaatcttgagaatgttttttgaccttatacatttgtgctttagtataacaaaatgatatagacaaaggtaacttttaatagaaccagtcactacattaaaaaaatgacaaattct

SEQ ID NO: 442908 - DNA, 526 bp, Homo sapiens
aacactatcatgtaccagtgggcctcataacccacctagccctgtgatttttcaggttcacttttctaaacttgtgaattaaatatttattttcttagttcagaagaggaaaaaaactcttgtaattgttgcccatttcaggagaaatcttgcatatgaaaacaagagataaatatacacarctgagggctgtggtttaaacaaaatcttgagaatgttttttgaccttatacatttgtgctttagtataacaaaatgatatagacaaaggtaacttttaatagaaccagtcactacattaaaaaaatgacaaattcttctgcttagctaagcaacagagaaggtaaagtactaattcaattcatcaatttaagcaatactcattaagagccaagtatgtgcttactgaataagctgctaaggtttggtggttacagagtgtgcggtgaaatgatgtctacatcacagtccaacattcacagagtttaaaagcctaccaagaatcaagacagacacaaatacctaa

SEQ ID NO: 442909 - DNA, 497 bp, Homo sapiens
gaaaacattaaacatgagaaataatgctagccaatatggttattattagaaaccaattacattttcaacttaaaaatagtaatacttattgcagactcaaatgtgcttattctaaaacaagtaaatgtttgcctatggtctgagattctaatccacggagttcattctaatccacattcaacactatcatgtaccagtgggcctcataacccacctagccctgtgatttttcaggttcacttttctaaacttgtgaattaaatatttattttcttagttcagaagaggaaaaaaactcttgtaattgttgcccatttcaggagaaatcttgcatatgaaaacaagagataaatatacacagctgagggctgtggtttaaacaaaatcttgagaatgttttttgaccttatacatttgtgctttagtataacaaaatgatataracaaaggtaacttttaatagaaccagtcactacattaaaaaaatgacaaattct

SEQ ID NO: 442910 - DNA, 585 bp, Homo sapiens
attattagaaaccaattacattttcaacttaaaaatagtaatacttattgcagactcaaatgtgcttattctaaaacaagtaaatgtttgcctatggtctgagattctaatccacggagttcattctaatccacattcaacactatcatgtaccagtgggcctcataacccacctagccctgtgatttttcaggttcacttttctaaacttgtgaattaaatatttattttcttagttcagaagaggaaaaaaactcttgtaattgttgcccatttcaggagaaatcttgcatatgaaaacaagagataaatatacacagctgagggctgtggtttaaacaaaatcttgagaatgttttttgaccttatacatttgtgctttagtataacaaaatgatatagacaaaggtaacttttaatagaaccagtcactacattaaaaaaatgacaaattcttctgcttagctaagcaacagagaaggtaaartactaattcaattcatcaatttaagcaatactcattaagagccaagtatgtgcttactgaataagctgctaaggtttggtggttacagagtgtgcggt

SEQ ID NO: 442911 - DNA, 507 bp, Homo sapiens
agccagagtacagtttaggagaagaaattgtatggaaggaaggttcatttccattagaccagaaaagacagcacatttgaaggcctgaataagaaatattctggataagatattgtggctgctaccagaatggctcttgatgatctctacctcttggtatttatacccttatataatytctttcctatagtataagctggtcccaggtacttgtttctattgaatagaatagaacaaaagaaatgagatgccacttctgagattagattataagatactgtgaatttcatcttgtgccctctccctctctctctttctcttgccctctcatttgaatgaagccaactggcatgctgtcagtggcccagtgtaagtcctgttacaagaaattgatgattacctgtagccaaccctaagtgaagaactgaggtcctcagtcctacaaatggagagaaactgaatctagctaagaaccatgtgagtgagctgggaagaagatccaccctc

SEQ ID NO: 442912 - DNA, 528 bp, Homo sapiens
aatacctaacatagacgtttgtatgtgataagagagccagagtacagtttaggagaagaaattgtatggaaggaaggttcatttccattagaccagaaaagacagcacatttgaaggcctgaataagaaatattctggataagatattgtggctgctaccagaatggctcttgatgatctctacctcttggtatttatacccttatataatctctttcctatagtrtaagctggtcccaggtacttgtttctattgaatagaatagaacaaaagaaatgagatgccacttctgagattagattataagatactgtgaatttcatcttgtgccctctccctctctctctttctcttgccctctcatttgaatgaagccaactggcatgctgtcagtggcccagtgtaagtcctgttacaagaaattgatgattacctgtagccaaccctaagtgaagaactgaggtcctcagtcctacaaatggagagaaactgaatctagctaagaaccatgtgagtgagctgggaag

SEQ ID NO: 442913 - DNA, 507 bp, Homo sapiens
agccagagtacagtttaggagaagaaattgtatggaaggaaggttcatttccattagaccagaaaagacagcacatttgaaggcctgaataagaaatattctggataagatattgtggctgctaccagaatggctcttgatgatctctacctcttggtatttatacccttatataatctctttcctatagtataagctggtcccaggtacttgtttctattgaatagaatagaacaaaagaaatgagatgccacttytgagattagattataagatactgtgaatttcatcttgtgccctctccctctctctctttctcttgccctctcatttgaatgaagccaactggcatgctgtcagtggcccagtgtaagtcctgttacaagaaattgatgattacctgtagccaaccctaagtgaagaactgaggtcctcagtcctacaaatggagagaaactgaatctagctaagaaccatgtgagtgagctgggaagaagatccaccctc

SEQ ID NO: 442914 - DNA, 606 bp, Homo sapiens
gaatagaacaaaagaaatgagatgccacttctgagattagattataagatactgtgaatttcatcttgtgccctctccctctctctctttctcttgccctctcatttgaatgaagccaacyggcatgctgtcagtggcccagtgtaagtcctgttacaagaaattgatgattacctgtagccaaccctaagtgaagaactgaggtcctcagtcctacaaatggagagaaactgaatctagctaagaaccatgtgagtgagctgggaagaagatccaccctcagttgaaatttaagatgacatattgagcagacatactgagacacactgaaagtaagagagcaggaggaaacaaaaccagggtcatacaaagaacacaactgattttgagattctcacataagtattacaccttcagtgagcacatgtactagaaatttaaaaaataaatacaataaaccttcaaagagagctagcaaataaatttccctatggtctcagctctgagtggagagagaaaatgttccctgtggagtttatagccagaatccagctctcaaacaggtttcagcctgaactcacacaatctgtgtggcttccaaatttg

SEQ ID NO: 442915 - DNA, 507 bp, Homo sapiens
agccagagtacagtttaggagaagaaattgtatggaaggaaggttcatttccattagaccagaaaagacagcacatttgaaggcctgaataagaaatattctggataagatattgtggctgctaccagaatggctcttgatgatctctacctcttggtatttatacccttatataatctctttcctatagtataagctggtcccaggtacttgtttctattgaatagaatagaacaaaagaaatgagatgccacttctgagattagattataagatactgtgaatttcatcttgtgccctctccctctctctctttctcttgccctctcatttgaatgaagccaactggcatgctgtcagtggcccagtgtaagtcctgttacaakaaattgatgattacctgtagccaaccctaagtgaagaactgaggtcctcagtcctacaaatggagagaaactgaatctagctaagaaccatgtgagtgagctgggaagaagatccaccctc

SEQ ID NO: 442916 - DNA, 563 bp, Homo sapiens
aattgatgattacctgtagccaaccctaagtgaagaactgaggtcctcagtcctacaaatggagagaaactgaatctagctaagaaccatgtgagtgagctgggaagaagatccaccctcagttgaaatttaagatgacatattgagcagacatactgagacacactgaaagtaagagagcaggaggaaacaaaaccagggtcatacaaagaacacaactgattttgagattctcacataagtattacaccttcagtgagcacrtgtactagaaatttaaaaaataaatacaataaaccttcaaagagagctagcaaataaatttccctatggtctcagctctgagtggagagagaaaatgttccctgtggagtttatagccagaatccagctctcaaacaggtttcagcctgaactcacacaatctgtgtggcttccaaatttgcaagctgagaatttaattcaaagtggtctcaggttgatagcagtccaaaatgctaggtaggaaaaaaaatcctctctggacaaataaatcatcaaagcaagctcataagagcaggttt

SEQ ID NO: 442917 - DNA, 563 bp, Homo sapiens
aattgatgattacctgtagccaaccctaagtgaagaactgaggtcctcagtcctacaaatggagagaaactgaatctagctaagaaccatgtgagtgagctgggaagaagatccaccctcagttgaaatttaagatgacatattgagcagacatactgagacacactgaaagtaagagagcaggaggaaacaaaaccagggtcatacaaagaacacaactgattttgagattctcacataagtattacaccttcagtgagcacatgtactagaaatttaaaaaataaatacaataaaccttcaaagwgagctagcaaataaatttccctatggtctcagctctgagtggagagagaaaatgttccctgtggagtttatagccagaatccagctctcaaacaggtttcagcctgaactcacacaatctgtgtggcttccaaatttgcaagctgagaatttaattcaaagtggtctcaggttgatagcagtccaaaatgctaggtaggaaaaaaaatcctctctggacaaataaatcatcaaagcaagctcataagagcaggttt

SEQ ID NO: 442918 - DNA, 600 bp, Homo sapiens
ggtctcaggttgatagcagtccaaaatgctaggtaggaaaaaaaatcctctctggacaaataaatcatcaaagcaagctcataagagcaggtttcaaaggtcatgagcttctaacacacacaaaaaaatcacacacacaaaatgggggtagcagcaacatgggtagcatattcaaacttgaaaagactttaaatatttgtattattagatgtagattatgaaacacatattttaatgtggttaatttttttaaggaatcaaaactatgagtaaagaccaagaaaaytgtgctggatggccacttccaccatggctcccctcctatttaagtctgggtactgtgtcacgcgaagtcttcaggcacattgttccaggtttgggtttgcctatgaaagaaactcatgagagctggaagtgaggagtgaagaggaggtcttcacataaagcaggcttaaggattagacatagcaggtttgacagatgtgatggcttgcagaatcctttatgagctcccactgtccatctggataagatttacagacctttcagaaattcctataagcttgggttctgtgcccacactctagactgtcaggctaa

SEQ ID NO: 442919 - DNA, 542 bp, Homo sapiens
tcataagagcaggtttcaaaggtcatgagcttctaacacacacaaaaaaatcacacacacaaaatgggggtagcagcaacatgggtagcatattcaaacttgaaaagactttaaatatttgtattattagatgtagattatgaaacacatattttaatgtggttaatttttttaaggaatcaaaactatgagtaaagaccaagaaaactgtgctggatggccacttccaccatggctcccctcctatttaagtctgggtactgtgtcacscgaagtcttcaggcacattgttccaggtttgggtttgcctatgaaagaaactcatgagagctggaagtgaggagtgaagaggaggtcttcacataaagcaggcttaaggattagacatagcaggtttgacagatgtgatggcttgcagaatcctttatgagctcccactgtccatctggataagatttacagacctttcagaaattcctataagcttgggttctgtgcccacactctagactgtcaggctaagatctctgatataaaacaga

SEQ ID NO: 442920 - DNA, 603 bp, Homo sapiens
atgggggtagcagcaacatgggtagcatattcaaacttgaaaagactttaaatatttgtattattagatgtagattatgaaacacatattttaatgtggttaatttttttaaggaatcaaaactatgagtaaagaccaagaaaactgtgctggatggccacttccaccatggctcccctcctatttaagtctgggtactgtgtcacgcgaagtcttcaggcacattgttccaggtttgggtttgcctatgaaagaaactcatgagagctggaagtgaggagtgaagaggaggtcttcacataaagcaggcttaaggattagacatagcaggtttgacagatgtgatggcttgcagaatyctttatgagctcccactgtccatctggataagatttacagacctttcagaaattcctataagcttgggttctgtgcccacactctagactgtcaggctaagatctctgatataaaacagacctcttctgattttgtctagctgcttttctaatatctattcaccaagctcttccaataatagcataaggccctaattaatattaaacttttatcattataatacataggatgtcttctgttttc

SEQ ID NO: 442921 - DNA, 661 bp, Homo sapiens
tgctggatggccacttccaccatggctcccctcctatttaagtctgggtactgtgtcacgcgaagtcttcaggcacattgttccaggtttgggtttgcctatgaaagaaactcatgagagctggaagtgaggagtgaagaggaggtcttcacataaagcaggcttaaggattagacatagcaggtttgacagatgtgatggcttgcagaatcctttatgagctcccactgtccatctggataagatttacagacctttcagaaattcctataagcttgggttctgtgcccacactctagactstcaggctaagatctctgatataaaacagacctcttctgattttgtctagctgcttttctaatatctattcaccaagctcttccaataatagcataaggccctaattaatattaaacttttatcattataatacataggatgtcttctgttttcctgatcaaattctgactactattaaaatataaagaattgtccagaaatatataaaaaaagaatcacacattgatcttctttaaatgaaaatataacaattgtatggactaggatgattacagttgttcagttctgactgttatttgaagaaaaaagcaataagaagcctcagcaacttaacagaaggagctgccatttactagga

SEQ ID NO: 442922 - DNA, 486 bp, Homo sapiens
tgtcttctgttttcctgatcaaattctgactactattaaaatataaagaattgtccagaaatatataaaaaaagaatcacacattgatcttctttaaatgaaaatataacaattgtatggactaggatgattacagttgttcagttctgactgttatttgaagaaaaaagcaataagaagcctcagcaacttaacagaaggagctgccatttactaggagaaaagattgtggatgagagtgtagcaaaggtcagaattctgtgaagcttgagatgtctattataatgaattatcttttatactcactacaatttcctaacaattttggggtttatatttttgaaagagatatacctttaatttttttctttgtactattgttagrtaactttaatgtgcagattatactacagtgaaagttgccaatgacaaggcaaagtcacttacatcagacccaaagcaaagtggagccgggtcatgaaaaag

SEQ ID NO: 442923 - DNA, 553 bp, Homo sapiens
tataatgaattatcttttatactcactacaatttcctaacaattttggggtttatatttttgaaagagatatacctttaatttttttctttgtactattgttagataactttaatgtgcagattatactacagtgaaagttgycaatgacaaggcaaagtcacttacatcagacccaaagcaaagtggagccgggtcatgaaaaaggggatcttgtgtgtgtgtccacgataagcactatcacaaggactttctataaactcacaagaaatttctgcccacccagcacactctgtttgtccagctcatcctgtaggtgtctctataataggatctatcataaaaaattcctcaagactgcagcatttcagataagccaccctcacaagaacacttgcctagcaatggctgtttctgccagtaagttaacaccagctcctgcatcagaccctgtgaccaatgatgtttgtttcaaaacagcttgcatagacttctttttgtctttacatattttccttacctcaacctcttgggatgcacctatgattgatcat

SEQ ID NO: 442924 - DNA, 491 bp, Homo sapiens
tattataatgaattatcttttatactcactacaatttcctaacaattttggggtttatatttttgaaagagatatacctttaatttttttctttgtactattgttagataactttaatgtgcagattatactacagtgaaagttgccaatgacaaggcaaagtcacttacatcagacccaaagcaaagtggagccgggtcatgaaaaaggggatcttgtgtgtstgtccacgataagcactatcacaaggactttctataaactcacaagaaatttctgcccacccagcacactctgtttgtccagctcatcctgtaggtgtctctataataggatctatcataaaaaattcctcaagactgcagcatttcagataagccaccctcacaagaacacttgcctagcaatggctgtttctgccagtaagttaacaccagctcctgcatcagaccctgtgaccaatgatgtttgtttcaaaacagcttgcatag

SEQ ID NO: 442925 - DNA, 553 bp, Homo sapiens
tataatgaattatcttttatactcactacaatttcctaacaattttggggtttatatttttgaaagagatatacctttaatttttttctttgtactattgttagataactttaatgtgcagattatactacagtgaaagttgccaatgacaaggcaaagtcacttacatcagacccaaagcaaagtggagccgggtcatgaaaaaggggatcttgtgtgtgtgtccacgataagcactatcacaaggactttctataaactcacaagaaatttctgcccacccagcacactctgtttgtccagctcatcctgtaggtgtctctataataggatctatcataaaaaattcctcaagactgcagcatttcagataagccaccctcacragaacacttgcctagcaatggctgtttctgccagtaagttaacaccagctcctgcatcagaccctgtgaccaatgatgtttgtttcaaaacagcttgcatagacttctttttgtctttacatattttccttacctcaacctcttgggatgcacctatgattgatcat

SEQ ID NO: 442926 - DNA, 574 bp, Homo sapiens
atagcacaaatatctcagattataaaacttgtttatttccaaataaatttatttcttcagagatccactttttctgttattatacattgacattgttatyatgaaattggttgggtgatgtgtcgtattttcttgtctccagaagaatttctgtaacagtgcaattaaacgttctttgcatgtttgctagaactcacctgtaaaattgtctgagcaaccaaagcctggtttttgtgtttagtttttcttttgtgattggggaggggggtttatcgtactgattcaaggtgtgaaggtaacatcattttgattttatacatcttcttcagtccatttaagcatgttacatagcgttgtttgttcttttcatgatattctttacagtagtctcctaaatgttccctctgcttctgccaggagcccctacaatctatttcaactcagaagctatagagtttgtttaaaacatgtaacatattatgccacctttcttactgtaaaacatcccatggtttctcatagtatttatagtaaaagtgaaatttttatgatggcttgagaaacttttcccatt

SEQ ID NO: 442927 - DNA, 606 bp, Homo sapiens
cttgtctccagaagaatttctgtaacagtgcaattaaacgttctttgcatgtttgctagaactcacctgtaaaattgtctgagcaaccaaagcctggtttttgtgtttagtttttcttttgtgattggggaggggggtttatcrtactgattcaaggtgtgaaggtaacatcattttgattttatacatcttcttcagtccatttaagcatgttacatagcgttgtttgttcttttcatgatattctttacagtagtctcctaaatgttccctctgcttctgccaggagcccctacaatctatttcaactcagaagctatagagtttgtttaaaacatgtaacatattatgccacctttcttactgtaaaacatcccatggtttctcatagtatttatagtaaaagtgaaatttttatgatggcttgagaaacttttcccattagatgcccaagtgctggtctggtctgatcttctcatcttcccttgggtgattctgtggcagtcacactagcctccttgctgctccacaaaaactccagcatgatcctacttcaggatatttgccattgttactgcatctgcctggaaccttttctcccatata

SEQ ID NO: 442928 - DNA, 606 bp, Homo sapiens
cttgtctccagaagaatttctgtaacagtgcaattaaacgttctttgcatgtttgctagaactcacctgtaaaattgtctgagcaaccaaagcctggtttttgtgtttagtttttcttttgtgattggggaggggggtttatcgtactgattcaaggtgtgaaggtaacatcattttgattttatacatcttcttcagtccatttaagcatgttacatagcgttgtttgttcttttcatgatattctttacagtagtctcctaaatgttccctctgcttctgccakgagcccctacaatctatttcaactcagaagctatagagtttgtttaaaacatgtaacatattatgccacctttcttactgtaaaacatcccatggtttctcatagtatttatagtaaaagtgaaatttttatgatggcttgagaaacttttcccattagatgcccaagtgctggtctggtctgatcttctcatcttcccttgggtgattctgtggcagtcacactagcctccttgctgctccacaaaaactccagcatgatcctacttcaggatatttgccattgttactgcatctgcctggaaccttttctcccatata

SEQ ID NO: 442929 - DNA, 606 bp, Homo sapiens
cttgtctccagaagaatttctgtaacagtgcaattaaacgttctttgcatgtttgctagaactcacctgtaaaattgtctgagcaaccaaagcctggtttttgtgtttagtttttcttttgtgattggggaggggggtttatcgtactgattcaaggtgtgaaggtaacatcattttgattttatacatcttcttcagtccatttaagcatgttacatagcgttgtttgttcttttcatgatattctttacagtagtctcctaaatgttccctctgcttctgccaggagcccctacaatctatttcaactcagaagctatagagtttgtttaaaacatgtaacatattatgccacctttcttactgtaaaacatcccatggtttctcrtagtatttatagtaaaagtgaaatttttatgatggcttgagaaacttttcccattagatgcccaagtgctggtctggtctgatcttctcatcttcccttgggtgattctgtggcagtcacactagcctccttgctgctccacaaaaactccagcatgatcctacttcaggatatttgccattgttactgcatctgcctggaaccttttctcccatata

SEQ ID NO: 442930 - DNA, 606 bp, Homo sapiens
cttgtctccagaagaatttctgtaacagtgcaattaaacgttctttgcatgtttgctagaactcacctgtaaaattgtctgagcaaccaaagcctggtttttgtgtttagtttttcttttgtgattggggaggggggtttatcgtactgattcaaggtgtgaaggtaacatcattttgattttatacatcttcttcagtccatttaagcatgttacatagcgttgtttgttcttttcatgatattctttacagtagtctcctaaatgttccctctgcttctgccaggagcccctacaatctatttcaactcagaagctatagagtttgtttaaaacatgtaacatattatgccacctttcttactgtaaaacatcccatggtttctcatagtatttatagtaaaagtgaaatttttatgatggcttgagaaacttttcccattagatgcccaagtgctggtctggtctgatcttctcatcttcccttgggtgattctgtggcagtcacactagcctccttgmtgctccacaaaaactccagcatgatcctacttcaggatatttgccattgttactgcatctgcctggaaccttttctcccatata

SEQ ID NO: 442931 - DNA, 613 bp, Homo sapiens
tgctggtctggtctgatcttctcatcttcccttgggtgattctgtggcagtcacactagcctccttgctgctccacaaaaactccagcatgatcctacttcaggatatttgccattgttactgcatctgcctggaaccttttctcccatataaacatagagattgctcttgcctgtccttcaagtctattcttaaatgtcccattctctgtgaagctttcctgcccaccctatttaaattacagacttcactcccaattccccatctactttaagagtcttcatttatcattccttgacaaactgtaaatayacatgttcacttttttatcgtctgtctccaaatactggaatgttaagttctgtaatgtcagatatttctgtttggttcactggtgtattcttaaagcatgttacatactaggtatactcaatgaatatttgttgaataaatatcacattgggcttattccagaaattcaagcttgtttcaatagttagagcaatctacaaatgtaattcattacattaactaattaaaggagctaaatcacatcaccaccacaataatgcagaaaaacacatttgatacaactcaacattcatgtctgcct

SEQ ID NO: 442932 - DNA, 569 bp, Homo sapiens
ttaaattacagacttcactcccaattccccatctactttaagagtcttcatttatcattccttgacaaactgtaaatacacatgttcacttttttatcgtctgtctccaaatactggaatgttaagttctgtaatgtcagatatttctgtttggttcactggtgtattcttaaagcatgttacatactaggtatactcaatgaatatttgttgaataaatatcacattgggcttattccagaaattcaagcttgtttcaatagttagagcaatctacaaatgtaattcattacattaactaattaaaggagctaaatcacatcaccaccacaataatgcagaaaamcacatttgatacaactcaacattcatgtctgcctaacaaacatctcatgatactaggaaaagaggaagggatatattattttcatgtataaagcactaaccattgtagcatgccaatatactcaaaattcaatgaaattcctatcaaaatcttagcattcctcttagtcctcaacaaagcatttctaaaatgtgtatagaagaccaaagggccaaaagagtca

SEQ ID NO: 442933 - DNA, 569 bp, Homo sapiens
ttaaattacagacttcactcccaattccccatctactttaagagtcttcatttatcattccttgacaaactgtaaatacacatgttcacttttttatcgtctgtctccaaatactggaatgttaagttctgtaatgtcagatatttctgtttggttcactggtgtattcttaaagcatgttacatactaggtatactcaatgaatatttgttgaataaatatcacattgggcttattccagaaattcaagcttgtttcaatagttagagcaatctacaaatgtaattcattacattaactaattaaaggagctaaatcacatcaccaccacaataatgcagaaaaacacatttgatacaactcaayattcatgtctgcctaacaaacatctcatgatactaggaaaagaggaagggatatattattttcatgtataaagcactaaccattgtagcatgccaatatactcaaaattcaatgaaattcctatcaaaatcttagcattcctcttagtcctcaacaaagcatttctaaaatgtgtatagaagaccaaagggccaaaagagtca

SEQ ID NO: 442934 - DNA, 441 bp, Homo sapiens
taacaaacatctcatgatactaggaaaagaggaagggatatattattttcatgtataaagcactaaccattgtagcatgccaatatactcaaaattcaatgaaattcctatcaaaatcttagcattcctcttagtcctcaacaaagcatttctaaaatgtgtatagaagaccaaagggccaaaagagtcaacttctgaagaagtgsaaaaagaaagttgaggaaatcttaaaacatgttattgagcttaaagttgcaaaaataaactcatgtgccataattcatgagtagaaaaacagactagtggaataacataaaaataaaaacaatgcttacataaaatgttgtaactgatttggatgtcattagaaatcagtaagtaaatagatggacaatgtaatgaaagatgctaggcaaataatgtggtagggagaataatggc

SEQ ID NO: 442935 - DNA, 545 bp, Homo sapiens
gaaatcttaaaacatgttattgagcttaaagttgcaaaaataaactcatgtgccataattcatgagtagaaaaayagactagtggaataacataaaaataaaaacaatgcttacataaaatgttgtaactgatttggatgtcattagaaatcagtaagtaaatagatggacaatgtaatgaaagatgctaggcaaataatgtggtagggagaataatggcccgcaaagatgcccatgcctaaccctggaacctgtgaatatgttacactgaatgcaataaaggcttatcagatgtgattaaggatgcaaaccgagatggagagatcttcctgggttacccagatgggcccagtctaatcacatgagttcttaaaaatggagaacctttcttagctgagtccagagagagatgtgacaatgaaagaatggtcagagaaatgtgacattgccagctttaaaaagagagaggagaggcaatgagaaaaggaatgctgatgttctctagaagatagaaaaggccaggatatggattctaccctagccac

SEQ ID NO: 442936 - DNA, 624 bp, Homo sapiens
ggtcacttagtttgtagaaatttgttacagcagtaatagaacaagtggttatccatatgaggcaaattagattggatacctatctccaatagaaatcaattcaaggtgaattccaggaaaatacttaaaacatttagattaaaaataaatgagaatttttgttacttttggtaggtcatagaaccaagaaaaacaaacattaaggaggaaaaatgaacatatgactacatcaaaatataaagcttctctatttggawgatatcataaggtgacaaatcataaactgtaatatttacaacatatatatgagtgaataaatatacatttagaatatatatgacttcctaaaaatcacaggaaaaaatagacatagaacaagcaaaatgcataaacaaaagaaggcaaaacaaaataatgactcataattatatgaaaagaaactcatcttcatagatgagcagataaatgcaaattaaaaccaccctgagatgctttttacatccatgagcctgataaaagttagagtctaaaagtaataattaacaaagatgggaagtaacagaaaatcttgtccattactggttaaagtataaactgatacagctactttatagaatattacat

SEQ ID NO: 442937 - DNA, 586 bp, Homo sapiens
ctaaaattcatgcctgatttctgacttgtgtacactgtaagatgacaagtttgtgttattttaggtcacttagtttgtagaaatttgttacagcagtaatagaacaagtggttatccatatgaggcaaattagattggatacctatctccaatagaaatcaattcaaggtgaattccaggaaaatacttaaaacatttagattaaaaataaatgagaatttttgttacttttggtaggtcatagaaccaagaaaaacaaacattaaggaggaaaaatgaacatatgactacatcaaaatataaagcttctctatttggatgatatcataaggtgacaaatcataaactgtaatatttrcaacatatatatgagtgaataaatatacatttagaatatatatgacttcctaaaaatcacaggaaaaaatagacatagaacaagcaaaatgcataaacaaaagaaggcaaaacaaaataatgactcataattatatgaaaagaaactcatcttcatagatgagcagataaatgcaaattaaaaccaccctgagatgctttttacatccatgagcctgataaaagttag

SEQ ID NO: 442938 - DNA, 586 bp, Homo sapiens
ctaaaattcatgcctgatttctgacttgtgtacactgtaagatgacaagtttgtgttattttaggtcacttagtttgtagaaatttgttacagcagtaatagaacaagtggttatccatatgaggcaaattagattggatacctatctccaatagaaatcaattcaaggtgaattccaggaaaatacttaaaacatttagattaaaaataaatgagaatttttgttacttttggtaggtcatagaaccaagaaaaacaaacattaaggaggaaaaatgaacatatgactacatcaaaatataaagcttctctatttggatgatatcataaggtgacaaatcataaactgtaatatttacaacatatatatgagtgaataaatatacatttagaatatatatgacttcctaaaaatcacaggaaaaaatagacayagaacaagcaaaatgcataaacaaaagaaggcaaaacaaaataatgactcataattatatgaaaagaaactcatcttcatagatgagcagataaatgcaaattaaaaccaccctgagatgctttttacatccatgagcctgataaaagttag

SEQ ID NO: 442939 - DNA, 586 bp, Homo sapiens
cctatctccaatagaaatcaattcaaggtgaattccaggaaaatacttaaaacatttagattaaaaataaatgagaatttttgttacttttggtaggtcatagaaccaagaaaaacaaacattaaggaggaaaaatgaacatatgactacatcaaaatataaagcttctctatttggatgatatcataaggtgacaaatcataaactgtaatatttacaacatatatatgagtgaataaatatacatttagaatatatatgacttcctaaaaatcacaggaaaaaatagacatagaacaagcaaaatgcataaacaaaagaaggcaaaacaaaataatgactcataattatatgaaaagaarctcatcttcatagatgagcagataaatgcaaattaaaaccaccctgagatgctttttacatccatgagcctgataaaagttagagtctaaaagtaataattaacaaagatgggaagtaacagaaaatcttgtccattactggttaaagtataaactgatacagctactttatagaatattacattatagaataaagttgtgagtatgtatatgcagtgactcag

SEQ ID NO: 442940 - DNA, 586 bp, Homo sapiens
ctaaaattcatgcctgatttctgacttgtgtacactgtaagatgacaagtttgtgttattttaggtcacttagtttgtagaaatttgttacagcagtaatagaacaagtggttatccatatgaggcaaattagattggatacctatctccaatagaaatcaattcaaggtgaattccaggaaaatacttaaaacatttagattaaaaataaatgagaatttttgttacttttggtaggtcatagaaccaagaaaaacaaacattaaggaggaaaaatgaacatatgactacatcaaaatataaagcttctctatttggatgatatcataaggtgacaaatcataaactgtaatatttacaacatatatatgagtgaataaatatacatttagaatatatatgacttcctaaaaatcacaggaaaaaatagacatagaacaagcaaaatgcataaacaaaagaaggcaaaacaaaataatgactcataattatatgaaaagaaactcatcttcatagatgagcagataaatgcaaattaaaamcaccctgagatgctttttacatccatgagcctgataaaagttag

SEQ ID NO: 442941 - DNA, 624 bp, Homo sapiens
ggtcacttagtttgtagaaatttgttacagcagtaatagaacaagtggttatccatatgaggcaaattagattggatacctatctccaatagaaatcaattcaaggtgaattccaggaaaatacttaaaacatttagattaaaaataaatgagaatttttgttacttttggtaggtcatagaaccaagaaaaacaaacattaaggaggaaaaatgaacatatgactacatcaaaatataaagcttctctatttggatgatatcataaggtgacaaatcataaactgtaatatttacaacatatatatgagtgaataaatatacatttagaatatatatgacttcctaaaaatcacaggaaaaaatagacatagaacaagcaaaatgcataaacaaaagaaggcaaaacaaaataatgactcataattatatgaaaagaaactcatcttcatagatgagcagataaatgcaaattaaaaccaccctgagatgctttttacatccatgagcctgataaaagttagagtctaaaagtaataattaacaaagatgggaagtaacagaaaatcttgtccrttactggttaaagtataaactgatacagctactttatagaatattacat

SEQ ID NO: 442942 - DNA, 502 bp, Homo sapiens
ataattaacaaagatgggaagtaacagaaaatcttgtccattactggttaaagtataaactgatacagctactttatagaatattacattatagaataaagttgtgagtatgtatatgcagtgactcagcatattcattgctagtatgtactcaagagaaacttacaggagtggactaggaagtaaayacaaaatgattacaacattgtttgttatatcaaaaaataaaaaagacacccaattttccagcaaaaaaaataagtaaaaataaatcctggtgtattctaacaatggaataatatatagccattaaaataaatcaactattactgtacatatgaatgtaagtatcagcaaaacatattgtttagtgaaaaactaagaagctgaagaagaatatatacaatatggttacatttatatgaagtccaaaaacttgcaaaataaagaaatgtatttagaaatagattcacatgtgagaaaactagaagaaaattaatga

SEQ ID NO: 442943 - DNA, 569 bp, Homo sapiens
tgagtatgtatatgcagtgactcagcatattcattgctagtatgtactcaagagaaacttacaggagtggactaggaagtaaacacaaaatgattacaacattgtttgttatatcaaaaaataaaaaagacacccaattttccagcaaaaaaaataagtaaaaataaatcctggtgtattctaacaatggaataatatatagccattaaaataaatcaactattactgtacatatgaatgtaagtatcagcaaaacatattgtttagtgaaaaastaagaagctgaagaagaatatatacaatatggttacatttatatgaagtccaaaaacttgcaaaataaagaaatgtatttagaaatagattcacatgtgagaaaactagaagaaaattaatgaaaggataagagggatagcagtaattctgagtagttgagggaatttcaattggaaaaaaataatatcatattctttaagtcaggtagtgggtattagcatttgttttaccatcgttctttattcttatagctacactatatattttcaatgtatttaatgtattttttgcat

SEQ ID NO: 442944 - DNA, 569 bp, Homo sapiens
tgagtatgtatatgcagtgactcagcatattcattgctagtatgtactcaagagaaacttacaggagtggactaggaagtaaacacaaaatgattacaacattgtttgttatatcaaaaaataaaaaagacacccaattttccagcaaaaaaaataagtaaaaataaatcctggtgtattctaacaatggaataatatatagccattaaaataaatcaactattactgtacatatgaatgtaagtatcagcaaaacatattgtttagtgaaaaactaagaagctgaagaagaatatatacaatatggttacatttatatgaagtccaaaaacttgcaaaataaagaaatgtatttagaaatagattcacatgtgagaaaactagaagaaaattaatgaaaggataagagggatagcagtaattctgagtagttgagggratttcaattggaaaaaaataatatcatattctttaagtcaggtagtgggtattagcatttgttttaccatcgttctttattcttatagctacactatatattttcaatgtatttaatgtattttttgcat

SEQ ID NO: 442945 - DNA, 569 bp, Homo sapiens
tgagtatgtatatgcagtgactcagcatattcattgctagtatgtactcaagagaaacttacaggagtggactaggaagtaaacacaaaatgattacaacattgtttgttatatcaaaaaataaaaaagacacccaattttccagcaaaaaaaataagtaaaaataaatcctggtgtattctaacaatggaataatatatagccattaaaataaatcaactattactgtacatatgaatgtaagtatcagcaaaacatattgtttagtgaaaaactaagaagctgaagaagaatatatacaatatggttacatttatatgaagtccaaaaacttgcaaaataaagaaatgtatttagaaatagattcacatgtgagaaaactagaagaaaattaatgaaaggataagagggatagcagtaattctgagtagttgagggaatttcaattggaaaaaaatartatcatattctttaagtcaggtagtgggtattagcatttgttttaccatcgttctttattcttatagctacactatatattttcaatgtatttaatgtattttttgcat

SEQ ID NO: 442946 - DNA, 537 bp, Homo sapiens
taagtatcagcaaaacatattgtttagtgaaaaactaagaagctgaagaagaatatatacaatatggttacatttatatgaagtccaaaaacttgcaaaataaagaaatgtatttagaaatagattcacatgtgagaaaactagaagaaaattaatgaaaggataagagggatagcagtaattctgagtagttgagggaatttcaattggaaaaaaataatatcatattctttaagtcaggtagtgggtattagcatttgttttaccatcgttctttattcttatagctacactatatattttcaatgtatttaatgtattttttgcataattaaatattatgcaataaaaatgagaaaacaaaaaagtagaaaatgataaattacaataaagaaatggagaaaaaattataatctagttgagtaatggtatattacatagctattttcttaagtagatgtatrtacatgatgtatgcacgattgtacatacatgttcttaattatatataaatataaaaaaaaatatttttaatat

SEQ ID NO: 442947 - DNA, 551 bp, Homo sapiens
ctctttcctgagttagagcagggaactgctctgagtgttaactgttggattcactgcagtgtcctacaatattttacaagaagatgaamaggcaacctgcagacctaggcttgattcccaagtcacagtctgacccctgctacaggaggttaccctcctcaggaagagatagaaatagggaatttgaaggaatagtgaggggaccagggagatttgattgagtctggtttccaggtgaattaaaaggaaggatgtcatccagggtttgttgctacagtcaaaagaataaataaatcaatgaagaaataccttcattgtctgtggttttcatgcagatatactcatggaggttgtatctctccaaaaacagacaaatccaaggctgtgaacaagcatccgcatttgaattccattaaaccaaaatctatgttgaacgaagtgaagtctgtacacagcattgcaaatgtgaacacattcctgtgtgaggcacatcaccatttgtcagttattgtgaatatgtgtatttttaagcaataagatgcagctggtca

SEQ ID NO: 442948 - DNA, 551 bp, Homo sapiens
ctctttcctgagttagagcagggaactgctctgagtgttaactgttggattcactgcagtgtcctacaatattttacaagaagatgaaaaggcaacctgcagacctargcttgattcccaagtcacagtctgacccctgctacaggaggttaccctcctcaggaagagatagaaatagggaatttgaaggaatagtgaggggaccagggagatttgattgagtctggtttccaggtgaattaaaaggaaggatgtcatccagggtttgttgctacagtcaaaagaataaataaatcaatgaagaaataccttcattgtctgtggttttcatgcagatatactcatggaggttgtatctctccaaaaacagacaaatccaaggctgtgaacaagcatccgcatttgaattccattaaaccaaaatctatgttgaacgaagtgaagtctgtacacagcattgcaaatgtgaacacattcctgtgtgaggcacatcaccatttgtcagttattgtgaatatgtgtatttttaagcaataagatgcagctggtca

SEQ ID NO: 442949 - DNA, 551 bp, Homo sapiens
ctctttcctgagttagagcagggaactgctctgagtgttaactgttggattcactgcagtgtcctacaatattttacaagaagatgaaaaggcaacctgcagacctaggcttgattcccaagtcacagtctgacccctgctacaggaggttaccctcctcaggaagagatagaaatagggaatttgaaggaatagtgaggggaccagggagatttgattgagtctggtttccaggtgaattaaaaggaaggrtgtcatccagggtttgttgctacagtcaaaagaataaataaatcaatgaagaaataccttcattgtctgtggttttcatgcagatatactcatggaggttgtatctctccaaaaacagacaaatccaaggctgtgaacaagcatccgcatttgaattccattaaaccaaaatctatgttgaacgaagtgaagtctgtacacagcattgcaaatgtgaacacattcctgtgtgaggcacatcaccatttgtcagttattgtgaatatgtgtatttttaagcaataagatgcagctggtca

SEQ ID NO: 442950 - DNA, 551 bp, Homo sapiens
ctctttcctgagttagagcagggaactgctctgagtgttaactgttggattcactgcagtgtcctacaatattttacaagaagatgaaaaggcaacctgcagacctaggcttgattcccaagtcacagtctgacccctgctacaggaggttaccctcctcaggaagagatagaaatagggaatttgaaggaatagtgaggggaccagggagatttgattgagtctggtttccaggtgaattaaaaggaaggatgtcatccagggtttgttrctacagtcaaaagaataaataaatcaatgaagaaataccttcattgtctgtggttttcatgcagatatactcatggaggttgtatctctccaaaaacagacaaatccaaggctgtgaacaagcatccgcatttgaattccattaaaccaaaatctatgttgaacgaagtgaagtctgtacacagcattgcaaatgtgaacacattcctgtgtgaggcacatcaccatttgtcagttattgtgaatatgtgtatttttaagcaataagatgcagctggtca

SEQ ID NO: 442951 - DNA, 415 bp, Homo sapiens
aataccttcattgtctgtggttttcatgcagatatactcatggaggttgtatctctccaaaaacagacaaatccaaggctgtgaacaagcatccgcatttgaattccattaaaccaaaatctatgttgaacgaagtgaagtctgtacacagcattgcaaatgtgaacacattcctgtgtgaggcacatcaccatttgtcagttattgtgaatatgtgtatttttaagcaataagatgcagctggtcagttttctgggcaatcttggygatgcatttcctgtgctgtggttgttctctaaccactgtgagaaacccaaataaaaattgatccccccccaaaacaaatacgtatcacaaaaccatagtaatcaaaacaacatgacacttgcacaaaaacagacacattgaccagggg

SEQ ID NO: 442952 - DNA, 415 bp, Homo sapiens
aataccttcattgtctgtggttttcatgcagatatactcatggaggttgtatctctccaaaaacagacaaatccaaggctgtgaacaagcatccgcatttgaattccattaaaccaaaatctatgttgaacgaagtgaagtctgtacacagcattgcaaatgtgaacacattcctgtgtgaggcacatcaccatttgtcagttattgtgaatatgtgtatttttaagcaataagatgcagctggtcagttttctgggcaatcttggcgakgcatttcctgtgctgtggttgttctctaaccactgtgagaaacccaaataaaaattgatccccccccaaaacaaatacgtatcacaaaaccatagtaatcaaaacaacatgacacttgcacaaaaacagacacattgaccagggg

SEQ ID NO: 442953 - DNA, 573 bp, Homo sapiens
tctctccaaaaacagacaaatccaaggctgtgaacaagcatccgcatttgaattccattaaaccaaaatctatgttgaacgaagtgaagtctgtacacagcattgcaaatgtgaacacattcctgtgtgaggcacatcaccatttgtcagttattgtgaatatgtgtatttttaagcaataagatgcagctggtcagttttctgggcaatcttggcgatgcatttcctgtgctgtggttgttctctaaccactgtgagaaacccaaataaaaatygatccccccccaaaacaaatacgtatcacaaaaccatagtaatcaaaacaacatgacacttgcacaaaaacagacacattgaccaggggaacagaataaggaacccagaaataaactcatgcatttatgaccaataaatttttgacaaaggtgcccagaaaacgtaatgaagaatagacatttgtttcaataaatggtgttaagaaaactagatatccacatgcagaagaacatgaatgtgtatggtgtgtatccttatctcacaccatacacaaaaatcaattcaaaatggattaaa

SEQ ID NO: 442954 - DNA, 415 bp, Homo sapiens
aataccttcattgtctgtggttttcatgcagatatactcatggaggttgtatctctccaaaaacagacaaatccaaggctgtgaacaagcatccgcatttgaattccattaaaccaaaatctatgttgaacgaagtgaagtctgtacacagcattgcaaatgtgaacacattcctgtgtgaggcacatcaccatttgtcagttattgtgaatatgtgtatttttaagcaataagatgcagctggtcagttttctgggcaatcttggcgatgcatttcctgtgctgtggttgttctctaaccactgtgagaaacccaaataaaaattgatccccccccaaaacaaatacgtatcacaaaaccatagtaatcaaaacaayatgacacttgcacaaaaacagacacattgaccagggg

SEQ ID NO: 442955 - DNA, 666 bp, Homo sapiens
agtaatcaaaacaacatgacacttgcacaaaaacagacacattgaccaggggaacagaataaggarcccagaaataaactcatgcatttatgaccaataaatttttgacaaaggtgcccagaaaacgtaatgaagaatagacatttgtttcaataaatggtgttaagaaaactagatatccacatgcagaagaacatgaatgtgtatggtgtgtatccttatctcacaccatacacaaaaatcaattcaaaatggattaaaggtttaaacataaaactgtaaaactactagatgaaaacataggggaaaagttccacaatgttggtttggtcaaagatttcttggatataacccccaaagcacaggcaacaaaagcaaaaatatatgggattgcatcaaactaaaaagcttctgcacagcaaaggaaacaatatggtgaagagacaacctacaagttgtgagaaaatatttgcagagcgtacatctgatgaaaggctaatctccaaatatataagggactcaactcaatatcaagaaaaacaaataaccaagtcaaaaaatgggcaaggtcctaaatagacatttctcaaaaaaatacaaatgactaacataaaaaaagtttgtcatcctaattatcagggaaatgcaaattaaaatgacagtgag

SEQ ID NO: 442956 - DNA, 666 bp, Homo sapiens
agtaatcaaaacaacatgacacttgcacaaaaacagacacattgaccaggggaacagaataaggaacccagaaataaactcatgcatttatgaccaataaatttttgacaaaggtgcccagaaaacgtaatgaagaatagacatttgtttcaataaatggtgttaagaaaactagatatccacatgcagaagaacaygaatgtgtatggtgtgtatccttatctcacaccatacacaaaaatcaattcaaaatggattaaaggtttaaacataaaactgtaaaactactagatgaaaacataggggaaaagttccacaatgttggtttggtcaaagatttcttggatataacccccaaagcacaggcaacaaaagcaaaaatatatgggattgcatcaaactaaaaagcttctgcacagcaaaggaaacaatatggtgaagagacaacctacaagttgtgagaaaatatttgcagagcgtacatctgatgaaaggctaatctccaaatatataagggactcaactcaatatcaagaaaaacaaataaccaagtcaaaaaatgggcaaggtcctaaatagacatttctcaaaaaaatacaaatgactaacataaaaaaagtttgtcatcctaattatcagggaaatgcaaattaaaatgacagtgag

SEQ ID NO: 442957 - DNA, 533 bp, Homo sapiens
tttgtttcaataaatggtgttaagaaaactagatatccacatgcagaagaacatgaatgtgtatggtgtgtatccttatctcacaccatacacaaaaatcaattcaaaatggattaaaggtttaaacataaaactgtaaaactactagatgaaaacataggggaaaagttccacaatgttggtttggtcaaagatttcttggatatmacccccaaagcacaggcaacaaaagcaaaaatatatgggattgcatcaaactaaaaagcttctgcacagcaaaggaaacaatatggtgaagagacaacctacaagttgtgagaaaatatttgcagagcgtacatctgatgaaaggctaatctccaaatatataagggactcaactcaatatcaagaaaaacaaataaccaagtcaaaaaatgggcaaggtcctaaatagacatttctcaaaaaaatacaaatgactaacataaaaaaagtttgtcatcctaattatcagggaaatgcaaattaaaatgacagtgagatgccacttc

SEQ ID NO: 442958 - DNA, 533 bp, Homo sapiens
tttgtttcaataaatggtgttaagaaaactagatatccacatgcagaagaacatgaatgtgtatggtgtgtatccttatctcacaccatacacaaaaatcaattcaaaatggattaaaggtttaaacataaaactgtaaaactactagatgaaaacataggggaaaagttccacaatgttggtttggtcaaagatttcttggatataacccccaaagcacaggcaacaaaagcaaaaatatatgggattgcatcaaactaaaaagcttctgcacagcaaaggaaacaatatggtgaagagacaacctacaagttgtgagaaaatatttgcagagcrtacatctgatgaaaggctaatctccaaatatataagggactcaactcaatatcaagaaaaacaaataaccaagtcaaaaaatgggcaaggtcctaaatagacatttctcaaaaaaatacaaatgactaacataaaaaaagtttgtcatcctaattatcagggaaatgcaaattaaaatgacagtgagatgccacttc

SEQ ID NO: 442959 - DNA, 636 bp, Homo sapiens
ttgcacggaatggtgactgtaataaataacaaggtattgtatgtttcaaaatgactaacagagtagattttaaatgttttcaccacaaaaaagatatgtatgtcaataagatagacctaatctttccacaatttaaacatgtatcaaaacattacattgtaccccatagatacaattattatttgtcaatttaaaatttttcactaatttatattgttattgttgcaccaactcctttccaccaggcagattctcataaagactattttctctcttacatgaagcatttcctacacacctcttaatcacggtagcattgacatcattccaccagattctatctccagtgttaaaataatcaagaacccagaaatctccaccagggggcaaccaatgcgtatcaaagtttcccactttcctttagatttacttatgggtaacttawgggaaaaaatacttaagtacttccctttttaaagaaaaaaattatatgaattctacaaaattatggcagaaaatttaagaagagcagatgcttcccaactcattctaaagggccagcattaccctgattctgaaatgaaaaagctttacaaaatccaagatccattcctgactaaagataaaagaaatttt

SEQ ID NO: 442960 - DNA, 613 bp, Homo sapiens
ttatggagtcaacctaagtgtccatcaacagatgaatgaataaagaaaatgtggtacttatatacaatgaagtattattcagccataaaaaggaatgagaccctgtcatttgcaacaacatagatgaaactggaggtcattatgttaagtgaaataagccaggcacaaaaagacaaatactatgtgttatcacttatatgtggaatccaaaaagcaaacaactgaactcatggagatagagagtagaaggaagtataccagaggctgtgaagggtagtgggggttggcagaggtgggggatggytaatgggtacaaaaaaagaaagatttaataagacctagtatttgatagcacaacagggggattgcagtctaaaattcaattatacatttaaaaataactgaaagagtataattggattgtttataacacaaataataaatgcttgaggggatgaatatccaattttccattatgtacttattgtacattgcatgcctgtaccaaaatatttcatgtaccccataaatgtgtacacctgctatgtacccacaaaaattaaatttaaaaacaatacattgttatccactatagtcaccatattgcacaata

SEQ ID NO: 442961 - DNA, 555 bp, Homo sapiens
  misc_feature (1)...(555): n = A,T,C or G
gcatttttatatatctgttggccatttgtatgtcttcttttgagaaatgtctatttagatcctttgtcaatttttcattagggttccttgttttcttattattgwgttgtttgagttcctaagatattttggacattagcctcttatcaaatgtatagtttgcagataatttctcccattttgtaggttatcacttcactctgttgactttcttttgctgtgcagaagctttttaggttgatgctattccatttgtgttttgttgcttttcttgcctgggctttagagtcatatcataaaatattattgcccagaccanatgtctggagttattcccctgttttcttataggagttatatagtgctaggtcttacatttaagtctaacttattttgaatttatatttttatatggtatgaaataagggcctaagatcaatcttgtggacattcagttttctcaacaccattttttgaagagactgttctttccccatgtgtgttcctggcacctttgttgaaagtcaattgactataatatgtagatttatttat

SEQ ID NO: 442962 - DNA, 555 bp, Homo sapiens
  misc_feature (1)...(555): n = A,T,C or G
gcatttttatatatctgttggccatttgtatgtcttcttttgagaaatgtctatttagatcctttgtcaatttttcattagggttccttgttttcttattattgtgttgtttgagttcctaagatattttggacattagcctcttatcaaatgtatagtttgcagataatttctcccattttgtaggttatcacttcactctgttgactttcttttgctgygcagaagctttttaggttgatgctattccatttgtgttttgttgcttttcttgcctgggctttagagtcatatcataaaatattattgcccagaccanatgtctggagttattcccctgttttcttataggagttatatagtgctaggtcttacatttaagtctaacttattttgaatttatatttttatatggtatgaaataagggcctaagatcaatcttgtggacattcagttttctcaacaccattttttgaagagactgttctttccccatgtgtgttcctggcacctttgttgaaagtcaattgactataatatgtagatttatttat

SEQ ID NO: 442963 - DNA, 628 bp, Homo sapiens
ttattttgaatttatatttttatatggtatgaaataagggcctaagatcaatcttgtggacattcagttttctcaacaccattttttgaagagactgttctttccccatgtgtgttcctggcacctttgttgaaagtcaattgactataatatgtagatttatttatgggctctttattctgtgtaattggtctatgtgtctgcgtttatgccagtaccatggtgtttcgattgctatagctatgtagtataatttgaagtcaggtaatgtgatatctcctgccttgcttttttygatcaagattattttggcttttcagagttttttgtgattccatacagatttgagagttgtttttctatttctgtgggaaaatgtcataggaattttgatagagattgcattcaatatgtacatcactttggatagtatggacatttcaaacatattactttttccaatccatgaacatgagatatctttccatttatttgtggcttcttcaattgttttcatcaatgttttgtagttttcagtgtaaagatcattcacctctttgtttaaatttacatctaagtattttttgttgctattataaataggattgttttcttgatttcttttttt

SEQ ID NO: 442964 - DNA, 539 bp, Homo sapiens
tgctcaataaatagttgaacgactgaatatttttctttgaatgagtgagtggcacaaaagtgaaagtatgtgaataatagtttatctcaagtaggcgacctccataggataaagctgtctgctttaggttaataaactaattctggttgaggtgttaatagctgataacagcttaacttgttggcatgagtcaaggtaagatgtacattttaattgcaactctctagaagtcagataaaagtaggctttttaattctactgtgaggtcttccagaagcaaggttcctttagattaaattaaaaaaaaaaaaaaaaagaagaggagggaggggacaaatgctgagaatggggatggaacagaggatggagggagatgcggagaaacttcagagcggcaggtgccttygtttcccgttacctgctgagtctagtcccttccagggcacacagtgggcgcttagtaactgtagaaagaagtcgaacgaaatcggaagggggagaggcagaggccacaatcaagacacggaaacgacagtcag

SEQ ID NO: 442965 - DNA, 608 bp, Homo sapiens
ctctaaatttattatagaatttgttaccattattaaaacctttccataaataacaataaagacttccaagttaaattatgaaacagttaaggaagaaatagtaccagtccatcacaaactatttcacaaaagagtggaggagcgaacacttcacaaatcatttcatgaagctagccttaccctactatcaagaccaaagaatttatgaaaaaaagaaaactacaaacatatcctttgtgaacctagatgtaaaaatccttttaaagagtagtraataaaatccaacaatatataaaaaaggacaatataccacctctaactagggtttcttccagaaatacaatgttggtttaatatttacaaatcagttaatgttattttacatattaacagaaaaaagagaaaaattctgcaatggatgcagaaaaaacattctataaaattcaatatccatttattactttaaaaaggcaagccactcaagagctaaaaacagaagggaacttcctcaacctaataaagggtgtctgtgaaaaacccactaacatacaaaaggtgaatgactaaataaatgccttcatcctaagatcaggaacacgaccatcaac

SEQ ID NO: 442966 - DNA, 535 bp, Homo sapiens
atgtgtacagcatgactcagaggaccctcagggagcaggtgggctaaaaatctatcaaacaataataattttcatagatgggagctccccagcttcccagttgggtgttcagttgattatgagtcatgaatttcctttttagrgtaatatttaccatggagcatggctggttatagggaatacgtaatatccatttatctgatgggaaacatattattaaaacattacctaatgatagatttacctgataaataatccttgggattaaacaaaaaaggctggggaggggctagggagtgattgaaggaagcagaaaggtgaacaggaataagccatagcttggtcataaataaagagggcatttgttcagagctgggtgttaaaatgatccttactgtaataattagaatagagaagagaaagggagagacagagaaactgggtcaaagatagattaaaggaggagggattacggtttatcataggaaatggttaataacataatagtaggcatcttttaaatgtattgttagta

SEQ ID NO: 442967 - DNA, 614 bp, Homo sapiens
ttcatcaacttctgtgggttctataggtaagatgacaagctatgaggtcacatgaaactgatctcagtatgtgagttacagtcttggatgtacctacatttgactgtgagttcttaagaaagtatcttacctttattggtctcagtattttcattcgtaaaatagtaggtaacatttattgctgttgcttattttgaaattgattttgttgttactattttttgagtttgacttgtgccactctactttttgtctatcatttaattaaatccgtacagcaaatgcrtgaattatgtatgatcatttccttttcacagagtagacctagaaaacatgagaggcatgcataagactccttgctagacagcggcagagctgcaattcacggtgtcctctctgctccaaatccaaagctttctcctttacaacatatggcttcccaacctacctcaagaccctagactggaagtcatgagtaagcttttgtctaagagaatgctttgaaaaatataaaatgccatagaaatatcagggttttaaatatatattattagctactcatcttcttctctgtactttttgttgtttcatcaaaattgaccttatagatttga

SEQ ID NO: 442968 - DNA, 614 bp, Homo sapiens
ttcatcaacttctgtgggttctataggtaagatgacaagctatgaggtcacatgaaactgatctcagtatgtgagttacagtcttggatgtacctacatttgactgtgagttcttaagaaagtatcttacctttattggtctcagtattttcattcgtaaaatagtaggtaacatttattgctgttgcttattttgaaattgattttgttgttactattttttgagtttgacttgtgccactctactttttgtctatcatttaattaaatccgtacagcaaatgcatgaattatgtatgatcatttccttttcacagagtagacctagaaaacatgagaggcatgcataagactccttgctagacagcggcagagctgcaattcacggtgtcctctctgctccaaatccaaagctttctcctttacaacatatggcttcccaacctacctcaagaccctagactggaagtcatgagtaagcttttgtctaagagaatgctttgraaaatataaaatgccatagaaatatcagggttttaaatatatattattagctactcatcttcttctctgtactttttgttgtttcatcaaaattgaccttatagatttga

SEQ ID NO: 442969 - DNA, 516 bp, Homo sapiens
gaaagtagtagactgggacaaggtctagagtcaactgactccatcctgtcttcaccactcagagttgcccttggagaagatttcctaaaagaggtgagaaaaacaggaagggtgggaacgagcgagagggccagggaaaaagaggggcagaggagacactcatttattaagtgtgcgctctgtcaagcactttacacataggatttctcttggtctttactattaatacatctccatgaattacaaatgctcatcctcattttccccrgggtgaaaatggaggctcagagggatggatgattcatacacagtcatatcactggagaggggaagaactgggattcttccccaaaccagcctcattccaaagcacatgttctttagactaccccaccctttggattaaaaaccctttcctggctgattttgcattatctgatgaaactgagatgtgactggatggcaggtgaacctcgcctggtgaagagccactccactgcccaatggggaaggtgc

SEQ ID NO: 442970 - DNA, 516 bp, Homo sapiens
gaaagtagtagactgggacaaggtctagagtcaactgactccatcctgtcttcaccactcagagttgcccttggagaagatttcctaaaagaggtgagaaaaacaggaagggtgggaacgagcgagagggccagggaaaaagaggggcagaggagacactcatttattaagtgtgcgctctgtcaagcactttacacataggatttctcttggtctttactattaatacatctccatgaattacaaatgctcatcctcattttccccggggtgaaaatggaggctcagagggatggatgattcatacacagtcatatcactrgagaggggaagaactgggattcttccccaaaccagcctcattccaaagcacatgttctttagactaccccaccctttggattaaaaaccctttcctggctgattttgcattatctgatgaaactgagatgtgactggatggcaggtgaacctcgcctggtgaagagccactccactgcccaatggggaaggtgc

SEQ ID NO: 442971 - DNA, 600 bp, Homo sapiens
ttggctctagagtctgtgcttattattatcattattttttaaagagacaggtttttactcgggagtgcagtgccaataatagctcactacagccttgaactcctgggctcaagctatcttctggcctcagcctcctgagtatctaggactacaggtgtgcaccaccatgcccagctaatttttattattttttgtagagacaggatctctctatgttgcccaggctggccttgtattcctggcctcaagcaatattcccacctccgcctcccaaagtgctggtattacaggtgtgagccactatgcccatgctctgtgcttattactcttcaccctggtgtactatacagcctcagcaagaatgcagagcccaactccaagtgactttcaagaattccaattagatctgagctaaagcttagggtaaaagttgaaatgtgaaaaagaataaaaagaagaatttytgagccaaacatacaagtatataggcaacgatattgcagggccatagcaattaatgtgctaattgctaacaatcctcctcttaagttaacaaagatttagtgaatgtgttcttctgaaaaaaaaaaaaaaaaaaaa

SEQ ID NO: 442972 - DNA, 557 bp, Homo sapiens
tctgcctactgtcagtaccagtttttgttatgatggctgtcaagttttaaaatgtgacaatgggaatatattttcygaataagttattcccctgagtaaaccctttagaaatccagccatcgctatgggcaatggaggttccaaatgatgaacgctcttcacacttgaaagggttaagtgactgactgcaaggccaaaggcaccagactgcaaaagaaatgttgctttagtgagctctgaaaggtttctaacaagtaccaaatacttgttgatctgttcacaataaacaccagcaggattgtcaggctcctttcactgtctggggagatgcatttacatactgcacctaggaagaacagcttgttggtctcctttataaaagttgagtagctagaagcctcattcagtgtctcccatccaaatgactgaaagaagatgcaattgaaatagtggagtctctcgtctggcttgggcagcataaatgctgtgcataaaacacttggagtagttcaggcacaagacaaacccacctgaatggacgaggaacactgtctgtt

SEQ ID NO: 442973 - DNA, 584 bp, Homo sapiens
cttaatttgatcattgtacattgtatatatatatatatcaaaacatcacactgagtcccataaatatgcacattatgcatcatttcaaataaaataatactttaaaaatacaatttatatgtataataatgcagaataaaagaaattatctctacaactaaattagtcagttaaagggttattctaaattgtgaggagcatcttcatcacagcctcttactcagaaaacaataagtttctgtgagtagagtaaatgtgaactaagagagaaaaatgttcaaagtttatgttaaacaatcacttgccttctgctttgtgaggaaataaaaagctttctctactatgaattttcttttgaaatacaaaggtcagtatttgaaataaaagaatagggmattgttaaaaactgtacagctttcaagtgagggtaaaaattggaaggggtaggtatgttaatgacagcaagaatgagtccagaaaaatgtgagcatacaaagtatttttttttcttaatgtttggaaaattggttcatgaaattaggagtaatcatttaggttcacggagtggtacccaaagacttgca

SEQ ID NO: 442974 - DNA, 538 bp, Homo sapiens
gacctgcacccatatatttattgcagcactatttacattagcaaagataagaaatcaacctaagtgtcaatccatggaaattttgatttctttaatgtggtatatacacacaataggacactatttatccatagaaaataataaaattgtgctttttccagcaacatggatggaactggaggccattatcttaagtaaaacaactgagacacagaaagaaatataccaaatattctcacaactaccacatattctcacttataagtrggaactaaataatgtgcacacatggatgtagagggtggaatgatagacaatggaaatttgaaccggtggggagtgggaggagggttaatgatgagaaattacttaatgggtaaaatgtacatttttcaggtcatggatacactgaaagccctgactgcaacactatgtaatatatccatgtaacaaaagtacacttgtaccccaaatttatataaatacaaatttgaaaaaagaaatctacactatacgttgttttcactaagaattttga

SEQ ID NO: 442975 - DNA, 538 bp, Homo sapiens
gacctgcacccatatatttattgcagcactatttacattagcaaagataagaaatcaacctaagtgtcaatccatggaaattttgatttctttaatgtggtatatacacacaataggacactatttatccatagaaaataataaaattgtgctttttccagcaacatggatggaactggaggccattatcttaagtaaaacaactgagacacagaaagaaatataccaaatattctcacaactaccacatattctcacttataagtakgaactaaataatgtgcacacatggatgtagagggtggaatgatagacaatggaaatttgaaccggtggggagtgggaggagggttaatgatgagaaattacttaatgggtaaaatgtacatttttcaggtcatggatacactgaaagccctgactgcaacactatgtaatatatccatgtaacaaaagtacacttgtaccccaaatttatataaatacaaatttgaaaaaagaaatctacactatacgttgttttcactaagaattttga

SEQ ID NO: 442976 - DNA, 587 bp, Homo sapiens
gaagtcaagcaaaataaaattcaagaacaaaattaacatttttccaagaaggaaattttaatgagaaatttacaatggaatttataatttaacagtatagaaaaaaaaactctgaaagttagtttacctgatattcaataaagcatctgtccacagatgatctaaatgaaacactgtaaaactgccatttgattttaagcgcctcaagaataggtcaggtgtggtgactcacacttacaatcccagcactttggaaggccaaggcaggaagatcacctgaggtcagctttctattgcttataattcacacttgtttttgcacttgtgaccaattcctgtttcaaaactaaaggtgcaggagggtgagctctctttcccagaagttgagacacttatcccttccaaatttgattgagtagtcaakgtggtaagatactttatggaggtatcagcatgtttatccatgacgtgtgtaagtctcatagagcctctccacaagaacacctgcagagacttttagctcagcttgaaggtgcacatcagggttggcaccttgagcactctgctgctgcaaggcatttagagat

SEQ ID NO: 442977 - DNA, 224 bp, Homo sapiens
cagcaatggttgcaatgagagtcctttgaaatggctaaaattacttgtgtgcacaattggaaattttctggttttagaaacagacaaattgaatgggatacttactgccacctaaaagtctctaaaagaagttctgagaaaattgccttctttcaagaagtaaacaaaaatatatctgaaactatatccaaawttcaatggcatcagaagcctccactcttcct

SEQ ID NO: 442978 - DNA, 224 bp, Homo sapiens
cagcaatggttgcaatgagagtcctttgaaatggctaaaattacttgtgtgcacaattggaaattttctggttttagaaacagacaaattgaatgggatacttactgccacctaaaagtctctaaaagaagttctgagaaaattgccttctttcaagaagtaaacaaaaatatatctgaaactatatccaaatttcaawggcatcagaagcctccactcttcct

SEQ ID NO: 442979 - DNA, 588 bp, Homo sapiens
tccttttgtgcaacacataaggagcttcctcttgtaaatacttatgaaaatgtgctcacataccccaggatggtcatagcagcaatggttgcaatgagagtcctttgaaatggctaaaattacttgtgtgcacaattggaaattttctggttttagaaacagacaaattgaatgggatacttactgccacctaaaagtctctaaaagaagttctgagaaaattgccttctttcaagaagtaaacaaaaatatatctgaaactatatccaaatttcaatggcatcagaagcctccactcttccttctccaactattcctcctcctcctacactatgcatttgtatcctctcttatctggactttcctgctctgatttgccttcccttctacaactaccaccatcacctaagaaaaccatagatttctgacactcctcmctgaaactcctgttttggcagctcctttcaagataaaactcacaaaaagaggtgagcctgctattgtgtatagcccttagacaaagaaaaaacttaagaatatcgtaaaagacttcccacacctgctccaaaatcccatagggtttgcaaa

SEQ ID NO: 442980 - DNA, 591 bp, Homo sapiens
aaaatacattaaaaagaaaagtataaactcagtgttagatagcagagtacggtgactatacttaacaaaaatatactgtatttgggttgaggacaccctaaataccctaacttgattgctacacataatatacatgtaacaaaatttctcatgtgtcccaaaaactttacatataaacaagaaaaagtataattcaataatacaaaaataacctcattccttccagctatgtctttgtgcatatctgtgaattttttgtgaaataattaaacaaatatgtattaaatgcctactatgtttcaaacataagattaaatactgaggacatactattgaaaaaaatgaataaagtcataattcctatgctagtggacccatatagaagagtaaggaggagagaaaaatcaataaatgtttagtaacatattgcaataagtgttttaaatacatatatgaaaattctatgagacagggagactatttattttagggaagaggctataaagaaagcccctcccatcaytatatattctacatgtaacagatgaaattacaaacctctcccttactgtcaagtgtatgccaccaatg

SEQ ID NO: 442981 - DNA, 534 bp, Homo sapiens
atttcatccaagcaggaggaattccatttatgtaaaaatagatgggaaaagcgttcaggctcaaacaatctttgccaagaccgcatcgacaggactccagagaggatgagcagaattcagacgtacgtggtgcccagctccagcggaggagacagtcagtcttcgcccaggcggccagggcagcagcggattccacgcgggcgctgtcccttcagcacctccagcaccatcctctccccggaacctgcaagcccagccccttctctggtctcctccaggcaagtaacctcaaggcctccccagtgtcccacgtcactgggctgcactaagcgaccagagaacatgaagattgtactgccagaactggctgctcctgccgatcaaggccagctcatctgtccccaaagtcctctggtgggctccctccccagcagaaagcraaccacaggggctgtgaccgcctactgcccgggctcccccgggcttcccgaactgtccttctccctggagcctggcgcagagaggggcccagag

SEQ ID NO: 442982 - DNA, 642 bp, Homo sapiens
gcaacctattctatggttcatagatttctaaaataatattgaaattgatcccagaggactagaaggtattgcattgttttgaagatgagcgatraaaataattgttcattcttaccaagcaaaatattatttatgggaagaacaatgagaaaccgggagattccacagccagatgggtggccttgtgtagaaaaaacacatctgattaaattttgtactttggtgtcaggtagacacagcaaatattgataactcattccataatggattccttgtctttttaggattcatatggtcagccttcttatgaaaatttaaaaacaaagtttgtttttttaatagttatagtctgttaaattttcataagaaaatttatattatatcatatgatatattcaaatggtagaatcataaaagctttaaagttcatgttttcagatatctccacaggtttgtgccattagtatatcagactcacaagtatatcattacatcagactcacaattatcaaagcctcaacagtattcaaatgtgatatttacaaaatttgatcactgcaattatactgatataatctatacagatgatatacactaagttaactgtttaagagtggtttactctaggtcccccaggtagtc

SEQ ID NO: 442983 - DNA, 642 bp, Homo sapiens
gcaacctattctatggttcatagatttctaaaataatattgaaattgatcccagaggactagaaggtattgcattgttttgaagatgagcgataaaaataattgttcattcttaccaagcaaaatattatttatgggaagaacaatgagaaaccgggagattccacagccagatgggtggccttgtgtagaaaaaacacatctgattaaattttgtactttggtgtcaggtagacacagcaaatattgataactcattccataatggattccttgtctttttaggattcatatggtcagccttcttatgaaaatttaaaaacaaagtttgtttttttaatagttatagtctgttaaattttcataagaaaatttatawtatatcatatgatatattcaaatggtagaatcataaaagctttaaagttcatgttttcagatatctccacaggtttgtgccattagtatatcagactcacaagtatatcattacatcagactcacaattatcaaagcctcaacagtattcaaatgtgatatttacaaaatttgatcactgcaattatactgatataatctatacagatgatatacactaagttaactgtttaagagtggtttactctaggtcccccaggtagtc

SEQ ID NO: 442984 - DNA, 547 bp, Homo sapiens
gcctttattcttcttacagcgattctgctgtgaattcgtacggaatgggctccagcagctcaggctactttccactgggtctcacaaagtgtgcttctcgaagcaggctggggcttcccttgaacccaggtacctttctctttgtcttccttcttytttttttttttttttcttgagacagagtcttgctttctcatccaggctggagtgcagtggcacgacctaggctcactgcaacctccgcctcctgggtttaagtgattctcctgtctcagcctcccaagtagctgggaatacaggtgcccaccaccgcacccaactaatttttgtatttttagtagagatggggtttcaccaagttggccaggctggtctcaaactcctgagctcaagtgattcgtctgctttggtctctcaaagtgctgggattacaggcatgagccaccatgcctggcctggcttccttctttttctgattattttctttcacatgtttcaggatgctatcttggctcttcaagtgcttaaaatgctgaacatgtatatt

SEQ ID NO: 442985 - DNA, 553 bp, Homo sapiens
agatataaatcgagatatagatatacatgtacacatacatctatgaaaggggtttattaggagaattatgagagactcatgacaagctatctgcaagctgaagaaccagggaagacattagtgtggctcagtccatgtccgaaagtctcagaattagggaagccaatggtgtaattctcggtctgaggctgaagggccgaggggctgggtggggtgctggtgcaagtaaagttcaaaagccaaagaamctggagttctggtgtcaaagggcaggagaagaggggtgtcccagctccaggagagagagcttgagagagagaggaacaaagagaaagaatttgcctttcctcctttagtcctatctgggccttaggcaatgggatggtgcctaccctcactgggtgagggcagatcttccttactcagtctactgaatcagtgctgatctcttccagaaatacccttacagacacacccagaaatagtgctttaccagctatctgggaatcccatgatccagtcaagttgacccctaaaatttaccatcacagta

SEQ ID NO: 442986 - DNA, 571 bp, Homo sapiens
gtacatatactcaatgaaatattttgccataagaaggaatgaaatcacatcttatgcagcaacatgaatggaactggaggtcattatcttaagtgaaacaagccaggcacagaaaggcaaatattgtatgttcacactcataagtgggtgccaaaaaatgtgtatacatggacatagagtatggaatgatagacgtggatacttgaaagtgtgagggggaaggacgggagtggatgatgagaaattaatgaatgtaacgtaagttttttgggtaatggatcccctaaaagccctgacttgaccactacacaatctatgcatgtaacaaaattccacgtgtgaccccataaatttttycatatcaaaatttaagacaataatattctgagagtagaaatggggtaactttagatatggaagacattcattggccaaggacttgaggattatccttgggtgtagagtgatagctggtatgaaaatgataaggtgtttttatattcaaagtatcacaaaacaaaatacatgagtcagacaagatcctccccacagcaggtttagcctttctgat

SEQ ID NO: 442987 - DNA, 642 bp, Homo sapiens
aaaatgtatttgtgccagcaaagtgcctgtacataacagatgcttaatcaaattaacttactctctaaatttttttctttttactgtacttcaatggatgcaaacaaattaatttactctttccccttttatgcagatcattgaaataattattttaatgaatgttgaaaataattttggaaaagttagacccctaatctagcacccctactatttcataatgtagcattatattccgtcatagatattataatattctttaattcattgatttatttttcaacacacatttattcaatgtgcattatrtatcaagcatctatatacaaagaagaacaaaatgcatggctgtcttcaaggagtttccagcctagtggggagacagatacaaaaagggatcaacacgtcagagtaaatgtaatcagagacctacggggtgaggagacccaacccattctgtgaggcccagaaagacctccaaaggaggtaacagctgaactgagtgttaaaaatgagtatgagctggtttgaagaggagaggatacaaaagaaagccagacaggaaagcttgtttgagcaaagaactaggtgagaaacagcttggtacgtttttgtgtgtatgatgagtggagaggcatcagg

SEQ ID NO: 442988 - DNA, 562 bp, Homo sapiens
ctcacacatacatacaattctgcatttatatttctatatataacttaacatatattaatgctcatgaattcatagttatgcctccaattataatctgacactatagggttaattctgtcctcctttttcttattcgtaacttcttcctttgacaatggaaacagagtctctttatctacaatatatttacttatttgttagatcattgtatacacatgctcctttcagaaacagatttactaagtacatttgtgaatagttacttacatgtttagctttataatgtccacaccaaactctaagttacttagattagttcttttctacctcattccgttcagtgtggttatcctattcacttgtaacatatttaggttcatctcttactgtcttgtattcaattttcagatcccccaacaatttgagtgattttaataactatttagttttatgggtatttgagactttattatggttctaaaaatcaaagctatgctgagartatacccagagaaatatcgtgaaggaaaggaagatattttcatgtttgtgcataattggg

SEQ ID NO: 442989 - DNA, 606 bp, Homo sapiens
agaagaatacattttgctattgtgatgagatttcattttctgttagagtggaggctctcaaagtgtggtttgtggaagcttggggggtacctaggagtctgtgaagccaaaactattcataacagtaagaatatatttgccctttgcactgttttgccatttgcaccctggtggtgcaaagccatagtgggttaaactgtggtgccttagcacagatataggcagtgggcccaactgttgtcagaagtcattgcggtcttcatcactacagaacaaaaaaaatgaagccagtttgccctgagcatgcccttgaaaagrcagtataaataatcacttttattacattttggcttcaagtatacatgttttcaaatatattctgcataaaccactctactacacaatgcagtatgagagttgcctcaaagaaagcacttgcgcaattgtttgggttgtgagctgaactacctggggtttacacagaacactatttttacttgaaagaataactgactatctatggtttttcagtcttgttatttggtaggcatttcctcaaaaatgaacgaagtgagcttgttgggaagacactgacagtgtatgttg

SEQ ID NO: 442990 - DNA, 604 bp, Homo sapiens
acaattttttaacaaacccatatgaaggctatccctacttttaaaaaaagactgcatggatggtattacctgccttctaatttatgcaccaagaatgtgcatatgaaaattttttctaacaattacattagagaaaatttgtctatcctgartacgctttttactgtttcccttttcatcttgtcttcctggaagctcaatattttgaaatgtcatgaatttcagttgcttccctagcttagattttcttctataatttctccatccatcctgtgttatttgaatagtgacatcctaccttgttttaatcatattacagttttaacacatttgtacttttatctgtacttttcgttgtatacattacctcacatccatttcagtgtggcacaccctcttagaaagaagagaagaaaggaaaggagagacagaagagaaagagagagaaaaaaagaagaggtaaaatgaccctgctatcaacattcagcattttatgatgaatttgttcatcatgtttatcttcagttatcctttggaagatagaaagagtgagctaagagtagtggttggggagagggtagtcctaattttgtgtgtgtatggg

SEQ ID NO: 442991 - DNA, 638 bp, Homo sapiens
aaataatacagaagtgactacacttcttgtttatggaaaatcatgaagaygaatatgccttccccactccttcatttcatgtcccctttgccatcagccggcacaaaagctggttgaataacattatctctggggtaatccaaacctttattcctgagaattctaagtcttagatgatcctgctgtatatgactaaagtcacctttaagccatttttaatttattgctatacttggcaatgcaaaggtcttccccagccccactttcgtctcagttgattctgtccattctcctttctgcctccactgtgaactagcaactctatttttcttcagtgtcaggattaatcaccccagacagcactataatccctctttttagtatactcaactcatggtgaagaacctaaaaagaccaaatagctgtctcagcttccaactcaaaagaacacttgttacaatgcctggtggatgcattcatctcttgcttactaaatcctctaagccagaagtgtttggagttagcacaatttctagggcacattatgagctgtaacctgaaaagcataaaattttctatcacccttcttctccagactcgcatattatctatctctgagagaaatcattccatatact

SEQ ID NO: 442992 - DNA, 638 bp, Homo sapiens
aaataatacagaagtgactacacttcttgtttatggaaaatcatgaagatgaatatgccttccccactccttcatttcatgtcccctttgccatcagccggcacaaaagctggttgaataacattatctctggggtaatccaaacctttattcctgagaattctaagtcttagatgatcctgctgtatatgactaaagtcacctttaagccatttttaatttattgctatacttggcaatgcaaaggtcttccccagccccactttygtctcagttgattctgtccattctcctttctgcctccactgtgaactagcaactctatttttcttcagtgtcaggattaatcaccccagacagcactataatccctctttttagtatactcaactcatggtgaagaacctaaaaagaccaaatagctgtctcagcttccaactcaaaagaacacttgttacaatgcctggtggatgcattcatctcttgcttactaaatcctctaagccagaagtgtttggagttagcacaatttctagggcacattatgagctgtaacctgaaaagcataaaattttctatcacccttcttctccagactcgcatattatctatctctgagagaaatcattccatatact

SEQ ID NO: 442993 - DNA, 604 bp, Homo sapiens
tgatattatttgaaaaacagtggaaaatctacaattaatgaaatctgccccaaatttgatagaaaatattgccacaaaactgacaaaattgtgtatatccactccaatttatgaagtaagcaaataaaaaatattgtgaaagcatatatagggtgaaaggacagaaagtcaccagcaaagcytgagccaggtcacattgctcttccactcagaatttcccagtggcttcctgtctctcagagaatgtccagtgctcttgcaaaggtctgcatttctttctgtactctactccaccttcctgtcagacctccacttctccccgctctttctcattcactcaattccagacatactaaacatgctgctatttattgaaccgcccaaaacatgtgtcagcctcagggcctttgcataaaccaattcccatacctggaacagtgttcctgcagatgggcctatgtgggcacccgcatttccttcagatcttgaatttctgtctgccatggtcctacttacccattgcattggtttttctttccttgttgagaattccgttctttgaggttgctctaactgtaatctttggacaaatatagtagactga

SEQ ID NO: 442994 - DNA, 464 bp, Homo sapiens
caatttctctccactaagtagtaaaacaagaattgaatgttaggtgggcctccctcctaaccatggtctttattcacattattcctaaggtctgactcccattttttgtaatcttttggcagctgccactctctataaatatcaccccttatcaaattgtctgtaataatactggctccattgaggggtactttccatctttagtacccaaagtgcccaatggcaaatgagcaaaatagaattatttaggtcgttgaggattctcctgataggtactraaaggttatactaaatgaaagtaaagcttatgtttcaagtacaaagtgttactcagggaacagttccaaaggaaaagggagtttgctttcctatgaccagggcatggggagggcaagagagtagctgtggttccataaatggcaaaaactcaccaaaaagataagagtctctgaggcaagggtatg

SEQ ID NO: 442995 - DNA, 464 bp, Homo sapiens
caatttctctccactaagtagtaaaacaagaattgaatgttaggtgggcctccctcctaaccatggtctttattcacattattcctaaggtctgactcccattttttgtaatcttttggcagctgccactctctataaatatcaccccttatcaaattgtctgtaataatactggctccattgaggggtactttccatctttagtacccaaagtgcccaatggcaaatgagcaaaatagaattatttaggtcgttgaggattctcctgataggtactgaaaggttatactaaatgaaagtaaagcttatgtttcaagtacaaagtgttactcagggaacagttccaaaggaaaagggagttygctttcctatgaccagggcatggggagggcaagagagtagctgtggttccataaatggcaaaaactcaccaaaaagataagagtctctgaggcaagggtatg

SEQ ID NO: 442996 - DNA, 578 bp, Homo sapiens
atgagagataatccctaggtaagaaccagtctcaattttatgtgcttccctgctgccactgaaagtcaaacctctgaagatgttcactttgctcactttgctcatgtatgttgggtctgcaagtgaaaaataaaatacatgtatagctacttatatgtgaaacacacaactgaaatattgtgtggcacagttggagaggcaggcaaaccttcytaaggaaaactgtggatttggtacttaaagaatcctgggcagcatagtgagacccccgcctctacaaaatatttaaaaaattagccaggagtggtggtgtgtacctgtagttctggctacttgggaggctgaagtgggaggattccttgagctcaagagtttgaggctgcagtgagccacgatcataccattgcactccagcctaggtgacacagcaagacaaaatcaaacaaaaaaaataagtctgcccctagaaaatatgaacaccaagtcaaactcagagcaagtttttaatgacagctttattaagacataattcacatgtcatacaatttacccatttaaagtatacaagtcagtgggtt

SEQ ID NO: 442997 - DNA, 578 bp, Homo sapiens
atgagagataatccctaggtaagaaccagtctcaattttatgtgcttccctgctgccactgaaagtcaaacctctgaagatgttcactttgctcactttgctcatgtatgttgggtctgcaagtgaaaaataaaatacatgtatagctacttatatgtgaaacacacaactgaaatattgtgtggcacagttggagaggcaggcaaaccttcctaaggaaaactgtggatttggtacttaaagaatcctgggcagcatagtgagacccccgcctctacaaaatatttaaaaaattagccaggagtggtggtgtgtacctgtagttctggctacttgggaggctgaagtgggaggattccttgagctcaagagtttgaggctgcagtgagccacgatcataccattgcactccagcytaggtgacacagcaagacaaaatcaaacaaaaaaaataagtctgcccctagaaaatatgaacaccaagtcaaactcagagcaagtttttaatgacagctttattaagacataattcacatgtcatacaatttacccatttaaagtatacaagtcagtgggtt

SEQ ID NO: 442998 - DNA, 578 bp, Homo sapiens
atgagagataatccctaggtaagaaccagtctcaattttatgtgcttccctgctgccactgaaagtcaaacctctgaagatgttcactttgctcactttgctcatgtatgttgggtctgcaagtgaaaaataaaatacatgtatagctacttatatgtgaaacacacaactgaaatattgtgtggcacagttggagaggcaggcaaaccttcctaaggaaaactgtggatttggtacttaaagaatcctgggcagcatagtgagacccccgcctctacaaaatatttaaaaaattagccaggagtggtggtgtgtacctgtagttctggctacttgggaggctgaagtgggaggattccttgagctcaagagtttgaggctgcagtgagccacgatcataccattgcactccagcctaggtgacacagcaagacaaaatcaaacaaaaaaaataagtctgcccctagaaaatatgaacaccaagtcaaactcagagcaagtttttaatgacagctttattaagacataattcacatgtyatacaatttacccatttaaagtatacaagtcagtgggtt

SEQ ID NO: 442999 - DNA, 608 bp, Homo sapiens
gttgctgcaaaaggcattattttgttcttttttatggctgggtagtattccatgttgtgtacataccacattttctttatcygctcattggttgatagggacttaggttagttcaacttctttgcaattttgaattgtgccgtgataaacttatgcatgcaaggtgtctttttttatataatcacttattttccttcggtagatacccagtagtgggattgctggatcgaatggtagacttccttttagttctttgagaaatctccatatggttttccatagaggttgtactaatttacattcccatcaacagagtataagcattcccttttccccacatccataccaacatttactgttttttgactttttaataatggccattctccacagccagcagtatactaaatggacaaaagctggaagcatttcccttgaaaactggcacaagaaaagatgccgtctctcacttctattcaacatagtattggaagccctggaccgatcaatcaagcaagagaaagaaataaaggcatccaaataggaagagagggagtcaaagtatccctgtttgcagatgacatgattctacatctaaaaaccttcat

SEQ ID NO: 443000 - DNA, 608 bp, Homo sapiens
gttgctgcaaaaggcattattttgttcttttttatggctgggtagtattccatgttgtgtacataccacattttctttatctgctcattggttgatagggacttaggttagttcaacttctttgcaattttgaattgtgccgtgataaacttatgcatgcaaggtgtctttttttatataatcacttattttccttcggtagatacccagtagtgggattgctggatcgaatggtagacttccttttagttctttgagaaatctccatatggttttccatagaggttgtactaatttacattcccatcaacagagtataagcattcccttttccccacatccayaccaacatttactgttttttgactttttaataatggccattctccacagccagcagtatactaaatggacaaaagctggaagcatttcccttgaaaactggcacaagaaaagatgccgtctctcacttctattcaacatagtattggaagccctggaccgatcaatcaagcaagagaaagaaataaaggcatccaaataggaagagagggagtcaaagtatccctgtttgcagatgacatgattctacatctaaaaaccttcat

SEQ ID NO: 443001 - DNA, 608 bp, Homo sapiens
gttgctgcaaaaggcattattttgttcttttttatggctgggtagtattccatgttgtgtacataccacattttctttatctgctcattggttgatagggacttaggttagttcaacttctttgcaattttgaattgtgccgtgataaacttatgcatgcaaggtgtctttttttatataatcacttattttccttcggtagatacccagtagtgggattgctggatcgaatggtagacttccttttagttctttgagaaatctccatatggttttccatagaggttgtactaatttacattcccatcaacagagtataagcattcccttttccccacatccataccaacatttaytgttttttgactttttaataatggccattctccacagccagcagtatactaaatggacaaaagctggaagcatttcccttgaaaactggcacaagaaaagatgccgtctctcacttctattcaacatagtattggaagccctggaccgatcaatcaagcaagagaaagaaataaaggcatccaaataggaagagagggagtcaaagtatccctgtttgcagatgacatgattctacatctaaaaaccttcat

SEQ ID NO: 443002 - DNA, 624 bp, Homo sapiens
agtaaaagtaataataatattttttaaactttcaaaaaaccatgttttctgtaggacaggcagtaataaagaggactagaagaggcagataaacattcacacatgcacacatgcagacacatgtataaaagaaatggaaatgattatcaactgttatcattattcttcgctacctacgattctcatttagataataaaatggaaagtgaggttggcatatcaatatctagaaagaagaatgaaattaatgatgtttagaaaatggttttacttttcaataaaaataaattttgcagcaatgggtaaaatatttaagctgggttttttwaaaaactaattcatcagtcctggggttgtttccttacttataccccagattcagaatgttaactgaaattgtagagaactcctaattctctgtcattgatttaaaatctgtcttgtttcatttttccatttaacagaaccttggtgtattagtcagggttctctagagaaacagactagaatttgtatatagtatatagaaaatgatttatttcaagaaattggctaacataattacagaggctggcaagtctaagatctacagggtggaccagcaggctggagactgagaaggag

SEQ ID NO: 443003 - DNA, 394 bp, Homo sapiens
acatacattcacagaaacatcctagaataatatttgaccaaatgtccgggtaccgccgttgactaccgaaatggatacataaaattgaccatcacatttggtaatccagatacctgctggaagtgatattacastttttattttattctgctttccaacctctttctttcaaagctcttaaaatcattaacattattggcctagaggaaaagtttgtgcttagaaattgccataaatggcatgcctcagaaatcatctttgaactgcgcaatttcagttacagttggcaccaagaaacactagtttttaatgtcttgtgagtgttttagaattttcttaaccaagttgcctagaatctagtaaaagaatttttggaaactcttatttttacatc

SEQ ID NO: 443004 - DNA, 394 bp, Homo sapiens
acatacattcacagaaacatcctagaataatatttgaccaaatgtccgggtaccgccgttgactaccgaaatggatacataaaattgaccatcacatttggtaatccagatacctgctggaagtgatattacactttttattttattctgctttccaacctctttctttcaaagctcttaaaatcattaacattattggcytagaggaaaagtttgtgcttagaaattgccataaatggcatgcctcagaaatcatctttgaactgcgcaatttcagttacagttggcaccaagaaacactagtttttaatgtcttgtgagtgttttagaattttcttaaccaagttgcctagaatctagtaaaagaatttttggaaactcttatttttacatc

SEQ ID NO: 443005 - DNA, 394 bp, Homo sapiens
acatacattcacagaaacatcctagaataatatttgaccaaatgtccgggtaccgccgttgactaccgaaatggatacataaaattgaccatcacatttggtaatccagatacctgctggaagtgatattacactttttattttattctgctttccaacctctttctttcaaagctcttaaaatcattaacattattggcctagaggaaaagtttgtgcttagaaattgccataaatggcatgcctcagaaatcatctttgaactgcgcaatttcagttacagttggcaccaagaaacactagtttttaatgtcttgtgagtgttttagaattttcttaaccaagttgcytagaatctagtaaaagaatttttggaaactcttatttttacatc

SEQ ID NO: 443006 - DNA, 625 bp, Homo sapiens
tttgggtttggattatagtttctcctgttccatgaggtgtgacctaagattgtctatttgtgctccttcagactttctgatataggcatttaatgttatgaactttcctcttagcaccacttttgctgtatcccacaggttttgataggttgtgtcactatttttgttcagttcaaagaatttttaagtttccatcttgatttcattgttaacccaacaatcattcaggagcaggttatttaatttccatgtatttgcatggtttgggaggttccttttggagttgatttccacttgtattccactgtggtctgagagagtacttgatataatttcrattttcttaaatttactaagacttattttgtggcctatcatatggtctatcttggagaatgttccatgtgctgatgagtggaatgtatattctgaagttgttgggtagaatgttctgtaaatatctgttgagtccatttgttgtagggtatagtttaagtccattgtttgttgactttctgtcttgatgatctgtctagtgctgtcagtggagtactaaatcccccactattattgtgttgccatctatctcattttttaggtttactagtaattgttttataaattt

SEQ ID NO: 443007 - DNA, 502 bp, Homo sapiens
ccccacttcttggctcttccagtctcagttagaggcccatcaatgtatatacacctatcatatttttatcagactttaatagtaattgtggaatattatttttctccctcctcgtatgaaacatcttgagggcaagggatagatcttattttactctgtaaatcctagctacaaaacagagagattgtgactggtttatcccttccttcctctcagtggagaaaaaataagaaagagttctctcttctttttctctccctttctcctcatcactattagaaatgttcataaatatctcaagaccataatctaggcccctgaatcctcartattactctacacagtaaaaaaaaaaaaaaaggatgactagctattcttggagaccagaggtctaaggaacaatagtagaaagatattcctaacaatagaagaaaggtaacaggctcagcagccactccttctcttgcaataggtagattagcctcctccaaggcacgtggct

SEQ ID NO: 443008 - DNA, 502 bp, Homo sapiens
ccccacttcttggctcttccagtctcagttagaggcccatcaatgtatatacacctatcatatttttatcagactttaatagtaattgtggaatattatttttctccctcctcgtatgaaacatcttgagggcaagggatagatcttattttactctgtaaatcctagctacaaaacagagagattgtgactggtttatcccttccttcctctcagtggagaaaaaataagaaagagttctctcttctttttctctccctttctcctcatcactattagaaatgttcataaatatctcaagaccataatctaggcccctgaatcctcagtattactctacacagtaaaaaaaaaaaaaaaggatgwctagctattcttggagaccagaggtctaaggaacaatagtagaaagatattcctaacaatagaagaaaggtaacaggctcagcagccactccttctcttgcaataggtagattagcctcctccaaggcacgtggct

SEQ ID NO: 443009 - DNA, 502 bp, Homo sapiens
ccccacttcttggctcttccagtctcagttagaggcccatcaatgtatatacacctatcatatttttatcagactttaatagtaattgtggaatattatttttctccctcctcgtatgaaacatcttgagggcaagggatagatcttattttactctgtaaatcctagctacaaaacagagagattgtgactggtttatcccttccttcctctcagtggagaaaaaataagaaagagttctctcttctttttctctccctttctcctcatcactattagaaatgttcataaatatctcaagaccataatctaggcccctgaatcctcagtattactctacacagtaaaaaaaaaaaaaaaggatgactagctattcttggagaccagaggtctaaggaacaatagtagaaagatrttcctaacaatagaagaaaggtaacaggctcagcagccactccttctcttgcaataggtagattagcctcctccaaggcacgtggct

SEQ ID NO: 443010 - DNA, 607 bp, Homo sapiens
attttttttttttatggggggaagggatctttgttgttgttgttgtttttgctttctgtttgttagtttttcttctaacagtcaggccccttttctccaagtctgctgcagtttgctgaaatttcaccccagaccctgtttgcctgggtatcaccagtggaggctgcagaacagcaaagattgctgcctgmtccttcctctggaagcttcatcccagaggggcactggcctgatgcccgcgggtctcctgtatgagctgtctgtcgacccctgctgggaagcctctcccagtcaggaggcacagggtcagggacccacttgaggaggcagtctgtcccttaggagagctggtgcgctgccttgggaaaatatctcccttgtcaggatcagccactctcttcagagctggcaggcaggaaagattaagtaccatgaacctgagaccacagctgcccctccccccaccccaggtgctctatcccagggaggtgacagttctgtctgtaagcccctgactagagctgctggatttcctgcagatgccttgcccagtgaggagaaatctagagaagcagtctgaccacagccactttgctgtgctgtggtg

SEQ ID NO: 443011 - DNA, 607 bp, Homo sapiens
attttttttttttatggggggaagggatctttgttgttgttgttgtttttgctttctgtttgttagtttttcttctaacagtcaggccccttttctccaagtctgctgcagtttgctgaaatttcaccccagaccctgtttgcctgggtatcaccagtggaggctgcagaacagcaaagattgctgcctgctccttcctctggaagcttcatcccagaggggcactggcctgatgcccgcgggtctcctgtatgagctgtctgtcgacccctgctgggaagcctctcccagtcaggaggcacagggtcagggacccacttgaggaggcagtctgtcccttaggagagctggtgygctgccttgggaaaatatctcccttgtcaggatcagccactctcttcagagctggcaggcaggaaagattaagtaccatgaacctgagaccacagctgcccctccccccaccccaggtgctctatcccagggaggtgacagttctgtctgtaagcccctgactagagctgctggatttcctgcagatgccttgcccagtgaggagaaatctagagaagcagtctgaccacagccactttgctgtgctgtggtg

SEQ ID NO: 443012 - DNA, 607 bp, Homo sapiens
attttttttttttatggggggaagggatctttgttgttgttgttgtttttgctttctgtttgttagtttttcttctaacagtcaggccccttttctccaagtctgctgcagtttgctgaaatttcaccccagaccctgtttgcctgggtatcaccagtggaggctgcagaacagcaaagattgctgcctgctccttcctctggaagcttcatcccagaggggcactggcctgatgcccgcgggtctcctgtatgagctgtctgtcgacccctgctgggaagcctctcccagtcaggaggcacagggtcagggacccacttgaggaggcagtctgtcccttaggagagctggtgcgctgccttgggaaaatatctcccttgtcaggatcagccactctcttcagagctggcaggcaggaaagattaagtaccmtgaacctgagaccacagctgcccctccccccaccccaggtgctctatcccagggaggtgacagttctgtctgtaagcccctgactagagctgctggatttcctgcagatgccttgcccagtgaggagaaatctagagaagcagtctgaccacagccactttgctgtgctgtggtg

SEQ ID NO: 443013 - DNA, 607 bp, Homo sapiens
attttttttttttatggggggaagggatctttgttgttgttgttgtttttgctttctgtttgttagtttttcttctaacagtcaggccccttttctccaagtctgctgcagtttgctgaaatttcaccccagaccctgtttgcctgggtatcaccagtggaggctgcagaacagcaaagattgctgcctgctccttcctctggaagcttcatcccagaggggcactggcctgatgcccgcgggtctcctgtatgagctgtctgtcgacccctgctgggaagcctctcccagtcaggaggcacagggtcagggacccacttgaggaggcagtctgtcccttaggagagctggtgcgctgccttgggaaaatatctcccttgtcaggatcagccactctcttcagagctggcaggcaggaaagattaagtaccatgaacctgagaccacagctgcccctccccccaccccargtgctctatcccagggaggtgacagttctgtctgtaagcccctgactagagctgctggatttcctgcagatgccttgcccagtgaggagaaatctagagaagcagtctgaccacagccactttgctgtgctgtggtg

SEQ ID NO: 443014 - DNA, 495 bp, Homo sapiens
ggccaaacatgttcccattaaggcctttgaacttactatttatcttgtgtgcatatgtgaatatgtccacacaatttattctcttattttgttcaagatgctgcttcatgagggcaggggctttgttttgtttactgctgtgttctcagggcctataactgtgctcatagtaggtgctcaatacatagygaatgaatatattgcatgactcaacatttagatctaggatgccactatttaccaagacctacccagtggcgagcccagctgtctgtcgttttacctgtttatcttaggaaacataataggctggagtgtacttggtggagctattaatggacacatctgagtagcggagggaggcagaggcatgagaaacaagtaggcagtggcatattgcatcatctgggatgttatacacacatgttggatctttacattgctagatgataagcccctttaaggtgcttgggtcacacttaaggaagcttaata

SEQ ID NO: 443015 - DNA, 569 bp, Homo sapiens
cttgtgtgcatatgtgaatatgtccacacaatttattctcttattttgttcaagatgctgcttcatgagggcaggggctttgttttgtttactgctgtgttctcagggcctataactgtgctcatagtaggtgctcaatacatagtgaatgaatatattgcatgactcaacatttagatctaggatgccactatttaccaagacctacccagtggcgagcccagctgtctgtcgttttacctgtttatcttaggaaacataataggctggagtgtacttggtggagctattaatggacacatctgagtagcggagggaggcagaggcatgagaaacaagtaggsagtggcatattgcatcatctgggatgttatacacacatgttggatctttacattgctagatgataagcccctttaaggtgcttgggtcacacttaaggaagcttaatagcaacttgcctaaagttgtccatatattgatattcaatgacttttattaaattaatgaataacttgatattgaccttataaagctacatagttgagaattacttaaaataagaatat

SEQ ID NO: 443016 - DNA, 548 bp, Homo sapiens
gtttgcttactgtagccttgtagtatagtttgaagttggataatgtgatgtctccagcttcgttctataaccctattaaaaaatgggcaaagggcatgaatagacacttccgaaaagaagacatatatgtggcccacaaatatatgagaaaatgctcattatcactaatcattagagaaatgcaaatcaaaaccacagtgagataccatctcatgccaggcagcatggcaattattaaaaagtcaaaaaagaacagatgctggtgaggctgtggggaaaaaagaacaattatacactactggtaagaatgtaaattagttcagccactgtgaaaagcagcgtgtatatttctcaaagaacttaaaacagaactactatttgacccagcaatcctactactgggtatacacccaaaggaaaataaatcgttctaccaaaaggtacctgcactcatatgttcattgaagccatattcacaatarcaaagccgtggaattaaccaagatgcccatcaacagtggactggataaagaaaatgtggttcatat

SEQ ID NO: 443017 - DNA, 602 bp, Homo sapiens
gcttcctctgtcattcttttcttctctcccctcctccttcctgacctttcttccttcctttgctttactgaggaatttcaaagcaaatctcagatctcattccatttcactcctacgtacttcagtatgcatctatacaacatgcaaactttttcctatrtaatcttaatgccattatcacatataataaatgcaaacgtaatatttttgttatgatttagtaataagttcatactaaatttcccagactttctaaaaatatctttttacgtttgatatgtttgaatcagaattcaatgttcacaaatcacatttgattgttttagttctttacctaccttgatccttttctcttttttttttcatgcaatcgacttaccactgacactggattagttgttttcttgtagaatttcccacagcttggatttgtttgattgcttccttgtgtgtcatttaatttgctcttttatgtcccataatttctataaatagaagccagctctagacttttaaggagtctaggtgtatatattttttttcagctggagtacttagtagaagattctgtgggattcatattataccagataaggaggaac

SEQ ID NO: 443018 - DNA, 602 bp, Homo sapiens
gcttcctctgtcattcttttcttctctcccctcctccttcctgacctttcttccttcctttgctttactgaggaatttcaaagcaaatctcagatctcattccatttcactcctacgtacttcagtatgcatctatacaacatgcaaactttttcctatataatcttaatgccattatcacatrtaataaatgcaaacgtaatatttttgttatgatttagtaataagttcatactaaatttcccagactttctaaaaatatctttttacgtttgatatgtttgaatcagaattcaatgttcacaaatcacatttgattgttttagttctttacctaccttgatccttttctcttttttttttcatgcaatcgacttaccactgacactggattagttgttttcttgtagaatttcccacagcttggatttgtttgattgcttccttgtgtgtcatttaatttgctcttttatgtcccataatttctataaatagaagccagctctagacttttaaggagtctaggtgtatatattttttttcagctggagtacttagtagaagattctgtgggattcatattataccagataaggaggaac

SEQ ID NO: 443019 - DNA, 584 bp, Homo sapiens
tataattatataaaacttctgtacagagactgaatcctaagaaaatatatataatatgtcacttcagggttaaaacattatatattaatagacataaatatatgcattaggaaaatacatttatacatgtataggaagacgactggaaggacgtactctgaaagatcagaatcaggagcagtaggtggaggaagggaaagagtttcattttttattttcacatctgttttgggtaagtattaattttgcattttttataatttaaaaattaaaataacaaattcattgtaaaaagaagcagaactggtcaaggaagtgaataattgaacaatccacttatgcatcaattctggaagaaataaaaacattttccctatraagaaagagttgttagcattgtattcctataaaaaggagagcatagtattatttactataatttattaattatatttattattaataaatatattagcaaacaaaaaggggtgttctagagcattactttacagccctttaaaatactgaattataggggcgttgattcctatttctgtatcataagcctctcgtgttttacttgt

SEQ ID NO: 443020 - DNA, 561 bp, Homo sapiens
ctggaagagagaaaaaaggactggatcctggaacagaaaagtctgttggggaaaaaacagttaaatccaaataaagtgtgacattcatcatactcaccaatgctggttccttagttgtgacatatgtaccattcagaacaggggaaactgggtgaggagtacatgtgaattctctgtactatctttgcaacttttctgtaaacctaaaactattctaaaagaaaattttatttaattttgttcatgtgagagcaagtttcagtatgtttcctaaaataagaaactttgaattaaaagttgctttgctctgggacaatcaatacaatagacatcttagttatgcaaatataatacaaggatgtatttttcatttttgcrgaaaacctaagtgcagtggaataacccaaatgatagctatttcagaggaagaagcttagctgtctggttaggtaagctagctatgtaataagtttggccaacttatgactatgcagactttttttttttaatttgcaaagaatatgtatgagtggtttaaattattgtgtgtcctggtacaga

SEQ ID NO: 443021 - DNA, 561 bp, Homo sapiens
ctggaagagagaaaaaaggactggatcctggaacagaaaagtctgttggggaaaaaacagttaaatccaaataaagtgtgacattcatcatactcaccaatgctggttccttagttgtgacatatgtaccattcagaacaggggaaactgggtgaggagtacatgtgaattctctgtactatctttgcaacttttctgtaaacctaaaactattctaaaagaaaattttatttaattttgttcatgtgagagcaagtttcagtatgtttcctaaaataagaaactttgaattaaaagttgctttgctctgggacaatcaatacaatagacatcttagttatgcaaatataatacaaggatgtatttttcatttttgcagaaaacctaagtgcagtgraataacccaaatgatagctatttcagaggaagaagcttagctgtctggttaggtaagctagctatgtaataagtttggccaacttatgactatgcagactttttttttttaatttgcaaagaatatgtatgagtggtttaaattattgtgtgtcctggtacaga

SEQ ID NO: 443022 - DNA, 513 bp, Homo sapiens
ggacagatattggagagaggagaaatacaaaatgttcttttgtgaaatgagagaacagtaatacaagagaagtgtggcagtattgcttgggcacttgggagtgttctttgagatctggatcatgaattgaatagtagttagtaatgattgtgtattgtatggcaggaaaattagtctgttagagagcagatggagatttggtgtggagttgggtttaactagcactgagtttgtttccttttcctagtaagaatgycatagaagaagatgaggagaagagtttagagtacattcaatgggatgattacagtgatgattaatggaaaccaagctgggagcagtgagaatataaagggaatgagaaagttttaaaaatttgccaatggactggagaaccaactacctttggagttgggatgttgaaatagatgatctggaaagacaggaattggtaaagtataggctgtttgaagattttggaagtggagcaatgagtactgatactgaaatttc

SEQ ID NO: 443023 - DNA, 597 bp, Homo sapiens
atcttcttaatttattcagaagaataaaataaacctggcctggaaaatctgaaatgggagaagaagttgtagccttgctaaacctgtctcacaggtgagtaaatataatagagaatgcattttctttttagtggtgtctagggcaattttttgagatattaatttttaatttgttctattgtttttctattgttcaattcctagaagatagcaaagccttcatactcacttgactcygggaaggattgtgtcacagagtaaaagaagaaattgcttatagactacaaaggctaacatggagatagaagaaccacatggagcttggaaaatgggaatctcagtaataacataatggctgtgagtctgcaggggtgtcctccagtgcttttgttcttgttaaatccccaaggacctttgaaggatagtggggaggggaatcctccaaatacctaagattaaatttcctactggcttggtaggatggaacttgtaaatgaaattaaatttatttatattattattgttgttataattattattataatttatttttgacattaggcaccaaacaagaccaatcataatttttggctcata

SEQ ID NO: 443024 - DNA, 495 bp, Homo sapiens
caatgactacacacctattagaatggctaaaatccaaaacagtgacaacaccaaatgctgatgagtatgtggagcaacagaaactctcattcattgttcctgggaatgcaaaatggaaaagacactttagaaaatcatctgccagtttcttacaacactgaatatacttttatcatgtgatctagaaatcatgctccttgatatttacccaaatgakttaaaaacttttatgtccacataaaaaccaggacattaatgtttatggcaactttattcacaattgccaaaacttggaagcaagcaagatgtccttcagtaggtgaatatgtaaataaactgttatacattcaggcaatggaatattatttaacagtaaaaataaatgagctctcaagccgcaaaaagatacagaggaaccttaaatctacattgctatcattgaaagaagccaatccaaaaaggctaacatactgtatgattccaacaatataacat

SEQ ID NO: 443025 - DNA, 633 bp, Homo sapiens
catgtctctttatcaccttataattcctcaatctttctttgtctttcatgacctcgacattcaaggtatacaagccctcagtttggggttatctgatgtttcctcataaataggttatgcatttatggaaggattagcacagaagtaaagtgttgtgtccttttcagagcataataataagaagcacatgatatctctgtctcattattagtgacatttactttgatcacttaaggtgatttctgccatgtttcctcagtgtaaatcttttttccctttgtaattaataaataccttctggagacctrctttgatgtgatgtaaatgtcctatttttcatcaaattttcaaccattagtttctttcttggttcttggctaaaattattattactacagtggctgccaactggtgatgcgtctactttttaattcctttcaagttctcccttctctttcagcaacatcaaatatttctgttattctgggagtgatataacactaactaagcagcagcattgcttaattgcattctcagaactgatcagattctaatcagtctaattaggtttgtgtcattcagtacattctagggcattgctaatggggctgccatcaagcagatacttgaaaa

SEQ ID NO: 443026 - DNA, 531 bp, Homo sapiens
gtataatttatagttgcctatgtaaggatggtgcatttcttgaaggcaggaaatgtctacttcatctctgtatactagtatctaccagagattagcacatattaactgattagtaaatgcaggataaatagaactgatttaaacatgttatcatttgacttcaaaacaattattatagtcaacactaggaaaatrtaagttgtttacatttggctttggaatgtacagggccaaagggaggcttataactgaatgtggatgagtatagtatcctgggaatttattaatgaagctctaaagcatctcaattctctcagttcaactccctattgaaacttctgcttctctctgaagctgttatatgggtttcatctttccctttgtatcaatggggaaggtaattaagtgtttcaaaaccaaattatgtttcaaagttctgtctttgtgctgtgtcaggataaggacaaaggaggaaattagtgacttcctttagtgacttcttggtatcgtaggagggcattacaaatttct

SEQ ID NO: 443027 - DNA, 531 bp, Homo sapiens
gtataatttatagttgcctatgtaaggatggtgcatttcttgaaggcaggaaatgtctacttcatctctgtatactagtatctaccagagattagcacatattaactgattagtaaatgcaggataaatagaactgatttaaacatgttatcatttgacttcaaaacaattattatagtcaacactaggaaaatataagttgtttacatttggctttggaatgtacagggccaaagggaggcttataactgaatgtggatgagtatagtatcctgggaatttattaatgaagctctaaagcatctcaattctctcagttcaactccctattgaaacttctgcttctctctgaagctgttatatgggtttcatctttccctttgtatcaatggggaaggtaattaagtgtttcaaaaccaaattatgtttcaaagttctgtctttgtgcygtgtcaggataaggacaaaggaggaaattagtgacttcctttagtgacttcttggtatcgtaggagggcattacaaatttct

SEQ ID NO: 443028 - DNA, 495 bp, Homo sapiens
gaggtcactttctgcaggcaccactgtagcccaagataaagataaaaatgtacctgagattcacagcctctgaatatgcaggaccacaattcccattacatatgtacactgaatgtgaagaaaacaaaacaaaataacaacrgtaacaaaactgtataaatatagcttgtgtaaggggttgttatctaccccacagaagcagactggactctactcaagatttccaaggaaactatcttttgttaatgctttgaaaatgtcctctctgttattttctccgctttttctttatgaaactcctattttcttaggatactgaacctcctagattaagcctttaattatcttagcttttctcccttattatctatttctttaatgttacttcttcctgggtgttttccttgacttcatcttcttgaatgatgagcattcttaatttcaactataatttttaatttctaagtgctttttgctctgaccagactggtttca

SEQ ID NO: 443029 - DNA, 563 bp, Homo sapiens
ggctggttattcagtctactacctttattttactgatgagggagctgaggctccaaaatgcctttgagaccccagagagaagacagaaaacttctttctcatgaatatattatagcctaatattgacatgttactagcagttacaaacataaatgttgctatgacttgtatgggagttaatttttcttcaggcttgaaatgtgatgattcccaaagccatcttttygtgtaaattagataatttcctggattaatttgtatcttgggaaattactgattgcagctattattttagaagtgtgactgatagcttactgagattctgagttgctattttgttttgggaagcatttttagagagtattataataatttgacagatatgcaaaaggaaaggaagtgaaaatgagagaacattaatacagttgcccttgggctttctcctccccttctcagagggcctggtccttcgcaaggtgttttttattattactttttaaaaatttcctggtctcctatccctgcctccttcaacttttccttttcccatttcttcccattcc

SEQ ID NO: 443030 - DNA, 563 bp, Homo sapiens
ggctggttattcagtctactacctttattttactgatgagggagctgaggctccaaaatgcctttgagaccccagagagaagacagaaaacttctttctcatgaatatattatagcctaatattgacatgttactagcagttacaaacataaatgttgctatgacttgtatgggagttaatttttcttcaggcttgaaatgtgatgattcccaaagccatctttttgtgtaaattagataatttcctggattaatttgtatcttgggaaattactgattgcagctattattttagaagtgtgactgatagcttactgagattctgagttgctattttgttttgggaagcrtttttagagagtattataataatttgacagatatgcaaaaggaaaggaagtgaaaatgagagaacattaatacagttgcccttgggctttctcctccccttctcagagggcctggtccttcgcaaggtgttttttattattactttttaaaaatttcctggtctcctatccctgcctccttcaacttttccttttcccatttcttcccattcc

SEQ ID NO: 443031 - DNA, 558 bp, Homo sapiens
tctccaatgtaatcaacttatcattgaatgggtggcagatttactggataggtagtgccttatcagaaattcagcaatgatttctgtggctgccaggtcatttagcaatgaaaggcaatatattagtcttggtggtaatacacaccgtttggccctggctaagcatccatctttgccttcatctctactttatttatatcctgactggtccaacactaggaagaccaattgcagaggctagctagtgttgacccaccaagtctttcttctgcttggttgtataatgccttttctgtggtagaagctctctggtgggctaatgccaccatatgtgatacaaatactttgtgcccactttcagagtttcccatttttccccctttccaagcttccttatccgtgagtttcaaatgcttttctttccaaatctctgactaaccagtcaagctttcaactgtggtccaataatctataaatattctatctgtgggatatggcatrttaatgatgttcacaaattatttgacactactcccattaagaggtgaatttcattta

SEQ ID NO: 443032 - DNA, 625 bp, Homo sapiens
ttatttttctgtatatacttccctggctcctgttgcatatattggttaggtcccacatttgtttggtgtagaggccctttttctcttagtagtctcagcactttctcagccaagttttgtattgagttactgttattattagactggtatcctagaaaggaagtataggtagatcctgaggggataatttgttttctagaaaggcagagcctctccatgatattcaagaattgtgtaagcactagctagcttttaacaggaaaaagtaggccaattttgtaggccaaaaggtccagggaaattccaagaatttctactgcatcaatccagatgactccattctatggcaaaattccagtttcycagttcagggcctttacgttgaagtccacaccagatggagttgaaaatgtaacatcacttagatttcccttaattttaagaataacctctaagcctgatcaccctttttcccttctgggtgtagaagatgtgttatgctgccaaattggctctctgtctttcacacttagcttttaactggtaattaatcacactcaccttttcttccctttctctaaagcatctactggccccagcaatagccatccaattccatatggag

SEQ ID NO: 443033 - DNA, 625 bp, Homo sapiens
ttatttttctgtatatacttccctggctcctgttgcatatattggttaggtcccacatttgtttggtgtagaggccctttttctcttagtagtctcagcactttctcagccaagttttgtattgagttactgttattattagactggtatcctagaaaggaagtataggtagatcctgaggggataatttgttttctagaaaggcagagcctctccatgatattcaagaattgtgtaagcactagctagcttttaacaggaaaaagtaggccaattttgtaggccaaaaggtccagggaaattccaagaatttctactgcatcaatccagatgactccattctatggcaaaattccagtttctcagytcagggcctttacgttgaagtccacaccagatggagttgaaaatgtaacatcacttagatttcccttaattttaagaataacctctaagcctgatcaccctttttcccttctgggtgtagaagatgtgttatgctgccaaattggctctctgtctttcacacttagcttttaactggtaattaatcacactcaccttttcttccctttctctaaagcatctactggccccagcaatagccatccaattccatatggag

SEQ ID NO: 443034 - DNA, 625 bp, Homo sapiens
ttatttttctgtatatacttccctggctcctgttgcatatattggttaggtcccacatttgtttggtgtagaggccctttttctcttagtagtctcagcactttctcagccaagttttgtattgagttactgttattattagactggtatcctagaaaggaagtataggtagatcctgaggggataatttgttttctagaaaggcagagcctctccatgatattcaagaattgtgtaagcactagctagcttttaacaggaaaaagtaggccaattttgtaggccaaaaggtccagggaaattccaagaatttctactgcatcaatccagatgactccattctatggcaaaattccagtttctcagttcagggcctttacrttgaagtccacaccagatggagttgaaaatgtaacatcacttagatttcccttaattttaagaataacctctaagcctgatcaccctttttcccttctgggtgtagaagatgtgttatgctgccaaattggctctctgtctttcacacttagcttttaactggtaattaatcacactcaccttttcttccctttctctaaagcatctactggccccagcaatagccatccaattccatatggag

SEQ ID NO: 443035 - DNA, 571 bp, Homo sapiens
gtagtgttcagctctcagttatcaatagctctcttgacatcttattaaattggaaaggctttcagactcaagwttaaacaacatgtatgaatctctttatattatttgaaatatacattatgttcacataaactattatttctattatcttcattttgtatagcacaaaatgaattatataaattattattaccaggcccttagagacggttattttctacaaagaaagtagccagatagaaaaaacatcaaatgtaaaatcacaaaagaaaatgcctccaatcataaccaacatgttttttttccaaggaagatgaagcatatcagtcatcagctattctctaccaatgtatatgatatgtggataaataaataaatatctccccaattttataagatatattttttcctcccagattcagataaattgaattaactaaaaatagatgttcttatttaaatgatgtatctaagacttaagcccaagatattgaaaactatttttagtaaaatggaattgggggatgtatcttaaaagctgtaagcagaatttgtaaaataaattgatgag

SEQ ID NO: 443036 - DNA, 571 bp, Homo sapiens
gtagtgttcagctctcagttatcaatagctctcttgacatcttattaaattggaaaggctttcagactcaagtttaaacaacatgtatgaatctctttatattatttgaaatatacattatgttcacataaactattatttctattatcttcattttgtatagcacaaaatgaattatataaattattattaccaggcccttagagacggttattttctacaaagaaagtagccagatagaaaaaacatcaaatgtaaaatcacaaaagaaaatgcctccaatcataacmaacatgttttttttccaaggaagatgaagcatatcagtcatcagctattctctaccaatgtatatgatatgtggataaataaataaatatctccccaattttataagatatattttttcctcccagattcagataaattgaattaactaaaaatagatgttcttatttaaatgatgtatctaagacttaagcccaagatattgaaaactatttttagtaaaatggaattgggggatgtatcttaaaagctgtaagcagaatttgtaaaataaattgatgag

SEQ ID NO: 443037 - DNA, 589 bp, Homo sapiens
ggctgggcatggtggctcacacctgtaatcccagtactttgggacgccaaggtgggaggatcacttgaggtcaggagtccaagaccagcctggccaacatgttgaaaccctgtctctactaaaaatacaaaaattagccaggtgtggtggcacacgcttgtaatcccaactactcaggaggctgaggcaggagaagtgcttgaactagrcaggtggagtttgcagtgagcgaagattgtgccactggactccaacctggccaacagagcgaaactctgcctcaaaaacaaaacaaaacaaaacaaaaaataaataaaatacagttttattctttcacactgtctctcctcctttgggagcattttgcatttttggcccttattccctttcatagaaatgttgagctagtaatgtcaagattattactgataaaagggaagcttcagtgagtcagttcagtttttatcttataataaactcagatgatttggggctactttgacctagttcccacaaattacacatttaatatagtattttattataaatttgatattatgaaaaatgtgactttaatatgctagtagac

SEQ ID NO: 443038 - DNA, 589 bp, Homo sapiens
ggctgggcatggtggctcacacctgtaatcccagtactttgggacgccaaggtgggaggatcacttgaggtcaggagtccaagaccagcctggccaacatgttgaaaccctgtctctactaaaaatacaaaaattagccaggtgtggtggcacacgcttgtaatcccaactactcaggaggctgaggcaggagaagtgcttgaactagacaggtggagtttgcagtgagcgaagattgtgccactggactccaacctggccaacagagcgaaactctgcctcaaaaacaaaacaaaacaaaacaaaaaataaataaaatacagttttattctttcacactgtstctcctcctttgggagcattttgcatttttggcccttattccctttcatagaaatgttgagctagtaatgtcaagattattactgataaaagggaagcttcagtgagtcagttcagtttttatcttataataaactcagatgatttggggctactttgacctagttcccacaaattacacatttaatatagtattttattataaatttgatattatgaaaaatgtgactttaatatgctagtagac

SEQ ID NO: 443039 - DNA, 588 bp, Homo sapiens
tgcaaaaaggaaatagggaagagataaagcccaactgctcactaaaggaaaagggaaaatgagataaataaggtttgctggattgaaaaagggaggtcaaagaggcccagttaggatttctagaagtaaatgtggtatratctgatctcagctggggtagacaacaaacaaacatagaccagcatcctaactctatattgtgagcctttgagaagacctgactcctgatcaacagtttagaccccttcccagtgccccaaaaagaaggagaaggaaaagaagaaactctgtataaaagaatcccaatctctgcgttccaggagtgatactcctttccagcctagagactagaggtggggccaaatttgccttcatggaaaagctataggggtgaccggaagccccaggtggagctcataatctattggagttcaaaaacaggcagagaaccttagctttagtagacacgggtgcataatgtatcttaattcatgaaatccagaaagacagctgagtaaatgggcagctatagatggtcattgggggcaggaggggcaaataatctgagtgaaacaaactcctcccctc

SEQ ID NO: 443040 - DNA, 508 bp, Homo sapiens
gaaaagaagaaactctgtataaaagaatcccaatctctgcgttccaggagtgatactcctttccagcctagagactagaggtggggccaaatktgccttcatggaaaagctataggggtgaccggaagccccaggtggagctcataatctattggagttcaaaaacaggcagagaaccttagctttagtagacacgggtgcataatgtatcttaattcatgaaatccagaaagacagctgagtaaatgggcagctatagatggtcattgggggcaggaggggcaaataatctgagtgaaacaaactcctcccctccttggttttgagtggagtcccctggtacttactctacggttcccctgttgcttactctactgtctttatctcacgtatttcagaaaatatcttgggtatgaatgtccttttaggatgtgctttataaatgtctgtgggggaatgccacttatcactctggctggtaaaatgtatttcaatcctacaactccct

SEQ ID NO: 443041 - DNA, 508 bp, Homo sapiens
gaaaagaagaaactctgtataaaagaatcccaatctctgcgttccaggagtgatactcctttccagcctagagactagaggtggggccaaatttgccttcatggaaaagctataggggtgaccggaagccccaggtggagctcataatctattggagttcaaaaacaggcagagaaccttagctttagtagacacrggtgcataatgtatcttaattcatgaaatccagaaagacagctgagtaaatgggcagctatagatggtcattgggggcaggaggggcaaataatctgagtgaaacaaactcctcccctccttggttttgagtggagtcccctggtacttactctacggttcccctgttgcttactctactgtctttatctcacgtatttcagaaaatatcttgggtatgaatgtccttttaggatgtgctttataaatgtctgtgggggaatgccacttatcactctggctggtaaaatgtatttcaatcctacaactccct

SEQ ID NO: 443042 - DNA, 508 bp, Homo sapiens
gaaaagaagaaactctgtataaaagaatcccaatctctgcgttccaggagtgatactcctttccagcctagagactagaggtggggccaaatttgccttcatggaaaagctataggggtgaccggaagccccaggtggagctcataatctattggagttcaaaaacaggcagagaaccttagctttagtagacacgggtgcataatgtatcttaattcatgaaayccagaaagacagctgagtaaatgggcagctatagatggtcattgggggcaggaggggcaaataatctgagtgaaacaaactcctcccctccttggttttgagtggagtcccctggtacttactctacggttcccctgttgcttactctactgtctttatctcacgtatttcagaaaatatcttgggtatgaatgtccttttaggatgtgctttataaatgtctgtgggggaatgccacttatcactctggctggtaaaatgtatttcaatcctacaactccct

SEQ ID NO: 443043 - DNA, 588 bp, Homo sapiens
tgcaaaaaggaaatagggaagagataaagcccaactgctcactaaaggaaaagggaaaatgagataaataaggtttgctggattgaaaaagggaggtcaaagaggcccagttaggatttctagaagtaaatgtggtataatctgatctcagctggggtagacaacaaacaaacatagaccagcatcctaactctatattgtgagcctttgagaagacctgactcctgatcaacagtttagaccccttcccagtgccccaaaaagaaggagaaggaaaagaagaaactctgtataaaagaatcccaatctctgcgttccaggagtgatactcctttccagcctagagactagaggtggggccaaatttgccttcatggaaaagctataggggtgaccggaagccccaggtggagctcataatctattggagttcaaaaacaggcagagaaccttagctttagtagacacgggtgcataatgtatcttaattcatgaaatccagaaagacagctgagtaaatgggcagctatagatggtcaytgggggcaggaggggcaaataatctgagtgaaacaaactcctcccctc

SEQ ID NO: 443044 - DNA, 629 bp, Homo sapiens
cacccttttccaatgcagaggatgggccatcaattgccaaagatataaggcccaggaccagctgtraagttcctaagggttgcttggttgggtaacacatgccttatttcaggcagtcattgacaaaatacatttttacttgcctaaaacagttaaataagttacaacattgtccaggccttttgggatattggcaggctttagtccacatttagctcaatatttgcatcccctatacagaataataaatgaagaaatctagttgctgctgggataaataacaagaagaagcatttgctaaggctaaaatactagtagtttaaacacaagcattagattccccatttcccaggacatcagtgtctttagatgtgaccataagggtcacatcttgcaagtccaacacgagaaagaagttcccctaggattctggtcacagccatgaaagtatgttgaaacccagtgttccccagttgaacaggtcccaggcatatacaaagctctgcagcaagttgaacccgtaagtgctgctttgctggaaacagagagaacaggtctccctactaaggtctggctagagggattgttttccaggtctgtctcaactattgctcaggccttcactttac

SEQ ID NO: 443045 - DNA, 476 bp, Homo sapiens
ttcttttcttctccactcctatcaccaccaacattgacactcaaataacacttcagttgtttccctcctaccattattgcctccacttgctccagaacaattcactctctgtgcagcaggttgagggtcatttttatcttcatataaattatttaaaggcagtccactaattataatatataatagtttccatttgaagctagaatgtattccaacaattttccaaagcctgctggtcatatggtaagtgtgtgtctaattttataagaaactgccaagcagtttttcagtgtctgtaactgctttatattttcaataaaagtgwcataagttctttctccatatctgcagtgacagttcctattgtcgtttaaattttttttgaaattagagtggtctctaaatagtaatttatttcctttacctcttgttgtttaatactgtagaatatcttttttacaggcttattggccact

SEQ ID NO: 443046 - DNA, 509 bp, Homo sapiens
gatcatggacttatatctaaaatatacaaggaactttgaaaccccaatgaccaaaaaaaaaaaaaagaaccaattgaagatggacaaaagatctgaatagagatctcactaaagaaaatatgctaatagcaaataaacatgaaaaaatgctcaatattatttgtcacaaggaaatgtaaactaagcaacagtaaggtactactataggcctattaaaatttataaaattaaaaaactgacaatgccaattgctggtgatgataaggaacaatcagaacttgcgtgtgttgttggtaggaaggcaaaatagtccagtcattttagaagacacttgacagtttctcataaaggtaaacattgtattaccatatggtcctgcatttacactcgtatgtatttactcaaatgatttgaaaatgtacatacatgaaaacaccyacagcttcatttataattgccaaaaactagaagcaactgaattgtgttttaataagtacatgcataaatac

SEQ ID NO: 443047 - DNA, 581 bp, Homo sapiens
tattttcaacttgccttactccacttctccctttaaaaatctcttctggccctcacccttctctcccaatataagtaacccacataaacaacttgctctacttttcacctcaattactaacatcaacatcaatgcacatacacagacacacacatatttacatttacacacaagagtgtcatcattatgttacttctaaaaatgcaatcatattatatatccttttataaattttacttttgtcactttataatactgccacgaataactggcaaatgtccaatttattgtattaatagctatagcctttcgtaaagtaaagacaccataakgtattgatctcattctctccttgatcttcattgacatcagtgtaatggaatctctcaatgtgacttcaatttacatttatgtaactaactactgtaaattttaatatctctgtgtctattggtcaattggatttgctgtcctagaaattgtttattttgatattttattcatatttctattgggtttttggttattttctgattaacttgtggctagtgtgggccttcaataagtcatctgcactgaaa

SEQ ID NO: 443048 - DNA, 581 bp, Homo sapiens
tattttcaacttgccttactccacttctccctttaaaaatctcttctggccctcacccttctctcccaatataagtaacccacataaacaacttgctctacttttcacctcaattactaacatcaacatcaatgcacatacacagacacacacatatttacatttacacacaagagtgtcatcattatgttacttctaaaaatgcaatcatattatatatccttttataaattttacttttgtcactttataatactgccacgaataactggcaaatgtccaatttattgtattaatagctatagcctttcgtaaagtaaagacaccataatgtattgatctcattctctccttgatcttcawtgacatcagtgtaatggaatctctcaatgtgacttcaatttacatttatgtaactaactactgtaaattttaatatctctgtgtctattggtcaattggatttgctgtcctagaaattgtttattttgatattttattcatatttctattgggtttttggttattttctgattaacttgtggctagtgtgggccttcaataagtcatctgcactgaaa

SEQ ID NO: 443049 - DNA, 581 bp, Homo sapiens
tattttcaacttgccttactccacttctccctttaaaaatctcttctggccctcacccttctctcccaatataagtaacccacataaacaacttgctctacttttcacctcaattactaacatcaacatcaatgcacatacacagacacacacatatttacatttacacacaagagtgtcatcattatgttacttctaaaaatgcaatcatattatatatccttttataaattttacttttgtcactttataatactgccacgaataactggcaaatgtccaatttattgtattaatagctatagcctttcgtaaagtaaagacaccataatgtattgatctcattctctccttgatcttcattkacatcagtgtaatggaatctctcaatgtgacttcaatttacatttatgtaactaactactgtaaattttaatatctctgtgtctattggtcaattggatttgctgtcctagaaattgtttattttgatattttattcatatttctattgggtttttggttattttctgattaacttgtggctagtgtgggccttcaataagtcatctgcactgaaa

SEQ ID NO: 443050 - DNA, 581 bp, Homo sapiens
tattttcaacttgccttactccacttctccctttaaaaatctcttctggccctcacccttctctcccaatataagtaacccacataaacaacttgctctacttttcacctcaattactaacatcaacatcaatgcacatacacagacacacacatatttacatttacacacaagagtgtcatcattatgttacttctaaaaatgcaatcatattatatatccttttataaattttacttttgtcactttataatactgccacgaataactggcaaatgtccaatttattgtattaatagctatagcctttcgtaaagtaaagacaccataatgtattgatctcattctctccttgatcttcattgacatcagtgtaatggaatctctcaatgtgacttcaatttacatttatgtaactaactactgtaaattttaatatcyctgtgtctattggtcaattggatttgctgtcctagaaattgtttattttgatattttattcatatttctattgggtttttggttattttctgattaacttgtggctagtgtgggccttcaataagtcatctgcactgaaa

SEQ ID NO: 443051 - DNA, 606 bp, Homo sapiens
ttgatcattttttcatatacctgttgtccctttgtatgtcttttttggagaaatgtctatttggattttttgcccwtttaaaaatttagttgtatctttttgctattgagttgtttgagttcctaatatattctggatactaaccccacttcagatgtgtaacttgcaaatattttatccaattctgtaggttatctctttactctgttgattattttcttagctgtgcagaagcttttcagtttgaaataatgcgtttgtctacttttgcttttgttgtctgtgctttgaggtattgaaaaaaaaaaaaacaactcttccccagatcaatgttaaatgtttctcctatgtattcttctagtagttttacagttgcgtgtcttacatttaaatctttcatccattttgagttgatttttgtaggcagtgagagatgaggttctagtttcattcttctgcatgttgatatccagtttacccaacaccatttgctaaagagactgtcctttcctcaatgtgtgttcttggagcctttgtcatagattaattgactgcaaatgcatggatttatttctgggtcatatagatactctattcaattggtct

SEQ ID NO: 443052 - DNA, 606 bp, Homo sapiens
ttgatcattttttcatatacctgttgtccctttgtatgtcttttttggagaaatgtctatttggattttttgcccttttaaaaatttagttgtatctttttgctattgagttgtttgagttcctaatatattctggatactaaccccacttcagatgtgtaacttgcaaatattttatccaattctgtaggttatctctttactctgttgattattttcttagctktgcagaagcttttcagtttgaaataatgcgtttgtctacttttgcttttgttgtctgtgctttgaggtattgaaaaaaaaaaaaacaactcttccccagatcaatgttaaatgtttctcctatgtattcttctagtagttttacagttgcgtgtcttacatttaaatctttcatccattttgagttgatttttgtaggcagtgagagatgaggttctagtttcattcttctgcatgttgatatccagtttacccaacaccatttgctaaagagactgtcctttcctcaatgtgtgttcttggagcctttgtcatagattaattgactgcaaatgcatggatttatttctgggtcatatagatactctattcaattggtct

SEQ ID NO: 443053 - DNA, 622 bp, Homo sapiens
gccattatctggttaaataacacacacacacgcacacacgcrcacacacacacacacacacacacacacacacccgacaccataccacacagagttgtcccttggcatccatgaatgactggttccaggacctccttcagatgccaaaatctgaggatgttcaattcccttatagaaaatggcataatattggcaaataaactatgcccattctcctgtatacttttatttatttttattttgaaacagagtcttgctctctggaatacagtggagctgtaaaagcagaaggctctgaagctctcttcaagtgaattgactgtttcaaacaaggtgtgaggaagatcaagctaagggcactcttgataacaatgaaattttgctgattcattaagaggaggctggtaactccatgagagcaacaagctaaactatagtccagccacaagtttgccagagagaaaattagagaaagaagcaagtaagagccctcctggattggaacaaatctcaaagactgatcttatgcaaaggatcctatgtttaattggatcaaactgaaatggaatttatgcaccagaacattgttgaaaacaataaagaaatcatcctgcaaatagtg

SEQ ID NO: 443054 - DNA, 622 bp, Homo sapiens
gccattatctggttaaataacacacacacacgcacacacgcacacacacacacacacacacacacacacacacccgacaccataccacacagagttgtcccttggcatccatgaatgactggttccaggacctccttcagatgccaaaatctgaggatgttcaattcccttatagaaaatggcataatattggcaaataaactatgcccattctcctgtatacttttatttatttttattttgaaacagagtcttgctctctggaatacagtggagctgtaaaagcagaaggctctgaagctctcttcaagtgaattgactgtttcaaacaaggtgkgaggaagatcaagctaagggcactcttgataacaatgaaattttgctgattcattaagaggaggctggtaactccatgagagcaacaagctaaactatagtccagccacaagtttgccagagagaaaattagagaaagaagcaagtaagagccctcctggattggaacaaatctcaaagactgatcttatgcaaaggatcctatgtttaattggatcaaactgaaatggaatttatgcaccagaacattgttgaaaacaataaagaaatcatcctgcaaatagtg

SEQ ID NO: 443055 - DNA, 525 bp, Homo sapiens
ttctcagtgcaacctcaataattatataagacttttgtaatgattatttatcaagcactgtgatattctgttttaaatattgtttgctagctttgataaaaatacaatatatagcattccaaaagatatgtggccgcaacactggtaactaaactgtgtagtagagatctagtcaaaatgacctgagacaaatgaatccccaggcctcactaaataatatgtctttggtcattttttgcagatcctatttgaactcgttcttttgatatgctcagcaatattatgagtctagtttagtggttttattaaaattgtaaaattttcctttaaaacatgtattgaatgtttcaaaacaatactgactctcatcaaaggaaatcatgttaggtcagaatctataggaatttrttcacatgaaaaagctgtcacatgtcaaacagtgctatgaaattgatagctgacatttcaaagctggagcataatttttatcatcagcaatctagggtctatctctgggagttatac

SEQ ID NO: 443056 - DNA, 627 bp, Homo sapiens
ttcctttgatcacatctgattaccctttagggtcactttggagtaactgaaaagttttattaaaattctacccaacttgggccacaaaaactcatgcatctttgccctgcaaagcagtgataatatagcttcttttttgtgtttttaattttattttattttaggttctaggatacaygtacagaatatgcatgtctgatacataggtaaatgtgtgccatggtggtttgccgcaccatcacctagatattaagcccagcatgcattagttatctgtcctgatgctctccctccccttgtccccccaacaggccctggtgtatattgctccccttcctggttccatgtgttctcattgttcagcttccacttatgtgtgagaatatgtggtgtttggttttctgttcctgtgttaatttgctgaggatgatggcttccagcttcatccatgtccctgcaaaggacatgatcttattcctttttatggctgcacagtattccatggtgtatatgtaccacattttctttatccagactatcattgatgggcatttgggtgaatttcatgtctttgctattatgaatagtgctgcataaacatacatgtgcatgtatctttataacaga

SEQ ID NO: 443057 - DNA, 627 bp, Homo sapiens
ttcctttgatcacatctgattaccctttagggtcactttggagtaactgaaaagttttattaaaattctacccaacttgggccacaaaaactcatgcatctttgccctgcaaagcagtgataatatagcttcttttttgtgtttttaattttattttattttaggttctaggatacatgtacagaatatgcatgtctgatacataggtaaatgtgtgccatggtggtttgccrcaccatcacctagatattaagcccagcatgcattagttatctgtcctgatgctctccctccccttgtccccccaacaggccctggtgtatattgctccccttcctggttccatgtgttctcattgttcagcttccacttatgtgtgagaatatgtggtgtttggttttctgttcctgtgttaatttgctgaggatgatggcttccagcttcatccatgtccctgcaaaggacatgatcttattcctttttatggctgcacagtattccatggtgtatatgtaccacattttctttatccagactatcattgatgggcatttgggtgaatttcatgtctttgctattatgaatagtgctgcataaacatacatgtgcatgtatctttataacaga

SEQ ID NO: 443058 - DNA, 627 bp, Homo sapiens
ttcctttgatcacatctgattaccctttagggtcactttggagtaactgaaaagttttattaaaattctacccaacttgggccacaaaaactcatgcatctttgccctgcaaagcagtgataatatagcttcttttttgtgtttttaattttattttattttaggttctaggatacatgtacagaatatgcatgtctgatacataggtaaatgtgtgccatggtggtttgccgcaccatcacctagatattaagcccagcatgcattagttatctgtcctgatgctctccctccccttgtccccscaacaggccctggtgtatattgctccccttcctggttccatgtgttctcattgttcagcttccacttatgtgtgagaatatgtggtgtttggttttctgttcctgtgttaatttgctgaggatgatggcttccagcttcatccatgtccctgcaaaggacatgatcttattcctttttatggctgcacagtattccatggtgtatatgtaccacattttctttatccagactatcattgatgggcatttgggtgaatttcatgtctttgctattatgaatagtgctgcataaacatacatgtgcatgtatctttataacaga

SEQ ID NO: 443059 - DNA, 605 bp, Homo sapiens
atattagagattgattatttgaggactctcagaaatggcagaatatctaaataaaagcttatcttgacattatcaccattataatccttatatgagactaatgctttgcttttagaataaaacataataatctattaggatgtgtctgaagtaatgcagttctatgtgtactatctttcactgcaaatcattcaggcactttatttgatccttaatcataaatgtcattttaaaatcttttacattgtacagatgccaggagatccttttttatgctaaatttaatctcatatgcataaaacacttgtgaatttttctacatgtattttttatrgtatctcaacttataatcacattgaaaccatggactgtttttctttctaattcattccattgtttaatttttatttcaccgttccagccctctttctgtagcagttcagaaacatactacaaacttcaaaagccatttcaattttcattttacttttgcatttcttcctttttggatttatttttgttctactaatattttttaggcaactttcaatttgctttgaaatgctttcctttcatgtcactttttttctatttaaaaaaagcca

SEQ ID NO: 443060 - DNA, 575 bp, Homo sapiens
tagcagttaggagcatgggttctgaagcccagttccctagattcacataatggtgtcatattagctgaatgaatttgagtattttatgcaaccacttcctgactcaatgtgttcatcagtaaaatggggtaatattacttacctcgtagagtggttatgagggtaaacacatagaatagtatctggaacatagtaagtgcttaaaatattagttttaatagctatagatattttctgatacttataaatgcctttaatcaaacaattgctacattagtttttgtgtacagcatgtgtattaactatatgatgggaatcaatcttaacmtaagtttgagtcctcagtcttcgaactagaggttatgtgacattggcaagccactatctatgaatcttgaactagaaagtggatctgatacccccccatatctccatatctatatcattacaaaagcaagtgtgattatatttactgaatgcaagttataaaatcttatacagatgtgaaggcttgctatctattcatttaatcaattaacttcaaaatagttaaaaccacagtgattctgcagttg

SEQ ID NO: 443061 - DNA, 595 bp, Homo sapiens
gtccttggcatgaactgtttagaaagttatgcaaaataaatgcatttgacactcatggttcatcactcgtgagaagcaaagggtttactgactctatgcataatacctttgaccctatgcggagaaccgggracataatgctgctggttggttgctcctaagttcagtggacaaagtgatgaaagaaaatgatgaactcagggatcctatctcccagcttcagaagcaaatactgagccccaaatctgctaagattgagctgagagtcttatctcctgtagagaaagagctgaaattgtggaaaaatagacacaagttcttatcgtgtgagtggccgacctgcaacgaaaggtgcatgcccaacctcaccagatgtctactgttaaaggagggcatttgttggaaaagaatgggaccctgcaacttggaatggggaggtgtgggaaacacctttcccgtccccatagtggcaacatcccctcccccacccatgctgccatcagccttccacctttgaggagataaacccctgtgctgcctgaggcaatggtgatggcctccctgaggcagtttccaggcaagataatgttgattc

SEQ ID NO: 443062 - DNA, 638 bp, Homo sapiens
tagctatttaatacagctttgyggaataaattaaagagttaatctccatgcctttctccctttttcatttttttcataaccttttcacatataagtatgttgaaactttgaaagtgagattatttagaaaaataagaatctcataccccatggtttgccaatatttataaacaaataacagtagaaaacatgtttttgcatttaattttaaaactgttagatgaccttgttgacaataaaaacaaattatttacctaaattaaagctaaaaaatgatagaatgaataaaatagacatcagatctcttttgattgtttaatgtttttaaattaaatataagatatgcaacatcttaataaaaataagacacacaaactttttatttttctaaaattctcatgatttagcaaaaaagatcttcatggtataccacatttaccacaggctaaaatatagtttgcaaggcaggaaggttttcatattaagctttgcttattaattccctgaattagaatggctcttagaggagaaacaactaatttgcagtcagcttgaagaaattgaattgggtgatgatagctatatttaaagcttgtgaccttacattgtcctattatatgccttaagggcattaaaag

SEQ ID NO: 443063 - DNA, 624 bp, Homo sapiens
actgtgtaaatagagtaggaatgtgagtggtagttaagctggaatatttctacatgatattatatattctgctagtcaaatagcttcagttttactttcatattgatgaaatgaagctactgactccccaaatacccacattacttataatatkctgggcaaggaatacaataggaattgtaaagaaggcaatatggtaacactgaagagtcactgtgccacacagagactgcagttcagacacaggccacatgcagcatatctatctcacggcagccatttttaggttattattatcaagacatctaccaagaaaggttggctcttccatgaatttatggtgtcgggagggacacgtcatctagagcttcaggttggggattcgtaggaaaggtgattcaatgtgacatacagaaagtgctaatgggactgtaagataatttccttatagttaagaaagtagaattcaaaagaaggggaaatgaattaacatttacaagaagcttcctgacttctgttatttctataaattatagtaatgactgaattttggtgtgtgacagatttgctacatgataagatgatgagtaggatgtattagtgcaagaatgaacacagtgtcaa

SEQ ID NO: 443064 - DNA, 638 bp, Homo sapiens
actcatgtcttgggctttccactctcaaatattgacctgggtagctaaaaaatatcccctcagatgactgtgtaaatagagtaggaatgtgagtggtagttaagctggaatatttctacatgatattatatattctgctagtcaaatagcttcagttttactttcatattgatgaaatgaagctactgactccccaaatacccacattacttataatatgctgggcaaggaatacaataggaattgtaaagaaggcaatatggtaacactgaagagtcactgtgccacacagagactgcagttcagacacaggccacatgcagcatatctatctcacggcagccatttttaggttattattatcaagacatctaccaagaaaggttggctcttccatgaatttatggtgtcgggagggacacgtcatctagagcttcaggttggggattcgtaggaaaggtgattcaatgtgacatacagaaagtgctaatgggactgtaagataatttccttatagttaagaaagtagaattcaaaagraggggaaatgaattaacatttacaagaagcttcctgacttctgttatttctataaattatagtaatgactgaattttggtgtgtgacagatttgctac

SEQ ID NO: 443065 - DNA, 630 bp, Homo sapiens
atatttacttgatcctgtgcatagagatatgtaaataattttgttttttccctaacgtttggtccttatgtttacatctaatgatgtcttattttattgatttgttctgactgtcagaatttcttttagctgtacatttggttgctagattacacattttgctcagtgtgtatgtcttcctcatgtcgtttaattacttgatgtaagtcactaatataaaaatgatcaaaacagggcaacgaacagggcacaaagcatgatactatagacaatatgcaaatttagcatccaaagattcctatgtatatgatcaactaaaataaatttatccaacttgtcctcaatgacttcctgataaactgtcacataccatccttctccacatttctctaaaatacatgattagaaagtctctataaaagttaaatgaggtgacaaaatgttcttattgaagttatgcagggtcctaatgatccatggccttttttccccctyttcatgccccagtatttttaacatttaaaaaattcataaaagtaatacatcatcataataaaagtcatacaactatgaaaagtaattcttccattgtcaccagtgacatccataattccttaaaagtaaacacag

SEQ ID NO: 443066 - DNA, 554 bp, Homo sapiens
ttaattattccataatgtgtgcatatatcaaaacattacagtttaccctacaaacaagaataatagaaagtattaatttataattgttttgtttaagagacaagatctcactctctcacccaggatggagagtggagagtagtggcaggatcatagctcactgtaacctcaaactcttgggctcaagcaatcctccaccctcagactgccaactacctatgttacaggtataatacctastattacaggtacatgccaccacatctggctattatttttttagacacagagtcttgctatgttgtcctggctgctctcgaactcctgtacacaagaaattctcccttctcttcctcctaagtgctgagattacaggcatgagccactgcacccagcctgataatagtcttttaataaaggtaactcaagtatattgaaaaaaggacttttacattttttctacaaattttataattttaggtatgaataatagttttgtgtatcattttaagttgattttatattttatgtgaggtatggattgaggttgttac

SEQ ID NO: 443067 - DNA, 632 bp, Homo sapiens
tcttttcttcttctgtgcccttcaaaccattctaacctctgcctattacccagttccaaagtcacttccatgtttttggctatctttgtggcagtaccccactctaccagtaccaatttactttattagtccattctcacacttcctgagactggataatttcttaaggaaagaagtttaatttactaacagttccacatggctggggaagcctcaggaaacttacaatcatagctgaatgggaagcaagcacctcttcacaaggcagcaggagggagaagargagaaaactaagggggaaaagccccttataaaatcatcaaatctcatggtaactcattcaccattatgagaacagcatggaggaaaccgcccccatgacccaattacttccctccattgacacgtggggattacaggtctctcactcgacacatggttattacaagtcgagatgaaatttgggtgagggcacagagccaaaccatatcatcttggttttgattttgagaggaaagtctttaggtttttcccattaaatatgatattacttgtaaataatttagagacactcttaaataccttttcttgtatttatagtttgctgagagcaattatcataaatggatgtt

SEQ ID NO: 443068 - DNA, 558 bp, Homo sapiens
gatctaataatattagctttatatatctgggtgctttgatgttgggtgcatacatatttagtattattatatcctattgctaaatcagtccatttgtcattatataatgaccttctctgtctcagacttaaagtctgttttatctaagtatagctactcccacttgctttgggtttccatttgcatggaatgtctatttccatcctttactttcagtctgtatgtgtytctacaggagaaatgagtttcttgtaggcagcatgtaattgggtaatttaaaaaatcaatttggccgggcacagtggctcacgcctgtaatcccagcactttgggaggccgagatgggcggatcatgaggtcaggagattgagaccatcctggctaacacggtgaaaccccgtctctactaaaaaatacaaaaaagtagctgggtgtggtggcgggtgcctgtagtcccagctactcgggagactgaggcaggagaatggcatgaacctgggagacggagctgacagtgagccgagatcatgccactgcactctagcctgggcaacagag

SEQ ID NO: 443069 - DNA, 650 bp, Homo sapiens
gtcaatatactaaaccaccgagctgttcagcttttaaattagttaactatacgatatgtaaattatacctaaataaaattgttcttaaaaaaacaatgtgggccgggcatggtggctcacgtctgtaatcccagcactttgggaggcygaggtgagtggatcacctgaggtcaggggttcgagaccagcctgaccaacatggtgaaatcccgtctctactaaaaatacaaaaaaattagctgggcttgggtgataaatgctataataaaggcatataccaatacaggtaaagattccaggtgtctgaatacatgtgccctgaggtaaggaaaactccctgagaaattacaccagttaaatctttaaaaagatgcacagtctcctgagggatggcctacgtgaaggaaaaaaaaaaaagatgcacagtctgaaagtctgccaacagaacaaacccaggcagatttcatatgaaattaaaagtactgaatatgagagtattcaatagtttcatatagccagaactcagaaattctgttgaaaagtaaagattctgctggagagggaagcagagacagatgtatcaggaaccctgaatgatcaaacttattttttcttgcagacaatgggaagttaacaaaaaggggggcggg

SEQ ID NO: 443070 - DNA, 597 bp, Homo sapiens
ttctgttattaaaagactctgttgtattcttcagtatgcaattgcatttttcaactccagaatttctgtttgattctttttatttcaatctctttgttaaatttatctaatagaattctgaatccattctctrcgttattctgaatttctttcagtttcctccaaacagctatttttaattctgtttctgaaaggtcacatatatctgtttctctaggattggtgcctggtggcttatttagttcatttggggaggtgatttttttctggatcatctcaatacttgtagatattcatctgtgcctgggcattaaagagttaagtatttatggccaggcatggtggctcacacctgtaatcccagcactttgagaggccaaggcaggcagatcacaaggtcaggagttcgagacctccctgaccaacatggtgaaatctcatctctactaaatatacaaaaattagctggacatggtggcacacgcctgtaatcccagctactcaggaggctgaggcaggagaatcgcttgaacctgggaggcggaggttgcagtgagccaagattgcactactgccctccagcctgggcaacagaga

SEQ ID NO: 443071 - DNA, 597 bp, Homo sapiens
ttctgttattaaaagactctgttgtattcttcagtatgcaattgcatttttcaactccagaatttctgtttgattctttttatttcaatctctttgttaaatttatctaatagaattctgaatccattctctgygttattctgaatttctttcagtttcctccaaacagctatttttaattctgtttctgaaaggtcacatatatctgtttctctaggattggtgcctggtggcttatttagttcatttggggaggtgatttttttctggatcatctcaatacttgtagatattcatctgtgcctgggcattaaagagttaagtatttatggccaggcatggtggctcacacctgtaatcccagcactttgagaggccaaggcaggcagatcacaaggtcaggagttcgagacctccctgaccaacatggtgaaatctcatctctactaaatatacaaaaattagctggacatggtggcacacgcctgtaatcccagctactcaggaggctgaggcaggagaatcgcttgaacctgggaggcggaggttgcagtgagccaagattgcactactgccctccagcctgggcaacagaga

SEQ ID NO: 443072 - DNA, 574 bp, Homo sapiens
aaatcacttaggtggcttgctagtctgaaagattacacaattttacattctttttctatatttttatctctatcacatcaggacaatcatataatatcacactaatactaatgagcagctttttcttatggataggaataatcacatttccatctacatttgaacacctctcatcaatattcaaatagggtctacattttattagcatttcacttgtttttaaagccacrtgcctcagtttccatcagagctaaagggtgggagatgaaaaggttttatggggggaggtaggtagttttaaatatgggctgtgctaccgtaaccagagaagcaggtcaatcatctctgtacattgagcttctgtgtaaattgttgttgaagagaatattctattgtgtgaaataatcgcatcacatgaaacaaagtttgaggtctttctgatgactttgacaattataattcttaatcttatgcttacagaatattctaagaaacacatcgtgaattaaggattgtgtacagtggaaccatacagacctgggatcaaattccaactactaaactggctagttgt

SEQ ID NO: 443073 - DNA, 530 bp, Homo sapiens
agtggtctgctgggagaatgtcttcttcctctggggaggtcagtcttttttctcttaagrcttccaactgattgaatgaggcctacccacattacaacaggtaatctgctttattctaagtctattgattttaatgttaatttcatctaaaaaatatcttcacagaaacatctagaatagtgtttgaccaaatatctgggtaccatagcctagagaagttgacacataaaattaaccgtcacaaagagttggattttatcaagcacatgtttggtatgtattttatgatttttatcctctgttaatatacttaattttattaatacattttgaatattagactctctttgcactcctaagagaacccacacaaattttcacctaaatatttttaaagattctatatattttacccaaatatttcaaaaggttcaaaataacaagttttggcatggatatttcatatggatgtaaagtggcaaagtctttttggagagtactttgacaggatctataaacatttaaatgta

SEQ ID NO: 443074 - DNA, 530 bp, Homo sapiens
agtggtctgctgggagaatgtcttcttcctctggggaggtcagtcttttttctcttaagacttccaactgattgaatgaggcctacccacattacaacaggtaatctgctttattctaagtctattgattttaatgttaatttcatctaaaaaatatcttcacagaaacatctagaatartgtttgaccaaatatctgggtaccatagcctagagaagttgacacataaaattaaccgtcacaaagagttggattttatcaagcacatgtttggtatgtattttatgatttttatcctctgttaatatacttaattttattaatacattttgaatattagactctctttgcactcctaagagaacccacacaaattttcacctaaatatttttaaagattctatatattttacccaaatatttcaaaaggttcaaaataacaagttttggcatggatatttcatatggatgtaaagtggcaaagtctttttggagagtactttgacaggatctataaacatttaaatgta

SEQ ID NO: 443075 - DNA, 572 bp, Homo sapiens
tacctctcactttctatcatttgtgatgaggcacaacacttgtatctcattctggattttggaggaagcatatggtatacttgggaatctttctgcaacccattcatgggttgactcagaagacttcaaacaaggcccagggcaaaaatagggttttgtarcagctctagactcaaaagctgcagtttcagtggtggctaattgtttggatagatagaggtaacgtatggagtttctgcaatgccattaaaaatgagctgtgggcagatccatagagttctggagaatgccatgccttcttcagcagagaattatgatgtttgcaaaacagctcctggcatttaaatgtttcctactggagactgcacacctcatcatggagcaccaagcgcctctatgaatggaggtgctctttatggtctggatatcaccaggtccactgaaccaagtagtagagcaggcacaacagcaaatcactgtataatgaaaggggtttattggggacaagattccagtacctccgaaagaatgagtaaattacaaaatcagatggcccagatccctgtattaag

SEQ ID NO: 443076 - DNA, 572 bp, Homo sapiens
tacctctcactttctatcatttgtgatgaggcacaacacttgtatctcattctggattttggaggaagcatatggtatacttgggaatctttctgcaacccattcatgggttgactcagaagacttcaaacaaggcccagggcaaaaatagggttttgtaacagctctagactcaaaagctgcagtttcagtggtggctaattgtttggatagatagaggtaacgtatggagtttctgcaawgccattaaaaatgagctgtgggcagatccatagagttctggagaatgccatgccttcttcagcagagaattatgatgtttgcaaaacagctcctggcatttaaatgtttcctactggagactgcacacctcatcatggagcaccaagcgcctctatgaatggaggtgctctttatggtctggatatcaccaggtccactgaaccaagtagtagagcaggcacaacagcaaatcactgtataatgaaaggggtttattggggacaagattccagtacctccgaaagaatgagtaaattacaaaatcagatggcccagatccctgtattaag

SEQ ID NO: 443077 - DNA, 572 bp, Homo sapiens
tacctctcactttctatcatttgtgatgaggcacaacacttgtatctcattctggattttggaggaagcatatggtatacttgggaatctttctgcaacccattcatgggttgactcagaagacttcaaacaaggcccagggcaaaaatagggttttgtaacagctctagactcaaaagctgcagtttcagtggtggctaattgtttggatagatagaggtaacgtatggagtttctgcaatgccattaaaaatgagctgtgggcagatccatagagttctggagaatgccatgccttcttcagcagagaattatgatgtttgcaaaacagctcctggcatttaaatgtttcctactggagactgcacacctcatcatggagcaccaagcrcctctatgaatggaggtgctctttatggtctggatatcaccaggtccactgaaccaagtagtagagcaggcacaacagcaaatcactgtataatgaaaggggtttattggggacaagattccagtacctccgaaagaatgagtaaattacaaaatcagatggcccagatccctgtattaag

SEQ ID NO: 443078 - DNA, 522 bp, Homo sapiens
ctccccactcttgctccttctcctgccatatgagacaccttgctttccctttgtcttctgccatgattggaagcttcctaaggcctccctagaagcacaagccactatgcttcttatacagcctacagaacagtgaggcaatcaaatctcttttcttyataaatttcccactctcagattttttttatagcagtgcaagaatgggtaaatacagaaaattggtaccaaggaatggggcattgctatgaagatacctgaaaatgtggaagcagctttggaactgggtaacaggcagaggttggaagagtgtgaaaggctcagaggacaggaagatgaaggaaaatttggaatttcttagagactgcttgagtggttatgaccaaaatgctggtagttctatggacagtgaaggccaggctgatgaggtctcagatggagatgaggaactcattggaaactggagcaaaggtgacatgtgttatgccttagcaaagaacttggctgcattgtgcccctgcccta

SEQ ID NO: 443079 - DNA, 522 bp, Homo sapiens
ctccccactcttgctccttctcctgccatatgagacaccttgctttccctttgtcttctgccatgattggaagcttcctaaggcctccctagaagcacaagccactatgcttcttatacagcctacagaacagtgaggcaatcaaatctcttttctttataaatttcccactctcagattttttttatagcagtgcaagaatgggtaaatacagaaaattggtaccaaggaatggggcattgctatgaagatacctgaaaatgtggaagcagctttggaactgggtaacaggcagaggttggaagagtgtgaaaggctcagaggacagraagatgaaggaaaatttggaatttcttagagactgcttgagtggttatgaccaaaatgctggtagttctatggacagtgaaggccaggctgatgaggtctcagatggagatgaggaactcattggaaactggagcaaaggtgacatgtgttatgccttagcaaagaacttggctgcattgtgcccctgcccta

SEQ ID NO: 443080 - DNA, 522 bp, Homo sapiens
ctccccactcttgctccttctcctgccatatgagacaccttgctttccctttgtcttctgccatgattggaagcttcctaaggcctccctagaagcacaagccactatgcttcttatacagcctacagaacagtgaggcaatcaaatctcttttctttataaatttcccactctcagattttttttatagcagtgcaagaatgggtaaatacagaaaattggtaccaaggaatggggcattgctatgaagatacctgaaaatgtggaagcagctttggaactgggtaacaggcagaggttggaagagtgtgaaaggctcagaggacaggaagatgaaggaaaatttggaatttcttagagactgcttgagtggttatgaccaaaatgctggtagttctatggacagtgaaggccaggctgatgaggtctcagatggagatgaggaactyattggaaactggagcaaaggtgacatgtgttatgccttagcaaagaacttggctgcattgtgcccctgcccta

SEQ ID NO: 443081 - DNA, 622 bp, Homo sapiens
aaaaaggagccaaatgctaatagccaagataatgaaaagggcttgaagacgtttaagaccttaagaccttcatggcagcccctctcatcataggcccagagctctaagaggacacaatgctttcttgggccaggctcagggccccactgccctgtgcatcctcagggcactgctccctgaatcccagtttttccagctgtggctcaaagaggcctaggtacagtttggagaacaggctartacattagctctttagaaatgcaatcataaccttttacctcttctttaccagacaccctacaggagaagctcattatgcttagaagctccagggcagaactttctcccaccaggaaactgcctcaagaaacagtcaatttacaatccaaaatatgcctgctataaaactttcttccacctggagagttttggccactttttcaacccagttctgcccacaaagatgccagcagtggctagctcaatcacccagtggggtatagcatcaaaatgagttcatgatcccccacctgcatttccctcctctaagtgccattcatgccactctgccttttaaaaaacctagtttctgctccaaaagcctgtaatttttcccctaagc

SEQ ID NO: 443082 - DNA, 622 bp, Homo sapiens
aaaaaggagccaaatgctaatagccaagataatgaaaagggcttgaagacgtttaagaccttaagaccttcatggcagcccctctcatcataggcccagagctctaagaggacacaatgctttcttgggccaggctcagggccccactgccctgtgcatcctcagggcactgctccctgaatcccagtttttccagctgtggctcaaagaggcctaggtacagtttggagaacaggctagtacattagctctttagaaatgcaatcataaccttttacctcttctttaccagacaccctacaggagaagctcattatgcttagaagctccagggcagaactttctcccaccaggaaaytgcctcaagaaacagtcaatttacaatccaaaatatgcctgctataaaactttcttccacctggagagttttggccactttttcaacccagttctgcccacaaagatgccagcagtggctagctcaatcacccagtggggtatagcatcaaaatgagttcatgatcccccacctgcatttccctcctctaagtgccattcatgccactctgccttttaaaaaacctagtttctgctccaaaagcctgtaatttttcccctaagc

SEQ ID NO: 443083 - DNA, 622 bp, Homo sapiens
aaaaaggagccaaatgctaatagccaagataatgaaaagggcttgaagacgtttaagaccttaagaccttcatggcagcccctctcatcataggcccagagctctaagaggacacaatgctttcttgggccaggctcagggccccactgccctgtgcatcctcagggcactgctccctgaatcccagtttttccagctgtggctcaaagaggcctaggtacagtttggagaacaggctagtacattagctctttagaaatgcaatcataaccttttacctcttctttaccagacaccctacaggagaagctcattatgcttagaagctccagggcagaactttctcccaccaggaaactgcctcaagaaacagtcaatttacaatccaaaatatgcctgctataaaactttcttccacctggagagttttggccactttttcaacccagttctgcccacaaagatgccagcagtggctagctcaatcacccagtggggtatagcatcaaaatgagttcatgatcccccacctgcatttccctcctctaagtgccattcatgccactytgccttttaaaaaacctagtttctgctccaaaagcctgtaatttttcccctaagc

SEQ ID NO: 443084 - DNA, 600 bp, Homo sapiens
taagtgccattcatgccactctgccttttaaaaaacctagtttctgctccaaaagcctgtaatttttcccctaagctagctttggaacagaaaggcactttctttatactagaattttcttttgttaattgggcgagarctcactcgttaccatgaggagggcatcaaacaattcatgaaggatcagcccccatgactgaaacacttcccaccaggccctatctctaacactggaaactacatttcaatatgagatttggaggggacaaggatccaagccacatcactattttattaatttctaaaattaaaatttataatttactttattactttcttattagtgggcactcaagttgttttcatttctttgctcttatagagaatgctaaaataacccctcacgtgtatcatgtgtctttaaatctaagcactagtatatctgtcgaatgtattgttgggtcaaagagtaaaggcaggcacttataattctagtagatactgccacgttgacctccatggattgtgtgaatttgtcctctcactagcagagtttaagggtgactgtcttcacatagcctcgctgacagtttttattaa

SEQ ID NO: 443085 - DNA, 600 bp, Homo sapiens
taagtgccattcatgccactctgccttttaaaaaacctagtttctgctccaaaagcctgtaatttttcccctaagctagctttggaacagaaaggcactttctttatactagaattttcttttgttaattgggcgagagctcactcgttaccatgaggagggcatcaaacaattcatgaaggatcagcccccatgactgaaacacttcccaccaggccckatctctaacactggaaactacatttcaatatgagatttggaggggacaaggatccaagccacatcactattttattaatttctaaaattaaaatttataatttactttattactttcttattagtgggcactcaagttgttttcatttctttgctcttatagagaatgctaaaataacccctcacgtgtatcatgtgtctttaaatctaagcactagtatatctgtcgaatgtattgttgggtcaaagagtaaaggcaggcacttataattctagtagatactgccacgttgacctccatggattgtgtgaatttgtcctctcactagcagagtttaagggtgactgtcttcacatagcctcgctgacagtttttattaa

SEQ ID NO: 443086 - DNA, 554 bp, Homo sapiens
aaaaaaaatcccaaacaatacaattaaaaaatggacaaaccatctgaataaacatttctcaaaagacatacaaatggccaacaagtatattaaaaatgctcaacatcactaatcatcaggaaagtgcaatcaaaactactacgaaagaacatctcaccccagtgatgtttagtatcaaaaagacaaaaaataacaaatgctgcccagggtgcagagaaatgcaaaggcttatacactgttgatggaaatgctaactaatgcaattactgtggagaatatggagaacagtatgggagtgtctcgaaaaactacaagkaattctaccatataatctagtaatctcaccacttagaatttatccaaaggaaagaaaatcataatattgaagagatatctgccctcccatgtttattgcagcagcagcactactcacaatagccaagttatggaagcaacctagatgtctaacaagagaaaaatggataaagaaaatgtgatatatacacaataaaatactattcagtcataaaaaatgagtgaaatcctgccatttg

SEQ ID NO: 443087 - DNA, 617 bp, Homo sapiens
caaccttcacagttcttaacaaatagtaaacaaaacaatgcacacatctttatgaacatcatgggtcagggtctcctaaayatgtttataatagaaatggaaaagaaacaggtactatgtgtattaggtactttatacatattcttattaagttttcatactactctgtaagatttaacagccatctagatatcctgtttacttatgattcagataagaatggcccaccacactccaattatctcccccattacatgtccttaagaaaatccagggcacccagaagattccagagcagtggttttttaagggaagtaatttacccccgatatggtttggatgtttgtcccctccaaatctcatgtaatgcgatcccccatgttggaggaggggcttggtgggaggtgtctggatcatggcagctgatccctcacgaatggcttagccatccccttggtgatgagtgaattcctgctttagtagttcatatgagatctggttgtctaaaagagtgtggcatctcctccctccctctcttgcttctgctctagccatgtgatatgctgactccccctttgccttccaccatgattgtaagctacctgaggccctcacca

SEQ ID NO: 443088 - DNA, 617 bp, Homo sapiens
caaccttcacagttcttaacaaatagtaaacaaaacaatgcacacatctttatgaacatcatgggtcagggtctcctaaacatgtttataatagaaatggaaaagaaacaggtactatgtgtattaggtactttatacatattcttattaagttttcatactactctgtaagatttaacagccatctagatatcctgtttacttatgattcagataagaatggcccaccacactccaattatctcccccattacatgtccttaagaaaatccagggcacccagaagattccagagcagtggttttttaagggaagtaatttacccccgatatggtttggatgtttgtcccctccaaatctcatgtaatgygatcccccatgttggaggaggggcttggtgggaggtgtctggatcatggcagctgatccctcacgaatggcttagccatccccttggtgatgagtgaattcctgctttagtagttcatatgagatctggttgtctaaaagagtgtggcatctcctccctccctctcttgcttctgctctagccatgtgatatgctgactccccctttgccttccaccatgattgtaagctacctgaggccctcacca

SEQ ID NO: 443089 - DNA, 617 bp, Homo sapiens
caaccttcacagttcttaacaaatagtaaacaaaacaatgcacacatctttatgaacatcatgggtcagggtctcctaaacatgtttataatagaaatggaaaagaaacaggtactatgtgtattaggtactttatacatattcttattaagttttcatactactctgtaagatttaacagccatctagatatcctgtttacttatgattcagataagaatggcccaccacactccaattatctcccccattacatgtccttaagaaaatccagggcacccagaagattccagagcagtggttttttaagggaagtaatttacccccgatatggtttggatgtttgtcccctccaaatctcatgtaatgcgatcccccatgttggaggaggggcttggtgggaggtgtctggatcatggcwgctgatccctcacgaatggcttagccatccccttggtgatgagtgaattcctgctttagtagttcatatgagatctggttgtctaaaagagtgtggcatctcctccctccctctcttgcttctgctctagccatgtgatatgctgactccccctttgccttccaccatgattgtaagctacctgaggccctcacca

SEQ ID NO: 443090 - DNA, 605 bp, Homo sapiens
ccctttgccttccaccatgattgtaagctacctgaggccctcaccagggacaaatgctggtgccatgcttcctgtacagcctgcagaaccataagccaattaaacctcttttctttataaattaccccatctcaggtattcctttatagtgacacaaaaaagacaactacactctccatttggcaatgactgaagatgtttttgatagtcacaacttaaggtaggggtattagaggtatctagggtgtcaggaatactgctaaacatcctacaataactatgacagcccccataaatactcatctagtctgaaatgccagtaatgctgaggttgagaaactctgccctggagtaatatcatctctgactctcatttctgcctccattgatatcttttgcctggttttttatccactaatgtatttatctcatcttggcatgtatccaaattttcatctctccctccctaaaataaggtcattaccaatgtaagcctattgcatggaggagaaattttactaaagatttrtaggtatgaggtaggaggttacaaaattatatcaagagcaaataaattgaagagcatattagacagccctgctgtt

SEQ ID NO: 443091 - DNA, 585 bp, Homo sapiens
tgtaagcctattgcatggaggagaaattttactaaagatttgtaggtatgaggtaggaggttacaaaattatatcaagagcaaataaattgaagagcatattagacagccctgctgttaatgtcctattagtccctgcacctctggactcgggctttctcactgcccatgataacggttgcccatgtcaactcatgcaacgccttaggctttcaccatcttactggttycagtcttcatatatccccttcctagattgtacctaggaactccaggttcctctcactctattatgcagcaactattcaattctctcaattctctgcatctaaactcagcttgaagcctttctttaggctgtccagtggttttcaaatttgagcatgcatcagtcatacacagcttgcgggcaggggcagatttgattctgtaggtgtggttgagaatttgcatatcttaaaaatttccaggtagtgttaattcctctggtctgggacaacacttttagaaccaccatgaaacaaacaaacaaaaaacaaacaacaactaaacaaaatacacaaacccatccaaacaacagagccat

SEQ ID NO: 443092 - DNA, 542 bp, Homo sapiens
atctgagggctgtgaaggagaatctgttccatgtctctcctctaactttctgtggacctggccrtctcttgcccgttacatggtgcttttcctgtgtcttcacattgtattccctctgtgcatatctctgtgtccaaatttccccttttaataaggatgccggtcacattggattagagcctatgctaaagactttatttcaacttgattaactctgtaatgaccctacctccacataaggtcacattctgagagactgggggttaggactccagcatatcttttttttttctggaaagtggtagagaatagaattcaacctatcacaggaagaaagaaagaactgtgggtaggcaaaacactgaagtcacattgcacctttgtgcagggcccagtctgcacaactgaacactacagccctaccaaaaaagttctttgaactccatgtccccagtttcttataagacagaattctcctttttaaaagctggtaaaataaatggaagagccatgaagaatttgctaggttttgggttactaaa

SEQ ID NO: 443093 - DNA, 542 bp, Homo sapiens
atctgagggctgtgaaggagaatctgttccatgtctctcctctaactttctgtggacctggccgtctcttgcccgttacatggtgcttttcctgtgtcttcacattgtattccctctgtgcatatctctgtgtccawatttccccttttaataaggatgccggtcacattggattagagcctatgctaaagactttatttcaacttgattaactctgtaatgaccctacctccacataaggtcacattctgagagactgggggttaggactccagcatatcttttttttttctggaaagtggtagagaatagaattcaacctatcacaggaagaaagaaagaactgtgggtaggcaaaacactgaagtcacattgcacctttgtgcagggcccagtctgcacaactgaacactacagccctaccaaaaaagttctttgaactccatgtccccagtttcttataagacagaattctcctttttaaaagctggtaaaataaatggaagagccatgaagaatttgctaggttttgggttactaaa

SEQ ID NO: 443094 - DNA, 542 bp, Homo sapiens
atctgagggctgtgaaggagaatctgttccatgtctctcctctaactttctgtggacctggccgtctcttgcccgttacatggtgcttttcctgtgtcttcacattgtattccctctgtgcatatctctgtgtccaaatttccccttttaataaggatgccggtcacattggattagagcctatgctaaagactttatttcaacttgattaactctgtaatgaccctamctccacataaggtcacattctgagagactgggggttaggactccagcatatcttttttttttctggaaagtggtagagaatagaattcaacctatcacaggaagaaagaaagaactgtgggtaggcaaaacactgaagtcacattgcacctttgtgcagggcccagtctgcacaactgaacactacagccctaccaaaaaagttctttgaactccatgtccccagtttcttataagacagaattctcctttttaaaagctggtaaaataaatggaagagccatgaagaatttgctaggttttgggttactaaa

SEQ ID NO: 443095 - DNA, 542 bp, Homo sapiens
atctgagggctgtgaaggagaatctgttccatgtctctcctctaactttctgtggacctggccgtctcttgcccgttacatggtgcttttcctgtgtcttcacattgtattccctctgtgcatatctctgtgtccaaatttccccttttaataaggatgccggtcacattggattagagcctatgctaaagactttatttcaacttgattaactctgtaatgaccctacctccacataaggtcacattctgagagactgggggttaggactccagcatatcttttttttttctggaaagtggtagagaatagaattcaacctatcacaggaagaaagaaagaactgtgggtaggcaaaacactgaagtcacattgcacctttgtgcagkgcccagtctgcacaactgaacactacagccctaccaaaaaagttctttgaactccatgtccccagtttcttataagacagaattctcctttttaaaagctggtaaaataaatggaagagccatgaagaatttgctaggttttgggttactaaa

SEQ ID NO: 443096 - DNA, 572 bp, Homo sapiens
attttgtctaatatgaatatacttacacacttttttctgattgttgtttatatgatacatattttctattctttaactttttaaccttctatatccttttattttgggtgcatctcataaataatacatacttggattttattttttagtaacccagtatgacaatctttcttttttaactagagtaattggttcatttacaatgaatataattagtcacatactcagatttatgtaccatcttattgygtgttatttatcttcatctgttttgtttctttttgtcttcatttctgccttcttttgtattaactaagcattttattcttatttccttttgttcctgaacttccttcaaggttatatactctactcatttaatgtgtaggctacaatttacaatatacatatctatttaccttatcaaaattaaatttaatcaatacctttaccatttcccttacaatattttggaacttattaattcaagtaagtactaccatctcccaactaaaatgttattttatatcgtcaatttttttgaatgttttacatactactactttcttttc

SEQ ID NO: 443097 - DNA, 572 bp, Homo sapiens
attttgtctaatatgaatatacttacacacttttttctgattgttgtttatatgatacatattttctattctttaactttttaaccttctatatccttttattttgggtgcatctcataaataatacatacttggattttattttttagtaacccagtatgacaatctttcttttttaactagagtaattggttcatttacaatgaatataattagtcacatactcagatttatgtaccatcttattgtgtgttatttatcttcatctgttttgtttctttttgtcttcatttctgccttcttttgtattaactaagcattttattcttatttccttttgttcctgaacttccttcaaggttatatactctactcatttaatgtgtaggctacaatttacaatatacwtatctatttaccttatcaaaattaaatttaatcaatacctttaccatttcccttacaatattttggaacttattaattcaagtaagtactaccatctcccaactaaaatgttattttatatcgtcaatttttttgaatgttttacatactactactttcttttc

SEQ ID NO: 443098 - DNA, 572 bp, Homo sapiens
attttgtctaatatgaatatacttacacacttttttctgattgttgtttatatgatacatattttctattctttaactttttaaccttctatatccttttattttgggtgcatctcataaataatacatacttggattttattttttagtaacccagtatgacaatctttcttttttaactagagtaattggttcatttacaatgaatataattagtcacatactcagatttatgtaccatcttattgtgtgttatttatcttcatctgttttgtttctttttgtcttcatttctgccttcttttgtattaactaagcattttattcttatttccttttgttcctgaacttccttcaaggttatatactctactcatttaatgtgtaggctacaatttacaatatacatatctatttaccttatcaaaattaaatttaatcaatacctttaccatttcccttacaatatyttggaacttattaattcaagtaagtactaccatctcccaactaaaatgttattttatatcgtcaatttttttgaatgttttacatactactactttcttttc

SEQ ID NO: 443099 - DNA, 572 bp, Homo sapiens
attttgtctaatatgaatatacttacacacttttttctgattgttgtttatatgatacatattttctattctttaactttttaaccttctatatccttttattttgggtgcatctcataaataatacatacttggattttattttttagtaacccagtatgacaatctttcttttttaactagagtaattggttcatttacaatgaatataattagtcacatactcagatttatgtaccatcttattgtgtgttatttatcttcatctgttttgtttctttttgtcttcatttctgccttcttttgtattaactaagcattttattcttatttccttttgttcctgaacttccttcaaggttatatactctactcatttaatgtgtaggctacaatttacaatatacatatctatttaccttatcaaaattaaatttaatcaatacctttaccatttcccttacaatattttggaacttattaattcaagtaagtactaccatctcccaactaaaatgttattttatatcgtcaatttttttgaatrttttacatactactactttcttttc

SEQ ID NO: 443100 - DNA, 557 bp, Homo sapiens
tatctttgtctttagtatcttacagtatttctatgctgtgcctcagtgtagatttatttttatgcattctgtttggaattcactgggcttctcaaaaacaagaacaaactatagattaggcattccatcaattgtggaaagtatcccatcattatactttcaaatattgtcactatcagattctctttcctttcttccctgaaatagaattaaaaatgttttttatgtattttaagctttcttaagtttttcttcaagtcttttaatctcaccttccttttcctattttatattctctctatacttcattgtggatttttttttcacatttatcttccagttaattaacactstcttcagctataactaatttactgtttaacctgatgactacgttttaaaatttcaagtattatatttttcacttccagaattcagtatggttcttttgaatatcttcttggttattctttatagtttttttgttccctataggtagttttaattttatatcttataatttaatcagagtaggcctatttatttacattgtgtct

SEQ ID NO: 443101 - DNA, 530 bp, Homo sapiens
ttttcttcaagtcttttaatctcaccttccttttcctattttatattctctctatacttcattgtggatttttttttcacatttatcttccagttaattaacactctcttcagctataactaatttactgtttaacctgatgactacgttttaaaatttcaagtattatatttttcacttccagaattcagtatggttcttttgaatatcttcttggttattctttatagtttttttgttccctataggtagttttaattttatatcttataatttaatcagagtaggcctatttatttacattgtgtctgttaatgccaacatctgaaatatttaaacatctttgctgttattgctgttcttcyttttcatgaagcattatttgcttatgtgcttaaatttttgtgtttgttgcatactttccttggaaaattcatttctaggaattcttttaagattgtgataaaggcacatttttctcagagaatttgcttttcttttgctatgaatccgtaagtcctaccaatttg

SEQ ID NO: 443102 - DNA, 527 bp, Homo sapiens
ttttttttttttttaagaggaagataatggttgtgatttctttggacaacctgggtgattttaggcttcaaatctgcataaagtagtttacttcttacctgttcttatttgaaagtatagtcattgggggtgttctggcattataggagattacacattagacttcctaacttgagaaggtctggccattatcttctatccctattgtatgtgayctcaaaatacttagactcaagtttatcatatgtggaaagtgacatcagcgaaatggcagaatattttctctggctccagtctagagaaattgaactagcaactaaccacagacaagagtaccttcgtgaatatccctgaatgtgtgagagaggctgagacacccacttggaccacagaactgagaaaggtacattcaaaaagtaagagttttcactttgactacatcatctttccctcaagccagcacagcatcacccagcacatcactcctgggcccatggtttctacagtgggaaaagagagtgggaagt

SEQ ID NO: 443103 - DNA, 545 bp, Homo sapiens
tcataaaagtgggggaggcagtaaaagtgtagcatttttgtatgattaaagttaagttgttatcagccttaaatagcctgttataagtataatatattttctggaagcctcatcrtaaacacaaagcaaaaacctgtagtagttgcactaaatataaaaggaaagtgttcaaagcatagcaccacagaaaataatcaaacgacaagggaagacagcaagagaggaaaagagaaacaaaagatctaccaaacaaccagaaaacaaattacaaaatggcagtagcaaggtcttacctatcaataactaccttgaatgtaaatagattaaattttccaacacattaaaatttccaaattttccacagagtggctgaatgaataaaaggaaagaacaaactacctatatattgcatacaagagactcactttactagcaagaacacacataatctggaagtgaagcaatgaaaaaagatattccaacacaaatggaaaccaaaacagggcaagggtagctatacttatataagactgatacttatatca

SEQ ID NO: 443104 - DNA, 545 bp, Homo sapiens
tcataaaagtgggggaggcagtaaaagtgtagcatttttgtatgattaaagttaagttgttatcagccttaaatagcctgttataagtataatatattttctggaagcctcatcgtaaacacaaagcaaaaacctgtagtagttgcactaaatataaaaggaaagtgttcaaagcatagcaccacagaaaataatcaaacgacaagggaagacagcaagagaggaaaagagaaacaaaagatctaccaaacaaccagaaaacaaattacaaaatggcagtagcaaggtcttacctatcaataactaccttgaatgtaaatagattaaattttccaayacattaaaatttccaaattttccacagagtggctgaatgaataaaaggaaagaacaaactacctatatattgcatacaagagactcactttactagcaagaacacacataatctggaagtgaagcaatgaaaaaagatattccaacacaaatggaaaccaaaacagggcaagggtagctatacttatataagactgatacttatatca

SEQ ID NO: 443105 - DNA, 580 bp, Homo sapiens
aaacaataattctctagtacctttccccccggcccctggtaacttttatcatggagatacaaagagatgtattcacatatatacaaagtagcaattctactttgtatccctaagaatttgactacagtaggtacctcttacaagttgaaccatacaatatttatctttttgtgactggcttactttacttagcataatgtcctcagggttcatccatgctgtaacatgtatcagagttcttttcctttttaagactgaataatattccactgtatataaataycacaattttatggatatatacttgtatacaccacattcttctgttgatatgctcttcggttttttttccacattctcatttttgtgaataatgctgagatgaacatggatgtagaaatatcttttcaagatcctgctttcaattcttttgggtatatactcagaagtatatttaattcttgaggaaccactatactgatttccacagtggctgcaccattttacatttttaccaacagtacacaaggggtccaatttccccacatcctcaccaatgcttgttattttgtggggtttt

SEQ ID NO: 443106 - DNA, 601 bp, Homo sapiens
tatttttttgtaattctgtgrtatcagttgtaatatctcccatttcatttctaattgagtttactaatgtcttctgtcttcttttcttggttaatctcgctaatggtctattaattttatttatcttttcaaataatcagcttttttgttccatttatcttttgttttcttttttgtttcaatttcatttagttctgctcttacctttgttatttcttctgctgggtttgggtttggtttgttcttgtttctctagttccatgagaagtgaccttagattgtctatatgtgctctttcagactttttgatgatcattaaggaataggttatttaatttccatgtatttgtgtagttttgagggttcctttagaaatcagtttatagttttattccactgtggtctgagagagtacttgatgtaattccaatttttaaaaatttattgaaacttgttttgtggtctatcatatggtctatcttacagaatgttccctgtgctgataaacagaatgtatattctgcatttgttgggtagaatgttctgtaaatatccattaagttcatttgttctaaggtatagtttaaatccactgtttctt

SEQ ID NO: 443107 - DNA, 601 bp, Homo sapiens
tatttttttgtaattctgtgatatcagttgtaatatctcccatttcatttctaattgagtttactaatgtcttctstcttcttttcttggttaatctcgctaatggtctattaattttatttatcttttcaaataatcagcttttttgttccatttatcttttgttttcttttttgtttcaatttcatttagttctgctcttacctttgttatttcttctgctgggtttgggtttggtttgttcttgtttctctagttccatgagaagtgaccttagattgtctatatgtgctctttcagactttttgatgatcattaaggaataggttatttaatttccatgtatttgtgtagttttgagggttcctttagaaatcagtttatagttttattccactgtggtctgagagagtacttgatgtaattccaatttttaaaaatttattgaaacttgttttgtggtctatcatatggtctatcttacagaatgttccctgtgctgataaacagaatgtatattctgcatttgttgggtagaatgttctgtaaatatccattaagttcatttgttctaaggtatagtttaaatccactgtttctt

SEQ ID NO: 443108 - DNA, 601 bp, Homo sapiens
tatttttttgtaattctgtgatatcagttgtaatatctcccatttcatttctaattgagtttactaatgtcttctgtcttcttttcttggttaatctcgctaatggtctattaattttatttatcttttcaaataatcagcttttttgttccatttatcttttgttttcttttttgtttcaatttcatttagttctgctcttacctttgttatttcttctgctgggtttgggtttggtttgttcttgtttctctagttccatgagaagtgaccttagattgtctatatgtgctctttcagactttttgatgatcattaaggaataggttatttaatttccatgtatttgtgtagttttgagggttcctttagaaatcagttkatagttttattccactgtggtctgagagagtacttgatgtaattccaatttttaaaaatttattgaaacttgttttgtggtctatcatatggtctatcttacagaatgttccctgtgctgataaacagaatgtatattctgcatttgttgggtagaatgttctgtaaatatccattaagttcatttgttctaaggtatagtttaaatccactgtttctt

SEQ ID NO: 443109 - DNA, 598 bp, Homo sapiens
tcaattgccaagacttttcagtgcattttgcatttctataagcatgtcctttatttccagaaactgctatttttttatttatgctatctatttcactgaagattttttcctttgtatcttatatcatttgtttaaatttcattaaattggacttcacctttctctggtacctccttgattagcttaataattgaccttctgaattctctttttggcaattcagagatttcktcttggcttgaatccattgctggtgagcaagggtgatcttttaggggtgttaaagaaccttgttttgtcatattaccagaattgtttttctggttccttctcattaaggtagactatgtcaaagggaagacctggggctcaagggccactattcagattcttttgtcccattgggtactcccttgatgtagtgctcccccaatttccccagggatggggttttctgagagccaaagtgtagtgattgttatttctcttctggatctagccatccagcagagctacctggctccaggctggtacttgggggtgtctacacagagtcctgtgatgtgaaccatcttcaggtctcttagctgtggatagc

SEQ ID NO: 443110 - DNA, 484 bp, Homo sapiens
gctgtttggcctcctgccaggaagtggaggatcaagagagcatcagctgtggtagtatagggatgatcaggcagygggcagtgccctagagttcccaagggagctctttgtttttggctaccagggcaggtagagaaagaccatcaggtgggggcagggttaggtgtgtctgagctcagactctccttgggtggggcttgctgtggctgctgtgggggattggggagtgggggtgtggttctcaggccaatgaagttatattctcagggggattatggctgcctctgctgtgtcatgtatgtgaccagtaaggaaagccgacagttataggcctcatccagctgctatgcagcccaaaatgccagtctcactcccaccataccccctccccaacatcactgggttgtttccaggcagcaggtgagcagggctgagaacttgccccaggctgccaaccttctggctatgaaagtgagcggggctt

SEQ ID NO: 443111 - DNA, 548 bp, Homo sapiens
acagcctgcagaaccgtgagccaattaaacctctttttaaaaaataaattacccagtctcaagcatttatttatagcaatgcaagaacagcctaataaaggcctcaataccatttcagaagtcatctgagagcccctcccatcagagacccagaggcctaggaggaaataatggtttcataggccaggcccagggccccactgccctgcacattctcaggacacggcttccctcatccttgccactccagctccttccwtggcacaaaggggcccaggtacagcttgggccaccactcctgagggcacaagccttaagccttggtggcttccacatggtgttaagtctgcagatgctcagaatgcaagtgtgaagaaggcttgtcagcttccacctagatttcagaggacatatggaaaagcctgagtatccaggaagaagtgtgccacaggggcagagcccccacagagaatctctactagagtggtgccaaggggaaatgtgggtttggagcccacacagagagttgccaccagagcactgcctag

SEQ ID NO: 443112 - DNA, 441 bp, Homo sapiens
ggctcatggccctttaagtgcaaaatctggcagcctcctcagcccccatgttctctgccctgctccctccttcccctgagacaatgagcagagtccattttttacctaaattgggtgggaagggaatgagaaaatcaggaaatacagaggattttttaaaagacactatctcagtattttcttttttttttttttttttttttttcaaaaaaatgtgtataaagatactgcactgggttgaatagtgtcacccccacaaaaatctgtctatcagcgatctcagaatgtggccttttttggaaatagggtctttgcagatataattaaactaaaatgaggtctgacaaaragtttctccttaaccaaactttagtcaggctcctcttaatcgtctttccaactaggctttgacttttggacttccatatctgtcctgcatta

SEQ ID NO: 443113 - DNA, 551 bp, Homo sapiens
ataccatttcagtgtggctattacattcatttaaacgcatttcagaaggcatctctgtttatggcatcacaaagagtttaataaatctgtgcaagaataaacaacaaacacacctataaatataaagctgaaatatcaaaactatttcagcactctgaaaattggcaaagcataaaataattagggatgcatattttttatagaaaaaaaaagtactagtgctttgagtaaggacagaaaatgtctgtagccttttgcctgtgacagcacccttctacccccagctcaatcagtatgaattacagaactggagttttaccaatatgagcgtagcaaataaaactagcagcttgctgccaaagggggtggacttgagtaaagccaaggagtggaaaaaaattcttcagtgtttccagctaaacatgcagaactccatatgaaatgaacagaaaaatctcacagctttacaagtccaagacaatgacytgtttgaggcaagtagtacatctgctgatagtaaatagcagattcctggataagataggcccata

SEQ ID NO: 443114 - DNA, 545 bp, Homo sapiens
tttgactaacgttgaatattaaccattgcatcctatgaaaatctccattaagttcatgcccacaatgatgatatgccaaatagagtcctcacaacaatggatgctggatggagtcacatcagtgccattgtcaaggaagccctggaaatgtaaaaatcctaaccgtgggtaatctgtaaggttacatctgatgatcccattgcaaagagaagaggattttaataatattggctgttggttttgacagatcatcaggccttaaaagaaacacaacaggatgattgcagacaaagccattctggaagagctatgatgagatgtttcaaaaatgagccacaatccaaaaaaatgytttccaagtgagtattaatcaaaatgccattaatgagcagggggcttttaataatgaggatgattcaacacatggacttcagtcagtcagctttcccagcttccccagggagtatcatgaaccaatgttatggaggtccctgtggggactcaataatatgactttcaactaactgagacctacagggctaccg

SEQ ID NO: 443115 - DNA, 574 bp, Homo sapiens
ataacataatactttactgaccattaccttgcctcattcactcaaatattcaaatatttaggtcttcttttttggtttctccataaaaaatttgtttctccactggggtcttgcctagttttttttattttattttattttttatttttagacagagtcttgctctgtcacccaggttggagtgcagtggcacgatctgggctcactgcaacttctacctcccgggttcaagcaattctcctgtctcagcctcccaagtagctgggactacaggcgcctgccaccacacctggctaatttttgcatttttagtagagatggtgttttaccttgttggtcaggctggtctcaaattcctgacctcaggtgatccatctgcctcagcctcccaaagtgctgggattacaggcgtgagccatcgygcctggccatcaggtttttattagatttttttccctgtggcattgtggtttttgctgctctccctccccacatcagatatgctaggcatgtccttccttaccttctcctcaagctcctctgtccaccctcatccctctcactgtccaggaaa

SEQ ID NO: 443116 - DNA, 438 bp, Homo sapiens
gcccctagctccctgatatttcttagtcttgtcatccmtcctgtgggatcttgtagaaaagaggcatttagaggaaacataatccccatattagagttagggggcctgtctggggtaagatgatggcctgaattgaaaatcaccccagggcatgcattctaaaggaaaaaaagaaaaagaatggttaggaacactgaaatagctttcacaggtccagactaataaaggaactgcctggtctaccttcgcttccactcagcattatgttccttaacattcattatttcccttgttctggagtgcgatatttaatgcccatattgctctagtaagatggggtaccaccccattagcagactttctagatgtcctttctacatattgctgtgtgattccactgatctagcattcactaggatcattggcctgtggatgcag

SEQ ID NO: 443117 - DNA, 591 bp, Homo sapiens
tttggtcccttctagcaagctccccatttgttcatggagccacagatcctgtggggtcctgactaaacctgatcaagaatgtgccatttccatttgataacatggctctgttcagattgttcagttttactaatggtgtttgtaagtatccaagtgrgaatggacagctaagggaccagtgtcacagtcacacatggtgctgaagccttaacatgttcagtctccatcagtgcctaatagcaagcaaggagttgccattcaatataaacacattcagtggctgattcaggcaacttatgtgtcctaagattgagaggctggtgcactcattgatagttttctgttgctatacgctccactgagtatgcatagaggttgtggatacctggacttccatctggttagcaggctgtaaaaatcttagagaagtgactgggccaggccttgttgaacagattccaaggctactgttgcaaaacgcctttttcaaagttggcaactttgttcatgattttgactaagggaaccaaaagaacacccaggtgaggtttatgccgtctcccattcgcaaaggggcctacctgccactga

SEQ ID NO: 443118 - DNA, 591 bp, Homo sapiens
tttggtcccttctagcaagctccccatttgttcatggagccacagatcctgtggggtcctgactaaacctgatcaagaatgtgccatttccatttgataacatggctctgttcagattgttcagttttactaatggtgtttgtaagtatccaagtgagaatggacagctaagggaccagtgtcacagtcacacatggtgctgaagccttaacatgttcagtctccatcagtgcctaatagcaagcaaggagttgccattcaatataaacacattcagtggctgattcaggcaacttatgtgtcctaagattgagaggctggtgcactcattgatagttttctgttgctatacgctccactgagtatgcatagaggttgtggatacctggacttccatctggttagcaggctgtaaaaatcttagagaagtgactgggccaggccttgttgaacagattccaaggcwactgttgcaaaacgcctttttcaaagttggcaactttgttcatgattttgactaagggaaccaaaagaacacccaggtgaggtttatgccgtctcccattcgcaaaggggcctacctgccactga

SEQ ID NO: 443119 - DNA, 588 bp, Homo sapiens
cacagaaaataaatgttgctaaggaggtggagaaattggagccctcgtgaactggctgctaggaatagaaaatgatgcacttgctgtggaaaacaatttggtggttcctcacagaatcacacggagaaccagaaattccactcctaggcattattcacacacaaaaaattggcagcagggtctggaacagatatttttacaccgaagttaattgcagcattatttgttatagccaaaaggcagagacaacccgtgtccatcaacaaatgaatggatacacaaaatatgatacataaataatagaatattattcagccattaaagaggatgaagttctgatacatgcaacrtgggtgaaacttggaaacatgatgctgagtgaagtaagccagacacgaaaggacagatgttctattattccactgatatgaaatatctagaataggcaaatttgtgaaaatagaatgaagattagtgtttcccagagactggggagagggagcaaggctgagttattgtttaatgggtactttatttctgtttgtgatagaaatgaagatgctggttatacaaaactgggaatgtact

SEQ ID NO: 443120 - DNA, 603 bp, Homo sapiens
cacttttcatctgaatatatatttttatatattagtaaaaatatatatagtaaatatttttcaagtgtgttatcttttgttaatttttttctgatacacaggggattttaattttagtttgctaaatcaaccttcagaatgcctgcttgtgaggtcattcttaggaaggccactgttaacgtaaaatgtacctgtataaataagtctttgtgttttcttctggtatttttctaattttgcatatgtaaaaatttcagtctgtattccatcaggaactcatttttgtgacataaaatttcattagttttcttcacacagcaggcattttattaataactygtcctttcctactcatctgaaatgttaccattatcaatccctatgtatatatcttacatatatttcagtgtttttggatttcctattctgttccatttatttatatgtgtttgtagctgttagtaaataattaattgtgggaattaatagcacgttttgatatctagaggagcaagtcgtttttcactccatcataaacattttaaaatgtcatcacaatggtaagacagacagcaagtgtcatgcaaaaatgataaaaccttg

SEQ ID NO: 443121 - DNA, 543 bp, Homo sapiens
actttcaagtcttattatttaaaaaatacatttcataaacctattgccgccatagatacttattcatctgacggatctgggcaaagtaaatcaaaaacctctggaaaggattcaccattctagatgccattaagaatatgattcatgtgaggaggtcaaaattattaacattaacaagattttggaagaagttgagtccaaccttcagggatgattttaaggagctcaagatttcagtagaggaagtaactatagatgtggtagaaatagcaagagaactagaattagaagtggagcctgaacatgtgactgcatygctgcaatctcatgataaaaatgcagcaaataggagttgcttcttatgaatgagcaaagaaagttgtttcttgagatggtacctattcctggtgaagatgctgtaaacattgttgaaatgacaacaaagattttagaatattccataaacttagttgataaagcagtagcagggtttgaaaagatggactccaattttgaaagaagttccactgtgagtaaaatgct

SEQ ID NO: 443122 - DNA, 523 bp, Homo sapiens
actctgtctcattcaaagggtgataaaaccctttctattgtcattttcaaacatatataaaggcaaacgaatccaaacaagcataaaagaggcttggttatgatgtgagagggtctgatgttaaagtttgggcagggggacacttgccatatatcacaggtgctttctccttcactgaactgtttaacaaaacgaaactcagttgaaccgaagctaaagacaactacaaccatctttcccagttcttttgaataaatcaaggaataattgtaagtgcttccctgttccctgtcctagccatttctccaagcctgtactcaggctccctctgtgatcaacagagaagactgtccatttggggagggaagtcctcatttgcaaccaattctctttcaccctgactgacttttgmtagattgcatcttacttgttattcaaagagtagtctaaagagcatgagccatttgcatttggaaaatggcatttgtgtaaaaggtgacattgccatggttttacacacttt

SEQ ID NO: 443123 - DNA, 566 bp, Homo sapiens
gtgggggagggggcttggaattgtggcatctacaatgccaggagaagctttcataagcctaaggctgtagtccttgttcaggggtggaaagatgcctccagtcggtccaatctgagtgacacccacgtctttggtaagcagctgggaaagaaaagctctgtctccttccagatggtgtgctgcattcccatggttttggatcctgcaaccactcttgttccacgcagaggccagcctgtgggttagagagatgcacagagagggacaaagcccggaacaatcacagagaatcaaagcactctggttataccttgccttccctaagctgctgatgaattagcagatcaaattccagaaataattcaaccttccactgttttttttttttcacgcacgtgtccctttgccaggcagccttgctgtagtgcctctgtttaatattccatttgtaagatgggcagctccaagtctatgctcactcagctgctcatcaagaataacaaggtaaatgacaaaggaggtaagaatgtcctygtcaaatgtcctatgctgtcacctgccagaaa

SEQ ID NO: 443124 - DNA, 649 bp, Homo sapiens
cagaatgctggacctttaactcttaaagagctttacacctggcaggtgctcaataattgtcaaattggctatgagtaacattccgttycattcctttacatccccgccccctgaattggcttattgccatctgtgacatctatgacagatacctacttccccctgttcagatctccatatttacaagctgataccatttctgctggagagctattgtgtccacaatagttttcctctgaaatccccacaccctttctttgtcatttggccatgaagccaaatcaccaagtcaggattctgttctgcaggtttatgtctttgttccaggttcagtgacaagtaatgacaagccaaggaagaggagttttctccccttttgtcatttccaggcctctgagctcatatgtcctcaccttggggctgtggcaggcttcaaagaccagagaagagggaagttttaagagaatgaaactgtacaatgagaaaagccacttatgattttttgttgttggtggtggtggcgttgttaccaatctgggaaattctgaattgagttacattttaataaattgttagcatttatgctctgactgaattactctttcagcccttcatttaagaccaacagagtgatgggttgcagaaggtg

SEQ ID NO: 443125 - DNA, 605 bp, Homo sapiens
aggggtgtgagatctgtgcttttaaagatcactcaagcctctgtgcagagaatgtgttaggaacatatattagtgtcctcagactgctgaaacaatgaaccacaaactggtacgtcggcttaaaataggagaaatgtactctcttgcagttctagaagtcagaagtctgaaaccaaggcgtcagcagggccaaaatccgtctgagactgggaggaccctccctggcctctccccagcttctggtgggttgctggcaatcccagctstttcttggcttgcagctacgtcactccagtctctgcccctgtcatgacatggcatcatccctttgtgtctgtgttttcctatcgagacactgctcactagattagggcccactctaacccagtgtgacttcatcttaactgtaattcagttaagaattacatctgcaaatagcctatttccaaataaggtcccgttcacaggtactgggaattaagtcttcaatatacgcttttagggacacaattcaacccaccacagaaggatggaatgaatgggagagaccaatcctgtgggttcccgaggtggtggaaactttagctgtttggggtggaggcaga

SEQ ID NO: 443126 - DNA, 551 bp, Homo sapiens
atgtgaataaggataaataatgatagattctgacgcggacgagccaaccagagtggaggctctgtccctggtgatttaggtatcagtcctagagatttagcttatgtgggttatatttgctgataccatgatagctattaaaacagggaaattttaaacatatttctcaattcattggacataaccataataaacccattctatgttaataaaaatagcacatattttggaaactatccatatttttcaaaattccatttagtggaaaaagtgccactatctatatattttttgcaaatattttgaatgtccrgctttaaagaaaacagcgggagtctcctctctgcttctgtattcagtctgttgtgaatttgtttggttggagtatatgaagaaattctggcctcgagcagatatttgaaaagggaggaatattttaataacctggaacagataattgtggatatttttctttgatattacaccaaaactcaatacactgtaatgtcttaacagttatttactgggtggaatctgaaaccatatcactg

SEQ ID NO: 443127 - DNA, 583 bp, Homo sapiens
tggcgaccagttgacccttgagaatccagtggtctgactgcagaacaggcctctgcctggaccaccctcgtgccaggatccgtgccctttcccactcccttttctgcgactctgaactcctgcctttgcccacagccttttcagccttcaacaaacaaaagcaccctttatactagagcaatgagagattcaggagcaagcctgattcgacttgcttttaaaaatatgtatatttatttaaaatacacatgtatattttcttatagttcatatttattatattttattaatatatatatttattttgtaagtagggacatcatatttttcaaattaatggactttattttttagagcagttttagattgacagaagcacagaacagaaagcacagttcccatcctcccctcccccyaccccctcccttcagattcccctattatgaacattttgcagtagtgtgtgcatttgctataatgtatgtgctacatttgctataattgttgagccagtattttacatgactattaaccaaaacccatagtttacattaggcttcactcttggcatcttacgttttat

SEQ ID NO: 443128 - DNA, 687 bp, Homo sapiens
tgttcctaatcagcattaagggaggagaaaaaatggggccagtgtttcagggttccgtcattctgttatggatgattttatgattggtactttttttttcctttattttttgctttttgtatttcaaaagcttttggggtacaagtggtttttggttacrtagatgaattatgcagtggtgaagtctaagattttagtgcactggtcacctgagtagagtaccttgtatccaatgtgagatttcttagcccttggctccctcctcccctgcttctgggtctccagagttcatgatatcactcatgcctttgtgtatccatagcttagctcccacttataagtgagaacatacagtatttgattttctattcctgagttattcacttagaagaatggcctccagctctattcaagtgtctgcaaaaaaacatgatttcattcttttttatggctgagtagtattccatagtatacatatgccacattttctttatccactcattggtcgatgggcatttaggttggctccatatatttgcagttatgaagtgatgattgccacttttttgaattagaaaaagtcgttttagataattgtagattcacttgcagttttaagaaataatctagtggatcctgagtatcctttgccagttttccccaggggcaacaccttgcaggactaca

SEQ ID NO: 443129 - DNA, 599 bp, Homo sapiens
taggaaactctcctcatcagggggtaggaggctgctgggagtccctgagacatattcttgcatctggcaagaagggtgtttccagggaagctccaggattgacgtcactgtttggcctgggtcagctgccctgtcaatcactgtgggtgggacttgggagggcggatgtgctgattggctggttcccagcccacacctggaccttgttgggatctgggctcaccctctcctgattcatactgagaattcaggaagtgtgggcttccctaaggaaacactggggcactgttaccagaagatgaacatgctgagcaggttaaaagcaactggcatccactgtcaacactctcytctgtgcctctagccgtggcgtctgtagactgtggcacggtttcagctgaaactgtgtgctcaagtttgtagttctcagacctggagtgtgtggtaaagcacttcgccttgcccaaagagaggtctggtctttgtccttggggtctgggtgatctctattggggtatcatgtctgacaccagtgtctctttacctggggtgtcttgggctgagccggataggggcaatgtgatttacactggggactt

SEQ ID NO: 443130 - DNA, 634 bp, Homo sapiens
ttcagtaagcgtgtgttgagcagatgagcagatgagtgagtcaatgcatgccatgttctttttccctttgcaggtcaatcagttgaacttttaaccttgagaagcctgccacgtggtaattacttggtgccactcttcattggagacaaacagggactttcccagaagcaaactgtccatgtaaggatctgcccctgtgccagtgggctcacatgtgtggagcttgcagatgcagaagtggggcttcatktgggggccctgttccctgtctgtgcagcatttgtggctctggcaggtcagtggtctgtaggggtgtcctgggactgtggctcctctccccaggcaataggccaggggtaaggggcttgctggggtaggggacagcggtggcaggattggtggaatggctttgagaatgacttctgggtgtactcaggctcctagatgtagatcagaggttgccatgctggccaggcaagatccctggccagcaaaagcagcttctactcacaatggaatccactggtaaatatagtcaaggagtggccctttgtttgtaataaccatggagacagcaatgtacagatattcaggctcctggacttggcaaggctaataagaaagcagcttttcc

SEQ ID NO: 443131 - DNA, 645 bp, Homo sapiens
agtgctgagtttgagaaactgtgcttagggaaatagtgttttttattaagtagacgttccctaaatgggattktgttaggctcactagttaaatgagtctgagctggcttcttggccatggctttcagtagatcatggcagaacctgctcttctaccattgtccggcaaaggccaaccagaaagctcactgcccttggaggtacaaggcctaggctctgtttctgcttttgcatctcattagcttcatcatttaaccctacatcctcatctgtgaactgggatgataaagtcaaattcttagataggttgtggatcaaagaggatgcctatgaaggcacctaacacaaggcagagccatataaagtaattggccaatggccactggtttttcaaactggctgcttctgaaatgggccctacattatcttagtcatccttgcagcaaccctgggctggggttagacagacaaagagatgaaagcattgtgagctctcctgtttgtcttcatctagaattaagtggttgatttagaaaatgaacacaaaagaaatgtcaaaaggaaacacacacagaggattcggtcaccccatcttacacctccaccaatgtttttttcctggaagggagagacttattgaatgaa

SEQ ID NO: 443132 - DNA, 645 bp, Homo sapiens
agtgctgagtttgagaaactgtgcttagggaaatagtgttttttattaagtagacgttccctaaatgggattttgttaggctcactagttaaatgagtctgagctggcttcttggccatggctttcagtagatcatggcagaacctgctcttctaccattgtccggcaaaggccaaccagaaagctcactgcccttggaggtacaaggcctaggctctgtttctgcttttgcatctcattagcttcatcatttaaccctacatcctcatctgtgaactgggatgataaagtcaaattcttagataggttgtggatcaragaggatgcctatgaaggcacctaacacaaggcagagccatataaagtaattggccaatggccactggtttttcaaactggctgcttctgaaatgggccctacattatcttagtcatccttgcagcaaccctgggctggggttagacagacaaagagatgaaagcattgtgagctctcctgtttgtcttcatctagaattaagtggttgatttagaaaatgaacacaaaagaaatgtcaaaaggaaacacacacagaggattcggtcaccccatcttacacctccaccaatgtttttttcctggaagggagagacttattgaatgaa

SEQ ID NO: 443133 - DNA, 621 bp, Homo sapiens
tcagaggctcaaccatgaagggaaacagaaatggttcccagtcccaggagctgtgcctcagtctcctccttggagggagagagtgaaagctgctgagcttggaggagactggcaggaatgtcacacaacctgagttcaggttgtagctgaggtggaagggacagtggggatgccctggttacccttctttcccagcagctttgtgattgtctcttggaaaagaggaagcagctatggaagcagtgtgggtggaaaggaaccttggcccttgtgatgctaagaccaggagggttggagggggcttaatgacatggtggcactggtcaaagaccagctatgccagygggacaagagaacctcatgctgggcaaggggctctgttctcttcttgtaccaacaaatctttctcttgtttcccattcacagctaaaggcacatctccattcctgcttcagtatcttagggctctgagaagtggaattcaacagacctgggtgtagattccaaatctgtgattgatcagttacataatctaactgaatctgactttcatatataaagtgagcttgatagtcttctgtctcttaagttttttggactctaatcaaataacacatgtaa

SEQ ID NO: 443134 - DNA, 604 bp, Homo sapiens
attggctatttttgactctttgatagtagctatcctaactgggatgagataatacctcattgtgggtttgatgtgccttttcctgaccattcatgatgttaagcagtttttcatatattttttggccattttatgtcttttgagaaacatctgttcagatcatttacccattttaaaattggattctttttattttgctgttgagatatttgagctcctcgtgtattccagataataaccccttattggataaatagtttgcagatatttcctcccattttgtacgttaacttttcactctgtagtttcctttgctgtgcagaaacttttttcgtttgatataatcctatttgattatttttgcttttgttgtctatgctttcgaggtcttactcataagtttttttacaagaccaatttcctgaagcattttccctagattttcttccaatagtcttatagttttgggtctcacatttaggtytttgatccactttgagttgatttctgtatagggtgagagaggggagtctagtttcattcttctgcatatagatacctactttccccagcaccatttgttggaaagactatcttttcctca

SEQ ID NO: 443135 - DNA, 543 bp, Homo sapiens
taggttgtatgtgttcaggaatttatccattgcctctaggttttcaaatttaccggcatatagttgttcacagtaattaataattctttgtatttctgtggtctctattgtgacatctcaattttttgtttcaattttatttacttgaatcttttctcttgttttcttagtctagctaatggtttgttgatttcatttattttttcaaaaaatcaactttttgtttcattaaccttttgtattgtttttctggtctcgattttgtttatttgtgctctgatctttattatttctttccttctactaattttgggtttcatttcttcttgaatttctagttccttaagatacattattaaattgctcatttgaaatatttctagttgtttaatgtagtcatttgttactttaawcttgcctcttactactgtttttgctatgttccatagattttggtgtgctgtgtttcctacttttatttgcctcaaggaattttaaaatctcattcttaattgattttctcactccttggtcatcaggagc

SEQ ID NO: 443136 - DNA, 606 bp, Homo sapiens
agggagggaaggaaggaaggcaggcaggcactgagggaaattcagaagatgcaataaacaggaaaattagcactctccaaatctggattatacacaaygtgaaagagactacaaacaattttatttaaaattaataaaaagataaaaaggaataaaattcaaaaagaaaagctcagatactgtgaaaaagaatagaccaatttgaaaagccaaatagaacttctagaaatgaaggagaaactcattgacattaaaaacaagtaaaaatatccatagctagatatgttatagaaaaatttcagaacctcaacaacaaaggattgagaaagtaaaaacatattatctataaataaatggcaattcgagtgacagcaaactcctcatcaacaacaataattcttgaaggctgggaagcatcttgaaagcaatgagggaatataacaatcagagtatatatccatctaaattatatgcacatgaggtgaaataaaagcctttttagatagactgcttgaaaaagtttactactcgcaattttgccccgagatgaatattagtttaaacaatatgaaatttctgatatttggccattttgacccacaaaaa

SEQ ID NO: 443137 - DNA, 606 bp, Homo sapiens
agggagggaaggaaggaaggcaggcaggcactgagggaaattcagaagatgcaataaacaggaaaattagcactctccaaatctggattatacacaatgtgaaagagactacaaacaattttatttaaaattaataaaaagataaaaaggaataaaattcaaaaagaaaagctcagatactgtgaaaaagaatagaccaatttgaaaagccaaatagaacttctagaaatgaaggagaaactcattgacattaaaaacaagtaaaaatatccatagctagatatgttatagaaaaatttcagaacctcaacaacaaaggattgagaaagtaaaaacatattatctataaataaatggcaattcgagtgacagcaaactcctcatcaacaacaataattcttgaaggctgggaagcatcttgaaagcaatgagggaatataacaatcagagtatatatccatctaaattatatgcacatgaggtgaaataaaagcctttttagatagactgcttgaaaaagtttactactcgyaattttgccccgagatgaatattagtttaaacaatatgaaatttctgatatttggccattttgacccacaaaaa

SEQ ID NO: 443138 - DNA, 607 bp, Homo sapiens
ccatacactatgatgaaaaccttaataaatttaaatgattgaaataatacaaagcatgttcatcagtcacaatgtaatgacattagaaattaattagaagtaaatttgaaaaattcacaaataggtaaaaattaaacaacatactcttaataaccagtaagtcaaaagggataccacaaggaaaattatagtttgaaataaatgaaaataaagattaaacatgccaaacttatggatgcagctgaagaagtgcttagagagagattaatagctatataaatacctatatttwaaaagaagaaatagctctaatcactaacctaaacttccattttcagaaaccagaaaaaaggagagcaaactaaacccaaagcaaaatggaaggaaataataaagattagaatgaaaataaatgaagtagagaatatattaataaaaacaagagtgaaaattcaaaattgacaaacttatatctagactgaccaaaagagagagagaatactcatattactaaaactaggaatggggccacagggagggagaccatcaggataaataactaatgcatgtggggcttaatacctaggtgatcggttgataggtgcag

SEQ ID NO: 443139 - DNA, 509 bp, Homo sapiens
catttcccccaataagatatacaaatgaccaacaagcaattgaaaagatgttaacatcattaagcaaatcatcatggggaaacgcaaattgaaaccacagtgagttttaccacttaacacccactaggatggctataatgaaaaagatatataataacaagtgttggcagggatgtggagaaattggaaccatcatatattyctggtagcaaagtaacggtacagcctcttttcaaagttgtttgacaattcctcacaaagttatagagttgccatatgacccagcaattccactctcaggtgggctttgatttcttaagagaactttatttcttaagacaaatcaaaacctatgtccacacaaaaactggtacacaaatgttcatagcagcattaatcataatagcaaaaaagtgaaaacaactcaaatgtccatcaacagatgaatgaatcaacaaaatgtgattattcatataaaagaatattatttggccataaaaaggaatgaa

SEQ ID NO: 443140 - DNA, 509 bp, Homo sapiens
catttcccccaataagatatacaaatgaccaacaagcaattgaaaagatgttaacatcattaagcaaatcatcatggggaaacgcaaattgaaaccacagtgagttttaccacttaacacccactaggatggctataatgaaaaagatatataataacaagtgttggcagggatgtggagaaattggaaccatcatatattcctggtagcaaagtaacggtacagcctcttttcaaagttgtttgacaattcctcacaaagttatagagttgccatatgacccagcaattccactctcaggtgggctttgatttcttaagagaaytttatttcttaagacaaatcaaaacctatgtccacacaaaaactggtacacaaatgttcatagcagcattaatcataatagcaaaaaagtgaaaacaactcaaatgtccatcaacagatgaatgaatcaacaaaatgtgattattcatataaaagaatattatttggccataaaaaggaatgaa

SEQ ID NO: 443141 - DNA, 596 bp, Homo sapiens
ggacatccttctcatgcttcaaggcacagctcaaatgtcatctcctctgtaaagctgccctttactkcttcaaacctaagtctttaactggggacttaactatcttccaagcacagcattagatgctttcatcacagttgtgctgaagggtgggtgttaccatcttcacttctcagtgagtagtttgagaatcaaaattttaaaggacttagattaaagtgtagccatacactcatgaggggacagggccaaaattggcccaggcctgacttccaagttgattggttttctcatcattccatgataagtactagagagttaagtgctttttcccaaaaattcatataacttcttgcttatagctcaattacagtggttattgcactgaattctatttaggtatgtttgcatccctcctctgaaattgattttgagctgcttgagcgaagaattcagtcttgttcatcattgagttcccagaacctagcagagtaactgcaaatacagccaagcctcattattcacaaattccatatttgagaattcaccaaaatttatttgtcactttcaaatccatgtttagtgcacttttgtgg

SEQ ID NO: 443142 - DNA, 528 bp, Homo sapiens
gacctgccagttccacagccatgtgattgtggtgaaagcagacataacattatggctcaaacagagcaaagatgagcttacaaagtacatggtttaagtaactccagagctttgggacacagatctctttcttcaggacacgtatctcatgtaaccataatcatgattggtggtggggaattttaaaaacagagtatccccaaaaccttccagacttagttataccacagctaaatcaggtgattccaacacatgattcacatcccacaaaaaaatgaaatgtttacaaaaacaagactcttaaaggatgaagtagccttttctcaaaatccattcaaaatttaagccaatctttctttctgtgttttgtttgacaattgctgttrcttatgctaaaataaaagattcatacatacaattttcacacacatacaatttttgcatacaaacacatatgcaatttttgcatctaagtttcagggttctgacatattttaaatgccattgtcttagtatatgtaggtcata

SEQ ID NO: 443143 - DNA, 587 bp, Homo sapiens
gtattcattgatttatttcctagatgtctcagccagatgtcctcttacttgttcaagaatgtttaaagaacagtggtaaggccaaattccacatttaaaaaatttttatgttgtctataatttggatctatcttatttctcaaactttgaaaatagcaaggcatgcttttaaaattatttatgtgggtaatatccaaagcaartgcccatgaattattaactagagtcctgttagtagttctactatgcagaataaccatttcataagtaaagcttttagcttgatgacatcatcactatttataaagattaaatgagtcctagatgtgactaagaaatgcaaaatatgtaaaatgtactcttgagggtaaaactgaaggataatctgcttttatcaatggttaaaatcagtattttaccaacagtgaataggtgtaacccaaccctaattaatgaatccacagagtggtgcccatttaggtttatcagttgtctaatacaatgtccagcttggggctttatggctctttgtgttttacatagtccttatgaaactgtgtcatctcttgaattagtcatccccatcc

SEQ ID NO: 443144 - DNA, 556 bp, Homo sapiens
tatttctccccataacctgtaaaacaaaaaaatatataaacattgaaattgctacctgtaccacaagatgcagaacctartagtcatctcttgaataatattttgacattattttaaagatgaattagaattcatgtgatcactctttctttctggataaattaatgttgagttgatttgttcaagtaagatttaagaagagaccatctgaaagagtcaacatgatattagctcatcctcttagaaaccttgtttgtaatcccttggtattaccttgatacacttttatgtgtagaaaaactcccattttatagaaagaccccttagtgaaaagcttactttgacacattggctattgtaactacttttcttaatgcacacaagtttctctcatcatttaaggagttcttaacaatgagtacacatcaaaaaatacatttaaagagaattttttccttatactgaataaggtgagattaagcagggacttctgtctaccaggccgtgggaataaagactgaagtagaataactcacttagaaaactatcctggcat

SEQ ID NO: 443145 - DNA, 545 bp, Homo sapiens
aaggcccctgatcttcccgttaccttttggggtaaattgacagtaacatccacaaaattcttggaatcgaatcccagctytatacaaacaagtcatgtcactcctccagttcatgttttactcatgcctaaaatgaggagttagtggtgaatcagattttccagttgtgttttctagaatccttgaacactgggaggaggaggagagtggtggtaccaccctacctctgctgccaccagaaccacttttatctgtttcttatttggagtctctgtagtggagaagagtataggctgtggagccagaatatgtgaatttgtatcccagctctcccacttcccagctgtgtgtccttgggcaagtgacttcgcctttctgtgcaccagtttcctccctactcatggggataatattggtaccctctcatagggtcacttacagaatgcttaactcagtgccgagcatgtggtgagcactcagtaaatgttagctgctattcttattttatttgaaaaagaaaatgttctctgctttaaagaaaacca

SEQ ID NO: 443146 - DNA, 575 bp, Homo sapiens
ccaggttcaagaagctcaaacaaccccaaatatatttaatccagacaggttctctctgatgcacattatactcaaattgtcaaaagtcaaaaacaaaaaaaaagaattttaaaagcaacaagacaaaagcatcaagtcaactataagggaatctccactagactaacagtgaatttgtttgcagaaacctttcaggccaggagagaacaggatgatatattcaaagtcctgaaagataaactattggccaagaatattgtacacagcaaagctttccttcaaaaatgatggagaaataaaatctttcacagacaakcaaaatctaagggaattcatcaccactagaccaaacttacaaggaatgctcaagagactcttacatctggaagtgaaaagaagataaccaccatcataaaaacatacaaaactataaaattcactggtaaagccaataagcaaaggaaaaacagaaaggaatcaaaccttatcagtacagaaaggcacccaaccataaaaataaaccacatgagaggtagttaagaaacaaaggatttacaaaacaaccaggaaacgat

SEQ ID NO: 443147 - DNA, 543 bp, Homo sapiens
agtggtgagaactacaaacaaggtttccccatgaagaagggtgtcatgacccatggccgtgtccrcctgctactgagtaaggtcctcttacagaccaaggagaactggagaaagaaagaaagaaaatcagtttgtgattgcattgtggatgccaatcttagcattctcaacttggttattgtaaaaaagggagagaaagatattcctggacagactgatactacggtgcctcattgcctggggctccaaagagctagcagaatcctcaaacttttcaatctctctaaagaaaatgatgtccaccagtatgttgtaagaaagcccttaaacaaagaaggtaagaaacctaggaccaaagcacccaagattcagcatcttgttactccacatgtcctgcagcacaatcggcggtgtattgctctgaagaagcagcgtactaagaaaaataaggaagaggctgcagaatacactaaacttttggccaagagcatgaaggaggctaaagagaagccccagaaacaaattgccaagagatgcagactt

SEQ ID NO: 443148 - DNA, 543 bp, Homo sapiens
agtggtgagaactacaaacaaggtttccccatgaagaagggtgtcatgacccatggccgtgtccgcctgctactgagtaaggtcctcttacagaccaaggagaactggagaaagaaagaaagaaaatcagtttgtgattgcattgtggatgccaatcttagcattctcaacttggttattgtaaaaaagggagagaaagatattcctggacagactgatactacggtgcctcattgcctggggctccaaagagctagcagaatcctcaaacttttcaatctctctaaagaaaatgatgtccaccagtatgttgtaagaaagcccttaaacaaagaaggtaagaaacctaggaccaaagcacccaagattcagcatcttgttactccacatgtcctgcagcacaatcggyggtgtattgctctgaagaagcagcgtactaagaaaaataaggaagaggctgcagaatacactaaacttttggccaagagcatgaaggaggctaaagagaagccccagaaacaaattgccaagagatgcagactt

SEQ ID NO: 443149 - DNA, 502 bp, Homo sapiens
aaacatcacaacagcaaaataacaaagaatctgattttaaaatgggcaaataatagaaatagaaacttctcagaagaagatatacaaatggtcaaatccaacaaatatatgaaaaatgctcaatatcaccagtcatcagggaaatgcaaatcaaaaccacagtgaggtattatctcaccccagttaggatgacaatttcaaaaagacaaaaaacaacaaatgctggtgaggatgcagagaaaagggaatttttctttctttctttctttttttttttttttttagagatggagtctcgctgtgttgcccmggatggtctcgaactcctgggctcaagtgatcctcctgcctcaacctcccaaagtgctgggattataggcatgagccaccgcacttggccaagaaaagggagcttgtatacactgttggtgagaatgcaacccttacagccactatggagaacagtatggagctccctttaaaaatgacaaataggaatggg

SEQ ID NO: 443150 - DNA, 496 bp, Homo sapiens
aaaacaagtgatgcattgatcagttgatgaaaatatggtgacggcaggctctcaggcacataacccctgagaagcgatgggctactacttgctaattcagttttgggggtgactttgtggaatgtataacctgaaataatgagaataaactatattytactttttttacaaagcaaggaaataatttttaaaagcaagttaaattttactgtttttgtaagagatatgttttcgaaacagttgaactgttttataacacagagaaagtctctttgccttacattttatattagttaattaagtcagcagatttttcttgggctcctgtgatgtgactggcactgttttggtaccaaaagggcattgcaaaaaaagtccagaagtagacagatcacagccttcaggattaaaagcagtctcatcaatgtgatatttcgtttaaacttagtagcaagcccattgaattctcaaaatgagaatctgctaattatcacac

SEQ ID NO: 443151 - DNA, 615 bp, Homo sapiens
acaaggtttttgtagggtcatagatttatactaactaacatccatgggaagaagtggaaccagtggctagaagtttagcaaggaatattacagctgctacaacttctacacagttggagcatcrgacaacgaagggggatggggctaccctgaagtggatacacaggggcactgtcaccccttggcaaggatggagtcaggaagagtcacacatatgaggctctggatgaggtaatttctaggccaccttctaaccccaaggtgctaagcatcaattctgtgattattgtctcaagtgctacttgatcccaaccccatgccaggaatgaaccatgtctcagactgacaccaagttttctgtttaactagtagcttggaggtggcttggtcacggaatttttaaaaactttcaggggatgcacatgtggatacacttccaatagaaaattgagactaaactggattcccaccccattgctttctgtcacttgacagcaactgcatccttccctctcattttttaggagaaggaagcatcccctaatcccaaccactgcccctccccagcagggatgatactcatttcttggcctaagcagtcagtcatcttctgca

SEQ ID NO: 443152 - DNA, 615 bp, Homo sapiens
acaaggtttttgtagggtcatagatttatactaactaacatccatgggaagaagtggaaccagtggctagaagtttagcaaggaatattacagctgctacaacttctacacagttggagcatcagacaacgaagggggatggggctaccctgaagtggatacrcaggggcactgtcaccccttggcaaggatggagtcaggaagagtcacacatatgaggctctggatgaggtaatttctaggccaccttctaaccccaaggtgctaagcatcaattctgtgattattgtctcaagtgctacttgatcccaaccccatgccaggaatgaaccatgtctcagactgacaccaagttttctgtttaactagtagcttggaggtggcttggtcacggaatttttaaaaactttcaggggatgcacatgtggatacacttccaatagaaaattgagactaaactggattcccaccccattgctttctgtcacttgacagcaactgcatccttccctctcattttttaggagaaggaagcatcccctaatcccaaccactgcccctccccagcagggatgatactcatttcttggcctaagcagtcagtcatcttctgca

SEQ ID NO: 443153 - DNA, 599 bp, Homo sapiens
aaacaattggagggaacctatggataatgcaggaagatcggctgccgggggaaggagatgagttggaatgctcatgaggctttcactcagcacccaatataggaaactgagggtctaaggagaggtttgggaagagatacaaatgtggaggttctcaggatagttgttctttaaaggaatcagaaactctaacagttagaggccaaacagaaaaatcaccagagagaaggagtcaaaaaagtaggaggaaactaggaatgtgtggcaacacagaaatgcaagaacagtggtctgagagagagagcagaatccacagttaaatgatgctcaaaagttgggtaagacacaaatggaaaaatctccattgaaggtcattgcagaccttgaaaggagcagttcagtgaatggtgggggcagacaccaggttggaaggggttgaaaagtcaaagggcaagcttcccattaaactcartggattgtatccctgcagttaggactcctctgtccccaaactccagcaaaatgatcgtagattagaaatgttaacacatttttttagaaaatggaaagcaaatgtagatgtagcaactgattgagca

SEQ ID NO: 443154 - DNA, 607 bp, Homo sapiens
aatatagaccatacaataggccacaaaacaagtctcaataaattttaaacaataaaagtcatgtcaggtatcttctcagatcacagtggaatgaaactaaaaatcaaytccaaaaggaactctcaaaactatacaaatacatagaaattaaacaatctgctcctgcatgatttttgggttaacagtgaaatcaagatggaaattaaaaagccctttaaaataaatgataatagtaacacaagttatcaaaacttctgggatacagtaaaagcagtgctaagaggaaagtttatagcactaaatgcctacagcaaaaagtctgaaagatcacaaattgacaacctaatttcatacttcaaggaactagagaaacaaaaacaaactaaacccaaagctagtacaagaaaagaaataagatcggagaagaacaaaatgaaattaaacagcaaaaaaaaatcaatgaaacaaaaagcttgttctttgaaaaggtaaaattgatagaccataaactagattaaccaagaaaagaagagagaatattcaaataaactcaatttgaaatggaactagagacatttcaactgacaccacagaattatgaaagatc

SEQ ID NO: 443155 - DNA, 607 bp, Homo sapiens
aatatagaccatacaataggccacaaaacaagtctcaataaattttaaacaataaaagtcatgtcaggtatcttctcagatcacagtggaatgaaactaaaaatcaattccaaaaggaactctcaaaactatacaaatacatagaaattaaacaatctgctcctgcatgatttttgggttaacagtgaaatcaagatggaaattaaaaarccctttaaaataaatgataatagtaacacaagttatcaaaacttctgggatacagtaaaagcagtgctaagaggaaagtttatagcactaaatgcctacagcaaaaagtctgaaagatcacaaattgacaacctaatttcatacttcaaggaactagagaaacaaaaacaaactaaacccaaagctagtacaagaaaagaaataagatcggagaagaacaaaatgaaattaaacagcaaaaaaaaatcaatgaaacaaaaagcttgttctttgaaaaggtaaaattgatagaccataaactagattaaccaagaaaagaagagagaatattcaaataaactcaatttgaaatggaactagagacatttcaactgacaccacagaattatgaaagatc

SEQ ID NO: 443156 - DNA, 607 bp, Homo sapiens
aatatagaccatacaataggccacaaaacaagtctcaataaattttaaacaataaaagtcatgtcaggtatcttctcagatcacagtggaatgaaactaaaaatcaattccaaaaggaactctcaaaactatacaaatacatagaaattaaacaatctgctcctgcatgatttttgggttaacagtgaaatcaagatggaaattaaaaagccctttaaaataaatgataatagtaacacaagttatcaaaacttctgggatacagtaaaagcagtgctaagaggaaagtttatagcactaaatgcctacagcaaaaagtctgaaagatcacaaattgacaacctaatttcatacttcaaggaactagagaaacaaaaacaaactaaacccaaagctagtacaagaaaagaaataagatyggagaagaacaaaatgaaattaaacagcaaaaaaaaatcaatgaaacaaaaagcttgttctttgaaaaggtaaaattgatagaccataaactagattaaccaagaaaagaagagagaatattcaaataaactcaatttgaaatggaactagagacatttcaactgacaccacagaattatgaaagatc

SEQ ID NO: 443157 - DNA, 513 bp, Homo sapiens
gctcctgcttgctccatagagcaggaggcctgggtctgtagctgcagtttgggcggctgtagcggcacagggagctcccatcccaactcagaaggggcagctcccacgggctccatggagtgttgcagccccagctgtgcttccctgctgcagccagcatgatggcagcagccactgccatcactagcagtgccgatggctacctgaagctggaagacgyaaggaccacttctcccctagggcctgtagagggagtgcagacttgtccagaccttgatttcaggctctcgaccttcagagctgtgagcaaatacatttttgttgtttgaatccaccagtctgtgggaacacatagcagccacaggaaactaatacaacacctgagagccccatctgtagtaattattcaataacagttagtcatcagtcaccatcaacctcatcctatttcggaccaaacctgggcagtggggacacatcaagcctaccatttggagggtgactctcccagca

SEQ ID NO: 443158 - DNA, 567 bp, Homo sapiens
gtggcttccttaaaatcactgcacttacttacttttgtaggctgattgtacaaaatgtgcactagctgacataattccagttatttatttgtagattcaggaaatgagtgagaaagcaagattatttcaggttcaaagtaatttgctgaaagcataggttctcctggttctcccacttagcagcatcttacctaggtaaattacttaagctctgagtmctaatgcttacatctgtaaaaaggagaaacaacagtaatgcaaactttgtaaacttttatgagatagtagctgtgaaatactttacaccattcgagtaaatgttagtagccaccatttctattgtatttatttttattctccaggcagcctctttcatgctaggggagcaccaaaaagaagggactccaggtcttctttgccaaacgtttgccattatatttcaccaagaggctgctttataggaaaaaacatgtgtgtgtgtgtgtgtgtgtgtgtttgtgtgtgtgtcgtagttaatggtaattttgacttttaagtattgaatgaatggctccctgaatgaccatt

SEQ ID NO: 443159 - DNA, 565 bp, Homo sapiens
aagatctgggcaccgtggcccagtcaagttgacatgtaaaattagccatcacagactcagatcttgctgaatcatctaggtcatagttgccactaagaggggttgtaggcaagtagtccaagaatgattttggtcctcttattggaaattccagaaaaaaatatatagttactttctattaggatagtctaatttaatggggtaaattytaagctctgcttctaacttggtacttaccaaatttacttacatttcatctaaataaaaccataacagcaagtttagactattgattctatcaaaacctcatcaatcccttttatatgtgacctccctcttcggccagcccttctctccctaattcttctctaaactcttttttttttttttttttttttttttgtattttttgtagagatggggttgcaccattttgcccaggctggtctcaaacttctgggctcaatcaatccacccacctcagcctaccaaagtgttgggattataggtgtgagtcacggcacccagcctcttctctgaacacttaagaaacacacaggctgtg

SEQ ID NO: 443160 - DNA, 634 bp, Homo sapiens
taacttgcccagccatacagctgatgcagtgaagaagcactttttataaaccccttcctacccaaggcagctgagctgacaagatggaaaagatgaaaagcttcactcttcacatctctctggactatagaacaggagtgggaaaagtatggtccaccagccaagtccagcctgctgcctatttttgtatgaccatgatwaagaatgttttttcatttgtatagagattgcactgaatctgtagctcattttgggtagtattgttaaatagttgaaaaaaacaaaagaagagtaataattttgtgacatgcaaaaatatacaaagtaagctcacatttcaaagtctttaaataaagttttattgaaacacagccacatccatttgtttacatatggctgcttccatgctacataagcagagctaagcagttgcaacagagactctctggtccttaaagcctaaaatgtttactgcttacccttttccaaagaaggtttgccactccccgctctagagaccaaactggaatttagagtaagttattctgtcttctctaggcaaccctcagcacccttctctgtctccagaacttaaagtattccccctccacatttaaaagaatccggaccaaaa

SEQ ID NO: 443161 - DNA, 634 bp, Homo sapiens
taacttgcccagccatacagctgatgcagtgaagaagcactttttataaaccccttcctacccaaggcagctgagctgacaagatggaaaagatgaaaagcttcactcttcacatctctctggactatagaacaggagtgggaaaagtatggtccaccagccaagtccagcctgctgcctatttttgtatgaccatgataaagaatgttttttcatttgtatagagattgcactgaatctgtagctcattttgggtagtattgttaaatagttgaaaaaaacaaaagaagagtaataattttgtgacatgcaaaaatatacaaagtaagctcacatttcaaagtctttaaataaagttttattgaaacacagccacatccatttgtttacatatggctgcttccatgctacataagcagagctaagcagttgcaacagagactctctggtccttaaagcctaaaatgtttactgcttacccttttccaaagaaggtttgccactcccygctctagagaccaaactggaatttagagtaagttattctgtcttctctaggcaaccctcagcacccttctctgtctccagaacttaaagtattccccctccacatttaaaagaatccggaccaaaa

SEQ ID NO: 443162 - DNA, 559 bp, Homo sapiens
gccctgcttggcacgtaggaggtgctcaataaatatttgtggaccaaaggggctactcatttattaatatttggctcaaggccctgatggagtatggacctctgctttggaatggatgctgtgaggacagtcaggaagtcccacactgcacacactaaaccaagagagagtccacgtaaagctcctgggtggccactgcaacagtcttaagcactctaagaaaggcataaaagcagattaatgctcaagtattgacccacatctgcaaaggacgttggggcagggagacgcttagctgataaatagaaaactacccctgtctaaagcagggatggttgggatatgactgccttgatgcaaaacaggagcaggaaataggacaggcccaaacaagggctcaaaaaagaaagaaagaaagaaagaaagccaaagcggcaataacaacaacaaactcttgctgctggtgggaaacctacagggcaagctccttctccacatgarccctgctggcagttgtttgtatgtgtgtgtgtgtgtgtgtgcatgcacacgcgtaaga

SEQ ID NO: 443163 - DNA, 589 bp, Homo sapiens
tgacttgtcaatgacaaactcacttgagtgaaatgcctgcaattaaaacttctctaattctaggccaatgctctttctataagagcatgcagcctctcatttaccttgattgatttgctcaatgtgccagctagccacctctgcacactttgtgtctctgtgtgtgtgtgcttgcatgtgttcttcctgttcttttcaccaatgattcttagctttgactagacttgttaaataaagatttataactttaatggctttatatgcctgataaaatgctygattgttttcaataaaagttgctaaattattaaattatttttaatggaagaccaactaatcattcattcgacaaaaatatactcagtccatactatgtgtcaggcattagtattgctattcatcacgaaattgatggtctctgctccagagaagctcacaacaatcaatttgaggaaatacatacctagaggttaggagtgtggactccagtgtcagatggactcggagagaatcacagctctcccacttattcattatagaatcttggacatgttaacttcagtagatctctattttataagtagtaaaa

SEQ ID NO: 443164 - DNA, 591 bp, Homo sapiens
aattacagcatgtcagtaataaaggaaacttgaggatcatctcccacacttaattcctcatttcaaaaataagaatagtgaagtgacttgtcaatgacaaactcacttgagtgaaatgcctgcaattaaaacttctctaattctaggccaatgctctttctataagagcatgcagcctctcatttaccttgattgatttgctcaatgtgccagctagccacctctgcacactttgtgtctctgtgtgtgtgtgcttgcatgtgttcttcctgttcttttcaccaatgattcttagctttgactagacttgttaaataaagatttataactttaatggctttatatgcctgataaaatgcttgattgttttcaataaaagttgctaaattattaaattatttttaatggaagaccaactaatcattcattcgacaaaaatatactcagtccatactatgtgtcaggcattagtattgctattcatcacgaaaytgatggtctctgctccagagaagctcacaacaatcaatttgaggaaatacatacctagaggttaggagtgtggactccagtgtcagatggactcggaga

SEQ ID NO: 443165 - DNA, 619 bp, Homo sapiens
tagttattataactaataaacattctgttaatttaacaaatggttattatatttcctctgacagactatgatatatggttgacaagggtatgagctgttcatattcctttcaaggaaggacttgaccagctatgaagagtgtgatgaacacacagcctccagctgccagcaacatctgggactgtgagttagctagaaggagcggctttgcccaaggtcacacccttccttagagcagcccatgtatgacgactaagcaaagcaagggtgtaaagctccagtcatctaagcytaagtcagatcaactctcattaataatatctactgcagcactccctctgcctgatcttgcttcctcacagatgttgtcaatctctagtaaacacatcccatcacaaactttatctccatctcttcttcagagaacccaacttttgacagtaccgtgcgataaccaagaaggtggctctggatcctctgtgcccaactctgaattctgacctccactccctgggctctctcaaatgtgtcacttagtcatatgttgccttggtttcttcacctataaaatggaaatgacattaatctgtaccccataaagttgtgaagatcaagtgaa

SEQ ID NO: 443166 - DNA, 500 bp, Homo sapiens
acagaatggggagcttggagattttccaatatgccttgcttcagggcaactgagtgcagagaggaaggtttatggtgctcttaaactttgtgatctgccacttcccttcctatctttatttactataattcacccatttactcatcatttattcggcaaatgctgattcatatttagtatgggttctggacatgtgggataaatccacaggtcgttttcaataaaacctgcccccaaatctctactcttctcttctacacacacacacacacacacacacacacacacacacacacacasaggcacacacacgcacacacacacacacaaattttcttgttcttggtttactgagcacagtagaggacagttaactatcctgagtataagagtgtctccaccaattaaaactctccatggcctgataaaactctccattggcttttaaaatgacctgccatcctggctccaggcagttctcacagttcataactccccgc

SEQ ID NO: 443167 - DNA, 520 bp, Homo sapiens
gaggctacaacagttccaaacagagtgaaaaatgaagaagatcatctagatgccaaggcccagttggctatgtatgggtaaaaactatctgggttacagcagtcatagttgaatgcttgttctacaggcaacrtgttacatatagtatgtcataacttcactaccatttctctttaccattgtacagagacaaaactgaatttcagatcagaaaagttacattgctttcctatcataccaagaataagtggtcaagccagaattcctacccagactctctgatcctcaaacctccattctttccccatcacctcaaaactgtcaatccaatggtcagttagaattaccataatttgggaggcggaggttgcagtgagccaagatcatgccactgcactccagcctgacaacagagcgagaatccatcaaaaaaaaaaaaaaaaaaaaagaattaccttatttttgccaccattttgtcttgtgttccacaaaagcctattgttttttgttttgcccacat

SEQ ID NO: 443168 - DNA, 629 bp, Homo sapiens
ggcctccaggagagtttaaacagcctcttaacagtccttcacctccatactgttttcaggatgattatcttaaaacactgatataaccatgtcagccatgcttataaaatctctgtggctgctatctgctagacaatagagtcccaattacttactggtactctctgtaatttagcttctgcatatccttctaatatgacattgccactttcacccatcttaccaccaggatccatcctcctctatcatcataaccatgatactaacatcatagccaaattttagggaggaccctctacatacctcctacataaaagtttttcacaagttctcagaaacttcctatgagatatttttacctttattatactgagattcagaaagttaagaaacctgttcaggatcacasagctgaccacaaaggtgacagagttaagacccaaacccaggtctatttgactcccaaactttgctctgccacatggacattctgaaatcctggtagtttcctgaatgagccgtgctctttttacttcaccattgtcttggcaagtgcttttctctgcttttaataccctgccccttcttagacagctgcctaactgctcctttcccaaggatttggctcc

SEQ ID NO: 443169 - DNA, 629 bp, Homo sapiens
ggcctccaggagagtttaaacagcctcttaacagtccttcacctccatactgttttcaggatgattatcttaaaacactgatataaccatgtcagccatgcttataaaatctctgtggctgctatctgctagacaatagagtcccaattacttactggtactctctgtaatttagcttctgcatatccttctaatatgacattgccactttcacccatcttaccaccaggatccatcctcctctatcatcataaccatgatactaacatcatagccaaattttagggaggaccctctacatacctcctacataaaagtttttcacaagttctcagaaacttcctatgagatatttttacctttattatactgagattcagaaagttaagaaacctgttcaggatcacagagctgaccacaaaggtgacagagttaagacccaaacccaggtctatttgactcccaaactttgctctgccacatggacattctgaaatcctggtagtttcctgaatgagccrtgctctttttacttcaccattgtcttggcaagtgcttttctctgcttttaataccctgccccttcttagacagctgcctaactgctcctttcccaaggatttggctcc

SEQ ID NO: 443170 - DNA, 476 bp, Homo sapiens
tctagtaggaaagattgacaaataagggatgattatttgaattaacaccagtgatatgcacaggccacagcaggaagacaaaggaaagatattctatccagcctagggattcaagaaacactttttacaggagatgatagttgagtgaattcctttaaaatgtattcaaggtcgtacagataaataagcaacaaaccaaaactataacatttgtgtcctcttatgtaatctagtaaaacaggaaattaaataggaaaagttagcatttacatcctatttatgacatattttctaaatatagaaatggtagtgtatgtattggagagaacatggtttgtatatgatgtctgcttaccaggtgtgtgaccatagkcaagttcttcactctctgatccccagtgtcctttgaaaataagaaaatttactaaaaattgttgttgtaaaaattaagatacagtatgttcaaagcttctaac

SEQ ID NO: 443171 - DNA, 504 bp, Homo sapiens
aaaccttagtttcccataaagaggcagcgtaaacatccggcagggaagaatggaattttggggacagttagcagtcttgattattaattaagagcaaatagttcttcccttgtagcrttcatcaccatccctcaaaaacacaagtaatagaaaaagctgagatagagttaccctgggagaatccaagaataactttggtaaggtaagtgtatataaattgaaagaaaacactcgactgctattctaatcattcttgtaatcaacatttatttaatttttattaggcatcacttggtggggatacaaagatggaaagaggaaggcaatgtatgtatgctaggaggatcagaagacaaccatagttagctaagaggtcatgatttagcaacaaatgaaaccagacttgtctaacaaatttctcatcaacaaacattgtacaaaaaaaagtactgaataaaagtattgcctatgttgttgttcacacctatgtatttactagaatgt

SEQ ID NO: 443172 - DNA, 616 bp, Homo sapiens
acctaacataaaatcaccacatgagataaaatgtgtgaaagcaaagaacacataggacagtctcaacaaaaccatgtttaactgaataacctccaaatcaccttcacagcagaccataagatgagaagtttgatttgtttgtttgtgtctttttctatcaaggaacctatgtaataaggttaattaggaaacaagttttcctaataaagcctatcttctctyggagtctgaattccatggtgctctacagtgtcctttgctttacctcttaatacatttttataaggaaacactcatacaactctgcagggctttgacactttgcagtggatttgagggcagaggaacccatgggctgagaccctgtttttgaagcaggatggaggatggtgatgggattgggtaatggaagctatttatttaccaccagctgcctccagctgtgacaccccgctaggttatggaataaagcacagtaaataaacaccccgaggagacaccctgaagcacagcacacatggaaatccatctcctcacaaatcctagaaaaatatgtactcagtgctgagcacgtccaaaataaaccatcccaagccaatgatttggaatgatttcc

SEQ ID NO: 443173 - DNA, 611 bp, Homo sapiens
gctgtgatatatagctccaacaaaggcctcagcttaccccatggggagttctggtgttggtatggtctttcagaattataccaatttgggatacagtggccaggccatagatcagtcataggaggcaggttgactctcaagaggaggtgtgaccttgactaaggagggctgaaactgagggctgtcttcagcatcccttcctgcagctggggaagttaagtcctccattcctgaaaggagacaggggttccatgtggccataacagcatctatccaacatcccatcctttaaacacccagcatcctaatattctaagcactktagcaaggcaattaaagcaattaaggcttagcaacgtaaagtaacttggcagaggttacatagacagtagcaactgagttggtactggaactcaagcctggctgattgcaaagcctatgttccttctccacatcaacttatctccctctggcacattataaattgtatgacagcatgtatgtggtaatcttttgaagaccagaaatacacactcatagaactgatctctttccagaactgcactcttccatcatcccccaaacaagcaattccctctgagcccacacac

SEQ ID NO: 443174 - DNA, 645 bp, Homo sapiens
ccaataaattagagattatggtaaatgaccaagcataagaataattggtgttcctcaggaagaagagaactctaaagtttggaaaacttatttgagggaataattgaggaaaattccttgctcttgttagagatctagacatccaaatacaagaagctcaaagaacatctgggaaattcatcacaaagagatcattgcctaggcacatactcatcaggttatttaaactcaagacgaaggaaagaatcttaagagctgggaggcaaaaaggaaaacctatcagagtaagagcaaatgtcccaacagataccctacaagatagaagggattggagtcctatttttagcctctttgacaagataattatcagtcaagaattttgtatccagtgaaactaagcttcataaatgaaggagaracgaagtctttttcagacaagcaaatgctgagagaatttaccactaccaagcaaacactacaagtaatgctaaaagaaatttgtttctaaatcttgaaacaaaacctcaaaatatacaaaaatagagcctcctgaaagcataaatctcacagggcctataaaactataacacacacacacgcgcgctcgtgcacacacacacacacgcacaaaaaggtgaccaggca

SEQ ID NO: 443175 - DNA, 525 bp, Homo sapiens
tgtttgctttgttaaaaatcagttggctataagcatttggctttatttctggtttctctattctgctccattggtctacatgattgtttttatgccagcatcatgctgttttgctaatgatagccttgtagtatggtttgaagtttrgtaatgtgatgcttccagatttgttctttttgtttagtctggatttggctatgcaagctcttttttggttccacgtgaattttaagattgatttttctagttctatgaagactgatgatggtattttgatgagaattgcattgaatttgcagattggttttggcggtatggtcatttttacaatatttattctacctacctatccatgactataggatatatttccatttgtttgtgtcatctatgatttctttcagcagtgttttgtggttttcctcatagagatctttctcctctttggttaggtatatttatttatttatttttcttttcttttctttcttttcttttgagacagagtttcactctgtcgcccag

SEQ ID NO: 443176 - DNA, 495 bp, Homo sapiens
cattctgtgagaagctaacatccatcgtcaaatgtgtttgggagaatttgcctagtatactccactagagaatcatgacaaattctagatcttgaggagaaatcttttaaatccaattcaactcatgtttcccaaaattacttatcacatactccttatttcaaaaaatacctggtaacaaattgtaggatctgtgttttaaaatttggaaaacaaaaattcataatcccaaaggaaaggagaaaaatataagcatccaaaatagtgcctaccrtatagtaggtaactaatggatgctaacacgcattattttacttaatccttacaataactgtatgaggaagattttgttttcctgttcagacgagaaaacttgggcacaagaagctatttttttaaacatacaaaatgctatctcatatcccaaggggcagacagtgtccttggacagccaagggctattgcttcagtcccacccaagcatcaaagtggact

SEQ ID NO: 443177 - DNA, 573 bp, Homo sapiens
gagatttctcaaagaactaaaaatagaactaccatttgacccagtaatcccattatttggtatatactcaaaggaaaataaattcattcaatcaaataaaatcattcaatcaaaaagacatctgcacttgtatgttcatcgcagcactattcacaatagcaaacacatggtatcaacctcagtggccatcaatggtggattggataaagaaaatgtggtacaaatacaccatggaatactatgcagccataaaagaaaatgaaatcctggcttttgcaccaacatggatgcagctggaggccattatcctaagttaattaacacagaaacagaaaaccaaataccatatgttttcacttataaatggaagctaaacaccgggtatttaaacatacagacacaaagatgagaacaaatagacactaggagctacaaagggggggcaagagctgaaaaactatcaagtactgtgtttactatttcggtgacaggatmaatagaagcccagatttcagcatcaggcaatatctccttggattccgtgccaaactaatagacacccttctcctattc

SEQ ID NO: 443178 - DNA, 568 bp, Homo sapiens
tcactataccctcttccaatccctttgtcttatggttgagaggactcagaaaactcgagagctttcctcaaagtcacatggggaattattggcattgctggtaccaacacttgaatctcatcttaactccttctagagtgcyctattaacaaaagcctgcaaatatgagccacaatttgatcagtaagttttgtaaaactgcatattttaaattaagaggcagcatggcataatggtgaaaagcatggattccatgactgacaaatctgcatttggttctcagctcttctacttacttgctttgtgacattgaccaaattaacctctctgaatgtttgtttaccacctcacctgaaaaatgagtggtaaaatgtatatagtgcttgtcacaagatagggattcatcaaatggaagttgttgttattattattattattattactattatttaactggacctggagtcagtaaactgtagcccacaaactgaatttggcctgcctgtttttgaatagcctgtgagctaagaagttttacatttttaaacggttaaaaaattttaaaata

SEQ ID NO: 443179 - DNA, 553 bp, Homo sapiens
ttaactaatctaactacttcacatcttttaactcagtaagtattctcaaaagttctatgaaatagacataaatattattcccactttacagatatggcaactgagacaatgattaagcaaatacctctaagttgtatagctagcaagtgaataacttggaattcacctccaccaccatcatcaccatgaacatgtatataataattataataataatgacaatctccaggtaatcccagttctagagcatgggcttttacacttaatttcctccaagaaggctttatggtggaggaggtggaattagaactgagcctagaggaatgggtagtaacacaaaaacccyggggaaggccattcaagggcaaggaaacagcaataagcaaaggcccacagaaaaaccatggaagtagtttgaatgacattctcagaaatgcccttcagggaggatgattgggaagatgatctggaattcaacttgcagatggaatggagggaatcatgcttggaacaatgaaataaacagaaaacaagctggaataaattactttat

SEQ ID NO: 443180 - DNA, 299 bp, Homo sapiens
tgaagttgttctcataaacaaaaacacataagtttttcaggcacttaggcaccttaacctcactgtcaatgtgccaaatctaatcagcaggcttgtttagcccacacagtggttttttgttgttgttgttgttgtttgtttttkttttttttttctggaaccagttgacattatttatttatccatagacacataaatatagtatcatctttatatatcagacttcatgcacagatcagcagtttctcctaaaacatcagaaagtccagcaataccagcattcccacatggcagcaatg

SEQ ID NO: 443181 - DNA, 566 bp, Homo sapiens
taaggttaatataaaccaccttaatacctactgaacatgtcccagcttcagtttgaatcctaggcacgtgttgtctgtttgaacatactcaaagacctgagagttgggggtagctggacttggcatgcccaaagagacaggggtgtggtaagtacctcatgagttggcctatcctgcagtggagatattaggaaaccctttagaaggagcttatatttgcttamatctctcctgtcccctaaatcagtgagagtctgatcaggaaaatgaaaactacactaattatttcaaacaagggttgggagggaggatttgatgcaggcacttggttccaaaagcattcgaaagcaaaggaagccaaaagggggttgtaaataatcccagagattagtaacttcaggaagctgctaccaccagtagggctggaggcacagaaggatggaggtggtgttagcagagcctaggaacactaactgccaactctgctgctgcggggtcagacagcagctactgcttatgctgctgtaatcacaactgcccgacttactgatatcactgaagcccat

SEQ ID NO: 443182 - DNA, 609 bp, Homo sapiens
tgaatttctatggccatctataattgctcaaagtttagtttccaaatttgtaacaattgtactttaggagatcaggtgccatacagaggcagtctttaayacttactaacctgagaacaggttaatgaatggaaagaaagtaactttctctatttccctggtcgggcattatcactaatatgttctaatatgtgtgagaaatgctataaaatccttttaatctgaatactaacctcttagccaaatgtaagctttaaaaatttgcatcttcccaattagacaaaaatgggtttttttaaaattagatttacatgtagtaaaatgtataatattaagaatatgatgacttttgacaaatgtgtacatctgtgtaatcgacacttctaaagaaatacagggcattcctatgcccagaaagctttctcatgccctttaccagacaatcttccatgtcagagatagtcattccaaaatttattttcaatcataaattagttttgcttatttagcacctcatattgaatcatacagagttctgggtatttttttacccagttttttggggcttagcatagtgtttgagagctctacccatgaaattcaagtatt

SEQ ID NO: 443183 - DNA, 566 bp, Homo sapiens
tcatacagaaaaagactaaaggaagtgattagaaacagatgtgacgctttaaaagcctccactgttaaaagcagaaaggagtcacagcgggagctgggcagagttggagttatgttktatgtccataggcatcccctacccttactaaagcccatctcaaatatatagagaagatagttttctccatatggacaagatagaacattgattcaggagctggttgctctgagacacaattaagaatcagcctagaatcagtggttggaatcttacattgccttgttagaaggaaaaaaagcattaatgtaggatttatatattggaaagctctacagaagctgaaatacagtagcaaatgaaacgaagagtcttaagaaaacaggagtcattacagaattaactaaatatactaatttctgtccttttctggaaagctggtaaaaatccctacagatcaatttgctgttttacaaagaaagcatcaaacattgctcagtgctgttaggagacaattctccatggttctctcctgttcccacatgtcttctgagcaaaggcactgacat

SEQ ID NO: 443184 - DNA, 547 bp, Homo sapiens
ccacatactctcccacttaccatctttatgatggtagtagataaaaacagatcatgacagtagctgtcatactactgaccactgctattcagtgagtacctgccaggtacataatctcattagagcttcaccgtactgcatttaatttatgacaaaacaaaataacattcccaaggtcaggcaattagggatttgaacatagtgctgtctgactccaaaaagtcaatgctcttaaccactatcttttaagacaatttaaaactttcaacaccaagatggtaaaattaagtgctacattgtatgttatagactaacaatgctcagaaactcagaggtaaagaatttcaatgaaattcaatgtgctttcagagagaaattgtgacttgatgttgaaaatactygattctcctaagaagtctagtagcagacacaatcctgaaagtctgtctctggatggaaagctcaatgacaattgataaggaaagagctttgaagagcttcactatgtgctaactacagtagcccatgatagactctcctattgttg

SEQ ID NO: 443185 - DNA, 611 bp, Homo sapiens
tgatatccccatctttagatcctttgtttaatcaacttgccaatgaccattttccaaataaggtaatagttacagattccaggaattagggcctgctatctttgggagctgttatttggcttattaaagaagggcattgaaaatcctatttcatcctgcttcatgatgatattcaaggtgatctctcaaggacatcatcatgcataagaaccaaacataggtagatataatcatgctgtgggcatttggtggggaaaggtagagaagcaggaaggcagagtcaagagaagctgactgtagtaggattgttgcataatggacataacatttgctacctgaaacaacacacaactgcatcatgctgactggatgagagcctgcattcctgtcaaccaggacaagaccactaaagagtcctagattggccaaccaatgagtaattttctgacactaaccatttgttrtaaaatcaaacaacttttcggtgccagaactctccgtctcagaaacatttaattccatgcaaaacatttaattattttatttaaggaaaaaataaaccacacttctcattctatgagtactatgcccatgctccttagactgctgtg

SEQ ID NO: 443186 - DNA, 571 bp, Homo sapiens
aaacaattcggccccttgggttcactcatctgattaactggaggatattttgtggttaatggaatcctgataaatctatcatgagctcatcaaaatttaaacttctgcattatatcattaaagaatctcagtctcaaaatcttccaagaacagtgaatattatatttggccaccaaaaaaatccactccctgttttgttaactcrtcagctctctttagacatccacatccatacgtaagcacaccctcccagcccatgaagtcaatgtgttttggggaaagccaagctccgcccctagctagtcagccccaaggtaagcagagcattcctctccctgggcagaataattggttcagggatggactcctgattcaattgcaagtcaattaaatatgagaaaaaggtttttttgtttgtcttttggggactttcttttgtcacaatctgggactgaagctttttgaccacagagaaggaagatccagaaggaatcctctctccatatttgaaacaagtagcaatgaagccatctcttaaccacaagagggagccaatccttacgttgaagct

SEQ ID NO: 443187 - DNA, 564 bp, Homo sapiens
tgggctgtattactcctattttgagtttctgtaggagatgtaaataaggtgattttgtttatttgtttrtttttttaattttaaatgaaaacttacatacagtctagaaacctcagtccttgggacacttgtaatagaagtctgcccaacatttaaagtctttaaaaaaatcctggcagatatttacattttaccagctgcaaggtgaaataaaactttgggtttcttggctggaattagagtacatcagtcaggatagtaacactggttctcatgttgatcaaaaagctgattctcgattaaatatttatttggcaaataaatatttgaaaaatgaattctacttgatgaatcctgtttggtagattaaaatctttcaaagtatagactctaggaagaggtgtctgcagtggcaaataggtctgtaggatgattacctctggtgattggcatgccatgaagcctgtgtgtacctgggctgctttgtcactctgctgaggcctttttcagtgttaattttgggttctgagtggaaaggcaggaatttgggactattcctagttc

SEQ ID NO: 443188 - DNA, 427 bp, Homo sapiens
caagggcagccctttcaagcaaggactgtttttattctcacatccaacactcaacaactgttgaagatgggctaggtttccccttgctccttatttctactgccaaactattgtttcccctctactctaaaattccccagttacctggaagcatgtattgtgcagaataamtgaccagattaacctgcccttgttgcaataatctactttccattcatgttgatgtcctagacagcgtcattctcaacaactatactgactccaaaatttccatgtcaagagtctcactgagctcatcatcttctgtttttcttgggcattcctccaacaattctgagccaatatgcttcaaccacagtggaatctcccattgactgcctcttccacttttcactgtctgtcatacttctaccactgcctcctcacc

SEQ ID NO: 443189 - DNA, 415 bp, Homo sapiens
ataaattcagttctgagtgttctatctcagaggccagattaggatttctttgtactctcctaatttacttgaattamaatatacttggtagttatcgccctgatgatttcctctttgccccaattatttggaagtagacatattggcatacacataagctgaggaatgttagggaaactatgctcatttatcagatacagcaagttaaaatcgaatacctgttagaataggtgaaggtttattgctagtaataagcagaaagtgctggagcaaggggtagggttgcgaatctgttgaaggtcagccaaacaatgtacgaagagaggaaattagatgacaggaccttgcacacaatatgtaactaggattcattgataaaaatatatgaatagtagatggatggaatgatggatag

SEQ ID NO: 443190 - DNA, 415 bp, Homo sapiens
ataaattcagttctgagtgttctatctcagaggccagattaggatttctttgtactctcctaatttacttgaattaaaatatacttggtagttatcgccctgatgatttcctctttgccccaattatttggaagtagacatattggcatacacataagctgaggaatgttagggaaacwatgctcatttatcagatacagcaagttaaaatcgaatacctgttagaataggtgaaggtttattgctagtaataagcagaaagtgctggagcaaggggtagggttgcgaatctgttgaaggtcagccaaacaatgtacgaagagaggaaattagatgacaggaccttgcacacaatatgtaactaggattcattgataaaaatatatgaatagtagatggatggaatgatggatag

SEQ ID NO: 443191 - DNA, 415 bp, Homo sapiens
ataaattcagttctgagtgttctatctcagaggccagattaggatttctttgtactctcctaatttacttgaattaaaatatacttggtagttatcgccctgatgatttcctctttgccccaattatttggaagtagacatattggcatacacataagctgaggaatgttagggaaactmtgctcatttatcagatacagcaagttaaaatcgaatacctgttagaataggtgaaggtttattgctagtaataagcagaaagtgctggagcaaggggtagggttgcgaatctgttgaaggtcagccaaacaatgtacgaagagaggaaattagatgacaggaccttgcacacaatatgtaactaggattcattgataaaaatatatgaatagtagatggatggaatgatggatag

SEQ ID NO: 443192 - DNA, 415 bp, Homo sapiens
ataaattcagttctgagtgttctatctcagaggccagattaggatttctttgtactctcctaatttacttgaattaaaatatacttggtagttatcgccctgatgatttcctctttgccccaattatttggaagtagacatattggcatacacataagctgaggaatgttagggaaactatgctcatttatcagatacagcaagttaaaatsgaatacctgttagaataggtgaaggtttattgctagtaataagcagaaagtgctggagcaaggggtagggttgcgaatctgttgaaggtcagccaaacaatgtacgaagagaggaaattagatgacaggaccttgcacacaatatgtaactaggattcattgataaaaatatatgaatagtagatggatggaatgatggatag

SEQ ID NO: 443193 - DNA, 538 bp, Homo sapiens
caagaagaataggctttttttcttgttagttctattgcacagcatggtaaatctaactaattctaactaattatagagtattttatatttgaaaattgctaagaggataaatttcaaatcttctcaccacaaaaaatgttaagaatttaaaytgatggatatgttaactagcttaattattccacattgcagtcataaactataacattagtttttaccccatagatttacacaattacaaattgtcaatttataacaaaaattataaaatgtaccaaccttgaaagctgcattctgtttttctcacttcacctaaaaaatacaaaacacacacaaaaaggaaactgaaataaaagccaattaaagtaacacaagaagtcaaaaagacattttctttatttcttttaacttttacccatttttcttgttgacaggaaagaagcatttaactacagagagaaaaaaaactgataaaactctttttctcctatattgtttttaatatatttttactttttaaattttgtcataatttgct

SEQ ID NO: 443194 - DNA, 538 bp, Homo sapiens
caagaagaataggctttttttcttgttagttctattgcacagcatggtaaatctaactaattctaactaattatagagtattttatatttgaaaattgctaagaggataaatttcaaatcttctcaccacaaaaaatgttaagaatttaaactgatggatatgttaactagcttaattattccacattgcagtcataaactataacattagtttttaccccatagatttayacaattacaaattgtcaatttataacaaaaattataaaatgtaccaaccttgaaagctgcattctgtttttctcacttcacctaaaaaatacaaaacacacacaaaaaggaaactgaaataaaagccaattaaagtaacacaagaagtcaaaaagacattttctttatttcttttaacttttacccatttttcttgttgacaggaaagaagcatttaactacagagagaaaaaaaactgataaaactctttttctcctatattgtttttaatatatttttactttttaaattttgtcataatttgct

SEQ ID NO: 443195 - DNA, 538 bp, Homo sapiens
caagaagaataggctttttttcttgttagttctattgcacagcatggtaaatctaactaattctaactaattatagagtattttatatttgaaaattgctaagaggataaatttcaaatcttctcaccacaaaaaatgttaagaatttaaactgatggatatgttaactagcttaattattccacattgcagtcataaactataacattagtttttaccccatagatttacacaattacaaattgtcaatttataacaaaaattataaaatgtaccaaccttgaaagctgcattctgtttttctcacttcacctaaaaaatacaaaacacacacaaaaaggaaactgaaataaaagccaawtaaagtaacacaagaagtcaaaaagacattttctttatttcttttaacttttacccatttttcttgttgacaggaaagaagcatttaactacagagagaaaaaaaactgataaaactctttttctcctatattgtttttaatatatttttactttttaaattttgtcataatttgct

SEQ ID NO: 443196 - DNA, 540 bp, Homo sapiens
ctgtttttctcacttcacctaaaaaatacaaaacacacacaaaaaggaaactgaaataaaagccaattaaagtaacacaagaagtcaaaaagacattttctttwtttcttttaacttttacccatttttcttgttgacaggaaagaagcatttaactacagagagaaaaaaaactgataaaactctttttctcctatattgtttttaatatatttttactttttaaattttgtcataatttgctttttaaaatttcttatgagtatagaaattatgaatgacaatgagtaaaaatgcagaggggatgtttaataaacatgattaaattgtatgaaagaaaaaattatataggcagcacttatcccatggaagccatcatgataagatttttgataaattcaggcaagattattttaaggtgctattacaatttcttctcaggttctatatttctactcttgaatgctgattagaacacaggcttttgcgtcttctctctccttactcccctaataatctgttctcccttatggaccaagt

SEQ ID NO: 443197 - DNA, 540 bp, Homo sapiens
ctgtttttctcacttcacctaaaaaatacaaaacacacacaaaaaggaaactgaaataaaagccaattaaagtaacacaagaagtcaaaaagacattttctttatttcttttaacttttacccatttttcttgttgacaggaaagaagcatttaactacagagagaaaaaaaactgataaaactctttttctcctayattgtttttaatatatttttactttttaaattttgtcataatttgctttttaaaatttcttatgagtatagaaattatgaatgacaatgagtaaaaatgcagaggggatgtttaataaacatgattaaattgtatgaaagaaaaaattatataggcagcacttatcccatggaagccatcatgataagatttttgataaattcaggcaagattattttaaggtgctattacaatttcttctcaggttctatatttctactcttgaatgctgattagaacacaggcttttgcgtcttctctctccttactcccctaataatctgttctcccttatggaccaagt

SEQ ID NO: 443198 - DNA, 540 bp, Homo sapiens
ctgtttttctcacttcacctaaaaaatacaaaacacacacaaaaaggaaactgaaataaaagccaattaaagtaacacaagaagtcaaaaagacattttctttatttcttttaacttttacccatttttcttgttgacaggaaagaagcatttaactacagagagaaaaaaaactgataaaactctttttctcctatattgtttttaatatatttttactttttaaattttgtcataatttgctttttaaaatttcttatgagtatagaaattatgaatgacaatgagtaaaaatgcagaggggatgtttaataaacatgattaaattgtatgaaagaaaaaattatataggcagcacttatcccatggaagccatcatgataagatttttgataaattcaggcaagaktattttaaggtgctattacaatttcttctcaggttctatatttctactcttgaatgctgattagaacacaggcttttgcgtcttctctctccttactcccctaataatctgttctcccttatggaccaagt

SEQ ID NO: 443199 - DNA, 585 bp, Homo sapiens
agtacgaatctcattaagcttcaagctatatcctacaccaaattactttgggctcctgtgccaagagattggcagcaaggagaagcgtcactctctttgccaggacaattatctcctcatcaggatctgatatggctgctatacacaataagggcagaaaagaatatctggcatgcaggtgatacactaggcattttgtgaactttccttgctttttttttttttttgtaataaacggacaagtgcagcagcctaaaaataaaatgttgaggaggggttcagatcccttagtaatagtctgtgttaccccayaaggtaggccacatatgttcattagggtactggctgaggatgggagaattttagaatgggtaggagaagagaagaagagaagagaagagaagagaagcgaagcgagagatattaagtatctattgtgagcttgaatagcaggggccatggttccccactaatcttcttctaagaggtttcctaaagatggcaacctattcggattctggaggagctgttctcagatgggataaatatattatatgatgcaagtagtgccaagtagatgccaca

SEQ ID NO: 443200 - DNA, 564 bp, Homo sapiens
aatgactgattaatattgtactacaaagaccggactccctttcctcagcttgggacacctataaatacattgatcccaagtaacttcccaataaatttcatgcatgaaaacctctgtcttagagtttgtttcaccagaaaatttacctaaatcaaggtaaatttggaagacatggagcagagagttgaacacagatatgtcaggctctgaaatccatatcctttccattatatctttctacctatcaaaasgaagagttgaaacaaattttcagaacatttttgtgtatgcagtagacataggcaatgatggtatatttcagcctgtaagtcatcattcttcattattacacaatagctacaattatactgccattggaatattaaactaatgtatttagatctcttgaaatctagacatctacagagatgttagtagatatgtacaaacacacgttgatttataatattatattaaaatacagttgacccatgaacagcacagatttgaattgtgcagatgcacttatacatggaaatttttccataaaaattatataagtat

SEQ ID NO: 443201 - DNA, 564 bp, Homo sapiens
aatgactgattaatattgtactacaaagaccggactccctttcctcagcttgggacacctataaatacattgatcccaagtaacttcccaataaatttcatgcatgaaaacctctgtcttagagtttgtttcaccagaaaatttacctaaatcaaggtaaatttggaagacatggagcagagagttgaacacagatatgtcaggctctgaaatccatatcctttccattatatctttctacctatcaaaacgaagagttgaaacaaattttcagaacatttttktgtatgcagtagacataggcaatgatggtatatttcagcctgtaagtcatcattcttcattattacacaatagctacaattatactgccattggaatattaaactaatgtatttagatctcttgaaatctagacatctacagagatgttagtagatatgtacaaacacacgttgatttataatattatattaaaatacagttgacccatgaacagcacagatttgaattgtgcagatgcacttatacatggaaatttttccataaaaattatataagtat

SEQ ID NO: 443202 - DNA, 635 bp, Homo sapiens
ttgactataatcttggatttaaaaggaaatattcaccctctgcccctaccttaaccaattttgtctgatggaagtgtttagcttggagaaaggtggtcttgtactgacactgaaaacattgacccagatggtcatttatgtcgcacttctaacccgacactacaatttggggaagatttttggccaaatcattagaatgctgccctgtgartcaataggcttaggccaccatttacattttgtttcttcagtttttttctttttctttttatatatccatggattcctgtacacttttaatagcagcatattacaatcaggatattacagtgtaaagagccaagtctttggatacagatggacctaggttggatcccagcactactacttattaacagggaaatattgagctagttctctactttctctgagcctctgtttccttctctattaaatggggataataatacttgcctcaaggtttgttttgagaattagtgaggtaatagatagtacttggcatttattagacacaaaataaatattcattccatttcttctttaatactctttgtgattattaagctatctcagctggctgcatttatatttatgacattcaaaatatgaaagca

SEQ ID NO: 443203 - DNA, 539 bp, Homo sapiens
acaatacacacagggagagttagctgaacagcaattaaacacatttcatgtttcctgtgttgtacatcagcagtatttagagcaaagccttgaatctcatggggggccattcacatgcagtctgcagctcttcaacacctaaaatcttcatacaggatattatcattcagttctatgggccacatggtacatttcaataaaaaacactaaagcatggtggtcaaaaatacttgctctgtttttagacagttgacataactctttaacttgctgtgtgctctttggaaagttacttgtccccatgattcattttcttaatctgtaaaatggggatagtaataaatagtgtttamctccctggattattgtgaggattaaatgaaatactaccacaaaagttcttgatacattgagatcactaaataaattttatcattttttcatacctgcttccaaacaggatttgtagagatttatttcatataacaaatatataacagttaaaacaatgtggacaaaaagaacaaggatcctatagt

SEQ ID NO: 443204 - DNA, 611 bp, Homo sapiens
gtacatttcaataaaaaacactaaagcatggtggtcaaaaatacttgctctgtttttagacagttgacataactctttaacttgctgtgtgctctttggaaagttacttgtccccatgattcattttcttaatctgtaaaatggggatagtaataaatagtgtttacctccctggattattgtgaggattaaatgaaatactaccacaaaagttcttgatacattgagatcactaaataaattttatcattttttcatacctgcttccaaacaggatttgtagagatttatttcatataacaaatatataacagttaaaacaatgtggacaaaaagaacaaggatcctatagtaaaaggtggtaagtgtggaagtgaagtcttttactgtgctaagcccaatccagagmtaagtcccctgagtccatgtccccacttaaaattttttcatgtatagctcctcatctgtaggaagaagaatattcaccctacaatgcatgcaaggacctccatgggtgacttctgcccacgtgggttgctagcagcactcactctttcatttctaaaattgaaacactatagatcaccattcattgtgtgtgtgtgtgtgtg

SEQ ID NO: 443205 - DNA, 576 bp, Homo sapiens
  misc_feature (1)...(576): n = A,T,C or G
agtgcacgaagccataaatatatacaggaaattggaggtgagtgaaatccagangggtttgtcacttccaagcccgaaccactaaattaatactgaatgttgatttatgttaatgacatttagtaatgtaattctctgtaagagcatctgtataatatttcagatattcccrggggtgcttagagaaggggagttagtcgaccatgtaatattgtgtaaaattaattaaacagagattttaatataaggaagctctgaattggaaaatacatctgttttgtatatgcacttttttccacctcacctgcagtgcttaggtttgcatagaatccctgtgttaaaagaatctggggtagagaaacctatgatcttatgctaatacagaaaataaagttataaggcttgagggcaggattacagctatgaaagtcatttacatatgttcattttcactaaaataaaacattacacaatacaacatatgtgaacatctataaatattatattagtgataaatattactatattactgatctctatcataatagttatttattttagacaatttgaaaattg

SEQ ID NO: 443206 - DNA, 576 bp, Homo sapiens
  misc_feature (1)...(576): n = A,T,C or G
agtgcacgaagccataaatatatacaggaaattggaggtgagtgaaatccagangggtttgtcacttccaagcccgaaccactaaattaatactgaatgttgatttatgttaatgacatttagtaatgtaattctctgtaagagcatctgtataatatttcagatattcccaggggtgcttagagaaggggagttagtcgaccatgtaatattgtgtaaaattaattaaacagagattttaatataaggaagctctgaattggaaaatacatctgttttgtatatgcacttttttccacctcacctgcagtgcttaggtttgcatagaatccctgtgttaaaagaatctggggtagagaaacctatgatcttatgctaatacagaaaatraagttataaggcttgagggcaggattacagctatgaaagtcatttacatatgttcattttcactaaaataaaacattacacaatacaacatatgtgaacatctataaatattatattagtgataaatattactatattactgatctctatcataatagttatttattttagacaatttgaaaattg

SEQ ID NO: 443207 - DNA, 576 bp, Homo sapiens
  misc_feature (1)...(576): n = A,T,C or G
agtgcacgaagccataaatatatacaggaaattggaggtgagtgaaatccagangggtttgtcacttccaagcccgaaccactaaattaatactgaatgttgatttatgttaatgacatttagtaatgtaattctctgtaagagcatctgtataatatttcagatattcccaggggtgcttagagaaggggagttagtcgaccatgtaatattgtgtaaaattaattaaacagagattttaatataaggaagctctgaattggaaaatacatctgttttgtatatgcacttttttccacctcacctgcagtgcttaggtttgcatagaatccctgtgttaaaagaatctggggtagagaaacctatgatcttatgctaatacagaaaataaagttataaggcttgagggcaggattacagctatgaaagtcatttacatatgttcattttcactaaaataaaacattacacaatacaacatatgtgaacatctataaatattawattagtgataaatattactatattactgatctctatcataatagttatttattttagacaatttgaaaattg

SEQ ID NO: 443208 - DNA, 628 bp, Homo sapiens
gatgaatgctcaagccttctttacaatgtaattccaaataccaaaaaaaggaggggaaaatgttgcttaaaacttatggggaaagttctccttcttctaagggaccgtatgttaactctcttctctctgaaaaatgctgactataaaaaatactttccttttctcgaattcaaggaagtgcaaagcaaaatctgccacaaacckctcgctgtctatatagctagtatgtgctctcttttgcctgctgtgtttcaaccctgtcttctaatctatgttgttacttgtccttgatcttttagtgttcatattcccatcgtcatataagtatttctactgtaagatgcctcaaatcctacatatagacagaaaagaaatagtccaacaaacacgcaaactttatcgctacgtgtcatcccatcccctatgtccacccgcaattatggagatgtacaattctagtctcagtcatgctgcagtgacccaccagcccaccagcagtcagtggtactggaatctcaaatctcttgtcaggtatcctcgtggctgcttttcagcttaaggcctttggtgagatctgggtatctcttggcttggcttcctctcatctacaatattagacttcaattct

SEQ ID NO: 443209 - DNA, 569 bp, Homo sapiens
aacatacatatatacattcctcacttcaaataaacaaataaacaaaaaatcatgctcatctcttccgtttcttggactgcagagctacgggtctgcctattctgtattgaaattagtataaaaatactgaaaagaagtctaaggtaaatattttgtgttttctggcaaatcaacaaagattgttctgtatacatagattgtcctgtataagtactgatagacatcgtgataaaagtactcttgggactgagatgaaaatttaaactcagctttgagactagttactgattacaatgactcaattaacataataggaaaaaacatccatattcttgctgaaaactatttaaggatcttactcaggtacctgaattcttgagaccttagacaagaaagtgcaggtcaaaaatgtagggaaaaaatttgggcccacctcttctcaccatttctataggacacatatgaagagtttctatcagctgccattagctgtggggactggaaatcatggagatgcctaaacscgacattaagtttggagagactgagaattacttggtaagttaaac

SEQ ID NO: 443210 - DNA, 559 bp, Homo sapiens
gcatagtggttggaacacagaaaatgctgggaaaatattgaataaataaaaatgttaacaaccatttmgaaattttatggtacattatatattgccatttcagttcttattccagtatcattctactcaaatctattatctttatttatatcagagtcattgatcttaatgctaagtctaaacttttcccaattttatatatttggcaaatatgcatgactttttaagttttgcacaataaagtctaacatttaaactcctccttaagcaagatatacaagaactatgactatctcgtgcctattctttcagtgttaactcttactgctctccttcaactcagtacatttcactttttccacacctctgggctcttacccatgtttgtacatatatgcttacattttgtctagactgtacttctttcttttggatctagcaaatttctactaattcttccagacccagcccaggcatttctatatttaaaaccttccttgaccaacagatgtaatcacttcttgtatgcaatcactttccctaatttatacttttattg

SEQ ID NO: 443211 - DNA, 559 bp, Homo sapiens
gcatagtggttggaacacagaaaatgctgggaaaatattgaataaataaaaatgttaacaaccatttcgaaattttatggtacattatatattgccatttcagttcttattccagtatcattctactcaaatctattatctttatttatatcagagtcattgatcttaatgctaagtctaaacttttcccaattttatatatttggcaaatatgcatgactttttaagttttgcacaataaagtctaacatttaaactcctccttaagcaagatatacaagaactatgactatctcgtgcctattctttcagtgttaactcttactgctctccttcaactcagtacatttcacttttyccacacctctgggctcttacccatgtttgtacatatatgcttacattttgtctagactgtacttctttcttttggatctagcaaatttctactaattcttccagacccagcccaggcatttctatatttaaaaccttccttgaccaacagatgtaatcacttcttgtatgcaatcactttccctaatttatacttttattg

SEQ ID NO: 443212 - DNA, 559 bp, Homo sapiens
atgcaaccattagtattaagagcaggtactaaggattttccaaatcattttgttattcttatcaatatttctagtattcttttagatcccttcactcactttctctattgctttccatttcctgaagttttaaataaaatttcccttctgtttgtcttgtaggaaaaatcatcatgcttaccacatagaatrtgagttgtaggagagacacaatgggagacatcggttaagggacaaaagacattaacattttaggtgattgtgagttcataatttttccagaacacaagcattgcatggctactctaatatactagattattaaaatagatatatctttgccctacctgataaacactatttgtataagtgaatatatttttaatattaatccaatatatttcataagaaatatttgatttgcaaagtaatctgagcattacgatgattccctatctaaatactggcatggtgaaaatgaggacaaatctaccctttctctaatgtagttacaggcaagctatactcatataataaacatagaacgtacaatcaaaac

SEQ ID NO: 443213 - DNA, 504 bp, Homo sapiens
ctaacttccatattcccatgtgttctcttatatctcatttttatcttcaaactttgtttctcaaataataactaacattttttaacctgttatggttagtaatttttgagtgtttatcttatgctgtgttgtgttttataagccatatgctattcaatcaccacataaactttattgaggtaagtgctattgttattgccattttacacataagcaaagtgaaaaagacttgttgaagtcaatgctggttagtactaagaccaagattcaacacaaggcaactacagggtctggcctggcttgtcagcctaygcacacacttcttcctccaacctgagttgcttctatactggattgactcatttacagcctcccaagacttttctccattctctctatgtcttctaactcagaggcatggtagtgaatttcttacaaataataaatactttcaagaaagtgaagacaaataaatataaaatgtggaaagagtaccaaaagaga

SEQ ID NO: 443214 - DNA, 584 bp, Homo sapiens
tggctgttctctagaggggctgcataagctgatattccagaacttcactgataacctgggaaatgttatctccttcttatattcatgaccttatttcctgggggccattttctcttctttcttggtggagcatgtggaaatttgagagtattgctccatggaattctagctttcaggattgatactgagaagtcatggtctattctggctcttacgcttttgtaggtgactctttttttcccctttcttctctctctggaagctgtagtgtactcttctgtctcttctattctgagcttctatggtagcatcataaaagttgttattatagcatcactgggcccttttaatctgaaaataattccggctattagtttgcaattattatttattaatcactcamctccaacctttctttatttcaagaactattatgagtcagatggtgggtattctgcattaattctggtttattgaactttttcccctatttttaatctttttgtcatttttttcaactttctggaaactctccttaagggtaacttccaatatgcttcaatttctttccttctttttccaag

SEQ ID NO: 443215 - DNA, 663 bp, Homo sapiens
tcaaccttctgtcatgctactatgactatctttgtccatccacttaacatttttgaaaatgtgtttgccattttttgtctggtattgtctgtcacctttcttgattactttgtccttggggggttatgcattatttatcctttattcttattttagttacttttggggagggagtagagataaaagctcacaccatgtttaattaaaagtgacwccattgctataaccactacacgtgctgccactgcttacaattttgagtccatcaccatgctatagaatatgcatggctaagacaagatttactgacatttgggtacactcagcatttacataatctgcctattcttatctctcctcttccataggaaaacctagaaagataaaatcagacaggtaggtgggtaagagggaaggttttagtaagagagactaggttgaactacataataaaatgctggaagaaaggagagtgagatacatatgtagcaaaagtggcaagaactagggcttaagaagagcttaaggttttgatgaagatttgaaacattgcagtgtgaaagatttgacaggtgaagaaaaggatttgtgaaaagagttgccgtgagttacagatttgatcacctttaatgatctttgaaagagtaaagtgaatattggtat

SEQ ID NO: 443216 - DNA, 547 bp, Homo sapiens
taaaaaagaaccaaacataaattatggagtggaaaaatacaatatctgaattgaaaattcactagagttgttcaacagcaaccttgaacaagcaaagaaaagaatcagtgaacctgaaggaaagtcacctaaaactattaagtctgaagagwaaaaagaaaaaaaaaaagagtaaagaaaagtgaacagagcagaacctaagggacttacagtaaaccaatcaacagactgctgtacacattataagaatccaaaaagataaaagagagataaagtgatacagagattatttgaagaaataatggctgaaaactttgcaaatttgaggaaatgcatgaatctataagcccaagaagctcaacaaattccaagtagaataaagagattcacaagaagagacattacaatcaaatttctgaaggccaaaaacagggagagaatattgaaagcggcaagagaaagaacattaatcatgtacaagggatccttgataaacctatcattgaatttttcagtggaaattttgcagaccataaagcagtaggat

SEQ ID NO: 443217 - DNA, 552 bp, Homo sapiens
cacctaaaactattaagtctgaagagtaaaaagaaaaaaaaaaagagtaaagaaaagtgaacagagcagaacctaagggacttacagtaaaccaatcaacagactgctgtacacattataagaatccaaaaagataaaagagagataaagtgatacagagattatttgaagaaataatggctgaaaacttkgcaaatttgaggaaatgcatgaatctataagcccaagaagctcaacaaattccaagtagaataaagagattcacaagaagagacattacaatcaaatttctgaaggccaaaaacagggagagaatattgaaagcggcaagagaaagaacattaatcatgtacaagggatccttgataaacctatcattgaatttttcagtggaaattttgcagaccataaagcagtaggatgatatatttaatgtgctaaaataagaaaaaacctgtcaatctagaatcttatatttggcataaagtttcttcaaaaataagggagaaattaaaacattcaccagacaaacaaaactgaggcagttaatta

SEQ ID NO: 443218 - DNA, 547 bp, Homo sapiens
taaaaaagaaccaaacataaattatggagtggaaaaatacaatatctgaattgaaaattcactagagttgttcaacagcaaccttgaacaagcaaagaaaagaatcagtgaacctgaaggaaagtcacctaaaactattaagtctgaagagtaaaaagaaaaaaaaaaagagtaaagaaaagtgaacagagcagaacctaagggacttacagtaaaccaatcaacagactgctgtacacattataagaatccaaaaagataaaagagagataaagtgatacagagattatttgaagaaataatggctgaaaactttgcaaatttgaggaaatgcatgaatctataagcccaagaagctcaacaaattccaagtagaataaagagattcacaagaagagacattacaatcaaatttctgaaggccaaaaacagggagagaatattgaaagcrgcaagagaaagaacattaatcatgtacaagggatccttgataaacctatcattgaatttttcagtggaaattttgcagaccataaagcagtaggat

SEQ ID NO: 443219 - DNA, 552 bp, Homo sapiens
cacctaaaactattaagtctgaagagtaaaaagaaaaaaaaaaagagtaaagaaaagtgaacagagcagaacctaagggacttacagtaaaccaatcaacagactgctgtacacattataagaatccaaaaagataaaagagagataaagtgatacagagattatttgaagaaataatggctgaaaactttgcaaatttgaggaaatgcatgaatctataagcccaagaagctcaacaaattccaagtagaataaagagattcacaagaagagacattacaatcaaatttctgaaggccaaaaacagggagagaatattgaaagcggcaagagaaagaacaytaatcatgtacaagggatccttgataaacctatcattgaatttttcagtggaaattttgcagaccataaagcagtaggatgatatatttaatgtgctaaaataagaaaaaacctgtcaatctagaatcttatatttggcataaagtttcttcaaaaataagggagaaattaaaacattcaccagacaaacaaaactgaggcagttaatta

SEQ ID NO: 443220 - DNA, 533 bp, Homo sapiens
tatgtccctcgttattaatgaggttcacaagatatgatttctcatctgtggtatgcctatttatggtatttcccttgtgtattttgtggtttttgactctaagttgatattccttgaagctttatctgaaggaattctttgatgcctgagtcaaatgtgaactaaatcagatataatttgcattttctcctgccacatatttagaagctttaccaaacttcaccaactgtaaatatttgacttgaggggtggctctctttctctctttctctctctctctctctttctttggatttcccaagtagaatgccttcaggatgcaaaccatamatgagaacctacttgtggttactaaaattcctggtttttgtttttcttcactcattggcaaggctcaaggaagacaattatttttgctataacctggtatagacaggttatttgtaatttaccttaaaatgtagctacagccctttatgtctttagaatcttgggcatgtctccttagatgctcacattaaaccagctttagg

SEQ ID NO: 443221 - DNA, 530 bp, Homo sapiens
aacaattttctaaaacattttttctgctttctgtattaactcttgctttatatatgcttttcctctgagactttaattttccatgtcaagtaattactactgacaacgagttttgctttaatggtcttgttatttttttctttactgatctgagattgtgataaaaatctattgaagtgtagggttttctaacagacaagtgacaagattgaccattagcccttggttctactgataacttgttttttttttcagcagaaagcttctaagcttcacagttgaagagtagattgttatgaagaaattcaggcccaaattccaatgagtagcagcattcaattaatgcaattcttctagaattgttggtagatggatcatcgtctttcyccattctgtggtcgtctcaccttgatctgataaaatatctagagcctctctctctctctctcacacacacacacatacacatacacacacacacactgtgagcatgcacacattactactgtctctattcccactactgtaac

SEQ ID NO: 443222 - DNA, 554 bp, Homo sapiens
acacattactactgtctctattcccactactgtaacacctacagtgcttttgggactatatctctttcccgggacatactgcattactgtaagttcttccttcctttcttcccttttcagagggagcagaaaaagtaatcactttttctgtagatgtagaggcactgattgaagaaaggtgcccatgtatgactgcttrattttctgagtgatacaaatcttggatctttgagtcatggggaagaaacacagggtctctctacattacttaaggccataggttttctttactttagtttgtgaatttcaatttagcaatgtagagtcttcccagaaactaataataggttgactgaaagtgtcagttttgaatattatcataaaatgtcatctttctctgggcccttacagccattttaagctaaatcaagcactgctaagaaaaaaaaacttatttctgacatcttaaactatgataaaaaacattccatcagcatcattttgagaaaaattcaatcttcctttaatgtttactcacaaccaaaagctattcc

SEQ ID NO: 443223 - DNA, 545 bp, Homo sapiens
tatgttgtctcactgtggcattatttcaaatatactgaaacatgatttactttattctaaaacttatggcacattttacagtttgattcatttcctaacattttcaatgctgtagttcattaaattatacttgtttcatataagccaccaagaacatccactgttaacctaaaaagattgggaggaaaaggattgttttaaacacattctatttccttcatgtagatcaatgaagacagcttcctaaagaactatattttcctcactgttgcaggaaaagcttcagattatggtaacttaagtagagagaaagaaataccacctcaatataccaggctaagctttatctacagcctgggcatttaattaggggttctagtgtcagcaacagcttccagtagcatggtcttttttaaagtacccttcacctgaatgaggtgagtaagaattgctgatgaggtttgactatcatccattgggaatagcctaatgactcacataattacacartcttcaagtaataagcgactcagtttgtccagtct

SEQ ID NO: 443224 - DNA, 572 bp, Homo sapiens
tactgagtgttgttcacttcttctaataatctgcttsagggtaacactagctgttgtttggcctaattattttcttgatgacaacaggcacagcaatgacaattgaaagattccgtgtggcaatttcttacacacaagaaaagtaaatgtaggtcgttatgtttggcaatttgtgtgttgcaaatgactgatagaaagtaataggtgctaagtaaatactaagtaattgaagtctgacaaaaactagggttcctttgtgttatttagagaaaaaaaaatgtttattccaatgaagatattgtctcctggaaatttttcccagtgccttatattttccaaagaaagtacacatacatacatatgttcatgtgcatatgcacatgtgtgtgcatgcatgtatgtgggtgtgtatgtattctttttctattgctcagatttccttttaaaaaggtattcctcaggtacaggagacatctagttctgttataatgaatagtgctctcgttctatgaggcctccaaacaaatggtacttcaatgtaaaaaaaatcttgggttgaccctccttcaact

SEQ ID NO: 443225 - DNA, 572 bp, Homo sapiens
tactgagtgttgttcacttcttctaataatctgcttgagggtaacactagctgttgtttggcctaattattttcttgatgacaacaggcacagcaatgacaattgaaagattccgtgtggcaatttcttacacacaagaaaagtaaatgtaggtcgttatgtttggcaatttgtgtgttgcaaatgactgatagaaagtaataggtgctaagtaaatactaagtaattgaagtctgacaaaaactagggttcctttgtgttatttagagaaaaaaaaatgtttattccaatgaagatattgtctcctggaaatttttcccagtgccttatattttccaaagaaagtacacatacatacatatgttcaygtgcatatgcacatgtgtgtgcatgcatgtatgtgggtgtgtatgtattctttttctattgctcagatttccttttaaaaaggtattcctcaggtacaggagacatctagttctgttataatgaatagtgctctcgttctatgaggcctccaaacaaatggtacttcaatgtaaaaaaaatcttgggttgaccctccttcaact

SEQ ID NO: 443226 - DNA, 572 bp, Homo sapiens
tactgagtgttgttcacttcttctaataatctgcttgagggtaacactagctgttgtttggcctaattattttcttgatgacaacaggcacagcaatgacaattgaaagattccgtgtggcaatttcttacacacaagaaaagtaaatgtaggtcgttatgtttggcaatttgtgtgttgcaaatgactgatagaaagtaataggtgctaagtaaatactaagtaattgaagtctgacaaaaactagggttcctttgtgttatttagagaaaaaaaaatgtttattccaatgaagatattgtctcctggaaatttttcccagtgccttatattttccaaagaaagtacacatacatacatatgttcatgtgcatatgcacatgtgtgtgcatgcatgtatgtgggtgtgtatgtattctttttctattgctcagatttccttttaaaaaggtattcctcakgtacaggagacatctagttctgttataatgaatagtgctctcgttctatgaggcctccaaacaaatggtacttcaatgtaaaaaaaatcttgggttgaccctccttcaact

SEQ ID NO: 443227 - DNA, 619 bp, Homo sapiens
cttcagtgataaatatattccttgtctcttgcagcttctagaggcctcttggcattctttggcttgtggccacatcactccaatccctgtgtctgtgatcacattgccttcttatctgttttagaaggacccttgccattccatcaggcccactcatgtgatacaggataatctctgcatcacagaatccttaaccacacatgcaaaatctatgttaccaaatagagtaacattcacaggttccaagcagcaggatacagcatttttgggtcaccagttttctgcctaccacatgttcggagtaagtattctttttattatcctcttctttgcattatttgacttattttaactatgtttttgtattaactttaaaataaaattaaacctaattaaacatttaaaatcaaatggaaacstgtgcctttcttaggcacactgtgatatatcagctacaagtgcaatatttcatttttgaagaaggatttatttatgccccagtttgttccaaagagtatttaggcagtttataaaacaggctccaatagtaaaataaataaaattgaaagctgaaatgggattagaaatataataacatgagaatgcttatactataatc

SEQ ID NO: 443228 - DNA, 619 bp, Homo sapiens
cttcagtgataaatatattccttgtctcttgcagcttctagaggcctcttggcattctttggcttgtggccacatcactccaatccctgtgtctgtgatcacattgccttcttatctgttttagaaggacccttgccattccatcaggcccactcatgtgatacaggataatctctgcatcacagaatccttaaccacacatgcaaaatctatgttaccaaatagagtaacattcacaggttccaagcagcaggatacagcatttttgggtcaccagttttctgcctaccacatgttcggagtaagtattctttttattatcctcttctttgcattatttgacttattttaactatgtttttgtattaactttaaaataaaattaaacctaattaaacatttaaaatcaaatggaaacctgtgcctttcttaggcacactgtgatayatcagctacaagtgcaatatttcatttttgaagaaggatttatttatgccccagtttgttccaaagagtatttaggcagtttataaaacaggctccaatagtaaaataaataaaattgaaagctgaaatgggattagaaatataataacatgagaatgcttatactataatc

SEQ ID NO: 443229 - DNA, 614 bp, Homo sapiens
aagcaatataggtaaagagaaaagagaggtttttgaatatgcagttggggccaacagtctgttataaaatctcacagcrtgctgagaagtagaaacctatactagatgaatagaaactgtatgttagagcaggtaagaaggtgagtaaaaacgagactgagagagagaaggccaaaaaagaggctctataacttatataattttttgctttaacaacctgcatatttctttatatttttattgattcaggaaatgtaatttttgaaggatggcatgcaaatggtgtctaggagattggctaagtatctcaaggcctttcacttaaccccttttcgtcttacattcaaattacctgagtgataaaattcaaggagactctcattccatctcagttcaatcacagtcaaaaactccatgtagcaaaaagatatatttctgtctttgtaggacaaaggggataatattattcaaaggcatttgcccaagctttggggagtttggcagcatcttctcacctcctccatcatcagtaggatttagcacatccaaatatcctaccagaagagaaaatctgccaaagaatttttcccaatactaaacccccaacaagaatt

SEQ ID NO: 443230 - DNA, 614 bp, Homo sapiens
aagcaatataggtaaagagaaaagagaggtttttgaatatgcagttggggccaacagtctgttataaaatctcacagcatgctgagaaktagaaacctatactagatgaatagaaactgtatgttagagcaggtaagaaggtgagtaaaaacgagactgagagagagaaggccaaaaaagaggctctataacttatataattttttgctttaacaacctgcatatttctttatatttttattgattcaggaaatgtaatttttgaaggatggcatgcaaatggtgtctaggagattggctaagtatctcaaggcctttcacttaaccccttttcgtcttacattcaaattacctgagtgataaaattcaaggagactctcattccatctcagttcaatcacagtcaaaaactccatgtagcaaaaagatatatttctgtctttgtaggacaaaggggataatattattcaaaggcatttgcccaagctttggggagtttggcagcatcttctcacctcctccatcatcagtaggatttagcacatccaaatatcctaccagaagagaaaatctgccaaagaatttttcccaatactaaacccccaacaagaatt

SEQ ID NO: 443231 - DNA, 614 bp, Homo sapiens
aagcaatataggtaaagagaaaagagaggtttttgaatatgcagttggggccaacagtctgttataaaatctcacagcatgctgagaagtagaaacctatactagatgaatagaaactgtatgttagagcaggtaagaaggtgagtaaaaaygagactgagagagagaaggccaaaaaagaggctctataacttatataattttttgctttaacaacctgcatatttctttatatttttattgattcaggaaatgtaatttttgaaggatggcatgcaaatggtgtctaggagattggctaagtatctcaaggcctttcacttaaccccttttcgtcttacattcaaattacctgagtgataaaattcaaggagactctcattccatctcagttcaatcacagtcaaaaactccatgtagcaaaaagatatatttctgtctttgtaggacaaaggggataatattattcaaaggcatttgcccaagctttggggagtttggcagcatcttctcacctcctccatcatcagtaggatttagcacatccaaatatcctaccagaagagaaaatctgccaaagaatttttcccaatactaaacccccaacaagaatt

SEQ ID NO: 443232 - DNA, 377 bp, Homo sapiens
gtctatggtgtccaaaaagcagtcagtttaattttgcagcattattttgttggaagcaaataayagtggcaggtccacctacatggacacaatggagctgaccacggaatgcaatgggggtgtctgaagcagacagagtgactctattgtgaccctttggcaccggaaagaccagcccaagatacaattatacctttgcactatagcctattttgtgaagagaattaatttatggggattcagaagaacttggatccaagtgctagctctgtctcttatgatctgtgggagctcaaagaacgtatgaattttcctaagttccagttccattagtgtgcaggaattggctcatactggcctgtgagagtcaattatga

SEQ ID NO: 443233 - DNA, 377 bp, Homo sapiens
gtctatggtgtccaaaaagcagtcagtttaattttgcagcattattttgttggaagcaaataacagtggcaggtccacctacatggacacaatggagctgaccacggaatgcaatgggggtgtctgaagcagacagagtgactctattgtgaccctttggcaccggaaagaccagcccaagatacaattatayctttgcactatagcctattttgtgaagagaattaatttatggggattcagaagaacttggatccaagtgctagctctgtctcttatgatctgtgggagctcaaagaacgtatgaattttcctaagttccagttccattagtgtgcaggaattggctcatactggcctgtgagagtcaattatga

SEQ ID NO: 443234 - DNA, 377 bp, Homo sapiens
gtctatggtgtccaaaaagcagtcagtttaattttgcagcattattttgttggaagcaaataacagtggcaggtccacctacatggacacaatggagctgaccacggaatgcaatgggggtgtctgaagcagacagagtgactctattgtgaccctttggcaccggaaagaccagcccaagatacaattatacctttgcactatagcctattttgtgaagagaattaatttatggggattcagaagaacttggatccaagtgctagctctgtctcttatgatctgtgggagctcaaagaacgtaygaattttcctaagttccagttccattagtgtgcaggaattggctcatactggcctgtgagagtcaattatga

SEQ ID NO: 443235 - DNA, 590 bp, Homo sapiens
gctattgttttaaataattatgacaatgccacccctctcctttttttttttttttcaaaggatgacctcaacttttcctggacgcccagaataatatgcatgaaactttaatctagtttggcaagaagcagagtttacataatagtaatttggttcctgcctataaaattgtgagcctgttggagatcagggactggatcctactcaaatataccctagaaacacttgstacagttatttgcacatggaatatgaatataagattttttaaatggaattaaatcctttttttggcatcatctctattcttctcccaattccttaagatgaagattaatttagtctctctgctttctttaattatctctctaattctgtctttacctatttttttataccaaaggacgcccacaacctgacccaataagccaaaatcttttccccttaaaaaccaagtagaagttggtaacactcatgtatgaataacttttctttgctaatacacattcataatttttgccccaaatatctttaaaaatatacccctatatctcaacttactttcttcaaagctgtcttttttgtttctt

SEQ ID NO: 443236 - DNA, 588 bp, Homo sapiens
aattttcaattaaatttaaaaagatctaactcaataaggagaagtgtgcctttctcgttaggagatatagaaagaaaacactgaaaaccaaatccctgccaagggatcttattgtagaagtctttgattaggttcactgacattttaatattctgcaagtttaaaactttcaaagaacactaatatatattacgtaacttgtatatttaatttaaggcattttatttcttattctctcttgagctttagcaacactgtattattattcgacattgttatattaatatgtgtcctctsaattgaaatagaattgggtccttcaaagagagtgctcattctgaaacctctatcatagttaactctaaaactgtgtcttcattcctgtcttctcaggggagtctgggcccatcgcctctagttagaggtcttactgtcacatcaaattcaatttaatttgttatttctagtaccaacctcaccaattccttcatgtaggtagcttttcctccatttaaaaatgtattaaatttacctctatcactattagatttgtagcatttaccacataatagaaacacacagacatat

SEQ ID NO: 443237 - DNA, 450 bp, Homo sapiens
aagaaagaatatatgatactactacatttttgtttctagggctatatgtatatccctatatatagagatgcatatataaatatgtatgcacttatgatagtttatagtggtgcataaactatttatcaagataaggaaagaaggaaggacataagaaagggaagaaaagaaagaaaataatttaaaaacaataaaaaaaggagggaggggcaggttaaggaataattgaggcaaagagaaaaaaaagatagaaaaatataatgagccakagtaaggttatagaaaaaaatcacttatgatatggaaaattcacttacttgtaactcagcaaggcagggctgaaaggctagccataaatgtgtaaagcactattcaaaggttattattgctccttaatgaatggccctatttggaggcaaatgattacacagaattaaaagcacagacgca

SEQ ID NO: 443238 - DNA, 610 bp, Homo sapiens
aaactatttatcaagataaggaaagaaggaaggacataagaaagggaagaaaagaaagaaaataatttaaaaacaataaaaaaaggagggaggggcaggttaaggaataattgaggcaaagagaaaaaaaagatagaaaaatataatgagccagagtaaggttatagaaaaaaatcacttatgatatggaaaattcacttacttgtaactcagcaaggcagggctgaaaggctagccayaaatgtgtaaagcactattcaaaggttattattgctccttaatgaatggccctatttggaggcaaatgattacacagaattaaaagcacagacgcacatttctcagctcacctaagtccctgtgccaagattctggttatcacagaggagaggtttctaaggccacagcacacaacttaagaaaggaagcttggatttgttgccaacacttgcaaattttcctaagggtttctgctaatttgcagcacatagcaaaacaagtgtgaaagtatgaaatgacgcatgctaaagggaaggttgaaaaagcggggagaaggagagaatggttctatttcaggaggatgcctgatttcattaaaatcaactgttaa

SEQ ID NO: 443239 - DNA, 610 bp, Homo sapiens
aaactatttatcaagataaggaaagaaggaaggacataagaaagggaagaaaagaaagaaaataatttaaaaacaataaaaaaaggagggaggggcaggttaaggaataattgaggcaaagagaaaaaaaagatagaaaaatataatgagccagagtaaggttatagaaaaaaatcacttatgatatggaaaattcacttacttgtaactcagcaaggcagggctgaaaggctagccataaatgtgtaaagcactattcaaaggttattattgctccttaatgaatggccctatttggaggcaaatgattacacagaattaaaagcacagacgcacatttctcagctcacctaagtccctgtgccaagattctggttatcacagaggagaggtttctaaggccacagcacacaacttaagaaaggaarcttggatttgttgccaacacttgcaaattttcctaagggtttctgctaatttgcagcacatagcaaaacaagtgtgaaagtatgaaatgacgcatgctaaagggaaggttgaaaaagcggggagaaggagagaatggttctatttcaggaggatgcctgatttcattaaaatcaactgttaa

SEQ ID NO: 443240 - DNA, 486 bp, Homo sapiens
acatggtacagtggttaaaagcagcaattttatgattaaacagattgacctggagtttgtgccttgctgctactgaccaacagagtgacaataaggcactcattcaactttcccagagacagtttctgtagctgccagaaagaacaatatctaataagtgagtttggaggattgagtttatacatgttacaatatctcatgggtatgggtctacaaacctaggaggtcatgtctttcaaaatacaaagggagaaatgattgagaaatayacctgcttggaactagaggaacatcatgatattcaatgattttttttaaaaaaatctctacatctgtaatgtatattggaccactttgcatgcttagtttataatagccagaagcaaatatctttgtggcagttgtatgacaattaagacattttagcaactgcatggatgaagtattcacaattgattgctttcttctggagataattccataatc

SEQ ID NO: 443241 - DNA, 486 bp, Homo sapiens
acatggtacagtggttaaaagcagcaattttatgattaaacagattgacctggagtttgtgccttgctgctactgaccaacagagtgacaataaggcactcattcaactttcccagagacagtttctgtagctgccagaaagaacaatatctaataagtgagtttggaggattgagtttatacatgttacaatatctcatgggtatgggtctacaaacctaggaggtcatgtctttcaaaatacaaagggagaaatgattgagaaatatacctgcttggaactagaggaacatcatgatattcaatgattttttttaaaaaaatctctacatctgtaatgtatattggaccactttgcatgcttagtttataatagccagaagcaaatatctttgtggcagttgtatgacaattamgacattttagcaactgcatggatgaagtattcacaattgattgctttcttctggagataattccataatc

SEQ ID NO: 443242 - DNA, 471 bp, Homo sapiens
caatgaacagtggagtgttttcgtccagagagctgcagagtataagaagacgcttttattaggttatatttaagctgttaatgttaagataaagccatacaatataggacaaaatcctttgtattttttaatctaatgtatacattttccttccatacctacttagatgaagaattgtacatatgtacccaattctttgtactaataaaagaaatacatgggyacacatatgcatttatatacccttacagccctttagaaatacacaatttattgcaaatatcaagtacataagtatgtagattgtaactgacctagtgaataaatcactgtagatggaaactattgcaatatagtaaggagttcagataaaaaaaaagctgattcagttatatattgctgtggaatttataaaagaagtcactggggaaatggttagtctgtgaaggactctggcaaggccaacttgtt

SEQ ID NO: 443243 - DNA, 666 bp, Homo sapiens
ctatggttataaaacttttaatttaaacttgctggctcactataaagattcgcttcatctattgtacaaacacatttttttcatatatcacttcccatctaccatatgcataccattgtttgtaagaaagacaataaggcagatcaaggggattaatttacagctattgctggggaggggccagggatttctgtatagatacaggtcacagggctgaactatagtaccatttgttctctataaaagtaatatgacccatattcaaagagaataggcataaattctgctaaagttcagaaaatttttaccatcactcctttctttctctgtgtcaaacccataggtttgcacaaagtaagatagccctgtatcataacatttatggagaactgacttggaatacctttttctgtattcatcattcttttgtggccatgtcgagagggactagattttcccatcaggcatgtaaatttctcatgacttaagaaacgaatgctgaaaaaatactaaaaatactaaccaaatttcaaagattcytgaaatgtttaaagaaaataatatagttggtgattgtataaatcacttaataataagccatttaatatctcccaaggtaaatactaaatggctttccttttgcccaaattgtcatgatcattatac

SEQ ID NO: 443244 - DNA, 588 bp, Homo sapiens
tcatttggaatttcaagggacaacaaatagccaaaaacgtcttgaaaaaaaaaacaaagttagaggtctcacactttctgattttaaaatgtagtaccatcattccttggtaaacatgggggattrgtttcaggaccaagggagtaccaaaactcactcatactccagtcctgtgttcagccctggagaacccacatatgtgaaaagtccaccttctagatacaaggattttacattccatgaacaccatctgcatttaattgaaaaaaattcatacataagcgtaccacagctgatcaaacccatgttgttcaagggtcaactataccaagctacaataatcatgacagtgtggtccttgcataaatacaggcatatagaccaaaaaaatagacaactcagaaataccccatctcatataaaaccaaatgattttccacaagagcgacaagaccattcaatgggaaaagaacaatcttttcaacaaactgggaatacaggatatccacatgcaacagaatgaagatggacccttaccttacctacaccatatatacatattaattcaaaatggatcaaagacctaaa

SEQ ID NO: 443245 - DNA, 598 bp, Homo sapiens
gagtatatatgtgaaataactaaaagcaagattttgaagagacatttgtatatctatgtttatagcagtattatttacaatagccaaaagatggatgtagcctatgtggccattggtagatgaatacattaataaaatttggtacacatatacaatggagtatttttcaggaaaaataaaaaggaaggaaattctgacatgtgctataacgtggataaactttgaagacatcatgctgaataaaataagctagtcacaaaaggacaaataccttataattccacttattatcaggtacctagaatagtcaaaatcatagagacagaaagaatgatggttgccaggggctgggaggaaggagggatggaaagttatgttgttcatggatacagatttccagttttgcaggaccgaaaagagtcccaaaggttgatcgtggtaatggttaaacaaaaatatgaatgtatttagtgccactaaactatatacttaaaaatggttaaggtggtaaattttatgtcatgtgtattccaccacaattttttaaaaagtttccttttttgagtaaagcttgraatggaatatacagttaaatatt

SEQ ID NO: 443246 - DNA, 554 bp, Homo sapiens
tttgcctataacatattaatgatacataatatataataaaacatttagtacatgtactgaagtagacataggacgtgtaattccagaactaatctcatatatctgaaaaagaagtaacattttgctcatgtttttaaaataaaactataaattcagtaattcgagagttatatttacaacctattaatttggaaggtaaaaaggatgaaatgaattttgcatggactagcactactctgccaccattggtagaaaagcaatcaaaacattgtttgttttgttatttgtyagcttgaagggagcactaccaatagaagtttttaaatatgcaggtatactgtgctgatgttttcataccctttgccatgtttgtaaaagatggggacagagaggttgcccctgaggtgcacatggcttaaatggaggtttagtgtccatccaagaggatggagctcaatagatatagtctaaggttgtttaaagggaaattgcatcgagcattctttaccctgtttttatgcctgtagcatttctggttgtttttagagtgagaa

SEQ ID NO: 443247 - DNA, 552 bp, Homo sapiens
tcttcaggaagtttatatattaaactaactttcagttaaatacagaagctctttgtataaagagaagtatgaaatctaccactttgttcatctttgatagactttacctcatacttcctttgatagactttagcccatacttcatgttagttctcaagcttcagtgaattaacttaggcacttattgaaaaagcagattcytaggaaatgtgactccagataatttgatttggtggccagggtggaacatcccaggtttttctcataccagttgtctaggcattacacattgagaaaactgctcaagacagggactttgacatcttataagggcattgattttcttcttttacatcatgcatttatagttaccacgcttttcataaaaatctacttctcttaataacaaagaagaaaataacatattatcctattgatttgttttccttgatgaatagtcaattattcttccttgcattattcaagtcacctattacttgagatttattgcaaacaaataactctctagaagtctctgtggctgtaaaaatt

SEQ ID NO: 443248 - DNA, 594 bp, Homo sapiens
gggttcccaaaaccaaagctgctgtaacactatagccctcctgttctctgctggcactgggtggccatgccatgcaacagaagcagcagtggggctgggcaagcccatgagttgtgggccagaacgaggcagcaggactaaaagagctgtaacacaaatgggctgaaacaygcccccatcaacccattcaccacgctgcaggtgacatgaaagagagaagagctacagtccttcttggagtccagaccttggggctccccaagccagggctgtgacaggctgtatgtaacaccctctttggactctgtggtttctggcatctctgagctttcaagcaccaccatattcccctcatccagacactggtgcccacagtggaagtttcttgtggtatgtctggtccaactggagccttgcatggagccagcacctgtgccggtgcctgaagctgcccaccccactgcagcagccagtatgcctggctgtgtgcagtagtcagaccccacactcacttacttacataccccttgccactctgcacctggctcagccttagcaggtgtgggatccaggctggtagtgcaagccaagtgc

SEQ ID NO: 443249 - DNA, 591 bp, Homo sapiens
gtgtgcagtagtcagaccccacactcacttacttacataccccttgccactctgcacctggctcagccttagcaggtgtgggatccaggctggtagtgcaagccaagtgcagtctgctgggccaagtgggcagaactagcccagtgaaagcaagccatactcaggcataaggtgctgctgtctacagaggtttctggctggtgaagtgacaccccaaggatcctgtgacaaagccacccaagaacactacctcacttaagtmatttagccaaagtcacagagctagtgactgataatgccagaagccagggtccagagcctgtgctcttcactactccacatgacaatgttatcaataataatatacattcttaacatgctacattttatcctttattttcagaagttatcgttatttcttgattctgtaagtctgaacccttgtcaatgggaatggtggtttctgtattgcaaaacaacttatttcctctcacttgatagttgccatgttcctcacattgtcccaaagggctggagatacatggtccctacacctcatcctgaccaccctgaagcttgtgatcaaagcca

SEQ ID NO: 443250 - DNA, 557 bp, Homo sapiens
gtcgtttttcctaccacaacctagcaattacctttaaataatacataagcattgtagaaaatgtctaaaatacagaaaagctcaaagagagaaagtrtttttctcataattctactattattctataaaatataacactgtgctttcaggaatttctctatatacatattctatatatataatatttatgcttttatattttatttttataatatgaaagtatatatgttcatttataattaaaattattaaaatattgaaaagctatgtgtaaaatttttaataagttgattcaaattttagtacttcaaaacagttgtctatgtaaagaattactgagagaaataattctgtgatatgtgtggtcagctcaaaattgtctttgtgattttttaaatattcaaatttttatttaaaaaaagtattctagtaataagcaaaatattttaaatctgctattgctatggaaaatgaggtggtttttttttgccacaatttgcactggtaatgattaaacgaacagcttatcacaaccatgcttctaaacccagatgcac

SEQ ID NO: 443251 - DNA, 557 bp, Homo sapiens
gtcgtttttcctaccacaacctagcaattacctttaaataatacataagcattgtagaaaatgtctaaaatacagaaaagctcaaagagagaaagtgtttttctcataattctactattattctataaaatataacactgtgctttcaggaatttctctatatacatattctatatatataatatttatgcttttatattttatttttataatatgaaagtatatatrttcatttataattaaaattattaaaatattgaaaagctatgtgtaaaatttttaataagttgattcaaattttagtacttcaaaacagttgtctatgtaaagaattactgagagaaataattctgtgatatgtgtggtcagctcaaaattgtctttgtgattttttaaatattcaaatttttatttaaaaaaagtattctagtaataagcaaaatattttaaatctgctattgctatggaaaatgaggtggtttttttttgccacaatttgcactggtaatgattaaacgaacagcttatcacaaccatgcttctaaacccagatgcac

SEQ ID NO: 443252 - DNA, 558 bp, Homo sapiens
tcatgaagttggagctcagatttagatgcgcccaccacatccaggttagtgacatgtgcaaggtgatcagcaattccaaaaaagtttctttttcctttatgtgatttttaaagtatatcaggatgggaatggtggctcatcctgtaatcctatcattttggggaggccaagacaggaggattgcttgagccggagagtccgaggccaggctgggcaacatggygaaactctgtctctaaaaaaattacaaaaatttgccaggcatggtggcgtgtgcctgtagtcccaactacttgggagactaaggctggaggatcaccagagcccaggatgttgaggctaccctgacccatgatcaggccattgcactgtagcctgggtgacagagtgagacttcttctccaaaaaacaaaaaagaaaaactgtaacaatattagttatgtgggaagaatttatatgcatcagaaaatgtactcctgttttgagagatttactttgcatatcttagggcccagtttctagaagtgattagaacagattcatatttagcatagatag

SEQ ID NO: 443253 - DNA, 572 bp, Homo sapiens
atgaatgtgattgcatgagtttgccaatatttaaaaaaaattaacaaaaattaaagtaacttattcatcctaagaaatgtgattaaatgagctgtcattttatgccatggattggcagctgcaagacaaagtgcattaaattactgatgctgtcaatcagaccatactatacttctgtgctataagaatctgccatttgaagctagctaaaagtgctccccgagtttcagtgtcctgccatgataaaacagggcttcttaacgtcaagaaggaaacagaaggggaacagatgtctgagggagttggcaagtaaacaaatccctagtctcagtctggattgagagtcctctattgaattggatctttgagaagaaatcttttgaaggtaatgaagctgccattcatagagagcgatctggctcccstcattaaactgtactatatagtactgcctctgtcttctccacttctgcgtcctgtgcctaaagttatattcctgaccccatccctagaacatattgcctaagtgaacgtctaaagatacctgtttgtttgaccaattcataagtaag

SEQ ID NO: 443254 - DNA, 560 bp, Homo sapiens
attgggaaagaaaacaagtctcattgaataccaaagaatcagtatcattcaaatcacaacctgtgtccaaaatacaacatattagaaattcatattgaaaagagaaacttgaaaaatatcttctttttttttttttttttttttttgagacagagtcttgctctgtcgccaggctggagggcagtggtgcgatcttggctcactgcaacttccacctcccaggttcaagcaatcctcctgcctcagcctcccgagtagctgggactacaggcatgcaccaccacacccagctaacttctgtatttttagtagagacggggtttcaccatgttggccaggatctcaatctcctgaccttgtgatccgcctgccttggcctcccaaagtgctgggattacaggygtgagcccaaaaatgtcttttaaatgtggaaattaaagacatacttttaaataattcacaagtaaaaaagatcatgatagacatttcaaaatatgtataacttgatgataacaattaccataaaaaattgtgagataaacaaatattacagttaaaca

SEQ ID NO: 443255 - DNA, 557 bp, Homo sapiens
tttagtaaaaagcatagctaggaatagtagatcaggaattcaagcaccaattcaagatacaaactgctcttggacctatgggcgggagtgtsggggcaggaatccacaccctgagaagtaaatctgttttgacactcaaagcttacttggtcaagtgttgtctgagaaacagagtagtcttctatgtggagtcgctttttgctctgggagaggatgctgaatatcctggccagagaagataatgaagatggaagctggtattgtagcatgttccggtgtttctcttttagaacacttccaggaaatgcaagtccaaagaaatcctggacaggcttcaggtccgggttggaccctgctattcgtacaactattgtataaccatctccaaacctgaaagcaggaaaaaatacccaaatggaggatctccagaaaactatttaaaagaatactgaaccctgggaacccaacttgtgccatgaaaaagggcggcccctggcaggcccagaaataagtttctgagagaaggaaccagttatcatttactaaatacttatttt

SEQ ID NO: 443256 - DNA, 522 bp, Homo sapiens
aaacctcatacattgctattaaacagtctggcactacttagtaaagatgaatatgtacataacttatgaccsagcaattccactcctgggtatgtaatccagagtagtggtttgtaatttccagtacacagatcctgagtgaatctatagatagaattcagagggtctgataagttggatgaataacaattccatctttattggcaacaacttctaactaaaattaaccatttcctttatgaaggtaggcaacaaaccacaatattagcaggacctgtgactttgtaaccaataaatattatagacaatgtcaaattccatttatagttgttgtaaatacataaaaatttcttccacacttatcactacttcaaaattacatcttttacacccactattagatattgttttttagtgccctaataaagaagcatctctatttctttttaaaaagttttttatatttcattattctagttcatttttttcatatttgattttgtattttgattattctagttc

SEQ ID NO: 443257 - DNA, 522 bp, Homo sapiens
aaacctcatacattgctattaaacagtctggcactacttagtaaagatgaatatgtacataacttatgaccgagcaattccactcctgggtatgtaatccagagtagtggtttgtaatttccagtacacagatcctgagtgaatctatagatagaattcagagggtctgataagttggatgaataacaattccatctttattggcaacaacttctaactaaaattaaccatttcctttatgaaggtaggcaacaaaccacaatattagcaggacctgtgacttygtaaccaataaatattatagacaatgtcaaattccatttatagttgttgtaaatacataaaaatttcttccacacttatcactacttcaaaattacatcttttacacccactattagatattgttttttagtgccctaataaagaagcatctctatttctttttaaaaagttttttatatttcattattctagttcatttttttcatatttgattttgtattttgattattctagttc

SEQ ID NO: 443258 - DNA, 518 bp, Homo sapiens
tatcctttcaacatttattaaatatctactatctcagtaaaactatatttgactgtaaataagtgtcttagacaaaacatatgtttatttctctsttgcataaacacacttccaaggtaaagggtccaaagcaatttactgactctgttgtatgaactcccttaggaatcaaagacttcctgtttagaactctgctatccaatggatttgcccccagtgtcatgtttcaaaatggaatacacatatcccaagaagtgacatgaaggagggaaccaaaaacaataaggccaaaatgtgtgtgccagctctcgcttaaggaaggtttctacaaattgccagatgacatttcttcctatatcccatctgacctgaatttacgctcgctccttgagtcatgtgtattttggattggcatgtataatttagaaaatttggagtatagatactgaggacagctaacaatctctgccactaccactacgtgccagaaattatgttagctgcggaacattagcaag

SEQ ID NO: 443259 - DNA, 552 bp, Homo sapiens
tttgtgaaatatactgttaagaaaatgaaaatataatctacctactggggaaaaattataaaacacctattgaaaaaaagaaacagatccaaactatagaaagaactcttaaagctaaataataagaaaataaagactcaataaaaaatgagtatatatctaaacaaaaacctcatcaaataagatatacagatggcaaataagcatatgaaaagatgttccacatcatatgtcattaggaaatagcaaattgaaagaataatgagatgtcaatatggacttattggaatggcttaaatccaaagcactgacaatgccaaaggctggagaggacatgaagcaacaggagctgttattctttgctggtcagtatgcaaaatggtacatccactattgaaaacagtttggtagcatcttacacagctaaatatagtcttactatgtkatccagccatcacactttttggtatttgcctaaatgagttgaaaacgtatgtctgcaggaaaatatgttgcatgtgattgttcactttggctgtattcataactgtc

SEQ ID NO: 443260 - DNA, 552 bp, Homo sapiens
tttgtgaaatatactgttaagaaaatgaaaatataatctacctactggggaaaaattataaaacacctattgaaaaaaagaaacagatccaaactatagaaagaactcttaaagctaaataataagaaaataaagactcaataaaaaatgagtatatatctaaacaaaaacctcatcaaataagatatacagatggcaaataagcatatgaaaagatgttccacatcatatgtcattaggaaatagcaaattgaaagaataatgagatgtcaatatggacttattggaatggcttaaatccaaagcactgacaatgccaaaggctggagaggacatgaagcaacaggagctgttattctttgctggtcagtatgcaaaatggtacatccactattgaaaacagtttggtagcatcttacacagctaaatatagtcttactatgttatccagccmtcacactttttggtatttgcctaaatgagttgaaaacgtatgtctgcaggaaaatatgttgcatgtgattgttcactttggctgtattcataactgtc

SEQ ID NO: 443261 - DNA, 552 bp, Homo sapiens
tttgtgaaatatactgttaagaaaatgaaaatataatctacctactggggaaaaattataaaacacctattgaaaaaaagaaacagatccaaactatagaaagaactcttaaagctaaataataagaaaataaagactcaataaaaaatgagtatatatctaaacaaaaacctcatcaaataagatatacagatggcaaataagcatatgaaaagatgttccacatcatatgtcattaggaaatagcaaattgaaagaataatgagatgtcaatatggacttattggaatggcttaaatccaaagcactgacaatgccaaaggctggagaggacatgaagcaacaggagctgttattctttgctggtcagtatgcaaaatggtacatccactattgaaaacagtttggtagcatcttacacagctaaatatagtcttactatgttatccagccatcacactttttggtrtttgcctaaatgagttgaaaacgtatgtctgcaggaaaatatgttgcatgtgattgttcactttggctgtattcataactgtc

SEQ ID NO: 443262 - DNA, 479 bp, Homo sapiens
actataatgtaaatgtgtcagtattggctcaataatcataataaatacgccacagtaatgagcgatgttaataatagtgaaaattgggagaaaggtgagggggtatagtatctacttttgctctcactttctgtaaacctaaagctgtatgaaaaacagtctatttaaaaatattctttgtatcaacttcaccatattgatgatgttctcagaaatgcatttttaagatttcagacatgtttatatttgaattagattgtatgtttataattttgaaaagtatccattttaaggttataattttgaaaattatccactgctatgtttattataaaagagtaaaaagaacaaattatttaccagaatttgacaaaaattttggtacataaaggcttgtattatcrgacatttggtgttgaaataattcaaacaatatggcgctaatgggagattcaaggcaagattaaagcttagaatat

SEQ ID NO: 443263 - DNA, 568 bp, Homo sapiens
aactatatttcaaagttctgatgaaacaaacaacctgaaatttagccataataaatgcaatgtctgtgttttgacttaaaacataataaaaatatagaatgagtgaagaggcaggggtaayatctagcaagaaaaaaattaactcagatatatatgattttattttaatgtttcctagttcactgtgcctctaaaatagtaaacaccctcaagatttaagcctaaataaataaatttagggtccagctaaggaagcttatctgtgaaacccttgtaatcccagcactgcactttagagttattacaaactagagtaatgcaaaaaagcaaataacatattacaagataaattgagtaatatagtttgaacaagtaaatatttctaaccatcttcaaatacttcattggcatccaggtagaagaaagcagattgatttcatgtgtgaaggaccaggacaaatcttagggaagttgatatttaatcagtccaagtaaggaaattgattagaattaaaacaatccattaataggtatagactgtgtcacagtcacaggggaaacacaaagt

SEQ ID NO: 443264 - DNA, 577 bp, Homo sapiens
aagcctaaataaataaatttagggtccagctaaggaagcttatctgtgaaacccttgtaatcccagcactgcactttagagttattacaaactagagtaatgcaaaaaagcaaataacatattacaagataaattgagtaatatagtttgaacaagtaaatatttctaaccatcttcaaatacttcattggcatccaggtagaagaaagcagattgatttcatgtgtgaaggaccaggacaaatcttagggaagttgatatttaatcagtccaaktaaggaaattgattagaattaaaacaatccattaataggtatagactgtgtcacagtcacaggggaaacacaaagtggcttattcaaataaagtttagataaatatctatgaaagattttgtagaagggattcaaatgacacagttaattcagaaaatcatgctgaaatctgaccatgagaacagtttatcaaaggaagttctgaactctgaaaaatctctaatgtttttgtccaatagaacaagtacccaagaaatagacccacattagccacatgattagtatgcttcaccatcacctag

SEQ ID NO: 443265 - DNA, 577 bp, Homo sapiens
aagcctaaataaataaatttagggtccagctaaggaagcttatctgtgaaacccttgtaatcccagcactgcactttagagttattacaaactagagtaatgcaaaaaagcaaataacatattacaagataaattgagtaatatagtttgaacaagtaaatatttctaaccatcttcaaatacttcattggcatccaggtagaagaaagcagattgatttcatgtgtgaaggaccaggacaaatcttagggaagttgatatttaatcagtccaagtaaggaaattgattagaattaaaacaatccattaataggtatagactgtgtcacagtcacaggggaaacacaaagtggcttattcaaataaagtttagataaatatctatgaaagattttgtagaagggattcaaatgacacagttaattcagaaaatcatgctsaaatctgaccatgagaacagtttatcaaaggaagttctgaactctgaaaaatctctaatgtttttgtccaatagaacaagtacccaagaaatagacccacattagccacatgattagtatgcttcaccatcacctag

SEQ ID NO: 443266 - DNA, 568 bp, Homo sapiens
caaattttcaatgactagactcaggatttttgaaaaatcttcctagtgactttgatcactaatgatatatgaaaatctaggtaatgatgggaggaaagcatggtacaaaattctggatcagaaggwaaacttacgtgttatttctgttccactttgtaaaatttttaagcaagccatataatatttagtgaattactctttgaggtctaacttttaatcttcttttgttttttgacattaaaaactcctactactaatagtaggatcagttctaccaaaaatgataggaaatgctagaaaattaccccaaaaccacaaacaactctaaatcactgcaaagtctaatttcctagctaactcttgcactagtgactcataaactaatttacttgccagccattcctcatactggatgtatcttaagcggttgtgtctatgtcatcatttgccaatgtagcaggagaagccgcatccaaaactcctcagacaccgagttaaagaaggaaggggtttattcggccgggggcattggcaagactcctgtctgaagagccgagctccctgagtg

SEQ ID NO: 443267 - DNA, 568 bp, Homo sapiens
caaattttcaatgactagactcaggatttttgaaaaatcttcctagtgactttgatcactaatgatatatgaaaatctaggtaatgatgggaggaaagcatggtacaaaattctggatcagaaggaaaacttacgtgttatttctgttccactttgtaaaatttttaagcaagccatataatatttagtgaattactctttgaggtctaacttttaatcttcttttgttttttgacattaaaaactcctactactaatagyaggatcagttctaccaaaaatgataggaaatgctagaaaattaccccaaaaccacaaacaactctaaatcactgcaaagtctaatttcctagctaactcttgcactagtgactcataaactaatttacttgccagccattcctcatactggatgtatcttaagcggttgtgtctatgtcatcatttgccaatgtagcaggagaagccgcatccaaaactcctcagacaccgagttaaagaaggaaggggtttattcggccgggggcattggcaagactcctgtctgaagagccgagctccctgagtg

SEQ ID NO: 443268 - DNA, 549 bp, Homo sapiens
ggaccccacaagttaagggcaacatcctccataagaccactgtcacttcagatgggcgctgcaattctcagagcagtctccagaccatctgaacttctgagcaaatggctacaaatttgaaggtttctgtgatgcmctaaggtttgataatttgctagaaagatacagaacacagggaagtgctctgcatatattacagatttactaaaaagggtcctcatatgcatgagttctgagagggaatgcagagcttctgagctatctcttggaatcaacatatatcactggctggcacatcaatgggttttaccaaccagtaagtttcattgagcttcggtgtacagggttttatcaaggcttcattacataggcataatttattaaatcactgggcacctccccacccctggaagttaggctagctcaaagttcaaaccctctaatgtggttagtctttttcgtgatcaggccccatcctgaagttatttgagggcctaccacaagtaatttcatagagtttaaccatttatcaatcctcgtctcatattg

SEQ ID NO: 443269 - DNA, 509 bp, Homo sapiens
ctgcatatattacagatttactaaaaagggtcctcatatgcatgagttctgagagggaatgcagagcttctgagctatctcttggaatcaacatayatcactggctggcacatcaatgggttttaccaaccagtaagtttcattgagcttcggtgtacagggttttatcaaggcttcattacataggcataatttattaaatcactgggcacctccccacccctggaagttaggctagctcaaagttcaaaccctctaatgtggttagtctttttcgtgatcaggccccatcctgaagttatttgagggcctaccacaagtaatttcatagagtttaaccatttatcaatcctcgtctcatattgtttgatctgtataaccttcttctctctttttcccttgggttaaatttccattataataatcttcactaagtctaaaaattagcttacttgatcaaaagtcatatatgtttcataaacacttttataacagacatacataattca

SEQ ID NO: 443270 - DNA, 509 bp, Homo sapiens
ctgcatatattacagatttactaaaaagggtcctcatatgcatgagttctgagagggaatgcagagcttctgagctatctcttggaatcaacatatatcactggctggcacatcaatgggttttaccaaccagtaagtttcattgagcttcggtgtacagggttttatcaaggcttcattacataggcataatttattaaatcactgggcayctccccacccctggaagttaggctagctcaaagttcaaaccctctaatgtggttagtctttttcgtgatcaggccccatcctgaagttatttgagggcctaccacaagtaatttcatagagtttaaccatttatcaatcctcgtctcatattgtttgatctgtataaccttcttctctctttttcccttgggttaaatttccattataataatcttcactaagtctaaaaattagcttacttgatcaaaagtcatatatgtttcataaacacttttataacagacatacataattca

SEQ ID NO: 443271 - DNA, 629 bp, Homo sapiens
gacacatacttagaccaggactgggaagctgaagaaggaaatctgtcagatggtggaggagttggaagcctcgctactgctttacaccaacaaggtgagtcaggaagtctacaacactrtgcatgagctacaatgtgtctgatattacactgaccctttgagccttgatcaagctgttgtttatgtccaccttccaaattccacacctaattttctatagtggccagccctgcctgaggagcataaagggaaggaaagtctgagtcacattgttctagcttaggtaaattgacacagtaaaaagctgtcaaggtgtatctcttgccatcttggaaactatacacatcctcattaaccaaacataaattccaaaatcatgcttcctcctaatatgattcagttgtccctttcatactaacctcttcctaaataaatttacaaaattattttatttttagctgatgcttatttctcttcaggatgagtcacacttcctctttgacatcctgtaacctaaatattgagatataagattaactactattagcacattttgttagttgataagagaatagaaggaaaggaaaaatgcttaaattatgtgaatacatcccttattgaaataaaga

SEQ ID NO: 443272 - DNA, 596 bp, Homo sapiens
gctttgaccagttgattttggcagaagttatgccgtaccagtttcctggccagttcttcagagagttcagttcttcaaatctccagttcttcagagttcttcagttcttcacttcttgcctcttagaatatttgctcttagaaaatgcccacacaatcaatgaagagggtcactcacattgatgagaactgactcctcgctaatagtagctttaacttgccagccaacttgaattgcatccttcagtcatagttgacccattctagatgacaacacattgaattagctgccctcaccaagcccagccaaaatggaatatttgtgagcaaaagaattattactttatttttaagccactaggttttagggtaatttataatgatacaatagatagctgaaacaaacacarcttgaaagataggcaaactagaactgaaactcagttttactaataccttattcaaaattctttcaacattatcatttttcttcctcctcccccaccagttgtagtagaggaaaatgaaagaatagatatcctatccttaagaatgtaggaagagaaaaatatgactagtgattcaattacttcattc

SEQ ID NO: 443273 - DNA, 629 bp, Homo sapiens
ccttaagaatgtaggaagagaaaaatatgactrgtgattcaattacttcattctaacagtttgtcacaaatatttttaaagtcactattgtggaactgttggaattctgagtcctgttttagaaatgtttaataattgactttcttttctgattagaaatttgtatgtaatgcacaaaacatttggaagccaagtcattggtattgttatgtgcttagaattggtgtttattttgttgatttgctaactaccacaaatactatgagtaataacattagtagaattgtcaagaaactggatatatgatcacttcaactcaattatagtaacataaaatattaattgtagggaaatgttggttatctttctttcttatacatctggaaacataatttataggtgtttcaaacacagtaaaatgtatagaatcatattgttaattggtaacttaaagtatgattatagatatttcaaggattatattcaattacttaataacatggtgtttgtgagtataaaataaaaccaccaatcaaaatatttaattttcaacggtactgatttgaatattgattacctgtcaccataattattgttgtgtcatcttaccttttcctgtcttcttctag

SEQ ID NO: 443274 - DNA, 629 bp, Homo sapiens
ccttaagaatgtaggaagagaaaaatatgactagtgattcaattayttcattctaacagtttgtcacaaatatttttaaagtcactattgtggaactgttggaattctgagtcctgttttagaaatgtttaataattgactttcttttctgattagaaatttgtatgtaatgcacaaaacatttggaagccaagtcattggtattgttatgtgcttagaattggtgtttattttgttgatttgctaactaccacaaatactatgagtaataacattagtagaattgtcaagaaactggatatatgatcacttcaactcaattatagtaacataaaatattaattgtagggaaatgttggttatctttctttcttatacatctggaaacataatttataggtgtttcaaacacagtaaaatgtatagaatcatattgttaattggtaacttaaagtatgattatagatatttcaaggattatattcaattacttaataacatggtgtttgtgagtataaaataaaaccaccaatcaaaatatttaattttcaacggtactgatttgaatattgattacctgtcaccataattattgttgtgtcatcttaccttttcctgtcttcttctag

SEQ ID NO: 443275 - DNA, 629 bp, Homo sapiens
ccttaagaatgtaggaagagaaaaatatgactagtgattcaattacttcattctaacagtttgtcacaaatatttttaaagtcactattgtggaactgttggaattctgagtcctgttttagaaatgtttaataattgactttcttttctgattagaaatttgtatgtaatgcacaaaacatttggaagccaagtcaytggtattgttatgtgcttagaattggtgtttattttgttgatttgctaactaccacaaatactatgagtaataacattagtagaattgtcaagaaactggatatatgatcacttcaactcaattatagtaacataaaatattaattgtagggaaatgttggttatctttctttcttatacatctggaaacataatttataggtgtttcaaacacagtaaaatgtatagaatcatattgttaattggtaacttaaagtatgattatagatatttcaaggattatattcaattacttaataacatggtgtttgtgagtataaaataaaaccaccaatcaaaatatttaattttcaacggtactgatttgaatattgattacctgtcaccataattattgttgtgtcatcttaccttttcctgtcttcttctag

SEQ ID NO: 443276 - DNA, 629 bp, Homo sapiens
ccttaagaatgtaggaagagaaaaatatgactagtgattcaattacttcattctaacagtttgtcacaaatatttttaaagtcactattgtggaactgttggaattctgagtcctgttttagaaatgtttaataattgactttcttttctgattagaaatttgtatgtaatgcacaaaacatttggaagccaagtcattggtattgttatgtgcttagaattggtgtttattttgttgatttgctaactaccacaaatacyatgagtaataacattagtagaattgtcaagaaactggatatatgatcacttcaactcaattatagtaacataaaatattaattgtagggaaatgttggttatctttctttcttatacatctggaaacataatttataggtgtttcaaacacagtaaaatgtatagaatcatattgttaattggtaacttaaagtatgattatagatatttcaaggattatattcaattacttaataacatggtgtttgtgagtataaaataaaaccaccaatcaaaatatttaattttcaacggtactgatttgaatattgattacctgtcaccataattattgttgtgtcatcttaccttttcctgtcttcttctag

SEQ ID NO: 443277 - DNA, 560 bp, Homo sapiens
ttggtctctataatttttggtatgtttcagtaactggcctcatgacatgtcatagaagttactattgcccctccacactacaaagttccttgtataataaggagtgattataagttgatatggcttaacatttcgatggtttgtacacttctgaatggcctgacaagaagtatggtgggggttactttgcataagaacagtgaagagctcatctgcagagacartagtgtttgaacacagggaattaatatgaggaaaatatctcaaaggtaaaaagaatgtcgatctagtatataatgaaataaaaatttagaaggaagtagaattgtttctttttaaaatattactagaacataacagtagagtttaaatgtgtcaggggtaaagcacagcaaaaaagggatcttcccaaacattagcatctttaagaaggccaaccagagaaaccactcttttaactcacaataacactggtgtcttgacatcagagagctcaataataaattaccataaagaccaaatttgagaagtaatttgtaagaagtgaaagataacagtat

SEQ ID NO: 443278 - DNA, 561 bp, Homo sapiens
atataaatgcaccacttttaacttaaaaggattatattccaggatagtaaactagataagaaacataaaaatataggtaccaatcagagctagaaatatatttttaaggataagaacagatataaaatattgcagcaagcttattttaaatatagttatgataaaaattcaaaaaaattgaaatctttaatcagctaagtatagatcaatgatgagctgttaaggaattactgatcaaatrtaagtttggaaatgtgttaataattttactttattattttgaatttggcattgtactaacattatggaaatgcttacattcattataggtcatgtggtataatagtcagatatttaatagaagagcttacaaatagtgtagctcactaatagcttatatcaaacaatcaattaaccaatatcataaataaaaatatttgaagtgagatattttaaattggggaaataattttaaaatgtataaactaaattattgaatagcattacactgtaatgtattaatatagtattttaaagaaggatctcaaatagatttaggtt

SEQ ID NO: 443279 - DNA, 532 bp, Homo sapiens
accttcttctaactcttcttcaactaccatcctacagtcttttgttcatttggcwgccagccagccttcccaatggagaaactggcaacctgcttgaaaattttattatcatctactataaatacaatggaaatttcatgcatccttgccacatggagtgatggttatgcttgcagttccaccacacatctcctttctgcctaggatggtcactttgattttctccttttgatagtctgttcttgcataaaactatcacccctgcttaataaggacaagtaactgaaataggagattcaggaaataaattcaagatcaaagatgagttgattttggaagttcatattttgagtaaaactgagatattcaagaagagatattggatggaactcattgatttagcatcatacatgtctcaaaaaactttgaagccatggttcaaaatgagatctctaagggtaagtgtgtgaaggaaaaattagagaggaagaggaatagaaacttttgttggataagtaggaacagagaatcg

SEQ ID NO: 443280 - DNA, 532 bp, Homo sapiens
accttcttctaactcttcttcaactaccatcctacagtcttttgttcatttggctgccagccagccttcccaatggagaaaytggcaacctgcttgaaaattttattatcatctactataaatacaatggaaatttcatgcatccttgccacatggagtgatggttatgcttgcagttccaccacacatctcctttctgcctaggatggtcactttgattttctccttttgatagtctgttcttgcataaaactatcacccctgcttaataaggacaagtaactgaaataggagattcaggaaataaattcaagatcaaagatgagttgattttggaagttcatattttgagtaaaactgagatattcaagaagagatattggatggaactcattgatttagcatcatacatgtctcaaaaaactttgaagccatggttcaaaatgagatctctaagggtaagtgtgtgaaggaaaaattagagaggaagaggaatagaaacttttgttggataagtaggaacagagaatcg

SEQ ID NO: 443281 - DNA, 552 bp, Homo sapiens
caatatgttagattttcctcctttctttacctttttattgtgtgtgttcttgtgtgtgtgtgtgtgtgtgtgtgtgtgtgtgtgtgtgtgtgtgtggtgtgtgttttctatgctcaacattgtatttcacccagcttttaagcttggttatttcaacctcaaaaatgccatcttcttacttacacatacattatttaagacctccctttaaactgatgaaattttatttcaacgaatatarattggacctgacagaaacataatgtatacttgaattaaacagctttaatcatgctttttcactatgctggcaactaaccttgaccaggcatgtggaacaacttagtaaggttttaaaatcacttgaagttttatcatattgaaacagaaggctagtaatgccaaagtcaaaataatcattgttatttctggtaaacataatcaaagcattaaaatgagtgaagatgaaaagtgtagtgagatagacgaagatatcattttcaataaatatcaaatatagttaaactaggtattacatgaacactgacctca

SEQ ID NO: 443282 - DNA, 598 bp, Homo sapiens
gttgcattccaaattagaggacataatgaagagtgataatggggagtctttaatataataacacatgtagatctcttagcatattccctggcccataataaatggcaatacatgtcatatatttaaagtaaaaaaaatcataaactatatgtgtatttatctaactagaaataaagaaggagaatggctatttgagtttcataaatgattgaataattgattattgggggcttaaaacactgatgaaaggggtcataattttgtcatactgcttaattccataaagataaaaagcaaaaccagaaaaaaagaaaaggacggtaagtcaggtagatattaatgtattagtaaagatttcrtgcaattaaagtacaaggtgttgtaaggcttatgatattttatcttcatcataaagtttctaattttttctcttacagcagaatattttatagacaatactcttgaatcagtaattatttttgctccctcggggaagtttgacaatgtctggagacacttttagttgtcataactggccagaatttgccactgcagtctagagggtagagacaagaaatgctactaaacattctaccat

SEQ ID NO: 443283 - DNA, 577 bp, Homo sapiens
tcaagcagcctttccggacacgtgatcacagtcagcaggcagatcccagagacaaagcaccttagcttcatctctaattaggattttcaactgaaaaagaaaaaccccagttaagagcccaaatggatcactatattctcttgtccaggtggccaatttatcacttcaagcctttcaatagaaaaacaagaatggatggagtgaggggagtttcctaaaagaatgttggtgttttacgataagggaagtggtgcctgcagataaaagtagaatctacaacacagggtttcgtgtatcctcaatacacagaatggaaatcagatcaatactgccttccaaattgtaacaatgatagagagaaaccagtgattacataaactagtagaaataagaaaagaaatatatacrttagttccaggcacccaaattatctttgaagattgattttagtgttggaagaaataaaagtaattggaaagtcaagctttaacactttgagctttaggctattataggttttgtgtttcgaagtatttcatataaagagtagctagatttttggaaacattaggttacc

SEQ ID NO: 443284 - DNA, 614 bp, Homo sapiens
ctattgtacctaataacattttagtacttttttttaacttttttattttttacattgacagataatgatgtatgtatttaccttgtacaacatgacgcattatctaacatggttgttacttttgtggtaacatarctttttattcactctcttatttttcaatatgaaaaattattaactataattaccaggttataaaatagatctcttgaaattatttctcttgttaattatatttatttttctttgagcattatctcttcactcccactaccaaacattccagcccctgagatcaacttgtttgtattctccaaatatgtgagatcatgcatgatttatgtttctgcaactggctcatttcataaattcctccaacttcatccattttcacataaacaacaagattttcttattttttatggcttaatagtacacagtatttcattgtgtatacatcctacattatccgttcattcatttatggaaaattagattgattttgtctacttgcaattgtgaatagtgctgcaataaacatatgtataagtcctactactaatagtgggattgatgtattatacggtagttctaatattaattttttgaggaaa

SEQ ID NO: 443285 - DNA, 614 bp, Homo sapiens
ctattgtacctaataacattttagtacttttttttaacttttttattttttacattgacagataatgatgtatgtatttaccttgtacaacatgacgcattatctaacatggttgttacttttgtggtaacataactttttattcactctcttatttttcaatatgaaaaattattaactataattaccaggttataaaatagatctcttgaaattatttctcttgttaattatatttatttttctttgagcattawctcttcactcccactaccaaacattccagcccctgagatcaacttgtttgtattctccaaatatgtgagatcatgcatgatttatgtttctgcaactggctcatttcataaattcctccaacttcatccattttcacataaacaacaagattttcttattttttatggcttaatagtacacagtatttcattgtgtatacatcctacattatccgttcattcatttatggaaaattagattgattttgtctacttgcaattgtgaatagtgctgcaataaacatatgtataagtcctactactaatagtgggattgatgtattatacggtagttctaatattaattttttgaggaaa

SEQ ID NO: 443286 - DNA, 448 bp, Homo sapiens
gatttatgtttctgcaactggctcatttcataaattcctccaacttcatccattttcacataaacaacaagattttcttattttttatggcttaatagtacacagtatttcattgtgtatacatcctacattatccgttcattcatttatggaaaattagattgattttgtctacttgcaattgtgaatagtgctgcaataaacatatgtataagtcctactactaatagtgggattgatgtattatayggtagttctaatattaattttttgaggaaagtccatactatttttcataatggctgtactaatttacattcccaccaacaatgtgcaaaaatatttttcccacatcctcaccaatacttgatttttgtcttttcgatgataggcattctaataaatataaggatatctcattgcagctgtgacttccgttaccctgatg

SEQ ID NO: 443287 - DNA, 448 bp, Homo sapiens
gatttatgtttctgcaactggctcatttcataaattcctccaacttcatccattttcacataaacaacaagattttcttattttttatggcttaatagtacacagtatttcattgtgtatacatcctacattatccgttcattcatttatggaaaattagattgattttgtctacttgcaattgtgaatagtgctgcaataaacatatgtataagtcctactactaatagtgggattgatgtattatacggtagttctaatattaattttttgaggaaagtccatactatttttcataatggctgtactaatttacattcccaccaacaatgtgcaaaaatatttttcccacatcctcaccaatacttgatttttgtcttttcgatgataggcattctaataaatataaggatatctcattgcasctgtgacttccgttaccctgatg

SEQ ID NO: 443288 - DNA, 530 bp, Homo sapiens
gcatatatgctcttgtaagcagcatacagttattttgttgctatctttaaaattcattcagtttctctatgtcttttgattggtgaatttaatctatttacattcaagattattgctaatagataaggacttgctactgccattttatctattatttctatttcttttgtatattttactattctttctacttttctgtctttctttgtagataagtgattttctctagyggtatgttttgatttaacattgtgtgtgtgtgtgtatctactacaggttttttgttttgtggttaccatgagtcttaaaataaacatcttatagtaataacatgcttttttcagctaataataacttaactttgattgaaaaaaacactacacttttacttcattcctcccaacattttgaaattttgatattacattttacatctttttgtattgcatatccctaaaaaatactgtaactaatagtattttaacagttttgtcttatagtattaatacaaaagatataagtaatttata

SEQ ID NO: 443289 - DNA, 612 bp, Homo sapiens
ttgctattgatgctctctattgcactttgcatttcatttattgtatttcttaggcccaacatttttgggtttttagttattattgaaacctctctattaaagttctcattctggtcacattgttttccttattttggttaatttttttctgtgtattttcttgaagtttgctaagcttcctaataatatttattttgaattctttttcaagatgttaatacatctctgtctctaactyagttacttgtactttactttgctggtttagtgatattgtatttccctaattgttcttgatcctaatggttatccatcagtgtttgcatatttgaagaagcagatacttattccactctccacaaactagtcttgtctgcagcagattagaaacttaggacggatgcagtcagcatggcgccacctgagcctgggattcactaaggcaggcgtgatgctgggacactaagtcatgaagctaggagccactaagagctgcctgttgcttagggctgtctggggcccagggccactgacattggctcagcaatggtacagatcagaggctgagttctcaaaaaatgcctggcacctggggctgtgtgatccctcctg

SEQ ID NO: 443290 - DNA, 632 bp, Homo sapiens
atcttaattcaggtgaaacagtttgagctttcaggacaagcatttacagaaattacaaaactctcttgaatggcaacttactttttccttcttaattaggaatgctgctcccttgtctatgaatagcttcttacctctgtgcatgtcagcttaaaaatctcctcaaagagacctttttatgaccttagctgagcaactatcattctttggttttgtttaaaatgcttttaacactgaaatcatcatatacattccactgcacatttgttttttatgtttaccactataagcatatggcagttttgatctttcatccttctattcccaggggctagcataatgccaggcacagagtaaatgctcaacaaatatttgttgaatgaatgaatactctcagctaattatgattgctattcttacattgcaacatttggttttggctgtttgcttctcttagattccatccagaaaaatattttaccttatatacagcatttttatctaagactgaactgccatttcwctctttctctttggtattctttgggttgttgttgttttgttttactgcattgaacttaggttcagtgctgctgatctaagttaattgatgttcctacttccgaatgacc

SEQ ID NO: 443291 - DNA, 512 bp, Homo sapiens
ttaggttaacagtggtaagttacatggtagtttaatttgaagtctccaacctttttagattttaagcactattttataagtgcacttaatgaagtcaacaatcatcaaacagagaaccgaaatgtcagcatggactaaatctgaaaaattgctcattattcactgtcaaagtagcttatgaacttttaatagayaagccctcaaaatttgagaataaaataattagaacagatgagactggtctaagtgatggggtgatgtatttcaattctatgcctttataattttataaaataatatatataaatttcaaaataatctgtttataataaggtctttgacctttagtatttgtatcttttattatccatgcttatttatgtcactaatttatagatcaagatgagtcagtcttttgccttttcagaactaaaggtataatattaagtgtaaatattgaaacctttacagaagacaggtgttatttattaaatatgcttatttttcaaatt

SEQ ID NO: 443292 - DNA, 618 bp, Homo sapiens
tatgaacttttaatagacaagccctcaaaatttgagaataaaataattagaacagatgagactggtctaagtgatggggtgatgtatttcaattctatgcctttataattttataaaataatatatataaatttcaaaataatctgtttataataaggtctttgacctttagtatttgtatcttttattatccatgcttatttatgtcactaatttatagatcaagatgagtcagtcttttgccttttcagaactaaaggtataatattaagtgtaaatattgaaacctttacagaagacaggtgttatttattaaayatgcttatttttcaaattttctgctccttttcaactctgtataacctttcacttacccctgctgatgctctgatgttccaggggtcacacctgttcttaaggaagtgtgggagggagtgggttgggaatttgagagaaacacctgggtgaactttgctgtaagggatctttatatgttgctcagtcttttcacctcctgccccattgccttctctgttgacaacagcagcatgcctcttgctgccccatgggttagaattcttccttacaggcaaaataacagcaaacagctctacttta

SEQ ID NO: 443293 - DNA, 556 bp, Homo sapiens
caagttatttaagatattggaactcattatctttatacataaaatgctgttcaactagatgatgtattatatccagttcctctagtctgtttctaactccatggcatttcaagatgtgtgggcagttattagtttccaagtgatgattcttcaycccaccttccccaaaacacaactcaatggctttaccattaaaactctgctgcctttgatactaaagccattggaggagtatggtataatattgctacagaactgaaggtgaggaattgatttcaaaaaataagtagtggtgaattgattaagcttaagtaaacagatgctaaggaaccaaaatacctgcttgtatgatgatacctgctttaacactttaacactttccctcttctctggtactgtgtctgacattttgtcaattagatatgcattggagttacccaaacttttcatttaaatacatccattaaaaatgattttaatactaaagtaggaagaatgtttaatgtaactgttttcttgatcttatgaaatagatggaataaaggctatgaacaat

SEQ ID NO: 443294 - DNA, 594 bp, Homo sapiens
ttggaaactaccaatcttattgacaaaatgctgcagctaaaaatgaaaagttagtgtccaccatcagggctgcaatatgctgttgttccaactgtaacactctgtaacacaaaggggaactactggacacacagacatcattgtttatatatttattggaacaatttttgggatggcattcatgtatctttgtaccaaaatcaatattttctgacaatgatttgatatatggaagtgtcttagggaagatacattttttgaaatttttgatcaaagaatcatatgagttaacattggccctcactattatagcaaggatgttgggactgcatttattcaaatacrtttaggcagaaagcacaacaaagtagttgagagcatggtctcatttggaatcagaaagactgggttcaaataatgtttctttttgtttgtttgttttgttttccctacagttatgtaaccttggaatatatatttaaccattgagaaatttggttttctcatctggaaaaatgggaacagataacaaaattgttataaggcaagacaaaatcaatggatcatgaaatatgggcatacgttggtaaaaat

SEQ ID NO: 443295 - DNA, 583 bp, Homo sapiens
agtaaagtccactgcttcctctgatctttttcctctgacctaaagacctttgatattttggtgcccagaaaaaaaaaagtagaaaatacatctacctaacaccagtttaatctcaaacgatccacagaagtttttgagacagaatacctgattgasagcagatgtggaagtctggaaaaataaactgaatgagtcataacttggatgtgactattgtgtataaaactacatctttcaagcattttgttactttaagtttttagtgttttaatattatgcactttttaatcctcttttctcaaagcagtttccatggatcatcagagatgggatgtagcccaggaaaaatgtttagtcacagcctaatgtgggtctaggggaacctttataattagacatgtaggaatatttgtgtggcatgttggattttccacaagcagctaggtttgagatggatttggggcataaaatatttattattggcacctgtgaaataaaagagggagaaaaggattgagcagagggagaaattaaatagtgatgtagctctgacaaagctttaaccagccaagtaggtagctgt

SEQ ID NO: 443296 - DNA, 583 bp, Homo sapiens
agtaaagtccactgcttcctctgatctttttcctctgacctaaagacctttgatattttggtgcccagaaaaaaaaaagtagaaaatacatctacctaacaccagtttaatctcaaacgatccacagaagtttttgagacagaatacctgattgacagcagatgtggaagtctggaaaaataaactgaatgagtcataacttggatgtgactattgtgtataaaactacatctttcaagcattttgttactttaagtttttagtgttttaatattatgcactttttaatcctcttttctcaaagcagtttccatggatcatcagagatgggatgtagcccaggaaaaatgtttagtcacagcctaatgtgggtctaggggaacctttataattagacatgtaggaatatttgtgtggcatgttggattttccacaagcagctrggtttgagatggatttggggcataaaatatttattattggcacctgtgaaataaaagagggagaaaaggattgagcagagggagaaattaaatagtgatgtagctctgacaaagctttaaccagccaagtaggtagctgt

SEQ ID NO: 443297 - DNA, 547 bp, Homo sapiens
cacctaaatctcatcttgaactgtaattcctataaaccccgaaatccccacatgtcaatggaaagaccaggtataggtaattgaatcacgggaatggtttcccctatgctgttcttgtgataatgagtgagatctcacaagatctgatggttttataaggggttcttttccctgtgctcagcacttctccttcctgccaccttgctttcactttgccttctgccatgattataaatttcctgaggcctccctagccatagtgaattatgagtctattaaacctttttccttcagaaattacccagtcttgggcagtttttttagcagtatgaaaataggctaatacartacattggtaccaggtgtagggcactgctgtaaagatactcaaaaatgtggaagtgactttggaactaggtaataggcacagattggaacagttccaaaagctcagaagaagacaggaaaatatgggaatgcttggaacttcctacagacttggaggactcagaacacaggaagatgtgggaaagtttggaactgccta

SEQ ID NO: 443298 - DNA, 609 bp, Homo sapiens
ttgccataagtcctactgggaaatttttaattcccattcacaatattagtatttgctgggctagaatccatttcccaaggaggatatttgtaggaggaaacaaaataagattttacctagaagtaaaattatacctgtcacctgaatttctttttttttttttagatggagtctcacactgttcactgtctcccggactggagtgcagtggcaagatcttggctcactgcaacctcctccttccaggttcaagcgattctcctacctcagcctcctgaatagctgggattacaggcacccgccaccattcccggctaattttttgtatttttagtagatacaggcttgtcttgaacgcctgacctcatgatccacctgcctgggcctcccaaagtgctgggattacaggcgtgagccgytgtgcctggcctgtcacctgaatttctaatacctgcagaaaagtaggtgaagaagggtgtcactatactggcaataatgaccctgcttatcataaggagataatcataatgagggcaaggttatgcctgaagttctgagaattcactggggtaaatcttgatgtttccacgcttgttgatcattgtaaat

SEQ ID NO: 443299 - DNA, 597 bp, Homo sapiens
atcatataatactgttcttgttctaggaacaacattccttttcctgacacataataggtgttcattaaatatattttaataaaagaataaatgttgaccatgtatcaatccacaatcgtacactgaatgctctctatacatcaggcaatatgctaaatctcagaggtttacatattgaaagaacacatgatccctgcctttaaggagtctgcaagctaatttggttttatattaatgtcatgactatttatatggcataaataataattggcatttaccgaatgttcgttcagtgccaggcactgttctctgtgccatccatattattttctctcttgtccttggagcatagataaaaagataataatgttattaccttcattgttcaaataaagaaactgaaccttggaaagtttaaataatttgacgaacatccttgaactgagaaatgaacccagacagtctgacttggyttcttaacaattaagtaataattgtctctaagtaggtggaggtgtcagactgtaactggtattaaccttcagaaaaggagaagacattttgttgttgaattctcagggaaaagttcacggagaa

SEQ ID NO: 443300 - DNA, 595 bp, Homo sapiens
tttactctttttctttttttttttttttttttttgagacatagtcttgctctgttgcccaggctggagtgctgtggcatgatctcagttgactgcaacgcctctgcctcctgggttcaagcaattctcctgcctcagcctcctgagtagttgggattacagggacatgccaccacacccagctaatttttttatttttagtagagatggagtttcaccatattggtcaggctagtcttgaactcctgacctcatratctgcccatcttgacctcccaaagtgctgggattacaggtgtgagccaccacgccctgcttattttacttttcaccctgcaggaaaatttatatatattagtttcttgcctttagaagttttccatattaaaatatttttcctatttgtattgtactgtgacttttgagatagagaaatatttcaattcagtgtagttgcatgtataatagtttcttttatgtttgtctattttcagttatttgaagaaattttaagcaacttgaatatgataagcctattatcctatattctgtgctaaaacttttaaagttttactttcaaaatgtcaacacgtggc

SEQ ID NO: 443301 - DNA, 595 bp, Homo sapiens
tttactctttttctttttttttttttttttttttgagacatagtcttgctctgttgcccaggctggagtgctgtggcatgatctcagttgactgcaacgcctctgcctcctgggttcaagcaattctcctgcctcagcctcctgagtagttgggattacagggacatgccaccacacccagctaatttttttatttttagtagagatggagtttcaccatattggtcaggctagtcttgaactcctgacctcataatctgcccatcttgacctcccaaagtgctgggattacaggtgtgagccaccacgccctgcttattttacttttcaccctgcaggaaaatttatatatattagtttcttgcctttagaagttttccatattaaaatatttttcctatttgtattgtactgtgacttttgagatagagaaatatttcaattcagtgtagttgcatgtataatagtttmttttatgtttgtctattttcagttatttgaagaaattttaagcaacttgaatatgataagcctattatcctatattctgtgctaaaacttttaaagttttactttcaaaatgtcaacacgtggc

SEQ ID NO: 443302 - DNA, 560 bp, Homo sapiens
ctgattcaatgtgtcctctgacacagatgccagcacaatatcaagcggccaaaacacttgcaaggcaagaatccaaaaaaagaaaaaaaagatgaagaagtagttattaattttaaactaatttataaacttgtgcatgraaaggatgtggattaattgagctatttaccaattcctaatatgatggtaatttcatgacataaaatgtttaaatttagttaaataaaaaagactaggcttgtatagctctattaatgattcatttatgactttggaaaatttataggtctcctctatgtgtgttgcaggttttatgacataaggatactgaatctaaaagaaatgagtaaaatatgaggttacatgcttatattagccttgaaaattattaatgacagtaattggaaaggaataacaaaaaaaaatggtaaatcctggttctaaccaaagtttcctttaaaatctaatctgttagttttcctataggttgctattatcttcattaacctaaaagcctttcgaagacatgtgctttagaaacatatcctaaaaattgctaa

SEQ ID NO: 443303 - DNA, 440 bp, Homo sapiens
atagttttatcttcgtaggcataatgattcgttttgaaaagatgaatatgaactgggttatcaatacaaccatayaattatatttcagtgtgtgttcttctttctcagtctctattcctgcttgtaatcagtattagtttgcatgtttcaaaaacatttaacataaattagaggcccgagaatgggctttgcatgctaaagatgtggcttcctggaacttctttgtataaattttcaatcatctactttgctcttatatagatctttgatttatctttgatgcattccaccatttatataaaatttagagattgatttaggcattaaatttctgaaggaggtgaaagcagctcatcatttttcttctgcttaaaagagttagatctacattaagatcattttccatttctcttgggccttttaaattgtgttcttaggtg

SEQ ID NO: 443304 - DNA, 605 bp, Homo sapiens
gtgtgtaggtgtgtgtgtgtgtgtcttcatacgccattcgatttcccaccactacagaaaaggaaacaaagtttttttacatgaagctcagagttataattaaaacaatcaaatccaagatctctaaaatgattctgaatagattgcagattgcttaaaagcagaatataatcaagcaaatccacggacaatttaatagacagaaacttctgtcttaattatatgtactggtgcagtagagagcctgtaataaagagggatcattttatttkgtttttagcagactgtgtctcattatcttgccatttgtcataacaaatatttatcttaaaatgtgcatgtgaccaaccttttaacctttctctctgtgtgaactatctggatctaaattttcctttaaacatatgagattattcagtgcttattgggtttcctaattgtttatcaacatgtaggtctatacatgagagttagtgatacaaactcctccttcaatttccaccagtctgcctttattaaaaaaataataaatctatttgctttaattatgtagaagtagaaacacatgaactaggttaaaatgtaagttgacagcctgagtaata

SEQ ID NO: 443305 - DNA, 575 bp, Homo sapiens
catgtaggtctatacatgagagttagtgatacaaactcctccttcaatttccaccagtctgcctttattaaaaaaataataaatctatttgctttaattatgtagaagtagaaacacatgaactaggttaaaatgtaagttgacagcctgagtaatacatgattttttccttctattcacatattrccctgcatatgttacagggttgagtcttttttggtttaatttaatttcactgtccacatcaatgtatatcaaattttcatgaaggaaaaataaaccaatttaattaaacagggtatcaattatatgtcaggcattatgctaggtcctaggaactcagtggtgaataacaaagatgttgtctccttttgggaaagaccgacaatgaacaaacaactctgagtataataaacatgaaggtggaagtaaaaatgaacaatgaatctatcctagacacgggagagaattgagccctctgagagcaagtcgtatttctgataagagataaagtgagtctattagttgggcagctagggtggttataaagaagagatttcattcagacagaatag

SEQ ID NO: 443306 - DNA, 575 bp, Homo sapiens
catgtaggtctatacatgagagttagtgatacaaactcctccttcaatttccaccagtctgcctttattaaaaaaataataaatctatttgctttaattatgtagaagtagaaacacatgaactaggttaaaatgtaagttgacagcctgagtaatacatgattttttccttctattcacatattaccctgcatatgttacagggttgagtcttttttggtttaatttaatttcactgtccacatcaatgtatatcraattttcatgaaggaaaaataaaccaatttaattaaacagggtatcaattatatgtcaggcattatgctaggtcctaggaactcagtggtgaataacaaagatgttgtctccttttgggaaagaccgacaatgaacaaacaactctgagtataataaacatgaaggtggaagtaaaaatgaacaatgaatctatcctagacacgggagagaattgagccctctgagagcaagtcgtatttctgataagagataaagtgagtctattagttgggcagctagggtggttataaagaagagatttcattcagacagaatag

SEQ ID NO: 443307 - DNA, 592 bp, Homo sapiens
tggtctttggagccccagagacctgagccttaattaaagtttgaaaaacttaagcaagctattttaaattcgaaagccttagtgaccatgtgcaaaataagaaaaacaatatctgcttttaaaagaacatatataaaatatatagcacacagcaatgctcaataaatgttaaatttttttatacaggatttttttttttttttagatggagtctcgctctgttgcccaggctggagtgcartggctcgatttcggctcactgcaagctctgcctcctgggttcacaccattctcctgcctcagcctccccagtagctgggactacaggcgcccgccaccacgccctgctaattttgtttttgtatttttagtagagacgggtttcaccgtgttagcaaggatggtctcaatctcctgacctcatgatccacccacctcggccttcctatacaggatattttaaactgttaatttttttattattgtcagtcttacaatctgatttgttgagaaaataaatattaaatttaaaataatataccaccaaaaatattgttaaggaaggatcactaaattgaagggcagaatatag

SEQ ID NO: 443308 - DNA, 575 bp, Homo sapiens
taagatttctatgggcctatgttttttgactaggaagaaagcaaaaatctgggctttttttttagggtctaattttgaattatattgtgtgggtcatgggatgggaaagaaaggacgtgaaataatggcaagaatgawtattgaagattcagaagaacttagttacctcaaaatgcatcacttactactttaggattatgatttagtggaatcaaaagattcatatctcacatttggcttaagtcacatatgatatatgtgtaaaaatttgaaaggtcagtactgttaggactttcaggacttaaaattttgtttcaatacattattatagataatcatatttatatgtatatttataaacagtacgtaaacattttaaagttttattttgtttgttttttaagccatagtttcatgtaactgtgacatacatgctcatacttcagatggcacaattgatcatgatactaacttttctaattagcccattactaacttttcacttttccacagttcagtaaaatatgaatccttctttagtccttccctttttaatcccaagagcaatacagttg

SEQ ID NO: 443309 - DNA, 624 bp, Homo sapiens
ctaggacatagtatttgaaagacagggtaatttacagagttataaaatcatctaagatttctatgggcctatgttttttgactaggaagaaagcaaaaatctgggctttttttttagggtctaattttgaattatattgtgtgggtcatgggatgggaaagaaaggacgtgaaataatggcaagaatgaawattgaagattcagaagaacttagttacctcaaaatgcatcacttactactttaggattatgatttagtggaatcaaaagattcatatctcacatttggcttaagtcacatatgatatatgtgtaaaaatttgaaaggtcagtactgttaggactttcaggacttaaaattttgtttcaatacattattatagataatcatatttatatgtatatttataaacagtacgtaaacattttaaagttttattttgtttgttttttaagccatagtttcatgtaactgtgacatacatgctcatacttcagatggcacaattgatcatgatactaacttttctaattagcccattactaacttttcacttttccacagttcagtaaaatatgaatccttctttagtccttccctttttaatcccaagagcaatacag

SEQ ID NO: 443310 - DNA, 538 bp, Homo sapiens
aaaaagagtagtatctgcaaacagaagcagttttgtgcttgtttgtagtaaagactctatctataactgagtcagtaagcatattctcctttttaattactgccatgtactaatcaaacactatttaaaatgccaggcatgttgctaggtgctgttcatatctgttgtcttatcttcagagaaaccctgcaaaaaaatactttatctacattttgcaactgaagattaaagaagttaaataacttttggattgatgcacaggaagtggtagagccaggtgaatccaagttggtctgtcttttggactgcaaaagctgtatttttcccacatctgaagctgttagccctcaccctttatatcctagtgcccagctactttatgtgtcctgcacccctaaacccaaaagyggtatgtgtgtgaagtgaaggtagagagttttgtttttctggatttgttttttcacagctttactctgaccacctagaaccatgcctggcacaatataggtaatacttattgagtgaatgaaggaatgcc

SEQ ID NO: 443311 - DNA, 575 bp, Homo sapiens
aattaaacaatctgttacagaatgacttgggtaaacagtgaaattaaggcataaatcaagaaattatttgaaactaatgagaatcaattcaccacatgccagaatctctgggacacagctaaagcagactgaagaagaatgtttatagtaataaatgcccacatcaaaaagttagaaatatctcaaattaacaacctaayatcacacctagaagaaataggaaaagaacagcaaccaactcccaaagctagcagaagacaagaaataaccaaaatcagagctgaatcgaatgaaattgagatgtgaaaaaccatacaaaagttcaacaaattcagaagtttgctttttgaaagaataaataagagagatagaccactacctagattaataaagaaaaaaagagagaagatctaaaaaaacacaaacagaaatgacaaaggagacattaccactgaccccacagatatgcaaaataccctcagagactattatgaacacctctaggcacaaaaactagaaaacctagaggaaatgaataaattcctagaaacatacaatcttccaagactgaacca

SEQ ID NO: 443312 - DNA, 641 bp, Homo sapiens
cttactatttcaacaaagcttctggttattttagtattaatttttattttatctatttttacagacagggtctccctatgttgcccaggcttgtcttgaactcctgggctcaagggatcctcctgcctcagcctcccaaagtactagaattacaggtgtaagccaccacatctggcctcgtattaattttatttatttatttactgacagggtctcatactggttgtccaggctggagtgcagtggcatgatcttgccacttactgcagcctcaacctttggggctcaggtgattctcccaactcagcctcttgaatagctgggactatcggcatataccactatgcccagctaatttttgtatttttagtagagayggggtttcactatgttgcccaggtggtctcaaactcctggactcaagcaatccgtctattttgacctcccaaagtattgggattacaagtgttagccattgtgcctgggcaattttattatgaattttagatagagcttattttgtgttctattcctaaggtaataatataaaaactaaatcaacattgaaattgatttatacatatatcatttcatatggtggttcttttagctaaagaaaatcattatttgtcttagtgaat

SEQ ID NO: 443313 - DNA, 572 bp, Homo sapiens
ggattacaagtgttagccattgtgcctgggcaattttattatgaattttagatagagcttattttgtgttctattcctaaggtaataatataaaaactaaatcaacattgaaattgatttatacatatatcatttcatatggtggttcttttagctaaagaaaatcattatttgtcttagtgaatatgtcttaaaacataaacggagtgtcttttctctcctgtgcaggtttgaacttggatctgcagccataatgtaaaaatccttcccctatttgtaagttttactcctgagactctatctgatcattcagtcacttataatttttttgtttactaattttattttattttttagagatgaggtctcactatgttgtccaggctggcctcgaactcctgggctcaagccattttcctgcctcagcctctcaaagtgctgggattacaggcatgagccactgtgtccatccawactcattttttcattctccaacgatgtgctaggcactcactgtgtactatgcaaggtctggggactccactttcttggattcaagtctcagctctgct

SEQ ID NO: 443314 - DNA, 612 bp, Homo sapiens
aagattgttcatctcttgtaaaccgtgattcttttcttctagcgagaatcagtcaggggtggatccatcaaagaatggggaagacatgatacttctgcttgaatgtggacttggtagctccaaaatgatctcctttgttattgggatggtcatcaatgcttgaaggaaattgctgtggttgtgatggggagttgagtagaatataatgcatctcactactagagagtccatcagatgtccctggtcctcctggggttgtctgttatyatatttaagagttcacttcccatccattgtgtccatttgtaagaaaggctctccaaaagaacataatagcaagtttacacatactgttgagcctatttaccatagggatctcaaaatcataggggtcctgcctgttttgttgtggttgtttacattctttgtgtctatttctatatactgcacagattataccataaagctattttgtgataagaagaattgagagagactgaaaccaaatctttctctcgagctacaagtttctctgaaaatagaaagagacctacccatatttttaaaaaattacacctgttatccagttctagctataatggcaactcataa

SEQ ID NO: 443315 - DNA, 441 bp, Homo sapiens
tatgagtaacatctttggcgattcacataggagtcaaacatttatttgtagtctggtttggtgacactattcttggtaacagaattagaaaaactgattgtgagtttgcaggaaataccaagtcatactgaagttataggtgggtggcatttgcaataaagattagtgaggcrgggcatggtggctcacacctgtaaactcagagctttgggaggctgaggcaacaggatcatttgagcctaggagttgaagaccagttagggcaacagtgcaagtcctccttctctacaaaaacataaaacattagccagacatggtgtcacgtgcctgtggtcccagctacttgggaggctggggcaggaggattgcttgagcccaggagtttaaggctgcagtgagctatgattgcaccactgcactccagcctgggcaacagagtga

SEQ ID NO: 443316 - DNA, 441 bp, Homo sapiens
tatgagtaacatctttggcgattcacataggagtcaaacatttatttgtagtctggtttggtgacactattcttggtaacagaattagaaaaactgattgtgagtttgcaggaaataccaagtcatactgaagttataggtgggtggcatttgcaataaagattagtgaggcggggcatggtggctcacacctgtaaactcagagctttgggaggctgaggcaacaggatcatttgagcctaggagttsaagaccagttagggcaacagtgcaagtcctccttctctacaaaaacataaaacattagccagacatggtgtcacgtgcctgtggtcccagctacttgggaggctggggcaggaggattgcttgagcccaggagtttaaggctgcagtgagctatgattgcaccactgcactccagcctgggcaacagagtga

SEQ ID NO: 443317 - DNA, 570 bp, Homo sapiens
tggtgagcatagtgtgaaacaaacaaacaaaaaaatcttttccaaaaagtctgaattatggaaaatataaagggccacaaatgaacagaaagataatgcagtgaaattcattttaattcagatgaagaagttgtatgatcccagcctaatgctgtgagrcttgaatttgtttcttgtgatcccatacacctgattctaggcagggaggtcaggacaacgaacaaaccccttaaacattcacatgcagacatcagacactctgtggggaagccaagagggcaggcccagggtaacagctggcataaagaaccccagaccccacagcccctggctgcaataaagtagccccacatgccttcaagaagaaacacacacaacttttatttggcaccaaagagagctggtgggtacttgctgatttagctctctggctgactccaaattaatgtagtaaagtcttcatgagaatttaatgcctttaaatttccccaatctgaagagcttctttggatatgtacgattctattttttcccccaagtaattttctgtcacaaagattttaagggtct

SEQ ID NO: 443318 - DNA, 570 bp, Homo sapiens
tggtgagcatagtgtgaaacaaacaaacaaaaaaatcttttccaaaaagtctgaattatggaaaatataaagggccacaaatgaacagaaagataatgcagtgaaattcattttaattcagatgaagaagttgtatgatcccagcctaatgctgtgaggcttgaatttgtttcttgtgatcccatacacctgattctaggcagggaggtcaggacaacgaacaaaccccttaaacattcacatgcagacatcagacactctgtggggaagccaagagggcaggcccagggtaacagctggcataaagaaccccagaccccacagcccctggctrcaataaagtagccccacatgccttcaagaagaaacacacacaacttttatttggcaccaaagagagctggtgggtacttgctgatttagctctctggctgactccaaattaatgtagtaaagtcttcatgagaatttaatgcctttaaatttccccaatctgaagagcttctttggatatgtacgattctattttttcccccaagtaattttctgtcacaaagattttaagggtct

SEQ ID NO: 443319 - DNA, 519 bp, Homo sapiens
gaacccggaccccacagtaaagtgaggtgactgctgctgagtacccatatggaacagggggaggaggcacaaatgagcctgctgtgggcactgcccttgcagaggctctggctggacccacaccaacctcatcagggaccacttccctgcagaccccgggtgctcttgcctttggcacatgcttgagctcattcgagtttcctcctatttgcatgtgcaattaatgacctccacttagaaagttcaccctcattctttcctacattcaatgttcagctcaaaagcactcatcttgctgaagcttccgcagaccctattcacagtacattccttttctccacagccacgtgccatgctgtgtaatcatctgttcacgttatgccccttctcccccaagagctctcargagatagggaccttgtcttgttcatgttcatcctccaactgcctcgccttgggtcttgtaaacagtaggcactcaataaatgtttactgaataaatggcttcagtttattcag

SEQ ID NO: 443320 - DNA, 501 bp, Homo sapiens
actattaactttcaaagaataatttggaggcaaaatttaggcaatgaaatrtgatagaaaaagtaaaattattgtcacatatatctctgtctggagactcacgccttctgggctactggatggatatccaattttaagcaaatgagacatgtgcttgtgagggtaggatgcaaatgcagggtcaggagttcacaaaggtaagggctgaacccggacgtctatctaggacacagtgcgcagagatgactcaccaacaactcccagttctacataattacaaggtctccttaagctaacaactcatcttctgcagaaaatgttctagcagattctctacagctaccatctaagttttaccaccacagctttgggattccacaaagcaaagctttcagcctcaagaccaggttcctaaatcccagacaagaaatgtatcatcctgtccattggcaatggagccagaagtgggtaaaggatataaaagtatcccaaggcaaagct

SEQ ID NO: 443321 - DNA, 501 bp, Homo sapiens
actattaactttcaaagaataatttggaggcaaaatttaggcaatgaaatgtgatagaaaaagtaaaattattgtcacatatatctctgtctggagactcacgccttctgggctactggatggatatccaattttaagcaaatgagacatgtgcttgtgagggtaggatgcaaatgcagggtcaggagttcacaaaggtaagggctgaacccggaygtctatctaggacacagtgcgcagagatgactcaccaacaactcccagttctacataattacaaggtctccttaagctaacaactcatcttctgcagaaaatgttctagcagattctctacagctaccatctaagttttaccaccacagctttgggattccacaaagcaaagctttcagcctcaagaccaggttcctaaatcccagacaagaaatgtatcatcctgtccattggcaatggagccagaagtgggtaaaggatataaaagtatcccaaggcaaagct

SEQ ID NO: 443322 - DNA, 560 bp, Homo sapiens
gtgcttgtgagggtaggatgcaaatgcagggtcaggagttcacaaaggtaagggctgaacccggacgtctatctaggacacagtgcgcagagatgactcaccaacaactcccagttctacataattacaaggtctccttaagctaacaactcatcttctgcagaaaatgttctagcagattctctacagctaccatctaagttttaccaccacagctttgggattccacaaagcaaagctttcagcctcaagaccaggttcctaaatcccagacaagaaatgtatcatcctgtccattggcaatggagccagaagtgggtaaaggatataaaagtatcccaaggcaaagctgatcattcattttaattcttttttttttttgagacagagtttcactctttttgcccaggctggagtgcagtggtgygatcttggctcactgcaacctctgcctcctgggttcaagtgattctcctgcctcagcctcccaagtagctgggactagaggtgcacaccaccacacccagctaatttttgtatttttggtagagatggggttt

SEQ ID NO: 443323 - DNA, 445 bp, Homo sapiens
aagttttaatgtcacagaaagtcacaaatgagctgactacttgtaatgtgctaagtttgagtgtgttccctagaattcttgtgttagaaacttggtccccactgcagcagtgttgagaggcagaacttttgggaggtgactgggtcatgagagctctaccctcatgaatggattgatgcattcaaggattgatggattaatgggttattgagggaacgggttagttatcgtgagagtggagctgttttacaagtcagtttggctgtccctcgtgaacccccttgacaggtgatgtcctgcactgcggattccccactagcaagaaaacccttaccagaagmagcccctccaacttggacttcccagcctccagaattaaaagaaaacagactaagacacaacattagtgcctacctgaacagtcctccaccccaaacactagcat

SEQ ID NO: 443324 - DNA, 510 bp, Homo sapiens
tacaaatacagggtgacttctgtaaacagtggtcactgtctcagttgctgcaggaaaacaaaagttttaatgtcacagaaagtcacaaatgagctgactacttgtaatgtgctaagtttgagtgtgttccctagaattcttgtgttagaaacttggtccccactgcagcagtgttgagaggcagaacttttgggaggtgactgggtcatgagagctctaccctcatgaatggattgatgcattcaaggattgatggattaatgggttattgagggaacgggttagttatcgtgagagtggagctgttttacaagtcagtttggctgtccctcgtgaacccccttgacaggtgatgtcctgcactgcggattccccactagcaagaaaacccttaccagaagcrgcccctccaacttggacttcccagcctccagaattaaaagaaaacagactaagacacaacattagtgcctacctgaacagtcctccaccccaaacactagcatctac

SEQ ID NO: 443325 - DNA, 510 bp, Homo sapiens
tacaaatacagggtgacttctgtaaacagtggtcactgtctcagttgctgcaggaaaacaaaagttttaatgtcacagaaagtcacaaatgagctgactacttgtaatgtgctaagtttgagtgtgttccctagaattcttgtgttagaaacttggtccccactgcagcagtgttgagaggcagaacttttgggaggtgactgggtcatgagagctctaccctcatgaatggattgatgcattcaaggattgatggattaatgggttattgagggaacgggttagttatcgtgagagtggagctgttttacaagtcagtttggctgtccctcgtgaacccccttgacaggtgatgtcctgcactgcggattccccactagcaagaaaacccttaccagaagcagcccctccaacttggacttcccagcctccagaattaaaagaaaacagactaagacacaacattagtgcctacctgaacagtcctccascccaaacactagcatctac

SEQ ID NO: 443326 - DNA, 565 bp, Homo sapiens
aaagtgcacttcatatctgaagttagatttttattcttccatgatgaggattgtgactcaatacgtcagttggtcctggctctcttgatctaaggacacacaatatttcaagagtatttggamtgcttagcttaactaagatggtttcagtatgaatgggaaatcgggacatacatattcaaaatgcatgttgttttatgaataaattaatccattaagaataactaaaatgatatgacaaaatgcaaagacatacttgtctctaagttttaaataatgcagtgaataaatctatctttcttgatataaacacacagagagataaaattatctggaaagatatataccaaggtgttgttggttttattgtgggtaattttttaaatatttattttcctaaaattttgaattttctaagtgtcctgtaagagatatctatttctttattctttaagatcacatttttttagtacacagaattataggtgtagaaaaacattgatgcaaacatccccattgaaaaataacatttatatagtttagtttagaacttttgaatgcaaaa

SEQ ID NO: 443327 - DNA, 550 bp, Homo sapiens
gtccagactattatgatggctctgtgatgccttctacggcccagcctcctcctcttttctgctgtgcctccytggtgccgggctgcatcttcagggtatcctcatggtcgcaagatggtggctgtaccattaccatgttccaaaaaagccaaaaggaaggaggaataatgaggaagaataaaagatgtctccaaaatggcttcttaattcttctgttcaaatatacaggctgtccctgtgcattgtgccaggtactaagacattcaggactatttttcctagtgtgtagtattagatcaagtggaaagaagaaactggagttaagcaaacaggtttcttagatcatactttcccactgtataagccattcttgcatttgctattaagaaatacctgagactgggtaacttataaagaaaaaaggattaattgactcgcggttatgcaggttgtacaggaagggtaacagtggcatgtgccttggggaggcttcaggaagcttccgctcatggtggaagatgaaggggaccaggcatcacgcacagtggga

SEQ ID NO: 443328 - DNA, 571 bp, Homo sapiens
tcatcatgttctaggcaattttaggtgaatttatctttagatggagatttcctttttctgatgtctgttctttcttcaaaattcacagattgctcttgataaagagtgttgagttgccctacacagagatggaaaggggctttataaatatgatggtaatacacgataaattaaattcatctctaaaggcagaagtaaaatgccttgtcttgtatcataaatatcattgatactgacaaaatacaatgtctctaacagtatatatcacactctcattcattcatttattcaacaaacatttattaatcacctactgtatatyagacttcttgatagatatggaaaaattatccttttaaagcaaaccaagacaaaacaactagactcatgtaatttggaaattggttatttgggtagatttttggtttctaaacaagaattaagtccttctttacattgttggtaaagatttagtcaggatctcaaaatagtaatttttttgtaactgatagaaaatatagacattgggtttccacctcacacataggaagaaattataggaagtctttgt

SEQ ID NO: 443329 - DNA, 530 bp, Homo sapiens
ttttgtaactgatagaaaatatagacattgggtttccacctcacacataggaagaaattataggaagtctttgtttttggaggaagccatcactgcttcctaacacccagcagtaataagacctgggtcacaccctgaagctgtcgcgtccacagagctgagtgctcccaagcatgagacacaggccagcaaaagccatgtggtcaactctaaatacccaatgacacaggttccttttgttttggttttggtttttcgttcttytttggggcctctcgtcccaggtagatattctatgtccttctggtatacattttaatctgacttccactgaagcagggacaggacaagtcagcccttcaacttgaagcacctcctgctgagaggtcctggagcacagtgggtgccgagggctggtttcctgggcagagaagttgaggcttagctatgtccgttgctggcactcggtgggggagccctgggaaggttgtgggtaaaagtggattttcctctccccggtgccagtgcca

SEQ ID NO: 443330 - DNA, 530 bp, Homo sapiens
ttttgtaactgatagaaaatatagacattgggtttccacctcacacataggaagaaattataggaagtctttgtttttggaggaagccatcactgcttcctaacacccagcagtaataagacctgggtcacaccctgaagctgtcgcgtccacagagctgagtgctcccaagcatgagacacaggccagcaaaagccatgtggtcaactctaaatacccaatgacacaggttccttttgttttggttttggtttttcgttcttctttggggcctctcgtcccaggtagatattctatgtccttctggtatacattttaatctgacttccactgaagcagggacaggacaagtcagcccttcaacttgaagcacctcctgctgagaggtcctggagcacagtgggtgcygagggctggtttcctgggcagagaagttgaggcttagctatgtccgttgctggcactcggtgggggagccctgggaaggttgtgggtaaaagtggattttcctctccccggtgccagtgcca

SEQ ID NO: 443331 - DNA, 185 bp, Homo sapiens
tgcaggctaagtgaggcacctcaacctcaaggctcatgcaggctaagtgaggcacctcaatgtcaaggctcatgcagcctaagtgaggcactkcaacctcaaggctcatgcaggctaagtgaggcacctcaacctcacggctcatgtagcctaagtgaggcacctcaatgtcaaggctcatgcag

SEQ ID NO: 443332 - DNA, 190 bp, Homo sapiens
tgcaggctaagtgaggcacctcaacctcaaggctcatgcaggctaartgaggcacctcaatgtcaaggctcatgcagcctaagtgaggcactgcaacctcaaggctcatgcaggctaagtgaggcacctcaacctcacggctcatgtagcctaagtgaggcacctcaatgtcaaggctcatgcaggctaa

SEQ ID NO: 443333 - DNA, 638 bp, Homo sapiens
aactgtgggtataacagtgaagaaaatattcaaaaattcctgccctcatggagcttacatttgagagataagaagcagatagcagcaagatagatgagtagcacatacatgggttagatggaggtaaatgccacccactgtggagtgcactgtgaccctctggggtggccacaagatatttcagctgccttctggcctgtctgcctcccttccctcctcatcaggtgagtttaacttcctaaacttgcaagaccagcaacggcccctgcaatcctccatggccagctgtcccagctacaccaccctcctggctgcccttgagcacrcagagggtccttggcaggggtaactgcctggtgggaccttagcagggtaactgcctggtggcccctgcctccttctgtcctcttgacagggccttccctgatgcctcctcccctgagacctcgacattccactttccccttccctgcttcatctctcaatagttcagccatgccgagggatgcgggccccattccaaaggcagtgggtgccattgaaggattttcagtaggagagagacatctgttccaatttgtgttttggaaaaagaaaattctgcagacagcgtggggggtgtctaagagagaggaaag

SEQ ID NO: 443334 - DNA, 469 bp, Homo sapiens
gctggcaggctccatgtgtggagtcgtgaatccccacattgccagaatccaggaacctatatgcaactttttgttcagccgctaaaatttgttacactgtgtgagccaacaggccttcaaagacttgcaaggaaaaaatatcctgccatttcccaattgctgtatgcatctatacattccacttgagaacctaaagagcctaatggtaagaacatctaatcctcatctcacctcatagaacagagggttgtggggtctaggcctggaacacccataagaggctacctgtggtaggcatgtaagagaccartgattctgaaagtgggaaccctgtaaccagaacccttcttggggacagtgtaatgaagtgtcccctgctccctcaaatgaatctttgacccaattcaccataagcccataggcttaacaactattcttctacctcccacaaagaaaatacccaataaat

SEQ ID NO: 443335 - DNA, 518 bp, Homo sapiens
gtggaaaagagacaaatggttgcattgttttgagtttctgagtagcctctccaaaggagacaatcagatatgcatttatctcagtgagcagaggggtaactttgaatagaatgggaggcaggttggccctaagcagttcccagcttaacttttctctttagcttagtgatgtgggggccccaagatgtattttcctttaaccctgtggataccacaggaccccagtgtcaccaacagttttgcttcctcatggtaccttgttgtacctaccatcatcttccccctaagccaggtrtgtttctattttttaaagtaactattgaagtctaattcacgaataagaaaatatacttcgtttatacttcagcgaattctggccaatataaactggtacagttgtgaccagatggagggtcctgatgatgagtcgtctaggttcttggcacattgaacaaagacttgaacagcacacatgaacaacgaaagcatagatttactaaagcaaaagacaacagaag

SEQ ID NO: 443336 - DNA, 540 bp, Homo sapiens
ggatgattatactgagaattttgcttcagaattttgactgtgctgcaaggtcccactgtattccttagctttctattctattccactgatctagctgcacctgtatcataaaattcacatttaaaaataatggttttataatgttttaagtggcatcattcagacagttgagggagaaaacagttgtttggcatgaacagagcacttactctgttacaagatacatgtttggtcctggctgttttgtgrcctttgtggcattgcataaatacaagttttaatattcttatctttaaaatatagaaaataatacctatttcatggtatgctttacaaattaaataaatcaaagaatttgaatgtggtaaagagcatggtgaattctacattcatatgataaattattatgaagggataatacatagctataatttatgtcaactgtcaatgtttattgtattattaaattttctgacatggctgaggaggagcaaaggaaaatcaaaacccaggtgtttggtaatagcaccatgagcgctg

SEQ ID NO: 443337 - DNA, 634 bp, Homo sapiens
ctccagccctcagtttccctatctataaagaggctgaaaaactggatgatctctgggggccttcaagctttaatatttttgttctaatatgctagggacattttaaaaatatgtatgacaagagaggcaaattttaacacattttttaaaactagaactaatgttttttgataaatatcatacctaaactataagtaaagcaaagtgaagatacaagtgagggaaaatgaaggcagaattattttccacattctgaaagctttcctaaaaatccacaacaactgcagaagcaagccaacatccccttgtttctgccagcaaatatcacaagtgagctgcaggtttgatcaccttgaccctctaaccccagcaatgccaaattragaaagtctctgtgcagaggcccacttggatcctaaaatcacattcatgcttctggagtctttttccaaagcaggggatggggcacccacccagcatagaggctagacagcacagccctgtctctgattccaggaagattgctatgaaaatggagattttagggacacatccttcctcttgcaactcagagtttggttatccataatctttttggatgtagaccagtggaaactctgtgctaaacagtacc

SEQ ID NO: 443338 - DNA, 563 bp, Homo sapiens
tcagagctgttttcccacaggatcagcccactcttcccttgaagtgtacttatttttccccctataataagctctttgctccytatttcctattataaaggtctccactgtctttgaaccatctcttggccgaaatctttctccgaagttagataccggggacttcttcatttcctgctaacagtttcagtaacattttgaatacttatgtgccaggtatggagtggtttctttatataaattaattcaattttaaaaacaattctccctaacctgtttttcttctgtatgttgggaatgaggaagttagcaggctatagtcttctctactattcatcatactccctttataggtgaaggaacaaagaggtcaagtaactcgcctgcctagggtcacacaggaaataagtaaaggaatcagaattagaatgcagctagtctggttccagggtccatgtgctcaacatcaggctctacttaaccttggggtaatggggaaagtgatgagtaaaagtggcaatgttctactaaaaagggaataatttaaaagaggcacacaaagt

SEQ ID NO: 443339 - DNA, 566 bp, Homo sapiens
aaaaagaatgagttcatatcgtttgcagggacatgaataaagctggaaactatcattctcagcaaactaacacaggaacaaaaaaccaacactgcatgttctcactcataagtgagaatgtgaacacacggacacagggaagggaacatcacacactggggcctgttgggggtagggggcaaggggagggatagcattaggacaaatacctaatgcacgtggggcttaaaacctagatgatgggttgatgggtgcagcaaactaccatggcataygtatgcgtatgtaacaaacctgcatgttctgcgcatgtatcccagaacttagagtataataaaaaaatagtaggaagctaatttaactcaatggcttataagtgccaatgggttggtattttgatgggcattgtaattactacaatatccaatcagattaaaaatggcaagttcttttttattctctaaatgtaaatatgacctatttccacagcacctttagaaagtacaatgttttcctgccccctgtagcaacacaagcttttgaaatctatttatatagagatcatg

SEQ ID NO: 443340 - DNA, 559 bp, Homo sapiens
agatatttgtatattattctaggtgcaatgagaaacatggagggatattaagccaaatcctgcatctgttctattcattcagtcagcaactgattactttccatgtgccgagagagmgcagtaaaaaaaacacacaactgtgaagagattaatatgtatgaagggcttcactgaggtccaccaaataaacactactcaagcacagactgcaaaccaaaatgtatctgtgttatgacattaattgcaaataacaagtatggtgctaaagtctacaccaatggaattagatgagtgctatgcacttaattttaaaataaaactagttttcagtaaaacacacatacacacacacacacacacaaaacctctgccctcaggatggttactttctagtgctttcctgtcttcctctccatgcacatatcaaaggcaaacccctccaattgttccacaagtctcagcccctctcctctactcactccaacaattttccccttcagtccacatgaatccttccctttctacttcatcattatcattgtcatcaaatatgatgtac

SEQ ID NO: 443341 - DNA, 559 bp, Homo sapiens
agatatttgtatattattctaggtgcaatgagaaacatggagggatattaagccaaatcctgcatctgttctattcattcagtcagcaactgattactttccatgtgccgagagagagcagtaaaaaaaacacacaactgtgaagagattaatatgtatgaagggcttcactgargtccaccaaataaacactactcaagcacagactgcaaaccaaaatgtatctgtgttatgacattaattgcaaataacaagtatggtgctaaagtctacaccaatggaattagatgagtgctatgcacttaattttaaaataaaactagttttcagtaaaacacacatacacacacacacacacacaaaacctctgccctcaggatggttactttctagtgctttcctgtcttcctctccatgcacatatcaaaggcaaacccctccaattgttccacaagtctcagcccctctcctctactcactccaacaattttccccttcagtccacatgaatccttccctttctacttcatcattatcattgtcatcaaatatgatgtac

SEQ ID NO: 443342 - DNA, 588 bp, Homo sapiens
atcctttaaccaaaacacaagtaaaatccaatgggagcacagagaactgagtgatcctgtctgattggaagaattcaaagaagcatcacagaagtgaagggcaggatttctacaggcagaaatgtggcagatttctaggatgagagaatagctttggttagcaatgacacataaacatatgaaaaaggcagggcatgtttgtggaatcattctgtgtagctggagaaggtcagtaaagaagraaagtgggagaaaaccggataagcaggacaaacctgcataatggagacactgaacacagcaatgagaaactgaagcactattaatggtttttgcagtggacattagcacattccaacctgtgtttaagggtgatgtccaagtcagcagtgtgatgaatggacaagatgagtagtaagtaaccaggaccctggggccacactgagctgccctagcttggtgataaaacctgtgatctcatttgaggatgaaaggatagtaagccactttcatgtcactattcttgtttaaacaatattcagccattacctggaggctaaataacagttttctcattgatgttcttta

SEQ ID NO: 443343 - DNA, 588 bp, Homo sapiens
atcctttaaccaaaacacaagtaaaatccaatgggagcacagagaactgagtgatcctgtctgattggaagaattcaaagaagcatcacagaagtgaagggcaggatttctacaggcagaaatgtggcagatttctaggatgagagaatagctttggttagcaatgacacataaacatatgaaaaaggcagggcatgtttgtggaatcattctgtgtagctggagaaggtcagtaaagaagaaaagtgggagaaaacyggataagcaggacaaacctgcataatggagacactgaacacagcaatgagaaactgaagcactattaatggtttttgcagtggacattagcacattccaacctgtgtttaagggtgatgtccaagtcagcagtgtgatgaatggacaagatgagtagtaagtaaccaggaccctggggccacactgagctgccctagcttggtgataaaacctgtgatctcatttgaggatgaaaggatagtaagccactttcatgtcactattcttgtttaaacaatattcagccattacctggaggctaaataacagttttctcattgatgttcttta

SEQ ID NO: 443344 - DNA, 549 bp, Homo sapiens
ctggggccacactgagctgccctagcttggtgataaaacctgtgatctcatttgaggatgaaaggatagtaagccactttcatgtcactattcttgtttaaacaatattcagccattacctggaggctaaataacagttttctcattgatgttctttaatttcataaagcaattaatctaaactgtaagaacccatatattaccctcttgaatcccaataaagctgtttatttttttgagtaagaaaactttgaccaatagctttttttaggtttctttcaattactctttattttttaaagtatgcataccttccctagattattctaaggaaagaggaagagaggccagtcaagaaatttttgcaatagtcttggtttgaaaatgactaacatctgagctaataaaatggtgctcagtgttcacatgtcatgcatgaggtgcatgaggcgttrtctcatcccaaccctgtgggttctataactatcttgattttaggaatgagaaacagagaggttacagaacttgtccaaagtcatagatctagtc

SEQ ID NO: 443345 - DNA, 581 bp, Homo sapiens
acccttaagctcactaacttcacagaaaactcactgatatatttagccatttccttgttttgcttgtattgttttaaatttatttcaattatagcgtttatcaaaataaatagcataaattactttttaaaaattttcagtgctaaaatgtgagcaggaaccacatattgtcaatccctagaagcctaagacccaatatgtggttttagttgttttaataccaaggatttattagttgaaagcataaaacttcagtcaatcgagttaaagcaaacttctaggtgttgtaaggatatagacttcctggatgccagaatgagaaatgaggcatcaccaaagttgttaggaaagggaactggaggctggagggatgttgtgaagttygggcagcctgacttctagagtttggaagctgatgttctaccagtaacctggcctgttgtcttcctatgtctgcttccagaatctctgaaacccacctgtgactttccacaatgtctaagttcaaattatccaagagaatgcaattttttcagcccagacaactgtcattctccctctaccctcataacatatgccag

SEQ ID NO: 443346 - DNA, 549 bp, Homo sapiens
aatctgaaagtcttttgaataattgtagtattactgaaatggcacctgacttccagagaatatgacattttcatactcaaattcagtttacctcttgaaacagtaatmtcataatttgatgtcacacttcacacacttattattcagtccttaaaaataactgacaggtggagaagaaaaacagtgtctaggcataaatataatgaaaacttaattttgtgaacttggaatcaaatccagcagaaggtacttttgaatttagctaccatttaaaccaaagcattaaggctttatgaccacaaaataacaacataatgaaagataaaaggggaaaacagtaaacgcacatctgggccattttgtacattttaaagatgggcctacctttgatataatctgaagttgaagtgaaaaaggaatgtgatggtttcttaagaaacagaaaggtatatttttcaagagaacatctacaacctcatttctcacaccttattttgcaacagtggtggtgaggaggggacataattcaagaaaggacggagaaatcga

SEQ ID NO: 443347 - DNA, 588 bp, Homo sapiens
catgtggtcttcccctctgagtgggtccagtctctctctgcctgttttataagcatacatgtgattgcattaagggcccttgtggataatccaggataatccccctaactcaatatccttaatgtaattacatctgcaaagacccttttttccaaataaagcagcatttgcagggtctcgggattaggacttgataacataggggaccgttattcagcctaagaaaggagaactgggatcctgtatttaactacaagtggaacaactaccatattctattttagtctcccctctcccctgatttctcaactaagtgcacagggttctgagcactttgtctgtctacagctaagcattcattcaatttcagacagagccgaaaatgcacagccagagaaggcctcaaggactgacttacacaaccctctccttgacaattgaataattcgggtctcagaaaatattatgtacccagggtcagacattgagtatgagatgaacatagaacagaggacaccagacttgtaacagagccrcaaatactatgttacattctttgttagctgcctggttagccatttggttggt

SEQ ID NO: 443348 - DNA, 588 bp, Homo sapiens
catgtggtcttcccctctgagtgggtccagtctctctctgcctgttttataagcatacatgtgattgcattaagggcccttgtggataatccaggataatccccctaactcaatatccttaatgtaattacatctgcaaagacccttttttccaaataaagcagcatttgcagggtctcgggattaggacttgataacataggggaccgttattcagcctaagaaaggagaactgggatcctgtatttaactacaagtggaacaactaccatattctattttagtctcccctctcccctgatttctcaactaagtgcacagggttctgagcactttgtctgtctacagctaagcattcattcaatttcagacagagccgaaaatgcacagccagagaaggcctcaaggactgacttacacaaccctctccttgacaattgaataattcgggtctcagaaaatattatgtacccagggtcagacattgagtatgagatgaacatagaacagaggacaccagacttgtaacagagccacaratactatgttacattctttgttagctgcctggttagccatttggttggt

SEQ ID NO: 443349 - DNA, 524 bp, Homo sapiens
gattccatttacagaaggcataaaaacaggcaaaactgatctatggggcaaaagtcatgatagtgcctggccttggatgtggatactgattcaacattagtaasagggaaacatctgagatgttaaaagactgcctttcttgatgtaggtgctggttgcaaggttatatttgcttgggaaaaaatcaaatgagttacacacaccaatgtacacttttctgtatgtatatttcattgaatgtaaaatgtaaagcttttcatttaagcaactcttcatttctctacaaggtagaaataaaagatggcaattgggccctgtagtccagagctgttaaaattttcttttctttccaccaagggcagtaatctaaaaaataacatcattcatgagcctggtaagtagaaggcaaattaatttggatgccacttgcatttacatttttaaaagaaacacccatgtaatggatcgagcactgcatttatactcaagatctgagtttgattcccaattgcacccatcacttg

SEQ ID NO: 443350 - DNA, 589 bp, Homo sapiens
tactgggacagtgtagcctggaaaagatagaaccaaagagaggtttgagaacaatcttcaaatatttgaagggaaaacctgtagaagcargaatggattcattttgtctccagacaacagggagaatcaagatggaaaggagatacaggcaagaaagtagaacacagctcatctcaaaaaccacctcctaacaacttcagcaggccagtaatgaaatgactgcctttacgtattgtgaagtcctcattcaagaagtgttaaatgacacctggggccctctgtcagtggtattacagagaagagtcctgcacttaagtggaaaatgagactcgaagtttccatccagatctaaggttctatgataccataaaatggaacaaatgaatttaaactattttcacttacaaaagaaatttttttttattttaacaaaaaacaatctttcttctctgtattatctccatcaaacctttctgagcaagagcacagaaaacagttttctatgacagtgcacttacttacagaaattgtaaattcagacgatgggctgaattctggcttgtagataaagtcttgtttagctggtaca

SEQ ID NO: 443351 - DNA, 589 bp, Homo sapiens
tactgggacagtgtagcctggaaaagatagaaccaaagagaggtttgagaacaatcttcaaatatttgaagggaaaacctgtagaagcaggaatggattcattttgtctccagacaacagggagaatcaagatggaaaggagatacaggcaagaaagtagaacacagctcatctcaaaaaccacctcctaacaacttcagcaggccagtaatgaaatgactgcctttaygtattgtgaagtcctcattcaagaagtgttaaatgacacctggggccctctgtcagtggtattacagagaagagtcctgcacttaagtggaaaatgagactcgaagtttccatccagatctaaggttctatgataccataaaatggaacaaatgaatttaaactattttcacttacaaaagaaatttttttttattttaacaaaaaacaatctttcttctctgtattatctccatcaaacctttctgagcaagagcacagaaaacagttttctatgacagtgcacttacttacagaaattgtaaattcagacgatgggctgaattctggcttgtagataaagtcttgtttagctggtaca

SEQ ID NO: 443352 - DNA, 589 bp, Homo sapiens
tactgggacagtgtagcctggaaaagatagaaccaaagagaggtttgagaacaatcttcaaatatttgaagggaaaacctgtagaagcaggaatggattcattttgtctccagacaacagggagaatcaagatggaaaggagatacaggcaagaaagtagaacacagctcatctcaaaaaccacctcctaacaacttcagcaggccagtaatgaaatgactgcctttacgtattgtgaagtcctcattcaagaagtgttaaatgacacctggggccctctgtcagtggtattacagagaagagtcctgcacttaagtggaaaatgagactcgaagtttccatccagatctaaggttctatgataccataaaatggaacaaatgaatttaaactattttcacttacaaaagaaatttktttttattttaacaaaaaacaatctttcttctctgtattatctccatcaaacctttctgagcaagagcacagaaaacagttttctatgacagtgcacttacttacagaaattgtaaattcagacgatgggctgaattctggcttgtagataaagtcttgtttagctggtaca

SEQ ID NO: 443353 - DNA, 589 bp, Homo sapiens
tactgggacagtgtagcctggaaaagatagaaccaaagagaggtttgagaacaatcttcaaatatttgaagggaaaacctgtagaagcaggaatggattcattttgtctccagacaacagggagaatcaagatggaaaggagatacaggcaagaaagtagaacacagctcatctcaaaaaccacctcctaacaacttcagcaggccagtaatgaaatgactgcctttacgtattgtgaagtcctcattcaagaagtgttaaatgacacctggggccctctgtcagtggtattacagagaagagtcctgcacttaagtggaaaatgagactcgaagtttccatccagatctaaggttctatgataccataaaatggaacaaatgaatttaaactattttcacttacaaaagaaatttttttttattttaacaaaaaacaatctttcttctctgtattatctccatcaaacctttytgagcaagagcacagaaaacagttttctatgacagtgcacttacttacagaaattgtaaattcagacgatgggctgaattctggcttgtagataaagtcttgtttagctggtaca

SEQ ID NO: 443354 - DNA, 595 bp, Homo sapiens
tggggaaccacctttgctggggaaccaccctcttctacccattgtttccctctctgctgtctgtagcagaatcacacaaaatcagacattttgtgtctggcttctctgcctagcataatgttttccatgttcattcaagttgtagtgtgtatcaaaacaagmattcttttttagggctgaatagtagtccattgtgcaaatacactgtattttgcttttctattcttcagttaataaacatttgagttgtttccatattttagctattgtggatagtgttggtatgaacatttgtatacacgttattgtttgaatacttgtcttaaattttggtaatatatacctagcagaggaattggtagcccttgggttaattctgtttaacttttggaggaacagacaaactgttttcagcagtgacttaaccattttacatcaataccagtgatatacgagggctgaaaatttctccatattctaacacttattttccttttttaaaaattctagacctcctagtgtttgtaaagtaatatctccttgtgcttttgatttgcatctccttaatgactaataatgtttagcatgttttcat

SEQ ID NO: 443355 - DNA, 595 bp, Homo sapiens
tggggaaccacctttgctggggaaccaccctcttctacccattgtttccctctctgctgtctgtagcagaatcacacaaaatcagacattttgtgtctggcttctctgcctagcataatgttttccatgttcattcaagttgtagtgtgtatcaaaacaagcattcttttttagggctgaatagtagtccattgtgcaaatacactgtattttgcttttctattcttcagttaataaacatttgagttgtttycatattttagctattgtggatagtgttggtatgaacatttgtatacacgttattgtttgaatacttgtcttaaattttggtaatatatacctagcagaggaattggtagcccttgggttaattctgtttaacttttggaggaacagacaaactgttttcagcagtgacttaaccattttacatcaataccagtgatatacgagggctgaaaatttctccatattctaacacttattttccttttttaaaaattctagacctcctagtgtttgtaaagtaatatctccttgtgcttttgatttgcatctccttaatgactaataatgtttagcatgttttcat

SEQ ID NO: 443356 - DNA, 595 bp, Homo sapiens
tggggaaccacctttgctggggaaccaccctcttctacccattgtttccctctctgctgtctgtagcagaatcacacaaaatcagacattttgtgtctggcttctctgcctagcataatgttttccatgttcattcaagttgtagtgtgtatcaaaacaagcattcttttttagggctgaatagtagtccattgtgcaaatacactgtattttgcttttctattcttcagttaataaacatttgagttgtttccatattttagctattgtggatagtgttggtatgaacatttgtatacacgttattgtttgaatacttgtcttaaattttggtaatatatacctagcagaggaattggtagcccttgggttaattctgtttaacttttggaggaacagacaaactgttttcagcagtgacttaaccattttacatcaataccagtgatataygagggctgaaaatttctccatattctaacacttattttccttttttaaaaattctagacctcctagtgtttgtaaagtaatatctccttgtgcttttgatttgcatctccttaatgactaataatgtttagcatgttttcat

SEQ ID NO: 443357 - DNA, 622 bp, Homo sapiens
taataagaatatggtatgtaaataataagcaactaaaaattcgattgcctgtgtccattgggttttcgttacattttatttcttggaaaccaaggtggtattttacttaatgtaaatgacgagtttggcagtttcttacagaggtaaacatgtacttgccatatgacccagcaatcaacaaaaacttaggttcacacagaaacctgtacaaaaatgtttgtatccactgtatttataatagcaacatattggaacaactcacatataatttaatgtgcaaataatagtacaaactctggcatatccatgcagtgtaacagtactcagcaataaaaagaaatgaactactgatgcatacaacmacctagatgtgcctcaagggcattgtgcttggtggaaaaaaagaagtttatctccaaaggatacgcactgttgattttgtttatataatattcttgaaattataaaactaagagatgaacaaattaatggatgccaggggatagagactggatttcaggggtgggaagatggggaaggcgcatatgcaaacgagtagcacaagcattttcttttacagtgatgaacaagtgcggttgttgattatggcggtagttatagt

SEQ ID NO: 443358 - DNA, 549 bp, Homo sapiens
acaacatgattctaggtagtgtccaaatgcctcatttcttaacatttacattgtccagaaattattgtccatccactcccactccagtccaagaagactgtctcttcacaccaaagtgcctgctaattaaagacaggagattttcccttgctgattctgggaagcccacttttatttcctgatctgaaaaactttaggggaaaaatctactccccctttggaaagatctacagacacacactgttcytgcaaagatgaggctgcttgtactcccgctcagtataataattgttagacaaacatctgcgctttccattcccattattgtggtttgtgtgaattgcagacaccaagttgctgacctcccagcctgccacagaagcctgacatttatctccctggtgccactctaatttgcaaaggaaatggcagaaatgcaaccaagagaaagaatgcatgagaatgcatgaggtgaccttggtagaaagacgtgcaccctaccaaattgaactttgaacttcattaaatgcacgttttattttagttggt

SEQ ID NO: 443359 - DNA, 521 bp, Homo sapiens
ctaaaacgattccattgagcccaatccctcagcttccaactgaaaagtacggctaagttttgttagaatttattcctattgcattctttcactgtatatttaacaagtatttattgagttcatatagtttatgggaaagaaattaaaatgctcatctggagatctgagttctggtcgtaatagctaataacaagttatrtgagcttgatcaatcacttaatctatttggaaccattttctcctttatcaaatgactggttgtacctcacagggtcattgtaaatttcaaataagacaaaaggattttaaactatcattagtatattacttaagtaattgttattctcatattgttatcttgacagtctcaagttattggcagcttagccattaccaataacacaggtacagattacatcttttatttctgtgagttatcccattggccataacaatctatacaataaacttgcttaaatgagtcttttgagttgaattactgctctagaattttatattaa

SEQ ID NO: 443360 - DNA, 580 bp, Homo sapiens
atgcattactttcctaatcagaaaatcacatacaacaaacatattcataggaaagggttgytgccaaagaaagatgaggatagacaggggaaatggctgcagtgaatgagttgaagtttcctgtgccgcacatcaagatcccagggtattaaaagaacttgcagatgtggtcacagaaccagtgtcagcgatcctggaggaatcatagaaagcaggcgtggttccagaagattgcaaacttacaaatgttgtccagatttccaaaagaaggggactggcgaatttcaaagattcaatcccaaggcgcataacatcaatctctgtgtgatttcaaaaatagattattaaacagatggctctgagttcttagcaaaggaaatcgtgggctcactaaaaacacaccatgccaagccaacctcatttcttttttgattggactaagaaattcacaggagagaggggctgttgcttcagctaggtacctgatagtctttactgacatctgctaatgccagagctttcttcattggtggaatcaggccaactaggagagacaagagtagacacacccttcaagatg

SEQ ID NO: 443361 - DNA, 580 bp, Homo sapiens
atgcattactttcctaatcagaaaatcacatacaacaaacatattcataggaaagggttgttgccaaagaaagatgaggatagacagrggaaatggctgcagtgaatgagttgaagtttcctgtgccgcacatcaagatcccagggtattaaaagaacttgcagatgtggtcacagaaccagtgtcagcgatcctggaggaatcatagaaagcaggcgtggttccagaagattgcaaacttacaaatgttgtccagatttccaaaagaaggggactggcgaatttcaaagattcaatcccaaggcgcataacatcaatctctgtgtgatttcaaaaatagattattaaacagatggctctgagttcttagcaaaggaaatcgtgggctcactaaaaacacaccatgccaagccaacctcatttcttttttgattggactaagaaattcacaggagagaggggctgttgcttcagctaggtacctgatagtctttactgacatctgctaatgccagagctttcttcattggtggaatcaggccaactaggagagacaagagtagacacacccttcaagatg

SEQ ID NO: 443362 - DNA, 579 bp, Homo sapiens
cagcagccaaacacatccctcctactccatggagagaagccaattaggaggttatgtgaagaggaaagcaccttcttcagcttttcccccagaagggagcagaggtcgcctctccatgggccaggacagcattgcaggagaggagatggataaccccagtagcctagaattctgctgtgccctattgatccaagctctccagggattaagctcagccttygtaacatgcccattacttcagctttatacatttttaggccagaaagtaagcactccaacatagttgttaaggcaatgtctgaagccaggctgactggcttcaaatcacagctttaccactcactatctgtattactttaggcgtggttgttgatgcctcccctaccttaaaatgggcataggcctagcatctatctcataagatttttgcaaagattatgcgagttaataaatgtaaatttcttagaatcatgactatatatattaatcactacataaagtttttgccatcattatgaatctgcaaacacataatattttagtaaatactgagctcacatgaaaataattccagacccc

SEQ ID NO: 443363 - DNA, 592 bp, Homo sapiens
ttgaatttgtatctctaaaagaatagaccaatacataggtagtgagccccctacccctagaagactgaaagttggtgaatgactcaatgggaaggaaattttgtgttgtggatactactttgggctcgaggctgtgtttgatgatctctaatgcctgtgattctagaatcttggaagtccttggattccaaccataggagggcagcccaataagtaatgaagtcattctcagcatttgacaaatgatcarttggccaaacaggaggccattcatttcataaatatagacacagttaccatcttcatgaacagaactcaaagtgaaagagatttgatcatctttatttaatggaagaaagccaaaagcaacaatttaggcacagggcagatgatggctacagagcaagctaaaaaaattccttgtttccacatggaacaagtcctctccttccttcctcttttaacaatgattaggcaatacatgcttgcttccccatttgatttccagctctggagagaggctgcatcccaatttattcacttggatacagagttattcagttttactatttagtctttctttttattttgt

SEQ ID NO: 443364 - DNA, 562 bp, Homo sapiens
tctacagcgcaaagacaagatgcatacaatatagcttgagcagtataaaagactcttcatatcctaagaattatgtcccaagactttcttgaattcccaaatatatcacataaaactttcataaaatgtagtcaaaaatttaaatggcactgccagactccagtgattttctctgcataggatgaaaatcatatgcaatataccctatttctggctaggaacaatcacctttttgtaactcttcagttgctttttacttccattaccagaaccagcaacatgtttctttatgggaaaaattatgctaaaaaaaaaacttttatactatagttgctgtgttcacaaagaaacatgagatatggaggatgaatagtcagctaaaggcagtcactagccatatgcctcacttatgtaagccagcctcatagttcttggagttcaaaacaaatctcagtcaaatttccaatgattacccaccatgaacctcctaggttttcaaaattggttgawactacacattaaacctatgaatgtgaagcctgtttagggcaattttagatga

SEQ ID NO: 443365 - DNA, 616 bp, Homo sapiens
tacagtttgaataagatattgaattttaaaaattgattttgtatastccttaggccaacttcctgggattagaagtttctttaacacttcacattctcttcaggcttctcagatatcagcaaaaataaagaaaacggagaccacggcagaacaaaaccataactcaggggttggtaataggtgaaagaggctaatcccagttgagaggagttcataaaaatgaatcctggcccccctttgggtggcaggagtactgcatcatgaatatttatggtggaatatgggaagtgttgggaaacagacccagcaggggccaatctacccgaacagctggggatcgtttgagtgttaaaatgaagttttaagggacaccatttagataaaaatcatatttgaaaagaattatgcctgtgttccaaataacatcaagtatagagcaattttgagttttatatgctttgcaaacatctgcttgcttttaaactctactcatcttataccataaagttggattaggtttcaaaaatctcccatattttttatgttggggtgacccagttaaaggagtttgtgaaagtgttcaaaagaaaaatgttgtgtatgtacatatctatat

SEQ ID NO: 443366 - DNA, 632 bp, Homo sapiens
cactttcaacctatttgtgtctctgcatctaaagtgagtttcttatagacagcatatagttgagtcactttttttaatctattcttccctctgctacaataagatattattctacacacacactaggatggcaatagttttccttataaaagaaagaaaataacaagggttggcaaggatatgaagagattgaaacccttatatattcttggtagaaatgtaaaatgggacagccaccatggaaaataatttgctagtatctccaaaagttacacatagaattaccatataacccagcaatttcacttcgaagaatatacccaaaataattgaaaacaggtatacaaacaaatacatggacataaatgttcatagcagtaccatttacaatagccaagaggtaaaaacaacccaaatgtccatcaatagatgaataaatagataaggccaggtgcagtggctcatgtctataatcccagcaytctgggaggccaatgtgggtggatcacttgagcccaggaaattcaagatcaactgaggcaacatggtgaaaacccactgcaaaaaaatacaaaaattaggcatagtggcacacacctgtagtcctagctactcaggagggtaaggcagga

SEQ ID NO: 443367 - DNA, 471 bp, Homo sapiens
aaaataatttgctagtatctccaaaagttacacatagaattaccatataacccagcaatttcacttcgaagaatatacccaaaataattgaaaacaggtatacaaacaaatacatggacataaatgttcatagcagtaccatttacaatagccaagaggtaaaaacaacccaaatgtccatcaatagatgaataaatagataaggccaggtgcagtggctcatgtctataatcccagcactctgggaggccaatgtgggtggatcacttgagcccaggaaattcaagatcaactgaggcaacatggtgaaaacccactrcaaaaaaatacaaaaattaggcatagtggcacacacctgtagtcctagctactcaggagggtaaggcaggaggattagtagagcccaggagattaaagctgcagtgagctgggatcacaccactgcactctatcctgggtaaaagagcgaga

SEQ ID NO: 443368 - DNA, 548 bp, Homo sapiens
ccttactatccttaattctccttgtttattagtttgtttgagtgactcattatagagaagtagaaacagaaaaaaatgtacctatacactcaatatcctgtaaacaaaaatgatttacattatttagatgtttttcacacctcctttataatagttatattcatcaatctagcagataaaaagaaaagaactccagttctcattccatgtgcaatggaaagttcagttcccttcttataccttgcaggattcaaggtgggtttttattttttctaggtatacgttgccctgagcattgcttctggtgaattattcttatttgcatcctaatattggtttcttctatttggactataatttttccaaaaaagaccatatttccatatttccttttacaacgattttcccaaatcatcactacacaaggcaattgtatgtggattagagtcttcagagaataaatgttacctaaaaatacagtatgttcatatagctatatgttcataactaaatgcagttttatgyctgcttcatccaacatctgatga

SEQ ID NO: 443369 - DNA, 545 bp, Homo sapiens
aatgcttttctctctaactggcacaatatttcactacagagaatttgaaattccaatggctactttaaagagcttttaaaacaagcaaaattattaattttagaggttgcagataaccaaaagcaaagaaagctttacgaggagatggattgtctaaaacaaagatcactttatttagtttagttgacctcccttcttctgattccatactttgaagcttaatgagttctgcctcttaaaattatatgttttgattaaaattgccaagagcctaagttatgtcaagactggctgtatgtmatttgttgtgcctatatatgtcaaaatatgtttatgtttttttttccttgcagagagcaaagaatttctttttttgtttgttttgtttgtttgtttgtttgttttcagggtctcactatggcccaggctggagtgcagtgatgtgatttcagctcatcacagccttgacttctagggctaaagcaatcctcccacggcagcctcccaagcagctgggaccacaggcatgtgccaccacgcttggc

SEQ ID NO: 443370 - DNA, 529 bp, Homo sapiens
caatttaccatatgatggcttttaagtggtcccattattcatgtagttgattgtcacccactgagttaatgatggtaaccatatgtcctgattttctgggactgcccatggttttactgtcaaatcatgtgcctccgtttttggttcaaaaaacacagtcctcacacggtgagcccccacagggggattccagaaacactttgcaatgaatcttactgtctttcgttctaatcagcatttacttccctgatccgatcctcactggagatggaaaaacggtcaccatcctctacatttacctatttggtgagctggcatgattgttggagcctcccctgtgattctccttcagcctttctttttttagtgaatayactgcctacaggatccagtttaaactcttcagcttagcacccagatccttccacagtcaacccctgacttcttttacaaccatcgagccctctgataaaggaaatactggggcttttccggctcgccctgcctttctttgtagtgttacttctgc

SEQ ID NO: 443371 - DNA, 456 bp, Homo sapiens
tcctaacctagcgtaaaggcaatgggaatatacagggagataagggtgtagagattaaggaagtaaaatggcaaaaccgatgcatacaagagccaagagagcatgcagaaatgagtctatgatttctggcctatgcagagatttctggtctggtggttggaagaggagttggtttgaggagggttggagtgggggattgctggatgtgattttaggacctgtttagtcagaatcagaataggccaggttttgctgccataaaaacaatctcaaaatttcagtgacttaacacaaccaaggtgtacttctcattcatgttacctcyccaacgtgctgttatagtcactcagaaatccacattgcttccataactactatggcagaggggcaaggatgtggcagactgtgcactggctcttaaaagttaccccacaagtgacacatgtcacttacgct

SEQ ID NO: 443372 - DNA, 550 bp, Homo sapiens
cctaaccttaaccccaaccctaacccatccatgtctttatctatctgtttgacctggtaacaagtagtttttaatggcaagcttctggaggagtaatgactaagaagtgatatttaaaatccacacatggaaagatcaacatattcattgatatcaaaattataagttttaggttgttaaaaaataaaaagcaaacaaatataatcacttgagaaaaattctttgcagggaaaaatgacagagttgttatttataccttataagatggtataaatcagtaaataaaacactaagacttgaaggaaatgtaccaaaaaaccctcacattttctgtaatattattattttccaattttcctatattttcagtaatgtggctattttgcttttattatttgraaagtacatttctagaagtgaagtacaggcttacccaattcaccctgtctgacgctcttccccagggggagcagctctggacctgaaagcctgtcctcccaaaccctatcgctggatccttgacatgacttggctgaatcttgtggagctg

SEQ ID NO: 443373 - DNA, 584 bp, Homo sapiens
gatctacaaatcaactagaaaacaagtaacaaaatggcagtagttagtccttacctaccaacaattaccttgaatgtaaatggattaaaatctacgattaagagacacagagtggcttaatggattttttaaaaaagacccagctatatgctgcctacaagagactcattttacctggaaggatacacacagactgaaaatgaaggatggaaaagatattctatgcaaatgggcaccataaaaagaacaggagtaactatgcttatatcagataaaatagactataaaccaaatactgtaaaagaaggccattatacagtgattaagggtaaatacaacaagagtgcatgtgtgcatacacacaatgcacccaacatcagagcacctaagtgtataaagatatataaaaattaatatatatattaattataataaaagatataattaataaaaatrtaaatattaatagacctaaaaggatagactgcaatacaataatagtagggggcttcaacatcccattttcagcaatggacaaatcacccagatagaaaatcaataaagaaacattagagttaaaccat

SEQ ID NO: 443374 - DNA, 627 bp, Homo sapiens
tgtataatacatatatgcatatatacattttaatatagataggtctacaaacccttggagtcagatatgtttcagaaatcagaatgttctggtttttagaaggtgatattccatatattatataatacactgcagctaagatataaatattcaggaagatagggataaataaagactataaatagcctcacatctgtttaggtcagcttttgcctccaaaatgatttacgattttcagagctttctgaattttgaaatgaaggtaagggattgtggattatgcatattaaaaggattagaataaagatctctagggaggaatattggtgatttttatttccttctttatatgctcctgtatttttcaaaccttttaatgtgaacatatattatttaattagaagtaartccaaaaaaataagaaaaagtggaagagacacaagcctaattttggaaaggaatataaaggcagtcaaaattttactaaagtctttcaaatacaaacaattaaaacaaaacctaaaccaccaaagtgtaattatactgtatcacctgcagcaacacttcctccaatgtttcctgcatacacgcttctcttgagagtcccccttatgatatcttggcagt

SEQ ID NO: 443375 - DNA, 524 bp, Homo sapiens
tgaacgtctccttcaggcttatcattgtgaaattttgacagttaattatattcactatcccattattctttttcttgtctccaagtcttatttttgcaacagattaaaacttcttgaaaatgcatcctttttgatattttttattgtattgcataggactcatcccatggtttcaaaaatgttaattaaactgaagaaattcaatattccaaataagtccagcaaaaccccytgctttgatcttccaaatgagttcttaggttctagttgtttgagtctatcctgatagtattccaaggtaatttaaaaaaatagcaagaagatgaaatgacttcatttgtgaaagaaaaggcacccactaagattttgggctttttttcccaagatgagctaatcagtttatgactttagtgaaccaacttaaaaagtaaatgctttagatgaaaattggtagtaagaaatataaacatgaagcaaatctcagcattagggcaattttcaaaactcacattttaaagaacaac

SEQ ID NO: 443376 - DNA, 486 bp, Homo sapiens
gcttgtgaaaacggcagtgtgtgtgtgtgtgtgtgtgtgtgtgtgtgtgttgagttggggaaggcagaaaagaaaaagaaaagttagtatatacttagaggtaaaagagtagaattaaacattcccatagatgtatagggattctactctccacatgagtcctcaccttaggcactagaattagggtctaggaactaatctaataaatccctggcccttccttagagactgattatgtgttgcgataggaaaagctgatgccatagaaacatctggactcatctatgtgggttgttggatcatcarttcttggagctatcaggtctaatacttgccatacctttaaaatgctctctggaatatcaaaacaattgaatcatttgctctgagtccagtttgattatttattggtgatttgacaattgtaaacagttagccactattgcacaggagtctcttaggccctctttgattaagtagagggaa

SEQ ID NO: 443377 - DNA, 577 bp, Homo sapiens
atctacattttttttttttttagtgcttgtatggtttcacgtttttacatttagttcttttatccattaggaatttacctattaggtataagtatggatgaaattctttttcagaatagcaatccagttatcctatcaccagtgactttttttttcttttttttttttttttgagmcggagtcatgctctgttgcccaggctggagtgctgtggcatgatctcggctcactgcaaccacctcctgggttcaagtgattctcctgcctcagcctcctgagtagatgggattacaggtacatgccaccatgcctggcaaatttttgtattttagtagggaaggggtttcaccatgttgaccaggctggtcttgagctcttgaccacacgtgatccgccagccttggcctcctgcttcctttaacatagaatttccttccataggtactcgggtccatttctgggctttctattctgttttcctttctattttgtagcagtctgttttaagtttagctagtctccagtatgttttattatctgatagttatagtctcccctcattgctcttttttttttt

SEQ ID NO: 443378 - DNA, 617 bp, Homo sapiens
tccataaatttgagagaagagggagatttgggcagggcgaatcacaagtctctctcctcagtccttgcataagaatgcagaatctctgaagtggagggggaaatcaaggtgaataaatgctttaaaataagtaaaatctctctcaagagtttagatagcatagtgataagaaccatgaaaatacacagtttattcacattttattatgtagatttataaggtaccaaagactctgcaaattcaactctttcaatgtcaaaaatggttgcttattttcactctttttctcatcagtggttatgcatgtttctttactttctgaaatttatcaaatgccttattacaacctttatattcatttcaatgcaatacaaattgaaatgtattcccttgagtatttgaggacacttttgagatttagattttttgaaaaatttatgctcattgatatttcatgtgcaaagacgtatgtaaatctagactgatttggatattayggtgcactaatatctcattaggtagttgtttatttcatagacagctctgtttttcagttgttttgcatttctattatccatgaccctgacttcccagaaccaccaagctacaagggcaat

SEQ ID NO: 443379 - DNA, 581 bp, Homo sapiens
  misc_feature (1)...(581): n = A,T,C or G
ggaggagagaaaaggatgcaattctctctttccatacactgcagagaaaaggcagaagggggcgctttctggtggggcataaagagtaagggtttgtaagatgcatctcagtgaacctgaaatatttgtccctgatttatytctgttaacttcttgacaactgtgatgggctttgccttatggggatttatttttctctgtttttcaaactgaaaatgatttttaatattctttattctaaaagtcctacatcttattgagaagcataaacaatagagaaaaataaacagnnnnnnnnnnnnnnnnnnnnnnnnnnnnnnnnnnnnnnnnnnnnnnnnnnnnnnnnnnnnnnnnnnnnnnnnnnnnnnnnnnnnnnnnnnnnnnnnnnnntcaatcacaatattaacaacaaaattagatcataccataactgggtttgatgccatgttattttattctataatcccccaatgacacctcgcatgatcaatgaatatacagctacatcagcatttttattggctatatagatttttataaagctttactaggatttattattacaaatactgttataaagt

SEQ ID NO: 443380 - DNA, 581 bp, Homo sapiens
  misc_feature (1)...(581): n = A,T,C or G
ggaggagagaaaaggatgcaattctctctttccatacactgcagagaaaaggcagaagggggcgctttctggtggggcataaagagtaagggtttgtaagatgcatctcagtgaacctgaaatatttgtccctgatttatctytgttaacttcttgacaactgtgatgggctttgccttatggggatttatttttctctgtttttcaaactgaaaatgatttttaatattctttattctaaaagtcctacatcttattgagaagcataaacaatagagaaaaataaacagnnnnnnnnnnnnnnnnnnnnnnnnnnnnnnnnnnnnnnnnnnnnnnnnnnnnnnnnnnnnnnnnnnnnnnnnnnnnnnnnnnnnnnnnnnnnnnnnnnnntcaatcacaatattaacaacaaaattagatcataccataactgggtttgatgccatgttattttattctataatcccccaatgacacctcgcatgatcaatgaatatacagctacatcagcatttttattggctatatagatttttataaagctttactaggatttattattacaaatactgttataaagt

SEQ ID NO: 443381 - DNA, 684 bp, Homo sapiens
atacactttcaatagttttattggtgtgatcttcaaaaaacaaggcagcatacttgccttcaaagatttttaatactggcatgtgaaagtgagataaaacttactctaaaagattacaccacaggactgctattgccaggggaaaggttcaagaccttgtgataattcgagctgtccagtcttagctggggccacttcaccaacaagacctttgttctggtgattattccagcagaaacagcatcaggggtgtaactaaatggattcctatatgggaaagagtttgtactaagagacatctaaaacttgtccctgttccaagatcacttactttttagtgtcttattttatagaagagatctttcttgaacaggtggctgtaaagtgaattttgtaaatcaaaatataattataccattgagttctgtagtaaaaatgaagctacattattgtagagaatactacctggtcccagaaacataatgaaaatgctatataagrctacagcaagtcttaaattttattaataaaaagacaattttaggctggaacaataattatactcaaaatcaggactagaattacattttctagggtttaaggtttttctaagcatgtctctatctcaagtaaagtttcccttttaaaaccctaagcaggacaaggtgatttgtttgaaactgt

SEQ ID NO: 443382 - DNA, 684 bp, Homo sapiens
atacactttcaatagttttattggtgtgatcttcaaaaaacaaggcagcatacttgccttcaaagatttttaatactggcatgtgaaagtgagataaaacttactctaaaagattacaccacaggactgctattgccaggggaaaggttcaagaccttgtgataattcgagctgtccagtcttagctggggccacttcaccaacaagacctttgttctggtgattattccagcagaaacagcatcaggggtgtaactaaatggattcctatatgggaaagagtttgtactaagagacatctaaaacttgtccctgttccaagatcacttactttttagtgtcttattttatagaagagatctttcttgaacaggtggctgtaaagtgaattttgtaaatcaaaatataattataccattgagttctgtagtaaaaatgaagctacattattgtagagaatactacctggtcccagaaacataatgaaaatgctatataaggctacagcaagtcttmaattttattaataaaaagacaattttaggctggaacaataattatactcaaaatcaggactagaattacattttctagggtttaaggtttttctaagcatgtctctatctcaagtaaagtttcccttttaaaaccctaagcaggacaaggtgatttgtttgaaactgt

SEQ ID NO: 443383 - DNA, 587 bp, Homo sapiens
tcataataaactggtaaggaacattccaaatcatagccttaagatagttacatttatcccctacaaaaagagttttagaaactaccttagcatctacttataatgcagccaagaatgtttccattcttcccaatgaccagagctatcctgtgaactagaaaaccactcctttgttgygatctgaagaaaagccctcctgtcccagtcgttcctaccagattgccaagtaccaggaaatctcagcagaatctctgtcttatctgacacatctgggacctcagtcaatatgtcagaaggaagaagcagcacttcaagctatttttacccagtaacagaaaacttgttcctcttctggtcatggccaagtaacctcctatcatatcagccctcccagagataacatttatatactccagataaaacgtaaaaaaaaaaagaagatgctaggaagtgaacaaatgcaggcagatgcagcgggcagatgagggagtcaacacttggaggaagacaacagcaggaaatgactttcctattttaaaaatgacctttatccaaaggccaggctatagtcagtgctgcacagcatg

SEQ ID NO: 443384 - DNA, 604 bp, Homo sapiens
tgtgagccaaatgttttatatcaaagggtggaaggcacatggctccaaacactgattctaacagccctatagtaaatgggctttgccctctattattaaccacgctagcttttaattcttttataatttaaactctacaagagtgtgttcatgtaaaagatgttgtaggtcattcagatcaggccttayagtaataggaaaagcgcaaggtcctaaaggttcaccagccatagcagcagcacgcaacattttttatatgggggtttctgcttctgttattggagggggtggcggaggccagttctcctctcctttttcctgcgtagcaagtggccaaatctcctcccctttctcctgctcattattttcaataggcgctgtcagaggaataaataatctttttaattcttgagactcagaacctgactcctgttgtccgacagaattagaaggagacagcagcagtaggattgtgcaaaccaaaccccaggcagaaaaaacagaagggtctactttaagacctttttgatgagcccgtttcaatccttctcctattctgtcccaattttccacatcaagattgcctgcctgcagaaaccatggg

SEQ ID NO: 443385 - DNA, 581 bp, Homo sapiens
ctgctggagatcgcggacccagagacccgccctctccgcgtcagtctctttgaccgagcggctctaccgttgagacggcactcaccccacgaatatcccagtacccgagaaccatagacgactcgcacgacatggtgacgggcttccgagccttcgaggactagggaaactgtgagcgggaggggctttataccckacataagggggcggggcccacgcgcgggcgccctgactccgcctccgccccgttctccgtcccttgcctccgcggctccacagggccgtgcgcaggcgcgactaatgccggcgttggggttcagggcctggcgaccccgaggcgggacccgggcaggagtgctgcaggagagcaaaggacccgaggttgaggctcctcccttccccgcgggtgggagccagacttcattcattaatggtgccagtgaagacgcgaaaagcaccactagccaggcagtggggaccctagttacccagggagagcgagattcgcgccgtttttaccgagccagccggggctggatgaaggataggaagactggggcaaggccggagagtcagaccag

SEQ ID NO: 443386 - DNA, 467 bp, Homo sapiens
tcctccctaaggccttatcttagaacccaaactatccccacctcccacaggccctgacccccaggaacactcagatcaccctggtccagcacatcaagtggctcctaggcagcccctctgcccctccgcccctccagctgctggaaagagaaacgccctttccagcccccacccccagctctccaggctgggggaacccactaagacataggtgatggcgactcacccaacatacaccccatacttaccccacacttctcctccccagagatggtgacccgctgaaactcccgttccagcacatcacgctcccgcaggctccggtcaccctgcccctcaccctgttccttgtagagcctgcagggggtgcattcaagggaggggtttagagccggcagaagggcaggctscagctccgcatcccctgtgcccctctgccctcctcactgtaggtccgagtcactgtc

SEQ ID NO: 443387 - DNA, 603 bp, Homo sapiens
tttttaaaagttgaatgactaagtaaaaaatataaatacacatccatctacgtatgtaatggttaaagtatatatatatatatatatatatatatccatatatttttagttattctcacatcccataaggaggtggtaatttaaatttataaagaattaaattgcaattttttgaatgggttgcatggaaatatacattaagatttgttattacttttggtcatatgtaattatgcatataaatatatagatatatagatatttagatattcaactactcatgcactatttgaaagtagcaaatcatatcaaacagcagtataattttttaaatttgcaagatgcttgagggtgcagtaatgaaatggtcgccattgaccacagcatgactatcttatttccagattggcatatctacccagtcctcacatcccacaaaatcaagtataggagacttctgccctctacaattgtcaaacactagaatttcattwaaaatcctttaaaaacaattattaagtcccagattttataaatattaattccatggctagtatgggacagttaactatgttcagttgtctacaccatattattacatag

SEQ ID NO: 443388 - DNA, 580 bp, Homo sapiens
ccgcgggaaggtccgacgcacccggctgtccctgagggaggcaggatggagcaagggcaggacactggaggtggtgcccagcaactccggcgcgcgcttgcttcccaggctggaaaccttggcccaggctcaacctgtctgagctggaccagtccaggccacgcgccttggwgccctgctaaccaacagggacagccgcgaccctaggtcgtgcgaacacctggggtcccggatctccgcttgcctgccatcatcccccaggctgcttggctgctggctcatctgcccgcaccgtccgccccgccgactgagctccccacaaagcacacagaggcgcagagccagcgctgttggagtcttttattgtgttctgtcaccgaggtcgcagccccgagccaggtggttggttaccagccaagcgagcgagtgcgcccgctcttcggggctcctgggtgccacccggaggtgtcctgttggttgcgctgattagagccgtcgccccctctcgggcggctggtcctcttattaggcggcagtgcaggtggcagtgtggacagcacaccgcagagacaagctcaag

SEQ ID NO: 443389 - DNA, 632 bp, Homo sapiens
taatcccgaatttgtgatttattagctctgtgaccttgagcacataaatctctctaaacttctgtcccttcatccattatatgattatataagacaaatttataataattgctaaaaatgtttttgagcatttattatgtgccagtaagtaatctaagggctttccatatattaagtcatttaacatctattatgtgttttgcaccataatggcacataataaagcacttaataaatgtttgctattattaattaatcaaattaaatrtaagccacccattaacaatcagaaataagtatcatcactttctatcacaacaaagactagcttggcctttatagaatataatctttctatgtatttgttttcagtatgttgtaagaataatgagaccatattttacaaaacagattcaaattagtaccatctttaacagtgataaaatgaaagtctttttcctctttttgtcttagctcagatataatcttctccaagaagattctcttctacccaatgtcccactgtccttcacccaccctgccaacttggttcagttactctcatatcatctataatggttcttttcatattgttacactcgattttaacaatctctttagtaagatttcac

SEQ ID NO: 443390 - DNA, 403 bp, Homo sapiens
atggatttaatatttaggaatattsttatcaaactgactgattgacatgtaagaaacccatatgaagcagtttatcttctcaattgtggtgtctcgattgaactatctttctcctttctttggagtctatgttgctatgtcactaacatggaatgttgtagtgacagtgcctgcctttacataccacaggcagaactacaatttttagtgagtttttttctgagattgagaacttactcagtgttcgctcaaaatagtgttgtcatgccattaattagagcttaaaaacattttttagttgatttttaatttgcatcttaaaaagtgctgttgtagattattttcaggatatcgataaaccttgggaaaggtcttcattgcattttactagtattttgttcta

SEQ ID NO: 443391 - DNA, 403 bp, Homo sapiens
atggatttaatatttaggaatattgttatcaaactgactgattgacatgtaagaaacccatatgaagcagtttatcttctcaattgtggtgtctcgattgaactatctttctcctttctttggagtctatgttgctatgtcactaacatggaatgttgtagtgacagtgcctgcctttacataccacaggcagaactacaatttttagtgagtttttttctgagattgagaacttactcagtgttcrctcaaaatagtgttgtcatgccattaattagagcttaaaaacattttttagttgatttttaatttgcatcttaaaaagtgctgttgtagattattttcaggatatcgataaaccttgggaaaggtcttcattgcattttactagtattttgttcta

SEQ ID NO: 443392 - DNA, 555 bp, Homo sapiens
gtccaaccctgcattcataatttttagtattctccacagcattattactggataaattctttacagatggaaatataataaaaattctaaaaccttatctccggaawtggatgttttctttactaaagtctctagaaggcaaataggaaatctctgcaatatgaacttccattttttagtattagctagataaaacgaaaacatcttactgagatcttgatgagattaggctcacacgccatcatgaatttatgagagattacaatgctaagcaatggaacagtgtacatatttaagaagccacagagagtttcttttcacataaatgaagaggtggacatacattttttttcaacatggtatacagtttaatcttccttttatctcccagtatctcaagattccaaaaccctgaaagtagatgaagaaacagaaaacacaatgagagttacatggaaaccagcaccagggaaagtcgtcaactaccgtgttgtctatcgccctcatgggagagggaagcaaatggttgctaaggtgccccccacagtcacttcg

SEQ ID NO: 443393 - DNA, 595 bp, Homo sapiens
gacttgggatcatggagcttcagatgtgtctctctacagaataacttgggcaccttttggaagctcagataagatggaggtagttaactctctttatctttctctctgtctttcatgtcccatttaatttgtgagggaagcttagttcaaagaagtattactcttgttgtcaataagcatttattgacatttgagctcatgacatgcatcagagcaggaggaacatctggctaaataatgtraataaactgccattgagtgtgtatgatgtaagtggagacttacttttgcgtgggtatgtttttgtcctctttctccaagaccatcttaaatggagatgaaaacactttggtgttcgaaaacctgaaccccaacaccatctatgaagtttccattactgccatctatcctgatgagtcagaaagtgatgacctgactggcagtgagcgcacacgtaggtgtttagctttcaaataggacattgatattttaaagttaatttttaaaaaatagggctacagctatattagtaatgtgttcccaaattctgttttcttttagtgcctatcttaacaacacaaggtaagaatttaat

SEQ ID NO: 443394 - DNA, 581 bp, Homo sapiens
gcaattgtttcatatcttaaagtccctttgtagctcacttatgattagtcccccccgccccctttttttttgaagagttctgtgaaatgtgttttggatgaaattttgcagtgctggcggctagcaagttgaaatatctttttggggtcaccagtttaaagcttggaatcctttttatgatttgaggtgcatattttacatttgaagttataccacaaggtgtatgttaaaccttkactgtggtatgtaattctggaacttgacaagggtctcaaacagcttccctgtagaaagagctttttctaacagattagtgagatggagagagcaaggctgacacttaccaagaccctttttactcaagaccacaataggaggacggcagaacagtgtggtcctgcagaaactgaagccagacactccttacactatcaccgtatcctctctgtatcctgatggtgaaggaggtcggatgacgggaagaggcaagaccagtaagtgaaacctgagttcctatagcttctttaatagctactattagaatggaatcatctctttatctggaaacactggggtgacac

SEQ ID NO: 443395 - DNA, 581 bp, Homo sapiens
gcaattgtttcatatcttaaagtccctttgtagctcacttatgattagtcccccccgccccctttttttttgaagagttctgtgaaatgtgttttggatgaaattttgcagtgctggcggctagcaagttgaaatatctttttggggtcaccagtttaaagcttggaatcctttttatgatttgaggtgcatattttacatttgaagttataccacaaggtgtatgttaaaccttgactgtggtatgtaattctggaacttgacaagggtctcaaacagcttccctgtagaaagagctttttctaacagattagtgagatggagagagcaaggctracacttaccaagaccctttttactcaagaccacaataggaggacggcagaacagtgtggtcctgcagaaactgaagccagacactccttacactatcaccgtatcctctctgtatcctgatggtgaaggaggtcggatgacgggaagaggcaagaccagtaagtgaaacctgagttcctatagcttctttaatagctactattagaatggaatcatctctttatctggaaacactggggtgacac

SEQ ID NO: 443396 - DNA, 585 bp, Homo sapiens
gtaatgctatattagtattatatatattactatattatatatatatcatatagctctatttttctctcatatatatgagagattttatatataaagaaaaatatgtgtatatgtatatataatcttaactcctttctcacagttttttaaattaaaaaaataaaatttggttcattttttataataaagaaattaaattcccatctaggaatttcagagaaaagttcacattgtaccaaaaaaaaaaaaaaagaaaaagaaaaagaaaaaactcttctttcaagaatcagttgcttgattttacargaaaaaaaaaaggttggtcagagaaaatgagaaagcttcactattgcagtcttaccaagcacccctcctgattgctatgagattagctcctggtctctagaacccagtttgtgacagagatgtcaaaggtaacagagagctttaggcccaggtttttccacaggcaaattctaacaaacatttagggatgaaataatactaattctgcacaatctcttccaggaaattaaagaagaagaaacacttccaaactcattttatcaagccagcaatgccctg

SEQ ID NO: 443397 - DNA, 568 bp, Homo sapiens
tatggataaggcaacaaggaaaatgaatatgacaacaaaacaaagtgctgtgaataacaacagcatgcataccaaaagatagcatactaataagatgagacatttgggtcttgttctgatatgccaaagcttatcagaattgaattgattcacagctaaattgactcaagctgcccttgaaacaagamtctcttagaaccctaatgtgcggatgatgctagttgggaaaaaaaaaataccctgaatgaaaccaaacataattgataaaagctggaagagcttcaaaactcaagctgaataacactggtgttacagagttccttagctttggaagctgaaggattcttacacctggagaagctattccaagcacagatgtcaattaaatgattgttctcacttttagtgagaatgcctatgctgatctcagttaaccttcttttctttctcatgatgaatgagaaataatgaagaaaatcaaatggtgggtattaattcaattgttcatattttgaaaaattattaaattgtgttagataactatccttgaatcttctcgtgttttcat

SEQ ID NO: 443398 - DNA, 608 bp, Homo sapiens
aattcatattaaatgtcaatcaaagccaggcaccattgctcatgcctataatcccagcattttcagaggccaaggaaggagaattacttaaggccaggagttcaagattagcctaggcaacatagtgagaccctgtctctataaaaaagaaaaaaaaaaaccaatcagctgagtgtggtggcatgtgcctgtattcctagcaacttgggaggctgaggtgggaagactgctagagcctaggaatttkcagctgcagagagctatgatggcatcactgcactccagcctgggtgacagactgagaccctgtctcaatcaatcaatcaatcaatcaatcaatgtcaatcaatagacctattgtcctaaaagcaaagctagcctgtttggcttctatagttattattttaaaaatggctttatttatttaatttagctttcttccatggacaggattttcttctagattcaaaaggaaaatttttattccacaatatagaaacaattagttcaaatgtaatagaattttgattaaaatccaaaccttctgttgaatattgaatctgatatttaagtataacaattacatcaggtttttaaaataataacat

SEQ ID NO: 443399 - DNA, 576 bp, Homo sapiens
tgagtctgcttgctttctcagcaggaggcttgtagcctggggcaagttctcagccctgctcacactccaaccctggggcatggtggaagtgagactggccttttgggctgtgggctgcatgagagctgggtgagtcctgtggctgctggcttcctcccacttctttggcaacctgtgtgacgcagtagaggcagccataatccccctgggaacaaaactgcattggcctgggagccrtaccaccatcacccacagcatctgcagcaagccccacccaaggagagtctgagctcagacatgcctaaccctgcctccacctgatggtctttctctacccaccctggtagctgaagacaaaggacataatctcttgagagctccatggctccacccaccacctgatcctccctatacaatcacagctgatgcactcttgaaagcaccacctcctggctggaggccaacaaacaaaaccagctcacttaacaaaaatacaaccaaagaccctcacagagtccacctcagtctcctgctccctccaccagagcaggtgctggtatccacagctgagagacc

SEQ ID NO: 443400 - DNA, 588 bp, Homo sapiens
tatggaaaagagtgtggaaattccttaaagaactaaaagtagatccaccatttgatccagcaatcccactcctgggtatctacccagagggaaagaagtcattatacaaaaaagatacttgcacatgcatgtttatagcagcacaattcttaattgcaaaaatatggaaccagctgaaacacccatcaatcaacragtggataaagaaaatgtggtatatgtataacatggaatactactcagccatagaaaggaatgaaataatggcatttgcagcaacctggatggtattggagaccattattctaagtgaagtaactcaggaataaaaaaccaaacatcatacgttctcactcataagtgagagctaagctctgaggatgcaaaggcctaagaatgatataatggactttgggggctcaggggaagaggtaggaagagagtaagggacacaagactacacattgggtacagtgcacactgctcgggtgatggctgcaccaaaatctaagaaatcaccgctaaaaaaacttattcatgtaaaaaattaataaatagaaaaaaattagcccaataaaaacatgaaca

SEQ ID NO: 443401 - DNA, 491 bp, Homo sapiens
tgaatcttacaaaacaatatttaataagagttaaaatgataactaatgtaagtgtattcatatatggtaattactattaagtaatatttatacgtggtagaaggtaagcgtccatcttcattcttttgcacgtgaatgaatctctaattttctcaacatcacttcatggcaagactcctttttcctgcattgaatgatcttggcamccttgttgaaaaccatttgtcaatatatgcaagagtttacttctgggctgtgtattttattccattggcctatgggtatatctttataccagtaccacatttttaaaactactatagctttgtagtatgttttgaagtcaggaaatgtgagacctccaactttgttcttcaagactgttttgtcaattcaatgttccttgagattccatatgaattccatatgaattttaggatggattttactatttctgcaaaaataccattgggatttgataagtattttta

SEQ ID NO: 443402 - DNA, 630 bp, Homo sapiens
  misc_feature (1)...(630): n = A,T,C or G
cagggggaatcaaaaacagctctgacctaagaaatttccagatgactgtagttttagaatatgttgagttgtttcaacttggcttctgcaagctcaacattttattcgttcttctctttgttgttttagagatgaaatgaacgctacggttttctaggaaaatctttctataatttaaaagaaaatgattattgaagtcggccaatcaatattaatacagttaatatgccaaacaacatattctttgatggcgacatgtttttatcaatacagcatatgacacttcttaaagctttgctcttagggatggaacagaattttatttaagcctattttggtgaactttgcatgcatttcaacacttttcaacatctgtctttcattaccagaggtaccagtatccaaacagcaaagtattttgaatgccttgaaagtcagctcctgctcctyagtcctcctgtcttaaatcataatttcactgtgacatcaggttcatttttaaggaacatttttanttgantttcaggcaggcagcctttttttttaggaggcagatnctcgcgacataaagaggntccaagtaagaaaaatagctaaaagtgccccgcaagccaaattcatattaaataa

SEQ ID NO: 443403 - DNA, 560 bp, Homo sapiens
gcaaactaaagaagaaacaggatatactaggcccctgcttgcatagccaatgcctgtttgtcagcccccagcccccaccttagttgctgtcacccgaaccaaaaaagtttagtctaagataaaagtttactagcctgcaaatagctcactttttctgctcttatcagcctgcccagctacttaggtcataagtcaaatacttaaagagcccctgagctaactaggattgsaatgcattgtgggctgcaacaaaatgcagcaagacaaccctaaagaaaacatctaaagcccctacccaacaatcaataagcaacgtccggaagactgtgaccccatagtattcagcctataaggaacaggggagggatttgcacactaggggataaattgcttgttaaaactgtgctgggtatgcctgcccatcaaacacccagtcttgcaaaactgtcattaaaagtctcactttcactgttctctgggtctctgagttcattctttggttttaaaagggtgagtttgtttctcacaatctgtcaccatttatcttcttcctcaattaa

SEQ ID NO: 443404 - DNA, 522 bp, Homo sapiens
tcattttcatgtatgaaaatatgaagtatttccagtgtgtcttacatacattttggggtgtttgtgattgaattatccaatttgrctcacaaatctcagtttaggccaactccttcactttctgatgagaaaaatggtgcaaggaggtaaagtgatgctgtgaggctgggccagttcttccacctgtggcttcatacatggacgtcctggaacctattggtaacgtatttttccatttcatagaaagaaaagccaaaactcagatccaggatttgtccaggatcaccaggagtctgttctgggctttgaaccacggagagaacatcaaatcactgcatttccattccaaagaatacaactctttctgttaggcacactgccctattttaaaaatgatgtaaaggtgtcagtaatttaaattgtcccagaagagagcaagctccgagtaatacaagctgaacctgagcaatcagatgggatctaagaagtcaagggtgtgagccgagaaagctgttgcacaag

SEQ ID NO: 443405 - DNA, 576 bp, Homo sapiens
ataggttcagtgcaggacaccgctgatgggctctctctctctttctgccaaatcctgctgccttctcccttccacagggagtgaatcctaataaatatcttgcacattgaatgctgtttcagcatctgctttcagataacgcaggctgaagttttcttttcctccaggttgtttagagtttataaaacaaaaaagaatctcactgaattttatcaaatgtttactaggtgtctagtgagataatcataaatttcacttctattggtcaaaaatgtaatgaattatactgttagatttccattcttaaattcttggtggaaaatctacttatttaattagaagcatttttaaaaatattctgctatactttagttgctagaaagttattaagaattcttgcctctctgttcataagtcatactattctgtaatttctgtttgtttattttaaytctattgtctttgtgagctttggtagcagggttatgccagccttgcaggataatttgggggaactttgtatttttaataatgttctgagagagcttacaaacacagaggttacctggttcctga

SEQ ID NO: 443406 - DNA, 615 bp, Homo sapiens
attttcattcttgggcaagaagtctttacagtgacacccagatcactctccagccagggacacaaaaatttcctcctagcctctgccagctcgcttgaccatccacccgtggcaactatgacaataaagaatatctttctgaaaactgtctctgtttttgtattctgacaaacatagccgatgtgcagtattctgrtggggcttgggtgagggtgtgtgttgcaggtggggtgctgttctggtgtggctggaagaacccaggcaaagcctcagaggaggagctgtcatgtctggagttttcatctgtctggcaacccatctgaactcaagcatgaggtccctgctggctaggcatcttctcagaggggaggccctcctcacagagtccttccatggtgcctggattggtgacttcatgcagaacaaagggatcacccatctctctatggtgggagaattctcagagcagccacacggaacctgcaggaaaatgagagagtaagggaaagattgatggattgagtgggaaaggaaaaggggtgaaaaagagaaagaatgaggcaagagagggaaggtattagaatgtccccatcacatttaacatgtctcgtattg

SEQ ID NO: 443407 - DNA, 557 bp, Homo sapiens
aaatttgaattgcagataaacaatgaatacactttttagtataagtatgatccttgcaataatttgcaactactgatactaaaaaaattatttgttatttatcaaaaaaagttctgaatgagtgggcctggtacctacattttaaaaaatacggtgttttccgtacagataattctcagatcacactttcaaatagcaagagtctgaagctgtgagatcatgaatctccttgagaatcaagtcttttcccagaaaacactcatataaactcaatactttcacacaacttcagtgaaagaactgaaattcagaattggctagagcctacaaacctcatgaaccccaagttaagcactagccttagtaatctcatgtggtttactgaaaagcttggctcttccacagaagtgagatgagaacaggctcattttgagccctcccacttggcctactctttgtccttcccaacacttctcagcacaaggagagcwttttttttttttttttttttttttttttttttactttccacaagaaataatccataatcccctgca

SEQ ID NO: 443408 - DNA, 572 bp, Homo sapiens
gatgccacgctcaagtggcagtcattgtatcagcattttgtctaatttatgtgttgaatcatgtgctattattcatcaagctatgcatttcctatctgtaagagatgaattttatagtaattatccagacaagattgagtctttgttcatgttcccatagtaactagaccaaggattctaaaagtgcaaggcagagagctgcgcctgaataaagcctgtggaaccgttgccgactgcacatttgaagagctgtgtgagagagtragtatccaggcacgtccagactcactggccttttcacatgttaaaatacttcgtgttttcctctctgcccatttcagattttaaaataccattcacagagtcagaatcgatttaaaagtctcattaagggaaatactcatctatttttgccatgtgctttttatagatattggcacaaaatttgcacttagaggggctctaatgcaaaattagaaatgcagagagaactgtcaactgttgctagaagcaaaaataaaatcagttttggggctgttttgtaaaagtcaaacataagagattttggaaaa

SEQ ID NO: 443409 - DNA, 470 bp, Homo sapiens
tatgggtgaaaataatcaatttaaatgaaatttcaggaaggagaacacattgattttactctttctcactgaactatcatgaaaactgaagaaaaagaccacargtctccctggaataatactagtaccacagccataaatatttgaagaattatttagagtaagtttagaaaaactcgcttcattgttttccatttactttctatctacatacttaagaaggatatcaataattaccattaaaatgcacgtattggaaaacagaaaaaaaagtagttctggagaaattaaagatgtttatggagatatccaaagcaaacacacactctaacttttttctatgtggacaaggatctcaaaatcattcttctaccccccaatattttaaacttagatagtaaatatttttgtcctacatattgaaattctgaatatatttcctactagaaatatatccaatataattaaat

SEQ ID NO: 443410 - DNA, 618 bp, Homo sapiens
tttctttaaatctgcttctgcattcaattagaatcaaagaaaatattctgtgtgatttcaattatcttgaacctattaacagttatttcatgacccagaatatggcttttcttggtgaatatttcattaataatcttttaaagaaatttaaacattttatttaaaattagatttacccacatggttaccattgctaacttcttttttgcagatccatactttcatttggtatcattttacattttcctgaaggaatttttctaatactttttaaggtgcagttccaatggtgatraatgctttcatctatagtttatttgagaaagtttttattttgcctccatttgtaggagtttttgccacatatagaattatacacttaacttcttttctttcagtactctaaatatattacttcaacatcttctggcgccagctgtttctgatgagaaatctgtcttccttacctttgtttccctgcatgtaacatgtcttttatctttggcggcttttaattaagatttctaaaattactacttttaagtgatttgtttatgatatgccctggtgtagtttttctcatgttttttatctggagtgtgttgacctctcaaatgc

SEQ ID NO: 443411 - DNA, 622 bp, Homo sapiens
gcaagcaataatttacaggtacaagttaatctaaatccaaattttaaagaaatgtattcaaacagaaattatctgtttaagtataaacttgtaaagagactaatgttaatttttattaatgcataattaagatctcttccatggctcctyaatatacatacatacttcatatcattgtcttttacttgactattagaatcaaaattttatttctcagtagggtcaaatttaagtaaaattcttacagaaatttgttttaaaaagctttatttctatctaaaatttaccatagtgtttcctgtattatttctccgattaaaattattaaaaagaaagtatgtcactttttttggttcatggaaaattattatagtaacaattcatgttaaatatctatgctttttgatgaatacaatgaccattataatgtattttccagatagggaaaatttgctgaaagcgaaagaggctgttactaattatatgagaacataaactgggacaaaatactataattgatagcaatcattatttgattttggtttctttatcttacctttaaaacaaaaacattattttaagctaataagaatgagttgatctgatccccatggatttactt

SEQ ID NO: 443412 - DNA, 546 bp, Homo sapiens
aatgagtttagaaatgccacagaatacaaagtaaacatacaaaaatcaattttatttctgtatactggaaaatgaatttaataacactataagtaaaaatacaaaaccatttgcaattgaggaaataaactcaaaagatattttaaatctaaaaagtatgtaggactaatgctgaaaattatgaagtactggtaaaaaatcaaagaagatgtaaataaatagagatacatactatcttcatggattagaacatagatgtcaaatctttccaaatcaatacacaagattaatgcgattcttatgaaatctcaacaagcttttgcatatatagggttattctagaatgtatacagaaaggcaaagtaattagaatatcaaaaacaattttgaaaaagaagaaaaatgtgggaggaattagcctactctcttttaaaacttattayaaagctacagtaatcaagactatgtagtactggtgaaggcataggcatgtagatcagtagaacaaaatagacaacccataaataggtccacacacacatgtcc

SEQ ID NO: 443413 - DNA, 546 bp, Homo sapiens
aatgagtttagaaatgccacagaatacaaagtaaacatacaaaaatcaattttatttctgtatactggaaaatgaatttaataacactataagtaaaaatacaaaaccatttgcaattgaggaaataaactcaaaagatattttaaatctaaaaagtatgtaggactaatgctgaaaattatgaagtactggtaaaaaatcaaagaagatgtaaataaatagagatacatactatcttcatggattagaacatagatgtcaaatctttccaaatcaatacacaagattaatgcgattcttatgaaatctcaacaagcttttgcatatatagggttattctagaatgtatacagaaaggcaaagtaattagaatatcaaaaacaattttgaaaaagaagaaaaatgtgggaggaattagcctactctcttttaaaacttattacaaagctacagtaatcaagactatgtagtactggtgaaggcayaggcatgtagatcagtagaacaaaatagacaacccataaataggtccacacacacatgtcc

SEQ ID NO: 443414 - DNA, 595 bp, Homo sapiens
catccaggttctttcaaagttatgttttgatataaaaatggattatctgccctgttcccctttttagcaaatggctagtaatcatttggccaactgcagcctagtttggtataatgaaatagctaccagcaagcaacaaaatcacattccagtgaagaatgtgatgaatatatatgctgcctaatattcacaatcagaaaatctgtgcaatccactggcacctactattcttccattgatgtaatattgaaggtctaggtggttaagcaagacatctggrtttcaatcagaatacagaaaaagttgtagattataaaatacttttgtgagaatccataacaatgggtaatgtctaataaagaaaatggaatttcacactaacacttttaaggacacgggaaatacactttcagctttcactatactcatgtgctacctcattcattcaaatacattttgccttccaccacagaaactgaatttggagatggtacaaaactttagggataatctcttttaggatgttgaataaccctacattgccttttctcatcaatggcagatcagagacatgccctcaaatcaactatgtttc

SEQ ID NO: 443415 - DNA, 595 bp, Homo sapiens
catccaggttctttcaaagttatgttttgatataaaaatggattatctgccctgttcccctttttagcaaatggctagtaatcatttggccaactgcagcctagtttggtataatgaaatagctaccagcaagcaacaaaatcacattccagtgaagaatgtgatgaatatatatgctgcctaatattcacaatcagaaaatctgtgcaatccactggcacctactattcttccattgatgtaatattgaaggtctaggtggttaagcaagacatctgggtttcaatcagaatacagaaaaagttgtagattataaaatacttttgtgagaatccataacaatgggtaatgtctaataaagaaaatggaatttcacactaacacttttaaggacaygggaaatacactttcagctttcactatactcatgtgctacctcattcattcaaatacattttgccttccaccacagaaactgaatttggagatggtacaaaactttagggataatctcttttaggatgttgaataaccctacattgccttttctcatcaatggcagatcagagacatgccctcaaatcaactatgtttc

SEQ ID NO: 443416 - DNA, 584 bp, Homo sapiens
aattggtgagggctgggtgtggtggctcgtgcctgtaatcccagcactttgggaggtcaagttyggaagatatcttgaggtcaggaattcaagaccagcctgggaaacacagaaagactttgtctctacaaaaataaataaataaataaatacataaatagataaaattaaaataaattggtaaaactcagaatgccaccaggtgaccagataaagggtacaatatgtgagaagactaatcaatgcttcaccattgcaatggagactctaagatagtacatattatctttcaaaagccacgaaaataattctgcaaaccatagtgagttgtctttgatgcttgtttggtgatcttaaaatgcttatggctgcttaaaacaaataatctgtatctaacctcattagttcatctcaaattttccatcccagtgatagggaagtacaatttgttttgaggtaggtaacctcattatcaatgatctgataagatttgtcacttaaaaaaatcacttttagtgcctcagcataagagaagttataaaaatacctttctgtattggagaaaaaaaatgctgtatttgcgc

SEQ ID NO: 443417 - DNA, 584 bp, Homo sapiens
aattggtgagggctgggtgtggtggctcgtgcctgtaatcccagcactttgggaggtcaagttcggaagatatcttgaggtcaggaattcaagaccagcctgggaaacacagaaagactttgtctctacaaaaataaataaataaataaatacataaatarataaaattaaaataaattggtaaaactcagaatgccaccaggtgaccagataaagggtacaatatgtgagaagactaatcaatgcttcaccattgcaatggagactctaagatagtacatattatctttcaaaagccacgaaaataattctgcaaaccatagtgagttgtctttgatgcttgtttggtgatcttaaaatgcttatggctgcttaaaacaaataatctgtatctaacctcattagttcatctcaaattttccatcccagtgatagggaagtacaatttgttttgaggtaggtaacctcattatcaatgatctgataagatttgtcacttaaaaaaatcacttttagtgcctcagcataagagaagttataaaaatacctttctgtattggagaaaaaaaatgctgtatttgcgc

SEQ ID NO: 443418 - DNA, 593 bp, Homo sapiens
acaggtgcttgccaccatgtctggctaatttttatatttttagtagaggcaggatttcaccatgttggccaggctggtctcgaactcctgacctcaggtgatccacctgccttggcctcccaaagtgctgggattacaggcatgaaccaccacacccgaccctctcacwacttttctacacttctcttatatttttctcttgtacaattttcagtctgatgtgtcacacagcataattatttatgttagtatatcctaacaaatcaataccctctttcaataaatacatagaccaagtggtcttcttaaattttctttgaaatttcacaataaattaaatatacaccacaaagtaataaaatcaatgggattttaaagaaaaaattttaatttgaaagacaaaaatttatttttccgctttgttcacatagtgtgagtatcaattttaattgtccaaagattttctcctctaggttgtataaaacataaaacaaactggcacgtaaaccaaatatgctttggttttattttagagtcagaaatagagtaaaaccaaatactgcacatattatgttatattatagatcacagac

SEQ ID NO: 443419 - DNA, 567 bp, Homo sapiens
  misc_feature (1)...(567): n = A,T,C or G
agctatctgcatttcatttttatttttaaataaattggctgttcatattatttccmcatttttatatgggttattggtcttattaactatatgtgattactgactaataaaggatattagctattttctgtaatgtaaaaaacaatattatttttcattttacaatttgcctttggcctttgcctatatatgttttataatatattttttaaaactttaaatggtncaattggtcaataaaatagataatgattcctgcatttttgaaaatattgtgaactgttttaccaatcctaaaattatttttcaattgcttgtttccttctaacaaagggataatttactttttcatatttaaatatttgatctgtatgaatatttcttggcataaaaccattgtgataacaccctcccatgttatcacaatgtatttattacataatctaattttttctgcactgatgtgaaattgtactttcataatgaatgcatgcacatacacatatacacatatgcggaattatgtatgaattttctgttctgtttcattaatctgttattagcaaa

SEQ ID NO: 443420 - DNA, 560 bp, Homo sapiens
ccttacaatgaccactctaaaatgcatggttaatcttttctcacacacaaatccagatatttgcttttgatacaagtggctttgttgttgttgttattcttcgggaaagaacttacttgaggtaattgtcttaaatcacttgcccaaaacttgaagattgaatgaatctgtctttttctgcttatrtgtcacttcagatgatctgatgtctgttccttgctacatttcagggaaattagttaatgtcagtgagaagtttctatatgctctaaaaatatcagatttggggatcagcagtaaagctcctgttttattgtctgccttaatctggtaacatttgcaaaattgcagtataaaaagacaaatacagtagaaaacttggataagtacatccaggtgaccaaaccattttcttggatttttccctccagttcaaaaaaaaaaaaaaaacaaaaagcaaatgtgatggctcatgcctgtaatcctagcactttgggaggccgagtcaggtggaggattacttgaagtcaggagttcaagaccagcctggccaacatggc

SEQ ID NO: 443421 - DNA, 429 bp, Homo sapiens
agcctacattgacacatcattatcacccagagtctatatagtttacattagggttcactccttttgcacattccatttcatattggccaaatatatccactgttatgctatcatacagagtgttttgtcactgcctaaccatctgtgttctgcctattcatccctctcctctgamcctggactatgactccagttttgctttttacagaatgtcatataattggaatcatgcagtatgtagccttttcaaattggcttctttcattaatatgcagttaagtttcctccatgtttctttgtggtttgatagttcatttctttatagcactgaataatattccattttctgaatttggcagtttctttatccattcacctactgaaggtcatcttggttgcctccatgagcaattataagtaaagttgcca

SEQ ID NO: 443422 - DNA, 589 bp, Homo sapiens
cagtatgtagccttttcaaattggcttctttcattaatatgcagttaagtttcctccatgtttctttgtggtttgatagttcatttctttatagcactgaataatattccattttctgaatttggcagtttctttatccattcacctactgaaggtcatcttggttgcctccatgagcaattataagtaaagttgccataaacatctctgtacaygtttttgcacagtagtttctttttaaaaaacacttttattttctggcactataggtcatgcattttaatctactttgccaattcctgtttctcggttcataaatttagaccatttttatttaatttcattattgatatattacacttaaatatgccattttttttctgtttttctctcttgtttgtttctattttctttttcctgcctgtaggtatgacattatatatctataagtaattacaatctagtaatatgacattttactatttcaagtgaaatatagagatcttatctccctttatgttctgttaccctctcccatttataatctaattatattaaatattttctgtatgtccatttataattagat

SEQ ID NO: 443423 - DNA, 640 bp, Homo sapiens
ttaccaaaacactgctaaatagtccatatcaaagaagaaattataattcaaataatagaacatttaaaactgaataaaaatgtaaatattatatatttataaacatggaatccaattaaggcattctttatagataaatgcataaccttatgtgctcttatgagaaaagtagaaaggctaaamattaggtgttacatatctcatttaaaagtaagaatgaataacaaaagtattcaaagaaatcagagggagactaaaatgaaaaagcagaaatcaacaaaatagaaaataagacacgatagagagaaacaacaaagccaagcgttagctgttgtattagttcattctcatcctgctataaagaactgcctgagaataggtaatttataaaggaaagtggtttaactgacccataattaagcatggctgggaaaacctctggaaacttacaatcatggccgaagggaaagcaaacatgtccttcctcacgtggcaggaggagagagagaggatgaaagcccagagaagggggaagccccttataaaaccatcagatctcttgagaagtaactcactatcacaagaacaggatggggcagtctacctccatgattcaattatctccaccttgtcccttcca

SEQ ID NO: 443424 - DNA, 640 bp, Homo sapiens
ttaccaaaacactgctaaatagtccatatcaaagaagaaattataattcaaataatagaacatttaaaactgaataaaaatgtaaatattatatatttataaacatggaatccaattaaggcattctttatagataaatgcataaccttatgtgctcttatgagaaaagtagaaaggctaaaaattaggtgttacatatctcatttaaaagtaagaatgaataacaaaagtattcaaagaaatcagagggagactaaaatgaaaaagcagaaatcaacaaaatagaaaataagacacgatagagagaaacaacaaagccaagcgttagctgttgtattagttcattctcatcctgctataaagaactgcctgagaataggtaatttataaaggaaagtggtttaactgacccataattaagcatggctgggaaaacctctggaaacttacaatcatggccgaagggraagcaaacatgtccttcctcacgtggcaggaggagagagagaggatgaaagcccagagaagggggaagccccttataaaaccatcagatctcttgagaagtaactcactatcacaagaacaggatggggcagtctacctccatgattcaattatctccaccttgtcccttcca

SEQ ID NO: 443425 - DNA, 531 bp, Homo sapiens
ttttggtctctttctagtagatggtgttctttcatgggtttatgtagaactctttcgctttactatgagaaagtatgtgtataatattttctatggtatcaaggttatattcttatataaatgttttgtgaatgcccaagagtattttgctcttagacttatatatggataaagatatagattacatatctataaatctatataaatattatttacatatgttacatataaataatttaggaaaatatataaatttataaacacatatatgcatatgtacgtgtatgtgcatgtgtatgttaaagtttctttcattagttagataaatagattttgctttttatctaacttaatacttgttcatttttcattatcctgatcaatattgtctgtcttaaatcttgwgccttgagaaggaagtgcctgcctctgtttaaataactttacatggtatttaattctctgatgttcacagagccacataaatattttaagataagataatggtaatgttataagttattgtagaat

SEQ ID NO: 443426 - DNA, 595 bp, Homo sapiens
ggaactggataaaagttgattataatttaaattcccactgctattttggaaactaatcagaggaaagaaggccaaaatattctttcaagacttgtaaagaaaaaaaaaacgagagagacttggctaaactgagtcctccaggcagatgtttctattggcaaccagtgaggcaaaggaaaaaatgtttattgaagaaaatattcataggtggaagctttgagctctgaagaactcactacggtctaatcacaccagatgtaggktttctggaaaaaataactgcctttattcttctttaatcaatttcattttattaatttattcatatatttaatacatattctccccatatttttagtcacatcacacaaagatttacatttgggaattttccctctctatagcaatattcctgtgctccagctccagcactctgaaatatgatctgttgctcagtttgtactggaacttagtatttactgtgattggataggtaccctggcttaccatcacttcaccttatcactgaataaattaatcttaagagaggggcacaatatgacttcttttaagttcacagagtcagtaaaagttc

SEQ ID NO: 443427 - DNA, 589 bp, Homo sapiens
aagtgtgattttcatatcactcactggtcatttgagtttacataatcttcagaatttcagaatatcttttaaaatagagaattaataactaaacataataccacagattatgctatgactgaaaatgctgtgaaggtattttattggatttmtctatttttataataatgcagcttcagatttcatataatcacagcaatgatggatcttccctcttctgatctttatttatcatctgatttttgttttccttaggtacattttccctttttcactacaaaataatttttaaaatacagaaaaatatatatatatattttttgagacggagtctcgctgtatcgcccaggctggagtgtagtgacgcgatctcggctcactgcaagctccgcctcccgggttcatgccattctcccgcctcagcctcctgagtagctgggactacaggcgcttgccaccatgcccagctgatttttcgtatttttagtagagatggcgtttcaccatattagccaggatggtctcgatctcctgacctcatgatccacccacctctgcctcccaaagtgctggggattacaggaagtct

SEQ ID NO: 443428 - DNA, 591 bp, Homo sapiens
tgtaatatattttgaaatcaggaagtgcaatgtctacagcattgttttccrttctcaggattgttttgggtatttgaaatcctttgtacttccatatgaattttaggatatttttctatttctgttaaaaaatgccattgtgattttgataggaatttcactgaatttgtaaactgctttgggtagtataaacattttaacaatattaagtcttctaatccatgaacacaggatatctatttatttgtgtcgtctttaattttactcatgaattttttttgcaatctacagtgtgcaagttgttcaccttctcagttaagtttatttctaagtactttgttcttttgatgatattgtaagtggggtcattttcttaatttcttttcattgtttgtacatagaaacacaaccaatttttgtatgcttgttttataccctgcaacattactgaatttgtttattataataggtttttacggtagaatctttagggtgttctacatttaagatcataccatctcaaatagatataattttacttctttctttatgacttatatattccttttatttatttttctgcttaattag

SEQ ID NO: 443429 - DNA, 591 bp, Homo sapiens
tgtaatatattttgaaatcaggaagtgcaatgtctacagcattgttttccattctcaggattgttttgggtatttgaaatcctttgtacttccatatgaattttaggatatttttctatttctgttaaaaaatgccattgtgattttgataggaatttcactgaatttgtaaactgctttgggtagtataaacattttaacaatattaagtcttctaatccatgaacacaggatatctatttatttgtgtcgtctttaattttactcatgaattttttttgcaatctacagtgtrcaagttgttcaccttctcagttaagtttatttctaagtactttgttcttttgatgatattgtaagtggggtcattttcttaatttcttttcattgtttgtacatagaaacacaaccaatttttgtatgcttgttttataccctgcaacattactgaatttgtttattataataggtttttacggtagaatctttagggtgttctacatttaagatcataccatctcaaatagatataattttacttctttctttatgacttatatattccttttatttatttttctgcttaattag

SEQ ID NO: 443430 - DNA, 591 bp, Homo sapiens
tgtaatatattttgaaatcaggaagtgcaatgtctacagcattgttttccattctcaggattgttttgggtatttgaaatcctttgtacttccatatgaattttaggatatttttctatttctgttaaaaaatgccattgtgattttgataggaatttcactgaatttgtaaactgctttgggtagtataaacattttaacaatattaagtcttctaatccatgaacacaggatatctatttatttgtgtcgtctttaattttactcatgaattttttttgcaatctacagtgtgcaagttgttcaccttctcagttaagtttatttctaagtactttgttcttttgatgatattgtaagtggggtcattttcttaatttcttttcattgtttgtacatagaaacacaaccaatttttgtatgcttgttttatacsctgcaacattactgaatttgtttattataataggtttttacggtagaatctttagggtgttctacatttaagatcataccatctcaaatagatataattttacttctttctttatgacttatatattccttttatttatttttctgcttaattag

SEQ ID NO: 443431 - DNA, 616 bp, Homo sapiens
catactgaagtgtaatccccaatgttagaggtggggcttgtgggaggtgattggattacggcgaaatttctcatgaatggtttagcaccatcctccatggtactgttctcatggtagtgaatgagttctcatgagttctggtcatytaaaagtttgtcgtacctccctgtttgatctcttgctcctgcttctgccatatgaagtaccagctctagctttgccttcagccataagtagaagctccctggggcctccccagatgcagatgctgccatacttcctgtacagcctgaagagccataagccaattaaacctcttttcttataaattacccagtgtcaggtatttctataatagcaatgcaagtgtggactaatacagaaaattggtactgggagtgaagcattgctataaaaatacttgaaaatgtgaagtagctttgggattgggtaacaggcagaggttggaagagtgaggagagctcagaagacagataagggaaagtttggaactttttagagactggttaaatggttgtgagcaaaatgctgacagtgatatggatgatgaagtccaggctgaggaggtctccgatagaaatgaggaacttactgg

SEQ ID NO: 443432 - DNA, 616 bp, Homo sapiens
catactgaagtgtaatccccaatgttagaggtggggcttgtgggaggtgattggattacggcgaaatttctcatgaatggtttagcaccatcctccatggtactgttctcatggtagtgaatgagttctcatgagttctggtcatttaaaagtttgtcgtacctccctgtttgatctcttgctcctgcttctgccatatgaagtaccagctctagctttgccttcagccataagtagaagctccctggggcctccccagatgcagatgctgccatacttcctgtacagcctgaagagccataagccaattaaacctcttttcttataaattacccagtgtcaggtatttctatamtagcaatgcaagtgtggactaatacagaaaattggtactgggagtgaagcattgctataaaaatacttgaaaatgtgaagtagctttgggattgggtaacaggcagaggttggaagagtgaggagagctcagaagacagataagggaaagtttggaactttttagagactggttaaatggttgtgagcaaaatgctgacagtgatatggatgatgaagtccaggctgaggaggtctccgatagaaatgaggaacttactgg

SEQ ID NO: 443433 - DNA, 582 bp, Homo sapiens
taagcacatgagattggtaaaaatgaattttatagaattattaagttgcttaccttacaatttgagggaggttattcagtaaatgtttttcagaactaaaaaaaaaagttgttatttctctgataagaagcaataaaatatatgcatctttttcatatttgccattttcttaatttttttcatatagcttgttttgcattaagtcttgagtgtacatttattaagaattatttaagcactggagcattgttagagttcyctgatataaaatataaaaatttttgttcatataacaaacctcaaatatttggcacctaaacaatggcatctttaaacaaatgaaattctagggaatacaaaatttgcaggcagaattttggaagcactactgagaaaagccaaagaaatgtcatgattggtcaggtcgctgtaagatcaaagtgtcctgacattggctggaaagacaagcatgcaactaaacccattctggcacatgaggtcacagtacaaatgagtgttgaagctgcaccaaagagaagaaggaaaacaatgatgagcaggaaagagaaggagacaggagta

SEQ ID NO: 443434 - DNA, 582 bp, Homo sapiens
taagcacatgagattggtaaaaatgaattttatagaattattaagttgcttaccttacaatttgagggaggttattcagtaaatgtttttcagaactaaaaaaaaaagttgttatttctctgataagaagcaataaaatatatgcatctttttcatatttgccattttcttaatttttttcatatagcttgttttgcattaagtcttgagtgtacatttattaagaattatttaagcactggagcattgttagagttctctgatwtaaaatataaaaatttttgttcatataacaaacctcaaatatttggcacctaaacaatggcatctttaaacaaatgaaattctagggaatacaaaatttgcaggcagaattttggaagcactactgagaaaagccaaagaaatgtcatgattggtcaggtcgctgtaagatcaaagtgtcctgacattggctggaaagacaagcatgcaactaaacccattctggcacatgaggtcacagtacaaatgagtgttgaagctgcaccaaagagaagaaggaaaacaatgatgagcaggaaagagaaggagacaggagta

SEQ ID NO: 443435 - DNA, 607 bp, Homo sapiens
cacaatcatggtggaaggcaaagggggagcaggcatctcacattaccagagtgggaataagagagcaaggagggagttctacacactttcaaacaactagatcttgtgaaaactcactcatcaccaaggagatggtgctaagccattcatgagggatatgcccccttgatctaaacacctcccaccaggcctccccaacctccaacactgaggattacatttcaacttgagatttggaggagaaaaatatccaaactatctcaccgaggaaactgcagccatgatatggccaatggcacaggaaawttgtttttcctccagcattaccaatgataatttaccttgcaaatagaatgaccaagtgcaagttcctttccatagaaatcatttagcaagggaacagcacctgttcaagaatctgtgaatttctaagggaaaatttacatctttatttttttacatcttgaagatttagcattttctttaatcatgactgtagctctaaccgcagtaatattagaagcacctagtcattaatataaatcagatatttttatatcaccttacagtttattaacatattgtttacattaaagtgtattattta

SEQ ID NO: 443436 - DNA, 586 bp, Homo sapiens
aaccatgtctagttaagttatttcatcacatcaaaagtagtgtaaaatagctcttctgttgactggaaagctgagttcagtggttatgaatgtaccagacatcaaagagctccattatccacagactatatggaagcaggccagcagcattcaaagtttcccctctattgctctttcctttaagtggagtcagcacctactagactggagggaaggaagtgatttccataataatccattcctgcactctttaaccaaataggaaggatggtgaccagctgttctgtatctccaccaaaggcagataaaggggaaaaaatgtgttcattttataacaggaagacaccactgggtactggctagaaaaaagagaaaaagcttctaattctggcttttaccrctattaagttctacaattatggctaaattgtttagcttctcttgaagcatctctgaaagactagaactagtttcaataatctggaaagttcttcagggcacaaatcatatgcaattttaaatatttgattctatgtgttacctaaacttgaaacaagtgaatgaaaaatatccaaatatcaactcc

SEQ ID NO: 443437 - DNA, 628 bp, Homo sapiens
ggtactggctagaaaaaagagaaaaagcttctaattctggcttttaccgctattaagttctacaattatggctaaattgtttagcttctcttgaagcatctctgaaagactagaactagtttcaataatctggaaagttcttcagggcacaaatcatatgcaattttaaatatttgattctatgtgttacctaaacttgaaacaagtgaatgaaaaatatccaaatatcaactccaggaaaattttagtatagggaatacaaaccatgtcaaaatgtgccttgagagtgcaaaaaaaaaatactcaataaagtctaagtagattatcctgatgattacaagtgytcacatttttaatgtatgcttatctcagcttgggttccccagaagcaaatcctgggatgaggtttcgtacaaaagtgatttatcaggaagtgttccctggaaaaattggtgggaatatgagaaaatgggatgctgaagggaaagaaaaacaaaagtgtaatatcaagcaaaatgctataacataatcagttcaatcctccagagaaatagaattgagattcaggccatgtttgggaagaaaatgataggaaaatccaatagaggagtgatataaaataaaaact

SEQ ID NO: 443438 - DNA, 612 bp, Homo sapiens
gatagcaacccaagctccaattcattaaatatattctgatatttgattcttaatccagtatcttcttatttgttttatgtcttcaaaaagttgaaaagaatcccrttcttcatcttctcctcatctttactttaaaattcaacctccacctggacattgacatgaaaatgcccttccctagaaccctttaagaacagcataaacagtttgcctgaataacaaaaatagcaaatgagtaaggtaaggtggcaggtgaattctgagaggacgaaatgtaaggagaaattgacaacatctaagattggctaggatataaaaggattatagcatggagggaagagacatttgtgggaacattattttcagatggatgcagcaaaagtggggctgggtgattgttatggttactttgttgttggtttaataatgttgcggccaaatgtatacaaaaatggccattctatttttaacttgggaaacttacttattctcaaattattggtaccttcaccctgtaagatgggctaaagatatttaccttgaagggttttcgtaaaaactaatgtgcgcagagtgcttagcatacctaaaacattagataaatagtagctt

SEQ ID NO: 443439 - DNA, 319 bp, Homo sapiens
acagcaacatgaaggcagaaatttttatacattttttcactattatattcttattacataraatattgccttaattcatgaattcacaataaatatttcttgaataaataaataaataagtgaggttgtgaaacaaatatatcaaaaggaaaaataatttgttaatgtcaattaattatggagctattttatgatattcacaatatattttgacttaaataaaaacatttccaagtaaactagaaaaagattatatcttaaggactgatattacctatttcaaactgataaacaatacaaaaaggtagaaacagataaa

SEQ ID NO: 443440 - DNA, 566 bp, Homo sapiens
tatgtctgctaagacttgggtgcatggggttgctagacaattccattatgttcccagaagcacaatattgatccagattttttatattacccattcctattgcttcttctgacctgaagccagagatcactagttggttcataaggctaagcagggttagtctaaattgaagacaaaaactcaaaaataactgatgagactagaatctaataaaatgtataccatagtttttgaaacaatttttttcttcagtgttcaattttcttaaaaacaaatgatgataggactgatttgtttgcaaactaagctttagttttattacacttggctcgattatttgcataaagcacaacaaatgcaattatttgccatayaggctcctttttaaattgactttgatgtaacttcatttcataggaaatttcagataagagttttattaaagccttaagcccagccataggttggtgtcaccaagtacctgtgcgagttggataaatttttctcctcttgaggtcacaggataaattggggctcctggtcctgtcagaaagtgacattcttta

SEQ ID NO: 443441 - DNA, 543 bp, Homo sapiens
atttgcataaagcacaacaaatgcaattatttgccatataggctcctttttaaattgactttgatgtaacttcatttcataggaaatttcagataagagttttattaaagccttaagcccagccataggttggtgycaccaagtacctgtgcgagttggataaatttttctcctcttgaggtcacaggataaattggggctcctggtcctgtcagaaagtgacattctttatttaccacaagagctgtacagtgactgtgtagagaaggtaagagaggccagttttctcaaggggcttttattggctccatagataaattagattccttaaagaaaagcaggccattccagtcaaagtcttggtaaaatagtttctccaattgtgtcctgttgctaaagaaaaaagactcttagattacttatgcaaatagccatatggctataagttaataatactcaaaaatggtttcaaaattctggagaaattacgtagagagaaagaaatatgctccaaattttgtttataggattacactatagtca

SEQ ID NO: 443442 - DNA, 582 bp, Homo sapiens
atgaattaatatgtttcaattgcctagcattgaatctgatatacaaacttccttggatacaagtaactttataccttggcctgagaacgctgaatcaggcaaaatgaaagtttttgatgcaggaaagatttatacttatgtaattgcattttattccacccgctaatttctactttctaatcctagaagacttcccagttgaacatccattttagtttctctcatattcaattttaggatgcatttgtttagtcttagcttatttaacactttttttgagtaagaaggttttaattgcatatttgaattttaaatgagaccactgttccaagggtaatwaagaatatggcttgagtaggtaagactatttttttcttgccaatttctgtagcttggtggcagcaaaatgcatattttgatcagaagaaacatataaaagggtccttaattgataaagaatttccttgtccaaacctgtaagtgttggttacttctgttacagaatacattagctaaagtagaatagatatcaaaattgctttgtatcctctaagggtgctagccgctggtcaaatgagccag

SEQ ID NO: 443443 - DNA, 590 bp, Homo sapiens
aacccatagggcctaaaacctcaatgaacccaaatagtaagaaaaacaaagttaactataaaaggcatatcataagcaaattacataaaatccataaaagggaaaaaatacttaaaggaatcagagaaaaatacaactatggatagaggatcaaatataaagaaaatgaagatttcatgtcaaaacagtacaagctrtatgacagtaaagcaatgccttcaaagtactgaaatgaaaataactgccaaatgagaattatttaactagtgaaaatatcttcaaaatacaaagacaaaataaaacatttagaatacataaaaaagtatccgaaaaaaatcatcagaaaattaaagaaatgcttccggtagcagtaaaatgataaccatatagtaaattagaccctcacagaaaaagggcactaaaaattataaatatatgtgtaaatataaataatattttttgttattatttaaatttgtgttaaagattgtgactgtttaagcaaaaataataacaatgtattgcgaggcttgtaacatgtcaaatataaaagtcaaatacataaaaacaatatcatgtaagccaggaaa

SEQ ID NO: 443444 - DNA, 590 bp, Homo sapiens
aacccatagggcctaaaacctcaatgaacccaaatagtaagaaaaacaaagttaactataaaaggcatatcataagcaaattacataaaatccataaaagggaaaaaatacttaaaggaatcagagaaaaatacaactatggatagaggatcaaatataaagaaaatgaagatttcatgtcaaaacagtacaagctatatgacagtaaagcaatgccttcaaagtactgaaatgaaaataactgccaaatgagaattatttaactagtgaaaatatcttcaaaatacaaagacaaaataaaacatttagaatacataaaaaagtatccgaaaaaaatcatcagaaaattaaagaaatgcttccggtagcagtaaaatgataaccatatagtaaattagaccctcacagaaaaagggcactaaaaattataaatatatgtgtaaatataaataatattttttgttattatttaaatttgtgttaaagattgtgactgtttaagyaaaaataataacaatgtattgcgaggcttgtaacatgtcaaatataaaagtcaaatacataaaaacaatatcatgtaagccaggaaa

SEQ ID NO: 443445 - DNA, 581 bp, Homo sapiens
ttgttgttattgttgtttgttttccttttgccttttccagcttctagaggccttctgatttcttcagcttatggcttacttcctcctatacaaaacaaacacacacacaatgaaaacacccaaaaagtgtaaaccctgagaagaacaaaatgttttagttaaaaggactgtagaagactcaaataaataaaattgaaaacacaaaaggggacattacaactgataccattaaaatgaaaaaggattattagagagactattacaaacaactacatgacaacaaaatcgaaaacctagtggaaatggataaattcatagatacatacaaccyacttagattgaaccaagaagattgaacctgaacaattgcaagtaacaagattgaatctgtaataaaaaagactccaatcaaagaaaagtctaaggtctgatggctcgtctgcggaattctatcaaagaagtaatatcaattttcctcaaaactctttcagaaaattgaagaaaattcttctaaattcacttcataagaccaacagtatcctgatactaaaactagaccagaacataaaaacaaaagaaaa

SEQ ID NO: 443446 - DNA, 379 bp, Homo sapiens
ttttggtatgtgtatttgtgtgtgtttgtgtgtgtgcgtgtgtgtgtgtgtataccttggaataatctatatatggaatcatgtcatctgcaaatagacacttttactattttcttttcactttggataggtttttttttttyaactgggtaatagctctgactagaatttctactacaatggtaaatattaatagcatagcaaaagcaagcatccttgtcttgttcctaatgtcagaggcaaagctttcagacttttaccactgaacatgatgttagctaagagttttgcatacctgccctttttaggttcagggagtttccttctattcctagttatctgaatgttcttattgtgacaaaatattaaatttattatg

SEQ ID NO: 443447 - DNA, 507 bp, Homo sapiens
tcttctttcaactctttaccacattttattttagtatcactcttcttgcctgggcctcctaaggatcaatacattaatagcaaagctttcctttatatttttgtttctctgtttttgaacttacttgatcgargattatcactatacaacataattttaaatgatagatgctcaagatattattttggattttaattacaaacttgtttgaaagcaatatgggcatcattcctcttggtaactgagaaagtaattattcttggcaggaagtgacatagcatttttaaaagctttttttgtgattaactaagatagaaacacgtagactttaaggcattgagagggcaagcagccataacacttaatatgagtagcagtgataattatgaagactgtggactggattcacctgcttcaatgttatttagaccttgcagtaataaaatggtaagtttaggaaagtaaattttgatgtcagggtaccaaaaattatttttgatcctatgg

SEQ ID NO: 443448 - DNA, 507 bp, Homo sapiens
tcttctttcaactctttaccacattttattttagtatcactcttcttgcctgggcctcctaaggatcaatacattaatagcaaagctttcctttatatttttgtttctctgtttttgaacttacttgatcgaagattatcactatacaacataattttaaatgatagatgctcaagatattattttggattttaattacaaacttgtttgaaagcaatatgggcatcattcctcttggtaactgagaaagtaattattcttggcaggaagtgacatagcatttttaaaagctttttttgtgattaaytaagatagaaacacgtagactttaaggcattgagagggcaagcagccataacacttaatatgagtagcagtgataattatgaagactgtggactggattcacctgcttcaatgttatttagaccttgcagtaataaaatggtaagtttaggaaagtaaattttgatgtcagggtaccaaaaattatttttgatcctatgg

SEQ ID NO: 443449 - DNA, 640 bp, Homo sapiens
accaccgtgacacattatctttatgatagaaaataagaagagatactgtgctcctgaatgaattcaaaagttagagtcacaatcaaatattgaaagatacaaggtgrtattcgccattcaatttatctgtcaggcctcttgatagaacaactaggttatggtggaaatcagtggactactgtaaacataacaagaatatattctttatttcaactattctatatttttatatttactggtatggtatttactggtatgatattttatatttactggtatggtaacactgtgtctaggatttagtttgtgcccattcttttttttgcaacttacattaaagccaattcatctttgtatggtaaggacaacagtaaatttttaccatattgtctacattgctactgtattagctgtaattattctcttgctgttaattaaaatatatatacacacaaacatgtatgtacatgtgtgtgtatacacatacacatgcattttaagagacagaatcttgcccttttgcccaggcagaagtgccgtggcatgatcatagctcactgcacttccaactcctgagctcaaacgctcctctcaccctcagccccttgagtaactggaacttcaggcatgtaccaccaca

SEQ ID NO: 443450 - DNA, 575 bp, Homo sapiens
gtgttctggattttggccacttaataagtacatagtggtatcatattgttgtcttaatttgcagttgcttagtgacatatgatattgaataccttttcgtatgctacttagcatctatatattttctttggagatgtgtctgttcagtttatttgcctattttttgagttttcttattgttgagtttgagttatttatatattttggataaacctcctttaccagatacgtcttttgcaaataatttttcccagtctttggtttgtcttctcactcttttgacaatgtctttcacagagcagaagtttttaattttattgcttatcaatagtttattttatagattttgtctctcctgttgtagctaaaaagwcattgccataaccaaggtcatctaagttttctcctggcaaggaattttatagcttttccttttgcctttaggtctatggtatacattgagttaatttttctgaatggtgtaaattctgtgcctagactattatttttctcatgtagatgtccagttgttctagtactatttgctcaaaaattatatttgctttattgcattg

SEQ ID NO: 443451 - DNA, 589 bp, Homo sapiens
ctttggcatatagataatcttctctgccacaaacatccacgatctttagaaaaagattgctgaatttacaaaggtactgaattggaaagtcaaaagaagggctgcrtttcttgttgcgttgaaaatggtgtgtggaaagcagtcgtggtgctggaaataagaatttgaaaagcaaaagaggccgtggactcaatttcccctggcgtggagttggatactcacagcaatcttacctataaaagtatatagactgttaaaacctatcagaattagtatcgcatttgtacattggacctcaataaaaaattaacaaaaaatgtacgtatgctttatttaatcctcaaaagcatcctatgtgaaagccacaggttctcaggtttcacaaacttactcaaggtcacacagcacttacagtaacttagatttttttaaatggtaattaattttgtattgtattcatttttacttctataggacatgagcacagatacctccaggtaattgctgtcaaagaaagataagcaaactataaatcatgtgtataaagtactggcatctagaccttaacccaggaaagatggttctgggt

SEQ ID NO: 443452 - DNA, 589 bp, Homo sapiens
ctttggcatatagataatcttctctgccacaaacatccacgatctttagaaaaagattgctgaatttacaaaggtactgaattggaaagtcaaaagaagggctgcatttcttgttgcgttgaaaatggtgtgtggaaagcagtcgtggtgctggaaataagaatttgaaaagcaaaagaggccgtggactcaatttcccctggcgtggagttggatactcacagcaatcttacctataaaagtatatagactgttaaaacctatcagaattagtatcgcatttgtacattggacctcaataaaaaattaacaaaaaatgtacgtatgctttatttaatcctcaaaagcatcctatgtgaaagccacaggttctcaggtttcacaaacttactcaaggtcacacagcacttacagtaacttagatttttttaaatggtaattaattttgtattgtattcatttttacttctataggacatgagcacagatacctccaggtaattgctgtcaragaaagataagcaaactataaatcatgtgtataaagtactggcatctagaccttaacccaggaaagatggttctgggt

SEQ ID NO: 443453 - DNA, 511 bp, Homo sapiens
gaatttattattggttataatttttttctatcctgtatatattttattgtccctgtgtaaattaatcaaaattgccagttattgattgaatgcttatcttacgtaagtaattccactacataagcactcacagtgttgttagggttgggaagtgggggaaaataaacgcattaaaacatgagtgacaagaagaagttcaaagcaatagatgaaatttcatgaggcagctcctgtgtcagtgcctgaggaatccttcccatgttcttactagcagtgcagaggagaaagtgaacatttcaacctgagagattacagaagaatttgttaatcatttttggttttacttattttaaatatttacttttttggaagtataatttatatacccaaagatgcactgatattaagttttcagttctatgagttttgacaattgyatacacccatggaaacataaccaaaattaaatatcaaatatttccatctcctcagaaaggtagctctttctagc

SEQ ID NO: 443454 - DNA, 633 bp, Homo sapiens
gctgagggtgaatgaaaagttgcccatgaacatgagaatatagggtgttagagatgaagatgtaagttataatgatattaacaaagccacagatgactctccttttcctaatcttctgggcagtagaaatatgccaatgcttataaatggagataaaggaaattacatgagtctggatctcacatagagagctcgattatatgtggcaaaagtgtgcccacggggtctttaaagtaagagtaattgacagtgatttatccagaaatccagaagacgatgaagccagagagataatccatatagtagtttaccaaaaggctatagctggaaaggttccaaggatcagatctgagaaatatgactagactacaaatgggatatcaactacaatttgggatataaaatgtgtggtggatcagggcaagtggttaacatgtgccagtcactatgctaaacaccttaaatacattatttcacttaattctgaaaatggtagtagaaatgtcacaygtaactaggaaaatagaggtttagagaagtagagagagctagtcaatgtcacatgaccagttcgtggtggagctaggagtcacatgcaggcagttgaccccatgattcataattttaactact

SEQ ID NO: 443455 - DNA, 578 bp, Homo sapiens
agtggctatcttattggacaacacagatatagaacatttctatcattgcacaaagttctattggcagtaattcccattagtactagatgccagggtggaaattatcctgttatttttctgggtttgaaaggatagatctgggttttattaaggaggccaagtggcatttcaggaactgtggcaggtgcctcctcaccagatcctaccccaaaactcaggtctctgcattctgttggaggcccaggaaggaactaattaccatgcaaatgttgttgtttggccagtgtgagagtttctaatggcaatgacaggacaagctagttttcctctgaagatattcctgctctaccaattcactctttgctagataacagacatttgtggcagrataatttaccaagcagtttttgctctgcctacctcttaccagaggaaacaaaaagaaagatgaaaaaataactttgtccttacctttccaaaagttcccagcttctggtatttctctcaggggttaacagcttttgtgcaacctggcccagcacagaggctgctagatatctgttgtccaacatcatcag

SEQ ID NO: 443456 - DNA, 446 bp, Homo sapiens
tttccaaaagttcccagcttctggtatttctctcaggggttaacagcttttgtgcaacctggcccagcacagaggctgctagatatctgttgtccaacatcatcagggctcattaatcaaagggaatttasctgtgtacttcttagggggaggatagagggactgggttgaaagagggggttgcccaaatgtagcaatgactcctaaaatttaagaaaagggatgtggtgatgggttccataaggggctgggacctttgtggaagtcccagtaaggcagtaggacttatgacagagggtgctgctgtgctttcagaggtggggagtggctaaacatccagcatcatagtcttgggactggcagcaaaagatgccatggcccacattggcagaggctgtgtcatcagctgcctttgaatggaccatcttctcatatatatagtgtgt

SEQ ID NO: 443457 - DNA, 446 bp, Homo sapiens
tttccaaaagttcccagcttctggtatttctctcaggggttaacagcttttgtgcaacctggcccagcacagaggctgctagatatctgttgtccaacatcatcagggctcattaatcaaagggaatttagctgtgtayttcttagggggaggatagagggactgggttgaaagagggggttgcccaaatgtagcaatgactcctaaaatttaagaaaagggatgtggtgatgggttccataaggggctgggacctttgtggaagtcccagtaaggcagtaggacttatgacagagggtgctgctgtgctttcagaggtggggagtggctaaacatccagcatcatagtcttgggactggcagcaaaagatgccatggcccacattggcagaggctgtgtcatcagctgcctttgaatggaccatcttctcatatatatagtgtgt

SEQ ID NO: 443458 - DNA, 446 bp, Homo sapiens
tttccaaaagttcccagcttctggtatttctctcaggggttaacagcttttgtgcaacctggcccagcacagaggctgctagatatctgttgtccaacatcatcagggctcattaatcaaagggaatttagctgtgtacttcttagggggaggatagagggactgggttgaaagagggggttgcccaaatgtagcaatgactcctraaatttaagaaaagggatgtggtgatgggttccataaggggctgggacctttgtggaagtcccagtaaggcagtaggacttatgacagagggtgctgctgtgctttcagaggtggggagtggctaaacatccagcatcatagtcttgggactggcagcaaaagatgccatggcccacattggcagaggctgtgtcatcagctgcctttgaatggaccatcttctcatatatatagtgtgt

SEQ ID NO: 443459 - DNA, 446 bp, Homo sapiens
tttccaaaagttcccagcttctggtatttctctcaggggttaacagcttttgtgcaacctggcccagcacagaggctgctagatatctgttgtccaacatcatcagggctcattaatcaaagggaatttagctgtgtacttcttagggggaggatagagggactgggttgaaagagggggttgcccaaatgtagcaatgactcctaaaatttaagaaaagggatgtggtgatgggttccataaggggctgggacctttgtggaagtcccartaaggcagtaggacttatgacagagggtgctgctgtgctttcagaggtggggagtggctaaacatccagcatcatagtcttgggactggcagcaaaagatgccatggcccacattggcagaggctgtgtcatcagctgcctttgaatggaccatcttctcatatatatagtgtgt

SEQ ID NO: 443460 - DNA, 603 bp, Homo sapiens
ctttcaggtgagggaggcccaattctaaatcctccctaagsctgccattttctcctcagtcaccttctatcagaaattgattctttccctgaattgtcaagctccttagaggaaaccttcaacagatcaagaaaataagatggttgtaaaaaatgtagtctctgccctggatcatcctcaatctgcccgctcacctacgagagaggaagaatagaaacccctggaatgggccctctctgaaagtgtctgtgtttggacactctctctctcagactggggagagggaacagacttttcaggtcccatcacggttgacaaaacacagcacagcgggacaatgtgctgtgggagcaataaaggcagttcagagctgcctacgagtcaagcaggaaatgagtccaggaatgacagtgagagttatgcccccaggagacactggcagtagagtggcaatgttcccagaggataaggatgtgagagatgaaattaagaattcactcaagggtcaaagggtcaagggagatagtcaagactgagtagttcccagctctgcaatcatgatcaagagacatcctgagaactagggaatcaggaaactcccaa

SEQ ID NO: 443461 - DNA, 543 bp, Homo sapiens
atctcgcagaagggctctgctctgcctagtaattcccaattctttcacttatctgaaattcaaaggttcacctttctttgtctaatttagagcaagaataaactggttataaaaagtcacataaatccaaatgccaataaagatggaataactacacattttttacaaagatagctaaggatcaaaggaaggaaaatttttctgtgatttaaaaacttatatagactgaccaagaatatgcagtgaaatttctaaaaagataggtaagcttactgagcagacctttccttcacaataatagagctaagtttatattttacaaataaatgtattatatggaaaatattcatrgtgattatgaatttatgttatatagttctggtgttggagtatgatttagataaaaaaaatttcctttcctttatttacatggtttaaaaacacaaacaacataataaaaaaagacttcctccaatcctgtctctatccactctataaatatttgtattagtttcttgtgcatctttcccaagcaaatcaaac

SEQ ID NO: 443462 - DNA, 620 bp, Homo sapiens
aaccatttatactaatagacagggccattagtagctattagcactaagggcaaatgtgttgattatttcattggttctttcattcctttatacaacagaatctgctgaagtctctatgtagacagccattattacctaagtctttgggacacaaaaagtctaactggcttyaatagagtggtatgatgataagggtgtggaaaaaattactggaaaacacatcagtttgcttagtgatataataaaaacatcaaaactccccctgtgagaagcatcaaagcaattttaccctccttgataattttgcccttccatttgctttgcatcatgtggcttcagttgtaactcaagcatagctatcacgattttgctcagaacaaattcttaacttattttatgtactttctttggatccaaagaaatagattctgaagtatgttacaatcaaccactctctaatagcatttcctgattataaagcaatggctatgactagaaagcgggcttcttttcaaaaaatgatggtttgtattttcatacattgacttctggaaaaataaaatataaatcaattaagatactcatttacctcaaggcaagatagtaatttatgtcctacc

SEQ ID NO: 443463 - DNA, 620 bp, Homo sapiens
aaccatttatactaatagacagggccattagtagctattagcactaagggcaaatgtgttgattatttcattggttctttcattcctttatacaacagaatctgctgaagtctctatgtagacagccattattacctaagtctttgggacacaaaaagtctaactggcttcaatagagyggtatgatgataagggtgtggaaaaaattactggaaaacacatcagtttgcttagtgatataataaaaacatcaaaactccccctgtgagaagcatcaaagcaattttaccctccttgataattttgcccttccatttgctttgcatcatgtggcttcagttgtaactcaagcatagctatcacgattttgctcagaacaaattcttaacttattttatgtactttctttggatccaaagaaatagattctgaagtatgttacaatcaaccactctctaatagcatttcctgattataaagcaatggctatgactagaaagcgggcttcttttcaaaaaatgatggtttgtattttcatacattgacttctggaaaaataaaatataaatcaattaagatactcatttacctcaaggcaagatagtaatttatgtcctacc

SEQ ID NO: 443464 - DNA, 599 bp, Homo sapiens
ctccaggctgtaagattctctgcaaaggatcacatcagaccaatggatgcgattctcctgttcaatgaaaggagcattaccaattcatgagtggtgctagtaatttccctgttctaatggggcaaggccttacagcaaggtcgacattccagaagggagaacttaaatgatacaaccatgaatacccaggaacctgctttatgccccagttgttcccctaccatccatcaatctaaaggggcccatgatatcgttgggaaacaacaatcaatatcctaagattttccttattccscataatataagaaaactctttcttaaaacaagtaaacaaatcttcatcaattgatgaacattatgtataatttcccaaaattcttaaaaatatttttgttttgagaaaaggtcttgttgtcatccaggctgtagtacagtgacacaatcacagcttacggtagctttgacctccggggctcaagcaatcctcccacctcagcttccagagtacctgggactacaggtaagtgccaccacacccagcgaatttttaaattttttagttttttggtagagatggagtctccctatgttacctaggc

SEQ ID NO: 443465 - DNA, 516 bp, Homo sapiens
gacttgaaagtttataatgtgttttagatatttattttgattatgcaagtatttcatgttcatcataaaaattagaaaatataaaaaagtaaaagcagaaactatcacccrtaatgctaccaaatgatgactgcagttacttagtgtttgttcttttaaatcttcttcctctaaatttccatgcctccatgtatacacaacatatttattcttttcaaatttaatttatcatatacattattttataacctgattgtttcactttgcaatatgtcatgaacatatatctatatattttactatagatttatagaataccttataatgcctttgtaatattccattttatggatgtatcttaatcttcttaaactacattcctatgtcaagcagttaatgtttttttaatgttgtacattataaaccaagctctgataaaaatcaaaaaagttagaatagtttgtcaataaccccaggatatctgatttcagagaatggaacacagcatgaagtaca

SEQ ID NO: 443466 - DNA, 617 bp, Homo sapiens
catagcaaacctacgtactgttgactataatcagaaacaaatttatatactcagatgctttcattagaaaaatgataaaagaaattacttaattctccagtttagaccaaaagactttaaagatttaggaaaagaacaaaaggttgacctgagaaaatatttaaaagataataataaaagatacaaaaatttatttaatgtaaaataggaaaataatttacaggtttaatgagaaaaaataattatactaacataaatggaaaaatctattcttaagatttaatttgcattcctaataatgatactactaaaatatggaatagaaagacattttctcaacatcaaaaaatgtatattcagaggaaaatgactaacattataaatatgatttagtactaatgttattcctaataaaataagaaataagatgtgttccctatatcttttgtaggcaatattgctttgacaatctgattaacaaggcatgaarcaaaattgaaaatcatgcatttttataattgttctgtatttctaatttattaatttttgattgacaaatcacaattttgtgtgtttatggggtacaatgtaattttttggtctataaaaaagcaaga

SEQ ID NO: 443467 - DNA, 617 bp, Homo sapiens
catagcaaacctacgtactgttgactataatcagaaacaaatttatatactcagatgctttcattagaaaaatgataaaagaaattacttaattctccagtttagaccaaaagactttaaagatttaggaaaagaacaaaaggttgacctgagaaaatatttaaaagataataataaaagatacaaaaatttatttaatgtaaaataggaaaataatttacaggtttaatgagaaaaaataattatactaacataaatggaaaaatctattcttaagatttaatttgcattcctaataatgatactactaaaatatggaatagaaagacattttctcaacatcaaaaaatgtatattcagaggaaaatgactaacattataaatatgatttagtactaatgttattcctaataaaataagaaataagatgtgttccctatatcttttgtaggcaatattgctttgacaatctgattaacaaggcatgaaacaaaattgaaaatcatgcatttttataattgttctrtatttctaatttattaatttttgattgacaaatcacaattttgtgtgtttatggggtacaatgtaattttttggtctataaaaaagcaaga

SEQ ID NO: 443468 - DNA, 600 bp, Homo sapiens
aagtgtttaggatggtgcatgatttttttcaaagtacagtaagtcctcatttaacatcatatataggttcttggaatctatgacttcaaccaaaatgatgtataacaaagccatttttattcctcatcagtgttataacaaaagagttgaacaaaaggacattgtttgtggayctgctgtacatcatttcacttgaagtcccagtttctaagaaactactgatgaagtgaggttcctagaacctattgatgacattaataggttaactatttaataagtcctctcttaataagtaattcagtaaatgaatgcagtaaatgtattgacatcagaaattattttctcaggagccatatcacttactgtattcatgatagcttattattttactgaatttttatttcttatttaactaccattctctgccataacactgtgagctttgttaaacacagactatatccctcctatttgttcattgttgtttccccaggatctagaaaatattgggcacataataggtaaatgagtgaaagaatgaatacttaagactctattttcctgttaagagagagctcttgcttttattggaactgtacc

SEQ ID NO: 443469 - DNA, 637 bp, Homo sapiens
gagcttatatgacttaatttagtcttttattcaacagatatttattgactgtctgctatgtgcatygcgttaggtggtagggatatgacgtttaatttcattggaaaaataatgcctaatttcttaaagcttttaccgggttagtgaattattcataaactgacgtgcattagcagttatacccattgatagcattgtcactattcacttataatctgatatgaaaatggaatgaagttacagctggcagaccagaacttgtgtttaactctgaacatacctataggaaagcatgatatttagagcaaaaacataaacagcttaagaatggggttttgtaaaatatttacctttggttctaatttgtgtctgtgtcactagatgatagactggttctggtgaaaaaaaatagactaaataaaatactttgataaaaacagctgcattttacctgtttttctaattcttatcagcaagtttgatactctgaggtatgacaagcttttttttttttgaggcttaagttttgtcagcatatagtaaattaaaagactatttggatgatgctacttaaattttcaggctacagtattcttcccactgtgaatacagtgtattgtttaggctgctacatgtt

SEQ ID NO: 443470 - DNA, 599 bp, Homo sapiens
tatatttgaaaggcctatagttgtttgcacttctaaagaatattatggtagagttgtcacagctggagcttatatgacttaatttagtcttttattcaacagatatttattgactgtctgctatgtgcattgcgttaggtggtagggatatgacgtttaatttcattggaaaaataatgcctaatttcttaaagcttttaccgggttagtgaattattcataaactgacgtgcattagcagttatacccattgatagcattgtcactattcacttataatctgatatgaaaatggaatgaagttacagctggcagaccagaacttgtgtttaactctgaacatacmtataggaaagcatgatatttagagcaaaaacataaacagcttaagaatggggttttgtaaaatatttacctttggttctaatttgtgtctgtgtcactagatgatagactggttctggtgaaaaaaaatagactaaataaaatactttgataaaaacagctgcattttacctgtttttctaattcttatcagcaagtttgatactctgaggtatgacaagcttttttttttttgaggcttaagttttgtcagc

SEQ ID NO: 443471 - DNA, 585 bp, Homo sapiens
gggctccagacacccaatgtgcttcttgcttcccatactttatatcaagctccttcggtaagcctgaaataaccatacctctcttttttatcctttgaaatcctttatggttgagaccaaatatcactcctccctctatgtgtcatggtcaaaaaagtttttgcaacattctaattgatgcacacgtcagtccttctctgtgttccccggtcaattttctggtcctttcttcatggaaattacttagcagattttaagattcttggtgagaggatycttatgttcttcatctatgtattatcatcaatgtacctaacaattttcaataaaattctctcaaacaaatgaagagaaatacacaagaagtcatcttaattttttaacctgtggtctgcagatctattttgtgagtacccatgaaaatggtggctgccttgtttatgctggaaaatgttagccatggggcaatgaggacaatgaacataggaggcattggagtccaggaacctgaagtcacaccctgtcaatgggatcatataagatacttcaactttttgagcctcagttttctcaaatacaaaatgg

SEQ ID NO: 443472 - DNA, 618 bp, Homo sapiens
catttaacatcatatataggttcttggaatctatgacttcaaccaaaatgatgtataacaaagccatttttattcctcatcagtgttataacaaaagagttgaacaaaaggacattgtttgtggatctgctgtacatcatttcacttgaagtcccagtttctaagaaactactgatgaagtgaggttcctagaacctattgatgacattaataggttaactatttaataagtcctctcttaataagtaattcagtaaatgaatgcagtaaatgtattgacatcagaaattattttctcaggagccatatcacttactgtattcatgatagcttattattttactgaatttttatttcttatttaactaccattctctgccataacactgtgagctttgttaaacacagactatatccctcytatttgttcattgttgtttccccaggatctagaaaatattgggcacataataggtaaatgagtgaaagaatgaatacttaagactctattttcctgttaagagagagctcttgcttttattggaactgtacccattcctcgtaatctacaagttatcacagaagcagcctatgttcaatgtagctacctccctgact

SEQ ID NO: 443473 - DNA, 346 bp, Homo sapiens
tccagactgctcaaatgaatggggattctgtctggggttaccaaattccacttaatgccaatgcttttgtagctcatttaagcagactcagttatttgagttatcttacagcaggaactagacaaacaggttaaggtccagacaggwtaaatatcttactctggaaatccaagtccaaattggggattagccctcaacttaatagttattacacccattactcagggttttgaatcacattgcttccacagaacttcgttccaaggaaggaagactggggatgtatttgtcaagtggtaaatcaactacttctatttaaaattctcaaagacctctggagcaaagc

SEQ ID NO: 443474 - DNA, 472 bp, Homo sapiens
aaaacaagtgcaaaaggatggtgtacagcactggcgtattaacagagtaaaaggtttaacaaatcattgcccatatcctgtaatcaagcacatagaatatgacctagttatctataaaaagcatgataactggatcaagataaaggaacaatatttatagcctttccaacacaaatgtagaatataagtgtattagaagaacactaataaatyaaacatagagttatatgattcaaggttagcaggattaagaaaattacaaactaggctaggaaaatcctctatgaaattcagttctctctcttgggtatctgacctagccagtagggctgggatagcacattcatgttttttaatgcttcagttctatatattttgagaatctccaggcacctagcacaaacctttgaaggttcccttgtccccaggcttatcagcacttgcaaatagatgcctgagggccttaatccaa

SEQ ID NO: 443475 - DNA, 588 bp, Homo sapiens
tgaccttgtagaacaaaaattaaattcataaaattggctttggcttcaacttggaagccaagcccgtatttatgaaagttccccattttcctagaaatattctattgtgcttactctctggaagttttcagaaggcaatataatttggctaataaaaactgagaaattattactatagagaaaaaatgatcactgtcttttaataatacattgtkatataacctagctttaattgtgggacttttcatttctgatttttaagaacctgtccaatagagaacacagagcagcaacatctaacaacagaaatcaacccgtgagggtctgaaaactgggggcgctgtggctgtgttcatgtatttccattgagggggtatgattgtcatgctaatgtatacgaaataatgtatattaattaaactgtatttccccacattaataaaatttgctgttacaaatttaacactgtaaatacatcagcttataaaatgatatgaaatataacaccattatgtagaggcaagaatagacaattgtaatttatgttactgaaatgttttaataaaatagacacaccttgaagaatgc

SEQ ID NO: 443476 - DNA, 588 bp, Homo sapiens
tgaccttgtagaacaaaaattaaattcataaaattggctttggcttcaacttggaagccaagcccgtatttatgaaagttccccattttcctagaaatattctattgtgcttactctctggaagttttcagaaggcaatataatttggctaataaaaactgagaaattattactatagagaaaaaatgatcactgtcttttaataatacattgtgmtataacctagctttaattgtgggacttttcatttctgatttttaagaacctgtccaatagagaacacagagcagcaacatctaacaacagaaatcaacccgtgagggtctgaaaactgggggcgctgtggctgtgttcatgtatttccattgagggggtatgattgtcatgctaatgtatacgaaataatgtatattaattaaactgtatttccccacattaataaaatttgctgttacaaatttaacactgtaaatacatcagcttataaaatgatatgaaatataacaccattatgtagaggcaagaatagacaattgtaatttatgttactgaaatgttttaataaaatagacacaccttgaagaatgc

SEQ ID NO: 443477 - DNA, 578 bp, Homo sapiens
tacaaatttaacactgtaaatacatcagcttataaaatgatatgaaatataacaccattatgtagaggcaagaatagacaattgtaatttatgttactgaaatgttttaataaaatagacacaccttgaagaatgccagttagatattaattggtatgcaattaagcactttctggggggacagactctcaaaaagaataaataacctgtatcatggaacaataattggagttctctctactccattgcttcagcctaatgctggcaagagagactctttggcccactgctggcactcagggctgaagaggtggttgaggcttcyggaaaaggaagattattagaatgattgtgcaagtctcttatggcttttgaatacctcacccatgtttgactcatcaatgcattttggtcacaccaatgataaatttagtggtttagtcatgataaaaagacaggtgcaacgttatcttttggaagaaagaacaatgagacccatataatttcaatcttggatgaaaatcaccagttgctaaaataaacaaaatgttttcagacctggttctcatctcctttta

SEQ ID NO: 443478 - DNA, 553 bp, Homo sapiens
ggcaattgtgttcttaagaatttcactaggtaattctgatcctaagtaaggattaagacccattggtaggccaggtgctgtggctcacacctgtaatcccagcactttgggaggccaaagtgggyggttcacctgagttcgagaccagcctggccaacatggtgaaacccctactaaaattcaaaaattaaaaatactaaaaatacaaaaattaactgggcatggtggcacacacctgtaatcccagctacttgggatgctgaggcaggagaatcgcttgaacctgggaggcagaggttgcggtgagctgagattgtgacactatactctagcctggacaacagagcaagactctgtcaaacgagaaaaacaaaacaaaacaaaacaagaacaacccactggtaaaagaatgagagtggtcttctctttcttaaagttgcatttttccagcctggtaaatatgggacttccattcagacatggagtcacagcccatgccattgtaaatagtacaaacacagttggccatattgagagttgagattagatggaa

SEQ ID NO: 443479 - DNA, 590 bp, Homo sapiens
cactggttcctgcagtggtttttgcttgtgagtgtcggctccagtaaattgaaatcatgtcatatctgccwgtctgtctgtccaattttgggagcagcagttttccttctaacctcatttatctgatgatatcagaagagttgctcatttttcagtttgttcagcttttcacttgtcatcatttatttcttgatgtgtttcatgagttttgtttgaggcttattggtgattagactcaaattatacatctctaattacagtatcatagaagtgatgctgtgttcttcccaatgcatcctatcctgccatgtggcaaacaatttaaatctgtccctttaccaacaatgttcactttgatcatttaattaagaaaatgtcttccagacttctccagtgcagttattcttttcctctttgaaattgatggaaatttggcgggaggtattttgaaactaggtaaatactccattcctcatcaaattttcaatttattcatttatttaattatacctataaaaattcatagcttcctattttatttattaagaaatactctctttatttattttgatgctcaaattgaccccagt

SEQ ID NO: 443480 - DNA, 590 bp, Homo sapiens
cactggttcctgcagtggtttttgcttgtgagtgtcggctccagtaaattgaaatcatgtcatatctgcctgtctgtctstccaattttgggagcagcagttttccttctaacctcatttatctgatgatatcagaagagttgctcatttttcagtttgttcagcttttcacttgtcatcatttatttcttgatgtgtttcatgagttttgtttgaggcttattggtgattagactcaaattatacatctctaattacagtatcatagaagtgatgctgtgttcttcccaatgcatcctatcctgccatgtggcaaacaatttaaatctgtccctttaccaacaatgttcactttgatcatttaattaagaaaatgtcttccagacttctccagtgcagttattcttttcctctttgaaattgatggaaatttggcgggaggtattttgaaactaggtaaatactccattcctcatcaaattttcaatttattcatttatttaattatacctataaaaattcatagcttcctattttatttattaagaaatactctctttatttattttgatgctcaaattgaccccagt

SEQ ID NO: 443481 - DNA, 590 bp, Homo sapiens
cactggttcctgcagtggtttttgcttgtgagtgtcggctccagtaaattgaaatcatgtcatatctgcctgtctgtctgtccaattttgggagcagcagttttccttctaacctcatttatctgatgatatcagaagagttgctcatttttcagtttgttcagcttttcacttgtcatcatttatttcttgatgtgtttcatgagttttgtttgaggcttattggtgattagactcaaattatacatctctaattacagtatcatagaagtgatgctgtgttcttcccaaygcatcctatcctgccatgtggcaaacaatttaaatctgtccctttaccaacaatgttcactttgatcatttaattaagaaaatgtcttccagacttctccagtgcagttattcttttcctctttgaaattgatggaaatttggcgggaggtattttgaaactaggtaaatactccattcctcatcaaattttcaatttattcatttatttaattatacctataaaaattcatagcttcctattttatttattaagaaatactctctttatttattttgatgctcaaattgaccccagt

SEQ ID NO: 443482 - DNA, 590 bp, Homo sapiens
cactggttcctgcagtggtttttgcttgtgagtgtcggctccagtaaattgaaatcatgtcatatctgcctgtctgtctgtccaattttgggagcagcagttttccttctaacctcatttatctgatgatatcagaagagttgctcatttttcagtttgttcagcttttcacttgtcatcatttatttcttgatgtgtttcatgagttttgtttgaggcttattggtgattagactcaaattatacatctctaattacagtatcatagaagtgatgctgtgttcttcccaatgcatcctatcctgccatgtggcaaacaatttaaatctgtccctttaccaacaatgttcactttgatcatttaattaagaaaatgtcttccagacttctccagtgcagttattcttttcctctttgaaattgatggaaatttggcgggaggtattttgaaactaggtaaatactcyattcctcatcaaattttcaatttattcatttatttaattatacctataaaaattcatagcttcctattttatttattaagaaatactctctttatttattttgatgctcaaattgaccccagt

SEQ ID NO: 443483 - DNA, 571 bp, Homo sapiens
tcattataaattattgatattctttgaatactacctcagaggacaagcacaacctgggacagtgttgggaagcctagtactaagaaaagacaaggagttgagatttatttttaaaacatgatatctaataaagaatgataatttcagaaaggactcctatattcttggcctgatcttttcacattttaagaacctcagaaaatcatacactttaataacttgttttcaccctaggttccactactaataactagatttaattcttctctgtaagattcgttgtattattcatcagaaatttcttcagaaaaataaatgattatttttaagtatattttaactttaataagtttatagtcatggatgtagactacttagaaagcacaaaaaatggataaattatttgtttgagagtttcctacgaatttttttcctcttcgattctggttcatttatactttttggtgtggtcttatggtgacattgcccggatctaagcatcctcacataaaaatcaaccaaggttaaagctgaagaaagtgacyttccattaaatcattgctttttattt

SEQ ID NO: 443484 - DNA, 532 bp, Homo sapiens
catatttttcagtggtggtttgcagtatgatttgcacactgtttttggaatcatcccatccgtcttgccacttctgggcgtcacagtgccttacagataattggagtctacagaccctgtacctcctttcttcaatgaaggctagggctctggaagtctccaagggtatctctctagcacccaagttcaatgtgaagcttccaaactgatccagaccagtgactaccagcgtcaatctgaatcatcttcagggacagggattttgccactttacctcctgctggataggatttttatgcctgacactattttgtactacagaaaaaacctcctgacttcacccagtctccagaggtacctgagattrgcaatacatatttgggatcacaggcctctctgaaaatcatcctgcctcatataaagttgtgcataccatttctagggtttccaatggccacaaacccagctagatggtggatagagaggaaaaatagcaaagcaatcaggcagctcaagatcatttggaaggtgc

SEQ ID NO: 443485 - DNA, 608 bp, Homo sapiens
ttcaactctagggatacagtggtaagcacaaccaacagtctcttgcctttgggcatctgcaaatcaatataaaatatagaaaataaataattgcattcatgcaaaatgctgtaaaagagaagttacagtgttgccagagtacattacaaagttacccaaccttttctacagaggaaagcttcccataggtagtggtatctattcgcaacacagaaatgaggagtagcattaacattagctagataaaggtgcttgggaggatggccaggggagagcctatttcattcaaaacaccaacaagagtyatgagagaagaccgaatgctaaaggaaccaagagaactccagcatagctagagcaagggagtattacgagtggtgccagacaaaggtaaagtggtggtaaaggccagaatgtgcaaagtactaaaggtcagtataaaggcttttaaatttcattctaaggtaaataaaaaccattggaagatttcaagcataatatattttatcttttaaaaatagcattctgacttctgtgtagagagtagactagggaggttaaagtggccatgaaaaagtgagttaacctattggagtgtcagcagtgta

SEQ ID NO: 443486 - DNA, 608 bp, Homo sapiens
ttcaactctagggatacagtggtaagcacaaccaacagtctcttgcctttgggcatctgcaaatcaatataaaatatagaaaataaataattgcattcatgcaaaatgctgtaaaagagaagttacagtgttgccagagtacattacaaagttacccaaccttttctacagaggaaagcttcccataggtagtggtatctattcgcaacacagaaatgaggagtagcattaacattagctagataaaggtgcttgggaggatggccaggggagagcctatttcattcaaaacaccaacaagagttatgagagaagaccgaatgctaaaggaaccaagagaactccagcatagctagagcaagggagtattacgagtggtgccagacaaaggtaaagtggtggtaaaggccagaatgtgcaaagtactaaaggtcagtataaaggcttttaaatttcattctaaggtaaataaaaaccattggaagatttcaagcataatatatyttatcttttaaaaatagcattctgacttctgtgtagagagtagactagggaggttaaagtggccatgaaaaagtgagttaacctattggagtgtcagcagtgta

SEQ ID NO: 443487 - DNA, 516 bp, Homo sapiens
ttgacatcttttgcttaaagctaatgttttatttaactgatgcacgctttctgctactagttgctgttagccatcaaaaggaggcttggcaattttaaaacagagagagggagagagagatgaattattcttttttatttgctcatttcctgataattctcgctaattttaatgggttttgatgtgcaaaaatgatctcctgagaacagttcmatcattgcagagcacattaaaataacaaggcattatgccatcttgagtccctaagagaggcaggtttggcagggcaaaagtgcaagaaagacctgcccattacagtgagactttactggagatgtgtgcatgtgaacttcactcaggctcaggcagctgaagggaaggagatgaaatctcaataccagacctggcaggccaggttgacatgagggccatctggttcctctcaagaatgtcaggtagcagaatgagcagagagtgagagcgcattgctgagttctggttcattgtgaactgatt

SEQ ID NO: 443488 - DNA, 516 bp, Homo sapiens
ttgacatcttttgcttaaagctaatgttttatttaactgatgcacgctttctgctactagttgctgttagccatcaaaaggaggcttggcaattttaaaacagagagagggagagagagatgaattattcttttttatttgctcatttcctgataattctcgctaattttaatgggttttgatgtgcaaaaatgatctcctgagaacagttcaatcattgcagagcacattaaaataacaaggcattatgccatcttgagtccctaagagaggcaggtttggcagggcaaaagygcaagaaagacctgcccattacagtgagactttactggagatgtgtgcatgtgaacttcactcaggctcaggcagctgaagggaaggagatgaaatctcaataccagacctggcaggccaggttgacatgagggccatctggttcctctcaagaatgtcaggtagcagaatgagcagagagtgagagcgcattgctgagttctggttcattgtgaactgatt

SEQ ID NO: 443489 - DNA, 516 bp, Homo sapiens
ttgacatcttttgcttaaagctaatgttttatttaactgatgcacgctttctgctactagttgctgttagccatcaaaaggaggcttggcaattttaaaacagagagagggagagagagatgaattattcttttttatttgctcatttcctgataattctcgctaattttaatgggttttgatgtgcaaaaatgatctcctgagaacagttcaatcattgcagagcacattaaaataacaaggcattatgccatcttgagtccctaagagaggcaggtttggcagggcaaaagtgcaagaaagacctgcccattacagtgagaytttactggagatgtgtgcatgtgaacttcactcaggctcaggcagctgaagggaaggagatgaaatctcaataccagacctggcaggccaggttgacatgagggccatctggttcctctcaagaatgtcaggtagcagaatgagcagagagtgagagcgcattgctgagttctggttcattgtgaactgatt

SEQ ID NO: 443490 - DNA, 625 bp, Homo sapiens
ccaaaacaaatgaactcattcatttaaaaacattatcagcatctccctgaaaattatcaacatctcatatactatatcaatatattttgggaaccattttatgggaatattcttaatagagttttaatgcatttaatgcatgctctttttttcagttgtccaaagagaagtgtgccttttgcaatagatcaatatttctctaagcctgcttcccacaccaactaatatcagattcactaaagtttattaagaataggcttctagctcctactcccaaccagattaatcatagttttggggaactaacccaggtatcttcattttcaaccagcatctaagatttggctagtaagttgtgagaatcaacagattttaccttttttgatatgatacagatgcaggcagaaatatgtaaatagagttataatcaccccacatcttgttttttcagttatcataaattaccacaaaaattttrttcatatgaaaagatgacctaatgaatgataagtaacttggaatttaaagaaaatgggcacacactcattcatgcatgtaagtagaggaggcacattggagtagaagaatttcttttctagattaatggttgtaaatgtccccaatc

SEQ ID NO: 443491 - DNA, 570 bp, Homo sapiens
aaggcaacattgtcctttgaaaaataacttgagaagtgagaacaattttgtttctgctacttatttttacctctgattgctaaataatctaacaactagccattgttctccttgtgtttgttttctattgtaaatttggtagacttaattacgggtgataatagtagcatttttgaggaatgacaatctgttgtgcattttcatgcataattataaaagcactcttgacaaacgaattgatcgcctaaacaaaatagacatgggtgtaaatgcaggtcaatcaaatggaagatcaatcatgtcaagcaatattttccaacagttcttttgagagatattcagagaaacaacaaggaaaattagttttaaattatcytggagatgctacattgtaaaacatactaagtacattttttgtttgtttttaaccacaaggtttcttaaagcaatgaacagaccaatgtgcagtgaatttcttggaggcaactgtatagttcactgttgaatgtatttggcatagtataatgtgggatggattcagaaaatctgaatttaagagtatacagctgt

SEQ ID NO: 443492 - DNA, 644 bp, Homo sapiens
attttttttgtggatatatatatattatgttatcttgggaatataccttggcatgaaattagctgggtcaaatgctagctctcaatttaactttttgaggaactgccaaagtgttttccaaagtgactgcagcattttacattccctccagcaatgtttgcatgctcagttttttccacagcctcacaaacactttgctactatttatctttgtttttattattttttttgagacagggcctygctctgtcacccaagctggagtgcagtggcgcgatcatggctcactgcagcctggatgtcccaggcttatgtgatcctcacacatgagcttcctgagcagctgggaccacaggtgtgccaacatgcctacctaatccttattttttttgtagagatggtgtctcgctatgttgctcaggctggtcttgacctcctaggcttaagcaatcctcccatcttggcctcccaatgcactgggattacaggctgagctatcatgtccagcttgtttatctttttaaatatagccaacctactcagtgtgaagcggcatctcactgtctcagtgtggttttgatttatatgccactaatgactaacaatgttaaacatcttttcatttgcttatcactcatttgtac

SEQ ID NO: 443493 - DNA, 644 bp, Homo sapiens
attttttttgtggatatatatatattatgttatcttgggaatataccttggcatgaaattagctgggtcaaatgctagctctcaatttaactttttgaggaactgccaaagtgttttccaaagtgactgcagcattttacattccctccagcaatgtttgcatgctcagttttttccacagcctcacaaacactttgctactatttatctttgtttttattattttttttgagacagggcctcgctctgtcacccaagctggagtgcagtggcgcgatcatggctcactgcagcctggatgtcccaggcttatgtgatcctcacacatgagcttcctgagcagctgggaccacaggtgtgccaacatgcctacctaatccttattttttttgtagagatggtgtctcgctatgttgctcaggctggtcttgacctcctaggcttaagcaatcctcccatcttggcctcccaawgcactgggattacaggctgagctatcatgtccagcttgtttatctttttaaatatagccaacctactcagtgtgaagcggcatctcactgtctcagtgtggttttgatttatatgccactaatgactaacaatgttaaacatcttttcatttgcttatcactcatttgtac

SEQ ID NO: 443494 - DNA, 653 bp, Homo sapiens
ctgggtaatttataaacaaaagaggtgtatttggcacactatcctatattgagataggatagtgacttcacactataggctgggaagtttaagcttggatagctgcatctggtagcttctggtaagggcttcgtgctcagtcaaacaaaacacagcggagaaatagaaggggagctaggcgctttcacaaaagggcaaaacacaagatacaacctsactttaaaacaacctattttgggggaactaatctattcctgctagaattaagccagtcttcagaaaaatatattaattcctcttaaagacttaatcatcttaaaggcgccacctcccaacattgccacgttgagggccaagtctcaatgtgagttgtggtgaggacaaacaaacattcatcttttatattttttatacatttttatatttttatagcagccattataacaggtgtgaggtgatatttcattgtggtttaattttcatttctcagattgttagttatgttgaagatttctttatatacctgttgactatttctatgtcttctcttgagaaatagctattaaggtcatttgcccaaggcatacactcttaatactttgtctcagaatagtattttagatgtaagttagtgatggttttcttgcctattc

SEQ ID NO: 443495 - DNA, 653 bp, Homo sapiens
ctgggtaatttataaacaaaagaggtgtatttggcacactatcctatattgagataggatagtgacttcacactataggctgggaagtttaagcttggatagctgcatctggtagcttctggtaagggcttcgtgctcagtcaaacaaaacacagcggagaaatagaaggggagctaggcgctttcacaaaagggcaaaacacaagatacaacctcactttaaaacaacctattttgggggaactaatctattcctgctagaattaagccagtcttcagaaaaatatattaattcctcttaaagacttaatcatcttaaaggcgccacctcccaacattgccacgttgagggccaagtctcaatgtgagttgtggtgaggacaaacmaacattcatcttttatattttttatacatttttatatttttatagcagccattataacaggtgtgaggtgatatttcattgtggtttaattttcatttctcagattgttagttatgttgaagatttctttatatacctgttgactatttctatgtcttctcttgagaaatagctattaaggtcatttgcccaaggcatacactcttaatactttgtctcagaatagtattttagatgtaagttagtgatggttttcttgcctattc

SEQ ID NO: 443496 - DNA, 653 bp, Homo sapiens
ctgggtaatttataaacaaaagaggtgtatttggcacactatcctatattgagataggatagtgacttcacactataggctgggaagtttaagcttggatagctgcatctggtagcttctggtaagggcttcgtgctcagtcaaacaaaacacagcggagaaatagaaggggagctaggcgctttcacaaaagggcaaaacacaagatacaacctcactttaaaacaacctattttgggggaactaatctattcctgctagaattaagccagtcttcagaaaaatatattaattcctcttaaagacttaatcatcttaaaggcgccacctcccaacattgccacgttgagggccaagtctcaatgtgagttgtggtgaggacaaacaaacattcatcttttatattttttatacattttwatatttttatagcagccattataacaggtgtgaggtgatatttcattgtggtttaattttcatttctcagattgttagttatgttgaagatttctttatatacctgttgactatttctatgtcttctcttgagaaatagctattaaggtcatttgcccaaggcatacactcttaatactttgtctcagaatagtattttagatgtaagttagtgatggttttcttgcctattc

SEQ ID NO: 443497 - DNA, 626 bp, Homo sapiens
atacctgttgactatttctatgtcttctcttgagaaatagctattaaggtcatttgcccaaggcatacactcttaatactttgtctcagaatagtattttagatgtaagttagtgatgsttttcttgcctattcaactttttcatgcatttactactcattagctcttgcattcagatatttattcatgcagccatgtttatgtttctagtacatgctacaccttctactagttgctgaatatatggctttgaacaaaaacaacaatgctcctaccctcatgagctatattttagcttatgttatgggtagaatgataatgatgatttctatggtgtaaatcaggactttaatttctctatgatatgtccagaacatgtattatttctttgatattcaaatgaaaagcatctgatagagtgtgatatactgagaacttgtattacttctcctcaacctaaatatttaatgtgtattgtaaatgtagtagaatagcctctttgtggtagcaagctggtttttggattcttgaaatacaaatgtatgttaatgtattctaagtagctattcatttcttttttacacatttcctgtgatgaatggctgtgctaacaacataatctgaga

SEQ ID NO: 443498 - DNA, 626 bp, Homo sapiens
atacctgttgactatttctatgtcttctcttgagaaatagctattaaggtcatttgcccaaggcatacactcttaatactttgtctcagaatagtattttagatgtaagttagtgatggttttcttgcctattcaactttttcatgcatttactactcattagctcttgcattcagatatttattcatgcagccatgtttatgtttctagtacatgctacaccttctactagttgctgaatatatggctttgaacaaaaacaacaatgctcctaccctcatgagctatattttagcttatgttatgggtagaatgataatgatgatttctatggtgtaaatcaggactttaatttctctatgatatgtccagaacatgtattatttctttgatattcaaatgaaaagcatctgatagagtgtgatatactgagaacttgtattacttctcctcaacctaaatatttaatgtgtattgtaaatgtagtagaakagcctctttgtggtagcaagctggtttttggattcttgaaatacaaatgtatgttaatgtattctaagtagctattcatttcttttttacacatttcctgtgatgaatggctgtgctaacaacataatctgaga

SEQ ID NO: 443499 - DNA, 585 bp, Homo sapiens
aattctattatataaaattattagtaatgtaataatgcctcagcattattcctctgttttattttctgccttctgatccattttcctcaagaataatttccttaaagtgtaaatctctattcaagacttatttaattccaacaccccaaagttgaactaaggactttttatcttagactagagagacagtagagggctgatttctagggttagaaattataagcccctgatccagaactgtagtaaactaattctttttgttttaaatggatcttccctactctccacagacatacccaatgggccctttgtgccttcactgtcaacagataccatctcagcctgtcacacgattctaacacctataaacctccaaaagggacaggctctggatcaccagcttccaggaagctttccycttctgggtattggttagagctctctacgaatgtcttctgattttcttaaagatattacatgtctggctgctaaggaattttaggagagatggctcctgttaattttggaaaatatcctattctatcaatttgctaataaataagtgactacttgctaaaataaata

SEQ ID NO: 443500 - DNA, 510 bp, Homo sapiens
aagtgaaatcgcattaaaggatttctcattgaaagcaacaattcccctgacttacctcatcctaacctaataggcaacaaactatagctttctgtttkgggatcattttgttgtatcttcacattattaaatagatatttttattgctgtttcttggcatatctattttagccatgatttgttgattgcttttggatggatgccaaagaaaaacacttaactccttagatacccttcttaccttttcatgtttgattacaatatgttgacttcttctagggtatcttagttgcttcatttgctttcaataagatgcttacttacacctttattttctggcttgcctaccatgggtcatagcttgtgagtatacttggtgaatgaggtgctaaccctgcccttccctcccctgcccctgcatcctgtgtgttgaacactcacccctccttggctgcaacccattccatgagcattccgggctttctctacctgcttgactggacaccactg

SEQ ID NO: 443501 - DNA, 510 bp, Homo sapiens
aagtgaaatcgcattaaaggatttctcattgaaagcaacaattcccctgacttacctcatcctaacctaataggcaacaaactatagctttctgtttggggatcattttgttgtatcttcacattattaaatagatatttttattgctgtttcttggcatatctattttagccatgatttgttgattgcttttggatggatgccaaagaaaaacacttaactccttagatacccttcttaccttttcatgtttgattacaatatgttgacttcttctagggtatcttagttgcttcatttgctttcaataagatgcttacttacacctttattttctggcttgcctaccatgggtcatagcttgygagtatacttggtgaatgaggtgctaaccctgcccttccctcccctgcccctgcatcctgtgtgttgaacactcacccctccttggctgcaacccattccatgagcattccgggctttctctacctgcttgactggacaccactg

SEQ ID NO: 443502 - DNA, 386 bp, Homo sapiens
tttactacctgatgggtccggtgtgagctgagttacaagccccrtgtttaaaggtgggtgcagtcacattccccagctaggcttaggaattcttagtcggcctaggaaatccagctagtcctgtctctcactttgactagattaaaccagagcttttttttgtttcttttggcttttgttcaatatttattggtctgcttcaggttttattttttctgctttatttgaatgaaagagtttgacttgaaattttctcttctgccaaggataagaaggcttaatttcttttgcaagggtgtatttagttttaaaattagtatttttcctttgtatttgttgcctgtgcttggtaagtttcaatttcatctcatatattatagtattac

SEQ ID NO: 443503 - DNA, 386 bp, Homo sapiens
tttactacctgatgggtccggtgtgagctgagttacaagccccgtgtttaaaggtgggtgcagtcacattccccagctaggcttaggaattcttagtcggcctaggaaatccagctagtcctgtctctcactttgactagattaaaccagagcttttttttgtttcttttggcttttgttcaatatttattggtctgcttcaggttttattttttctgctttatttgaatgaaagagtttgacttgawattttctcttctgccaaggataagaaggcttaatttcttttgcaagggtgtatttagttttaaaattagtatttttcctttgtatttgttgcctgtgcttggtaagtttcaatttcatctcatatattatagtattac

SEQ ID NO: 443504 - DNA, 386 bp, Homo sapiens
tttactacctgatgggtccggtgtgagctgagttacaagccccgtgtttaaaggtgggtgcagtcacattccccagctaggcttaggaattcttagtcggcctaggaaatccagctagtcctgtctctcactttgactagattaaaccagagcttttttttgtttcttttggcttttgttcaatatttattggtctgcttcaggttttattttttctgctttatttgaatgaaagagtttgacttgaaattttctcttctgccaaggataagaaggcttaatttcttttgcaagggtgtatttagttttaaaattagtatttttcctttgtatttgttrcctgtgcttggtaagtttcaatttcatctcatatattatagtattac

SEQ ID NO: 443505 - DNA, 623 bp, Homo sapiens
tttggtcttttctaaaaatgctctatgaatgcggcaataattgcgtggtatatcatcttctgagctgagacaggtcttccgtatctctctttaatgacgtattggcttggtaatcagttgtctcttgttaagcgtgtgtaatcattacattcagaaagccagactcagaaaggtctgagtagaaacattaaatcctctaggaatgccatttttactttgtcaccagaataaaatcatggccagctgtcagaatttttttgctcactattagtgcctgaaggctctttcattatgggttagttccataaaccgtgtaaattcagtaatgaaaatgtccagtccaacctaataatcaaacgtgtgaaattctcttactcttcgtttttcccctcrtccagttaggttctgcttcagtctaagagtccctagtagggtgtgtatgtgaaccttttcaggttcgtgtgccaaccttgcactctcctcgtccttcaaacaatgtttctgactcccctgtgcttgtagttggcaggtttcgagctggggagatgacggatcaaaagtgagaaagaagaagtgagagaagaaatcattctttgtgactggtaattttatgatctctcatt

SEQ ID NO: 443506 - DNA, 623 bp, Homo sapiens
tttggtcttttctaaaaatgctctatgaatgcggcaataattgcgtggtatatcatcttctgagctgagacaggtcttccgtatctctctttaatgacgtattggcttggtaatcagttgtctcttgttaagcgtgtgtaatcattacattcagaaagccagactcagaaaggtctgagtagaaacattaaatcctctaggaatgccatttttactttgtcaccagaataaaatcatggccagctgtcagaatttttttgctcactattagtgcctgaaggctctttcattatgggttagttccataaaccgtgtaaattcagtaatgaaaatgtccagtccaacctaataatcaaacgtgtgaaattctcttactcttcgtttttcccctcatccagttaggttctgcttcagtctaagagtccctagtagggtgtgtatgtgaaccttttcaggttcgtgtgccaaccttgcactctcctcgtccttcaaacaatgtttctgactcccctgtgcttgtagttggcaggtttcgagctggggagatgayggatcaaaagtgagaaagaagaagtgagagaagaaatcattctttgtgactggtaattttatgatctctcatt

SEQ ID NO: 443507 - DNA, 608 bp, Homo sapiens
ggtagagagagccacagcataaacatcacacctgcagtcagagggcttactatgtgactgcatatagtagtgtattagtcattgctgtccagaaaacaaaaacaaacccagtctttctctctctgaaagcaacttattttaaggaattggcttatgtgatcgtggggactggtaagtccaaaatctacagggaatgctactaggctggaaattctgcaaggaacctgccagaagttgcagtcttgagtccaaaggtggtctgaaggtagaattcmatcctcttctggggaccttagtatctcctaaggctttcaattgattgaatgaggaccaccaacattatggaggctaagatgctttactccaagtctactggtttaagtattaataacatctaaaaaatacattcacagcaacgtgtagactgctacttgaccaaacccactgggtactacagcttagccaagttgccatataaaactaattatcacaggtagtattttaggtgaggaatgagatggcaagcctgtgctctcatgaagctaatgccatagaacttgggttaagggcatgttagattgagtatccaggaaaaccttctctgggga

SEQ ID NO: 443508 - DNA, 602 bp, Homo sapiens
ttaactcaacaaaacacatgctatacttacgatagtgcgtatgctgtactgagaatagttgggtgctgttgcattttatagaaaagatgtactgatttacttcaatactcactaacaaatctaaccttttatttataaggtattcttcaggacagcatcaaacagatgtaataagtaaaagatcatatgtggatcatttcacttttgatccagtcaaatataaacaaaacttaagcatttttaccacggaacaagtaatagttaccatttgctttgtgtcttctatatgccaagcctaacaattggcacctttgcctaaattagttcattttgtcccttttaccaaccgcatgaaataggcatatcttcctcattttgtgtatgagaaaactgcagcaytgataagtcgaatccacccgagtgcattcttaagtttaaagcatgtaggttaaaattaattctacctatttccaaagcttgtgacttttaatcttcgcaatctcacttcagtaatctactataaacaataaacttccactcttcctcacctctcctttcttcaaatgaaggttccatcaaagaaacaccttggaagctgaaca

SEQ ID NO: 443509 - DNA, 528 bp, Homo sapiens
gataatatattttagttaaacaattgccccttaattcacagactgtaattatatatatttttacctgctgaatgcattttgtttttagtctgatgttttagaattctttttgaaatgctgaagctctttcggctgtttctcaggcattccaagtctttctgtgtctttggttgccatccagtggcagcagccatatacttcagttgagtaacagaaamgagaaaccctctactttccaagctgtgttttctcattcaaaagtgaacggtaggtggattagtccattttcaccctgctttaaagaaatacccgagactggcccatttataaaagaaagaggtttaattgactcacagttctgcatggctgtggaggcctcaggaaacttacaatcatggtggaaggcgaaagggaagcaaggaccttcttcacatggcgccaggaaagagagagaagagcaggagagaccgccccttagaaaaccatcagatcccatgagaactcactcactatcatgagaatagcatg

SEQ ID NO: 443510 - DNA, 528 bp, Homo sapiens
gataatatattttagttaaacaattgccccttaattcacagactgtaattatatatatttttacctgctgaatgcattttgtttttagtctgatgttttagaattctttttgaaatgctgaagctctttcggctgtttctcaggcattccaagtctttctgtgtctttggttgccatccagtggcagcagccatatacttcagttgagtaacagaaaagagaaaccctctactttccaagctgtgttttctcattcaaaagtgaacggtaggtggattagtccattttcaccctgctttaaagaaatacccgagactggcccatttataaaagaaagaggtttaattgactcacagttctgcatggctgtggaggcctcaggaaacttacartcatggtggaaggcgaaagggaagcaaggaccttcttcacatggcgccaggaaagagagagaagagcaggagagaccgccccttagaaaaccatcagatcccatgagaactcactcactatcatgagaatagcatg

SEQ ID NO: 443511 - DNA, 528 bp, Homo sapiens
gataatatattttagttaaacaattgccccttaattcacagactgtaattatatatatttttacctgctgaatgcattttgtttttagtctgatgttttagaattctttttgaaatgctgaagctctttcggctgtttctcaggcattccaagtctttctgtgtctttggttgccatccagtggcagcagccatatacttcagttgagtaacagaaaagagaaaccctctactttccaagctgtgttttctcattcaaaagtgaacggtaggtggattagtccattttcaccctgctttaaagaaatacccgagactggcccatttataaaagaaagaggtttaattgactcacagttctgcatggctgtggaggcctcaggaaacttacaatcatggtggaaggcgaaagggaagcaaggaccttcttcacatggcgccaggaaagagagagaagagcaggagagacygccccttagaaaaccatcagatcccatgagaactcactcactatcatgagaatagcatg

SEQ ID NO: 443512 - DNA, 421 bp, Homo sapiens
ttttacatttgattattctgttgcttgggggagaactgatctcttaacaatattgkatctttcaatctgtaaatgtttcttcatttatttgggctcttcatcattcttttttagcagtgttttgaagttttcagtacacaggtctggcacatcttttgttacatttatccataagtgtttctctttttttttttttgaggctattgtaaaaggtacaattacttttattttgttttgcaattgttcaatactagtatacagaaatgtgactaatgtgtttatgttgatcctacaaaattgctaaagtttctaattagttttaatgtctcctttttagattctataggattttctatgtagacaatcatattgtctgtaaataaagacagttttgcatttgctatctactctgaatggcatt

SEQ ID NO: 443513 - DNA, 421 bp, Homo sapiens
ttttacatttgattattctgttgcttgggggagaactgatctcttaacaatattggatctttcaatctrtaaatgtttcttcatttatttgggctcttcatcattcttttttagcagtgttttgaagttttcagtacacaggtctggcacatcttttgttacatttatccataagtgtttctctttttttttttttgaggctattgtaaaaggtacaattacttttattttgttttgcaattgttcaatactagtatacagaaatgtgactaatgtgtttatgttgatcctacaaaattgctaaagtttctaattagttttaatgtctcctttttagattctataggattttctatgtagacaatcatattgtctgtaaataaagacagttttgcatttgctatctactctgaatggcatt

SEQ ID NO: 443514 - DNA, 421 bp, Homo sapiens
ttttacatttgattattctgttgcttgggggagaactgatctcttaacaatattggatctttcaatctgtaaatgtttcttcatttatttgggctcttcatcattcttttttagcagtgttttgaagttttcagtacacaggtctggcacatcttttgttacatttatccataagtgtttctctttttttttttttgaggctattgtaaawggtacaattacttttattttgttttgcaattgttcaatactagtatacagaaatgtgactaatgtgtttatgttgatcctacaaaattgctaaagtttctaattagttttaatgtctcctttttagattctataggattttctatgtagacaatcatattgtctgtaaataaagacagttttgcatttgctatctactctgaatggcatt

SEQ ID NO: 443515 - DNA, 421 bp, Homo sapiens
ttttacatttgattattctgttgcttgggggagaactgatctcttaacaatattggatctttcaatctgtaaatgtttcttcatttatttgggctcttcatcattcttttttagcagtgttttgaagttttcagtacacaggtctggcacatcttttgttacatttatccataagtgtttctctttttttttttttgaggctattgtaaaaggtacaattacttttattttgwtttgcaattgttcaatactagtatacagaaatgtgactaatgtgtttatgttgatcctacaaaattgctaaagtttctaattagttttaatgtctcctttttagattctataggattttctatgtagacaatcatattgtctgtaaataaagacagttttgcatttgctatctactctgaatggcatt

SEQ ID NO: 443516 - DNA, 590 bp, Homo sapiens
atctttaagctggaaacaattcttatacttgtcaccttttgtagtttataaaggtttcttttgatccttttgcagttacttgctgaatattgaaaggggcttttttgacacatataaaacagggtttatgtgtgcatgtttatttttataaatttatttgttgctaggtccaagaagcctttttctcccctttgcattactttgatgcacctgttatgatcctgctgaaagctcccttgcttctttggagctctgaggggagctttgtacctttgaaattttcacgagcttttgactagctgccaagatttcggctgctgtgatgcagyacagaggcagccatgcattgggctgccaagtctcaaattcttgtttagaatgacagtgagaacctccagacctcactaaagagaatttgcagaacagaactgtattctttcacaaggtggttggtgccaaggccgggttggtctttgacagagcagaaaccaggatgatcaatatcagaagcatcctcatgcatggttttcaaatcaggagtgggggttaggaatgaagtttgccgagtattggatataacaggggatatt

SEQ ID NO: 443517 - DNA, 551 bp, Homo sapiens
gagactgtttatctagatgtgatggatcacatctggcataagtatatcatgggagaatttcttttccaagaagattaaatcctyagtatatttgaatgaaactttattaaatagttattataaaatctaatctctattgaacactttctatgtacattagatattctgcatgaaatattacatttaattctgactgcaattttatgttatttctatcattctgttttgtagatttggtcattcatataaagaataaatggttatgcagaaatgaaaactaagtttgtcttattctaaagcctgtgatctcaaccatgaaattatactgtttaattgatattcatcaatgatgctaacatttagagatttaacatatatttgttttccagagagagagagagaggatcgggtgggggagggagagagagagagctagagagagaaagagagagacagagtggaagagaaaatatagaatatcaaaagagtatgacatggctataattgatttttattctgtacctaactttttgaacttgcccaagcagcag

SEQ ID NO: 443518 - DNA, 613 bp, Homo sapiens
caagtacttcacaaggtcatagaatatcacaaggcaaatggaggcagtgtgagatcacaggaccacaggactgggatgaaattaaaattgctaatgaagtttcaggcaccattgtcattgataacatcttatcaggagacagggttttgagagcaaccggtctgaccaaaatttattaggtgggaatttcttcttcctaagaagcctgggagtgctatgggagaygggggtctatttcacccctacagtctacagaccataaaagacagccacgcccaggggggccgtgtatagacctacccccaggcacgtattctctttcccagggatgtttcttgctgagaaaaagaattcagcgatatttctcccatttgcttttgaaagaagagaaatatggctctgttctgcccagctcaccggcagtcagagtttaaggttatctcttgtttcccaaacattgctgttatcctgttcttttttcaaggtgcccagatttcatattgctcaaacacacatgctctacaatttgtgcagttaagacaattatcacagggtcgtgaggcaacatacatcctcctcagctgacaggattaggagattaaagtaaagacag

SEQ ID NO: 443519 - DNA, 613 bp, Homo sapiens
caagtacttcacaaggtcatagaatatcacaaggcaaatggaggcagtgtgagatcacaggaccacaggactgggatgaaattaaaattgctaatgaagtttcaggcaccattgtcattgataacatcttatcaggagacagggttttgagagcaaccggtctgaccaaaatttattaggtgggaatttcttcttcctaagaagcctgggagtgctatgggagatgggggtctatttcacccctacagtctacagaccataaaagacagccacgcccaggggggccgtgtatagacctacccccaggcacgtattctctttcccagggatgtttcttgctgagaaaaagaattcagcgatatttctcccatttgcttttgaaagaagagaaatatggctctgttctgcccagctcaccggcagtcagagtttaaggttatctcttgtttcccaaacattgctgttatcctgttcttttttcaaggtgcccagatttcatattgctcaaacacacatgctctacaatttgtgcagttaagacaattatcacagggtcstgaggcaacatacatcctcctcagctgacaggattaggagattaaagtaaagacag

SEQ ID NO: 443520 - DNA, 462 bp, Homo sapiens
tatctcatttaatgataccttcatgtgcccagtcgcttcagacaaaagataccagagattcatgaatctgtctttctttcacttgctatgtttaatccacccctcaagttctgctgtctcctccttcaataaatagatccagatagatagacagatagatccagatagayagatcttccaactggatctcagtcctcatagaccacccttagcaaaggcaacatcatctctcccctgaaacacactcaaaacttcatagctggattcactatttttatcttgtccattttctttcttccttccttccctttctttctttctttctttctttctttctttctttctttctttctttctttctttctttttttgggtggggggactgagtttcactcttgttgcccaggctggaatgcaatggtgcaatctcagctcactgcagcttccaccttccagggtcaa

SEQ ID NO: 443521 - DNA, 602 bp, Homo sapiens
taaggcctgattaatccgtatattacataagtggctagaaagtgatrtgtgccttggaaagatgaaaatatcaagcgagataaggatgatcataaatatagtgtaggacactgagaaggtgagatttcccttcctttatttcttatctcagggaatgacatgaccatcccctcacatgagcagggggaaaacacaattagaaattgtgtgtgttatcttaacactcttactttaacctgtcaattctggattcctaatgtctttcaaatctttcacttgtttttctgttcactgacaggctccttctcacatcctcagggtttctcctgctcaggttatagccacctaagtgacctcactgcttttctactcccaagttgctgccatgatgatgataacacctgcttgctggaaaacttaatggttccaactgccttttgaataaaacagaaacgtcttatgatgagcaataagactgatgataaaatggtttcttcttaccattttaccataattcattcccataagcacagtcccctctagtgaaactgcatactacccgtattttctttcctcttacccttactcatccaggctttttg

SEQ ID NO: 443522 - DNA, 609 bp, Homo sapiens
taaccaaataaccagctaacccacacagccatgaaacttcagatagcactgaataagtaaacakgcttaactggactcaccatcagagcaccttgcaaatgagtaagcaacagagccttttctttctcagattaaagctcttttgggctattctgtaaatgggctagagcaacacaccaaagtgaataatatgatttttttctagtatgtaaaggaatctaaaaagcactctatctcttcctgagttttaggttatcttaggtgcagaaattttccttttatataagaagaatatcccagtaacatacaggccacatttagaaacattgctgaattgtcaagcactggaaatgtcaatactttccaccacagaggcacaaatatgtctactaagacatttgggtgatgtgatccatattttattgtcagcattatgtcccacaggatatctagacaatcaaggctcctgtctaccatggactgggaaagtttttgacatctaacagtgaaggggtccttgccagctaaaagtgaattatttccaactgtccttactaattggtaaggaggtaaaagaatttgccaaatcattagctgcatagcaggtgt

SEQ ID NO: 443523 - DNA, 535 bp, Homo sapiens
aagcaccaaggaatactcatatttgtatccaatggcatggaatggaaatgccaaagctgccagatccaccacaattgtcttcgaactagtagaaaaaattgtgtctctagagtaggttacacatgtgatagagagacacttcctttccctttttcatcttcagtccaaaacacaaatcagattaaccatttccagggcacacagcctccaccatgatctgtagaatcatgtgtagcttcttttgcttggtgcagcaaatgagaatatgaaggaagtttcaaggtatctctttttgtttttgtttaggctcatatttgtagagctctcaacttttaaattaagcttccttctcagaaatgtgattcattctggtttgatgacttttgaagtcaaggwgtctgaggctctctttttgatctactggtttcaccctctttcagcaagattcttgttatataaggaacactgtaactttgggatcttgtaaactgagtaaaaccaaaggatttatagtcttcaatgtattgggtttgtc

SEQ ID NO: 443524 - DNA, 643 bp, Homo sapiens
ccctgtctccataaatcaataaattaaaatattttaaaacacagttcacagtgtcttctcagagcatgagctcctggaagacatggatgacagatgagcactcctctatatactgcctgctgccacaaataagaagcctctcaaaattaaaacactgatttttatagaccaaaaaataaaagaaaagaaaaaactagaggataaactcaaagttgatctcagacagagcaagttccaggaaagtgttgctggcttccaccttggaggacttctacctggaaatctgctcggtaccatattaagcagtttcaagagcccatcaaagccctggcaagttcawagtaaccagaggcacattctaacctataccagaactatggtgaaaatgtactttgctgggaaaggattctgagttactaaggcttctcaggaactactccattctctaatgaaaacactgatcatctaatgtgggcaattaacatgtatttagtaggtttttgcctcctgttgcatactgaggagatcccacaagacaccttctgcccagcattttcttgctaccatgaatgaatctataaaatattcacatgaatacaaacatgaactccagaataccccagtttaaatgaaaatgcattca

SEQ ID NO: 443525 - DNA, 634 bp, Homo sapiens
atagttcagcatggttgtggaggcctcaggaaacttacaatcatggtatggtggaaggcaaagggaaagcaaggcaccttcttcacaagccagcaggaaggagaagtgccaagtgaagggggawgagtcccttataaaaccatcagatctcatgagaactcactatcatgagaacagcatgggggaaactgcccctatgattcaattacctccacctggtctctcccttgacacgtagggattgtggggattataattcaagatgagatttgggtggggacacaaagcctaaccataccagaagctgtcccatgattactgatccccaggtcctcagagttgctccaaatttctgatccctccaaagcccctctctgaattccctctcttccacatttcctttaactctatgaaccatcccttcatcctaccaatacattttcaacttaaataagccaaaattgaattctgtggctttcaaccacagaactgtatcaggtgcaagtccctttcccattttctattccccaaggagacaagaaagagtactaaagatgccttaaagcaaataacaaggcatgccatcactcaagaatttagtatctaaatccacttcatgaaaatgactgttact

SEQ ID NO: 443526 - DNA, 653 bp, Homo sapiens
tcacaagaccatatgggactactgagcaccatgtaactcattcatgtgccacataattctgagattcacccactcactacgtcagagaagagcttcatccttcctgaagaaaccaatcaggcagtcaaagaagatgaataaaggaggaaataaagaaagaggtgaatccatatatcctggtgtcagtgatgtttttacatcttcagagaacctaaagagaatttttaattccagcaatagagaaaaacagaagattttgcataatgcaggtccaaaaagaagtgtaaaaaaaaaaaaagtttgaactacaagtagcaatcctattaattctagaatttccacacaatgcaagacctagaaggcatgatactgggcaccaaagaaatggaaaggtgatgagtaggaaaggtacagaagaagctatagttgagaagatagagaatgaagcrtgcacctgcttgcctcatcttcatgggggtactgtattagcttggctaggttaaacggaagtaggaaagacaaaagtagggaggaagaggagaagaaaaggaagggagaataaagaatttctacaaggcaggcgtgttggctcatgcctgtactcccagctactcagaggctgaggcaggaagattgagcctaggagttcaaga

SEQ ID NO: 443527 - DNA, 506 bp, Homo sapiens
aaatgtccaacagcgtacatactcccttagctattgccaagatccctatgaggcagcttcaattaatccccacaagtttccctattccagaacccctggcctgctcatgatcacagactctgccgccagaaaagaagacctgtttytcccagcctgggcagcatggcaataccccgtctctacaaaaaaatacaaaaattagccaggtgtggtggcacatgcctgtagtcccagctacttgggagactgaggtgggagaatcacttgagccccaggaggtggaggttgcagtgagtcaagatcgcaccactacactccagcctgggcaacagagtgagaccctatctcaggaggaaaaaaaaaaaaaaaaaaaaaaaaaaagatccatttctcacacgaactcttgaccaaggattaaatcaggcttccactattattttggaaaaacaacaactattagatgctttaaaagataaaacagtaaaagacacattcctggaaaacag

SEQ ID NO: 443528 - DNA, 506 bp, Homo sapiens
aaatgtccaacagcgtacatactcccttagctattgccaagatccctatgaggcagcttcaattaatccccacaagtttccctattccagaacccctggcctgctcatgatcacagactctgccgccagaaaagaagacctgtttctcccagcctgggcagcatggcaataccccgtctctacaaaaaaatacaaaaattagccaggtgtggtggcacatgcctgtagtcccagctacttgggagactgaggtgggagaatcacttgagccccaggaggtggaggttgcagtgagtcaagatcgcaccactacactccagcctgggcaacagagtgagaccctatctcaggaggraaaaaaaaaaaaaaaaaaaaaaaaaagatccatttctcacacgaactcttgaccaaggattaaatcaggcttccactattattttggaaaaacaacaactattagatgctttaaaagataaaacagtaaaagacacattcctggaaaacag

SEQ ID NO: 443529 - DNA, 531 bp, Homo sapiens
tactgttttcaagaagtagaaggtctgtatgtgaaagagggataagacaattctatggcactccatrggactggagcaggtggctctccagggcaacataacaaagaggctgtcacaggaggtgtgtgacctggaagcatcccctcccagtgttttattgaggctgggaggttgcagagggccaaggagtagagtcagaagatcagacttgaagtcctcgtgctgattattacttgtgtgactttgagtaagtcactgaatctctttgtatttccctttccttatctacaaaatgcagatgtgtccccagcttgacttatcacatagggttgctaaagatcaaagtgggatcatttcaaactgttagtcaagttaatagtttctatacaaacattcagccctattcaagtgttatattggagttaattggagtgatagctccaattctaaggatactaatggagcaactagtagttataggatggaaggaaatcttcaaaatgagtcatttaaaattcattagttctactg

SEQ ID NO: 443530 - DNA, 417 bp, Homo sapiens
tcggctcactgcaagctctgcttcctgggttcacgccattctcctgcctcagcctcccgagtagctgggactacagtcgcctgccaccaagcccggctaattttttatatttttagtagaaacgaggtttcactgtgttagccaggatggtctcgatctcctgacctcgtgatccgcccgccttggcctcccaaagtgctgggattacaggcgtgagccaccrcgcctggctaaatttatttttaaatgtgacatatgtacaagtgaatctgatttatttggaagaaatatttaccctttttttttttggataattatgacctggtagaattcagaaatgtgggtatagccaagctcacctaggccatatctttactgtctctgccaacagtggctctgctttcacaggagatggga

SEQ ID NO: 443531 - DNA, 603 bp, Homo sapiens
tgctgttttggttactgtaacctcgtagtatagtttgaagtcaggaaatgtgatgctcccagctttgttctttgtgcttagaaatgtttttgctatttgggctcatttttcgttccacataaattttaagatacttttttctaattctgtaaaggatgtcattggtagtttgataggaatagcattgaatctgtacattgctttcagcagtatggccattttaacaatgttgattcttcctgtccattcaatgagcatggaatgtttttccatttgtataatctttgatttctttcagcagtgttttataattcttattgtagagatctttcacctctttggttagctacattcctaggtattgtatggaaagaccattcttttgccacaagatgaccagaaaacttcttgtgattttgcgtaatcgaccctcttagttttacaaaatattgggggtgattctgctactaaagtccttgtttttataaaattaaccacataaatgacctcctgtgtactcttttgacttcaagtcttttctaaactagattgtctatgaataacagtgaatggatttcacayagggagtttctactctagtct

SEQ ID NO: 443532 - DNA, 560 bp, Homo sapiens
agattacatttaagtcaatgcctgaatgacaaaacgaagtcattccaacagtgctttgctatctcagcctccatgcctcagcacatgccctcccgtccatctggaatgcccttccacccccatttttctggtgaacttttgcctctccttcaaggccaagcttctttcctgaaccacctaagtagaggtaatcactctcacatttgtgccaccagagtcttaggtactttccaatatcataacatggtgtcatgcaaagatttatttgtctctctctctccacaggaggttgtggagggccaggttggcatcttttccctctgggacaggtaccacagtaggagctcatggggccaggagggttgtgggatgccctctgggctcygtcagcacctcttccctggtgcttcatggctgcctgaattgcctgggtgctgttgagctgtggccttggctgctagcttcgagggaaatgtggaactggaatcttgccttccctgggcctagttcaggacacttggcaacccatctccaacccagccgaaggtcccacctcttct

SEQ ID NO: 443533 - DNA, 621 bp, Homo sapiens
cagaacattatcagtccccggaaagtacccccatgctctcttcttgtcactactacctggagccactaagggtaaccactgtcctggcttctaacagcacaggttagttttgcccgtttgggaactttatctaaatggaatcatatagattgcactcttgtgcgcctgcttcattcgttcgtgagatttatccatayggctgcatgtagttgtaggtcgttcatttcagttactttagagtgttccacggtgtgaatataccacaatcaatgtatccattctgctgtttataggtatttggattgtttctagtttttaggctgttgtgaatagcaccactacgatatgctaaaacagcgtccaatagaacttcctgcgatgataaaaaatgttctatatctgtgttgtccaacatggtagccattagtgacatgtgacttttgagcacttgaaatgtgacaggtgtgactgaggaactcaatttttaattttctaaaattgcaattaatttaaatgtaaatagctaatacggctagagctactctattggacagcacagttctagcttgtcttttggtgaccacaatacatatttctattcagtatatgcctaggagtgca

SEQ ID NO: 443534 - DNA, 567 bp, Homo sapiens
gtttgagaccagcctgggcaacatggccaaaccctgtctctacaaaaaatacaaaaattagccaggcatgatggtgcacaccagtagtcccagatactaggcagactgacgtgggaggatcacctgagcctggggaggttgaggctgcagtgagctgagatggtgccactggatgacagagtgagatcctgtctcgaggaggaagaggagggggagcagtgggaggagggggaggcrgaagagggaggaagagaagaagaaaagaaaagaaaagaaaaagaaataattcttctaaattttgagttctgaggtcctaccaccctgcaatctaatattctctaccttcctttctctctcaaacatgtagccatctctccatattaccttctcttaatactggtgcctctttcttaaatatctttcctccctttttctgtcagtttctgcctattttttcaccagctccttccctctcccccagcctaactgatgtttgctttctaggtggtggacactgatgcctggttggaagttgcctttgtggtcctctggctcagttcttcccag

SEQ ID NO: 443535 - DNA, 623 bp, Homo sapiens
aggcatctcatagtgttctaatggttttactttaaattatccatatgttttttgtttttaaaaaaaaccttctggaagaattcacactatgttaatagaggagtaggatttgtagcagaaggtgaaaggggactttcatttttcaccctgtgtctttctgggctgtttgtttattttacaatgtgaggccctatattacttttgtaacttagaaaaaaaggtgtttgtttgttttttctaaatgtgactgttcctgtccattcaggacagcaccagtagtataaacacaaatacccactcaaattaatatcctcacatgataatacagatgatgccaccttagaaattagcagtgtacaaagcatgctcacagccattatctcacgtaatccatggcatggttttgtgaagcaggaagtgttttacacttttacagctgagaaatgcacaagaaatgtgcgtcactgccgtgtaagctatatctttcttacctccttatcctttgagtgttgactttggttcactttgctgtggtattttgagcactwattttagttatataataaaatatatttgcaatctattcagttgaggataagcatcgttagctgcaactgcccaga

SEQ ID NO: 443536 - DNA, 583 bp, Homo sapiens
ggaatgttcagcaattgcattgctctgctgcagtcaatggtgtatttggctaccaattctgaacggtttggcttcggaggcctggaactcctcacccccaagagaaaaccggactgtgggaagctactttgaacattctatatacacatctaaatctaactcaacaattctaactcgataaaagtacacccttatggagaggacctgggcataagctatgccaaatataaaaatgaatatggctccccaaatttgtgggccaataaatctgccttttacagaaagatgaaatatctaagtaagaatttctgaraaacctcaatgtgaaaaacttctacctggctttggagaaaagccaaacaacccagtagagaggtaagtggtttggtaaaagacaagccacatttgagtcaaaaagcctgagtctgagcctcagctttgctagttgtgtgatcttgggtatgtcacttaacctctttaagcttcaaaattgtcatctataacatgaggccaagaatgactggctcacagggctgttgtggggattaaaagagataagatatgtaaaagccattggtaattt

SEQ ID NO: 443537 - DNA, 548 bp, Homo sapiens
accctgcactctactcacagtctaagtctagggaggttactctgcagctagattatattaacttttggatatacggcattattaactcacaagtcattcaacctagagtctatacatataatgtgtgcatcttttttatttatacttgttttacatttcaatgttgttacttctctctcatggattttacagtttatttctatttctcccaattgacaaggacatttaacattctaatgtccattttagtcaagtgcatttaccccgttttcaatggatatggcccttgttaggagttaccttgtgttaaaatactcctgccagtttgctgtcattcacaaagcttmatgagcgctccccccatttccttatccacattctaatgaaaaacatgaaacagtactggaaccaaagggtagtggaagggatctactttgcctttcccaagttgattctctcctccttttgaatacataacactttcctgatttgaagagaaaacatacatcaaaaagctgccaggtcactgtttgactattacccttcac

SEQ ID NO: 443538 - DNA, 415 bp, Homo sapiens
gcataaaaaaaagcaatagaaatttcaggaaatatcgaacacacttatagaaatgtaaaatgttctggaaagtctcagcaatagaattgaacaagtagaagaaagaaattcagaactcaaagacaaggtctttgaattaacccaatcaaacaaagacaaagaaaaaagattaagaaaatatgaacaaaacctccaagaagtctgggattctattaaatgaccaaactaagaacaaycagtgttgctgaggaagatgagaaatctaaaagtttggaaaacatatttggggaaatgattgatgaaaactttcctggctttggtagagacctagacatccaaatacaagaagcacaaagaaaacctgggagattcatcacaaaaggatccttgcctaggcaacattgtcatcaggtca

SEQ ID NO: 443539 - DNA, 555 bp, Homo sapiens
taaacagcaacccacagagtgggagaaaatattcacaatctatacatctgacaaaggactaatatccagaatctacaatgaactcaaacaaatcactaagaaaaaaacaatcttatcaaaaagtgggctaaggacatgaatagacaattctcagaagaagatatacaaatggccaacaaacatatgaaaaaatgctcaacatcactaatgatcagggaaatgcaaatcaaaaccacaatgtgataccaccttactcctgcatgaatggccataatcaaaaaattaaaaaacagtagatgttggcatggatgcagtgatcagggaacacttctacactgcttgatgggaacgtaaactagtacagccactatggaaaacagtgtggagattccttaaagaactaaaagtagaactaccccttgatccagcaatcccactattgggtatctactcagaggaaaataagtcattgtatgaaaaagatacttgcacacacatgtttataacagcacaatttgcaartgcaaaatcgtagaaccaacccaaatgcccatc

SEQ ID NO: 443540 - DNA, 506 bp, Homo sapiens
tttcaaactacctgtggaattttccttggaactcaataaaatattcaaaagtgtatcttgaaaaatatgttggtaagaatgccaaaagatagattcttttctaaaaaaacagaaacrttggaaatctaattatatacattaaagaatagattccatataaatataggtcaatggaaaataatacaaacccagaaatatatctaattacatgttatttaatatacaaaaaatagacatcataatacaatagatatttacaattctcctacaaatttaaaaataaagttcagataattataattatattttttaattatcaaaaacatgatagaaaataaaattaagactattttttaatataaattatttcttcctaaacattgaagtagtagaaggattagagattttaaatctaaaacttaaaaaattttgtattacaataataacataaccttaatagcaactaatgttgcattaggatatttgcagcaagtaaggcaaataat

SEQ ID NO: 443541 - DNA, 506 bp, Homo sapiens
tttcaaactacctgtggaattttccttggaactcaataaaatattcaaaagtgtatcttgaaaaatatgttggtaagaatgccaaaagatagattcttttctaaaaaaacagaaacattggaaatctaattatatacattaaagaatagattccatataaatataggtcaatggaaaataatacaaacccagaaatatatctaattacatgttatttaatatacaaaaaatagacatcataatacaatagatatttacaattctcctacaaatttaaaaataaagttcagataattataattatattttttaattatcaaaaacatgatagaaaataaaattargactattttttaatataaattatttcttcctaaacattgaagtagtagaaggattagagattttaaatctaaaacttaaaaaattttgtattacaataataacataaccttaatagcaactaatgttgcattaggatatttgcagcaagtaaggcaaataat

SEQ ID NO: 443542 - DNA, 506 bp, Homo sapiens
tttcaaactacctgtggaattttccttggaactcaataaaatattcaaaagtgtatcttgaaaaatatgttggtaagaatgccaaaagatagattcttttctaaaaaaacagaaacattggaaatctaattatatacattaaagaatagattccatataaatataggtcaatggaaaataatacaaacccagaaatatatctaattacatgttatttaatatacaaaaaatagacatcataatacaatagatatttacaattctcctacaaatttaaaaataaagttcagataattataattatattttttaattatcaaaaacatgatagaaaataaaattaagactattttttaatataaattatttcttcctaaacattgaagtagtagaaggattagagattttaaatctaaaacttaaaaamttttgtattacaataataacataaccttaatagcaactaatgttgcattaggatatttgcagcaagtaaggcaaataat

SEQ ID NO: 443543 - DNA, 631 bp, Homo sapiens
tttttcattccggggacttttccattaaaacaagctgccttctatcatctaggaacttgatgatttgacccacaaatggaggattatgcaaattcttgggggttgatactagggggaagagcaagagcttttcccctttggagacataatgagcacaacatccttttcagtggkaagaagtatttctatctaggcacggactgaaaccctgcagctcctgtactgggactgtagggctcttgcctggccctagagatagtccaaaggggactgtgagatggtctccaagccctcttgccctgctcatcagaggtgagggtttgtagccatgaatatgacttggggattctctagggaaaagcaggaactccaagaagcagagtgagtaagagagaacttccctctgggtccagggaaaatgtctgggcccccaagatacagaatagttcagtactaaagtgaataatgtttttcacagaaaacttaaatgaggccactttgttgttgtttaaaattgtactttttggagcatagatttagcaaacaacatcttggcttattatgaaagtaaaggaggcaatgaagaaaaggcactaaatgttgtggaacatctgttgtccctttaatgtga

SEQ ID NO: 443544 - DNA, 590 bp, Homo sapiens
ctttggttgccagcagtactttagtgttttgggaggtattattacagtataatggttgagggtatgcatatttgaaccagacagatatgggattgaatctcagcttcacaactttccagttatgtgacctttgatttcctttatttttaaaatggagaggatgataccacttattctcacaaaactgttgtaagaataaagagataattaatacataataaagcccttagcaaagtgtctcacctatgataagtacttaatattattattagtcaagtttgggtctctggtacttgctcttacattgtgttcaggcagcctatttggacctctgccaactgcccaccctgcccatgcttagaatggattttggaagctacttaaaaccttaaatgataacctggcttgaaatctattccagattctcatcccaacctgctaactctaaaatagcccatgggttataatctgaactatatttgggacttcgrattctacccaaccatacaggtctgctgaggctacttggtttactcaggcaggttatacccaacctgacactgtacaagtccaggttatactaggtattc

SEQ ID NO: 443545 - DNA, 515 bp, Homo sapiens
caagccctctactcttggaacaaaggaaatgtgaagctttgtccaccaaggtaggaaaataatcaaaggaatagtatcctggaagtcaagcaaagaaagtttttcaaaaaagagagagtgaaaaggcattttaaatgctgatggtaggtcaagtaagatgaggactgagagattaccattgtaattaacaatgtgtttgtcacttgtgacctttataagaaaggagtggtagcaacgaaagcctgattagaataggttcaagagagaattgggaaagtggaaattttgagtataaacaaatatttcaagaaattatgctataaggggaacagggaaataggatggtaactataggagatggtggagttaagggagggtttgataatactcaaatctaataattaatggagtgcttactttgtgccaggcamtatgttaattgctttaaaggtattagcctatttaattatcttaacaaccctgaaagataggtaatattattctcaagtcacaga

SEQ ID NO: 443546 - DNA, 529 bp, Homo sapiens
aacgcttcaggaagccttctctgacctgtccatgaaatctgtggcagcccatgctgcccgaaactcttaaagtgcaaagaatggttgcatatgaaagttttgtaagcatgagacctatattacactctcttttrtctttctccaaggcccattactacagtctgaacacatacaaggtggtccagtaaatacttgttgaactgaatggaataatggccaagagaacaaaactgttgcaaagggtgaaggaaatgatgttcaggaaccatcttgtgcccccatctatcttgccctcagttgtaaatataagggggccttgtactccttctccagaaagcagaagagtcttgctttctcagagggcctgagagcttatgctatagtgtgaacaaaaataaatatgtaaaaaaaaatgtaaaaaggaaaaaaaaagacaaatttgtgtgggggttagagccaagaaaagataaatagcttggcaagacactggctgtgctgtaggttcaacttgtctcccagaatagggagg

SEQ ID NO: 443547 - DNA, 531 bp, Homo sapiens
ggcttggtggggcggcgggtcagacagggcattgtccagggctaccttggcagcctgggctggcagggggaatttctgtcgcttctgctctgtttcccgcctggcctccgggccctctccctgggcggcctcrccactgaccctgggaggtcacctcccagccacgggtgggtgatggcgctgcagggatggctgtgtgtgggaacgggtgctgttctcggggatccccgaggagcaaggatctttcggggatgctgtgaagagcccatgctgatcccagggcgggatcaggttcccctcaggaatctgggaaactctcaaggaggccctgcgggggctggttaaactgtctggggtctgggggcgttgggtcattggactgtaaatgcagggagggggcaggcggacttgccacattgcaggctctggtgcctccaagggaccttggaggccttcaagtctccttgctccttttatgaaggaggaggaagagggagagacgggcttctattctgctctcagagctctggc

SEQ ID NO: 443548 - DNA, 548 bp, Homo sapiens
ataacattcaagggaacagaaagtttcaggagagaagaaggtgtcttatatagcagggccatcaaggaagataaggaatgaaaaatatccattggatttggcaacaagtaagttagtagtgattagtgtcagcaatagggccagcccacaaatgtctgaggagtgagagggcaaatatttgtcatgaaataaggcacaaaacttaagtgcaggcagctggagaaaggcctggccacccaaggaggtgatatamaatatgagctttcatgttggagcagtagaggacaaagacattggtgtgtgttgtagtgggtagtcaggagagggacatgaggggatacacagggaggaggaaagatgtacattgcaatttcctaattaaggagaaaatggaaaggcttcttggtagccatggcaccagtcagctgacacagggaatgccagatgtttgcaggaggagaataaattgaagggctagttgttaatgcatctaggttctggaattcatgggaaacacattttgcggcagtggaacagcaggatgtagg

SEQ ID NO: 443549 - DNA, 468 bp, Homo sapiens
ttggagcaagagccagatcatagaagatttcatagaccaatgtaagagctttgcccctggaaatccactgaagggcttggaacatatgagtgacaccagttgatttactttttaaggaggattactcaagctgccatgtgaactgtagtggggcaagcacagaagcagaaaggccacctaggaggctgttgcggtagttcagcaggatgmtggatgtttataacagagaggcagttatagagtctgacagaagtaaaatgattctaggtatgttttaaaggtagagctgctaggatttgctgatggattggatgtgggatgtgactgaaagggagaagtcaagaatgactccaaagtttctgtactaggcaactacaaggatgcaattgccatttattcagatggagaaaactgttggagaagcttgcttgggaagcgtcaggaattctggttttgagatgtgtataa

SEQ ID NO: 443550 - DNA, 600 bp, Homo sapiens
aggattactcaagctgccatgtgaactgtagtggggcaagcacagaagcagaaaggccacctaggaggctgttgcggtagttcagcaggatgatggatgtttataacagagaggcagttatagagtctgacagaagtaaaatgattctaggtatgttttaaaggtagagctgctaggatttgctgatggattggatgtgggatgtgactgaaagggagaagtcaagaatgactccaaagtttctgtactaggcaactacaaggatgcaattgccatttattcagatggagaaaactgttggagaagcttgcttgggaagcrtcaggaattctggttttgagatgtgtataagatattcaaatggaggagttgaggagctggctatggaagtctggaattcaaggaagatgccttagtcagtatagacttgactacgttgtggtaacaaacttaagatcgcaatggtttagcacacaaagtttgatttctcacttttgtcataatcctgaatggtagtgcctaggttttcttctagggtttttatggttttaggtctaatgtttcagtctttaatccatcttgaattaattttcgtataag

SEQ ID NO: 443551 - DNA, 517 bp, Homo sapiens
ggaaaacctaacaacatggagagtaggagagaacatggtttatctggagatcaccatctctgctatcattgttatataaagccaaggggttaggtgtggtggcttgtgtctgtaatttgtaatcccagcacttgggaagccaaggcagggggatcgcttgagccgaggagttcgagaccagcctgggcaacatggtgataccccatctctacaaaaaaattagacaggtgtgatggcatgtgcctgtagtcccagctactcaggaggctgaggcaggaggatcactgragcccaggagtttgaggctgatcgtgccactgcacccagcctgagtgacagagtgagaccctctctaaaaaaacaaaaagcctccaaagtagatgagattaccaagggagtggaggtagataaagggaagagaatacaccctagaattaagcactgaagcatgtcagtgttaagagagcatgaggaggtacttgagaaggaatctgagagggagtagccagtgagatga

SEQ ID NO: 443552 - DNA, 578 bp, Homo sapiens
ggtattgggaatggaagaaatggcactgtagccagagagggacatggggtaagaagtatgtttaatttttttgttaagattggagatattgaaatatattagtagtttgagggaatatgtgttgacacaggagagagatggaagaattgttggggatgactttaagtgtacaagagaggatggtatctaatacagaagttgatggaatgcccttaggtaagagaattgaaagttcatccacagtgacaggtgggaaggcagaatacatagatacagatgcaggtagggtagttgatgtggtaatggaagcatgcagacattctcttcaacatacttattttttcctctcagtgaaacaagaatcaaggttatcaactgagaataagaacatgaaggagttactggaggtttgtggagaaataaggtgtgacatgatcagttaggagagcaaggasaaggcatgaactagggaaatgtggcaggactgcaaggcagctctaagggcccacttgaatttggtggtcatggacttaaacgaacatcagttatcaatattgtgaggtttttggtagacttgt

SEQ ID NO: 443553 - DNA, 592 bp, Homo sapiens
tacattattcatccattagaggcaataaagtaacatgagatggcattcctggaactggattccagtcctgctttattattataataaatggctgagtgaccttggacaactcactttacctttcttggtttctgcctcaccaatagcaaaagaaaatctcagaaattctttaaagtaagtgtgtggtatagtaaattcgagtcttcagaaggatccgggtccaaatcttgcttctgacacttattagttctgagcaagtttcttctgagccccagtttctgcagttccaaaatgggaataaggatatttacctcataacagagttgttataatgatcaaataagacaagctgagtgcagagtatcacagatattaactcctttcwctgtcattttccctttcagctcaaatactatatggtactgttctgtgcagatggaaagttaattcctcttagaaaaatgtaactaccaacagagactaagcgtaatcaggatactcaaaggatgcatttgagattacagagtcttgaacagcttttgttatggtgtaatttcatttcatttggaaaaactctttatgaccatttgat

SEQ ID NO: 443554 - DNA, 615 bp, Homo sapiens
tgggctgtgtcttattcatcctaatatgcaacaatgccttacaagtacacaataacatgtgtacaagttgttctcgccacttggaaactaccatattctccattccacatctacagcttctaatttgtgattcagctctaatgtcacctcttctggaaagcctttcctaactccctgtatggtttggctgtgtccccatccaaatctcatcttgaattgtagctcctataattcccacctgttgtgggaaggacccagtgggagataattgaatcacagggagcagtttcccccatactgttctggtggtagtgaataagtctcagcagacatgatggttttataaggggttttccctttcttttggctctcattctctcttgcctgccaccawgaaagatgtgccttttgccttccatcatgattgtgagggttccccagccccatggaactatgagtccattaaacctctttttctttataaattactcagtcttgggtatgcctttatcagcaccgtgaaaacagactaatacactccccaaggcaaaactaatcacttctaccgctgaaaaatttttcttccatctgaaaaaatggcagtgactcttgggt

SEQ ID NO: 443555 - DNA, 588 bp, Homo sapiens
ggtgggaatggcaagttctcagcctcgcttgaggctctgaaatcacaatgcaatttgtaaagagagaaatgagagaaggagggaaakaaaagagaatggtgaaagagaggttaaagaagagagatagaggagagagagagagatacagagagagaggaggacaaaaaggaaaaggaggaggaagtggaggagggggaggaggagaaagggtagagagaagaggggaagcagagacaaggaaagagaaggcaacagaatacacaaaacaccaaggaaagacccagatggaaggaagagaaataatctatttcaagggaatatgtttgtaagacatacacctttcacaggtaggaagcagggaaataacaatattttgaagggaaaagaaccacaatagcccatgtgtggcatgtacacatgtagccctcaagagatcccaccagaggatctatgtgggttgggaaatattcatttcccaaggcgaaaaaacaaatcctcttacacaagcaggcacatgtgtgtaatcagacacatttcttgcagcatatggaatgcagactgtattttttaaaagctgtttaccttgac

SEQ ID NO: 443556 - DNA, 588 bp, Homo sapiens
ggtgggaatggcaagttctcagcctcgcttgaggctctgaaatcacaatgcaatttgtaaagagagaaatgagagaaggagggaaagaaaagagaatggtgaaagagaggttaaagaagagagatagaggagagagagagagatacagagagagaggaggacaaaaaggaaaaggaggaggaagtggaggagggggaggaggagaaagggtagagagaagaggggaagcagagacaaggaaagagaaggcaacagaatacacaaaacaccaaggaaagacccagatggaaggaagagaaakaatctatttcaagggaatatgtttgtaagacatacacctttcacaggtaggaagcagggaaataacaatattttgaagggaaaagaaccacaatagcccatgtgtggcatgtacacatgtagccctcaagagatcccaccagaggatctatgtgggttgggaaatattcatttcccaaggcgaaaaaacaaatcctcttacacaagcaggcacatgtgtgtaatcagacacatttcttgcagcatatggaatgcagactgtattttttaaaagctgtttaccttgac

SEQ ID NO: 443557 - DNA, 379 bp, Homo sapiens
tactttaaccctccaagaatggaggttgcccttgctcacccaggaggacctaaattacacaggtttacattgaatccatagtatgtagggaaaacaaccatgtgaacactgtgatcacaaactaggcttaaattgatcttacttgtaatcctggtggtcctgcaggtcctacagctccaggaaatccgggtgctccttgtgggccctagagaggcaagtttttaccaagttcaaaaagcaaggcagttttccaagaaaaatgaaaatatgtatgtccacgagaactgtacaagaatgttcatagcaactttattcataatagtcaaaaattgsaaatgttccagttgtccaatgatacaaggataaactctgatagatt

SEQ ID NO: 443558 - DNA, 641 bp, Homo sapiens
acactatttcaggttatagagaaattctcctacatttacagttttacctttcacatttaggtttgtaatctatcyagaggtcacctttgtatgtgatatagggtagcaatccaactctatttttctccagataacagtgcttttcttttctttttcaggtaatcgaaccaagaggatatgatagcatatgcttagcataatgtggtaaattggtaggactgctcatagtcacccgtggaagccaccagcctgggagctctggccacgttaggttcttcctggatatcctaagggtcaagaagatcaatagctctgtaaacctatagtccatttatagcttgtaatgtgacacactggtttggaagctctgtcacatgatgatctacccattccaataccaaaaatccatccttcccttgatgtaaaattacttttatctcatcatctgtttctgagctctatattctattaattggtttactggccttttactgtgcactcctacttattactaataataatatgtctttgcagcatttctcaaattgtagaggggaaagtcacctgttctttattcaaaaatcaatttaaatattcatagacatttattcttctatctacattttagaataagtttttaa

SEQ ID NO: 443559 - DNA, 596 bp, Homo sapiens
ggctctacccatcttgagagcaaatatacaaagaacccccagtattagttttgctgattgctcaagccactctgagtcccacagggggcaaaaaaaaaaaaaaaaaaaaaaaaggaaaggcatcctcaaatggaagkgggggggctacttcctgaagagagctttctccaaagttctgctctgatagcctgctgtttgaattggaccaaggagagaggctacattatctagaagagtctgtgttagtgctccacactttagtaactttaaaacgtaaagcagcatttctcaaagggaaggtcaggatgaccttgggggctgaaggaacttgtgtgtatgagagaaagatagttcaataaagggactcagtggcaaaatatacttttcccttgcctgcccaaggtctgccacaaaaaatgcagcattcagaggctcatttttcctcctcattcttctcttttctttcccctaattttgtttagagccaagttctgtatgtaccctgaatctgtttttcagtcctctcttgtcactggttctgccaacctcaccctgttaacaaactctgactctttgcttgcccatgttcatttttc

SEQ ID NO: 443560 - DNA, 596 bp, Homo sapiens
ggctctacccatcttgagagcaaatatacaaagaacccccagtattagttttgctgattgctcaagccactctgagtcccacagggggcaaaaaaaaaaaaaaaaaaaaaaaaggaaaggcatcctcaaatggaagggggggggctacttcctgaagagagctttctccaaagttctgctctgatagcctgctgtttgaattggaccaaggagagaggctacattatctaraagagtctgtgttagtgctccacactttagtaactttaaaacgtaaagcagcatttctcaaagggaaggtcaggatgaccttgggggctgaaggaacttgtgtgtatgagagaaagatagttcaataaagggactcagtggcaaaatatacttttcccttgcctgcccaaggtctgccacaaaaaatgcagcattcagaggctcatttttcctcctcattcttctcttttctttcccctaattttgtttagagccaagttctgtatgtaccctgaatctgtttttcagtcctctcttgtcactggttctgccaacctcaccctgttaacaaactctgactctttgcttgcccatgttcatttttc

SEQ ID NO: 443561 - DNA, 596 bp, Homo sapiens
ggctctacccatcttgagagcaaatatacaaagaacccccagtattagttttgctgattgctcaagccactctgagtcccacagggggcaaaaaaaaaaaaaaaaaaaaaaaaggaaaggcatcctcaaatggaagggggggggctacttcctgaagagagctttctccaaagttctgctctgatagcctgctgtttgaattggaccaaggagagaggctacattatctagaaragtctgtgttagtgctccacactttagtaactttaaaacgtaaagcagcatttctcaaagggaaggtcaggatgaccttgggggctgaaggaacttgtgtgtatgagagaaagatagttcaataaagggactcagtggcaaaatatacttttcccttgcctgcccaaggtctgccacaaaaaatgcagcattcagaggctcatttttcctcctcattcttctcttttctttcccctaattttgtttagagccaagttctgtatgtaccctgaatctgtttttcagtcctctcttgtcactggttctgccaacctcaccctgttaacaaactctgactctttgcttgcccatgttcatttttc

SEQ ID NO: 443562 - DNA, 546 bp, Homo sapiens
tgtttgaattggaccaaggagagaggctacattatctagaagagtctgtgttagtgctccacactttagtaactttaaaacgtaaagcagcatttctcaaagggaaggtcaggatgaccttgggggctgaaggaacttgtgtgtatgagagaaagatagttcaataaagggactcagtggcaaaatatacttttcccttgcctgcccaaggtctgccacaaaaaatgcagcattcagaggctcatttttcctcctcattcttctcttttctttcccctaattttgtttagagccaagttctgtaygtaccctgaatctgtttttcagtcctctcttgtcactggttctgccaacctcaccctgttaacaaactctgactctttgcttgcccatgttcatttttcacacttccacctaatgatctagcagccagcacatttggactctctttcaactccaagctcttatgacaataatcaaccacagccaaaacatctgtgctataacaacatataccttcacagaacatacaaaattaagttgaat

SEQ ID NO: 443563 - DNA, 593 bp, Homo sapiens
tgccatagtctgaatttactattgtaatcaattctttcttgaaattgcccccaaatgtgcatcagctaatattaataatgactaatatttatttactgctatgtgttcagcactgtgccaagcactttataaacactgttttattaatcctcacaacaaccatatgagggaggatgtattatgcccattttgtatatgagacagctaagacttagagtttagaaatttrccaaatggcacatatcaatagagattcaggcccaggtactctagagcccacaactgtgccaatactatgttgccaaccatcaggcaaaacagtcatgagtcatagcacgtggtgtcacactgccagctgcctccttgcttcctctccacaatccaatgatagattgttccaaagcaggggcaagaatatccatggcagtgcccttagtcagacttctttgcttcctcatctcctctgacatggtagttgtacggctctttctcccgagcaatgagccagcatgacatttgagggccaaacgcagacattgtttgaatttattgaggttctttatcagcagcagctattttttctccagcagcaa

SEQ ID NO: 443564 - DNA, 610 bp, Homo sapiens
ataaacttcctggcctctaggttttctctaacttttctttatattgcactcaggtcatcttgctgagctactgtttagaaaaatcagttcgttctcattcttttaaaggaatatgaatgactcttggtttcctatggcatcaaagcctctgtgtagcagccttattactcgaacttcactcactgtgtcaacccacttcaggctggtacctagaacactgattctcacttttgagactttactcaaaccacttcctttgcctaaaatgttccttgagacctcctcaacaatcctgtcactccatgtatgcatagccagcctcaaatttctatctccccatgaaaattctcttcataataaaaatgagatgagtggaaatttaattaaaaccaagcaatcaaccaacaaaacaaacaacaacaacaacaaaagcgagataagcagtaggattcccagtcttcttactgtttggttatcagtggcttctccagaaatgctttttttttttaacccatctytcattttttatttcagtaggacaactttaattcgagatagcactctctacttctatctgccaatggttatcaacctcggctttgcattagag

SEQ ID NO: 443565 - DNA, 590 bp, Homo sapiens
tcccatcatattcacaggtcccacccacactsaagaggagggaattatacaggtcatataggcgggggtgggagtcttagaatcttgtcttccatagcacagaattattttatattaatatattttaataagaaagaaatctaggggtatatacattaggatgttaacactaatcatccctgctttcaagtggtattctattttgaaattttatagtttttattctataaagcacttgtattacttgggaggaaaggaagaaaaatggaaatgaaggaagggaagaaaaggtaaataaggaagaaaggaagaaccttctattgcttccaaaactaagcatagttcattctatcaaaacagtttctccataagatactgtcaactatgttcaaggaattatctaccaatacctccttcaagcaatcctatattcaagacaagccaagtaccctggcccatatttatcctgtgttttcctatctgtatggcacactcaaattactccactgcttcgtttctgttaaaatcctatgcatcccacaaagcccattgctctatcctgtatgagttaattcttgattccaccagcc

SEQ ID NO: 443566 - DNA, 590 bp, Homo sapiens
tcccatcatattcacaggtcccacccacactcaagaggagggaattatacaggtcatataggcgggggtgggagtcttagaatcttgtcttccatagcacagaattattttatattaatatattttaataagaaagaaatctaggggtatatacattaggatgttaacactaatcatccctgctttcaagtggtattctattttgaaattttatagtttttattctataaagcacttgtattacttgggaggaaaggaagaaaaatggaaatgaaggaagggaagaaaaggtaaatamggaagaaaggaagaaccttctattgcttccaaaactaagcatagttcattctatcaaaacagtttctccataagatactgtcaactatgttcaaggaattatctaccaatacctccttcaagcaatcctatattcaagacaagccaagtaccctggcccatatttatcctgtgttttcctatctgtatggcacactcaaattactccactgcttcgtttctgttaaaatcctatgcatcccacaaagcccattgctctatcctgtatgagttaattcttgattccaccagcc

SEQ ID NO: 443567 - DNA, 590 bp, Homo sapiens
tcccatcatattcacaggtcccacccacactcaagaggagggaattatacaggtcatataggcgggggtgggagtcttagaatcttgtcttccatagcacagaattattttatattaatatattttaataagaaagaaatctaggggtatatacattaggatgttaacactaatcatccctgctttcaagtggtattctattttgaaattttatagtttttattctataaagcacttgtattacttgggaggaaaggaagaaaaatggaaatgaaggaagggaagaaaaggtaaataaggaagaaaggaagaaccttctattgcttccaaaactaagcatagttcattctatcaaaacagtttctccataagatactktcaactatgttcaaggaattatctaccaatacctccttcaagcaatcctatattcaagacaagccaagtaccctggcccatatttatcctgtgttttcctatctgtatggcacactcaaattactccactgcttcgtttctgttaaaatcctatgcatcccacaaagcccattgctctatcctgtatgagttaattcttgattccaccagcc

SEQ ID NO: 443568 - DNA, 666 bp, Homo sapiens
tttagctaggcacatagccacccagaataaagactacaattcttgatctcacttttaggtgactgtgaccctgggactaagttctgaaccatgggatgtaagcaaaagggatgtcatgagatatttctttttttagagacagagtctcagtctgtcactcaggctgtggtgcagtgacacaatcatagtgcactgcagccctgagctcctgggctcaagtgatcctccagcctcagcctcccaagaatctgggactacaggtgcacatcaccacacctggctaatttttaaaatttttgtagagacaaagtctcactatgytgcccaggctggtcttgaactcctgggctcaagtgatcttcccatccaggtctcccaaaacactgggattaaggtgtgagcgatcatgtctggctgagatttctaagcatctttaaatggaggggcatactcctttcccctagtctctcatggtgctgttggaaggaagatatgatggctcaagctagagcagccattttggaccctgaattggaaatcatatgttgagaatagtggagaaagaagatagaagtagtctgggtccctgatgatcatggagatgccattcaagcccacaactacctacatggactcttacatcatctcaacattgaatttttctac

SEQ ID NO: 443569 - DNA, 577 bp, Homo sapiens
gacaggcctgaggaagggatgagggcttggtactgcgcagtcagaagttttaccagccaggccttcagaaagaaatggtcaatgtgctggaactcaaggatgagctcaaatacaatcacatttttaaaaatgttgacatagacaaaccaggttgaaatagataaacctggtctcaatctcagaagtgagactatggtgaaaaatgatatgcaaaagtatgttaaacatatacagaaattaaaatgtgcagaaaaaggaattggtcaaggaaatgttcattccatgttacaatggacccgctcctctcagtctgcaaagcaggttgatttctgttactccacagcttccaggcggctctgagatgtcaaaagacttttcctctagaagacctgccccctcactgttgatttcactgatgttacaagataacaacctggacagagagcaaaccaaactcatgccagacagagaggggcgtatccacatctgggagaaccaattaactycctgttagcaaccatccaccatccacctccccttcttcaaacagtaaaatccatacacctggcccctgccc

SEQ ID NO: 443570 - DNA, 598 bp, Homo sapiens
gcaacattttgacaacataatcctgcttaattctaatttagtatgacttcctttttttttttttttttaagttggtgaattcagcattgaatttaattctgcattggcaggcggatgactaaagtcatttgaagaaggatttaccctacctttggctcatcatgtatgaggctggatcacgtacataggagaacccatttyttcaggctagcagaaattgttaatgatcatcttgcttttcaaatggcaaagctgactcctttgtcactaggttgtagtaatatttgtataacatggcagaaagtgaactcactttcctgggaatgcctgaatttgccaactcaatctctttttctcctcacccctcagatatcagcgcttagtgaacgttagtgaggggctgtaggcaagaagttgatagaaagaagctgttgtcagcagtcacttttttagaatatattgtattgtactaggtgtaatgccttgggttaaatgctgccttgcacacaagaatttataatctgtgagaagataaaaatagacgaatgctgattagaaacactgtcttgggtagcatcataaaaggatgattcattag

SEQ ID NO: 443571 - DNA, 598 bp, Homo sapiens
gcaacattttgacaacataatcctgcttaattctaatttagtatgacttcctttttttttttttttttaagttggtgaattcagcattgaatttaattctgcattggcaggcggatgactaaagtcatttgaagaaggatttaccctacctttggctcatcatgtatgaggctggatcacgtacataggagaacccattttttcaggctagcagaaattgttaatgatcatcttgcttttcaaatggcaaagctgactcctttgtcactaggttgtagtaayatttgtataacatggcagaaagtgaactcactttcctgggaatgcctgaatttgccaactcaatctctttttctcctcacccctcagatatcagcgcttagtgaacgttagtgaggggctgtaggcaagaagttgatagaaagaagctgttgtcagcagtcacttttttagaatatattgtattgtactaggtgtaatgccttgggttaaatgctgccttgcacacaagaatttataatctgtgagaagataaaaatagacgaatgctgattagaaacactgtcttgggtagcatcataaaaggatgattcattag

SEQ ID NO: 443572 - DNA, 557 bp, Homo sapiens
gtcctggacagtgtaattaatttgtagctgaggaagttattgaaaagtaactttttgtaatcccagcactttaggaggctaaggtgggcagatcacttgagcccaggagttcaagaccagcctgggcaacatggcgaaaccccatctctacacaaaaaaacaaaaattagctgcgcatggtagcacgtgcctgtggtaccagctccttgggaggctgaggtgggaggatcgcttgagctcggaaggcagaggttgcagtgagccaagatcatcacaccactgtactccagcctgggtaacagagtgagaccctatctcaaaaaaaaaaaaaaaaaaaaaaaaagtaactttsgatttataaagctcctctgaagattgttctccttgagtcatttctggaaatccgaacccaaacatggaccttttgtgctgtgcaagtgttgtctttggtagaggattcaggccgagggagagctgctgtgacctcctgtttcagggagggtagccagaagggatttggcttacaccaccgactagggaaagtcagagcaggacac

SEQ ID NO: 443573 - DNA, 427 bp, Homo sapiens
tgtttgcctgaaaattgtctttattttatatgaacttctgaaggctgtttcagcttgctggagaatacggtctgtagttattttctttcggccttttaaagatggcattctattgttttcatgatgtttattaagaaatcaataggtaattgatttttatcctataagggaaatgtgtatttttcttctggttacttttgagaatttattmtttgtctttgattttcagcagttttgccttgatgtggctattttagttttcattgaatttgtcctctttggatttcactaaatttcttttttctatgcagtgattattagattgggtaattcttcactgttacttcttcaaaatattgcttctgtctcgcatttcctttcctcctttctgagactccaattacatctgtctgagatgtttgtatct

SEQ ID NO: 443574 - DNA, 562 bp, Homo sapiens
agaaaaaaaaaaaagatgcccccatacgatggcctgagagtggagaccagtgactcaaaagcagaaggctggttccaaaacrtcaaacttctgcagtctcagcttcaggtgaggaaggcagctctcactcagggaaagagccaaagttagaaacagtgcagctcttgccagtcattgacctaaggccaggcggctcctcagatgacctgcaaattggggacacaccacggcatgcagcagctgggctgaaggatcctgctcccagtggatttttgcaggggacgttctgattcccttagctgacgaatatgatcctatgttcccttatgattatgagaaagtagtgaagtgccagagagaggaacgacagacacagcaggagctagaaatatgaaaggaaatagaagaaagggaaaagaggcctgaagacaggcaagaagttaggggagttctgatcaaggcgaccaaatccagattctgatgaaggggaagattaggagggagagaggaggaaaagtagtagggtggagctgccattgcccttcccacttctctggtagag

SEQ ID NO: 443575 - DNA, 562 bp, Homo sapiens
agaaaaaaaaaaaagatgcccccatacgatggcctgagagtggagaccagtgactcaaaagcagaaggctggttccaaaacatcaaacttctgcagtctcagcttcaggtgaggaaggcagctctcactcagggaaagagccaaagttagaaacagtgcagctcttgccagtcattgacctaaggccaggcggctcctcagatgacctgcaaattggggacacaccacggcatgcagcagstgggctgaaggatcctgctcccagtggatttttgcaggggacgttctgattcccttagctgacgaatatgatcctatgttcccttatgattatgagaaagtagtgaagtgccagagagaggaacgacagacacagcaggagctagaaatatgaaaggaaatagaagaaagggaaaagaggcctgaagacaggcaagaagttaggggagttctgatcaaggcgaccaaatccagattctgatgaaggggaagattaggagggagagaggaggaaaagtagtagggtggagctgccattgcccttcccacttctctggtagag

SEQ ID NO: 443576 - DNA, 562 bp, Homo sapiens
agaaaaaaaaaaaagatgcccccatacgatggcctgagagtggagaccagtgactcaaaagcagaaggctggttccaaaacatcaaacttctgcagtctcagcttcaggtgaggaaggcagctctcactcagggaaagagccaaagttagaaacagtgcagctcttgccagtcattgacctaaggccaggcggctcctcagatgacctgcaaattggggacacaccacggcatgcagcagctgggctgaaggatcctgctcccagtggrtttttgcaggggacgttctgattcccttagctgacgaatatgatcctatgttcccttatgattatgagaaagtagtgaagtgccagagagaggaacgacagacacagcaggagctagaaatatgaaaggaaatagaagaaagggaaaagaggcctgaagacaggcaagaagttaggggagttctgatcaaggcgaccaaatccagattctgatgaaggggaagattaggagggagagaggaggaaaagtagtagggtggagctgccattgcccttcccacttctctggtagag

SEQ ID NO: 443577 - DNA, 562 bp, Homo sapiens
agaaaaaaaaaaaagatgcccccatacgatggcctgagagtggagaccagtgactcaaaagcagaaggctggttccaaaacatcaaacttctgcagtctcagcttcaggtgaggaaggcagctctcactcagggaaagagccaaagttagaaacagtgcagctcttgccagtcattgacctaaggccaggcggctcctcagatgacctgcaaattggggacacaccacggcatgcagcagctgggctgaaggatcctgctcccagtggatttttgcaggggacgttctgattcccttagctgacgaatatgatcctatgttcccttatgattatgagaaagtagtgaagtgccaragagaggaacgacagacacagcaggagctagaaatatgaaaggaaatagaagaaagggaaaagaggcctgaagacaggcaagaagttaggggagttctgatcaaggcgaccaaatccagattctgatgaaggggaagattaggagggagagaggaggaaaagtagtagggtggagctgccattgcccttcccacttctctggtagag

SEQ ID NO: 443578 - DNA, 553 bp, Homo sapiens
ggctaaaaataagattagcttcatgaggcctattaaattaactttgcactgaagtttaaaattaggccaagattgaaactatttcagaagttacatatatyataataaactttagactaatagaaattttcctataaagttaacattttacttgatagtcctgggaaacctgtaaattattaaaatgactctatgcttcatttatttttcttcctaacatgcatttatgtgaagttagtatattattaccatttcaaatgtagtacttcttaaaaattaaacattaacattaatattttagctttcccttttaaccttcagtgatgtatgaaacagaaacagaagtagtaataaagtgtaaggaaataaattattctttaaaatcaaccaagattctggatgtcttcaatgtaaaactaggcattgtctaaacacaatctggaggattatatgattctgcaggtttctgtgccttttaccttgagtttttttttgtttttgttttttttttttgagatggagtctcgctctgtcacccaggctggagtgcagt

SEQ ID NO: 443579 - DNA, 553 bp, Homo sapiens
ggctaaaaataagattagcttcatgaggcctattaaattaactttgcactgaagtttaaaattaggccaagattgaaactatttcagaagttacatatatcataataaactttagactaayagaaattttcctataaagttaacattttacttgatagtcctgggaaacctgtaaattattaaaatgactctatgcttcatttatttttcttcctaacatgcatttatgtgaagttagtatattattaccatttcaaatgtagtacttcttaaaaattaaacattaacattaatattttagctttcccttttaaccttcagtgatgtatgaaacagaaacagaagtagtaataaagtgtaaggaaataaattattctttaaaatcaaccaagattctggatgtcttcaatgtaaaactaggcattgtctaaacacaatctggaggattatatgattctgcaggtttctgtgccttttaccttgagtttttttttgtttttgttttttttttttgagatggagtctcgctctgtcacccaggctggagtgcagt

SEQ ID NO: 443580 - DNA, 553 bp, Homo sapiens
ggctaaaaataagattagcttcatgaggcctattaaattaactttgcactgaagtttaaaattaggccaagattgaaactatttcagaagttacatatatcataataaactttagactaatagaaattttcctataaagttaacattttacttgatagtcytgggaaacctgtaaattattaaaatgactctatgcttcatttatttttcttcctaacatgcatttatgtgaagttagtatattattaccatttcaaatgtagtacttcttaaaaattaaacattaacattaatattttagctttcccttttaaccttcagtgatgtatgaaacagaaacagaagtagtaataaagtgtaaggaaataaattattctttaaaatcaaccaagattctggatgtcttcaatgtaaaactaggcattgtctaaacacaatctggaggattatatgattctgcaggtttctgtgccttttaccttgagtttttttttgtttttgttttttttttttgagatggagtctcgctctgtcacccaggctggagtgcagt

SEQ ID NO: 443581 - DNA, 553 bp, Homo sapiens
ggctaaaaataagattagcttcatgaggcctattaaattaactttgcactgaagtttaaaattaggccaagattgaaactatttcagaagttacatatatcataataaactttagactaatagaaattttcctataaagttaacattttacttgatagtcctgggaaacctgtaaattattaaaatgactctatgcttcatttatttttcttcctaacatgcatttatgtgaagttagtatattattascatttcaaatgtagtacttcttaaaaattaaacattaacattaatattttagctttcccttttaaccttcagtgatgtatgaaacagaaacagaagtagtaataaagtgtaaggaaataaattattctttaaaatcaaccaagattctggatgtcttcaatgtaaaactaggcattgtctaaacacaatctggaggattatatgattctgcaggtttctgtgccttttaccttgagtttttttttgtttttgttttttttttttgagatggagtctcgctctgtcacccaggctggagtgcagt

SEQ ID NO: 443582 - DNA, 608 bp, Homo sapiens
aataagcatttatatgcagcttttgtgtggacatgtattttcaacccatttaggtaaatacctaggagtgaaatcgttgaatcatttggcaagactcaaactgtgttccaaagtggttgcatcattttgcattcccaccaggaatgaatgacagyttctggtgctccatatccttgtcagaaattggtattgtcaggtttttttttattatacccattctaataggtgtatagcttctcgatactgtttcaatttgtaattaactaatgacatatgatgttgagcaacttgtaaatgtttatttgccacgtgtataacatctttggtgagatatctattcagatcttctgtttcctttttttaattttaagagtttttgtatattttggacatcaattatttatcatttatgtgttttgcaaaaatgtttcctaattttttgcctctccattctctgaatagtctcagaaatttttaattttaatgaaattcacctttttaaaaaattttatggatcgaggattcagtgttggatgtaaaaagtcgctgccaaataaaaagtcacctatgctataatctcagctactccacagggtaaggcaggagga

SEQ ID NO: 443583 - DNA, 608 bp, Homo sapiens
aataagcatttatatgcagcttttgtgtggacatgtattttcaacccatttaggtaaatacctaggagtgaaatcgttgaatcatttggcaagactcaaactgtgttccaaagtggttgcatcattttgcattcccaccaggaatgaatgacagtttctggtgctccatatccttgtcagaaattggtattgtcaggtttttttttattatacccattctaataggtgtatagcttctcgatactgtttyaatttgtaattaactaatgacatatgatgttgagcaacttgtaaatgtttatttgccacgtgtataacatctttggtgagatatctattcagatcttctgtttcctttttttaattttaagagtttttgtatattttggacatcaattatttatcatttatgtgttttgcaaaaatgtttcctaattttttgcctctccattctctgaatagtctcagaaatttttaattttaatgaaattcacctttttaaaaaattttatggatcgaggattcagtgttggatgtaaaaagtcgctgccaaataaaaagtcacctatgctataatctcagctactccacagggtaaggcaggagga

SEQ ID NO: 443584 - DNA, 600 bp, Homo sapiens
ctgcctctttctgctgctttatcaagtttgctgttgaagatctctgaaatttttcagttcagtcattatgttcttcagyttcagaatttctgtttggttattttttatgttttctctctgtcaaacttttcattttattcacacattgttttcctgattttgtttggttggctgtgtcttcttgtgtagttcattgagcttcttcaagccaattagtttgaattcttcttcaggaagttcatagatctccatttctttagattggttatgggtattacattctttttgtgatgtcatgtttcccggattatttatgttccttgtggctttgccttggtgtattcatatttgaagaagtaggcacctcttacagtctttacagacacttcagtgggaaatccttttaccagtcagcttgtccggagattctggtaaggccaactggcatggtccatgggtgggattattttagggggctggcctggtgcctgggtcagtgggcatgtgggcctggctcttgagtccgcaacggttggcctggtgccttggcctgtgggggcaggcctatagccccagtccactcagtggactatgagcatg

SEQ ID NO: 443585 - DNA, 600 bp, Homo sapiens
ctgcctctttctgctgctttatcaagtttgctgttgaagatctctgaaatttttcagttcagtcattatgttcttcagtttcagaatttctgtttggttattttttatgttttctctctgtcaaacttttcattttattcacacattgttttcctgattttgtttggttggctgtgtcttcttgtgtagttcattgagcttcttcaagccaattagtttgaattcttcttcaggaagttcatagatctccatttctttagattggttatgggtattacattctttttgtgatgtcatgtttcccggattatttatgttccttgtggctttgccttggtgtattcatatttgaagaagtaggcacctcttacagtmtttacagacacttcagtgggaaatccttttaccagtcagcttgtccggagattctggtaaggccaactggcatggtccatgggtgggattattttagggggctggcctggtgcctgggtcagtgggcatgtgggcctggctcttgagtccgcaacggttggcctggtgccttggcctgtgggggcaggcctatagccccagtccactcagtggactatgagcatg

SEQ ID NO: 443586 - DNA, 600 bp, Homo sapiens
ctgcctctttctgctgctttatcaagtttgctgttgaagatctctgaaatttttcagttcagtcattatgttcttcagtttcagaatttctgtttggttattttttatgttttctctctgtcaaacttttcattttattcacacattgttttcctgattttgtttggttggctgtgtcttcttgtgtagttcattgagcttcttcaagccaattagtttgaattcttcttcaggaagttcatagatctccatttctttagattggttatgggtattacattctttttgtgatgtcatgtttcccggattatttatgttccttgtggctttgccttggtgtattcatatttgaagaagtaggcacctcttacagtctttacagacacttcagtgggaaatccttttaccagtcagcttgtccggagattctggkaaggccaactggcatggtccatgggtgggattattttagggggctggcctggtgcctgggtcagtgggcatgtgggcctggctcttgagtccgcaacggttggcctggtgccttggcctgtgggggcaggcctatagccccagtccactcagtggactatgagcatg

SEQ ID NO: 443587 - DNA, 429 bp, Homo sapiens
gccctagggtcaactgagacaggcctcatatctgattccattgggaaaagcctagtacctaagaccatgaaaacaggcctggaattgggtccataggggttgrccttatgctggagcctagagctgcaggggccatcctggagcttgaaggtgtgggtgccagcatggctctggatgggcctgttgcctgaggtcatgtgagctggcctggggcctggaggccacaagggctggtctagatcttggggccacagaggctaacctggtgcaggtattggcctgcagcttggggatgcaaaggttgacctggtgctggggcgaacctggaagctgaactggtgctggggtgagcctggaagctaagtctatgaaaatgagccacatattgagaccacagggatcagtctggcattaggcacactggtatta

SEQ ID NO: 443588 - DNA, 429 bp, Homo sapiens
gccctagggtcaactgagacaggcctcatatctgattccattgggaaaagcctagtacctaagaccatgaaaacaggcctggaattgggtccataggggttgaccttatgytggagcctagagctgcaggggccatcctggagcttgaaggtgtgggtgccagcatggctctggatgggcctgttgcctgaggtcatgtgagctggcctggggcctggaggccacaagggctggtctagatcttggggccacagaggctaacctggtgcaggtattggcctgcagcttggggatgcaaaggttgacctggtgctggggcgaacctggaagctgaactggtgctggggtgagcctggaagctaagtctatgaaaatgagccacatattgagaccacagggatcagtctggcattaggcacactggtatta

SEQ ID NO: 443589 - DNA, 429 bp, Homo sapiens
gccctagggtcaactgagacaggcctcatatctgattccattgggaaaagcctagtacctaagaccatgaaaacaggcctggaattgggtccataggggttgaccttatgctggagcctagagctgcaggggccatcctggagcttgaaggtgtgggtgccagcatggctctggatgggcctgttgcctgaggtcatgtgagctggcctggggcctggaggccacaagggctggtctagatcttggggccacagaggctaacctggtgcaggtattggcctgcagcttggggatgcaaaggttgacctggtgctggggcgaacctggaagctgaaytggtgctggggtgagcctggaagctaagtctatgaaaatgagccacatattgagaccacagggatcagtctggcattaggcacactggtatta

SEQ ID NO: 443590 - DNA, 429 bp, Homo sapiens
gccctagggtcaactgagacaggcctcatatctgattccattgggaaaagcctagtacctaagaccatgaaaacaggcctggaattgggtccataggggttgaccttatgctggagcctagagctgcaggggccatcctggagcttgaaggtgtgggtgccagcatggctctggatgggcctgttgcctgaggtcatgtgagctggcctggggcctggaggccacaagggctggtctagatcttggggccacagaggctaacctggtgcaggtattggcctgcagcttggggatgcaaaggttgacctggtgctggggcgaacctggaagctgaactggtgytggggtgagcctggaagctaagtctatgaaaatgagccacatattgagaccacagggatcagtctggcattaggcacactggtatta

SEQ ID NO: 443591 - DNA, 502 bp, Homo sapiens
gggtgggcccagaacctgagtttatgaggctgggttcagtatagaatctatggcagcagcctggccctagggtcaactgagacaggcctcatatctgattccattgggaaaagcctagtacctaagaccatgaaaacaggcctggaattgggtccataggggttgaccttatgctggagcctagagctgcaggggccatcctggagcttgaaggtgtgggtgccagcatggctctggatgggcctgttgcctgaggtcatgtgagctggcctggggcctggaggccacaagggctggtctagatcttggggccacagaggctaacctggtgcaggtattggcctgcagcttggggatgcaaaggttgacctggtgctggggcgaacctggaagctgaactggtgctggggtgagyctggaagctaagtctatgaaaatgagccacatattgagaccacagggatcagtctggcattaggcacactggtattagggcacactg

SEQ ID NO: 443592 - DNA, 502 bp, Homo sapiens
gggtgggcccagaacctgagtttatgaggctgggttcagtatagaatctatggcagcagcctggccctagggtcaactgagacaggcctcatatctgattccattgggaaaagcctagtacctaagaccatgaaaacaggcctggaattgggtccataggggttgaccttatgctggagcctagagctgcaggggccatcctggagcttgaaggtgtgggtgccagcatggctctggatgggcctgttgcctgaggtcatgtgagctggcctggggcctggaggccacaagggctggtctagatcttggggccacagaggctaacctggtgcaggtattggcctgcagcttggggatgcaaaggttgacctggtgctggggcgaacctggaagctgaactggtgctggggtgagcctggaagctaagtctatgaaaatgagccacatattgagaccacagggatcagtctggcattagkcacactggtattagggcacactg

SEQ ID NO: 443593 - DNA, 601 bp, Homo sapiens
tggaagttgtctgcttctggaggctttttaataggcctctaggtcagatttaacatgggtctggatgtccagattataggaccctaaacacttttatccttagaaccatgtcttctctagtgtttttcatagagcttaaacagattctttgcgattaaaaaaataatcaaaatggctttttatagcatagttctaatgctaagtgtgtttcttccaataaactcattatcttggagggatacatccaatcatatccctcttggaaatacattttgtattaattgtgcacatgactgcacatatattaattttgtaaatactgacaggatacaaattcaatgatatggaatctgtcagagcaggattcaagccaagagtcaygtaccttcttgtaacatttacaaaatgagagtttatgagaaatttgggacaagatcacattaacattttatctaggagtagaactttagctcaaacgaaagctttaattaaaatgaaaagtttcttctttggtaaatgacttttaaaactttacactttggtaactgatccttggttatgctaagtacaaataaattatttccaagaaattttctttgag

SEQ ID NO: 443594 - DNA, 580 bp, Homo sapiens
aatttgaagagtgacattttccccccaaagrccaaatttctaactttgtggttctttctaatgagctgtctgtagctcaagccatacccctagcagctggatgataaaaaaggctgtttatttgatcctcagactggggaggagcactagtgatttctttccctgctttactggccctgagaagaatacaacttctcgcttgcactctgattagcagcaggtagaagaaaaaagctaatgttagaacttttcccctgtccctgatgctccagacactgattcagcagaggtgaaagctctgctttcattgttcagagctatagatttatgaaaattgcttcttttgataggcagccaggcatgaagcagccttctgcttctagtctcaaaaaaaaaaaaaaaatactgagggctaatgatgtaaatcgaagatattgccatatttcctggatttggatctcattgctactcctagagcaaagaatggttcctatgactgaagacagaaaccatacaattcattcaacattctgtctttggtaatccctgaaagccacactagaaatttaggattgtgtta

SEQ ID NO: 443595 - DNA, 580 bp, Homo sapiens
aatttgaagagtgacattttccccccaaaggccaaatttctaactttgtggttctttctaatgagctgtctgtagctcaagccatacccctagcagctggatgataaaaaaggctgtttatttgatcctcagactggrgaggagcactagtgatttctttccctgctttactggccctgagaagaatacaacttctcgcttgcactctgattagcagcaggtagaagaaaaaagctaatgttagaacttttcccctgtccctgatgctccagacactgattcagcagaggtgaaagctctgctttcattgttcagagctatagatttatgaaaattgcttcttttgataggcagccaggcatgaagcagccttctgcttctagtctcaaaaaaaaaaaaaaaatactgagggctaatgatgtaaatcgaagatattgccatatttcctggatttggatctcattgctactcctagagcaaagaatggttcctatgactgaagacagaaaccatacaattcattcaacattctgtctttggtaatccctgaaagccacactagaaatttaggattgtgtta

SEQ ID NO: 443596 - DNA, 580 bp, Homo sapiens
aatttgaagagtgacattttccccccaaaggccaaatttctaactttgtggttctttctaatgagctgtctgtagctcaagccatacccctagcagctggatgataaaaaaggctgtttatttgatcctcagactggggaggagcactagtgatttctttccctgctttactggccctgagaagaatacaacttctcgcttgcactctgattagcagcaggtagaagaaaaaagctaatgttagaacttttcccctgtccctgatgctccagacactgattcagcagaggtgaaagctctgctttcattgttcagagctatagatttatgaaaattgcttcttttgataggcagccaggcatgaagcagccttctgcttctagtctcaaaaaaaaaaaaaaaatactgagggctaatgatgtaaatcgaagatattgccatatttcctggatttggatctcattgctactcctagagcaaagaatggttcctatgactgaagacagaaaccatacaatkcattcaacattctgtctttggtaatccctgaaagccacactagaaatttaggattgtgtta

SEQ ID NO: 443597 - DNA, 655 bp, Homo sapiens
tatgatccatttcgacttaatttttgtgacaggtgtaaggtctgtgtatagatttatatttttgcatgttggatgaccagttattctascaccatttgttgagaagactaccttttcttttgaattgcccttgcttctgtgtcagagatcagttcactacgtacatgtgggtctattttttggcccgctggtatgttccattgatctatttttttattctttcaccaataccacactgtcttgatcactataactttatcatagattttgaagctatacagtgtaagactttcaaacttgttcttctttaacatttgttggctaatctggatcttttgcctttttatataaactttggaatcagtttgtcaatacccactagataacttgctgggatttctattgggattgcttttaatctatagatgaaatttgaaagaactgacatcttcacaatattgagtctttctatccatatacttagaacaactctccatttatttagatcttcactgaatgccttcatcacagtttgagttttcctcctatagatctgataaaatcagaacaatgatgtggagctatcactgtctttgttgaaggaaacaacaaaacatatgtgctcattgggagaaatattagcaaattatcacac

SEQ ID NO: 443598 - DNA, 655 bp, Homo sapiens
tatgatccatttcgacttaatttttgtgacaggtgtaaggtctgtgtatagatttatatttttgcatgttggatgaccagttattctagcaccatttgttgagaagactaccttttcttttgaattgcycttgcttctgtgtcagagatcagttcactacgtacatgtgggtctattttttggcccgctggtatgttccattgatctatttttttattctttcaccaataccacactgtcttgatcactataactttatcatagattttgaagctatacagtgtaagactttcaaacttgttcttctttaacatttgttggctaatctggatcttttgcctttttatataaactttggaatcagtttgtcaatacccactagataacttgctgggatttctattgggattgcttttaatctatagatgaaatttgaaagaactgacatcttcacaatattgagtctttctatccatatacttagaacaactctccatttatttagatcttcactgaatgccttcatcacagtttgagttttcctcctatagatctgataaaatcagaacaatgatgtggagctatcactgtctttgttgaaggaaacaacaaaacatatgtgctcattgggagaaatattagcaaattatcacac

SEQ ID NO: 443599 - DNA, 539 bp, Homo sapiens
gctgactagacacagccaggaggaacagctcccaccaagggaccaggacattgggaagactggtgtgctcctggcagatcttcagagggaaggctttgagagcagacagagggaagacacagatgttgggctgaagggggaggaagscgggaaccctgcaaggggcaaccgtgcaccaggactcattccaggtccccaaaatctcctggaggagaggtgagttgaacaggcaaggggcaacctcctcttgtcgcaggcccctgaattcctgacaggaggagaccctacaaccaccagggacacttgagttgtcaggaagacctgcttataaagtgttaatggtagaattccagactgtgcaaagcccagaaggttttgtgtgggagcatctgtagtggagaatggtcagggacacccattgccctaggctaaacttgttctcataggagacttcagccctaggggaactgtcagacctgaactctgcagggcattcttgcccctgagacagggccagtctgacctgagcatccttcagt

SEQ ID NO: 443600 - DNA, 539 bp, Homo sapiens
gctgactagacacagccaggaggaacagctcccaccaagggaccaggacattgggaagactggtgtgctcctggcagatcttcagagggaaggctttgagagcagacagagggaagacacagatgttgggctgaagggggaggaaggcgggaaccctgcaaggggcaaccgtgcaccaggactcattccaggtccccaaaatctcctggaggagaggtgagttgaacaggcaaggggcaacctcctcttgtcgcaggyccctgaattcctgacaggaggagaccctacaaccaccagggacacttgagttgtcaggaagacctgcttataaagtgttaatggtagaattccagactgtgcaaagcccagaaggttttgtgtgggagcatctgtagtggagaatggtcagggacacccattgccctaggctaaacttgttctcataggagacttcagccctaggggaactgtcagacctgaactctgcagggcattcttgcccctgagacagggccagtctgacctgagcatccttcagt

SEQ ID NO: 443601 - DNA, 539 bp, Homo sapiens
gctgactagacacagccaggaggaacagctcccaccaagggaccaggacattgggaagactggtgtgctcctggcagatcttcagagggaaggctttgagagcagacagagggaagacacagatgttgggctgaagggggaggaaggcgggaaccctgcaaggggcaaccgtgcaccaggactcattccaggtccccaaaatctcctggaggagaggtgagttgaacaggcaaggggcaacctcctcttgtcgcaggcccctgaattcctgacaggaggagaccctacaaccaccagggacacttgagttgtcaggaagacctgcttataaagtgttaatggtagaattccagactgtgcaaagcccagaaggttttgtgtgggagcmtctgtagtggagaatggtcagggacacccattgccctaggctaaacttgttctcataggagacttcagccctaggggaactgtcagacctgaactctgcagggcattcttgcccctgagacagggccagtctgacctgagcatccttcagt

SEQ ID NO: 443602 - DNA, 428 bp, Homo sapiens
ataaaaagtctcagaggaatatctactctacttgtggtagctaagccttaaagctatagcarggttgtatgcttacactagacctatcagtttaaccatttgagaagaactaagcattggtaaaaaggcagattctataacagatatccaaaaattatagcctatactgtaaaatatatacctggatcacattaatattacatcaaggttctgtagaggaacattagtcccaaaagtgcatgattaaagtttcagtagttggtagacacaaataacagtcacctatattaacaaggaaatgtagtgtctgagattttaccccatttataagctaataagttagtctgttactgtttcatgaatagggggaagacacaacagtcctggatcagagacaaacatttcattactcacggcattgctaatgt

SEQ ID NO: 443603 - DNA, 428 bp, Homo sapiens
ataaaaagtctcagaggaatatctactctacttgtggtagctaagccttaaagctatagcaaggttgtatgcttacactagacctatcagtttaaccatttgagaagaactaagcattggtaaaawggcagattctataacagatatccaaaaattatagcctatactgtaaaatatatacctggatcacattaatattacatcaaggttctgtagaggaacattagtcccaaaagtgcatgattaaagtttcagtagttggtagacacaaataacagtcacctatattaacaaggaaatgtagtgtctgagattttaccccatttataagctaataagttagtctgttactgtttcatgaatagggggaagacacaacagtcctggatcagagacaaacatttcattactcacggcattgctaatgt

SEQ ID NO: 443604 - DNA, 465 bp, Homo sapiens
agcctatactgtaaaatatatacctggatcacattaatattacatcaaggttctgtagaggaacattagtcccaaaagtgcatgattaaagtttcartagttggtagacacaaataacagtcacctatattaacaaggaaatgtagtgtctgagattttaccccatttataagctaataagttagtctgttactgtttcatgaatagggggaagacacaacagtcctggatcagagacaaacatttcattactcacggcattgctaatgtgagtgtcatgttgtatcagtcaactttgtcccccaaatctcacaaggataaagcagaggaacccaagtcaatggtgaacatgctataataaatttgtattgcagcaaagaaacactgagcttgggggatgtactgcttttacattaagcagtagacaagtctgcttaacgttccaaagggaaacattttttcacc

SEQ ID NO: 443605 - DNA, 428 bp, Homo sapiens
ataaaaagtctcagaggaatatctactctacttgtggtagctaagccttaaagctatagcaaggttgtatgcttacactagacctatcagtttaaccatttgagaagaactaagcattggtaaaaaggcagattctataacagatatccaaaaattatagcctatactgtaaaatatatacctggatcacattaatattacatcaaggttctgtagaggaacattagtcccaaaagtgcatgattaaagtttcagtagttggtagacacaaataayagtcacctatattaacaaggaaatgtagtgtctgagattttaccccatttataagctaataagttagtctgttactgtttcatgaatagggggaagacacaacagtcctggatcagagacaaacatttcattactcacggcattgctaatgt

SEQ ID NO: 443606 - DNA, 558 bp, Homo sapiens
ctaaggaatttatttaaatgatgcaagaagtgaacgacaaaatcaccgttctgagaatgaaacccatctgacagagctgaaaaactcactacaagaatttcataatacaatcagaattgttaacagcagaatagaccaagctgaggaaagaatctcagaacttgaagaccagatctttgaatcaactcaatcagacaaaaatgaataaaaaagcataaacacaacttcagagaaatatgggattatgtaaagagaccaattctatggctcattggcctgaaagagaggaagagagagcaagcaagttggaaaacatatttgatgataactgtccatgaaaatttccccaactttgctaaagagctcgacattcaaattcrggaaatgcaaagaatcccttgagatactacacaagatgtccattcccaagacacatatttattagattctccaaggtcaacctgaaagaaaaaataataaagacaactagagagaaggggtaggtcacttaaaaaggaaccccatcaggctaacagcagacctttcagcaggaactat

SEQ ID NO: 443607 - DNA, 575 bp, Homo sapiens
tgtagcatttctacataccaacaacatccaaggtgagaggcaaatcaagattgcaatcacatttacaatactcacaccaaaaattacctaggaatacagctaaccagggaggtgaaagatctctataacaagaattaaaaacgctgctgaaaaaaatcagagaggacacaaatatgaaaacattccatgctaatggataggaagaatcacctttgttagaatggccatactgcccaaggcaatttacagattaattactatttctatcaagcttccaaaggcattcttcagggaactaggaaaaactattctaaaattcatatggaaccaaaaaagagcccaaggcaatcctaagcagaaagaaaaaagcygggggcatcacatttcccaacttcaaatgatactatcaagctaaagtaaccaaaacaacttggcactggtacagaaacagacacatatagcagaccaatgtagcagaacagaaaacccagaaataaagccacacatgtaaaactatctgatcttcaacaaagttgacaaaagcaagcaatgtggaaaagactccctattcaata

SEQ ID NO: 443608 - DNA, 553 bp, Homo sapiens
acctattataggcgatgatactttaaacaaacaaagcaagaggaagtcttagaagtgagaaacctttgccataaatgattgaagatcctgaccaaaacacacaacttatatttgaagaccaaaatttcgaaatgatttttataagctgttaatcttgatataattatatatatacatatacgtgtgtgtgtgttaaacatactcaaataggtgataratttaaactttttaactctaattttgaaataattacctttactaacaaataatgggtaaatatattatctttaatttaccaacttaataacctgcacactttttaaatcagacaacatatattcattatcaagtgtacatattctcttttccctgtacatattcctcttgagggatgatatatccgaaatagtgcctcactgtggaaatagtttctgccttctgaaacacaacttgaggatataacagaatttccagcagggaggtatagtttgaaaagattccagaaacgattctgataccacactcactgttgcgaatcaatgacaatatgtca

SEQ ID NO: 443609 - DNA, 606 bp, Homo sapiens
ttgtggaataatactctgtagattcccttggctgtcattatcccaataaccaaaaataatatctctatcacaggcaatagtgcatattggctaagagattgggcgctggagtcagacaagagccagactgcctgagttcaaattccagctcagtcatttattaagtgaatgtgtaaccacacaaaaccagtctggttcttcaacttttatgtaaaaaagttatgaatagtttttcagttgccatggactcccaggctgaaggtcccataacctgaacatgcccaaatgaaccaaacttgcaatgatgggcggracttaagtgctcagcccaagaagtgggactgaattaaaaaggggacactgcatggcaagatccaggatccaatcaaatggagcccttgtggtaccccatggcaggattcagtcagatcatgcctcccagcatcatctcatcacaagacccaatcagataacacttcattaccctattcctataaaacccaactcagcccccagctcagggagacagatttgagcattttctcctgtctccttgccagtcaaccagcaatacagcttctcttttctcaagcctgtgccatggta

SEQ ID NO: 443610 - DNA, 543 bp, Homo sapiens
tttcctctgtccatggaaactgagaacagttgcctagaatagacatgactctcatgaataagacacattttactgcatgttacaagacatttttgaaagtttgaaattatgaagtccctacttagggcttaagtcattaagggccacaaacactaataaaattattttccwtaaactcttctcattttctatcatatgttatttaaagtgttatccaaaaaaaaaaagagaagaagaagaagcctaacaaacgcgccaaagttaaatcagtatctttgccaattttctaactgtagaagtttggagccttaggccagtgctggacctggctgctgggtcatccacacgcacctggaagggaacaggaatacactcacaggaatacactctccagtgcacacgagctctgctttccgacagttcactgaagacatgcaccggtcacatcatcacatcagtcatcaaattgagacaaccatgctgatgaaaaagaacgatgatctgtaggatggttttatgaaagagccagatttggaaggctaa

SEQ ID NO: 443611 - DNA, 543 bp, Homo sapiens
tttcctctgtccatggaaactgagaacagttgcctagaatagacatgactctcatgaataagacacattttactgcatgttacaagacatttttgaaagtttgaaattatgaagtccctacttagggcttaagtcattaagggccacaaacactaataaaattattttccttaaactcttctcattttctatcatatgttatttaaagtgttatccaaaaaaaaaaagagaagaagaagaagcctaacaaacgcgccaaagttaaatcagtatctttgccaattttctaactgtagaagtttggagccttaggccagtgctggacctggctgctgggtcatccacacgcacctggaagggaacaggaatacactcacaggaatacactctccagtgcacacgagctcygctttccgacagttcactgaagacatgcaccggtcacatcatcacatcagtcatcaaattgagacaaccatgctgatgaaaaagaacgatgatctgtaggatggttttatgaaagagccagatttggaaggctaa

SEQ ID NO: 443612 - DNA, 543 bp, Homo sapiens
tttcctctgtccatggaaactgagaacagttgcctagaatagacatgactctcatgaataagacacattttactgcatgttacaagacatttttgaaagtttgaaattatgaagtccctacttagggcttaagtcattaagggccacaaacactaataaaattattttccttaaactcttctcattttctatcatatgttatttaaagtgttatccaaaaaaaaaaagagaagaagaagaagcctaacaaacgcgccaaagttaaatcagtatctttgccaattttctaactgtagaagtttggagccttaggccagtgctggacctggctgctgggtcatccacacgcacctggaagggaacaggaatacactcacaggaatacactctccagtgcacacgagctctgctttccgacagttcactgaagacatgcaccggtcacatcatcacatcagtcatcaaattgagacaaccatgctgatgaaaaagaacratgatctgtaggatggttttatgaaagagccagatttggaaggctaa

SEQ ID NO: 443613 - DNA, 543 bp, Homo sapiens
tttcctctgtccatggaaactgagaacagttgcctagaatagacatgactctcatgaataagacacattttactgcatgttacaagacatttttgaaagtttgaaattatgaagtccctacttagggcttaagtcattaagggccacaaacactaataaaattattttccttaaactcttctcattttctatcatatgttatttaaagtgttatccaaaaaaaaaaagagaagaagaagaagcctaacaaacgcgccaaagttaaatcagtatctttgccaattttctaactgtagaagtttggagccttaggccagtgctggacctggctgctgggtcatccacacgcacctggaagggaacaggaatacactcacaggaatacactctccagtgcacacgagctctgctttccgacagttcactgaagacatgcaccggtcacatcatcacatcagtcatcaaattgagacaaccatgctgatgaaaaagaacgatgatctgtaggatggttttaygaaagagccagatttggaaggctaa

SEQ ID NO: 443614 - DNA, 451 bp, Homo sapiens
gagccttgtaaaaatgtgtatctctttgctgtaaggatgcttatttagaattaactacagtagttgtctatttatccagcatgttgatttcaaagcccagttctttttattgarctactttggaattaaaattttttataatatttacatataggattaggtttctaagccaattccatctaactgctagtaaatttattttgtatatagcacaaagaattgaattcaatcccaaattctctccagcatactaaccaaatttaaataaacatatgtgatgagctagcaatggtatttctgaattttcatatttttattttccttggcttacattttccatatatcaaagtctcttttgaaaattaaactatataatataacctcaattttaaaacatcaatgataagctggatttaatcaactcagaacccagtgagggaaaacatgtttt

SEQ ID NO: 443615 - DNA, 451 bp, Homo sapiens
gagccttgtaaaaatgtgtatctctttgctgtaaggatgcttatttagaattaactacagtagttgtctatttatccagcatgttgatttcaaagcccagttctttttattgagctactttggaattaaaawtttttataatatttacatataggattaggtttctaagccaattccatctaactgctagtaaatttattttgtatatagcacaaagaattgaattcaatcccaaattctctccagcatactaaccaaatttaaataaacatatgtgatgagctagcaatggtatttctgaattttcatatttttattttccttggcttacattttccatatatcaaagtctcttttgaaaattaaactatataatataacctcaattttaaaacatcaatgataagctggatttaatcaactcagaacccagtgagggaaaacatgtttt

SEQ ID NO: 443616 - DNA, 640 bp, Homo sapiens
cacatgccttgccaacatctgttgtttatgacttcttagtaatagccatcttgactagtgtaatatgatatctcatttttgttttgatttgcatttctccgatgattcgtgatactgagcatttttttaataaagaactcaaacaactcagtaagaaaaaaaatcccattaaaaactgggcaaaggacatgaacagatgtttctcaaaagaagacatataagcataaaataaaaagaagacatatawgacataaaatgcttaacatcactaaccaatttgggttttggttaattggatttagtgagggtctgaaggtacaggtagacatggagaaatgttgaataatatcatttagtgcaaaaactatttggaaagaacataagaattgatgaatttttttgcaatagatctgtctaaattccttggaaaattacaagtggtgaagattaatacatgtgctattattgttgtttttcattaactgtttgctatggaatcattgaagaaagtgatagacatgttagaaagacagatttctttagagtggtatatactcatatttctttagggtgggcaaattaaaatcactgatctgattgtggcatatataactacggtcttgcatccttttggcctgaa

SEQ ID NO: 443617 - DNA, 418 bp, Homo sapiens
ctcaagttcttactgcttctgctcgtgggactataacaaacactacttcttttacctcagtaggacatcacagcccattgcttccatgcatcccaggagctgggagagacttgggcctcttctgtctgctatttttttttttaatattgctaatctcaggctatggtctgagaatcaaacagcaaacatttttgcacttctattttctaataaactatctggattcctcctaaaagttggaastgaggtagagttgacatctaatttcacagccatgttgatacaaatgaagcaaatctttacaatatttcaatatgtataattccaaggcacaatgagcaaggtataggagtatgtcccctgtgtctagctgtttctccaggcttctccagaatgatggatgaaaatgtaattggca

SEQ ID NO: 443618 - DNA, 560 bp, Homo sapiens
gagaatcaaacagcaaacatttttgcacttctattttctaataaactatctggattcctcctaaaagttggaactgaggtagagttgacatctaatttcacagccatgttgatacaaatgaagcaaatctttacaatatttcaatatgtataattccaaggcacaatgagcaaggtataggagtatgtcccctgtgtctagctgtttctccaggcttctccagaatgatggatgaaaatgtaattggcaagtcaaatgtctactgtggaagcctacaggaaaagggatgtgaaatgcttgacgtgatgagggatgcagagtgttcagcacttatttactgagcagctcatcacctgattgtatagtatacaatatatgagaatttatagaacagtgaacatrtaaacacatagaacaaataaacatatacaacatataaacactgtttttaacatttattacatacatagaacatataagaatttatagagcaatgaaaataccacattttgacatttgtattgtactgtgaaagatttatatgtatttgtataaaaaat

SEQ ID NO: 443619 - DNA, 545 bp, Homo sapiens
tgtttctctgcagtcaactcccatcccacctcaacccaggtaactactgatacaatttytactgctatatcttagtttcgcttgttctaggacttcagaatgtaccctatagtgtctagatttattcattcaacacaaggttttttagattcagccatgtttgttgcagttaccagtagttttgtccattttatagctgaagagtatttcattattaatacaacacaaattgtttgtccattttcttgttgaaggtcttttaggcagtttacagtttggggatattataagtaaagatgctataaacgttcttgtgtaagtcttataatgggcataagttttcatttcttttcaatctaggattggaattgttgggtcataggtttcatgtatgcttaattatataaaacaatgttaaacaatttttcctaagtggttgtagcattttacattccaacaataatgtatgagaattataattgctccatattctcaacaacacgtggtactgacaatatttttaatcataaccattttagtgggaa

SEQ ID NO: 443620 - DNA, 545 bp, Homo sapiens
tgtttctctgcagtcaactcccatcccacctcaacccaggtaactactgatacaatttctactgctatatcttagtttcgcttgttctaggacttcagaatgtaccctatagtgtctagatttattcattcaacacaaggttttttagattcagccatgtttgttgcagttaccagtagttttgtccattttatagctgaagagtatttcattattaatacmacacaaattgtttgtccattttcttgttgaaggtcttttaggcagtttacagtttggggatattataagtaaagatgctataaacgttcttgtgtaagtcttataatgggcataagttttcatttcttttcaatctaggattggaattgttgggtcataggtttcatgtatgcttaattatataaaacaatgttaaacaatttttcctaagtggttgtagcattttacattccaacaataatgtatgagaattataattgctccatattctcaacaacacgtggtactgacaatatttttaatcataaccattttagtgggaa

SEQ ID NO: 443621 - DNA, 545 bp, Homo sapiens
tgtttctctgcagtcaactcccatcccacctcaacccaggtaactactgatacaatttctactgctatatcttagtttcgcttgttctaggacttcagaatgtaccctatagtgtctagatttattcattcaacacaaggttttttagattcagccatgtttgttgcagttaccagtagttttgtccattttatagctgaagagtatttcattattaatacaacacaaattgtttgtccattttcttgttgaaggtcttttaggcagtttacagtttggggatattataagtaaagatgctataaacgttcttgtgtaagtcttataatgggcataagttttcatttcttttcaayctaggattggaattgttgggtcataggtttcatgtatgcttaattatataaaacaatgttaaacaatttttcctaagtggttgtagcattttacattccaacaataatgtatgagaattataattgctccatattctcaacaacacgtggtactgacaatatttttaatcataaccattttagtgggaa

SEQ ID NO: 443622 - DNA, 609 bp, Homo sapiens
gagaggtgactagaaaagatgtttaaaaagattccttgaggtcaataataatttttaaaggttgataaatgccgctgtaattcttttgagtgtttctttcccttgcctcaggtagtttcatgcactttgttacacactgaagggcgaccctctccagatttgcaaagttttctccaatgcagctctttcctcgccggtactctatcctgcaatctctagccaccttcgtgtacctsaactctcagcaacagctactccattcagagacttgctaggcttccttaagctatctatctccattgtcactgctgtctcaaattctctcaagttgtaagctgggatactcacagcacacatcttatgtttcctgtctttcagggattacattccgtgcctcatgtccagtgtactgaaaaccatagtttcatatattttgtctggtttgaggttgtttcatgcaggagggttagagggtaaatatgctccctattactccatcttagccagaagtaaaataagaaaaagaaatatatgtaagtataaacacacatacacatatatatatgtatgtatataacacacatgaatcatatcctaaagatttggaac

SEQ ID NO: 443623 - DNA, 609 bp, Homo sapiens
gagaggtgactagaaaagatgtttaaaaagattccttgaggtcaataataatttttaaaggttgataaatgccgctgtaattcttttgagtgtttctttcccttgcctcaggtagtttcatgcactttgttacacactgaagggcgaccctctccagatttgcaaagttttctccaatgcagctctttcctcgccggtactctatcctgcaatctctagccaccttcgtgtacctgaactctcagcaacagctactccattcrgagacttgctaggcttccttaagctatctatctccattgtcactgctgtctcaaattctctcaagttgtaagctgggatactcacagcacacatcttatgtttcctgtctttcagggattacattccgtgcctcatgtccagtgtactgaaaaccatagtttcatatattttgtctggtttgaggttgtttcatgcaggagggttagagggtaaatatgctccctattactccatcttagccagaagtaaaataagaaaaagaaatatatgtaagtataaacacacatacacatatatatatgtatgtatataacacacatgaatcatatcctaaagatttggaac

SEQ ID NO: 443624 - DNA, 504 bp, Homo sapiens
ggttctctctttacacataattgccaaaacagtgtttacaaatactttcatcttgccccagattggccaatgaggtagtaggttaaacagccaattcatcatgttttgatttaaaatgtgtccatatcattcttccccaaattcaagtatattttaataatccatttctgtyacttatattatggattcaagaataaactaagcaaatggatcatttgtttgccttccagttatacatgaagaaattaatgttttattaaagaaaaaagccatcaaaatcaattttccatctgcactcttttatttgttgcaatactgtttataacagctaagatttggaaacaccctaagtgttcatcaacagatgaatgaagaaaatgtggttcacatacaaaatggagtactcttcagccataaaagagaatgagatcctgtcacttgcgacagcatggatggaactggaggtcattatgttaagtgaaataggccaggcatagaaagaca

SEQ ID NO: 443625 - DNA, 522 bp, Homo sapiens
catttctgggatcatttccactttgtcttgatgtatagtcatttttatatgtgactggatttgctttggtaatactctgttcagggttttcacatctatctacttaaatgatattggtctgtagatttaaaatatatatacttgtatatctatgtctggctttggtattagggaaatactgaccttacagaataagttggaaaatgctcctttctcttttattttttggaagagttttgaagaatacttcttatttaaatagttgatatatttttaaatagttgatatattctgatagttgatagcatcaattgtttgaaaccatctggacctgggctttactttstgtggtattttaatattattaagacattccttttattgttataggccaatttatattttctcctccttcttgaaacagaagtagtagtttgtgttaattttgtagttagtgtcatcctaggaattcgtccattttatctaagttacgtaatttttttcaacatacagttgtttata

SEQ ID NO: 443626 - DNA, 567 bp, Homo sapiens
tgagaaatttctcctgttttatttattatttcctgtttctccttacattagatttagtttgctcttcttttttcagtgtcttagggtggcaggtcaggttttttatttgggaaccatttttctttttgaatattgatgtttacagctttaaaattccctctaaaccctgctttagctgtgttactatatgttttagtaatgttgtatttttgctttcatttatctcaaaaccttttctaatttcccttttgatttcggagtgtatagtttaatttccacatatttgtgatattccacaatttctttatgttattattttcatctcattgtgttttaaaaagacccttcatatgatttcaatccttttaaatgtgttgaggcttgatttacaggtagcatgttgtctaacctagaatatgttccatgaacacttgagaagaatatacwttctgctattgttaagtggtgtgttctacagatgtgtgttagaatgattgcgtttttatttttttcaactctattttcttggtaatcttctgagtaattatcctttattgtaagtgaagt

SEQ ID NO: 443627 - DNA, 462 bp, Homo sapiens
ttattttcaactaaattacccctttcaatctaaattgtatgtccttagacagcatatagttaagatttcttttgttatccattctgacaatatttgtcttttgattggrttgctcaatcgatgaacatttaatattattattgatacagttagatttacatctgccattttctttttctttttctatgtgtttcatttgttttcttttcactttccttctgacttattattttgtgttggtggatattttggagtgtaacattttaatttctttcttgatttcactatactttggggtaaaatatataaatatataatttgccacttaaccatttaaaatatgaaattcagtagcattaaattcacaatgttgtgcaattatcacctcttttgatacccaaaatttgtcatcatcccaaaattaaactgtattcattaagcaataactctccattgccccct

SEQ ID NO: 443628 - DNA, 462 bp, Homo sapiens
ttattttcaactaaattacccctttcaatctaaattgtatgtccttagacagcatatagttaagatttcttttgttatccattctgacaatatttgtcttttgattgggttgctcaatcgatgaacatttaatattattattgatacagttagatttacatctgccattttctttttctttttctatgtgtttcatttgttttcttktcactttccttctgacttattattttgtgttggtggatattttggagtgtaacattttaatttctttcttgatttcactatactttggggtaaaatatataaatatataatttgccacttaaccatttaaaatatgaaattcagtagcattaaattcacaatgttgtgcaattatcacctcttttgatacccaaaatttgtcatcatcccaaaattaaactgtattcattaagcaataactctccattgccccct

SEQ ID NO: 443629 - DNA, 482 bp, Homo sapiens
aaattgtatgtccttagacagcatatagttaagatttcttttgttatccattctgacaatatttgtcttttgattgggttgctcaatcgatgaacatttaatattattattgatacagttagatttacatctgccattttctttttctttttctatgtgtttcatttgttttcttttcactttccttctgacttattattttgtgttggtggatattttggagtgtaacattttaatttctttcttgatttcactatactttggggtaaaatatataaatatataatttgccacttaaccatttaaaatatgaaattcagtagcattaaattcacaatgttgtgcaattatcacctcttttgatayccaaaatttgtcatcatcccaaaattaaactgtattcattaagcaataactctccattgccccctcatctcagctgctggtatccttgaatctactttgtctctacaaatttgtct

SEQ ID NO: 443630 - DNA, 462 bp, Homo sapiens
ttattttcaactaaattacccctttcaatctaaattgtatgtccttagacagcatatagttaagatttcttttgttatccattctgacaatatttgtcttttgattgggttgctcaatcgatgaacatttaatattattattgatacagttagatttacatctgccattttctttttctttttctatgtgtttcatttgttttcttttcactttccttctgacttattattttgtgttggtggatattttggagtgtaacattttaatttctttcttgatttcactatactttggggtaaaatatataaatatataatttgccacttaaccatttaaaatatgaaattcagtagcattaaattcacaatgttgtgcaattatcacctcttttgatacccaaaatttktcatcatcccaaaattaaactgtattcattaagcaataactctccattgccccct

SEQ ID NO: 443631 - DNA, 482 bp, Homo sapiens
aaattgtatgtccttagacagcatatagttaagatttcttttgttatccattctgacaatatttgtcttttgattgggttgctcaatcgatgaacatttaatattattattgatacagttagatttacatctgccattttctttttctttttctatgtgtttcatttgttttcttttcactttccttctgacttattattttgtgttggtggatattttggagtgtaacattttaatttctttcttgatttcactatactttggggtaaaatatataaatatataatttgccacttaaccatttaaaatatgaaattcagtagcattaaattcacaatgttgtgcaattatcacctcttttgatacccaaaatttgtcatcwtcccaaaattaaactgtattcattaagcaataactctccattgccccctcatctcagctgctggtatccttgaatctactttgtctctacaaatttgtct

SEQ ID NO: 443632 - DNA, 482 bp, Homo sapiens
aaattgtatgtccttagacagcatatagttaagatttcttttgttatccattctgacaatatttgtcttttgattgggttgctcaatcgatgaacatttaatattattattgatacagttagatttacatctgccattttctttttctttttctatgtgtttcatttgttttcttttcactttccttctgacttattattttgtgttggtggatattttggagtgtaacattttaatttctttcttgatttcactatactttggggtaaaatatataaatatataatttgccacttaaccatttaaaatatgaaattcagtagcattaaattcacaatgttgtgcaattatcacctcttttgatacccaaaatttgtcatcatcccaaaattaaactstattcattaagcaataactctccattgccccctcatctcagctgctggtatccttgaatctactttgtctctacaaatttgtct

SEQ ID NO: 443633 - DNA, 460 bp, Homo sapiens
ctcattcagtgccacattgttttgaataatgtagtttatagtaagttttgaagtcaagaagggtgaatcctccaactttgttcttttgtaaaattgttttgcttattctgggctttttcaaattttatttaaatattgataggggctttttcatttgtataaaaagtgctttggggattctgataagaattagattgaatctgctggggttgtattgtcattttaataatctyaagttttccaattcatgaatatggaatgtctttccatctatttagttctttctttaatctctttcaacaacgttttatagttttcaatgtctaagtctttcactttctcggttaagtttatttctaagttttttattctttttgatgatattgcaaatggaattgtttccttaatctcactttcagatttttcattgctagtgtagagaaatacaaccaaatttttg

SEQ ID NO: 443634 - DNA, 460 bp, Homo sapiens
ctcattcagtgccacattgttttgaataatgtagtttatagtaagttttgaagtcaagaagggtgaatcctccaactttgttcttttgtaaaattgttttgcttattctgggctttttcaaattttatttaaatattgataggggctttttcatttgtataaaaagtgctttggggattctgataagaattagattgaatctgctggggttgtattgtcattttaataatcttaagttttccaattcatgaatatggaatgtctttccatctatttagttctttctttaatctctttcaacaacgttttatagttttcaatgtctaagtctttcactttctcrgttaagtttatttctaagttttttattctttttgatgatattgcaaatggaattgtttccttaatctcactttcagatttttcattgctagtgtagagaaatacaaccaaatttttg

SEQ ID NO: 443635 - DNA, 189 bp, Homo sapiens
aactcattactctcttggagttatcaamattctcttaattgcttactgccaatatcttcataccactatgcttaaacttatccatcctctgttccaaatagaaatcagttcacttggggagggctaccaagctgtgtattttcatggcctccctctacctcttggttgaatgtgcctcactgctctgaa

SEQ ID NO: 443636 - DNA, 189 bp, Homo sapiens
aactcattactctcttggagttatcaaaattctcttaattgcttactgccaatatcttcataccactatgcttaaacttatccatcctctgttccaaatagaaatcagttcacttggggagggctaccaagctgtgtattttcatggcctccctctacctcttggttraatgtgcctcactgctctgaa

SEQ ID NO: 443637 - DNA, 475 bp, Homo sapiens
tgccttgcctctcctggtggagaaactgttccttacaagtaagctggagtgagggcaattgggacacaggattttccagctgccacacctgaagaccttatgtcctggaatgaggagttggtgtaggaaggaaaccccagacttctcagctgtttctgcgtggacagagcttctgtcctacaaaactggggatgacaagaaatgctggcacccaatcttggggtaatgcagtatctctgkagtaggacctgggtagagaggaaacctctggcttcttggctatatccatatagagtggagcttccgtcatactgagctagggatggggaggtgctgggagagggtcttggcttaaatgcctcaaactctcactattattactgattaataaatgtttcttcatttgatgtatttccttaggacatcttctaaagactttcaatagttgttttttaaaataataatttttactagt

SEQ ID NO: 443638 - DNA, 475 bp, Homo sapiens
tgccttgcctctcctggtggagaaactgttccttacaagtaagctggagtgagggcaattgggacacaggattttccagctgccacacctgaagaccttatgtcctggaatgaggagttggtgtaggaaggaaaccccagacttctcagctgtttctgcgtggacagagcttctgtcctacaaaactggggatgacaagaaatgctggcacccaatcttggggtaatgcagtatctctggagtaggacctgggtagagaggaaacctytggcttcttggctatatccatatagagtggagcttccgtcatactgagctagggatggggaggtgctgggagagggtcttggcttaaatgcctcaaactctcactattattactgattaataaatgtttcttcatttgatgtatttccttaggacatcttctaaagactttcaatagttgttttttaaaataataatttttactagt

SEQ ID NO: 443639 - DNA, 475 bp, Homo sapiens
tgccttgcctctcctggtggagaaactgttccttacaagtaagctggagtgagggcaattgggacacaggattttccagctgccacacctgaagaccttatgtcctggaatgaggagttggtgtaggaaggaaaccccagacttctcagctgtttctgcgtggacagagcttctgtcctacaaaactggggatgacaagaaatgctggcacccaatcttggggtaatgcagtatctctggagtaggacctgggtagagaggaaacctctggcttcttggctatatccatatagagtggagcttccgtcatactgagctagggatggggaggtgcwgggagagggtcttggcttaaatgcctcaaactctcactattattactgattaataaatgtttcttcatttgatgtatttccttaggacatcttctaaagactttcaatagttgttttttaaaataataatttttactagt

SEQ ID NO: 443640 - DNA, 475 bp, Homo sapiens
tgccttgcctctcctggtggagaaactgttccttacaagtaagctggagtgagggcaattgggacacaggattttccagctgccacacctgaagaccttatgtcctggaatgaggagttggtgtaggaaggaaaccccagacttctcagctgtttctgcgtggacagagcttctgtcctacaaaactggggatgacaagaaatgctggcacccaatcttggggtaatgcagtatctctggagtaggacctgggtagagaggaaacctctggcttcttggctatatccatatagagtggagcttccgtcatactgagctagggatggggaggtgctgggagagggtcttggcttaaatgcctcaaactctcactrttattactgattaataaatgtttcttcatttgatgtatttccttaggacatcttctaaagactttcaatagttgttttttaaaataataatttttactagt

SEQ ID NO: 443641 - DNA, 591 bp, Homo sapiens
tggagaggcaaaggaggggaagttggaaggggtgacaccgtaccccaggatctcctcctctcagagggtacagtgctaaacagtaattgaatactgcatgcatgcacattttgtcatgtcaaacttgaatgctgaagaaaccatttagagaggtttacaacacctgtgtagtgacaaacaccattatgaaggcgacaattctcaatgttaggagcatggaaattacctagagtttctggaaaatgcagtttttagcctcctcccagagattccaattcggtgggcctaaggtgggggccccaaatctgaactatcaatcagctttgtgggtgattctgaagccagtgmttcatccaccgcaatgaatgctgattctaggtgaattttacgctaattgtgtttctaggcattcccttaaataatctccaagattacaagtgagaaaatcaagttcttggtttgacccctccgtgtagtcctcctttccagtagtttgatggtttcatgtcctttgaaaaagcctcactgcaccttaatagaagagctaaccacgcctgaagctaggttttaggaagtcatggtataacaccc

SEQ ID NO: 443642 - DNA, 591 bp, Homo sapiens
tggagaggcaaaggaggggaagttggaaggggtgacaccgtaccccaggatctcctcctctcagagggtacagtgctaaacagtaattgaatactgcatgcatgcacattttgtcatgtcaaacttgaatgctgaagaaaccatttagagaggtttacaacacctgtgtagtgacaaacaccattatgaaggcgacaattctcaatgttaggagcatggaaattacctagagtttctggaaaatgcagtttttagcctcctcccagagattccaattcggtgggcctaaggtgggggccccaaatctgaactatcaatcagctttgtgggtgattctgaagccagtgattcatccaccrcaatgaatgctgattctaggtgaattttacgctaattgtgtttctaggcattcccttaaataatctccaagattacaagtgagaaaatcaagttcttggtttgacccctccgtgtagtcctcctttccagtagtttgatggtttcatgtcctttgaaaaagcctcactgcaccttaatagaagagctaaccacgcctgaagctaggttttaggaagtcatggtataacaccc

SEQ ID NO: 443643 - DNA, 591 bp, Homo sapiens
tggagaggcaaaggaggggaagttggaaggggtgacaccgtaccccaggatctcctcctctcagagggtacagtgctaaacagtaattgaatactgcatgcatgcacattttgtcatgtcaaacttgaatgctgaagaaaccatttagagaggtttacaacacctgtgtagtgacaaacaccattatgaaggcgacaattctcaatgttaggagcatggaaattacctagagtttctggaaaatgcagtttttagcctcctcccagagattccaattcggtgggcctaaggtgggggccccaaatctgaactatcaatcagctttgtgggtgattctgaagccagtgattcatccaccgcaatgaatgctgattctaggtgaattttaygctaattgtgtttctaggcattcccttaaataatctccaagattacaagtgagaaaatcaagttcttggtttgacccctccgtgtagtcctcctttccagtagtttgatggtttcatgtcctttgaaaaagcctcactgcaccttaatagaagagctaaccacgcctgaagctaggttttaggaagtcatggtataacaccc

SEQ ID NO: 443644 - DNA, 593 bp, Homo sapiens
tactgcatgcatgcacattttgtcatgtcaaacttgaatgctgaagaaaccatttagagaggtttacaacacctgtgtagtgacaaacaccattatgaaggcgacaattctcaatgttaggagcatggaaattacctagagtttctggaaaatgcagtttttagcctcctcccagagattccaattcggtgggcctaaggtgggggccccaaatctgaactatcaatcagctttgtgggtgattctgaagccagtgattcatccaccgcaatgaatgctgattctaggtgaattttacgctaattgtgtttctaggcattcccttaaataatctccaagattacaagtgagaaaatcaagttcttggwttgacccctccgtgtagtcctcctttccagtagtttgatggtttcatgtcctttgaaaaagcctcactgcaccttaatagaagagctaaccacgcctgaagctaggttttaggaagtcatggtataacaccccatccacatccacatacatacgtgggttcacgtgtagcatttagtacctggaagttgtatctacccttccctgtaaattaggttggatgataa

SEQ ID NO: 443645 - DNA, 593 bp, Homo sapiens
tactgcatgcatgcacattttgtcatgtcaaacttgaatgctgaagaaaccatttagagaggtttacaacacctgtgtagtgacaaacaccattatgaaggcgacaattctcaatgttaggagcatggaaattacctagagtttctggaaaatgcagtttttagcctcctcccagagattccaattcggtgggcctaaggtgggggccccaaatctgaactatcaatcagctttgtgggtgattctgaagccagtgattcatccaccgcaatgaatgctgattctaggtgaattttacgctaattgtgtttctaggcattcccttaaataatctccaagattacaagtgagaaaatcaagttcttggtttgacccctccgtgtagtcctcctttccagtagtttgatggtttcatgtcctttgaaaaagcctcactgcaccttaatagaagagctaaccacgcctgaagctaggttttaggaagtcatggtataacaccccatccacatccacatacatacgtgggttcacgtgtagcatttartacctggaagttgtatctacccttccctgtaaattaggttggatgataa

SEQ ID NO: 443646 - DNA, 595 bp, Homo sapiens
cctttttctctcctcttaattgggttaatcaagtttaatttttccagtttttccactaatgtatgctgttctaattttgttctcctaggtacttgagctactacttttatcactttccaaacaatactaggatttaagtacaacttatgttagtttagttaaactcctcccaccatgtgtgctatgttgacacattttagtttcatacatacatgtgggtatgtgtacatatattttaatcacaaaatttaatataattttttttgcaatcagtattcacttgaatttactcacatatttactttctctgcattttcatgctctttctgaatcaaattctttcagctagaaagactccttttaatatttgtctyagcccagttctactggtaataaattgtcatatagcttttgtttgcctgaaaattgtctttattttatatgaacttctgaaggctgtttcagcttgctggagaatacggtctgtagttattttctttcggccttttaaagatggcattctattgttttcatgatgtttattaagaaatcaataggtaattgatttttatcctataagggaaatgtgtatttt

SEQ ID NO: 443647 - DNA, 666 bp, Homo sapiens
gaccttgtctcaaaaaatacaaaaaacaaacaaaaaaccccamacactcagcgctcaccttttgtcaaacagacattgtcctgggaattgaggacacagagtaaaaaatatattttagtctctgccttctgaaagcacacagcctattgaataccatgagtattaattatgtgactgggaaaataaatgcacacgtctgggtccaatacaaagagacctggaggatcccctaggggaacctggggtcctggtcttagctatgccactaattttgtctctggccaaaataaaggcatttgtctactctgctgcaaaagtattttattatatatgtgtatgtaactgtatatgtaataaatatttggccaataataaatattgcatatatgcatatataacaaaatgcttatatttatatacttttggttatattttatcacatatatgtctcaactgcatgtacattctgatttacagacaaaacactcttagtccagttatggttagaaactccacagtatctagtaaatactgtattttttaaattgcccagttctcaaaccttcttttgtatgcatttgtggcaaaagatcacaataattgatatttcatcattgcaacacttttgtattttcaaaataaggctttctgaattaaaaaaaatta

SEQ ID NO: 443648 - DNA, 666 bp, Homo sapiens
gaccttgtctcaaaaaatacaaaaaacaaacaaaaaaccccacacactcagcgctcaccttttgtcraacagacattgtcctgggaattgaggacacagagtaaaaaatatattttagtctctgccttctgaaagcacacagcctattgaataccatgagtattaattatgtgactgggaaaataaatgcacacgtctgggtccaatacaaagagacctggaggatcccctaggggaacctggggtcctggtcttagctatgccactaattttgtctctggccaaaataaaggcatttgtctactctgctgcaaaagtattttattatatatgtgtatgtaactgtatatgtaataaatatttggccaataataaatattgcatatatgcatatataacaaaatgcttatatttatatacttttggttatattttatcacatatatgtctcaactgcatgtacattctgatttacagacaaaacactcttagtccagttatggttagaaactccacagtatctagtaaatactgtattttttaaattgcccagttctcaaaccttcttttgtatgcatttgtggcaaaagatcacaataattgatatttcatcattgcaacacttttgtattttcaaaataaggctttctgaattaaaaaaaatta

SEQ ID NO: 443649 - DNA, 666 bp, Homo sapiens
gaccttgtctcaaaaaatacaaaaaacaaacaaaaaaccccacacactcagcgctcaccttttgtcaaacagacattgtcctgggaattgaggacacagagtaaaaaatatattttagtctctgccttctgaaagcacacagcctattgaataccatgagtattaattatgtgactgggaaaataaatgcacacgtctgkgtccaatacaaagagacctggaggatcccctaggggaacctggggtcctggtcttagctatgccactaattttgtctctggccaaaataaaggcatttgtctactctgctgcaaaagtattttattatatatgtgtatgtaactgtatatgtaataaatatttggccaataataaatattgcatatatgcatatataacaaaatgcttatatttatatacttttggttatattttatcacatatatgtctcaactgcatgtacattctgatttacagacaaaacactcttagtccagttatggttagaaactccacagtatctagtaaatactgtattttttaaattgcccagttctcaaaccttcttttgtatgcatttgtggcaaaagatcacaataattgatatttcatcattgcaacacttttgtattttcaaaataaggctttctgaattaaaaaaaatta

SEQ ID NO: 443650 - DNA, 482 bp, Homo sapiens
aagtctggtgttttcattctgagcataaagatagccagtgtttttcaccagtttcttattgttacaggcagattcccaacctttggaratcaaaatagaatactcaggatttgtcatagttatcagacttcctcaaaacttcctaattaatagggacatctcatttttcttttctattattttctaaagcttatactatagtctacacttggaaatagtgctttcataggtaccataatctcttgcagcagtattaaaaattcagtaagagaactttcaaagactttttgcttttattttatattttattaaaatttttatttattagaaattcctacggttctggaaattgtactttcctaggaagtgtgaaaacttctaaaagctactacttattatttgccagggaactttatttaaggcaaagtagggccataagtttgggaggttgcaaagaaagctaaaagggagaaatgttaagt

SEQ ID NO: 443651 - DNA, 482 bp, Homo sapiens
aagtctggtgttttcattctgagcataaagatagccagtgtttttcaccagtttcttattgttacaggcagattcccaacctttggagatcaaaatagaatactcaggatttgtmatagttatcagacttcctcaaaacttcctaattaatagggacatctcatttttcttttctattattttctaaagcttatactatagtctacacttggaaatagtgctttcataggtaccataatctcttgcagcagtattaaaaattcagtaagagaactttcaaagactttttgcttttattttatattttattaaaatttttatttattagaaattcctacggttctggaaattgtactttcctaggaagtgtgaaaacttctaaaagctactacttattatttgccagggaactttatttaaggcaaagtagggccataagtttgggaggttgcaaagaaagctaaaagggagaaatgttaagt

SEQ ID NO: 443652 - DNA, 482 bp, Homo sapiens
aagtctggtgttttcattctgagcataaagatagccagtgtttttcaccagtttcttattgttacaggcagattcccaacctttggagatcaaaatagaatactcaggatttgtcatagttatcagacttcctcaaaacttcctaattaatagggacatctcatttttcttttctattattttctaaagcttatactatagtctacacttggaaatagtgctttcataggtaccataatctcttgsagcagtattaaaaattcagtaagagaactttcaaagactttttgcttttattttatattttattaaaatttttatttattagaaattcctacggttctggaaattgtactttcctaggaagtgtgaaaacttctaaaagctactacttattatttgccagggaactttatttaaggcaaagtagggccataagtttgggaggttgcaaagaaagctaaaagggagaaatgttaagt

SEQ ID NO: 443653 - DNA, 580 bp, Homo sapiens
taagttataaagccactagcatatatgccattctggctttcttgtaataacctgccaatgctctcctctctgacctgtagagaatgggggtggggacagaccaatgagctggaggtcttctgaacagccaggagctggagggctggagccctcacaggcaggagccccttgtggaatggaggaaatgaaaacctctaggattgttaaagatgtccgtcaaaagatttgaaggtcgctgtttgtctcattagagcccaaagctaacacacatcatcacattatcataccagacactttaaaatgtacatcatacaaaatatkgtacaaaaccattttaactcatgggaaattacttcagacctgaaacttactggtggtcagatttgaaactatggatcagatctgttcctgttactcactgcactaaaactgcattcatttttaagtaagagaaagttgtattaagattgcatatcaaaatattcaaaaagagtgtctcataaatctgtatgatcatttagtaattttgaacttgaggaagattaaaaataatatccatgtaaatgtatagtatgtattc

SEQ ID NO: 443654 - DNA, 580 bp, Homo sapiens
taagttataaagccactagcatatatgccattctggctttcttgtaataacctgccaatgctctcctctctgacctgtagagaatgggggtggggacagaccaatgagctggaggtcttctgaacagccaggagctggagggctggagccctcacaggcaggagccccttgtggaatggaggaaatgaaaacctctaggattgttaaagatgtccgtcaaaagatttgaaggtcgctgtttgtctcattagagcccaaagctaacacacatcatcacattatcataccagacactttaaaatgtacatcatacaaaatattgtacaaaaccattttaactcatgggaaattacttcagacctgaaacttactggtggycagatttgaaactatggatcagatctgttcctgttactcactgcactaaaactgcattcatttttaagtaagagaaagttgtattaagattgcatatcaaaatattcaaaaagagtgtctcataaatctgtatgatcatttagtaattttgaacttgaggaagattaaaaataatatccatgtaaatgtatagtatgtattc

SEQ ID NO: 443655 - DNA, 580 bp, Homo sapiens
taagttataaagccactagcatatatgccattctggctttcttgtaataacctgccaatgctctcctctctgacctgtagagaatgggggtggggacagaccaatgagctggaggtcttctgaacagccaggagctggagggctggagccctcacaggcaggagccccttgtggaatggaggaaatgaaaacctctaggattgttaaagatgtccgtcaaaagatttgaaggtcgctgtttgtctcattagagcccaaagctaacacacatcatcacattatcataccagacactttaaaatgtacatcatacaaaatattgtacaaaaccattttaactcatgggaaattacttcagacctgaaacttactggtggtcagatttgaaactatggatcagatctgttcctgttactcactgcactaaaactgcattcatttttaagtaagagaaagttgtattaagattgcatatcaaaatattcaaaaagagtgtctcataaatctgtatgatcatttwgtaattttgaacttgaggaagattaaaaataatatccatgtaaatgtatagtatgtattc

SEQ ID NO: 443656 - DNA, 365 bp, Homo sapiens
gaaggacaacatggaaatcacattactctggaattaattaaargaaagcttgtcttttttcttaattcaggtaaaaaaatacttgaacttttataccagtagttaaaaaaaatctgtttacatttgttggtactcagtcttttcacagttagataaaatgaccatataattcatcatctaaaccagaacacctttaagaaataaaaaatacacaagtgatagttactctgggacagtaagtgcaaagtagaactgcaatgaacaaatgtaaatgaaaatttaagagcattactaccagatgcatgcaatacatacatatcctaagtatgatttctgtaaacagcatatattttgacaaactgtgc

SEQ ID NO: 443657 - DNA, 598 bp, Homo sapiens
tcttttttcttaattcaggtaaaaaaatacttgaacttttataccagtagttaaaaaaaatctgtttacatttgttggtactcagtcttttcacagttagataaaatgaccatataattcatcatctaaaccagaacacctttaagaaataaaaaatacacaagtgatagttactctgggacagtaagtgcaaagtagaactgcaatgaacaaatgtaaatgaaartttaagagcattactaccagatgcatgcaatacatacatatcctaagtatgatttctgtaaacagcatatattttgacaaactgtgcaagatcaccatatgtgtgtataatatatatgtaatatatgattatccatatcataaagacaatacatcattataaaattatgagataatgctgataatgaggttctaagaaagaaaatatttgcattgtaaatccaaatgtcatgagtaatagaaaaaatactaagaaaaatttcaacaaagtgtagaattgaacttaaaaaaaataaaaacagggtaaggttattgtgttcaagatagggagaaagtgagaaaacaactctgtaagatggaaagttggatgcaa

SEQ ID NO: 443658 - DNA, 604 bp, Homo sapiens
atcatggggccgttttcccccatactgttctcgtggtagtgaacaagtctcacgaaatctgatggttttataaatgggagttcccctgcagaagcgtctcctgcctgctgccatacaagaggtgactttgctcctcattcacyttcagccgtgattgtgaggtctccccagtcatgtggaactgtgagtcaattaaacctctttcctttataaattactataccagtctcaggtatgtttttattagcagcgtgagaacagactaatacatccctctgttccttgaatagcatcgtcctgatgatacaaaagtggttcaagaacttagtgtggtgtggtatgatttcctcaatggctgttatggagccttttaacatgactccaaagagagcattcttaatgcagcatctgccagattttggagaagagttctgaactgcttacattattacctcagagtagatctgcactcccttcctctggcttggttctgtcggctaacagaatcttatcctcattctctgaaaactggtagaaggatagagataacaaaagaaggagttcaccatcagttatgtgcctgctgtttgttaaacactgagtt

SEQ ID NO: 443659 - DNA, 425 bp, Homo sapiens
caaagtcacatgtctactatggagaaatgaaccaaggtttgtatggctgcagtrgctgctgttttgaaattgaaaataacaataatagttattcaacattctagttattcagcattctaagcaaattcaccaagaaataaaggacaggggcccttgcttcttcacttcaaaagctcttgaaatgatgtcgtgtagctgttactctctgaaattggcttatcctctgggaataattatgcaataatcacttataaatggctgcagggaaatgctgaagctggactgtgtaagtcttgcactgctaaagaaaataattgcaaatattaccatggttaagacagctgtttatttctgtcgaatgcatgagaatatatggaacaaataaagactaatttatctgtgtaaaaacatatatacacatttga

SEQ ID NO: 443660 - DNA, 425 bp, Homo sapiens
caaagtcacatgtctactatggagaaatgaaccaaggtttgtatggctgcagtagctgctgttttgaaattgaaaataacaataatagttattcaacattctagttattcagcattctaagcaaattcaccaagaaataaaggacaggggcccttgcttcttcacttcaaaagctcttgaaatgatgtcgtgtagctgttactctctgaaattggcttatcctctgggaataattatgcaataatcacttataaatggctgcagggaaatgctgaagctggactgtgtaagtcttgcactgctaaagaaaataattgcaaatattaccatggttaagacagctgtttatttctgtcgaatgcatgagaatatatggaacaaataaagamtaatttatctgtgtaaaaacatatatacacatttga

SEQ ID NO: 443661 - DNA, 596 bp, Homo sapiens
agcttaaaaccagtgaaactagatgatctttaaaatttcttctagctttaacattttatatcaagctgcaataactacatgtatcacaaagcttgagtgttttgttatttttattgttgttacttgttttgcttttaaagtgcgttagaattcattaggagaagaaaagctatccctttttctatgggcaattatatgatgagaagaatcatgtcaatttattgcctagagtccacggggacattttgactggagatagaatcccttacctgtgaattccactagaataaaatggcctaaaaatccaactccatattttgtgtatgtaaatatttgagaggtacattgaaaagcagaattagttctgattatttctttttctggtggggagcagaaagcgtaaaggtgaatgttcattcctataaattaggggcgactggtataaactttaagatccctgttaaatgcagaaaacattcaatctctagaccatctgtagcaaatttacagcaaacactwctgcatccctggaaacagttttatgccacaaaccaggaatttctccaaagttacaattacgtgatgcaaaacaggta

SEQ ID NO: 443662 - DNA, 596 bp, Homo sapiens
agcttaaaaccagtgaaactagatgatctttaaaatttcttctagctttaacattttatatcaagctgcaataactacatgtatcacaaagcttgagtgttttgttatttttattgttgttacttgttttgcttttaaagtgcgttagaattcattaggagaagaaaagctatccctttttctatgggcaattatatgatgagaagaatcatgtcaatttattgcctagagtccacggggacattttgactggagatagaatcccttacctgtgaattccactagaataaaatggcctaaaaatccaactccatattttgtgtatgtaaatatttgagaggtacattgaaaagcagaattagttctgattatttctttttctggtggggagcagaaagcgtaaaggtgaatgttcattcctataaattaggggcgactggtataaactttaagatccctgttaaatgcagaaaacattcaatctctagaccatctgtagcaaatttacagcaaacacttmtgcatccctggaaacagttttatgccacaaaccaggaatttctccaaagttacaattacgtgatgcaaaacaggta

SEQ ID NO: 443663 - DNA, 580 bp, Homo sapiens
ctcagggttttttcagtctcaggtttggactttaattttccttggctactgtatttcctgccaaagacatgaaacgggctaatgtactgaaagttgcagaattttattatatggaagawaaacacactttgggaaaaattactctattgttaatgtgagtgatcttgaaagccaaacaccacctcagttctttacattaaattttgacaaaagaatacacaccatacgctaagtagtaaggtgaattcacagattgaaagcccttaaaagattcactttttcaatttaagttaggtgaaacagttatttccccctctttagagaagaattagtagccataaaaactagtaagtgatttctacaaggttacaggacaacgttagcaggtcgaaaggctgaaactttgggcacctttttcttttatttgacaaatggggcggggaggggggtcagtagcatttaatatgtgtcttcagtaaaattcttgcgtgtgggaagtattagctatctgttttacagatggaaaagcacaggctcagaaaggtttgtttatttatcagtagtcaaacctatttgaaaa

SEQ ID NO: 443664 - DNA, 552 bp, Homo sapiens
aggacctgaactgatgtaaagattttaatagtctatatgtatcacaattagtgtgagtctttacctatttagctgaaaaatattaatatgttkatttaaggatgctgccttggatctaactaggattgctacatagtttacagatatgcctccattagtatctttccaagatctaaagatttctgaaatcttttctacatctgatccctaaacagccatgtttagacacatagagcccagcatcattgggttaaatttattcttccactttggtgtgccatacttataatatggattacccaagcattctgagtaaacgattatgatactttatttgtgttgaggattgagaagaagaactaagatgttgaggagaccagagtgtatggtgcaaaatgaagctgattacatagccccttaaaaattggttaataatagaaattaatgcgggaggcattgagtaggtgttattaacagtgatatttatagggaagggttgcctgtcaatgcatttgatatagattggatggaggaaagaaagagaaatgtaaa

SEQ ID NO: 443665 - DNA, 552 bp, Homo sapiens
aggacctgaactgatgtaaagattttaatagtctatatgtatcacaattagtgtgagtctttacctatttagctgaaaaatattaatatgtttatttaaggatgctgccttggatctaactaggattgctacatagtttacagatatgcctccattagtatctttccaagatctaaagatttctgaaatcttttmtacatctgatccctaaacagccatgtttagacacatagagcccagcatcattgggttaaatttattcttccactttggtgtgccatacttataatatggattacccaagcattctgagtaaacgattatgatactttatttgtgttgaggattgagaagaagaactaagatgttgaggagaccagagtgtatggtgcaaaatgaagctgattacatagccccttaaaaattggttaataatagaaattaatgcgggaggcattgagtaggtgttattaacagtgatatttatagggaagggttgcctgtcaatgcatttgatatagattggatggaggaaagaaagagaaatgtaaa

SEQ ID NO: 443666 - DNA, 564 bp, Homo sapiens
ttaagaggtagattctatttctttttccagtttttaaatacagaaaaaataagactcaaagagcttaataactccccttctattgcaggcctactaagcaatagtgcctgattctaaaacagacactcctggctgtaaaaaccttactttgcctgagacatggtaaaactatgacaacttccaaagtgcttacatgcctcagaaattttatcacaaattttaaaatgaattgtattagttttctattattgttttcacaattggccacaaatgtggtggattaaaacaacacaaatttaatctcttacagttttgaatgtcagaagtccaacatcatttctgctgagcttaagtcaaggtgtcagcaggtctagttccttctcaaggcrctgagggggaaatctgtttcgttgcttttttcagcttctagtgactgcccgtattctttggcttataatcagttttcaaaaagtatctcactgtattctctaatttggtatcacattgccttcttctctgactctgacaccccctacctccctcttataaggaccactgtgaaga

SEQ ID NO: 443667 - DNA, 551 bp, Homo sapiens
ccttttctaatataaaataatatttacagattccaaggactagagcatgaatatatttgtagggtcattatttaatctgccatgtgtattttacttgtattcacattaactctaaaagtacatgaatagaaaagttaccttggaaagttttaatgaaattaaatacagtcttctaaatcactgttacagttttggaattataatagaaatattgttatttagtcttatctactaaatgaaaaaatatcttccaaaatactgaaaaacataaattactaaattaatgtcagtattaataaaccagaattgtttaaagcagcatagcatctctatgtacataaaacaacagatttttctccartaaacacttgttaatggaacagatgtattaaacgaatacatttttatgtaacaaggatatctattacttaagctgcttctgtactcactttcttctgtttctattcaaatacaatgcattatattcatattcagtcgtattagccacagttcccaatgtacttgtttatctgatgcaaggttaatgtggt

SEQ ID NO: 443668 - DNA, 573 bp, Homo sapiens
tctctcattcagtcaaagcagcatttgctattacatgcactgaaattggaaagtgctgaccaagggaaaaataaattaaaaggaaattaaattctctctcacagatggagagagtcaatcagttatgaacttcagtgaagtraaaatgtaatatgcagtggctcaggattttgtttttgtctgtgtgtattgtgcaagaatgtatatgtgtgcgtgtgcatatctgcattagaaacacagaaaattctcaggcctcctaagaatgttgacattgaaatgaacaacaggcattgggtgtaacaagagttctttcaagtgaacactagagcatagtgtccatggcttcatgtttaggtgaaggtagaaataggtgtgtccacactttgattttaaggactaattgtcagtgattctttagaccccaattcaattcacttcagtaatttgggtacttactacgtgcaaaactcttagttgagtcctaagatatgttcaacgttatataagactagcctttgcccataatgtatatgtgatataatagccctgttacataatttaagaggtattgcg

SEQ ID NO: 443669 - DNA, 583 bp, Homo sapiens
gataataataacaagcaacatttattgagtgcctattatgtgtgagacactcttcctattatcttacatgtaacaattcatttagacagtataaggacctatgagtaagtaccagtatttgaaagagaattataaaaatgctgcagagcgtttaagcagcacttacttgctcaatgccacatggctggtaagagcagagttagagttcaggttcttgactgcctaatcttcaaataatgtttttttttttttatatccaagcttttgaaaatkgaacagcaagaatcttcaagatatattcttttcgttattcatacatagtatttgtacatatttgtggggtatatgtgatatttcatacatgtacacaatgtgtaatgattaaatcagaatttagaatactcatcactttggacacttattatttctttatgttgggaacatttcaaatctagttattttaagatgtaaatgaacaaaatcaatgaatctaataataataaaaagtaacatatattgagtgcttattatgtgtgagacactctttctattattttacatgtaacaattcatttagacacta

SEQ ID NO: 443670 - DNA, 603 bp, Homo sapiens
cccgactgggttattttttctttgtcttgaattagagattaattataattttgaggtttggctgtaatggagagacccagtgaaaataggtaggaggattttgcagttatccaggcatgaggtttatgagtagctattttactaatagtagaaactgaaagaaaaataactgatttaaattacacattaaagaacaatcacaatttactaactgggtttagggagagagtgaaaatggctgcaaatttctgagtcagaaaaaaatgctgtttctgttgccagtagtcactaggaaggaatagtcgttgagmaagtaaattcattgcttattaatacttatatttattagctattattgtggcattctatcatcacttgggttgatagctttttgcaatattgtattgtttataaaaagaaaaaaataagctattaaagtgagacaaatagtagaagctggttctggttcatactatgccactcactaaacatatgatattggaaaaatcacttattgcccctgaacattagtgttttcagctatataatatactatcttcacttacaaaagagttatgaagatcaaaacaattaaagaatgga

SEQ ID NO: 443671 - DNA, 613 bp, Homo sapiens
atggataacaaaatctgagaaygctcaagtcccttatataaaatggcatagtatttgcatataacctacatatatccttccatatacttgaaatcgtctataaattacttatagtacctaacacaatgcctacacatcacttcattcgtgtagattcaacctagtactctgtaagctgctaatttaacttaagcttttcttttctttctttttttaatttttttcttttttagatggggtctctgtcacccaggttagctgggactacatgtgtgtgccaccacacccagctaatgtttgtatttttcttagagatggggtttctccacgttatgcaggctggtcttcaactcctgagctcaagcgatccacccaccttgaccacccaaagtgctgggattacagatgtgagccacctagctaatttaagttttgctttttggaactgcataaaatcttttttttttcctgaatattttatttggtggctggctgagtccaaggatatgaaacccacgcatagggagggctgactgtattctgtagctgagtcagagggtgcaaaagtcatgaaacttgctcttgtacatttcttacgatgttaaattttcat

SEQ ID NO: 443672 - DNA, 613 bp, Homo sapiens
atggataacaaaatctgagaacgctcaagtcccttatataaaatggcatagtatttgcatataacctacatatatccttccatatacttgaaatcrtctataaattacttatagtacctaacacaatgcctacacatcacttcattcgtgtagattcaacctagtactctgtaagctgctaatttaacttaagcttttcttttctttctttttttaatttttttcttttttagatggggtctctgtcacccaggttagctgggactacatgtgtgtgccaccacacccagctaatgtttgtatttttcttagagatggggtttctccacgttatgcaggctggtcttcaactcctgagctcaagcgatccacccaccttgaccacccaaagtgctgggattacagatgtgagccacctagctaatttaagttttgctttttggaactgcataaaatcttttttttttcctgaatattttatttggtggctggctgagtccaaggatatgaaacccacgcatagggagggctgactgtattctgtagctgagtcagagggtgcaaaagtcatgaaacttgctcttgtacatttcttacgatgttaaattttcat

SEQ ID NO: 443673 - DNA, 406 bp, Homo sapiens
tcctctagtgaatttaatcttgagaaaaaatatacatcactaatagattggtatatgtttgtgtgtattgaaaataatacataagcttttcaagacttaagacatatatgtttaaataattatcaaaaaaggtaagcatataatgatcttatctttcaaaattcagcctcacatcatcaagtaatgacgattaccacaataagttgccctttggaaaagatagatagaagaaaaatagaaagagcgtaatacagctagactaagctacatatagcacctgctagagttgtgtagtatggaagttttggtgggtagagacccactgaagagaaacagttctctccaaagaaatacattcacaaatctttstcatgacacttaatctctaagtgagttaacctgttaa

SEQ ID NO: 443674 - DNA, 614 bp, Homo sapiens
aaacagaactttcaaaatatgtgtttaccttttgaaaagttaaatatcttgtgtaagtattgtaaagatgctcttaatgggaaaataactttaaaaagttatgatctagtatgtaataattttataataagagcatgcattaaatattataaaagctgaaagattttaagtttagggtatgtgcatttatcacctttaaatttataacttccaactgtaagcctgaataagatataaattcatttgtctttgagtgaattaaagtaaaatggtttattttgatcattaaactttcatatgatttacaacttcttggcaacaaacgcrtattttttattgtctaaaaggcataaaatacaactacctcagaaattatctcttgtccatctccatatacggcaaggattctggaggacaaaaaaagcactccagtttattgaagattacccaactccaatggtggtatcactatcagaagtcatctattgagtttcagcttgctgtactttctaccacttgttactagagcataccttcaacttcaataaatggaccttttgtcgtctctgatatttagctttactttatattaaggacatcctttaatctgtgaa

SEQ ID NO: 443675 - DNA, 610 bp, Homo sapiens
gttaattagcaggctaaaaccattctagaatgtagaatattgaaaaaaaaattgagctagatgggaaattctagtcagccttggacaacaaaccttcattgttttttttctaaataaatacattttattcaaattaagtggaaaagataaktctggtgatcttttagttttttttatgcataatcatattttatagtggtttatgggaaaggtagaatgatttcatggaaaaatgctagtttagattctaactagtcatcatctgaatcctggttctatttctaagtaagccagcaagtattctggttatcaagacaagtgtcgtttataatctagcctgtctccacccctactcctaaggagggtagtgactcttgctcatgtaggggagaaaaggtaatatcttttccttgcccatcacaccgttaatggctgacatccctataacaaaagacagattagaagaaaaaagcatagcaaatgtatttattcaagttttatgtgacatggagcctttaggaatgaaaacacaaaggcccagggaaaactgtatttttaatgcttaggtttgatgaagaataaacagtaatatagaagtaggtttgggcta

SEQ ID NO: 443676 - DNA, 377 bp, Homo sapiens
gaaagtcactctgtagtaacccaaaattgaaaaggggcagaaatcatctctaatccatcacaaaaggacactgaaaaatgtttcctacaaagtttgaaggaatctaaaagtgtaaaagagagccaaataaaagaagaataaagtagataaccactatctatagataaaataaatggctctttaaatatttttgagaataagtccttgtgaaaatattttaatgaggttttagcagataattcttctgaaacattcctagyattaaattttgcccagtaaatgtcctatggagaattaaaatataattatacataaaataaaagtataaataatgtttcacaacacaattctgttttgtttgatgatatatttgattt

SEQ ID NO: 443677 - DNA, 592 bp, Homo sapiens
ggtctagttgtgttgcccaggctggtctctggctcctgggctcaaataatcctcccatctcagcctcccaaagtgctgggattatacatgtgagccaccacgtctgagctcaaagtgaattctgactattatggagttattaatgcttgttctaaaatattctgttctctctttgattaggattatacttatccactccctttgaatccagaagtcatgtgtcttaatttgaccaataaactgtagcataaaaaacatgctycagcttcaggatataactatgtgcctggtagatgtgccatggtagatcagtgtgtgatctaccatgcccattttttctgccttagcattaatggaagcacgtgtagagactgagtcttcatggattttacgtccctgagtggccatgatattccaaaacctcttctcattcaagttagactggaactgctagtagaagcaaacttgtgttaagctactgagatttggggtaatttgttatttcaacacaagtattataatggatgacagtaaaagtgtaatttattgcagggcctttatctaggattattcactccatgaatagtgttgt

SEQ ID NO: 443678 - DNA, 592 bp, Homo sapiens
ggtctagttgtgttgcccaggctggtctctggctcctgggctcaaataatcctcccatctcagcctcccaaagtgctgggattatacatgtgagccaccacgtctgagctcaaagtgaattctgactattatggagttattaatgcttgttctaaaatattctgttctctctttgattaggattatacttatccactccctttgaatccagaagtcatgtgtcttaatttgaccaataaactgtagcataaaaaacatgctccagcttcaggatawaactatgtgcctggtagatgtgccatggtagatcagtgtgtgatctaccatgcccattttttctgccttagcattaatggaagcacgtgtagagactgagtcttcatggattttacgtccctgagtggccatgatattccaaaacctcttctcattcaagttagactggaactgctagtagaagcaaacttgtgttaagctactgagatttggggtaatttgttatttcaacacaagtattataatggatgacagtaaaagtgtaatttattgcagggcctttatctaggattattcactccatgaatagtgttgt

SEQ ID NO: 443679 - DNA, 592 bp, Homo sapiens
ggtctagttgtgttgcccaggctggtctctggctcctgggctcaaataatcctcccatctcagcctcccaaagtgctgggattatacatgtgagccaccacgtctgagctcaaagtgaattctgactattatggagttattaatgcttgttctaaaatattctgttctctctttgattaggattatacttatccactccctttgaatccagaagtcatgtgtcttaatttgaccaataaactgtagcataaaaaacatgctccagcttcaggatataactatgtgcctggtagatgtgccatggtagatcagtgtgtgatctaccatgcccattttttctgccttagcattaatggaagcacgtgtagagactgagtcytcatggattttacgtccctgagtggccatgatattccaaaacctcttctcattcaagttagactggaactgctagtagaagcaaacttgtgttaagctactgagatttggggtaatttgttatttcaacacaagtattataatggatgacagtaaaagtgtaatttattgcagggcctttatctaggattattcactccatgaatagtgttgt

SEQ ID NO: 443680 - DNA, 592 bp, Homo sapiens
ggtctagttgtgttgcccaggctggtctctggctcctgggctcaaataatcctcccatctcagcctcccaaagtgctgggattatacatgtgagccaccacgtctgagctcaaagtgaattctgactattatggagttattaatgcttgttctaaaatattctgttctctctttgattaggattatacttatccactccctttgaatccagaagtcatgtgtcttaatttgaccaataaactgtagcataaaaaacatgctccagcttcaggatataactatgtgcctggtagatgtgccatggtagatcagtgtgtgatctaccatgcccattttttctgccttagcattaatggaagcacgtgtagagactgagtcttcatggattttacgtccctgagtggccatgatattccaaaacctcttctcattcaagttagactggaactgctagtrgaagcaaacttgtgttaagctactgagatttggggtaatttgttatttcaacacaagtattataatggatgacagtaaaagtgtaatttattgcagggcctttatctaggattattcactccatgaatagtgttgt

SEQ ID NO: 443681 - DNA, 466 bp, Homo sapiens
gccgtcaagccccaagccttggcagcttacatgtgatgttgggcctgcagatgcacagaagtcaagaattgaggtacggaagtcaagaattgaggtttgggaacctagcctagatttcagaggatttatggaaatgcctggttgtccaggcaagtttgctgcakgggtggagctttcatggagaatctctgctaggacagtgcagaaggaaaatgtggggttggagcctccacagagggtccccactggggcactgcctagtggagttgtgataagagggccaccgtcctccagaccccagaatggtagatccaccaacagcttgccctgtgcaccaggaaaagccacagacactcaatgccagttcacgaaagcagctggcagggggtctatccaatgccatgggagcccccatcttgcatcagcatgacctggatgtcagatgaggagtcaaaggagattattt

SEQ ID NO: 443682 - DNA, 466 bp, Homo sapiens
gccgtcaagccccaagccttggcagcttacatgtgatgttgggcctgcagatgcacagaagtcaagaattgaggtacggaagtcaagaattgaggtttgggaacctagcctagatttcagaggatttatggaaatgcctggttgtccaggcaagtttgctgcatgggtggagctttcatggagaatctctgctaggacagtgcagaaggaaaatgtggggttggagcctccacagagggtccccactggggcactgcctagtggagttgtgataagagggcsaccgtcctccagaccccagaatggtagatccaccaacagcttgccctgtgcaccaggaaaagccacagacactcaatgccagttcacgaaagcagctggcagggggtctatccaatgccatgggagcccccatcttgcatcagcatgacctggatgtcagatgaggagtcaaaggagattattt

SEQ ID NO: 443683 - DNA, 629 bp, Homo sapiens
ttacccaatgcctgaatccccattgtattttggaagtcactagctcacttttgattttacrggttcataggtggaaagcacttgccttgtttcagatgagtctttggacttggaccttttggttaatcctggaattaattaagactttgggagactgttgggaaggcattattggttttgaaatgtgaaagggacatgagatttgggaggggctagtggcagaatgacatggttaggctttgtgttcccacccgaatctcatccagaattgtaatccccataatcctcatgtgtcaaggggggggaccaggtgaaggtaattgaatcgtgagagtgatttccctcttgctgttctcatgttagtgagtgagttctcacaatatctgatggttttataagggggtcttccctgcttctcctgaaactcctccttcctgctgccttgtgaagaaagtgtattgcttccccttcaccttctgccataattgcaagcttcctgaggcctccccagccatgttaaactgtgagtcaattaaaccttcctttaaaaattacccagtctcaaagagttatttatagcactgtgaaaatggactgatacattttccatcaggatttttcctactttt

SEQ ID NO: 443684 - DNA, 629 bp, Homo sapiens
ttacccaatgcctgaatccccattgtattttggaagtcactagctcacttttgattttacgggttcataggtggaaagcacttgccttgtttcagatgagtctttggacttggaccttttggttaatcctggaattaattaagactttgggagactgttgggaaggcattattggttttgaaatgtgaaagggacatgagatttgggaggggctagtggcagaatgacatggttaggctttgtgttcccacccgaatctcatccagaattgtaatmcccataatcctcatgtgtcaaggggggggaccaggtgaaggtaattgaatcgtgagagtgatttccctcttgctgttctcatgttagtgagtgagttctcacaatatctgatggttttataagggggtcttccctgcttctcctgaaactcctccttcctgctgccttgtgaagaaagtgtattgcttccccttcaccttctgccataattgcaagcttcctgaggcctccccagccatgttaaactgtgagtcaattaaaccttcctttaaaaattacccagtctcaaagagttatttatagcactgtgaaaatggactgatacattttccatcaggatttttcctactttt

SEQ ID NO: 443685 - DNA, 629 bp, Homo sapiens
ttacccaatgcctgaatccccattgtattttggaagtcactagctcacttttgattttacgggttcataggtggaaagcacttgccttgtttcagatgagtctttggacttggaccttttggttaatcctggaattaattaagactttgggagactgttgggaaggcattattggttttgaaatgtgaaagggacatgagatttgggaggggctagtggcagaatgacatggttaggctttgtgttcccacccgaatctcatccagaattgtaatccccataatcctcatgtgtcaaggggggggaccaggtgaargtaattgaatcgtgagagtgatttccctcttgctgttctcatgttagtgagtgagttctcacaatatctgatggttttataagggggtcttccctgcttctcctgaaactcctccttcctgctgccttgtgaagaaagtgtattgcttccccttcaccttctgccataattgcaagcttcctgaggcctccccagccatgttaaactgtgagtcaattaaaccttcctttaaaaattacccagtctcaaagagttatttatagcactgtgaaaatggactgatacattttccatcaggatttttcctactttt

SEQ ID NO: 443686 - DNA, 629 bp, Homo sapiens
ttacccaatgcctgaatccccattgtattttggaagtcactagctcacttttgattttacgggttcataggtggaaagcacttgccttgtttcagatgagtctttggacttggaccttttggttaatcctggaattaattaagactttgggagactgttgggaaggcattattggttttgaaatgtgaaagggacatgagatttgggaggggctagtggcagaatgacatggttaggctttgtgttcccacccgaatctcatccagaattgtaatccccataatcctcatgtgtcaaggggggggaccaggtgaaggtaattgaatcgtgagagtgatttccctcttgctgttctcatgwtagtgagtgagttctcacaatatctgatggttttataagggggtcttccctgcttctcctgaaactcctccttcctgctgccttgtgaagaaagtgtattgcttccccttcaccttctgccataattgcaagcttcctgaggcctccccagccatgttaaactgtgagtcaattaaaccttcctttaaaaattacccagtctcaaagagttatttatagcactgtgaaaatggactgatacattttccatcaggatttttcctactttt

SEQ ID NO: 443687 - DNA, 556 bp, Homo sapiens
ggaccaggtgaaggtaattgaatcgtgagagtgatttccctcttgctgttctcatgttagtgagtgagttctcacaatatctgatggttttataagggggtcttccctgcttctcctgaaactcctccttcctgctgccttgtgaagaaagtgtattgcttccccttcaccttctgccataattgcaagcttcctgaggcctccccagccatgttaaactgtgagtcaattaaaccttcctttaaaaatkacccagtctcaaagagttatttatagcactgtgaaaatggactgatacattttccatcaggatttttcctacttttatacttcacatagataataaaataataatgctgcatacattgaatatcaataatgtgcaaaacactgtattcactgttttgcatgtgttgtgctgtttagtatttgcagcaaggtataataaaggacttaggctaagaaaatatcatgccaagcagatgtgcctcatacgttgctaatccctatttatagaattagtatttctttataaactacaattttatactttcaa

SEQ ID NO: 443688 - DNA, 556 bp, Homo sapiens
ggaccaggtgaaggtaattgaatcgtgagagtgatttccctcttgctgttctcatgttagtgagtgagttctcacaatatctgatggttttataagggggtcttccctgcttctcctgaaactcctccttcctgctgccttgtgaagaaagtgtattgcttccccttcaccttctgccataattgcaagcttcctgaggcctccccagccatgttaaactgtgagtcaattaaaccttcctttaaaaattacccagtctcaaagagttatttatagcactgtgaaaatggactratacattttccatcaggatttttcctacttttatacttcacatagataataaaataataatgctgcatacattgaatatcaataatgtgcaaaacactgtattcactgttttgcatgtgttgtgctgtttagtatttgcagcaaggtataataaaggacttaggctaagaaaatatcatgccaagcagatgtgcctcatacgttgctaatccctatttatagaattagtatttctttataaactacaattttatactttcaa

SEQ ID NO: 443689 - DNA, 614 bp, Homo sapiens
aaaccttaagggttatcaaaagtatcagggatgtcatcttaatgttctagcccataataggtgttttgatattaattactgattctgaaggctgtgtaatcagtaacagagcccaaattcaaagccccatgtatctgcctccaaaaatttgtgtatttcccctcatatcacccagtgttcaaattttttgcaagagatagttacaatccccatcagatttactataatttctttattctgttgaggtttattctgctctttcactgcacttaaatattatgagtagccaacaatctagtttcacctgacatgacattgtcaaagaaaaaccactgacatttacctttgcaagtgacaagtgctcttttccaaggagtacataaaatggttacaaaattaaaacctcagagtttttgtctatttgtttagaatccactggggttcatactttatcattgctgtgatatttgccaaattagtgcttcagtgctaatatttttaaaagtatatttttctctctatcatactcctttcttttttttmtgctgacctgtaatcataatgaaagcacttatatgtctttggtcctgtctcacttttcaaaacaagtgcta

SEQ ID NO: 443690 - DNA, 561 bp, Homo sapiens
gagcccaacccacgaaaccattcttccttcccaggcctctggacctgtgatgggaggagctactgtgaccatctctgaaatgccttggaggtattttccccattgtcattcctataaacattcagctcctctttacttatgcaaattcctacagctggcttgaatctctccccagaaagtgaggttttcttttctaccacatgatcaggctgcaaatattttaaacttttgtattctgcttccctttatataaaagctccagtttcagataatctctttgctcacacatatgaccatatgctattagaagcagccaggctacatcttgaatgctttgctgcttagaaatttgttctgccagatactccaaatcatcactccagttcaaagttccacagatccctagagcagaggcacaatgctcccagtctctttgctaaagcatagcaagagtaactactccagttctcaataaaktcctcatctccatctgagatcatctcagcctgtaacgcattgtccatatccctattagcattttggtcactacaatttaacaag

SEQ ID NO: 443691 - DNA, 621 bp, Homo sapiens
ttttaatgacattcttaagtagaattgctttaggaagttaaatttttctcagtattattaatacaataaaacaaagcatttttatagagaaatctaaaatttctgatgcatgtcttcagcgcatcacaatttgatttttggaaaatatttattacaataagttacaactaaattaaacagtgaatggatcactcctaaggggataaactaaattaaacttggaagaaaccagagctaattgtattgcatctttataattaagcagcaagaatttttagtctgctgttatccttttggtttgctaacacttacattttattaatatagctgatgtgtctacatttttytctcagggtaatatgaactaaacccttaaaaattagagtactgaaagattacttatttttgtcaatgttctatgtttctgggattaattgttttaaaatttactaagtatacataatcatttacatcatctaatttgataatttaatccatttctatttttctgcatctatttattcaacacacatttattaagctgctatttgtgctctagatatgggaaggacaaaaaggaataacacatggtactactttcaagctggtctttgttctact

SEQ ID NO: 443692 - DNA, 501 bp, Homo sapiens
attataatgtcttctgtctcttgtgacagtttttgacttagtctattttatctggtattaatatagctacagtgatctcttttgtttaccatttgcatgaaataggtttttccgtcttttcatgtttcagcctatttgtgtcatctaaagtgagtctcttgtacatagaatataagtaactatttttttaaaaatcagtttagtctcaatctatggcttttgactgaggagctcargccattatcatgtaaggtacttgctgatcaggaaagagttactattgccaattttttaatttatttactgtattctttgtagctttttttgtacctttgtttctctatcactgcctttacttgtgttttgttgtagtagcaatttttgattcccttttcatttccttataagtatattctatacatattttctttgtagttaccatagcaattacataaaacatcataaaattataacattccactttaaagtgataacaagata

SEQ ID NO: 443693 - DNA, 458 bp, Homo sapiens
ttatttgcagatgacataatattctgtgtagaaaactacatggaatctaaaaataaatctcctaaaatgaatrgatgagtaaaacaatgtcacagaatgaaatataaacatacagaaataaattgtatttctacaaactagcaagaaacacatagacacagaaattaaatgcaatagcatttataattgctcaaaaatgtaaactaattaggtgtaagtctaataaagtttctatcgtcttacatgctgatatccataatctggtgataaatcaaagaagattgaaataaatggagagacatattgtttttgtggattggaagactcaaagatgtcaattctccccaaattgacataaagtttaacacaatttttaccaaaatacagcaaaaattttatattaatacaagagttttctaaagtttgtatggaaacacaaaggaactatattagctaaa

SEQ ID NO: 443694 - DNA, 616 bp, Homo sapiens
tttattctttttagggctgcatagtcttccatgatgtatatgtaccacatttttgttatccaattcaccactgatggacacctaggttgattctatgtctttatcatttatatttagattgatttgtttttctatgctataggtaataacttcttcatatttatatatcagtttattggtttgctcatcaagcatgcctcagatgctttttaattttccactaaatttttaatcttagtgatcagacttttttattttagaagtttatttttatgcttcatcttttgttttttttttattttttattctttgttatctgtrttttcaattgtctcttttatctctaaatattttacacatcatctatgtctttgggatttaaggaagattagtttatatttgtctgatgattatctcttataaacatgactttcttgtatgcttttaatttttaattttgagaaaatgctcaggatcatgttgatgatgagtccctccttcttgtatgcttttaatttttaattttgagaaaatgctcaggatcatgttgatgatgagtccctccagagaatatgtgcatttcttcatatcatgtgcccaaggagctactatcttc

SEQ ID NO: 443695 - DNA, 568 bp, Homo sapiens
taagcctacactcagtcacgatctggctgtgactctgtgctgtcctctttccctgtctcatcttctgccatgccttccataagagctgagtaaacagaaaggaccatatgagaaaaattaaaatgtccattcatgtaatatatatttactgataaacagatgaaatcatttgcgaaacactatatatagaagcaaatatgagaaatatatatctaaatgtcttgyagggagattagatgtagactataaggtactatataaatccaaccagaaaagtgcaactaaagcactaatgggagatcagaagaagaaaatctcttcagtgggcgagaatctcttcagtggctttcttcatgaagcaggtggcagttggaatagaccttgaaagatgggaatactttgaatacttggaaatagggaaaaaataaattctaagcacagaggagagaataaacacagaaatatagacagaaacattctgcaaattaatgaaatagaatgactcgagtttgaatgtttaaagtataaagacctaaacttaagaagtaaaactataaaagtctatggg

SEQ ID NO: 443696 - DNA, 492 bp, Homo sapiens
atttgctgaatttaactcaaccaattcagtaactaaagcaaaacatccaagatcatatgtgaaagtgtgacatggcagattagtcaatgagaattattttaagatgactccatgtctccattcttacttctcaatctttcctgtgagtttgttgatatagagaaggatctcatgatttccactctgacaacttcccaggcacagtcactgtttcttctctttcaggtagagacagattcyctggaagtaccttctcaaggccagtgtagagctcccaatcacccagcagattctccctctcccactgcccgcaccaagcaggtctccaggtgttccagctgctgatgaagtccagtgtggagttggtccaggagggtcgtgttccaggcagcagaggagcgctctgtgtggaagaggctgaagatctgctgcagcatctcatggaggacagacagggcctgggcctgctgcaactggctgtcatacacatct

SEQ ID NO: 443697 - DNA, 545 bp, Homo sapiens
ggacagaagaagactgcaaacaatacaattttttgtaatttgtctaaggccctggtcaactcccagtctgaaagcagcaaatccagatgttgagtgtgtagctggaggaaaagactcaagaggcccctgtgcagttgtaggctctccctccctgctacctcagcaattcacacacacytcctagtgaaataactccagaatatatggtgtcaattataggaatgcctctcaatctctaccaaaattgatacatttgaataaatagacctcgccagctctcagggaacagtaatgctattctttcacattccttagcttctatgggaattcttcctttttctaactgggcaggggttttactgttgagtggaagaactggaaagatcattattcaaaatgacagtgagaaaatgttttaatttgttaatgtttgaactctgatattaggattaaatctgtgaaattaagattgtactgctggtttaatgcaccattaaacatgaggtttctgtgaatagtattaagttccaatacaaaacggcagc

SEQ ID NO: 443698 - DNA, 633 bp, Homo sapiens
gcagcaaaccaccacgacacacatttacataacaaacctgtgcatccttcacatgtgccctgtaacaaaaaaaaaaagtgggtgaatgatgtgaacagacacttttcaaaaggagacatacacacagccaacaggcatatgaaaaaaagctgaacatcactgatcattagagaaatgcaaatcaaaacagtgagatactgtctcacaccagtcagaatggcttttattaaaaattcaagaaatagcagatgctggcaaggttgtggagaaaaaggaatgcttattcactgttggtagaaatgtaaatttgttcaaccattgtggaagacagatacctcaaaaacctaaaaacagaaataccattcaacccagcaatcccattactaggatataaatcattctgtcataaaggaatataaaccatgctgttatamaggaatataagtcattctgtcataaagacacatgcacgtgtatgttcattgtggcactattcacaataacaaagacatggaattaaccaaaatgtacatcactgatagactggataaagaaaaagtgatacagctaaatcctggaatactatgtagccataaaaaagaacacgtaggaacatggatggagctggaggcc

SEQ ID NO: 443699 - DNA, 656 bp, Homo sapiens
ttttgctatggaaacttttgtacttgtttattctttaaaatgaaattccaagcctaattgtgcaacctgattacagaataactggtacacttcatttatccatcaatattatattcaagatataagtaaaaataaactttctgtaaaccaggttgtatgttgtactcaagataacaaggtgaacctaacaaatacaattctgctctcttgtgtatttgatttttgtatgaaaaaaactaaaaatggtaatcatacttaattatcagttatggtaaatggtatgaagagaagaaggaacaaccgatgatttctctctgcagaaggtagattgaggcatgtgaggaaataaaaataagacagagacattctctttaaattgactagtatacatctattagaaaatgtccattgccagttagatatataagtttgcaatttgcaaggaatgcgattgctgggggtttatatgtgataagagaaagccaagaaatgaaggtcatggtgtygggagagagtgtagagagagaaaaagttttaaacatgattctgaggacctttcgcttttaaagggaggggagagaaaagccgcaaaggaaacatccacagccacaaaggaatggctgtacattagaaggcaacagcagagaaagataatg

SEQ ID NO: 443700 - DNA, 525 bp, Homo sapiens
ttggctggatattataaaaataaacacaccccattcctgaatccagaagtttttcaatcacagtgtcaatatctgtaggtcatgagcgtgcccattcagcatttattgggcttaatgtatgtgcagrttctttggtgggccttgggataaaaagtttaagaagacatgtccatgcccacaaagagctcaaaagctagtgggagaggtatgtgtacagtgagaatagggactctacatcaaggtgtgtggtggaagtggagagacacaagcaaagaagggggcactacctaaccattgtcttaaaggattaattctggtttgccaggtagaccaagcggcatgttcagggagtgttacagagttagggaacaacacttggaaagggctcaagacttagcattctaagggaatgccacttgtgggtgatggaaatatctggaagcccttgacttttggattagttgggaaattcctctgaaatgtgtgcattatgtctgactttggtcttagttgggtcacaggcaa

SEQ ID NO: 443701 - DNA, 570 bp, Homo sapiens
tatttctgttgtaaaagtgtaacatgtttatttgtcttagaatgccatgtgttaatgtctgtcatgaggaaatgaaatagtttttcttttgggcttcttggtaaaagataattcctctcaatacaggcagaaacaaactaattaagaatatataaatggctcttcactgtaagaaaaacagatttgtgataatatgttcagttctatggcagacaaaattccaaagggcagggacttcctcaccgtatgggggaataagcactttttccttgtgattatatcagattaccaaatgctggtagaaagattaacataaaaggctagtgatgacaatttgagtatgagattgctactgtggcccagagggcagccccgtcaacaccctgccaattcacattgttgtttggactttacttctcttcgctgaagttggacttggggcttttaggttttcaagtcttctttcagtcttcttgtttcctctctcctgtttcttgagttatttgagctgctcrtgggtgtttttagggaaatgatttataaactttaagaggtatttccagagcagct

SEQ ID NO: 443702 - DNA, 571 bp, Homo sapiens
tgtgtccttatttgaagataagattaccaaagagtggcagtttacactgtctgagcaggcacataatctacatgtatccaacaaaagcagaaaccctttctgtcaataaagttaatttgataagtttaggagtcaaaatctggaagtccaaaaagatgcatagtgaggagaatcatcaagcatgcatgaggaaacmaactgggatggcattacaggaaaatgatgtagttacttggaagcaagccaccttcgtggtttgcattctttggaaatatgttctatctaattgctgaactttgcaaaaaaatgagtgatttgacttgctgattccaagttaattacttggccattgaaagtttttatagaagagcattcatggaatttgtgtgacccagaatgatccctgcctgtgttttctcacctgcctttcttcttgcaaacctttcctgatttgtaaaacgtgtataagaaactcaaatattggactttggagacttgtcataaaaaattgtgttgagctattgcaggatcttggagagacagaggttatcttgggaaggagatccaggtc

SEQ ID NO: 443703 - DNA, 571 bp, Homo sapiens
tgtgtccttatttgaagataagattaccaaagagtggcagtttacactgtctgagcaggcacataatctacatgtatccaacaaaagcagaaaccctttctgtcaataaagttaatttgataagtttaggagtcaaaatctggaagtccaaaaagatgcatagtgaggagaatcatcaagcatgcatgaggaaaccaactgggatggcattacaggaaaatgatgtagttacttggaagcaagccaccttcgtggtttgcattctttggaaatatgttctatctaattgctkaactttgcaaaaaaatgagtgatttgacttgctgattccaagttaattacttggccattgaaagtttttatagaagagcattcatggaatttgtgtgacccagaatgatccctgcctgtgttttctcacctgcctttcttcttgcaaacctttcctgatttgtaaaacgtgtataagaaactcaaatattggactttggagacttgtcataaaaaattgtgttgagctattgcaggatcttggagagacagaggttatcttgggaaggagatccaggtc

SEQ ID NO: 443704 - DNA, 610 bp, Homo sapiens
gacttgcagtctaagaaaaaagataaccattgcaagtttgattattatggcgaaggactttcttgtttgtgtatggaaacataacaaagacacctaatttagacaggaagtggtaaaggaaaaccactttaaggaagaaatattatttaagttcaggcaaaaaaaaaaaaaaaaaaaaagggggggtcgcggggcagrggaagagtatcccagacagcatatgtgagagctgtgaagctagaaatcttggcacatcaacaactgacatgtctggagtgttgagaatagcggtgaaaagaggaaatggggtgcgcaatacacggacggggcccaacacaggtctcctaagccttatgaaaagtacaagtaatatcataagttagatgaggggccattgaaggatttaatgtcactgtctcatgaaacaaaacttttttcttggatattcacattctctccacaggtttattcacttctgccctctcgtgtatctaaaaattaaacttccctggatgctgtcactcctctttgttactggcccatccatcatattctctttgtgccctaacttctagcaaaaagagctaatatttattgcatctgtttcttc

SEQ ID NO: 443705 - DNA, 575 bp, Homo sapiens
tattcttcagcttattcgtggttgtgagggagaaaaaagagatcctcctctaagtattgtttgaagatagagtgcatgtcttctctgtatatttttatcttcacagtatctagtacaaaaccttgcacatataacacatttgttgaatatctgtcatagcaattatcatttgttctgtttcatatacaaagtacttccaaggagtcagcttttaaggtgtaaacacacacacacacagacacacacgcacacacacacacacaatgctgcagttgctttcaataaatgaggacayatttctctgctcaggctttccagcagtgctttattatataagctattctggttagctctattttatggatcagatgcttgccctggctaccttgaggagaaggggtccagtgtaagaatttgtaaggcctgggaccagatgatgtcaggaaccaaagcagctttaagggtatgctcttttcctcacctgtcattttctttatgactatgctcaatgcttccctgctcccctctgagagtctttttcactttatcttttttttactcgtttttctcttacc

SEQ ID NO: 443706 - DNA, 536 bp, Homo sapiens
ccacctctggtccaaccacctccagcctgctacacaacgtggctggctcagtcataggaattatgaatggggtagttcctcttcataagggatgtgagccttttctgcctacactcaccaaatgccatcactggatagaagtatttatatatctaagtacacttaaaaaatktgaattattttcctactctcatatcttaacagaacttccacaaacactaaaatagttgtattgatttaaaaaattatgaccccaattattgattctctctttttcataatgtgccttgtccttcaagccacacacttaacaagatttaggattgctaacattcgaaaaagtcttaaattttaaagattctttttctttattcttcctcaccttttctaaatagagcccatgtaaattcccaacatttcgtgtttgccctctcttttactatctcttattttattgcttccaataattttagatgaactctggagaagatgtgaggctgagtctcttcactttgcgctcaactttaggtcaagtt

SEQ ID NO: 443707 - DNA, 606 bp, Homo sapiens
gaagtattgctatgacaaccttaattgtatattataggcaaatcagataccaccttgagaagacaagataaacaattgcctgcactaatggcttaagacaaatttatgagaaaaaaatgcttataatttagaaagctgtatccattaacttgtgtatgaattggaaaatgcctgcttttatttaattttagcagtaaagcacctagcttcaacttgcaaaatatttgttccattaaatctgagaaccaatgatcttagtgatttacctcctgataattaaacaaaatgacaaattaatctattgtaaagtctaatgtaaaattttttagactttcagaaaatgtatcactgcttttttattttaagaaagtgcttgtgtctgtatttatatctcaacaaattataaaatgctctgtacctattgcctctcttttaatgcccttggcttcctaccacacttatcctgtaccatgcacatatgtacattttcctttcaccatcagtatgtaaytttctagttataaccagatatgttaatgagaaatagacattaattagaagtggaaaagttcaattttactaatctaaacttaaacactatagtgt

SEQ ID NO: 443708 - DNA, 592 bp, Homo sapiens
cattatccaattttcaaattgaccttaccaagtgccttctgtaattatttttttctcaagtgagaacaagactgtaaaggtgaaataacatgctcaaagtaatgtagcaagccacagagcttgcagataccagagcaaagatcttatcccaagtcagcctgactcaaaagcctgcactgtgttgttgacaactcaaacctgaatagcattgtgaaatatcactgcaaaataataataacaataataataattttctcctagctttctttattcaagtttacaatggtctctgaagtcttgaattaaagaaaagatattttcctttctcttgacattgcttccttaagaactgagaacagaatggaggaactgtcaaatggaaacgtttagaaaataatactcatatttagaagtttaaactaataytttatatactaatgttttcccaaacatttaggtttattaagttgatatcctgttgtataaccacctcaatgcctagcacaaaataaaaaattgttacttctaaatatgtgtgcccttttaaaactccaaaaccagagttctaaacttgggaatattgggaaggaga

SEQ ID NO: 443709 - DNA, 621 bp, Homo sapiens
acaaaaccaaactctggaggacagaggattcattccaaggtgaaaaatggcaaacttatccagtgatctcctctatagagaagtataaatgtttggtaaatagagttgggggccatttgtggaattgcctttggctaaagtcatttagcccaagttttctactcctccctagggtctgcttgtattcaatgactggtctacgtgggggtgtgaagtccccttactccacctgtgaagagtcttcccagtttcagaccaccctcccagcctcctgttattggctaaggccattttgtgactacactgcaggttagctttcccctttgcctaatcgtcctgccttttcttctcacaaatgtgattccatagctctctccaataaacttgcataagaatcctyatctcagaatttgttgtctgagcttcaatttagggccacagaaaacctaagctcataagctgtttcttttgctagctacatattctttcccttatatgtgttaataacatttctgttattcatgattcacttaaaatttttcccttcacggagagcctttatagtctgatttgtctgaacctatttgctacttgcccatagcacaaatcttaccatgtcac

SEQ ID NO: 443710 - DNA, 590 bp, Homo sapiens
ctcctgacctcaggtgatccacacaccttagcctcccaaagtgctgagattacaggtgtgagccaccgtgccgggcygaccccactcttatgatgtgtctttcctcccagtcagccggggttgatggttggttatatcttcaactgccaggtaatacagaaaccattagcaccatcttgagcagttctaaaaggatctgttttttgctcagctttttaaaaaaacttaaattatgaaaatattagaacagtacatgccaatggcataaatggctcaattttacaattttataaaatataacactcttcccattattctagtcaaaaggccactcatttgttgtccaaaataggtggccactagctattaataaagatttggtggcaattttcttcatttctttggattttatacatgaagcattatgagtaggcagaagatagccagcatgtagtaagtgtttagaggtaagtagctagggttacgtagtaagtatgcaggaagggaccataacacaataacagtcctatgaattttgccttcaatgcaaaaagaatccagtttcttagaggtgtgaaaagctgttcagt

SEQ ID NO: 443711 - DNA, 315 bp, Homo sapiens
gcagattttcagtgtagacaaaacagccttctattggaagaggatgccatctaggaatttcatagctagagaggagaagtcaatacgtggtttcaaagtttcaaaggacaaggtgattcttttgttaggggctaatacagccagtaactttaagttgaagccagtgctcatttacyattctagaaatcctagggcccttaaatattatgctaagttgactctgcctgtgctctatcaatggaacaacaatgtgtctggatgacagcacatctgtttacagcatcatttactgagtattttaagcccactgttgag

SEQ ID NO: 443712 - DNA, 581 bp, Homo sapiens
acagacctgtacccaccagcaccctgcccctatgcatccccaagacagcacaatcatgtgtaataatcaccagcaggggtccccaacctctggaaccctgctgtctccaccactgtggtgaacacctgcacggaggcaggcacccagtaacccactggtaccctgtcacagctgatgagcatgtaccctgctgcgctgtcactgctgctggcatatgcaaatgaggaagaatgctgctgccactgcactatgagcacacagtcctgaggttgggagctgagtgttggccccctaaaaccttccagaaacaaaccagtagactaaatccaccttataccacaaactctcaaggtcatcaagtaagataaaaggaaaataaaaacatccaacagtcagcaacttcaaagattgaagaagcacyagctcataaaaatgagaaagaaccagcagaagagcactgacaactcaaaagccagagtaccttctttcctataaacaactgcaagtgttctgaactgggctgagatagctgaaatgacagaaataaaattcaaaatatggataggaacaaagatcactgg

SEQ ID NO: 443713 - DNA, 564 bp, Homo sapiens
tttacagattagatttaacatcatgaaagctggtacaatccaggaatcagaggaactgtccctgaggacacaggacttcagggacatcaattattaagaggctacatgaaagcagaaatgctcctggatgtttccatygtctacacataaagtttcaacagatcagccccagcaagtataggcacattcctcactactgtgggtgatgagcttttcactcaaagcagagatgtgaaacctgacaggtttcaaagaccacctaagtgctccataccttgacagtcactcccacaaagctgaaacaccatctgttcctgagggatcaggtcatcatctgtgactttgagacactggccagtcaggcttcagttgacatgaggccagtgattttaagtgtaaaatgcccaaaccatcatactcattaggtagatatttggaggcctgtgcacttaaatgggttagtgaaatgtcacaccagacatatgactgggaataggggtttcctcctctgctcttagcagcaccttggtaatccaataattaccctccctcatgcctccacat

SEQ ID NO: 443714 - DNA, 264 bp, Homo sapiens
tatctcctcttcttaaattagtggtgaagaaattccagttttgttattagttcaagatgctgattttcctaaccaaatgtaattgaatctgtatgcagaaatatctcargaagctacctttgctcaaaactatatctgcatcattgttaaatgtaatttcaagtataaaatttagtaatgtaagttcatggcatggtttactcttttctctgtacctgtgatcttacgctgctttccacattgtgtcagcctgtgaactgtcta

SEQ ID NO: 443715 - DNA, 552 bp, Homo sapiens
atatttaaaaaaaatgttagatttcaaagtttgtattgatgtttatagtgtctctttttcttttagtaatttcctgctattgctccaggtttagtaatgtatattttttcaaatacatgatatgtagtacgtaaaaatatataccatatattttttagtatattaagtgctgtggccacagaaaatttccttttatttaggatgcaatrgtcttgataaaaatacaacattaacatccatcaataattagagaaaaataaaaagcatacaactaaatgctaaaacatgtggtacgtggactgtctctgatatcatatttgaaagaagaaaggactgctaagagatggaactgtcaaaggattaatcatgctgtctacaggcttccttcatatgccacatgctacccactacctgggtcaacttggataagttattctgtttctctgggccctacgttatctgttgaagacatgtaataatgcctatatgatggatttaattttaaaggcaaataaattggaataaattagaatgtgcactcagtatacactt

SEQ ID NO: 443716 - DNA, 388 bp, Homo sapiens
tgtattgatgtttatagtgtctctttttcttttagtaatttcctgctattgctccaggtttagtaatgtatattttttcaaatacatgatatgtagtacgtaaaaatatataccatatattttttagtatattaagtgctgtggccacagaaaatttccttttatttaggatgcaatagtcttgataaaaatacaacattaacatccatcaataattagagaaaaataaaaagcatayaactaaatgctaaaacatgtggtacgtggactgtctctgatatcatatttgaaagaagaaaggactgctaagagatggaactgtcaaaggattaatcatgctgtctacaggcttccttcatatgccacatgctacccactacctgggtca

SEQ ID NO: 443717 - DNA, 524 bp, Homo sapiens
cacaattatgcaaataagtaattgctaaagttctagtttgcaaggaagtttaactcaaatgcttctaacatktagacgctactctctttaaatagtttcttaagtaaagccagtaaaattattggcaaactgcatatttaaaagttgatttttcttctccatcttaatgaaatcattttaaattctgcagttctgtgataaggaaaaaaatctgcattcagagtatgactaaatgctttctaatatattgatatctaagaataagatctatcctttaaaagcattgtggtacaataaatgcttctttgtcttagaaatcatgcatagaacatgacagcagaaagactcagtggagacagaccactttaatttttactgataatatgatgatcacaggtgcatttttaattatctcaccacattgctttccccatcagctgtcactagtaatttcatacagcaagtacgttgcccttatgacattacagaatacaatttagagtcatttaggatgcgtgaagatt

SEQ ID NO: 443718 - DNA, 589 bp, Homo sapiens
cctgcctacttctctgaagttaaaattttgaaaatcaacaaaacagcaataaaatccctttgtatcctatcacgtttatgttatattataaatgcttttctagaagtccctacctacaggttttctgtgctraaaaaaatccacaccatataatagtattttactatcttctataggtgactcatctttgtatcctttttataaactaatgaccagctgcattttatatttaagtaaagaaaaatctttaagaattggaaaaagtaatgggttaataagagattgatttaaactaattataattaataggaaaataaaaattttaaacatttaaaagttctattgtatataatagaatactatacagcaaaaaaaaaataacaaatgaaaccttctggtcatgtaagtcagtctgatgaattcaaaaaatgtcattttgaatgagagatgccaggcattaaggtatacatattttaggattccagttatatgaactccaagaatagacatggtaatagaatcagcatagtagttagttcaggaaaagggaatggggtattttttaggaaaagaagacaacataacttcc

SEQ ID NO: 443719 - DNA, 589 bp, Homo sapiens
cctgcctacttctctgaagttaaaattttgaaaatcaacaaaacagcaataaaatccctttgtatcctatcacgtttatgttatattataaatgcttttctagaagtccctacctacaggttttctgtgctaaaaaaaatccacaccatataatagtattttactatcttctwtaggtgactcatctttgtatcctttttataaactaatgaccagctgcattttatatttaagtaaagaaaaatctttaagaattggaaaaagtaatgggttaataagagattgatttaaactaattataattaataggaaaataaaaattttaaacatttaaaagttctattgtatataatagaatactatacagcaaaaaaaaaataacaaatgaaaccttctggtcatgtaagtcagtctgatgaattcaaaaaatgtcattttgaatgagagatgccaggcattaaggtatacatattttaggattccagttatatgaactccaagaatagacatggtaatagaatcagcatagtagttagttcaggaaaagggaatggggtattttttaggaaaagaagacaacataacttcc

SEQ ID NO: 443720 - DNA, 589 bp, Homo sapiens
cctgcctacttctctgaagttaaaattttgaaaatcaacaaaacagcaataaaatccctttgtatcctatcacgtttatgttatattataaatgcttttctagaagtccctacctacaggttttctgtgctaaaaaaaatccacaccatataatagtattttactatcttctatargtgactcatctttgtatcctttttataaactaatgaccagctgcattttatatttaagtaaagaaaaatctttaagaattggaaaaagtaatgggttaataagagattgatttaaactaattataattaataggaaaataaaaattttaaacatttaaaagttctattgtatataatagaatactatacagcaaaaaaaaaataacaaatgaaaccttctggtcatgtaagtcagtctgatgaattcaaaaaatgtcattttgaatgagagatgccaggcattaaggtatacatattttaggattccagttatatgaactccaagaatagacatggtaatagaatcagcatagtagttagttcaggaaaagggaatggggtattttttaggaaaagaagacaacataacttcc

SEQ ID NO: 443721 - DNA, 589 bp, Homo sapiens
cctgcctacttctctgaagttaaaattttgaaaatcaacaaaacagcaataaaatccctttgtatcctatcacgtttatgttatattataaatgcttttctagaagtccctacctacaggttttctgtgctaaaaaaaatccacaccatataatagtattttactatcttctataggtgactcatctttgtatcctttttataaactaatgaccagctgcattttatatttaagtaaagaaaaatctttaagaattggaaaaagtaatgggttaataagagattgatttaaacwaattataattaataggaaaataaaaattttaaacatttaaaagttctattgtatataatagaatactatacagcaaaaaaaaaataacaaatgaaaccttctggtcatgtaagtcagtctgatgaattcaaaaaatgtcattttgaatgagagatgccaggcattaaggtatacatattttaggattccagttatatgaactccaagaatagacatggtaatagaatcagcatagtagttagttcaggaaaagggaatggggtattttttaggaaaagaagacaacataacttcc

SEQ ID NO: 443722 - DNA, 621 bp, Homo sapiens
gttatatgaactccaagaatagacatggtaatagaatcagcatagtagttagttcaggaaaagggaatggggtattttttaggaaaagaagacaacataacttcctgggcatatgaaaatgtactactatatcttgatctggaggtggctacatggatgtctacgtatgcaaacagtcaaattgcattcaagattcatgtttgttgctgaatgtaaatcatactttaataaaaagcagaacaaacaacatttgtttatggttgttattggtttacattcattcagtgcccatatacattatttcatttaatccttgcaacaactctatgagaaagacactgttattgggcccatttttagatgaaaactgaggtacaaggaagaaacaaaattttacgaggtcatataggtattacattgcagaatgaagatcagaactcaaagtgtctggttctggagcctacagtcttgaccaccaagcaataytgcttcttcctattaggtctctatatacccggtttttattttgtagagaagcttcatgtaacagtaaacaataggcttctacagagaaaatgagttattagaagcatcaatgcattggaaattgaaagcaaaaac

SEQ ID NO: 443723 - DNA, 522 bp, Homo sapiens
gaatctgagttccatagttactacattattagattcaattgcaaagctttcaacaaataacccacaagacatacaaagagagaggaacaaagggaccattcaaaagaaaaaaataaactgtccctgacaaagcttgatgayacatctactaaacagactttataacaaagtcttaaacatactcagagaagtaaaagaagatggggagaaagtcaagaaaacaatataggagcaaagtggtgatattgatttagagctagaaaacctaaaacgaaacctaaaagaaattctggagctgaaaactataataatgaaaattttaaaaaaaggatatagagggcttcaagggaagatttgattaggtagaagaatcagcaaacttgaaataggacaaaaaatatcactgagtctttaaattagaaagggaaaagactgaagtgaacagaacctaatgtatctgtggagcaccatgaagtggaccaatatacacactgtagaataaaagaagaaggaagaaaaaag

SEQ ID NO: 443724 - DNA, 550 bp, Homo sapiens
aaaaatagcagacgctgtggaaaagagaatctgagttccatagttactacattattagattcaattgcaaagctttcaacaaataacccacaagacatacaaagagagaggaacaaagggaccattcaaaagaaaaaaataaactgtccctgacaaagcttgatgacacatctactaaacagactttataacaaagtcttaaacatactcagagaagtaaaagaagatggggagaaagtcaagaaaacaatataggagcaaagtggtgatattgatttagagctagaaaacytaaaacgaaacctaaaagaaattctggagctgaaaactataataatgaaaattttaaaaaaaggatatagagggcttcaagggaagatttgattaggtagaagaatcagcaaacttgaaataggacaaaaaatatcactgagtctttaaattagaaagggaaaagactgaagtgaacagaacctaatgtatctgtggagcaccatgaagtggaccaatatacacactgtagaataaaagaagaaggaagaaaaaagat

SEQ ID NO: 443725 - DNA, 550 bp, Homo sapiens
aaaaatagcagacgctgtggaaaagagaatctgagttccatagttactacattattagattcaattgcaaagctttcaacaaataacccacaagacatacaaagagagaggaacaaagggaccattcaaaagaaaaaaataaactgtccctgacaaagcttgatgacacatctactaaacagactttataacaaagtcttaaacatactcagagaagtaaaagaagatggggagaaagtcaagaaaacaatataggagcaaagtggtgatattgatttagagctagaaaacctaaaacgaaacytaaaagaaattctggagctgaaaactataataatgaaaattttaaaaaaaggatatagagggcttcaagggaagatttgattaggtagaagaatcagcaaacttgaaataggacaaaaaatatcactgagtctttaaattagaaagggaaaagactgaagtgaacagaacctaatgtatctgtggagcaccatgaagtggaccaatatacacactgtagaataaaagaagaaggaagaaaaaagat

SEQ ID NO: 443726 - DNA, 550 bp, Homo sapiens
aaaaatagcagacgctgtggaaaagagaatctgagttccatagttactacattattagattcaattgcaaagctttcaacaaataacccacaagacatacaaagagagaggaacaaagggaccattcaaaagaaaaaaataaactgtccctgacaaagcttgatgacacatctactaaacagactttataacaaagtcttaaacatactcagagaagtaaaagaagatggggagaaagtcaagaaaacaatataggagcaaagtggtgatattgatttagagctagaaaacctaaaacgaaacctaaaagaaattctggagctgaaaactrtaataatgaaaattttaaaaaaaggatatagagggcttcaagggaagatttgattaggtagaagaatcagcaaacttgaaataggacaaaaaatatcactgagtctttaaattagaaagggaaaagactgaagtgaacagaacctaatgtatctgtggagcaccatgaagtggaccaatatacacactgtagaataaaagaagaaggaagaaaaaagat

SEQ ID NO: 443727 - DNA, 549 bp, Homo sapiens
caagaacatctaaattttctatgtaggaaatgtataaaatccttaagaggattttactgattttgtctgctgtatgctactatgtgctatgttttactatcaaatatttaaaaatacacaccaaataaactactgttgtattggttttcactaatacacagttttcaccatttcatacatttagaaacaawtatttctccagttaattgcctagaactaagaaagttgaaatggcatgaattgcttcaaattattaataagcatacggaagtggtcaacttgcttgtaaataaatacataaaaattaaaattgaacaaaaattttgccacaaaactaaaaatactgtatttgaatataatattacaaattctaatattaaaatgttctaagtcacagtttctccaaatggagatacaaagagtttgaacccaactataagaataactcataaaatgctttcaaaatgcatagaaaagctctggctcttcataattcctcattatactcagctaaaatgatgacattgatgagtaaaatatttagaaaac

SEQ ID NO: 443728 - DNA, 519 bp, Homo sapiens
tgtggtttttattttcatttgatgattaatgagattgagcattttttcaaatatctgttggtcatgtgtatgggtttatttgaaaaatggatattcagactttttgtccgttttaaaatcttttttttttttttgctgttaagtttttaaatttcttatatattctggatatttagtcctttgtcagatgggtagtttgcaatattttctcttaacctacaggttttctctttactacaytgttttgctttacggaagcttttttgtttgatatagtccatttgtctatttttgttttctttgcctgtgattttgaagtcttatctataaaatctattagatgaacgtcctgaagtgtttcccctatatttacttctagtggttttatagacttgggtcttagtttaagtctttatgcattttcagttgatttttgtagatggtgagagataggggtttaatttcattctgctgcatatggatatccagttttccagcaccattattgaaaattgtcct

SEQ ID NO: 443729 - DNA, 519 bp, Homo sapiens
tgtggtttttattttcatttgatgattaatgagattgagcattttttcaaatatctgttggtcatgtgtatgggtttatttgaaaaatggatattcagactttttgtccgttttaaaatcttttttttttttttgctgttaagtttttaaatttcttatatattctggatatttagtcctttgtcagatgggtagtttgcaatattttctcttaacctacaggttttctctttactacattgttttgctttacggaagcttttttgtttgatatagtccatttgtctatttttgttttcwttgcctgtgattttgaagtcttatctataaaatctattagatgaacgtcctgaagtgtttcccctatatttacttctagtggttttatagacttgggtcttagtttaagtctttatgcattttcagttgatttttgtagatggtgagagataggggtttaatttcattctgctgcatatggatatccagttttccagcaccattattgaaaattgtcct

SEQ ID NO: 443730 - DNA, 546 bp, Homo sapiens
gactcacattttttagtgtctttatgaaataagatctgtttctcacactacacatgccacacatgtcaatagggggcttaggttcaaatgggcgctcaagtayctgggctcataactgtaagaccagatgaaaaaatgtagaggaggccatggaatgtttgctgagtactaccatttctgccacaatgatcatatggtttagtcaactacagtaaatattgcataggaatcaatggtggttataacagatcaaacctccgaatcttgtagcaagactatggtagaagtgtgtaagttctcagaatcaaagtagagtcacttgtgtcaaactctaacaaaaagtaaatatataaagccaggaggctgagaagggagggccctcacacacacatgcctatgattttacaaaggctctctgaagcattcttgggcatgtatgcctatcacagaagactgcaaaaaccataactttacataaaggccattgccaccttacataaaaaaaaatacttctgagaggacatctgctcagcaactacatgtcca

SEQ ID NO: 443731 - DNA, 608 bp, Homo sapiens
cattgttcttagtagataattcttatggcttatgatgacctacaaggccgcaaattatacaacccttgtctccattccaaatgtatcttaagccatatccccaacacacatttactatggtttcaaaaaacaggtgttaaagaaactcacttcagcacaatacctaccatgtgaaaagcctgcagctaacatcaccatcaaaaggaaaaaactgaaagcattccctctaagatgagatacaaggcaaagatgcctacgctcaccatttctttcaacatagtactaaaagtcttagccagagtaattagacaagaaaaagaaataaaacgcatccaagtctgaaagggagaaacaaacctatctctatttgtragatgacatgataatgtatacagaaaaccctaaaggtgtaacaaaaacctattaaaactaataaatgatttcagtaaaattacaagattgaaaatcaatatgcaaaaatcagttatatttctttacaaactgttcaaaaagtaaattaaaaaacaattctattcacagtagcaacaaaaagaaatagaatacttaataatgattgcagtagagaggctaagaaggcatcattcttg

SEQ ID NO: 443732 - DNA, 608 bp, Homo sapiens
cattgttcttagtagataattcttatggcttatgatgacctacaaggccgcaaattatacaacccttgtctccattccaaatgtatcttaagccatatccccaacacacatttactatggtttcaaaaaacaggtgttaaagaaactcacttcagcacaatacctaccatgtgaaaagcctgcagctaacatcaccatcaaaaggaaaaaactgaaagcattccctctaagatgagatacaaggcaaagatgcctacgctcaccatttctttcaacatagtactaaaagtcttagccagagtaattagacaagaaaaagaaataaaacgcatccaagtctgaaagggagaaacaaacctatctctatttgtgagatgacatgataatgtatayagaaaaccctaaaggtgtaacaaaaacctattaaaactaataaatgatttcagtaaaattacaagattgaaaatcaatatgcaaaaatcagttatatttctttacaaactgttcaaaaagtaaattaaaaaacaattctattcacagtagcaacaaaaagaaatagaatacttaataatgattgcagtagagaggctaagaaggcatcattcttg

SEQ ID NO: 443733 - DNA, 563 bp, Homo sapiens
taggtatttcccctaataaatcatttgcatgtttaatcctctcttgatctcttcttggaggacttggtctaccacaatggtttcatttaggactagagcagccgactctcwtagattaaataattaatcagcagtagatccatttttttaaatccttctcttctttatagatcatttcatatcgtcacgtcatttttcaatcgtgttggtctactttgccatcagaattttactttcctcttgcaaaagtggcccagattcattgctcaatataggatgtaaatatttagaatccacagattagaaagacttttagcctgactgaattctgaaccctggaataaatttgatgccagatttagtatcagagaaacgtgtagctgtcattattatttgaggtactcaaatattttaataaacttctttaaagatatggctcaagaagcaaaggatatattccttgtcaagtcaatggccatactgcattctatgataggtggcaaggtttcatctaggcatgctcacacagggaatcaataaagatgaaataattataccaggga

SEQ ID NO: 443734 - DNA, 592 bp, Homo sapiens
ggtttcttgatgtgaaagaaatgggaaagttttgtttaaataatgtctagaagataacagaaatggcctagagatgaatgtatcagattgtctctagatatcatttctcagcatattcctttttttaaaaattacctttggaatactcaatttgagatggcttagactaacctagatagaagttgaggaaatccatatattttagtggaaaagcacattaagaagttatctggagtaatgcaagttacaaggctctgactgagacatcttctaccagtggtgtttaaaggtatttcttagttgagtcctcygaatgaaaaggccagaaaagtcacaggacctaccagtcttgttaacaaggctggttaacaaacagcaaaatttggaaagcaataatgattatgttttaagattatagaaaattaagtaacccagtaattctatttctagaagttaaaggatgtactcaaagattatatacaagtatacttgtcttagttccatatgtcatagtccaaagacattcaaacaatacatatatgaaacaacagtaaatggatgaacaaattatgttcctgccagaagtttgaat

SEQ ID NO: 443735 - DNA, 573 bp, Homo sapiens
gaaatcactgctatttggtgacttgatatactgttttttaataatttaatcgatcatgggcatctttccatgtcataaatattgagctacatarttattttggtggttatgttgtacgtcgtcatatcatgcagaggtgagtactttatttgctcagtgtataatggatatttgttgtttcactttcactaatacaaagaacttgcattaaacattcagtgcacacacatatttgtataactatctgaactgttttcaaaccaaattgttagacccaaagttattcacatttgtaaaattttgatttgtattccccgattacagtgtaggtattttaaaatataatggcagtagtatagaagtactactttaagaactatcaccaatatgtgctagaacctatcatgataaacaataggggaggcagtaacagctagttgaacacacatagaaatcctttactacctattttcagcaatgaagaaatatgctttatattttaaaagtttactaaatatttgctgttcattagataaagctaatcttgtgaaaactaaaatagtttacacttca

SEQ ID NO: 443736 - DNA, 573 bp, Homo sapiens
gaaatcactgctatttggtgacttgatatactgttttttaataatttaatcgatcatgggcatctttccatgtcataaatattgagctacataattattttggtggttrtgttgtacgtcgtcatatcatgcagaggtgagtactttatttgctcagtgtataatggatatttgttgtttcactttcactaatacaaagaacttgcattaaacattcagtgcacacacatatttgtataactatctgaactgttttcaaaccaaattgttagacccaaagttattcacatttgtaaaattttgatttgtattccccgattacagtgtaggtattttaaaatataatggcagtagtatagaagtactactttaagaactatcaccaatatgtgctagaacctatcatgataaacaataggggaggcagtaacagctagttgaacacacatagaaatcctttactacctattttcagcaatgaagaaatatgctttatattttaaaagtttactaaatatttgctgttcattagataaagctaatcttgtgaaaactaaaatagtttacacttca

SEQ ID NO: 443737 - DNA, 573 bp, Homo sapiens
gaaatcactgctatttggtgacttgatatactgttttttaataatttaatcgatcatgggcatctttccatgtcataaatattgagctacataattattttggtggttatgttgyacgtcgtcatatcatgcagaggtgagtactttatttgctcagtgtataatggatatttgttgtttcactttcactaatacaaagaacttgcattaaacattcagtgcacacacatatttgtataactatctgaactgttttcaaaccaaattgttagacccaaagttattcacatttgtaaaattttgatttgtattccccgattacagtgtaggtattttaaaatataatggcagtagtatagaagtactactttaagaactatcaccaatatgtgctagaacctatcatgataaacaataggggaggcagtaacagctagttgaacacacatagaaatcctttactacctattttcagcaatgaagaaatatgctttatattttaaaagtttactaaatatttgctgttcattagataaagctaatcttgtgaaaactaaaatagtttacacttca

SEQ ID NO: 443738 - DNA, 573 bp, Homo sapiens
gaaatcactgctatttggtgacttgatatactgttttttaataatttaatcgatcatgggcatctttccatgtcataaatattgagctacataattattttggtggttatgttgtaygtcgtcatatcatgcagaggtgagtactttatttgctcagtgtataatggatatttgttgtttcactttcactaatacaaagaacttgcattaaacattcagtgcacacacatatttgtataactatctgaactgttttcaaaccaaattgttagacccaaagttattcacatttgtaaaattttgatttgtattccccgattacagtgtaggtattttaaaatataatggcagtagtatagaagtactactttaagaactatcaccaatatgtgctagaacctatcatgataaacaataggggaggcagtaacagctagttgaacacacatagaaatcctttactacctattttcagcaatgaagaaatatgctttatattttaaaagtttactaaatatttgctgttcattagataaagctaatcttgtgaaaactaaaatagtttacacttca

SEQ ID NO: 443739 - DNA, 627 bp, Homo sapiens
tttgaataatttagagcggcatttttctgagtagtaatgcctaagagtcaaaatattaaacataaggatgtataaattttcagttaagagacataaattcccacttgctaaatgagttgtttgatgttattttatatatcattgatacccaaaatatttgtaatcactttcattgtatactttttgaaggagtatgwaactttatttagagattttgacattttggattttgtgagaataatttaggaacagatattcattcagtgaggaagatatcaaaggcactacaaccaacaggctaaaatacaaattccagcctatactatttattggcaacattttctgtagatatttttaatcacatattttgttatgtggtaacaagtaaactttcaaatgactttcaattgtgtaatgaaattccaacaaatgctctgggaggttaatggtttttcttggtgttaattcatgaatagactttatcttctttgcagtaagttttagacaatggaagacaaagattatagacatttcttattcaatccatcctaatatatactaacacgttcatacggtatagcatgttcagaaattcaaacaaatttgagcctccagaagaatatacca

SEQ ID NO: 443740 - DNA, 627 bp, Homo sapiens
tttgaataatttagagcggcatttttctgagtagtaatgcctaagagtcaaaatattaaacataaggatgtataaattttcagttaagagacataaattcccacttgctaaatgagttgtttgatgttattttatatatcattgatacccaaaatatttgtaatcactttcattgtatactttttgaaggagtatgtaastttatttagagattttgacattttggattttgtgagaataatttaggaacagatattcattcagtgaggaagatatcaaaggcactacaaccaacaggctaaaatacaaattccagcctatactatttattggcaacattttctgtagatatttttaatcacatattttgttatgtggtaacaagtaaactttcaaatgactttcaattgtgtaatgaaattccaacaaatgctctgggaggttaatggtttttcttggtgttaattcatgaatagactttatcttctttgcagtaagttttagacaatggaagacaaagattatagacatttcttattcaatccatcctaatatatactaacacgttcatacggtatagcatgttcagaaattcaaacaaatttgagcctccagaagaatatacca

SEQ ID NO: 443741 - DNA, 594 bp, Homo sapiens
agaaaaatcccggaagagattatagaatgcaattgtacaatgtctagtagcttttgaagtggcaataaaatatacagttattaaacattagtaaccagaatatcaaatctattatggtttttgtcttatttgtgactttaacctcacattatagtatagtagtggctggtaaataattgtttagtaaatatttgtggaataaatgtataaattacttaacaagcattatataccattgtattcaatagatttacatacattattcataggatagtttgctagtctcaccacttgccagtcattccaactttcccaagrtttaagatcttttttgtaagaaataagttaggcattgattaagacattgagaagattttgataaggtaaactctaacacctaaacacggggtattttttttcccaagggtctatccagttattatttctttattgcatcacttagatggtcattgattatttatcgagagtttataatgtgcaaggttttactgaaacagtctacattttttcccaaatatgttgcctacaattataataggaattgtgtttctgagatgataagcttcacagtct

SEQ ID NO: 443742 - DNA, 594 bp, Homo sapiens
agaaaaatcccggaagagattatagaatgcaattgtacaatgtctagtagcttttgaagtggcaataaaatatacagttattaaacattagtaaccagaatatcaaatctattatggtttttgtcttatttgtgactttaacctcacattatagtatagtagtggctggtaaataattgtttagtaaatatttgtggaataaatgtataaattacttaacaagcattatataccattgtattcaatagatttacatacattattcataggatagtttgctagtctcaccacttgccagtcattccaactttcccaaggtttaagatcttttttgtaagaaataagttaggcattgattaagacrttgagaagattttgataaggtaaactctaacacctaaacacggggtattttttttcccaagggtctatccagttattatttctttattgcatcacttagatggtcattgattatttatcgagagtttataatgtgcaaggttttactgaaacagtctacattttttcccaaatatgttgcctacaattataataggaattgtgtttctgagatgataagcttcacagtct

SEQ ID NO: 443743 - DNA, 646 bp, Homo sapiens
aaacaatctgtatctctaagctacatctaactgaagggtaggagagtttgtgcttaaaactcaactgtagctgaacatacagggaggggaacaacacttactagggcctgttagaggaggtgtggaggtggcaggggaggattagggaaaaaagatcatgcatgctgggcttaatacctaggtgatgatttgataggtgcagtaaaccaccatggcacacgtttacctatgtaacaagcctacacatcctgtatgtgtaccccagatcttaaaaattaaaataattattttaaaaactcaactatattacttactagctctctgtccttggatatatttgtttacctctctagtcagtgttcttacttatacaacatagatgctcataatacctgataggattgctatggagattaaatgagatgaacttaaagactttgacacacttcttggcacttagtatgtgttcagtaaatgttaactgtagttattaatgaggaccagcccactaagatgatattagactcataataaatrtataattacttgactcctaaaactgaaaagaataaatgaatatatgtgcattgaaatagcacttgtaagaataccgtacaatgattaactatcatatagagatgtaatg

SEQ ID NO: 443744 - DNA, 646 bp, Homo sapiens
aaacaatctgtatctctaagctacatctaactgaagggtaggagagtttgtgcttaaaactcaactgtagctgaacatacagggaggggaacaacacttactagggcctgttagaggaggtgtggaggtggcaggggaggattagggaaaaaagatcatgcatgctgggcttaatacctaggtgatgatttgataggtgcagtaaaccaccatggcacacgtttacctatgtaacaagcctacacatcctgtatgtgtaccccagatcttaaaaattaaaataattattttaaaaactcaactatattacttactagctctctgtccttggatatatttgtttacctctctagtcagtgttcttacttatacaacatagatgctcataatacctgataggattgctatggagattaaatgagatgaacttaaagactttgacacacttcttggcacttagtatgtgttcagtaaatgttaactgtagttattaatgaggaccagcccactaagatgatattagactcataataaatgtataattacttgactcctaaaactgaaaagaataaatgaatatatgtgcattgaaatagcacttgtaagaatrccgtacaatgattaactatcatatagagatgtaatg

SEQ ID NO: 443745 - DNA, 550 bp, Homo sapiens
ccatatacttattacatccattagagtttaatgtggagaaacaagctgagcagaaatgtgagctcacgttaaagggcctggaagtgttacagaaaaacattttcagaagggatttcctttctatgtcattaagaacagaaaggctggaccacttcagtgtrtaaagagttaaattgtgtgtgggggaggggtgtgtgtgtacacacaggagaaggaggtacaggttaggagaaatggtaatgccaattcctcaaaaacattttcacttttgctataagattcgctatttgaatatgcttgtttaactactcctaagagaaatcttgttcctagccaagaaaggtaatgtcatatcaacataaatattcagccatacatagaatttgctgatctggtaatcagggacaaggatactggttagatataacagtatctgttactgttactatttctgttactgtcttcctaagacatatcaagataattgctttttgtgcttcagtaagattctatgcatactatttcacttgctgcattattttataactac

SEQ ID NO: 443746 - DNA, 476 bp, Homo sapiens
caatatgtcagcacctttgcccacgtccacagcctgaaagcttttgaaggtaagcagcgccgtcatcattttggcattctattttagtctaagcctacatcagaagcctgccagggctcagtgctgataacaaagcactatcgcttttcaaagtgacagagcacagtgacatatcaacactaagacttaaacgaaaagccccttctcatttaactgggaatctgctgaagctgtattcagcccagcactcgttttcaattaaaactttcttgtcgcaagagaaaagtttggcatatccttttcaacracagttatggaagtgagtggaaagggtagtgtagtgtagagtatagatggtccaggaacagctaagtacgtatcagcctttttcatctactaattgcagtacctatggttcaacaaaagttttacctaatgactcatgttgctgaaagtccttcctctcaataccactg

SEQ ID NO: 443747 - DNA, 395 bp, Homo sapiens
ttccttaatgggggaatagaaattaccctacacggatatttgaataattttatcccattttgagatgaaattcttcctagggaagtatactccccctttcactcttcccctagagttattcttttaaagttattaattatacaaagaaatccactaagttactaaatgccttcttacctactactgcatatgtagctttgcattcataactttggcatcttagtactccatcacttggctaatatctgccacccagggctttgcaatatgctggtgtgacaggatcagatgagatatgttactcacacagtcattcatttaacacacttttactacrtaaacactgagtatagggtactattctttgtgctagggatagaactgaggtaaagaga

SEQ ID NO: 443748 - DNA, 378 bp, Homo sapiens
ttatctttcataaatagcatgtttactatcgatttcagtagatattcttgtgttaaatttctctcttattttgtacttctatagtttatcttttaaaaagttttaagtaggtattgacttttctgcatgtatttaggaaatcacatagtatatttttcctttaatcagtttacgtggttaattacacaaatatyaaaccacttaattttctgtaaatctaattggtaactattcattttaaaatacattgaggtatttggtatgtcaatttttaacttaagattttgcacacatgttcataagacaggttagcctacacatttttttcctgtaattgtccaactttactattaaacatcactatccttgaatagtgat

SEQ ID NO: 443749 - DNA, 646 bp, Homo sapiens
tcttttggcggtggttttaatgtttctgtttagtgttttaccctaaacatgactataaagaaataaagggaatctttttggtataattatttcctaaaggattatttgagccattgtggtgtgcatctgtacatttttayccatacatgtaacatgtatgtttacatatgtttatccatatgtatgcacgtacatatatatgtgtgtgtgtgtatttgcttttcttagtgataagtattctttcttaaattggctttaaacataaatccccaaaatgtgccacaagtagaattatgcaacaaaatctgcatcacagaagaaaattgaacccaatataaaatgaatttcaaaaatagggccattctatgttcttaatatccattcctctttaaaaaaaatcttcaactgttactaaaacataatggaagtattatgtgagctaattatacctggaaaaatcatatggcataaataaataaataaataacagcatggacaggatcccaagggtcaactaatctgttctctacttctagttagcattgtgacatgtatactattattaaaccacttcagaaactaaacagaaactactcttttgtagaggattaaggatggtcacagttctttgatattacttgcaggg

SEQ ID NO: 443750 - DNA, 554 bp, Homo sapiens
gtctactatacataatgacaatttttctaactayagtggcaaaataaaatcatatggactttatcttcattacagctcagtcaagaaaaaacaggattggactatttcttgagtaagtcatcctgtttggccaaacactgtataatcaacttgaatttattaaatttttagaaagttttgctgttgatttatactgtgtaccataccacttaacatgttctttggatttcgtgcatctacttttttttctgaacaactaatttgataggagagttctataatatgctttacttttttgacttctagttttttattttaaagaagacagagacctcattagagattaaaatgataaaatgagtccgataaatatgaaaagatttgatatctattttttgtgagtctttcatctgagttatgtaaatccttcaaacaataatctctcctatgtgatcccatctttaattctcagacccaaaggactagaaactatgttctgggatattgtgcctagcatggcattttagagtttgcagatgctccataaattggta

SEQ ID NO: 443751 - DNA, 653 bp, Homo sapiens
ttccattgtgacccatctacttaatatacctgtgagggaagaaaatcccactgtaagaatgctgactaagctcagtcttgtatccaaactgcttcacacctcctgagactttygtgaggttttaacattaggaatcaatgtggcctttggcaaatcattccacacaactggaactctatttctttattcaattcactgtctcttcaattgatatttattgagggcacattattgagcacccagtcaatgttattgtcaatggtgccacagaagggaacacaatagattaaaaatccctgacctccaaatgggatctaattaaactaaagagcttctgtacagcaaaaggaatggtcaatctacagacatcttacctacataatagaagtgaatgttcacaaactatgcatttgacaagggtctagtatcccacatctataaggaacttaaacacatttacaataaaaaggaaaagaaccacattaaaaattgggcaaaggacatgaacagacacttttcaaaagaagacatacatgtggccaagaagcatatgaaaaaaagctcaatatcactgatcattagagaaatgcaaatcaaaaccacaatgaggtaacatctcacaccagtcagaatggctattataaaatgtcaat

SEQ ID NO: 443752 - DNA, 653 bp, Homo sapiens
ttccattgtgacccatctacttaatatacctgtgagggaagaaaatcccactgtaagaatgctgactaagctcagtcttgtatccaaactgcttcacacctcctgagactttcgtgaggttttaacattaggaatcaatgtggcctttggcaaatcattccacacaactggaactctatttctttattcaattcactgtctcttcaattgatatttattgagggcacattattgagcacccagtcaatgttaytgtcaatggtgccacagaagggaacacaatagattaaaaatccctgacctccaaatgggatctaattaaactaaagagcttctgtacagcaaaaggaatggtcaatctacagacatcttacctacataatagaagtgaatgttcacaaactatgcatttgacaagggtctagtatcccacatctataaggaacttaaacacatttacaataaaaaggaaaagaaccacattaaaaattgggcaaaggacatgaacagacacttttcaaaagaagacatacatgtggccaagaagcatatgaaaaaaagctcaatatcactgatcattagagaaatgcaaatcaaaaccacaatgaggtaacatctcacaccagtcagaatggctattataaaatgtcaat

SEQ ID NO: 443753 - DNA, 573 bp, Homo sapiens
aactcattgcttttaaaatacccagaatctgtagcaagcaatgctcacatatgtaagctttgttgtcagagggtatatgcctgcagctgtcaactttcctccttcactccagtagggcccaataatcagcaattaagtaactgatacgtgagaatgtgtaagcattattttcttagtctaaatgtaattattgaactttgaaacacattaaattcctttgcttcatttgtctaacaatttccaagtataaaacttaatattttcttcctacctgaatagcttgctaggaagtcccttattgtcaacaatatagtcaagcatatttgtatttacttttcagtaaagaaaaattgtatgctttctttactaaccttattaattcagtaagtaaggggtatccatactgtcatttagaaacaccaaaacactgtagaaagagcatgatctttggaataccaatgtggaaaaaaaaaatccgagtttttctaccttctacttatrgagtttgggcagttgtcttaattatttgagtttcagtatcctcatctgttaaatgggaattatgtcatttat

SEQ ID NO: 443754 - DNA, 648 bp, Homo sapiens
atcgcatttaaaacagccacaaaaatacctagaaatacttttaaccaaaaaggtgaaagacctctacaacaagaagtataaaacactgaggaaagaaatcacagatgtcacaaacatatagaaaacatcccatgctcatgaataggaataatcaatatcattaaaatgaccctactttcttaagcaatttacagattaaatatgatccctatcaaataaccaatgccatttttcacagatttagcaagagcaattcaaaaattcatatggaacccaaaaagagcccaagtagccaaaccaaacctaagcaaaaacaacaaagacagaggcatcacattacctgacttcaaactatacttcaaggctatagtaaccaaaacaccatggaactggtacaaaaatagacacatcgatcaacagaacggaagacagaacccagaaatacagccacatacctacaaccatctggtctttgacaaagctgacaaaaatgaacaatggggaamggacatcttattcaataaatggtgctaaaaacacctggctagctatatgaagaaaagtgaaatgacccctatttctcacgatataaaaactagctcaagatggattaaagacttcaatgtaagacctgaaccattaaaaatc

SEQ ID NO: 443755 - DNA, 527 bp, Homo sapiens
tgtgcatattccatttgaaatgctctacttccaaataaacatctttttcttttggaaatcctctctctctttttatttaggttgccattcaaaatatagattcagtgaaatttttgtttggttctcagagccaggacttaattaggaatcaagctgcctagcctgttgaaatctcagaatgctcacttgtaaaacatcgataataatagggtctactttcaactgtttgaggactaaatgcatgtaragtgtgtgattcagtgactgacactcatagtaaaggctgaataggtcatagttgctttagtcttgtgatgacatgccataggatatctgtatgacaaggatattttgtacatcaggatatttagcccttctgacaatccaaaagaaaaagtatttgaaggctattttccaaacttttccaattgttttcccaatttgataagagctataaaaccaaaaatctaagaaagctcaaataaacacaaattcacacacacacacacacacacacacacacacac

SEQ ID NO: 443756 - DNA, 569 bp, Homo sapiens
actcttacctgaatctccatcctgccagctttccctacagatttcagacttgccagctcctgcaatcacataagccaatttcttataatctctctccctctctctatggaaagaagtatatatatttctcatatacatatagttctctctctatatatataaaattatatattaatgtatattatgtatagtattataygtagtatattatgcactatatactatatatatggtatgatatgtaggacaatatattatgtatagtattatgtatagtatagcatatatatattatataatgttaatatatatcccaatttatcctattggttctgttgctctggaaagccataatacaaagttcataaaaacaagaacttttgctctgtaaaaccccgcatgaaaagaatgtaaagataagttacttcctgggataaactagttgcaaatcacttatctggcaaagggctagtataaaaaataaagaactctcaaaattcaacaataaaaaaatagcaaaggagcaaaagacatgaacagacattttactaaagaggatatagagagta

SEQ ID NO: 443757 - DNA, 528 bp, Homo sapiens
gtggaatataagtaggtatgtctgtgggtatcactgactcttctatcctcaggtactagaaaccaaaaatatctgatacacacaaaataactgctattcatatctcaacaaatcttttctgttcttggttgggaattcttgacttttaatcttttaaagtatcatttttcatttgacctatcaacttggacttttctctatgacctgattctaagcatctgtagctgttgagtacagtaatggcaaaacaggtataaacttcaggatctatgtttgctwctagctaagactcccctgctgttagttcctagtcatataaaagtgacttgacatcattttaatgcatttacatattgaataatcattttgcattatcttgaaaatgaacagattagcaaattttgttagcaaatttttgaattgtacaaggaagatttttaggacgattaagaatcaaggagaaaagcatgttataaatattctaatgccaatatgttacaccaaaataacctcaaaaacacattgaga

SEQ ID NO: 443758 - DNA, 592 bp, Homo sapiens
tatgtcaaacagttgaattcattctttgactaaatgagatctggcttaagtgtgtaagcaacacctagttctagtttatctcatatatactgagattttatacaaatagtaaaaatattatagagcttttctgaacccctaaaaaacttttaaaaatatgctatacttacaccatgatggtactctttagtggtacatagaggccatcagatatttgaagacatttctttacatagttaagatcaatttagcaaaccattttttgaaagaataggagattggtataactcttttggtgatggaaaaattatttcacagatgatgcctcaatttcctataagggtccaacatttcaaaaaaacctgaaactccacatccaagactgggcaacagggtgagaccccrtctcaaaaaaaaaaaaaaaaatccaaatatcagctgggtgtggcagtgcaagcctgtagttctggctactctgtaggctgaggtgtgaggattgcttgagcctgggaggttgaggctgtgttgagccatgatggcgccactgcactccagccgggcaagagattgagaccctgtctcaaacaaaaca

SEQ ID NO: 443759 - DNA, 592 bp, Homo sapiens
tatgtcaaacagttgaattcattctttgactaaatgagatctggcttaagtgtgtaagcaacacctagttctagtttatctcatatatactgagattttatacaaatagtaaaaatattatagagcttttctgaacccctaaaaaacttttaaaaatatgctatacttacaccatgatggtactctttagtggtacatagaggccatcagatatttgaagacatttctttacatagttaagatcaatttagcaaaccattttttgaaagaataggagattggtataactcttttggtgatggaaaaattatttcacagatgatgcctcaatttcctataagggtccaacatttcaaaaaaacctgaaactccacatccaagactgggcaacagggtgagaccccgtctcaaaaaaaaaaaaaaaaatccaaatatcagctgggtgtggcagtgcaagcctgtagttctggctactctgtaggctgaggtgtgaggattgcttgagcctgggaggttgaggctgygttgagccatgatggcgccactgcactccagccgggcaagagattgagaccctgtctcaaacaaaaca

SEQ ID NO: 443760 - DNA, 592 bp, Homo sapiens
tatgtcaaacagttgaattcattctttgactaaatgagatctggcttaagtgtgtaagcaacacctagttctagtttatctcatatatactgagattttatacaaatagtaaaaatattatagagcttttctgaacccctaaaaaacttttaaaaatatgctatacttacaccatgatggtactctttagtggtacatagaggccatcagatatttgaagacatttctttacatagttaagatcaatttagcaaaccattttttgaaagaataggagattggtataactcttttggtgatggaaaaattatttcacagatgatgcctcaatttcctataagggtccaacatttcaaaaaaacctgaaactccacatccaagactgggcaacagggtgagaccccgtctcaaaaaaaaaaaaaaaaatccaaatatcagctgggtgtggcagtgcaagcctgtagttctggctactctgtaggctgaggtgtgaggattgcttgagcctgggaggttgaggctgtgktgagccatgatggcgccactgcactccagccgggcaagagattgagaccctgtctcaaacaaaaca

SEQ ID NO: 443761 - DNA, 521 bp, Homo sapiens
ccaaaataaatgctgcatataagacataaagatacataaaggaacaaaataacgttgaaagtaaaagaatggaaaaaagctattccatgcaaatactaatccaatgaaaactagtgcrtataaattaataccagaaaacatagagtgtaaggaaagaagcattactaggaataatccttcacattcctccacaaagaagattaaaacaaaactctaggccaggtgcggtgactcacacctgaaatcctagcactttgggaggcctaggtgggcagatcaccttaggtctcgagttcaagaccagcctggtcaacatggcgaaaccttgtctctactaaaaatacaaaaattagctgagcgtggtggcacacacctgtaatctcagctactctggagactgaggcaggagaattgcttaaagccgggaggcagaggttgcagtgagtcaagatcacgccagcctgggcaacagagtgagacgctgcctcaaaaaaaattaaaaaaaagaaactctatgcatc

SEQ ID NO: 443762 - DNA, 596 bp, Homo sapiens
gttctttgtattcactctgcacaacgacttttaatttgcctcgctgttatgttaaaataaaagaaaaaaatctgacttataagtggcataatttgctcagctttacaaaaattgtttcatttaaataatttacaaaacaaagatgtccaaaacagttcagattgtactaatcttcaaaacagatttgcattgaaatctaatcttaaaaaaaatcctatctaaacagtacatatattttgagtctattcgtctttaacaaaagacagtgaattttttatcaccttatctccaaagaacaccaccactactctgcattataaaagcatgtttatcttgaatgtttgtatatatttcatcgcattttatcctaactcagtggtagtagaaatctgtcttgcagatgaagaattaagacaaatgattttgtctgaagtgacatctgtacaaggagctatgcacgaacctaaaacccaaacatctagcccagctctctcacagtggccacactgctgaagtagccaacataccacgtgcagtagagrgttgaaagcttttgtctcccttctgtaattccagcagctgctagtcactgctgt

SEQ ID NO: 443763 - DNA, 643 bp, Homo sapiens
aatggtcatagtttttcttcattgtttayatttaaagtctacgacattatgttatgggatatagagacactgaaaaggttactgtagtgaaacaaattaacatatctataacctcgcacagttacatattgtgtgtatgtgtgtgttggtggcaatagcagctaaaatctactaatttagcatgaaactcgcatacagtacaaatttactgcccatgatcttcgtgttacaaaattagatctctagactgcagagaactcaatcgtgaaaaaacaaataaccaagttaaaaaatgggaaaaagacctgactagatatttctacaaagaatacataaaaatggccaacaggtatgagaaaaggtgcttcacattaataaaagggaaacacaaatgaaaaccactatgagataccacctcacttcccgttaggatggctgataacaaaaagacaaaagatatcaaatgtcagcaaggatgtgaagaaaagggaactcctgtccactgttgatgagaatttaggttgctacagccattatggaaaacaatatggagatttctaaagaaattagaaatggaactactatatgacccagcaatccatcttctgggtgtatacccaaaggcaataaagtcactagcaca

SEQ ID NO: 443764 - DNA, 480 bp, Homo sapiens
gtatagtgtaatataatatgtacacagaatacagtaaacgtaataatatatacgtatatcacacatgtctattaaacagcaatcattcaccctatcaccacatgttgaatgcctataatataccaggcactcttctggagaaaataacttgacatctaaggttaaaggaaagatctgacgtaasaaagtctattttacatgaacatgattgcttttaaacaccttctgataaagaaaaataatcctaacattttgtatatgaagggtattgtagacccactatgggttttgactccagaatgacctggtttcaagtaactgttgcatcatttactagatatgtgatttatgtaagttactttaagttctttcaaaaaagaacttatgtaagttctttcatctatgaaatggagacaataatgtagatttttagggggtggttgttgcatgataattatacacacacacacatatagcata

SEQ ID NO: 443765 - DNA, 435 bp, Homo sapiens
attttaaaaagaaatgaaatagagtagaaattttgttttacctagtcttaaaatcaaggaatttaatgcaacttcattaaagccgatgaatatttttggtatatctacaaagttaggcaccagggcctcagtagacggaccacatttgttcattgcactcaaagacgctaaactataatggaggtaaaaacccacagattctactatcctaacccctcatttaagcaataaggaactgaattccaaaagatttaaatgcaactgattccacctttgatgcataatccaccttcatatcccccaaagtagaattcattagcaagattgggcttctgagattaggraggtcaaggcattcagcagaacactgactctaattatcttagtaatccaagagagaaaagtgatgcaaaagataccaagcacattaataat

SEQ ID NO: 443766 - DNA, 619 bp, Homo sapiens
tatatcaccttggcagtttaacagtacactagaaacattttcaaggaagattatctatatacacaactcttggcaccataaatatttgtctgaatttatcctgctccacgccaatcaacaccttatgaaacttgtgatttaaaaggcttygatttttattcatgcagtgttaatataatggaaaacaattcagtatctccagcaggaatgattttacaggcattaagcaggtggcagactacataaactttaactttcttgacatttttaaacaactaatatagttttaaagcatgtacctttttgtgtcatttaaataggaaaattattaatgataaagtttgtaagagacataaatttgaagcattttgtttacattgagttaaggatatataaactttgataaatgttaatggaagttaccaacacgcattcctttcatagcaatggaagacctctctgtataattcccaataacccttttaacttgtgaaaaatgaataaggaactggagtgcatagaacaccaaagtataataagagcagaaataagtgagcttactccagtttattcccgagttaaatactaagaaataattccaaacaagtgcatttcatga

SEQ ID NO: 443767 - DNA, 619 bp, Homo sapiens
tatatcaccttggcagtttaacagtacactagaaacattttcaaggaagattatctatatacacaactcttggcaccataaatatttgtctgaatttatcctgctccacgccaatcaacaccttatgaaacttgtgatttaaaaggcttcgatttttattcatgcrgtgttaatataatggaaaacaattcagtatctccagcaggaatgattttacaggcattaagcaggtggcagactacataaactttaactttcttgacatttttaaacaactaatatagttttaaagcatgtacctttttgtgtcatttaaataggaaaattattaatgataaagtttgtaagagacataaatttgaagcattttgtttacattgagttaaggatatataaactttgataaatgttaatggaagttaccaacacgcattcctttcatagcaatggaagacctctctgtataattcccaataacccttttaacttgtgaaaaatgaataaggaactggagtgcatagaacaccaaagtataataagagcagaaataagtgagcttactccagtttattcccgagttaaatactaagaaataattccaaacaagtgcatttcatga

SEQ ID NO: 443768 - DNA, 614 bp, Homo sapiens
tttttgctactgaatctgtgctgtcttccttagtcttctgtaccccaaaatctctaaataagttactttaaagaaaagaaaaaactcaaaaaacagacatttcacattatatatttatacctctaagttttcttgtgtatgtaatggcctttcaagtcaatatagaatggagataaatttagaagacttcttatttctaaagagataattacagaaaaagaataagccgagcatctcctaattttctctgggatttagagatagttggtgtatacctatgaatattctcagagatgtttaattggactaamgttctgaaaaacttggatgcctaaaaggccaagagtagagaaatgccataaagtgaatgaagaattggattgaatacaaaaagaaattgtatctcatatgagggtaaatctaatttataagtgagaagtactcaacaatggcaggtccaagttcagttgaatctcctttcttcaagatttctagctattgcacataggcagaagaatgctgcctgtgaaacattactcagtgaaaaaactacacatatccttaatagaaagagcactttgaaaattatataattttcataagagcttcataaa

SEQ ID NO: 443769 - DNA, 565 bp, Homo sapiens
attgcattttttttctggtctttagaaactcatatttgaatggaaattttaaacatcatctatatacttttttttttttgagacagagcctcgctctgttgcccaggctggagtgcagtggtacaacctcagctcacagcaacctccacctcctggtcttaagtgattcttgtgcctcagcctcccgagtagctgggattacagatgtgcaccaccatgcccggctagttttttgtattttttggagagatagggttttgccgtgttggctaggctggtctcaaactcctgacctcaagcaatctgcccacctcggcctcccaaagtgctgggattacaggcatgacccaccacccccggtctgtatacttttaacaaataatcaactttacattactcttgtcaggccctgtatttaaaaatgtatatgggccaggagctgaaaaacattgtggaaaattccataggccagtttagtactgcaaaatactgacygattaggatgttattctataatatgtataaaagaaaaaaacgaaaacaaatttaggtccaaaaacaagat

SEQ ID NO: 443770 - DNA, 537 bp, Homo sapiens
aatataattcttttcagaaattcagtgtcccctggaagcttgagattcttaaggtaaaatcagcctaaagatgaaytgtattaagagtctgattataaaaacatttcagtgtcttagaaggttttaaagctgtgattattagaccattacaaacaatggtacttgtaaaaatctcaagaatgttgtccttcactggccttgtataacaaaagtataaagaagcctgtcttatgaaaaattttagatctggtctttggcacatggaggtaaaccccaataaaattcagagacaacctagaaaattgaaagggagttttcctaagtaaatcatccttctatgaaacaaaaaattgaaggtgttaaatatggaaatgaaaactgttctctagggcctcaattttctacgtcaaggaagaaggcagatatctaatcagtagttatactcccataagaattgacagcattagaaacattgacagcttccaatattgattagaaagtggaaaaactgattcaaacattttcattgttgtttaa

SEQ ID NO: 443771 - DNA, 537 bp, Homo sapiens
aatataattcttttcagaaattcagtgtcccctggaagcttgagattcttaaggtaaaatcagcctaaagatgaattgtattaagagtctgattataaaaacatttcagtgtcttagaaggttttaaagctgtgattattasaccattacaaacaatggtacttgtaaaaatctcaagaatgttgtccttcactggccttgtataacaaaagtataaagaagcctgtcttatgaaaaattttagatctggtctttggcacatggaggtaaaccccaataaaattcagagacaacctagaaaattgaaagggagttttcctaagtaaatcatccttctatgaaacaaaaaattgaaggtgttaaatatggaaatgaaaactgttctctagggcctcaattttctacgtcaaggaagaaggcagatatctaatcagtagttatactcccataagaattgacagcattagaaacattgacagcttccaatattgattagaaagtggaaaaactgattcaaacattttcattgttgtttaa

SEQ ID NO: 443772 - DNA, 601 bp, Homo sapiens
cacaattgaggtagagatattatcccatttgatagtaattctccataggtaactttttccagaatcctatggccttagtaagggcagtgtcacacataatccttcctaggtaacacttgctcaagaatataattactctattaagctataatacacttatgagtctgcagggtgcttttgttgcaggacttttccttagttcagctaaagacaggcttcttgtcccagggccatgaaagtttaatctcacagatggcttaaagtgtgagtaaagcagggttttattgggtgaaaagraaaaaatggggaaacagggactctccacaaggctagaattcctgcttcccacctcgcagtttgaatcccaggttccgcccaggaagtggaggtgccaggctcctcaccactgcaaatggtgtgaacctctgtgcctccaccccagtgcacattcctcccagtgtgcaggctggttggagtttttccggggacctcgtcccagctggttgtttatcgcccccttctaaagaggcacatctaactgctcttagaataaggataaggatgaagactgttttaactgcttcctgctgacagagggtga

SEQ ID NO: 443773 - DNA, 476 bp, Homo sapiens
tggggccatctacctccactgttaacccagagctgcaatctggacttgcaggtcttttacttcctcttcatggttcttcttcatgaagagcagctcctccttgaaagcctcgatctgtgtcttcagctgcagccaagtgacattggtgtcatcaatgatcttgtggagcccatggatttctctctccacagamcggcgcatgactgtccctgtctcatacttgactctaaagtcatcagcagcaagaccagcattgtcaacctgcagaacaatgtgggcattgtccatagtatttgtgaagatctgagccctcaggtcctgaatggtaatggccccagtctctgacttagggtctcttcttctccaggtgcaccccaagtttgctctccaccctctggttcttggtctcgaggctcctcgctctgtccagataggaggccaggcggtcgttcaggatttgcatggtctccttctct

SEQ ID NO: 443774 - DNA, 476 bp, Homo sapiens
tggggccatctacctccactgttaacccagagctgcaatctggacttgcaggtcttttacttcctcttcatggttcttcttcatgaagagcagctcctccttgaaagcctcgatctgtgtcttcagctgcagccaagtgacattggtgtcatcaatgatcttgtggagcccatggatttctctctccacagacmggcgcatgactgtccctgtctcatacttgactctaaagtcatcagcagcaagaccagcattgtcaacctgcagaacaatgtgggcattgtccatagtatttgtgaagatctgagccctcaggtcctgaatggtaatggccccagtctctgacttagggtctcttcttctccaggtgcaccccaagtttgctctccaccctctggttcttggtctcgaggctcctcgctctgtccagataggaggccaggcggtcgttcaggatttgcatggtctccttctct

SEQ ID NO: 443775 - DNA, 560 bp, Homo sapiens
ggaacccaaaggaatgtttcagagtctaacagaagaataaagaacattcagtaacaactcagcattttgaggcttttctaattcttgacctgcctaacccaatggttctcccatagccttgcagacatctcacaatgaaaataaagctagaggacaagagcatacttgagcccctgagcttataggaaaccaatatgggcctcccaccaaaaaatagctaaagaggaagaagtaatatatgtctaattagaamtgaggtctcacataaatgcagaccaaagttactggtaaacttgggctgctgtggcatgagggaatttgtgttgcacttacattattatgtataaccatattcatattcaaatgctattaaaccaggctacagtaattaaaagtttataatagttggttatatttgaattttgctacagtttaaatatatattttttatctgaaaatgacgcaaattcatgccacacgttaaatattggagatttgtagactttaagcaaattttcctcatcatacttaaggattttctttacacttttggaggattc

SEQ ID NO: 443776 - DNA, 656 bp, Homo sapiens
aaaaaatagctaaagaggaagaagtaatatatgtctaattagaactgaggtctcacataaatgcagaccaaagttactggtaaacttgggctgctgtggcatgagggaatttgtgttgcacttacattattatgtataaccatattcatattcaaatgctattaaaccaggctacagtaattaaaastttataatagttggttatatttgaattttgctacagtttaaatatatattttttatctgaaaatgacgcaaattcatgccacacgttaaatattggagatttgtagactttaagcaaattttcctcatcatacttaaggattttctttacacttttggaggattcaagaatatttcaaacatacagaaaaggatataaaataatataaaaacacctttgtactcacagctaaaatttttcaaatatttatatattaatttcagatctattttgtaaaacaataaaaatacagggattccattaaaatatatggaacctttttctccatcctttctccccagagttaactatcattttaaagtaagtaaacttccttgaggtctttttatgttatccatattcctatatttctgtaaataatatacaacattgggacacttgctttaaaatgttgcctaggtgatagata

SEQ ID NO: 443777 - DNA, 542 bp, Homo sapiens
gaggcctcagaatcatggcaggaggtgaaaggcacttcttacatggtggcggcaagagaaaaatgaagaggaaacaaaagcggaaccccttgataaacccatcagatctcttgagacttattcccacaacacrtgggaattctgggaaatacaattcaaattgagatttgggtgggaacacagccaaaccatatcaccaaatacatacctatttaataatccagaaaatacaatcttatgtacttactcaagagaagtgaaaatattatctacagaaagacatatatatctgatttgttcataggaggtttattcatgacagcctcaaatcagaaacaactacatatccatcaatagggaaatatattaaaaacaaaacaaacaaatgctcccaaacctgtggtatattcataaaataaagtattgcaaaataaaatgatcaataaaaacaaaaagatgagtgtcacaaacatgttttgtgaatgtagcctcacataaatgagtgtaatttatagcttcacttacagaattgattatagtag

SEQ ID NO: 443778 - DNA, 439 bp, Homo sapiens
tccctgtcaggaggcacgggggtcaggaacccacttaaggaggcagtctgtcccttagcagagctgttgcactgtgctgggaaaatccttcttgtcaggattggctgctctcttcagagccagcaggcaggaaagattaaatctgctgaagctatgaccacagctgccctttccccaggtgctcttctcccagggagatggggattttgtctgtaagcccttgagtggagctgctacctttctttccrtgatgccctgcccatagaggaggaatctagcgaaacagtctggccacagctgggttgctgcacccagcccagacctcccaatctctttagcactgtctgtggaaatctgcctactaaagcctcagtaatggtggacgcccctcccccaccaagcttgatcatccctggttgacttcagactgctgtgctgg

SEQ ID NO: 443779 - DNA, 521 bp, Homo sapiens
ttcccctacaaagccattaaaaagtattgaacacaaggaagtctgcaatagagcaagctggatgtagtggaagaaaggattggtaacttgaaaataatctaatagaaattattcaaaatgatcatagactaaatacagaaaataaaataaaatagtgttatgtggaataatagctaacagaataaactttgtgtatttggattttcagaataataggtggacaaagagggagaaaaatatacatatagatagaaaatgtcagaatttgtttttttcaaaactgacgaaagaacatctatacacaagcccacaaagcagagtgtatcttaagctggatagttaaaaagaaaaaaaaacatgttaataatatttattttggatactgtactgatgttttctatttatttaatattgtctccagtacaagtgaaattaatggacagtgatgactagatgactatatatgtgatagagcaagtaaaattagagtttcrgttatgggcatgagtgtacactgcaat

SEQ ID NO: 443780 - DNA, 557 bp, Homo sapiens
agtgaaagcatagaaacatttaagacatatactcaattcaagccaaacaattctgttcaacttggtctctgtagactcatttctgcatttcaaaataaggcaacaatagacctttaaaacatagttgtgagaaagtggaagtcaggcttttaaaatcctctatgaaggaagctgagtctatagttttttgctacttgggtttcatatgagtttgaaagatataccatcatgtaaggttattgtgaagtttcaaactatttttactaaaaatctagaaatatttcaatttgagttgtcttcttcttattgtttatattcactattttagaacatatttataattactcaaaataaaatttgttattgctgaaagaaagactatatatgatcctagcatcttggggttgcagaacatgtaacaggttatattatgaagttttaacacatttttctatcccagtggtcagcaaactayagcctgcagaccaaatctaggccactccctgttttagtcaagtattaagggaatacaatcataactattaagttctgcgttt

SEQ ID NO: 443781 - DNA, 558 bp, Homo sapiens
ggcattaactagggaaggctatgggagtacaaatgttcatctcagtttggttagtgatcttctttgggtattaatatgaaaaaatacaaataaaataattttaattaaataggaatgcttaaatatttttgaatacatgatatcatatcctcagttgaaatctctgtgccacacactcttcatttgcttgctcactcattctcttaatatatattaattaaagatttactatgtaccaaccagtaagcttaaggatgggagttcaaagtaagtaagatattaactctgccttcaagaacctctcaattctgtaaagaaaacgagcacaggaatccataatatgttactaattctttctatattaacagtatttaattgtatatagtgcctcttatattgaagttgtaattattttgggaacataacagaaggagtaargagcatatctaaacgattttttcctgtcttattttaatatactgaattgccactacctacactagcacccttcctatagtccagatgtaagaaatacatgtaaccaatcaatcaatcaat

SEQ ID NO: 443782 - DNA, 633 bp, Homo sapiens
tttcaagcgtatatctggtttaaatttgtttcataactccagaaacaaatctgaaattacctctttattaaaacctcaatttcattcaaatggctccatgcctcttctttcctggttgattaccaaaccctctatatttttttggacataccgactttcacatatttaaagaactccagctcttttcaaatgaccaaaataagtgaactgataactcaaaatacataccattaagtcctgaggaaaatrtacagccataatcactaacagttgagataccagaaatgccctatcacgtaactgctcttaattcacacacatctgcacatacatgtgcgtgcacacacgcatacacccacagagatcagttcaggatggattctggaaacagccatagtctttttttgttaattcacttccctatgacacttaggtcctaatgctaaatccaactcactcccaggacttcaccatttcttataacatgctgagctttctcttagaaaatcccactgccatttccctcaatggacatcaatcagcattacacacagtgctcacctgtctatggccatagcaaaagtttttattatttttataaatatgttttaaccttaactggctaagaattaa

SEQ ID NO: 443783 - DNA, 572 bp, Homo sapiens
tgtatgtaaacatgaatgcacaccacccacatgacaatatcaaatttttatttaaactaattattttttttttacttttttgcatagtagtaatgctttctggcatgaaaaaaaagtacaggaagacaaaattgtttaaatgttgtatttcctgcaagtcagtatgaaacacatattaaggcaataggttgggggccagaacttgatgaagttaacgctcagaaaggagatctgaatatcagctggaataaagagctataagtatgtcacaattgtaccaaactttagtgaaacttgagtggggtgcagtatatctgagagggttagtacactacttaacagactgaggaagttgttgaatcccctggaagagaactacatcaaagrcaatataaccagatttatataaggcttttaaaggttcaccaagtgggatttcctatcaggagagtttggcagttttattctcttttttcagtggattttatattttgcctgagaatgaaaagcatacttttagttttgtacattaggtaaagcagagcaacctccaaaatcatgcagccagtaca

SEQ ID NO: 443784 - DNA, 656 bp, Homo sapiens
aacctccaaaatcatgcagccagtacaaagcttgatgaagagacatcttatgccaaaaatgaccgtggcatttcaaagctggaagtttcttatgatataatgattgaccattcataygatttgtttataatgttggtaactagtttcccagtgctaatacaagcagaagttcttaaaaagacatttgattactttgaagcacaggcacttgtctactctaaatagaatagaaagatgggaatggaaactaaaaagttaaaagacaaattagataacaacaataaatatttactactctggatgggagtgcatggaagaactttcaaatatttggccttctctaagcactacttgaccttgctacttcaaaccaccactttggtatttaatgagtggccctgtgaaacaaaatatttaactagatagtaaaaatttttgggactttgatagatttttctggtacctgagagctttatctatctatcaaacactgtgcagggtaaagctaggctttgaaatacatacaactcattcacaatatctaattacagatgcatataaattaatttctaaaattatttcctattactagaagtaaatagaattatatttatttataaaacttatgtgttctattatggggacaatgtgtgtta

SEQ ID NO: 443785 - DNA, 656 bp, Homo sapiens
aacctccaaaatcatgcagccagtacaaagcttgatgaagagacatcttatgccaaaaatgaccgtggcatttcaaagctggaagtttcttatgatataatgattgaccattcatatgatttgtttataatgttggtaactagtttcccagtgctaatacaagcagaagttcttaaaaagacatttgattactttgaagcacaggcacttgtctactctaaatagaatagaaagatgggaatggaaactaaaaagttaaaagacaaattagataacaacaataaatatttactactctggatgggagygcatggaagaactttcaaatatttggccttctctaagcactacttgaccttgctacttcaaaccaccactttggtatttaatgagtggccctgtgaaacaaaatatttaactagatagtaaaaatttttgggactttgatagatttttctggtacctgagagctttatctatctatcaaacactgtgcagggtaaagctaggctttgaaatacatacaactcattcacaatatctaattacagatgcatataaattaatttctaaaattatttcctattactagaagtaaatagaattatatttatttataaaacttatgtgttctattatggggacaatgtgtgtta

SEQ ID NO: 443786 - DNA, 631 bp, Homo sapiens
catggtagtacaaattaacactaaagcaaaagctttcactgagttatcaagtttattttayctattctcttgtctccagagactttcttttctctcttcgttcaactctttgccaaaacatttcacttttgaagacaacacaaatttatgttttagaactgaagtggtgttatattgcaggctgtattttgccatgacagagcaagatttttcttatgttagtaaaacagaacatcaattagttatttttcttatatgtaattttgtgaaaattatataaactctttcacttagttttattgtaaagactacctatattatttcttcagcatcccctacgtgactttctattctttcactattttaatattttctctccatagttttagatgttttgccttgagagtaggagttttctgataagctttggtttcatacatatttgctttctcttgtatttgacaaatacataatgtgaaattctttatataattttaaaatccagcatgtataggaatcacactgagttatcaggatgtattcaacttgatttttatcatgtgactccttcaaatagagagattatttccatgaaagctagccagacgtttcattcatttcaatatattga

SEQ ID NO: 443787 - DNA, 596 bp, Homo sapiens
gtcctgcttcttctatgaaataatccattcaccacctagtatggttcttgttacactggaggtcatatcaccacagtgacaagcttgtgattaattcctggacaatcgtgtgacctctgattacacatattgagctaggaatggacatgaagtccaacttggaccagtyagagcctttccctttgatgttagatataaatagtaggagaaaagtatctgtcattcctttgaagcaagcatgttaagatactgcaacctggaggtccctctaagcacaatctcacatgatgctattatgagaaaaaccaaggaatgtaacatctcctcaagcaaggacccccaaactagaaagaaaccaagaaaaaaaggaatgactcagacaaggctagcttgctgagtacatgagttagttacaacttacatacagggcattactgggtagcagcaagacaactccagagatctgtctcactacctgcccctaagttgcttttaagataatttttcagctattcgtctgctgtgtgtaatgaaactgtttttattgtcattatgttctcaaatatgttctgggatgtttaggtttttagggacat

SEQ ID NO: 443788 - DNA, 579 bp, Homo sapiens
ttgtaaatatttgaatatttgaaaacttaataaagttaaaatatggtctgtgcctcttgaaaagaaaaakttgattggttatgattttttaaattgtgataaatgcacatatttaataacataaaatatgctgctttcaccatttgtaactggacagttcagccctatgaagtacatttacattattgtgcagccatcaccaccactcatctccagaactcttttcagcttgtaaaactacgcagtggttgttatagtccctgacaaccaccattctactttctatctctatgaattttaccactctcagtacttcgcataagtggaatcataacgtattcggcttatatcactcagcataatgtctgcaaggtttatccatgttgtagcatctgtcaacattttcttaaggctgaataatattccattaactgcatatgtcacattttgcttagccagttaactgctgatggacatgagagttgctaccacattttgtttcatgttaataatgctgctataaacatgagtacaactatgtatttgagaacatgctttcagttcttttgggtgtatatt

SEQ ID NO: 443789 - DNA, 348 bp, Homo sapiens
gaccaatagaacagaatataaaacacaaaaataaatccacatattgacagttaacccattttgacaaacagatcaagaacatacattggggaaatgacagtcgttccaataaatggkgctgggaaaactggatatccacatgcagaagaatggaactagatccttatctctcaccatataaaaataccactcaaaatgaattaaaaacttaaatatcaggcttgaaactgtaaaacgaccaggggaaaacattgggaaaatgcttcaagacatgggtccagggaaaagtgttttgagtaagacctcaaaagcaccagcaaccaaagcaaaaattaacaaatgatatta

SEQ ID NO: 443790 - DNA, 620 bp, Homo sapiens
tcagactttcattccaggtaccatctctacatcttccaaattcccaaagatgtgtcaaatttcatattggtttctctataacattactcaatttgcctgggagtggtggaaggtgacacgatgctccctcaacatctaactaaaattctaagtcaaaaatttgaatatattaaaaatctttcattaatgtcttacatactcgtgacattgagataagctaattctgtcataaatgtccttttggaatcctctgcggaaacacttcacctataaaccttggatstatgctacccacttattttttttccacagtgtacgtggagtaaattgtttctgaaactcacaatgatacacgttaagcacacatagataacattaatgcaattagaaaatgaatttctataggctattctctttattcatagtagttaggttttataaagtcaccatgaacaccaaattggtgaatagtaaagcattactcccagggaaaatacaggattagattcctacaagactctggtcacaacattttcatcagctgattaacacatagccttattttatatgtgtttctgtttaaagacatattattgaatgtacatgtatatgtgtgtgtg

SEQ ID NO: 443791 - DNA, 620 bp, Homo sapiens
tcagactttcattccaggtaccatctctacatcttccaaattcccaaagatgtgtcaaatttcatattggtttctctataacattactcaatttgcctgggagtggtggaaggtgacacgatgctccctcaacatctaactaaaattctaagtcaaaaatttgaatatattaaaaatctttcattaatgtcttacatactcgtgacattgagataagctaattctgtcataaatgtccttttggaatcctctgcggaaacacttcacctataaaccttggatgtatgctacccacttattttttttccamagtgtacgtggagtaaattgtttctgaaactcacaatgatacacgttaagcacacatagataacattaatgcaattagaaaatgaatttctataggctattctctttattcatagtagttaggttttataaagtcaccatgaacaccaaattggtgaatagtaaagcattactcccagggaaaatacaggattagattcctacaagactctggtcacaacattttcatcagctgattaacacatagccttattttatatgtgtttctgtttaaagacatattattgaatgtacatgtatatgtgtgtgtg

SEQ ID NO: 443792 - DNA, 630 bp, Homo sapiens
ataattcacaagaaaaacctaaaggattttatttatttcagttatgctgacacactgcctgcctttgtgaggactctttcaccacaagtaacttagtttggacactctgtctcctttatttagccctgagatgatcttacattagttactcaaaaatttgtacaccaaaggattcatgatctttaaaattatagaggattgaatatmttttattgatcatactttcctggggtaggatttctaagcatttatttttgttgtgtcctataaaggccattatgaaaaagatgatgaaatcatgatcttttgttcaggaatatctaaacagcatgaaatggttaatagcacccaatccagtgctcggacctgctagttgcaggacatttccccagatctaacacagtatatgtatcattgatatctatctgtatggttgctgtgttgttgcacaagtgtggcctattcaataacttatagtccttgaatttatgtcttcctgtctaaaattgccaccacttaaaagtgagctcttaaaatccattgctctgctttaatgcagaatatgccttcctgctttgatttagaatagagcagtggattatacaagctcacctgtaaatgtaggtgatc

SEQ ID NO: 443793 - DNA, 468 bp, Homo sapiens
agatatataaaggatgatgggctgtaaaaacacctatgtacctcgtttagttcaaattatgaaaatactttcaatgacagtttttattccccataatgacttccaatggcccatcattaattcatcagaaaatgagttttgctcatcacatcagttatgtttttctctataccacttactatgtcctctttgctaactagtgaggtaaaaacatataaaatatctagcacaattcattaatttacagatgagaaagctgagtctttggagatactatttgacttgcycacagttacacaactaaattgtcaaaatattgaaatcagaatgcaggtttcttctctcctgggctcagattcttagtacttgaaggtagctcctcaagtatgctaccttctatgctactacatatcttcttatacaaataaactatggatttatattacattgtatttttatggctatatg

SEQ ID NO: 443794 - DNA, 518 bp, Homo sapiens
tcatcacatcagttatgtttttctctataccacttactatgtcctctttgctaactagtgaggtaaaaacatataaaatatctagcacaattcattaatttacagatgagaaagctgagtctttggagatactatttgacttgcccacagttacacaactaaattgtcaaaatattgaaatcagaatgcaggtttcttctctcctgggctcagattcttagtacttgaaggtagctcctcaagtatgctaccttctatgctactacatatcttcttatacaaataaactatggatttatattacattgtatttttatggctatatgatagatgagagaaaatgtgactactttaaaagtaagggttgctaagatcaattttgttatagctgtgcattttcttctgaaagccacatyttagaaaaggaattaggaggaagaactagaatgtagttgtgatattgtacaataaatatttggtctttttcccatttcctgacatacaatttctaagatcct

SEQ ID NO: 443795 - DNA, 600 bp, Homo sapiens
ctgtttgcttacatttgataatttataagaaattacaagtacgttttttagtttaaagaaacttcgaaggggttaatttactccagtttacaaaggacttccttttttggtattcttttttctaggagtaattgtcaggtactttaacactatgagaaatctattgtggagtggacggaggggggcagcaattaataagcaataactcagygtatatatttaaaacataattagttttgaaatttcatagaaaagaatacttaggtattatgtgatttttttttcattaggaagcagttatagtagcaaacatagaatttaccttgttcaattaaaaattcattttgtgacatagctgtgacttttgatagatacattaaaaaatatttacaaaagtgtgttggtcaaatatcctgacaatcttctggtattggtattcattattgctaaatacaggctgatgaaatgaacaaaattcaaaaaaattaaatggagtctaaaattctactgaagagttataccatggtctttaaaaactcttacatgaaaaggaagttttaaatatacagataaaattctaagttgtaactagaatttatg

SEQ ID NO: 443796 - DNA, 591 bp, Homo sapiens
gtaattatctgcaaaaggtcaaatatttgctttatctatgtaattcaatttcccaaaggcctttgggattcaaattaatgcccttgtaatatcttcattgaaaaagaagattaattatrcttacatggaacctaatttggcttatcagacctttaatgtggctgtgatcatgggtgcattgaaatttaggattacgcgggtgatctcggtcccatatttgggagactttgaatatttgtcattatttttatgcatatcatttttcccgcctgcttgggaaaattaaaatgtcggttctgaaagaaataaacattatgtattgacattggtaattatgttttggtatttaaggatgcataaaaaactgcacacagggcctcaaatataaatttgcagttaatgtccctagatggaaactggaggtcttctaccagactcagtaaattgggaaaaagctctctctggggctgctgttctgtgtagccagggatagggatgtgggcacataacttttagcagtgctcaaagatgttgaaggtttgagtggtcccaggaactctggatttagtagggtcaggaggcctgggtttc

SEQ ID NO: 443797 - DNA, 591 bp, Homo sapiens
gtaattatctgcaaaaggtcaaatatttgctttatctatgtaattcaatttcccaaaggcctttgggattcaaattaatgcccttgtaatatcttcattgaaaaagaagattaattatgcttacatggaacctaatttggcttatcagacctttaatgtggctgtgatcrtgggtgcattgaaatttaggattacgcgggtgatctcggtcccatatttgggagactttgaatatttgtcattatttttatgcatatcatttttcccgcctgcttgggaaaattaaaatgtcggttctgaaagaaataaacattatgtattgacattggtaattatgttttggtatttaaggatgcataaaaaactgcacacagggcctcaaatataaatttgcagttaatgtccctagatggaaactggaggtcttctaccagactcagtaaattgggaaaaagctctctctggggctgctgttctgtgtagccagggatagggatgtgggcacataacttttagcagtgctcaaagatgttgaaggtttgagtggtcccaggaactctggatttagtagggtcaggaggcctgggtttc

SEQ ID NO: 443798 - DNA, 605 bp, Homo sapiens
ctggcgggttttattcttccttcccactgacatctcatgcctgcaggtctcaggggaatgtggcataaccaggcagaatggggcagaggtcgagtgagggacatgcgctcaccattctgggctctgcgcactaatgactcccacgtgtcttggctcatggttcagagaatgccttytttttcagcacgtctccatcatccccatatgctttggggcacatttctccttgggaaatgctttgtttgggcaggtaacaagttccctgatcggggatgacggcacgcagaggctgaaggatgaagacagaagtcaggtgctgggagctggatttggaagggaccatgtttaaggtcctcttgggtcctgtgaatctgagtgtatttgtggttcccttatttctacaggcctttccccttgcagcattaagtggggctttcctttgctgatcggagcccaaagatggggaatttgttggctggaatgactgcctcacactctctctggctcccccctgtccccagtcacacatttgctctgcatcttgaagtcagaggaatgcttctcagataataatctggccatgtcattttcttcttcagaagctg

SEQ ID NO: 443799 - DNA, 605 bp, Homo sapiens
ctggcgggttttattcttccttcccactgacatctcatgcctgcaggtctcaggggaatgtggcataaccaggcagaatggggcagaggtcgagtgagggacatgcgctcaccattctgggctctgcgcactaatgactcccacgtgtcttggctcatggttcagagaatgccttttttttcagcacgtctccatcatccccatatgctttggggcacwtttctccttgggaaatgctttgtttgggcaggtaacaagttccctgatcggggatgacggcacgcagaggctgaaggatgaagacagaagtcaggtgctgggagctggatttggaagggaccatgtttaaggtcctcttgggtcctgtgaatctgagtgtatttgtggttcccttatttctacaggcctttccccttgcagcattaagtggggctttcctttgctgatcggagcccaaagatggggaatttgttggctggaatgactgcctcacactctctctggctcccccctgtccccagtcacacatttgctctgcatcttgaagtcagaggaatgcttctcagataataatctggccatgtcattttcttcttcagaagctg

SEQ ID NO: 443800 - DNA, 288 bp, Homo sapiens
ctcattgttttaatcaatttccttttgcgttatattttcctttttaccggagccatcgttgactatattaccctccagtttcttagaggccatcaggtacatacctcaaaaaataaggggtctactttctcatttttactattcacaagattggcccaagacatgaaacatgcaaacttccactccgaaaaagtaatgcccatgacactacagcaatcctatgctgtgactgagctgggctccacatgarctagccataaaagaccaaaatacaatggaattacagca

SEQ ID NO: 443801 - DNA, 492 bp, Homo sapiens
acattacatttaggtatccctgaagaccaagtaatttatagatatttttygcccattcccagatttttttattccaacataaaatgcaaggattcagtaagtaatagtcataggaaattttagtgcaaactatccaaagtttggcatgaattaacacatggacaggcctgcccccacaattttgcattgtaagatacttgcaaaaccatcacagagataaaacagtcacacttgaaaataattcaagcttatacaaagcaaacaaaaaacaattgatctcaaagaggtttcccttccaggtagaaggaatcctgcaatcttgtgtgggaatcagtgagtcgaagtataaaaagcacgtggtacatttaggcacacagtacatgctcaatatgttgattaaacaaagactatctggatatgttacttaagactgagtccaaacacagatttggaatccatgaaacagagagaataagtgttcagctaaaactc

SEQ ID NO: 443802 - DNA, 492 bp, Homo sapiens
acattacatttaggtatccctgaagaccaagtaatttatagatattttttgcccattcccagatttttttattccaacataaaatgcaaggattcagtaagtaatagtcataggaaattttagtgcaaactatccaaagtttggcatgaattaacacatggacaggcctgccccmacaattttgcattgtaagatacttgcaaaaccatcacagagataaaacagtcacacttgaaaataattcaagcttatacaaagcaaacaaaaaacaattgatctcaaagaggtttcccttccaggtagaaggaatcctgcaatcttgtgtgggaatcagtgagtcgaagtataaaaagcacgtggtacatttaggcacacagtacatgctcaatatgttgattaaacaaagactatctggatatgttacttaagactgagtccaaacacagatttggaatccatgaaacagagagaataagtgttcagctaaaactc

SEQ ID NO: 443803 - DNA, 487 bp, Homo sapiens
tctgactattccccaatttgtttctccattcctctgttgatggacatttgtgttgttaccaccttttggctattgtgaataatgttgctatgaacactagcgtacacatttctatgtggacaggtgctttcatttctcttggatatatacccaggagtggaattgctgggtcatacggtaattctatgcttaactttttgaggtgtttatagcctttttccttgacaacaattgtttacagtgtaccaatcgactgtccagaaccccatatagtgttgtaaagaagaacgtgattctgatgatgaactgcccagttcatactatggattcastccttcctaggtgggggacgttgggcaagttagtaaactctgtcactcattttcctgaggtggaccttagacgatggttgtgtagattaaacggaaatggatgcaaaggacttaatatatatgtcattcagtaagtgtttgctgcttcaaaatct

SEQ ID NO: 443804 - DNA, 645 bp, Homo sapiens
tatctatttcttgatttatttcttttggattgtaagtattgatctctgctatgaaaaataaagaagtccatgtacttacactttcttctgtgtttcccatctgcacccaattcttgttaaataattattcttacattgtcaaggttcataacatttatattcactctgttaccataatggtctttcatgatttctccataggttatttctaaaattttaagcccaataaaaatatcatttatatattttagattrtggaaatactcactgcagaaccaagtgatgtgattaggcctgtagagatgagaatgtaatcaattctatgtctggaaacccttactgctcaaagggaatgttctaaacatcagggtcagcagattctcttataatttggtttgcactttccttgatcttaacttatccttagatatcattatttcctgtgtctactctttttctctttaatgccaaacttaccattttaatgattttaaagtgtataaatcagtggtgttaagcgcattcataatatcatgcactcatcgctgctgtctagttccagaattttttccttaccctaaaaggaaaccttccatctattaagcagtcacccctcattcctccctctcaccacccccagcaact

SEQ ID NO: 443805 - DNA, 645 bp, Homo sapiens
tatctatttcttgatttatttcttttggattgtaagtattgatctctgctatgaaaaataaagaagtccatgtacttacactttcttctgtgtttcccatctgcacccaattcttgttaaataattattcttacattgtcaaggttcataacatttatattcactctgttaccataatggtctttcatgatttctccataggttatttctaaaattttaagcccaataaaaatatcatttatatattttagattgtggaaatactcactgcagaaccaagtgatgtgattaggcctgtagagaygagaatgtaatcaattctatgtctggaaacccttactgctcaaagggaatgttctaaacatcagggtcagcagattctcttataatttggtttgcactttccttgatcttaacttatccttagatatcattatttcctgtgtctactctttttctctttaatgccaaacttaccattttaatgattttaaagtgtataaatcagtggtgttaagcgcattcataatatcatgcactcatcgctgctgtctagttccagaattttttccttaccctaaaaggaaaccttccatctattaagcagtcacccctcattcctccctctcaccacccccagcaact

SEQ ID NO: 443806 - DNA, 561 bp, Homo sapiens
ttactgttgcaccttcccaaggacttctatgttcaagatcttctcacgaacttagaattaccttgtggagcattcagggccagcagaattatgtccagttcacagtcaaagagtctgaagcacagatgcatgaagtgcttgtttcaaaataattaaagtactgggattatgaaaattctcactgttgcctattcgtatccattctactgcttgtccacatgaaagattacatataattactttcctgtctataaaattctagtcatataagaagttgaacccaagtcatggcctgtgtattagactgactatctataaactcaataaaatagaatttctttatatagtcctttctaagttagccaagaagatgggtaattgtgatgacggcttgttctgtgggccccaccatgtagtattactgagtttctttggctctagtctgttgattcygagggctcttggatatgggtggtggtttctaccattgctgctgccttacttttcttgccttgaccacagggctgttgtctgtcagtgtcttcacttctcccactgctc

SEQ ID NO: 443807 - DNA, 561 bp, Homo sapiens
ttactgttgcaccttcccaaggacttctatgttcaagatcttctcacgaacttagaattaccttgtggagcattcagggccagcagaattatgtccagttcacagtcaaagagtctgaagcacagatgcatgaagtgcttgtttcaaaataattaaagtactgggattatgaaaattctcactgttgcctattcgtatccattctactgcttgtccacatgaaagattacatataattactttcctgtctataaaattctagtcatataagaagttgaacccaagtcatggcctgtgtattagactgactatctataaactcaataaaatagaatttctttatatagtcctttctaagttagccaagaagatgggtaattgtgatgacggcttgttctgtgggccccaccatgtagtattactgagtttctttggctctagtctgttgattccgagggctcttggatatgggtggtggtttctaccattgctgctgccttacttttcttgccttgaccacagggctgytgtctgtcagtgtcttcacttctcccactgctc

SEQ ID NO: 443808 - DNA, 441 bp, Homo sapiens
ttagaaaacatatcttgaattaattgtcattaatatgccagaaattaaatgaaaaaaaattaaaatctcmtaagagaagtgaaaagagtaagaaaaagaatagacactctagaaatttttaaatacaataattaaaattaaggtgactttaatagaacatgagacacagctgcagagagaatttgtgggctggaagattaattagaaaaaaatatccatactgatgcaaagatcatagtgcaaaaatctaacacacacgtaactggagctgcagaaggagaaaagggagaaaaaattggtaagaagtagtaattgagaaacaatggctgataatattttccaaagctgatgaaaaacatcagaccagagaattcagaacctgtacaaaccataagcaagataagatgatgaaaagccacttaggccccatacaattgctgg

SEQ ID NO: 443809 - DNA, 441 bp, Homo sapiens
ttagaaaacatatcttgaattaattgtcattaatatgccagaaattaaatgaaaaaaaattaaaatctcctaagagaagtgaaaagagtaagaaaaagaatagacactctagaaatttttaaatacaataattaaaattaaggtgactttaatagaacatgagacacagctgcagagagaatttgtgggctggaagattaattagaaaaaaatatccatactgatgcaaagatcatagtgcaaaaatctaacacacacgtaactggagctgcagaaggagaaaagggagaaaaaattggtaagaagtagtaattgagaaacaatggctgataatattttccaaarctgatgaaaaacatcagaccagagaattcagaacctgtacaaaccataagcaagataagatgatgaaaagccacttaggccccatacaattgctgg

SEQ ID NO: 443810 - DNA, 604 bp, Homo sapiens
aaaacagcttgccagcagcacagagctcgcaaagaggaaattgcaaaacattgtactttaagagtagaagaggcataaaaatactcttcccagtaactataaattatttttgaaatagatttcrtttaacaacaatacacttttgcttggcatttctggcccaagatctctcctatcacatgtgtagcagacaattatctataacatatcctgttttatagtcatacagtgtggcgacagaagtgagagctctgcagtcacttctggattagaacacaatctctgctacttcccagctgtgtgacattggctgggtcactttacctttgttgagacttgcagggtcactgtgaaaatttaatgttccagatactatccattttatctcatttaattctcacatcaaccttgtaatattcaataagtaacactctgtgataatttaatgggtattttagaattaaataaatattttaagttaaatgcacaccatagtagatggcacataataaacacaagtgagttatcttcccctaccatgtgggagtacatatagtcccttgttacataaagagagtaaaatgtgcgtgtagctgtttagtta

SEQ ID NO: 443811 - DNA, 469 bp, Homo sapiens
tattaccagtgcttatctcttctgagtaagatttttggtgatttgtatttccttaaggatttccatgtttgcaaaatcttcaaaactctctgtaattggaaaacaaaaattcaataaatggtgtttaacttacctatttcaactgcaaagtctattttttagtcctcttgaatgatactcatcctagcctgtttttccattccattcttaaaagcctcctatgaagtggtctagaaatccctagaaacagctcccaaatgtcagaaaatatgtcttcacactttgctataatctgattttcactacaacctccattaaatgctcrtgaatgataagttcattcctgttataaataatagctcttcaaaaggttttatgatagtaagcatattcctctggttcttcttttctccagattaaatatcccccagttcttacattattccgttttgtggcatacatttgtatt

SEQ ID NO: 443812 - DNA, 440 bp, Homo sapiens
cacaatactctgcctccatctctacgccttccattcattcccttttttaaacattttccttaatttttagtgacattataatacttattcaatgtaccaatgagaagtgaaaatagtgtaaaggtgttttgtgtaaggaaaccagtgttaataacatggtttgtattcatctacatcttcttccacgtacacggagatatatatgcacatatatggggattttgttgttgcttgtcctaacaaagtgaagttgtatggtataaattrtttgctactttctttattgatttgacaatccattatataatccactccagtccgggcatggtggctcacacctgtaatcccagcacttcgggaagacgaggcaggtgcatcgtcttgagctcagggcaacatggcaaaaccccgtcttgacaaaaaagctcaagagctagcca

SEQ ID NO: 443813 - DNA, 507 bp, Homo sapiens
cagggcaacatggcaaaaccccgtcttgacaaaaaagctcaagagctagccaggagttggtagtgcatgcctgtagtcccagctacttgggaggctaaggctggagaatcgcttgagtctgggtagcggaggttgcagtgagccaagatcatgccactgcagtccagcctgggtgacagagcaagaatctgtctcaaaaaataaataaataaataaataaataattactccaatctggcttctatcctatcatgccaataaagacgcttgtcaacagcatacacacacamacacacacacacacacacacatatatccatgttaccagctagtttcatgccatcaaagtaatcatttgattactttgatgtttcttaccttactctagtgcctagcagtatgataggtgactatctctaacttcttaaagcacaatcctcacttggcttaatgacatctcaattcctgattttctttctgtctccctgggtgtatctacaatgtttg

SEQ ID NO: 443814 - DNA, 513 bp, Homo sapiens
catggaacacaaattaagcattctttattccaataaactctaggagagcaaggcctagagggttgaatcatcttaatagctttattcagcctttattcatgatttaaaacaaaataaaacaaaaaaactctcaataaactaaaaatgaaagaaattttttaagttgagaaaggataatgatgaagaacctatagttatcacactaagattaggaaagaatcaataaattctattctcactgcctgtattctacattgtgttatctgcccttgccagtgcaacgtgaaaagacaaaaattataaaagtcataaaaattggaaaaataaagaggtaaaactgcyattatttgaagacaacttagttatgttgatagaaaatatatgacatttatcaaaaaaacctatcagaaataataatttatcaaaattggaggatttgagggcaaaatacaaagtcaatttccttttaataggttaggagcaaagaaatgggaaataacatttcaaaacaac

SEQ ID NO: 443815 - DNA, 576 bp, Homo sapiens
tttttattgtactgtagtctgagtgtggtctggctggtatatatatttttaatttattgagaattgctttattgctgattttttggtcaattttagaatatatgccatgtgcagaacagaataatgtatattctgtttttgtcaggtgaactattctatagatgtctgttagggtcatttggtcaagtgttgagtctaggtcccgaaattatttgttagtgttctgccttgatgatctgtccaatacatcaatggggtgttgaagtcttctgctattattgtgtggttatctgagtttcttcataaatctctaaraacgtgtttgatgaacctgggtgctccagtgttgggtgcatatatatttaggatagttacgtcttcttgttgaattgaactctgtatcattatataatgctcttctttttttttgatagttgttggtttaaagtctgttttgtctaaagtaagaatagcaacccctgctttttcttgttttccatttgattgatacatctttctccatccctttactttgatcctatgtttgttcttgcatgtgagattggtctttcaaag

SEQ ID NO: 443816 - DNA, 572 bp, Homo sapiens
tattgtactgtagtctgagtgtggtctggctggtatatatatttttaatttattgagaattgctttattgctgattttttggtcaattttagaatatatgccatgtgcagaacagaataatgtatattctgtttttgtcaggtgaactattctatagatgtctgttagggtcatttggtcaagtgttgagtctaggtcccgaaattatttgttagtgttctgccttgatgatctgtccaatacatcaatggggtgttgaagtcttctgctattattgtgtggttatctgagtttcttcataaatctctaagaacgtgtttgatgaacctgggtgctccagtgttgggtgcatatatatttaggatagttacgtcttcttgttgaattgaactctgtatcattatataawgctcttctttttttttgatagttgttggtttaaagtctgttttgtctaaagtaagaatagcaacccctgctttttcttgttttccatttgattgatacatctttctccatccctttactttgatcctatgtttgttcttgcatgtgagattggtctttcaaag

SEQ ID NO: 443817 - DNA, 547 bp, Homo sapiens
cctggtggtgcagtcataggtcactgtagcctggacctcttgggctcaagtgatccttctgcctaagcctcccaagtagctgggactgcagacatatactaccacacctggatagtttgttygtttgttttctttagagatggggtcttgctatgttactcaggctggtcttgaactcctggcctcagtctctcaagtagctgggattacaaatgggagccaccacactcagcttaaacattacctttatatgcactgggaaaccaaaaaatgtgtgtcttcctttattgggatattcactttattgctgtggtctggagccgaacccactatatccctgagttatgccttatatatataacctgtgaagaagtccttctcagatattacagcatatatacaaaacataaagctgggtttaaaaaatggagctagaaggggtcatatttcagtctagtcattcagaagagattcaattgaaaaaataattaacttgttatattagccatgacacactaatacattcacacagatttcattctagagg

SEQ ID NO: 443818 - DNA, 547 bp, Homo sapiens
cctggtggtgcagtcataggtcactgtagcctggacctcttgggctcaagtgatccttctgcctaagcctcccaagtagctgggactgcagacatatactaccacacctggatagtttgttcgtttgttttctttagagatggggtcttgctatgttactcaggctggtcttgaactcctggcctcagtctctcaagtagctgggattacaaatgggagccaccacactcagcttaaacattacctttatakgcactgggaaaccaaaaaatgtgtgtcttcctttattgggatattcactttattgctgtggtctggagccgaacccactatatccctgagttatgccttatatatataacctgtgaagaagtccttctcagatattacagcatatatacaaaacataaagctgggtttaaaaaatggagctagaaggggtcatatttcagtctagtcattcagaagagattcaattgaaaaaataattaacttgttatattagccatgacacactaatacattcacacagatttcattctagagg

SEQ ID NO: 443819 - DNA, 547 bp, Homo sapiens
cctggtggtgcagtcataggtcactgtagcctggacctcttgggctcaagtgatccttctgcctaagcctcccaagtagctgggactgcagacatatactaccacacctggatagtttgttcgtttgttttctttagagatggggtcttgctatgttactcaggctggtcttgaactcctggcctcagtctctcaagtagctgggattacaaatgggagccaccacactcagcttaaacattacctttatatgcactgggaaaccaaaaaatgtgtgtcttcctttattgggatattcactttattgctgtggtctggagccgaacccactatatccctgagttatgccttatatatataacctgtgaagaagtccttctcagatattacagcatayatacaaaacataaagctgggtttaaaaaatggagctagaaggggtcatatttcagtctagtcattcagaagagattcaattgaaaaaataattaacttgttatattagccatgacacactaatacattcacacagatttcattctagagg

SEQ ID NO: 443820 - DNA, 607 bp, Homo sapiens
gaattgacagaagaaggcttcagaagatgggtaattaaaaaaaactatgctgagctaacggagcttgctctaacccaatacaaagaagctaagaaccttgataaaaggttagaggagttgctgactagaataaccagtttagagtggaacataacctgatggggctgaaaaacacagcacgagaactttgtgaagcatacacaagtatcaatagccaaatcgaacaagcggaagaaaggataccaaagtctgaagaccaccttgctgaaataaggcatccagacaatattagagaaaaaagaatgaaaaggaaagaacaaatcctctaaaaaatatgggacattgtataaagaccgaacctacgattgactggcatacctgaaggagatgggaagaatggaaacaagctggaaaacacatatcaggatattatccaggwgaactcccccaacctaggaagacgggccaacatgcaaattcaggagatgcagagaatatcactaagatactccatgagcacatcaatcccaagacacatagtcatcagattctccaacattgaaatgaaggaaaaaatgtaaagggcaactagagagaaaggccaggt

SEQ ID NO: 443821 - DNA, 526 bp, Homo sapiens
tcagtacacattccacgtaggcagggaatgtcacatacaagatgatgctggcatatagtaagcamtgaaaagtagtaaaaagacaaaatcccctgtcatcacggtgtttgctttctgggcatagggagacaaaaataaatatgaggaagtaaaatatatagtatattagcgaaaaaagtatgctggagaaaaatcaaacaaagaatgctcatagaggatgaagacagggtacagatgtaatagggtagtcagagaaagtgatttgggcaaagggctaaaggaggtaagagagattcatacctacctgaagaatagtccagaggaaaagaaagagatctgaggtaggtgcatgccagctgtgttctggaaagaggcaggtgtgtctagagaacagagagcagagtccctgagataaccactccattcccaacccagatctctttgataaaacatcaggtatctgatttttctttcagtgctgcagctgcatagggcatgtgttttctcccatcattccccaggcaca

SEQ ID NO: 443822 - DNA, 526 bp, Homo sapiens
tcagtacacattccacgtaggcagggaatgtcacatacaagatgatgctggcatatagtaagcactgaaaagtagtaaaaagacaaaatcccctgtcatcacggtgtttgctttctgggcatagggagacaaaaataaatatgaggaagtaaaatatatagtatattagcgaaaaaagtatgctggagaaaaatcaaacaaagaatgctcatagaggatgaagacagggtacagatgtaatagggtagtcagagaaagtgatttgggcaaagggctaaaggaggtaagagagattcatacctacctgaagaatagtccagaggaaaagaaagaratctgaggtaggtgcatgccagctgtgttctggaaagaggcaggtgtgtctagagaacagagagcagagtccctgagataaccactccattcccaacccagatctctttgataaaacatcaggtatctgatttttctttcagtgctgcagctgcatagggcatgtgttttctcccatcattccccaggcaca

SEQ ID NO: 443823 - DNA, 405 bp, Homo sapiens
gcattacaagccttaagtaggagaaaaagacaacagatatcaagtgtatccacaggaaactttacacatatatawgtatacgagacatgtatatgtgtgtatgtgtatgtgtgtgtatgtatatagatatacatacatacattttagggagtattttaaagtttttatttttaattgaaaaaaaatgattgtgtatgtttatgggatatataaggggatgttttgatgtaggtatacactgttgaatgattatatcaagcaaattaacatacccatcacctcaaatacttatctttttttataccgagaacatttaaaatctattgttttagcaattttgaaatatgcaatatattattatgaactatggtgaccatactgtgcaacagatcttgaaaatgtatt

SEQ ID NO: 443824 - DNA, 577 bp, Homo sapiens
ataagacattggaagaaaagtcccaaaccagagaaattagagaaaatgattgaaaacgtgaagttttcagaacctgtgtgacttggggatgaatgagaggcctagggttttggcacaggaaaattctgatgattcttagggataatgccaggcatttgagtcatcaattagtttttttgtcaggctctttgcaagatagaaaaaggtcctcaattacaatcctttrgtcagtgatttaccaagtaaaatatgaactctgatcatatcattgtgtgtgtgatacacacacacacacacacacacacacacatccatcagttttaataggttgcaaaaatatttagtccactcaggatccagcctgagcgcatgattcagaagccacctcgcacacaggacatggttcgtgttttctatataggactatttgagtgagctgggttgagcagcatattgagatgtttcagtaactcatccagttcttgaccatgagagagtgttcattagcagctctgtgaggctttcatttttagcaattccagaaactgaagtcaagagaggtacatgagacaaagtg

SEQ ID NO: 443825 - DNA, 607 bp, Homo sapiens
tgataaatataattaaaagtaaaagggaagaaaggcatttgtagaacaattaattgacaattaaaacagatcaggaaaaatataagtaaagcgtggttcagcagtatttgcaaaagacttatgtcaagaatatagtagggactgattaaattaatgatagagtttggcaactaattggatgagaaagaagttaaatctgaaatgtacatgaatgtcatatttaggatagagacacaagaaaatgttgatgaatctgtaaattatttttatcgtagtactgcaaacagtacaattaaatattaagtgtgattttcaggctgggcatggtggcttacacctgtaatcctaggactttgggaggacaaggcaggtggattgcttgagctcaagagtttgagaacagcctgggcaatatggtgaaaccctgtctctacaaaagacayaaaaactagttgggcgtggtggtgcatgcctgtagtcccagctactcaggaggctgagatgggagactacttgaacctgggaggttgaggctgcactgagctgagatcatgccactgtgctccagcctgggtgacaaagtgccacctgattaaaaaaaaaaagt

SEQ ID NO: 443826 - DNA, 683 bp, Homo sapiens
tttacaaattgggaaagaacacgtaagaacaagcacagaaaggcatgtaaggaattatcagtagtggagctacaggaacaaagaaggaatgaatctaagtatattatgtactatatttataaacaagatataggaagaagaaagacatgcttcagaaaattgtaagtctcctttgaacatatttaaggaaaacctaatatgtgtatatttggattctcatctctgcatggtagtatttttcattaagtgggaaattaaacttgtattcacattttccttaaagcgtattaattctcaatttttaaaaattgcgtaaaggatataaacataaaacagtaaaatatgtcattacatmaaaagtcatcaaacataaacctaaaaatgaaactttgaagtaatagaaacgtattaagattaccttataacaactttttctcttgtaaaaagcatttcttatttataataagatggtatgttgttactcacatacaataagctatctaatttatgcaagcataatggagagagtagaataatttttatttctcacttaggcatctcattgtgtttagtgtaaagggccattaaaaatatgctcttcctggtggtatactgttacataaacagtagtgaaattattcatctacagaaataaaaaggattacgtgcagttttgcaaaagt

SEQ ID NO: 443827 - DNA, 502 bp, Homo sapiens
atgttgtttgtcattgagtcatttgagttctttacataatttagaaattaaccccttgtcagatgtatcgtttataaatattttctctaattctgttggttgtcctttggttttgtcgattgtttccttttgctgtgcagaatctttttagtttaacataatcccatttgtctatttttgcttttgttacctttactttggggtcttatccaaaaaaaaaaaaagccttccccagacttatgtcatttctggtatgtttttttctattagttatatagttttggatctcacatttaagcattttaattcattttgggttagtttttgtatacggtgagagataargatctaatttcattattctgtatgtgaatatcgagttttcttaatgtcatttattgaagagactcttctttctcactcgtgtattcttggcatatttgtcaaaaatcagctcatagtaaatgtgtggatttctgggctctctcttatattccattgg

SEQ ID NO: 443828 - DNA, 595 bp, Homo sapiens
atgtgaagccacttaagaggaacagaatgtgccattttatattctcattttcaccagtagtaaataaggcagcagatttcagcctgtattgcaaacaaggaacagtgaaagaagaaaaatagatcttatggtttttaaataaaagactatgttacccctcattcctctttttggtaccactgccatgcccccttttaaagattttatttatttatttatttatttatttattgaaatgtccttaattttaatttggcccaactattgagacaggaatactagaggtcaagtcatcaggacaattgaaggctgacagtataaaagcaggagaaaaatgttttgacctttcctgccttaaaattctctaattaggaagcttagaattccaggcccagagatggcctagttttaactgggttagagttatagatagatgtaggagtatggggatacactcctgcactgtgcccttaagtcataagtagtgttggtggtggtggtggagaaaatggttgattaacamatgactaatcatcagagaaaggtaaatcaaagccacagtgatttaccacctcactcctgttaaaatggctat

SEQ ID NO: 443829 - DNA, 607 bp, Homo sapiens
ttacccatcaaattaataaataaataaatttggaaacaaaaaaagaaatcagtactgaagcagacttttcattttggaaatgttcaatgggcctagtttggaarggcaaatgttggaagactctattgctttctctacacaggcaaactagtgaaaagaatgagaaactaggaagagaaattgagccccagtttccttgtgtgatatcactgaagctacaaatgttgtctctcattgcatcagtggcaagatttttacagtaataagcaactggtcactgtgttaggtctgtccgtctggaaggggacagaggctaatctattttcctacccatgatgcagaaagatgacctgtgagagctcaactgcagcaactcaaatctcctcagtccctaacaattcaaaccatcctaaataaatccacaacctaagcaaaattcacgttctttatattcaactatagttccaaaacaaggtttttttagcccccactttcaaacaggttgttccatttctgtatggaaaatcaataatattcatggttctcaacccaatctttaaaattatcaaagcatcaaaaataacaccaacaactttgaacaagagat

SEQ ID NO: 443830 - DNA, 588 bp, Homo sapiens
ttactcactcataaatttatactaaaccaatctgggctcaacaatgataatgttttgactrtaaattcaccttccttcattattatagccttggctttgttgcatattattagagcaagttagctggttttcctttccttggggatgagagcagagagataaactgccaaacaaaaccagattttagagggcagtctatcacagcttctatgaagtcagaaagtttattaagcttaaatgttcagtacaatagttgaaacccatgttaaattgatgaacttttgttttagttgcattcaattactcttgtgatattaattccaagatcatagatgttgcaatttgctattgaaatggcattttatcccctaagaaatgtgatttggaattaagaatatcaaagacaatttattctgagctcacatttaagagaggagcagttggttgggtgtaactcatacccatttttccctcaaaaagacacatattttttcctcctatcttccataataatctagtctaaatattattatttgataagttaaattaaggatactctggaattatacagattaataattctgaatg

SEQ ID NO: 443831 - DNA, 602 bp, Homo sapiens
tgctttcaaatggagccatcatattagcattctaaaggctctgagaagcctgcaaaagagaagtctgattcattctaattaacccagtgtatcctatacacacttattcatgaaatcacttatttctgggtaacagcaattaataaaactcctgagatataatcatattagctatatttaaatgataattgggtcattttgggaaacctcagagtagatgttctcctaggtctcttttaaggtcaaatatattattaactcttaaagaataattctcaaggggtattaaatatatggtaaagttgcaattggaacttagaaattttgaattgaagtttataaatttataccctaggatactcttctctkcttttctccatgatcatattattgaactagtatataaactaatatgatagaggtagagatgatacatagccttttataagttagattcaagtagcagacaataacataggaacaccaagctaaaaatcaagtaactggtcccacatttcacaagcgggcttgaaattggccactggggacttgaaatatctctatgctttaatttatattaaaataatatatttttattggaa

SEQ ID NO: 443832 - DNA, 540 bp, Homo sapiens
gtcaatgggtggaaaataaaatttaaaacataaaataaaaatggcaacctattaggatagttacttcagtttgtaagagaactgaatgaagtatatatgttaataacaaactactgtgtaagaaaaaaaatgattccagagacaaagcagacattttataatgattaaaaagtcactacatccataagatatrgaaattataagcaaataaaaacctaacaaaagagcccttaaatgcattatgcagaaactgcctgaattaaagagattatgagaaatacaaaatttagcaataatagttggagacttcaacatctgctttcaataataatcaaaattactaggcaaaagataaacaaggacctagatgacttgaacaacaagaccaatgagacctaacagtcatagaaaaatttacccaatagcagtagaataaatattcatctcaatggcacatgaaacatgatccagaatacacaatatgataggccataaaagaacctcaataaatttaaaaaaatagaaattatatgtatttat

SEQ ID NO: 443833 - DNA, 540 bp, Homo sapiens
gtcaatgggtggaaaataaaatttaaaacataaaataaaaatggcaacctattaggatagttacttcagtttgtaagagaactgaatgaagtatatatgttaataacaaactactgtgtaagaaaaaaaatgattccagagacaaagcagacattttataatgattaaaaagtcactacatccataagatatagaaattataagcaaataaaaacctaacwaaagagcccttaaatgcattatgcagaaactgcctgaattaaagagattatgagaaatacaaaatttagcaataatagttggagacttcaacatctgctttcaataataatcaaaattactaggcaaaagataaacaaggacctagatgacttgaacaacaagaccaatgagacctaacagtcatagaaaaatttacccaatagcagtagaataaatattcatctcaatggcacatgaaacatgatccagaatacacaatatgataggccataaaagaacctcaataaatttaaaaaaatagaaattatatgtatttat

SEQ ID NO: 443834 - DNA, 540 bp, Homo sapiens
gtcaatgggtggaaaataaaatttaaaacataaaataaaaatggcaacctattaggatagttacttcagtttgtaagagaactgaatgaagtatatatgttaataacaaactactgtgtaagaaaaaaaatgattccagagacaaagcagacattttataatgattaaaaagtcactacatccataagatatagaaattataagcaaataaaaacctaacaaaagagcccttaaatgcattatgcagaaactgcctgaattaaagagattatgagaaatacaaaatttagcaataatagttggagacttcaacatctgctttcaataataatcaaaattactaggcaaaagataaacaaggacctagatgacttgaacaacaagaccaatgagacctaacagtcatagaaaaatttacccaatagcagtagaataaataytcatctcaatggcacatgaaacatgatccagaatacacaatatgataggccataaaagaacctcaataaatttaaaaaaatagaaattatatgtatttat

SEQ ID NO: 443835 - DNA, 582 bp, Homo sapiens
aaacctaacaaaagagcccttaaatgcattatgcagaaactgcctgaattaaagagattatgagaaatacaaaatttagcaataatagttggagacttcaacatctgctttcaataataatcaaaattactaggcaaaagataaacaaggacctagatgacttgaacaacaagaccaatgagacctaacagtcatagaaaaatttacccaatagcagtagaataaatattcatctcaatggyacatgaaacatgatccagaatacacaatatgataggccataaaagaacctcaataaatttaaaaaaatagaaattatatgtatttattctctgaccatgttacaatgaggttaaaaatcaataacgagaaaatttggaatagtcacaaatatgtgaaaattaaacaacacatttctaaataactaataactcaaagaagaaatcaaagagaaattagaaaaatagttcaagataaatgaaaattaagacactacataataaaatttatgaaatgctgcaacatcactgcttgggggaaagttatagtggtaaatgcctatattaaaaaaagatttagata

SEQ ID NO: 443836 - DNA, 521 bp, Homo sapiens
cagtcctttttattaaaatcggaagaacacagtacgaacaataaaggaagaagcagtttttagaatttttttttttattattctgagctaaacttgcttaacagatacctgcaactcaggaaatacagccagtatctgcctgaagagataccaccgagtaaatgaggaaccagattctactgacaaaggaagactttggagatgacaaagacagaattgggtctgtcagagcagcatgcatggtgaacactaagaatctgagcactaaaaggctaccgagagaaggaattaagatcttcctgaaaacacctgtttttcctcccacactgtgctcacataattcaaagcattkattcttatctcactcatttgtatctattacttcttattatctgtgttgtcaggattttgaggactttgataattctttggcttttaggtcgttttgctcttcttacacctaataaactatgggtcatttttaccctcatgttataccttctcagagcagtgcatgtcct

SEQ ID NO: 443837 - DNA, 606 bp, Homo sapiens
actagaggttgaggtccccaaaaaggcttgaaaagaaaagaatagtagaatgaaaagagtctctgaaatcaatagatctaggtttgtattactgtctgccatttcctaggtgtgaaacaagaagccaatttagttgtgtttctgagccatggtttcttcatcagcaaaatgtggttagtattaatatmcaaattgaaggtcaaagaatgaaatatttgtagaagtgcttcataaactacaaacactaggtacatagtagagatagtttataaaataacagttttgttgttgttgctgttgaaattttggagaggtttatggttttgatgatgtcaacaaagaaagccccaatgtagcaatgctcctattcacacttttttaagttaggcaacacttttgtaataattttcaaggaggatatataaacaaaaacaaaagcaaacaagaaaaccaatcttagtaaaattgccataaacttagaatgggaaaaaaatctgtatggaggtggaagctttgcttttggtcaacaaagatgatatttagacatttcaagatatgatgaataaacaagcaattttaccacgaaattttagtaagacctactgt

SEQ ID NO: 443838 - DNA, 606 bp, Homo sapiens
actagaggttgaggtccccaaaaaggcttgaaaagaaaagaatagtagaatgaaaagagtctctgaaatcaatagatctaggtttgtattactgtctgccatttcctaggtgtgaaacaagaagccaatttagttgtgtttctgagccatggtttcttcatcagcaaaatgtggttagtattaatatacaaattgaaggtcaaagaatgaaatatttgtagaagtgcttcataaactacaaacactaggtacatagtagagatagtttataaaataacagttttgttgttgttgctgttgaaattttggagaggtttatggttttgatgatgtcaacaaagaaagccccaatgtagcaatgctcctattcrcacttttttaagttaggcaacacttttgtaataattttcaaggaggatatataaacaaaaacaaaagcaaacaagaaaaccaatcttagtaaaattgccataaacttagaatgggaaaaaaatctgtatggaggtggaagctttgcttttggtcaacaaagatgatatttagacatttcaagatatgatgaataaacaagcaattttaccacgaaattttagtaagacctactgt

SEQ ID NO: 443839 - DNA, 569 bp, Homo sapiens
ggaagctttgcttttggtcaacaaagatgatatttagacatttcaagatatgatgaataaacaagcaattttaccacgaaattttagtaagacctactgttctgttttcagggaattttccttttgttcacagtataaggagcagaccaagaataagaccacagattgcccaggagtggtggctcacgtcagtaatccaagcagtttgggtagccaaggtgggagggttgcttggrcccaggaatttgagaccagcctgggtaacatagtgagaagctgtctctaaaaaaataaaaataacagaatttgctgggcatggtggtgcacacctttagccccatctacttggaggctgaaatgggagaacggcttgagcctgggaggtcaaggctgcaggaagccatgatcatgccaatgcactccagcctgggtgccagagtaaaagaccctgtctcaaaaaaaataaaaataaaaataaaaaagtaccacagatcctgccacaccaaagtcagaattttacctatgggatcaaagtaggtatttgaaggaaagcttcctaaatatcacct

SEQ ID NO: 443840 - DNA, 567 bp, Homo sapiens
ggtagtcaacagcaaagattccagatggatgttgcaagttaaataacagcaacagatgcaattctaaggttctttgggaaacgaactgaaaagaagagaaacgttaacgtattacttccttcatgccacctaaaagtagtcacatttcataattctcaaactatctacagttactagacccacgaacaaattctagctctgtttaacacacttcaagggcttacagtgctcttgagataaaatacagaawccttaacatgataaaccacagcccacctgatctggctcttgttcatctctccagcctcctttgggcttgtcctacctgcattctgtccacatgggccatcattcatgttctcatatgtgtccacatacatacaatatgtggtcttcatggttcaagggacttcatattctttaatttccttaaattttactaccctgctctccctaattttgctaattaactcctactcacttgctagatcctagtatatatatatatatttttttttattttccaggaaacacttcctgtccacctccattcctagactaagttag

SEQ ID NO: 443841 - DNA, 507 bp, Homo sapiens
ttgctagatcctagtatatatatatatatttttttttattttccaggaaacacttcctgtccacctccattcctagactaagttagttctcctttctcatcctcaaactttctcttcatggcagttttaattaaacacatattcacacaagtaaatatgtcttcccaactaaagtgtaaactctaaaagaacaggaagattgtctcttttgtgcactgytgtatctctggaactcagagcagtgagtggtatgcagtgcttatgctacatatttttgttgaataaatgactcgtatgttgcttaaaacaggcacatcatatcaacatgtgaggcactgggaatgactaaatggaaactactcaaattcagagatctctatgtagctttactaaacatttggtctattaccacttacctccgtaacgtaaatttttaaaaaaaaattcaattgaaaactaatttttgcacttctttaatcaataaaaatgttctaagggtcttacaag

SEQ ID NO: 443842 - DNA, 586 bp, Homo sapiens
tatgtcaaaataaacctccaaaactaaaacgcaaagagaaaaaaagaataaaaaaatggaaaaaaaaattcaagaaatgtgaaaccaccataaaatgtataagatacacattatgggaatatgagaagtagaagatagaaaaagacagaagaaatatttgaagcaataatgactgagaattttactaaattaatgtcagacacattaatgccattaaattaatgttaaccacagatccaggaaggccagggaacaggaagcagaaaacaaatgccaaaaaatctacatctatgcgtatcaatattaaaaatggagaaactaaaagataaacttgaaagaaatgggaaaatgtcttatagagagagaagtaaagataataattacatcagatgatttgtcctcagaaactatgmaagcaaaaagagaataaagtaaaatatttgaagtgttaaaaaaaaactcacctagaattgtgtattcctgaaaattatcctttgaaaatgaagaacaaataaagtcttttttcagacaaacaaaaattgagagaacttacttgtcagtagatttgtcttgtaagaaatgttaa

SEQ ID NO: 443843 - DNA, 551 bp, Homo sapiens
ggaaactgaatcattgggtcagtttcccccatcctgttcctgtgataatgagtaagtctcatgagatccgatggttttaaaagcatctagcatttcccctgcttgcactgattcgctttcctgctgccctgtgaagaatgtaccttctgccatgaatgtaagtttttctgaggctcccccagtcatgaagaattgtgagtcaattaaacctcttttctttataaattacccactgtcgggtatttcttcaaagcagcctgagaacagatcaatacacttgtctacacaaaaccaacttaaaatatgaagacacatatagattaaaagggaaagggagggagaaaaatataacatgctaacactaatcaaaaggaaagtggagyagttatattaattttggaaagagcaaacttcagaataaggaaagttatcagaaataaagaggggcattacccagtgataaatgggttaattctccaagaagacataacagtcctcagtgagtatttgtctaacagcaaagcatcaaaatacatcaggcaaaaactgat

SEQ ID NO: 443844 - DNA, 574 bp, Homo sapiens
tttggcagtttctcacagaactaaatgtagtcttggcaattttgaagaatacaatacattattaataaactatagccaccatgtattacaatagatctctcaaacttatttcttctaccataataaaatgataaatatgtgagataatgcatatgttaattagctagatttagtggtccataatgtatacatacttaataatgtcatgtcgtatgtgataaatatgttatttgtcaaataaaacaaataaataaaaattaaaaaaacacaaaaactaaacagagatttaccatataatttagcaatgatggcttttggtatttactcaagttgaaaaacaatatgtccacacaaaaacctgaacatggacgtttataatagctttatccataattttccaatatttggaggacactaagatgtccttttgtaggtgaatgaataaataaactgtggtacatccaggtaatagaatattattcagcactcaaaagataytagctatcaagccacgagaagatatcgaagaaccttaaatacatattattaagtcaatctgaaaaggcttcctact

SEQ ID NO: 443845 - DNA, 594 bp, Homo sapiens
gttacaaaagaaagaaaagaagaattaaagatagacttaggcatcttgatgtcctgtccattgtccattctattactttttacagctgctcacctaacattcaatttcatttaaatgtggcatgacattcagtaacaaattgcatgttgtcacattacctttccatgacagaggctgacactgtctgctctggttgagtatcttgtgccccaggccactctctggaatctagtagctgcagccttcagctattaacttccttaggattcatcctactttttttagcagaggtcatgctatttacgaggtaacctctgccagttactgagaaagtgacagctaagggtaggctttatttggctggtccccagccaatgactaaggaattattgagctccagccaatgaccaaataaggttmtagctaatttcacccaatatagaattcctctaacaaataaccttcactctacagtatcctgttaggttgggtgactcttggttaggctgtcatgatggtctgaaccttcccttgccaaaaccgccccttcccacattttctctgcatagctaatactccttaataaaaatgtta

SEQ ID NO: 443846 - DNA, 558 bp, Homo sapiens
aaccactccttttctctcttttcctttgcagagattacaggcttttcatggcatattttccccaaaggacctaggaaagaaaatcttagactcatctcaacacagaggttcatgcagtatctaccaactacgaagagctcatgagaaacttataacctctttgataactctggtctaattggtgtaatcaggaagcaaataaattattacaatgcagtgaactgaaagctagaaatgcataaaagataatatttagtacagagtggaaaaaagttaaagaggtcaagaatggattcccaaattagtaatatttaacatgaggttcaagattatggcaagttcaattaaatgaagatgattctatatatttataggagtgaaacgcacmtgagtaaaactgagataaaactgtagagtcaaacaaaacccagataataaatatcctttaaacaatgacaaaaatttcaaatttatgccactgaattttaagcaaggtagtggatcaaatttgtgctaaagaaaaaaaaactaactgtaatgtaaatatacaatgtatta

SEQ ID NO: 443847 - DNA, 567 bp, Homo sapiens
tcaaaatttggtatctgaacattgacatataaaaagaaatttattaggtggaaaagtcagaaatattaatcacagtagcaaatgtcatgcacgtccatgtgaagagaccaccaaacatgctttgtgtgagcaacaaggctgtttatttcatgtgggtgcaggcaagctgagtccgaaaaatgagtcagtgaagggagacaggggtggggctgttttataggattygggtgggtagtggaaaattacagtcaaaggggatttttctcttgcaggcaggggcgggggtcacaaggtgctcagtgggggagcttctgagccaggagaaggaatttcacaaggttaatcactcagttaaggtggggataactaaaaaggagtgcataaaaataatgttgtccaagttggcatcagagctggagagttttaagaggtttagaagcctggccgtcaatacctacaacagttatggaggcaaatgaaacaggcctttgaaaagaaggtaatgtggagttggtagcctccatattgattaagaaggggacctacttaccctctactgtaagagtt

SEQ ID NO: 443848 - DNA, 567 bp, Homo sapiens
tcaaaatttggtatctgaacattgacatataaaaagaaatttattaggtggaaaagtcagaaatattaatcacagtagcaaatgtcatgcacgtccatgtgaagagaccaccaaacatgctttgtgtgagcaacaaggctgtttatttcatgtgggtgcaggcaagctgagtccgaaaaatgagtcagtgaagggagacaggggtggggctgttttataggatttgggtgggtagtggaaaattacagtcaaaggggatttttctcttgcaggcaggggcgggggtcacaaggtgctcagtgggggagcttctgagccaggagaaggaatttcacaaggttaatcactcagttaaggtggggataactaaaaaggagtgcataaaaawaatgttgtccaagttggcatcagagctggagagttttaagaggtttagaagcctggccgtcaatacctacaacagttatggaggcaaatgaaacaggcctttgaaaagaaggtaatgtggagttggtagcctccatattgattaagaaggggacctacttaccctctactgtaagagtt

SEQ ID NO: 443849 - DNA, 560 bp, Homo sapiens
  misc_feature (1)...(560): n = A,T,C or G
ggcagcatcagtcttcagccactaagccgagaagatctgggaaggagtcagtcagagagccttgggccagggttccaggggctctgggagtggctgcyaggtgagttggacagtccgatttccagtggggtcctgcacagacgggactcggcttaggaggaatcccagcccccgcccattccttggtccagtggccagatttcaggcacttccccccccaaaaagggagaggaagtccagncagnaagcctgaccgctgtggcttaggcattttgaagttcttgtgtgctggagatgtggctggggtttctctcacagcagaggcaagtaattgcgactcctctctattattgtacaccttgaaggcgaggttaagtcctgtgtggggtttccgggttggaatctaatttttggagctttatttaatgtcgggagcagattgagtaataaaatgcatatggagaataagatggctttcttacctttcagggtctagggttgtaaagtttctcagggttgctgccaaatgagccatgaactgggctgggtttttatatttg

SEQ ID NO: 443850 - DNA, 560 bp, Homo sapiens
  misc_feature (1)...(560): n = A,T,C or G
ggcagcatcagtcttcagccactaagccgagaagatctgggaaggagtcagtcagagagccttgggccagggttccaggggctctgggagtggctgctaggtgagttggacagtccgatttccagtggggtcctgcacagacgggactcggcttaggaggaatcccagcccccgcccattccttggtccagtggccagatttcaggcacttccccccccaaaaagggagaggaagtccagncagnaagcctgaccgctgtggcttaggcattttgaagttcttgtgtgctggagatgtggctggggtttctctcacagcagaggcaartaattgcgactcctctctattattgtacaccttgaaggcgaggttaagtcctgtgtggggtttccgggttggaatctaatttttggagctttatttaatgtcgggagcagattgagtaataaaatgcatatggagaataagatggctttcttacctttcagggtctagggttgtaaagtttctcagggttgctgccaaatgagccatgaactgggctgggtttttatatttg

SEQ ID NO: 443851 - DNA, 560 bp, Homo sapiens
  misc_feature (1)...(560): n = A,T,C or G
ggcagcatcagtcttcagccactaagccgagaagatctgggaaggagtcagtcagagagccttgggccagggttccaggggctctgggagtggctgctaggtgagttggacagtccgatttccagtggggtcctgcacagacgggactcggcttaggaggaatcccagcccccgcccattccttggtccagtggccagatttcaggcacttccccccccaaaaagggagaggaagtccagncagnaagcctgaccgctgtggcttaggcattttgaagttcttgtgtgctggagatgtggctggggtttctctcacagcagaggcaagtaattgmgactcctctctattattgtacaccttgaaggcgaggttaagtcctgtgtggggtttccgggttggaatctaatttttggagctttatttaatgtcgggagcagattgagtaataaaatgcatatggagaataagatggctttcttacctttcagggtctagggttgtaaagtttctcagggttgctgccaaatgagccatgaactgggctgggtttttatatttg

SEQ ID NO: 443852 - DNA, 551 bp, Homo sapiens
tattctcagtgaagtaactcaggaatggaaaaccaaatacgtatgttctcasttataagtgggagctaagctatgggtacacaaagggatacagagtgatataatagactggagattcagaaggtacagggtagggggttgagggatacatattgggtgtagcttacaattctcaggtgacaggtgcactaaaatgtcagacttcaccactatgcaattcattcatgtaaccaaaaaccacatactccaaaggcattgaaataaaaaaaatatgtattttgcaaaaacagaatctaggttttatagaacttcttgactgactgggtgcagagggtaattctgaggtggtttctttctagatttctggagtggccaactggatagtgattgtaatatttcttgagatagggaatacaagtagaggagaagcaggtttgttaaggaagataatgagttaagttttcttgagtcagttaaattggatgagcctctaggcctgtgctttccaatatggcattcccttgccagatgtggttatttaaacttaaaat

SEQ ID NO: 443853 - DNA, 619 bp, Homo sapiens
  misc_feature (1)...(619): n = A,T,C or G
ggggaatgtattgcccacacgaatgttttttttaataggcatatttcctgctttttcagcacataawgatggatgtggatcantgtancgngagaacattttttgggggaatttantagttgcatgaattgaatgtggaagcttagtgggagggaggctttgttagaacttcatgcacttatgtatactttacatttttcataatgggagggtggaaaatgaaacccatttcagtggaaatctgatacttatggtagcacaattcccaactaatagtaaagtaaaactaaaattgtttcctctgttttaaagtttggtctacagataaatgtgactgccagtttataaatagctaatttaacaaataaattatcttcgctgaaagacttgcattctttttttatcctttttattcttttaaatttatcctatttttccaccagaagcaaatataatgtaaatgtcaatgacttcagtgcatgcctttgcatagtcagttcttaaccccctgcaagtgtccctgatgtattttttatatgaacatctcctcttcttctggaagaggagtaattctattactagaaatagggtaattctactgtaattataacagagtttt

SEQ ID NO: 443854 - DNA, 627 bp, Homo sapiens
cagtcaatgctcctggcagaggtgtaggaaggaggatacctcttatcttcatgacaggttttctctttaagatgctaaactgaattgccttcttccaggatttttaatagacagatagctgatgtttcaggggaaattaaagtcaattggttttggatataccataacttcagctggacatgcttttattttttcttcttatgaatttaataaaaaactatcagcaaacaaatggctatcatttgcaatttaagcagtgagaatttcaaacatctgattttctattgctgtgtacattgggattcatggaatgaattagccttaggagtctggttacctactggatttgcacattgcagttgctcgagcaatggaggagtagacamaatttctaagttctaatgttgactctgtgatccatatgacttttgctatgtaagtattatactatataccacagtttcctcatgtggaaaatggactctatcatggccactatgtagagaccaaatgtattaaatgacataaacatatgaaataactttgtagacccaaacactctagtacctaaatggctacttaggtaactgtgctgatttttaagctcttgtctcctagcttcaaatc

SEQ ID NO: 443855 - DNA, 540 bp, Homo sapiens
tggacacaggaaggggaacatcacacagggggcctgtcgtggggtgtgggcaggggggagggatagcattaggagatatagctaatgtaaatgacgagttaatgggtgcagcacaccaatatggcacatgtatacatatgtaacaaacctgcacattgtgcacatgtaccctagaacttaaagtataataaaaaaaataaaaaataaattccaaattttgtgataccatctgtttagaaatacatcccaattcatgcacatagcacatccctaactaatattgcaatagttactattttctagagtgttcagmccattttcttcctcagctttccctggattctgtgtgtttgtgttgtgtgtacaacacatttcatacatacacactcacatacataaatatttggaaatgtatatacagctattcaaagtgtaaaactcacagagcagtgatgtgtgtctctgataacattttgttccctgtagccaatatactgttagacactgcttacatgaatacttaggagtaacaaaccataa

SEQ ID NO: 443856 - DNA, 617 bp, Homo sapiens
tgattgtgagtgtccctgtttcattacawtgaacaatatgactgcttttgagtgaaagaggtctggtcctgaggcactcataggtgtataaacattgggaggaatgaaagtaaaggaattataataatgccctgagaggaaaacacaggagcttaggaaacatataggcatgatggtaactattatcattgtcttaaaattaatttggtgaagagtttctcctacaaactagagtagacaggtgaatacacaaggaagaagaattagaaacagaagcttcccaacttttgtaaatattctgagtcaaacttaaatttcagcagtagatgacagcacaatgacctaaatttaacagcctagttcaagacccaatgagttcaggaggaaatggtctgaaaaagggagagtcagactgggtccaggtagtctgggtgacttgaaacatgtctcacctcccgcaggatgtcttctctctccacttcatccccaagtgcctatggtcttttctctcttggagtttaaccactctgtcaattgtcctcacaagatcttgaggtttggtagcagtggatagctacaatggatgaaattatttcactgggaactaatgaaatgta

SEQ ID NO: 443857 - DNA, 552 bp, Homo sapiens
gaattagaaacagaagcttcccaacttttgtaaatattctgagtcaaacttaaatttcagcagtagatgacagcacaatgacctaaatttaacagcctagttcaagacccaatgagttcaggaggaaatggtctgaaaaagggagagtcagactgggtccaggtagtctgggtgacttgaaacatgtctcacctcccgcaggatgtcttctctctccacttcatccccaagtgcctatggtcttttctctcttggrgtttaaccactctgtcaattgtcctcacaagatcttgaggtttggtagcagtggatagctacaatggatgaaattatttcactgggaactaatgaaatgtaaactttggtctctaaatttctatttgcatttataaaattgtgcttaaattgcacagtctgtttgggcaaggtggctcatgcctgtaaacccggcacttgggaggccaaggtgagaggattgcttgagcccaggagtttgagaacagcctgggctctatagtgagaccttgttaccacataaaaattaaaacatta

SEQ ID NO: 443858 - DNA, 609 bp, Homo sapiens
attcaaatatgagagattattagaagcacacgttaaaattctttagagaagctgtaaaaataatatctatacaattccataaatcatggtaaaactactggaccctactctcaggggaaacaattaggtagaaaaattagaagatgtagaaattctgaaagtcagttgaagaacaaacaggtgattttccagccaaggttactgggtgttttaaacaggaagtaaagcaaaatgttttaaattactggccttgttgtaasttagcagtcagaacaatctaaaacaggagttgttttttgttgtttttgttgttgtttggttcattggttggttggttggttggttgatttttgtttaaaataaatagttgataaaaggagctaacaaattgtgtaaagccattaagagcaccaagatagtaaactgaaggtgaaaaccatcagtattaaatggagagatgaggcaagagcaagcggcttcctgagtgctcagtgagatgctgtggttattaatgctggaagcggaatacttcaaaaatgtttcaacttaacaaaatgtgtgaccgtggattcaaaagggctgcctgttgcatgccagttattgattcct

SEQ ID NO: 443859 - DNA, 609 bp, Homo sapiens
attcaaatatgagagattattagaagcacacgttaaaattctttagagaagctgtaaaaataatatctatacaattccataaatcatggtaaaactactggaccctactctcaggggaaacaattaggtagaaaaattagaagatgtagaaattctgaaagtcagttgaagaacaaacaggtgattttccagccaaggttactgggtgttttaaacaggaagtaaagcaaaatgttttaaattactggccttgttgtaacttagcagtcagaacaatctaaaacaggagttgttttttgttgtttttgttgttgtttggttcattggttggttggttggttggttgatttttgtttaaaataaatagttgataaaaggagctaacaaattgtgtaaagccattaagagcaccaagatagtaaactgaaggtgaaaaccatcagtattaaatggagagatgaggcaagagcaagcggcttcctgagtgctcagtgagatgctgtggttattaatgctggmagcggaatacttcaaaaatgtttcaacttaacaaaatgtgtgaccgtggattcaaaagggctgcctgttgcatgccagttattgattcct

SEQ ID NO: 443860 - DNA, 603 bp, Homo sapiens
cacacgcacacacacacacacaacaacaacaacaactaagtaaatgaatggggaaggaaactataattaaaccaaaaataaaattctaagccccgcaatcaattgtatraacctcctctcttgaccaagaagatgccaaagaaacctgaaaaattagttcgggccatgactagaaggggtgataagaagtgcctcactataccctcctccctttggaatttagacgtaactgaccaacattaacgttaaaatagatgtcataagactgacaaaatagactcttcataacaatcagatactaacctccaacctgagtgtgttatacagtcaaatgacagatagcaggccctgaaggaaatcaaagccttttaccccaaaatatacttctttgataatgtttggaattgccctgcaaagccatctcttgtgggtaacatttgcattctgtagattatctccttcccttactgggtttaagaaattaaaatctttatgccaaagtatatatctttgacatattttggaatggcccctcaatgccatcttttgtgggggaaatttgcattctgttgatgatctccttcccttactaggttaaggaaa

SEQ ID NO: 443861 - DNA, 551 bp, Homo sapiens
tgactacttttgaacctgaagaaatggcacacctttcttttcaaaaacccagcattcctactcttctggaagacaatgcagaggyctcccacaagacaacttgtgtaccctcaggactcactccaatctccactcttggccactaggtctataattagagtaataaaatcaagatgatgaccagcattaagatgaatttaagaaatcaggatcaagcctcattttatcctgaatactgctccaaggctctgaaaccacagggccagtgtctttttatttttaatttttaatttcagagacagagtctcactcactctgtcacccagtctggcgtacagtggtgccatcatggcttactgcagcctcgatcttctgggcttaagccatcatcctgcctcaccctcctgagtagttgggacaacaggtgcatgccaccatgctcggctactttttttattttttgtagagatgaagtctaactatgttgcgcaggctggttctgggattacaggtgtgaaccactgcactcagaccagtgtcttcttatacac

SEQ ID NO: 443862 - DNA, 551 bp, Homo sapiens
tgactacttttgaacctgaagaaatggcacacctttcttttcaaaaacccagcattcctactcttctggaagacaatgcagaggcctcccacaagacaacttgtgtaccctcaggactcactccaatctccactcttggccactaggtctataattagagtaataaaatcaagatgatgaccagcattaagatgaatttaagaaatcaggatcaagcctcattttatcctgaatactgctccaaggctctgaaaccacagggccagtgtctttttatttttaatttttaatttcagagacagagtctcactcactctgtcacccagtctgrcgtacagtggtgccatcatggcttactgcagcctcgatcttctgggcttaagccatcatcctgcctcaccctcctgagtagttgggacaacaggtgcatgccaccatgctcggctactttttttattttttgtagagatgaagtctaactatgttgcgcaggctggttctgggattacaggtgtgaaccactgcactcagaccagtgtcttcttatacac

SEQ ID NO: 443863 - DNA, 544 bp, Homo sapiens
tgttctttaatattctccactgcaattcttcttgctgcgtatttgttctcgctcctgctaagagctttytgatgcacacattcacagggtccaaaagtctgaaaggagggtctgggcccctggctgctgagagtgtatgttgtactttcacataactcttccactcttattttttttctttccttccttccttcctttcttcctttctccttgccttccttcctttctttgtttctgttgatcacattacactagacgtttaatgatagaatattgaatatatcacatgactttttttattgatgagtgattttcacattatcatcacagatttgtaagaacagctgccagtatattttatcagatgaaactaaaattaaccaactgttttattgccatacaaagcccatatatgtataatatcaattagatgttagcacaaagatgacaaaaacaagtgtgcttatttctgctgtttttgaaaaacaaacaaaattctgagataaaatttgccagtttgactgtaaagggaatatggcctatg

SEQ ID NO: 443864 - DNA, 596 bp, Homo sapiens
catattgtggagacagacattggtccccatcgkgtaggaaactagcttcttttcatcctctgtacctttccaatagcaggtggtcttctaagagtttatagaacactgaaatcttttgataaatattcttttagtatgcttttctcaccactgtgatttggggaatgcattaaagaataaattgatattttcaattttgactcaccaggtatttctggaatgcaggtaaggtgatttagcataagccaatcctacttgaataagcctgatatgattgttttagaaacaactaaatagagtttgggtcatatgcataacaattcttatgccaaaattttaaaggaaatttatctgaaaacctttgaaagccacatttatgagagccaatttattataatcaattctcccatggaacattctctacttcttctcaactcacatgaaatgtgttggaaatgtcaaatttcccaatgaaaggttgaataaagtgtatacaaatatccataatacacccacaagaaatactaacataaacagcagcataaatcttgattttttctgcactgtgacaccttaggcctgagaatgctgctagc

SEQ ID NO: 443865 - DNA, 596 bp, Homo sapiens
catattgtggagacagacattggtccccatcgggtaggaaactagcttcttttcatcctctgtacctttccaatagcaggtggtcttctaagagtttatagaacactgaaatcttttgataaatattcttttagtatgcttttctcaccactgtgatttggggaatgcattaaagaataaattgatattttcaatttygactcaccaggtatttctggaatgcaggtaaggtgatttagcataagccaatcctacttgaataagcctgatatgattgttttagaaacaactaaatagagtttgggtcatatgcataacaattcttatgccaaaattttaaaggaaatttatctgaaaacctttgaaagccacatttatgagagccaatttattataatcaattctcccatggaacattctctacttcttctcaactcacatgaaatgtgttggaaatgtcaaatttcccaatgaaaggttgaataaagtgtatacaaatatccataatacacccacaagaaatactaacataaacagcagcataaatcttgattttttctgcactgtgacaccttaggcctgagaatgctgctagc

SEQ ID NO: 443866 - DNA, 599 bp, Homo sapiens
aagcatgcttttaaagtatagccctgctgacatctattttgaatatatacacattctttcttaccaaaccaaatgacagtcatttctctaggataaaaacatttctcccactttccccatggaggtgattttgagtagcaaaaaagctacaggagtcataggataagaatttcaagagctaaaaattaatgtggattcttaaggtttctgtgctttttaatgtttggcaaatatttgagagtgcctgcagamctctaaaaagacattaagaaaaaactttaagagatgtaatgatatcccacataaacagggaaacttactgaatactgtagcaaagaaacactgacccaaggaactgaaatatattacttactaattaaattaaatattattataaatagatccaacttcttcacagaatcatccaaagtgagttatcctaagaccattaaggcaagacaatataggatagtggttaaaacaccagctctagaatgaaaccttcagttaaggtcttagcactgccattaattgtttatatattaagcaggttatttgacttatctaagtcaaccctttctcatttgcaaaataagaaa

SEQ ID NO: 443867 - DNA, 595 bp, Homo sapiens
gaatggtggctcacgcctgtaatcccagaactttgggaggccgaggtaggcagataccaaggtccggagttcgagacccacctggccaatatggtgaaaccctgtctctactaaaaaaatacaaaaattagctgggcgtgctggcaggcacctgtagtctcaactaccagggaggctgaggcaggagaattgcttgaacctaggaggcagrggttgccgtgagctgagatcatgccactgcactccagcttgggtgacagagtgagactctgtttaaaaaaaataataataatacatatggtacatgttttaatttccatgtgaacaaggagcatggcttaagtttcttttgtgctgtcatggtgcctagcaaagtcacagtacatatggcacctatttgatgtataactgctagaagatgagatttcagggctgtataggcttatacttgaagggagaaggagttttgggacaagcctactactccaaccacccactggcataccacagctgaagatttctgtttttaaaattattttttttaaacttttgttataggttagagggtacaagtgaaggtttgttacataggtaa

SEQ ID NO: 443868 - DNA, 595 bp, Homo sapiens
gaatggtggctcacgcctgtaatcccagaactttgggaggccgaggtaggcagataccaaggtccggagttcgagacccacctggccaatatggtgaaaccctgtctctactaaaaaaatacaaaaattagctgggcgtgctggcaggcacctgtagtctcaactaccagggaggctgaggcaggagaattgcttgaacctaggaggcagaggttgccgtgagctgagatcatgccactgcactccagcttgggtgacagagtgagactctgtttaaaaawaataataataatacatatggtacatgttttaatttccatgtgaacaaggagcatggcttaagtttcttttgtgctgtcatggtgcctagcaaagtcacagtacatatggcacctatttgatgtataactgctagaagatgagatttcagggctgtataggcttatacttgaagggagaaggagttttgggacaagcctactactccaaccacccactggcataccacagctgaagatttctgtttttaaaattattttttttaaacttttgttataggttagagggtacaagtgaaggtttgttacataggtaa

SEQ ID NO: 443869 - DNA, 586 bp, Homo sapiens
ttaatcagagcaagatgattatcctttacacctataaacactccaggatcagtcttgcattcaaatgaaacacagttggagtgcatattatgaaggacaaagaaggcctggtctggcagtggtttttcacacttatggagctgaggaaacaagagagaaagcaatccatatgtgaatgggaagttcagagtcaactttacctgcctgtattggaaactaaaggggamtacttatttatgacttgatatttctagcaagcttgcttagtgagttgtggagggaagagggggagaagtgagtagagggccagaggggtagtgggtggatttgatttgattcactgatagtcaacatagagaggcagtatggattagggtgattggatctggatgcaacagttctggatttgtacccttcttttgacatgtactatctctgagatcttggggatgttgctttatctctcaagcctcattttttttagtctaaccagttttctagatcagtcaatcctcaaaatatctacagacatgagtaaatataaatgattattattttgaggcactaagttttgggatggtttgtt

SEQ ID NO: 443870 - DNA, 612 bp, Homo sapiens
attttctgtttattattttttttcattcagctaagaaatttatatttcaagatctcttcatttgaagtcttcagaattagtgttttttatatctgtataaaacctctctcattgctccatttaaatagattttcatgtgtaagacttcataggggtaaagaaggcagtcacaaatgcaaggatcaggaaagtgtcacctataggatcctccatcagtttttctacctatcaaggcttctgtgagactggaggtataggctatctttgaaatagaggaagagtttgggaaccactgtaacaagtcaatcactgtgaatgcactgggaacatgagttagaactattaaagatggctgagtttacccaaacagtggacttggaaaaaaaaaccacaccaaactattatctcataagaaataactacttcctttcagacratgtagttaccattcctctgaaacactagaggaagatggatttaaaaactttctaagagataagaaaatataactagtcattggtccactgtgaaataagatgaaaatcagataattaatctagtgcccagaagaacctgccttatcttgggaagacagaaatgtatccaaaaatg

SEQ ID NO: 443871 - DNA, 529 bp, Homo sapiens
tttttataactataacacagcttgcattcatttgtgtgttgttcttgttccatttaacccaattaatttatcccakatactacagaatgacttttaaaatttcacaacagattattctatattttacataatattttacttacaaattctccaactgttgtgtaatatggtggtttcaaatttttctgaaacataatttgggtaaggggcatgctgagtctacctcggggaagaaatgaaggagaccttgggcatgggcagggccccagagactgtttttaaaactctatcaaataaaggaagattaaggctaagtttagagcctggaggtagtaggacagaaggtcctggccagaacctcttgctgatgttagagggaagagatttgaggtcctcctcagctcctggcactgcattagaggagagtgcacacaagatcactcctcttccgtcatccacttcccaaagaatttcctgttgactcctccctaggagcagccacaaacttaggttgaccagatggctgctt

SEQ ID NO: 443872 - DNA, 529 bp, Homo sapiens
tttttataactataacacagcttgcattcatttgtgtgttgttcttgttccatttaacccaattaatttatcccagatactacagaatgacttttaaaatttcacaacagattattctatattttacataatattttacttacaaattctccaactgttgtgtaatatggtggtttcaaatttttctgaaacataatttgggtaaggggcatgctgagtctacctcggggaagaaatgaaggagacyttgggcatgggcagggccccagagactgtttttaaaactctatcaaataaaggaagattaaggctaagtttagagcctggaggtagtaggacagaaggtcctggccagaacctcttgctgatgttagagggaagagatttgaggtcctcctcagctcctggcactgcattagaggagagtgcacacaagatcactcctcttccgtcatccacttcccaaagaatttcctgttgactcctccctaggagcagccacaaacttaggttgaccagatggctgctt

SEQ ID NO: 443873 - DNA, 501 bp, Homo sapiens
atctgacaggcttaatttagctagatgtcattcaaacttttctcatgggcagaaacctgttctcaaaataaaatcatacataaaatgtctgtatatgaacatatgaaagttgagccactttcacggacactgctcagccctctccagacctgtgcctctgcctcagtactcaagggttctgcaaaagagaatgtgaaaaccacacatctgtgtgctagttcatgtccaagaaagtgcatgttctaagaccagctgggagggatgatagatgtggggctataccaaagaagcgctcctccttggagcgtggctggactgagcatgatgagaaatgaggcaggagaagacccagtcaagggtctgtaatctgactttgggcacagcttctgcgccagtctagggtcatgtttttcctccagatctgctattgtggagccagcctygggcaacttcatcctcactgtgagacctgccctactcttgcccactatggtagtttgc

SEQ ID NO: 443874 - DNA, 514 bp, Homo sapiens
tttgtcaaaaaatagctgaagaagaatgctatagatatggatcttaagggctgaactttctggattcttactagtatattatgttaatgcacaktcacaatttttctctttgtcaactttaacatatattcatcagctaacaaatttagctgtagtactcgtgaggtcaaaaacttgaggcttcttattagtagttgtaattgtggttgttgctttttaaaagactttatttttaaagttttagatttacaggaaatgttactgttttaacctacacatggtccttgtgttaatggcacaggatccttttttgttgttgccgttatggatgtaactaaatattcaatccattcaagcctaagaatatcgatttctctaagactttaaaaacatcttttttgtttttaacgccccttttatttacccttcttggcttccttaacagtaagaagccagagaagctaaattgtctgcctgattgcttaaagcagtgcttgccaaacttcactgaata

SEQ ID NO: 443875 - DNA, 514 bp, Homo sapiens
tttgtcaaaaaatagctgaagaagaatgctatagatatggatcttaagggctgaactttctggattcttactagtatattatgttaatgcacattcacaatttttctctttgtcaactttaacatatattcatcagctaacaaatttagctgtagtactcgtgaggtcaaaaacttgaggcttcttattagtagttgtaattgtggttgttgctttttaaaagactttatttttaaagttttagatttacaggaaatgttactgttttaacctacacatggtccttgtgttaatggcacaggatccttttttgttgttgccgttatggatgtaactaaatattcaatccattcaagcctaagaatatcgatytctctaagactttaaaaacatcttttttgtttttaacgccccttttatttacccttcttggcttccttaacagtaagaagccagagaagctaaattgtctgcctgattgcttaaagcagtgcttgccaaacttcactgaata

SEQ ID NO: 443876 - DNA, 562 bp, Homo sapiens
tttgtgaaaccctagtgaagtccaagacatcagaggatcatttgcagagggaagacctacacataggtggctgatccaccaagcttgttcctgggttcaagccagaaaatgacccagtctcccaaggggtttggatacaaccccacttggccttgatcctgcaaccaaagccatctgccraggagtcaagaaggaattgtgcacactaatagaaaggctcatctacccactgacagtcgtgttggcagtcaatctgaacgttgctctctggttctgctccagccccctcaggtgaggtcccagctcagagctgcttacataaggatccagagggagacttgcccataacttgcagcccagtagtctgagcctctcagacaggctagagcttgtaaacctctgttccacaacagataccaaggaggcccagtctcagctctggcctctcacactgcaaccaaggaactattccatctttacagaaacttgctgggagaatgtgtctctctgagccaatgagacagggctctccaggttctgccccacagcagatgtcaagggg

SEQ ID NO: 443877 - DNA, 483 bp, Homo sapiens
atagacacaagtgagctataaatagtgccctgtcctcaaaggtttcagtggcaggcccacagggctgcttatcccagctcacagccagcacaagttgtggggccctttctcaaagtttctaacttctaataaatccaagcacttccctctgctatccccagccccaggagtggtagctgcttcctgcagttgctatctccatgttactttcattgttgtttttttgtttgtttgtttkttaatttaatcctttcagttacctagttaccaaccattccttaaagtctctatgttcaagtaactggtgtagcttctgtttcctgcttgcactctgatagagtatatataaatctattttcaagaaagctttaattttttcaaatttgtatactaaagggtttattttaaggcttaaacaataattgtagggaagtcttctagactactccaaaataaccaattaaaaaaatacagcaacttcca

SEQ ID NO: 443878 - DNA, 518 bp, Homo sapiens
tctggcatttggcatcacttggatgtgagctggcagcaatgctcaggtggttatatagaaaatgataagatcctgtggatccctcagaatgggacaattattaggtgggaatggtgggttctctagagcagaaaggcaaatgggagctccctacaactccccacagctcccagagtggaggcagagagggggttcccctcagctgccagccctgctcggtcttggtgggagaggaagtatgacacasggttctgagctcctgtgtaagaagcagctttccctagagccctgggttcctcaggcttctgtctgcccctagttgagctctggaaagttcccagaaccctatcatcagtccacagctcttctctttgcatatcctttctgctgcctctttaatcgcctcctctgacacactgaggacttaagagttgtgtctccaagatgctccagtgttggttattctattgcctggaggacatctccagccgaacatccttaaggagcctcaaattcaa

SEQ ID NO: 443879 - DNA, 358 bp, Homo sapiens
gatgagcccccggggaagatgctgacagtgttttctgggatgctctggctgcctataatttggtgtaagtcagagagtctatacagttgtccagagaagaactctctctgatggtcagtgggtcttttctattctgaaaccatgtattcctgtggttccagaagctgaaataaagcagttgtatcatgagtcaccactccctcagcagaccatgaatgagctgcttggcacaagctccaccagtgggaagcctgaccactgaractggccttgctgcccatctgtgtcctgttggaaaccttggaccaaggctgcagcaatttgggaatttttaaaaagtactctccaccgatttcaa

SEQ ID NO: 443880 - DNA, 572 bp, Homo sapiens
tgggcagagacaaaacacagcaatataagtgaagagatacagggccaaacaggctgttaggtctacgagaagcatgaacacagttaaacatcaacatataaaattaatcatccatttcaactcctctttaagtgaggtccttaattctggcagttttcaagaggagagaccaataaagactgaagtctgagacctggatggagagtgtatatatayacacacacacacacacacacacacacacacacacacacagacacacacacacacacgtatatatataattatatatatatatatacacacacacacatatatataattttatatatatatatatatatatggaatctggattaggcaggatcccatagggaataagacacggggtgttagagacagttcacagggagaaaaatcgtgtgctggccagaccttttggttgcaagcaagagtatctaactcacttggggaggaaaaaagataatttttataattggtagaaacttgcagaggtagttttggagcataggcaagattcaaagaacatctggaagccaggcagcaatagg

SEQ ID NO: 443881 - DNA, 370 bp, Homo sapiens
ttgtctaatttcctaaaagtgcttwttctagtgattttcccccttctggtcatgacaaatgaggctctttgtgagctggtatccaagggttttatttgtttgttttcctctgtttttgctcacacttctcagtttgaagttttccttacaagacttttagaattgtttaaatgacaccagatttggtaatacttacagaaaaaccagtatagatgggtttaaactccatagtgctaaattttgctaatttaacaaacgattattgagcgtgtattacatggcaacttattctgtatatagaaaggaaaagagagagctcttgggttcaaaaccttatattaaaataaaagaaaatatattgtgggaacta

SEQ ID NO: 443882 - DNA, 539 bp, Homo sapiens
gaaaactataaaactgcatcaaagatcataagagagaataaataaaagttccacattgttcttgtgtgaatatttattctggtgatgctgttattatctgagtaaatctgtatgttagacacaatctcaattaacattttttaaataaattatttaaagttcaactaaatataaatattgacatagcaaaaaaattcggaaagtggcagcaattggaaagaacactgagctgccagatatttaaatgcaataaataaaagatggccaaaaagcatttgaatagatgctgtactatactaataatcaaagaaacacacattgaaataagaatgcaagttcctttttttgctatacaaaatrcaaagttatctagtattgataactatggggatcaaacattcatatactgctaaggttaaatgggtataattttcttgagataaatttggcaatgtatttcaaaattttaaacgtgcatgctcttagggttatgctcccaagtgtgtaggtacaaatgatgcatggtgcatcaattattt

SEQ ID NO: 443883 - DNA, 578 bp, Homo sapiens
ctgtctatgcctgccttcacatggctgtctttcctcagcatgtctgcatgctcaaattttcctaattttataagaataccagtccttgggttagggcccaccctaatctcatatgaactcattttaatgggattatatctgcaaagatcctatttctaaacaaggtcacattcataggtactgggggcattaggatttgaagagktttttattgttgttttgttttgtttcagttttttgaggacccaattcagtccataatataggccatacttaagattattgccaaatgtaaaaaataatagatgtttttaggtttcaaggatgaaccatgcatagatgacttcaaaatgaagtttataataagatgcataaagaaacattaagtagcaaaggaagttttcctagtaactctgtgatcacttcaggttcctaggattaaaaactggatgtatggtggactcagtagagattcagggcaaatgattaatgttgggcagagaacaaatcaagtttaactggcctgctatatctttacttactcaacatttagactttcacaatgaaaaggtttactg

SEQ ID NO: 443884 - DNA, 663 bp, Homo sapiens
ctatttctaaacaaggtcacattcataggtactgggggcattaggatttgaagaggtttttattgttgttttgttttgtttcagttttttgaggacccaattcagtccataatataggccatacttaagattattgccaaatgtaaaaaataatagatgttkttaggtttcaaggatgaaccatgcatagatgacttcaaaatgaagtttataataagatgcataaagaaacattaagtagcaaaggaagttttcctagtaactctgtgatcacttcaggttcctaggattaaaaactggatgtatggtggactcagtagagattcagggcaaatgattaatgttgggcagagaacaaatcaagtttaactggcctgctatatctttacttactcaacatttagactttcacaatgaaaaggtttactgtgccttttttcaccacccaatatggagcagtggtaatgggttggattcaatttaaattctctgaatagcatgagttggctttccatcttcccactatcaagttctagccattgcttatccatctatctctaatcaaattggcatattctattttcagttaataaaggctttttaacatcagaaatcaaagatgaatgttatctttctctgacttaggggaaatcacagaaatgc

SEQ ID NO: 443885 - DNA, 663 bp, Homo sapiens
ctatttctaaacaaggtcacattcataggtactgggggcattaggatttgaagaggtttttattgttgttttgttttgtttcagttttttgaggacccaattcagtccataatataggccatacttaagattattgccaaatgtaaaaaataatagatgtttttaggtttcaaggatgaaccatgcatagatgacttcaaaatgaagtttataataagatgcataaagaaacattaagtagcaaaggaagttttcctagtaactctgtgatcacttcaggttcctaggattaaaaactggatgtatggtggactcagtagagattcagggcaaatgattaatgttgggcagagaacaaatcaagttyaactggcctgctatatctttacttactcaacatttagactttcacaatgaaaaggtttactgtgccttttttcaccacccaatatggagcagtggtaatgggttggattcaatttaaattctctgaatagcatgagttggctttccatcttcccactatcaagttctagccattgcttatccatctatctctaatcaaattggcatattctattttcagttaataaaggctttttaacatcagaaatcaaagatgaatgttatctttctctgacttaggggaaatcacagaaatgc

SEQ ID NO: 443886 - DNA, 635 bp, Homo sapiens
gtcacattcataggtactgggggcattaggatttgaagaggtttttattgttgttttgttttgtttcagttttttgaggacccaattcagtccataatataggccatacttaagattattgccaaatgtaaaaaataatagatgtttttaggtttcaaggatgaaccatgcatagatgacttcaaaatgaagtttataataagatgcataaagaaacattaagtagcaaaggaagttttcctagtaactctgtgatcacttcaggttcctaggattaaaaactggatgtatggtggactcagtagagattcagggcaaatgattaatgttgggcagagaacaaatcaagtttaactggcctgctatatctttacttactcaacatttagactttcacaatgaaaaggtttactgtgccttttttcaccacccaatatggagcagtggtaatgggttggattcaatttaaattctctgaatagcatgagttggctttccatcttcccactatcaagttstagccattgcttatccatctatctctaatcaaattggcatattctattttcagttaataaaggctttttaacatcagaaatcaaagatgaatgttatctttctctgacttaggggaa

SEQ ID NO: 443887 - DNA, 619 bp, Homo sapiens
aactgtagtacatccagacaatgaagtattactcagcactaaaaagaaatgaactatcaattcatgaaaagacatggaggaaacttaaatgcatatttctaggtgaatgaagtcagtctgaaaagtctatatackgtataatttcaaggacatgacattctggaaaaggcatagtaaaaagatcagttactgctaggtgttgggagggagaaagaaatgaacaattagagcacagtgaataaggaaataaaactactttgtatgatactataatgtggatacatgtcattataaatgtgtacaaacccagagaacatacaacaccaaaagtgacccctaatgtaaactatgaatttggagtaatgaggatatatcaatataggttcatcaaatgtaccactctggtgagggatattgataatagaggaagctatgcatgtgttggagcaggggatctatgagaaatctctgtgccttctgttcagttttgaggtgaacctaaaatcggttttttaaaaagcctattaagaaacaaatcacaagcaaaaatatgtaagtaaaaaaattatttaagtttaaaatttgtaaaaatgtttagatgaatagtattcttatgttt

SEQ ID NO: 443888 - DNA, 621 bp, Homo sapiens
tttttatcattctgcattatatggtttagacgtatctcttttagataagatatacttgaattagggggtggagtctaatctgaaagtctttgtttcttaaagagagaatcttggctcttttatgtttatgcttgtaaaatacattagttctcacttgataatttttcaagagtttgtgatttaaatgtttatttgcttcattaaaaatctgtctttatatgaattatgttttcactggtaattttttccctggtgattagaaaggtagaaaatggactacttattctgtatcttaatgactgagtaggcagattcagtcagccctgctctgtgaactcagcactttgtttgcttgcttgtttgtttcacaaataatatcaaaacccagcaaagctaaatagtctaaagtttcatgactagttagtaaagttgataccaaaacctagtactcctagcttcagaacagtgctttctactgcctcagtgtgtgccaaattttgccctattccatgwggatgagctttttccacctcaacaatctacacctgaatgttcatatttccttctcttgaaagaagcattttcctcaccatatctatgttctctacaatcttagcaggg

SEQ ID NO: 443889 - DNA, 583 bp, Homo sapiens
cagggaaaaccctcaataaatagtataattgattgtgactcacattaattgagcatctgctttgtgggagctgcctgtcatctcatttagtgtctctgcagcattagctgattaattcatctcactggaaatctggttgcagaaactccctgatgtcacagacacaaacgtaaaaaccaatcaataatttaaatttttacctttcgacaagctcttytgatggcactgacaccttcctttttcacgtgtctccagacacttacattttctgaaattaactcacattgccttatatacaacataaataaaactgcaaaaaatcaatccatcctatatttcaaaggtgattccataaataacatagaaagttatggtcttgtcttgaaggaaattccatatatcagagagatcttttaaaaagtgaataatttacggttaaaataggtcttgagtcacattttgaaagcatatccacagcctaattatcacagtaatctggagaagatccagattcgtgcttagaagtgtcttccaaaaggtttctgaaaactgctttattaatgatgccgcacaaatgcaaagc

SEQ ID NO: 443890 - DNA, 583 bp, Homo sapiens
cagggaaaaccctcaataaatagtataattgattgtgactcacattaattgagcatctgctttgtgggagctgcctgtcatctcatttagtgtctctgcagcattagctgattaattcatctcactggaaatctggttgcagaaactccctgatgtcacagacacaaacgtaaaaaccaatcaataatttaaatttttacctttcgacaagctcttttgatggcactgacaccttcctttttcaygtgtctccagacacttacattttctgaaattaactcacattgccttatatacaacataaataaaactgcaaaaaatcaatccatcctatatttcaaaggtgattccataaataacatagaaagttatggtcttgtcttgaaggaaattccatatatcagagagatcttttaaaaagtgaataatttacggttaaaataggtcttgagtcacattttgaaagcatatccacagcctaattatcacagtaatctggagaagatccagattcgtgcttagaagtgtcttccaaaaggtttctgaaaactgctttattaatgatgccgcacaaatgcaaagc

SEQ ID NO: 443891 - DNA, 541 bp, Homo sapiens
atcctaactgttaagtcacagccttactttgtagatgttctattgtcctttctacaggaggcaaattaatcactcttttttcctcctcaaacatatttttcccatgtgttctctcttgctgccatgctaagaattttatgagaaagctgaataaatactctaggtcattataattttacttaaataatacattttcatttttagaataatatatgatcatttactataagctgggctttatgctaatgacttgtatttatttacttgaatttgcagtgtgctattacatatattttctcgtttaatccccacagcacctctatgtagtaggtaatgcttttatcatcatattccaggaaaagatctacaccctagagaaytgaagtcacttacccaagttcttatgatgatgaagccacaactcacccccgagtagtcagatagcagaagccatgcttttaaccccagttctgtattgtaccctggctatccataatatatgaagggaaaaaagcaaatttcaaaacagcagatatagaag

SEQ ID NO: 443892 - DNA, 457 bp, Homo sapiens
tcaaaccagcacttcaagttctctgctgttatgtgtttcagtcactttcccgacccaggagaggcacgatctaaatcatcctttcccaaaccatcacccagaaatctctatttgacaaacttccgagactgctttctttgtgatgcttctaatcctcatgcgtggtgaggaagatggcaggtaggggaaaagcttaggagcttagttcctgtttatccatgtgtcattcttttagtccctgaggctacaatatccatttagaaagattaaataaaatggagttggggacagagaaaggggagctcagggggaggccgagcgaaagaagaaagtgsaattctctaagcattagactaaagagcctaagacattactcattctcaaatgggtctcacttcttaaagacaaactggcttcctgggaaatcgcaggcaggtgaaagcagcttgggtgattc

SEQ ID NO: 443893 - DNA, 302 bp, Homo sapiens
ccctgcctcaattctgaaactctactctgtcttaaaagtagcagtgatgggagacatccttcatctctatgtgatcttcaagagaatgtatctaaagtttctccaatgagtatgatgtttgcaatagatttttgatatgaaacctttatccttggttgctgaaattcatgtttgtttttgttttctcttgtgatcagaagtagacactgaacatatcacatgattttcttcacgtatcaggtaatcatatgcagttttcttttatatatkgatacagataaattatttttatagattatctg

SEQ ID NO: 443894 - DNA, 546 bp, Homo sapiens
ctagacgtgggctccaggaccacagaaggaaagccgggtagaaggaaagcacctggggccctgtatctggaaacaaactcttgctactatgcaaaggcagttcacagcactcagatcccattcatctctagtaatagcccagtggtgcactatatgcatttcctgtgtatcccagccaggaaatgggaatgggatagtgttactatttcaccaaagcacctcctttttgtcacyggtaactgagacagagcactaggggacaagtcactctatgatcaccaactgtggactgaggtagtggatttaaagcagctcttccataaattatggcccaaaccaaacaaaaaacaccatgcatgaaaaaaaaaaaagactgaaaagaaatatactaaagaataagagtggaaaacataactcggtttttctgctccttttacttctccatattttcctaaacattataaataacacatactacttttaacatgttgagataaaagcagtttttttaagacattcaactgtgaccacatagatagacaagac

SEQ ID NO: 443895 - DNA, 619 bp, Homo sapiens
attacatggctgcactccagcctgggcaacagagcaagagcaagactctgtctcaaaatgtatgtgtatatgtgtgtgtatatgtatgtgtgtgtgtatatatatatttagtgaaatatactggatgctcagaatacaaaaaagaagtcctagctgaatatttactatgctgtatttccgtcttaaagaaacttagagggtttttgttgttgtttctttgttgttttttgtttttaattgccttgatgggctaatggaattaagctcttaattacctactgctctttattttttttaactaagagtgtcctttgtcacttttcacaatttcaggtaggccccttactttgtccaaagttggtttagttttgcattttccaaattgctttgtcagtgctgtaatgaattttccttccttcatagaaatatcagtctctgtgaaactttccctgcttttgcccrtctcagtattaatgacctcaatattatgtatcactaggaatttcttcctcaatgccccataaacaccccagatatcgcatttcactcacttgattgacacgtatttgcttccatgtcaactgtgaaaattaatttccctctaagcttcagtgcttat

SEQ ID NO: 443896 - DNA, 619 bp, Homo sapiens
attacatggctgcactccagcctgggcaacagagcaagagcaagactctgtctcaaaatgtatgtgtatatgtgtgtgtatatgtatgtgtgtgtgtatatatatatttagtgaaatatactggatgctcagaatacaaaaaagaagtcctagctgaatatttactatgctgtatttccgtcttaaagaaacttagagggtttttgttgttgtttctttgttgttttttgtttttaattgccttgatgggctaatggaattaagctcttaattacctactgctctttattttttttaactaagagtgtcctttgtcacttttcacaatttcaggtaggccccttactttgtccaaagttggtttagttttgcattttccaaattgctttgtcagtgctgtaatgaattttccttccttcatagaaatatcagtctctgtgaaactttccctgcttttgcccatctcagtattaatgacctcaatattatgtatcactaggaatttcttcctcaatgccccataaacaccccagatatcgcatttcactcacttgattgacacgtatttgcttccatgtcaaytgtgaaaattaatttccctctaagcttcagtgcttat

SEQ ID NO: 443897 - DNA, 627 bp, Homo sapiens
atattaccgtactccggtgactgcaacgtttagaacagctttggaagagtattgtatcaattatattgtccctgtgggagccctattaacattaaaatgtcttataagatgagctaaacacttgcacaaagaaaacctttcatatgagggcttcttcaaatttatagttgttaaagcaaaaaaaatcgccttgcctctccctttgcacatgacacaaggatagatgactcttcttagactattttaagcaaattatcttagaaaatgagagcccatctcagaatatattatttcaggccaaaggcaacaccgtgtaggaggagacagcacggattaaaatcacacacattatctgggttccgattctggctctcctacttaggatatcaataaaatgatagcaattgtagtaataatttaacaagcaaaaattagggaccaggggctttctatagtccaagttgtttaatttccacaataayagtgcaatgggtatattattctgactttaagtatggggaaaccaaggttaaaagaggttaagtacaattgcaacaaaagcaaaaactgacaaatgggatctaattagagtaaagagcttctacacagcaaaaggaaactatcaag

SEQ ID NO: 443898 - DNA, 509 bp, Homo sapiens
caatcttagcagatttgaggctcagtatctgcttctgaagccaggagacagaatccctgagttcatcaytttctttcatcactttgtccactcaacttaggagcaaccaatcagcttcattatgttccttggttctccacatatggtcaaaggtattatgcagagtcactaaactccttgcctcacataagtggtaaatcagaagtgtcaaatgcatttattttacataactctccaaacaatttattccaaggactatcagtgttctccatactattagaagcatctttggatctaatcacattaggcagccaactccagaaacccccaaactaatgaaagaaccctatccttaatattctgctcctctatccctactcctggtaccaaagtctgtattagtcagggctctcttagagggacataactaattggaaatacacacacacacacacacacacacacacacacacacacacacacggatttattaagcattaacttacatg

SEQ ID NO: 443899 - DNA, 605 bp, Homo sapiens
agctggagtctcacctggaagggctaactgatgagatcagctttctcaggcagctatgtaaagaggatctctgcaagctgcagtcccatatctttaacatatctgtggttctgttcaggaacaacagccactccttgcacatggacagcaccatggccaatggctgtgcccagtatgagaagattgtcaaccacagctgggccaasgctaaaaacatgtaccagattaagtatgagaagctgcagacactggctgggaagcagagggatgatttgtgttgaagaaagatggagttctccaaaatgaaccagaacatcagctggctccaggcacagattgagggtcttaaaggccagagggcttccttggaggctgccattgtggatgcaaagcagtgtgaagagctggtcattaagaatgcctacaccaagctggtgaaactggaggctgtcttgcagtgggccaagcaggatatggcatgggagctgcataattatcaggaactgatgagagtcaatcaggccccggacattgagactgccacatacaggaagcttctggaaggtgaatagagctgcctggagtctggaatgcagaacattatt

SEQ ID NO: 443900 - DNA, 514 bp, Homo sapiens
attagcacacacacacgcaaaaccaagcaaatacataaaacaacagtcctgcatttgtcattttttgcatcacatttggattggtcattcattacctcaggggtaccttcacattgttcattccctaaagggagcaaaactctgacttaattccaagttccccagaagatgttttctatgagtgctttaaagagcatttttttaaaaacttactcaatattgacaaattatagttttatatatttatggggtgcaaaatggtgttataattttttaatacaatggggaaatatacaattaatctaattaacatatctgtcacctcaaatatttaacatttttgtgataacattagcaatgtacttttagctatawtcaaaacttattccttccatctaactgaggcttttgtaccctctgaccatcatcttcctatttcccagcatctggtaaccaccattctactctttgcttgggtaagtgagattgttttagatttcacatatatgtaaga

SEQ ID NO: 443901 - DNA, 514 bp, Homo sapiens
attagcacacacacacgcaaaaccaagcaaatacataaaacaacagtcctgcatttgtcattttttgcatcacatttggattggtcattcattacctcaggggtaccttcacattgttcattccctaaagggagcaaaactctgacttaattccaagttccccagaagatgttttctatgagtgctttaaagagcatttttttaaaaacttactcaatattgacaaattatagttttatatatttatggggtgcaaaatggtgttataattttttaatacaatggggaaatatacaattaatctaattaacatatctgtcacctcaaatatttaacatttttgtgataacattagcaatgtacttttagctatattcaaaacttattccttccatctaactgaggcttttgtaccctctgaccatcatcttcctatttcccagcatctggtaaccaccattctmctctttgcttgggtaagtgagattgttttagatttcacatatatgtaaga

SEQ ID NO: 443902 - DNA, 632 bp, Homo sapiens
ctttacttacaaattagtcagtcttaggtatttctttatagcaatgcaagaacaaccttatataatgaccccgagttatttataaatttcagaaataagcaaactgattatctgtatatatacatatacatattgttgccacaagtggaagttaccagtagagaaattatgagtcaataacaaatttccaataacatgtgagagactcaaataaaaagcatacatctgacaataatgtgttacagaatttagagggtttcaaaaagccattcaacagccttgaagagttagaagacatgaagtcctcgaattaagagcaaaacatcacagagagagacagctaaactaagtcctagctcttcmcctttgtaactttgtcaccttgggcaaatcacttattttttctgggtttcagtttcctgatttgtaaaatgagtggatttgatcctactgctcttcaagtcttacatgtaccctagaacttaaagtataattaaaaaaagagaaaataaacatattcattcaatgcacaatgaaaaaaaaagaagaacaaaaagaggctttgagatcaatcagatacaagatcactttttgtatttctaatctcataagatttaaaaatggccatggct

SEQ ID NO: 443903 - DNA, 576 bp, Homo sapiens
tctttggaaaaacaaacaaaattgatgagccattagcaagataaaccaatataagaagagacaagatcaaaatgagctcaattagagatgaaactggaggtattacaaagaataccacagaaatacaaaatattatttcagggtactatgaacatctttctgtgcacaaactagaaaatctagagaaaatagataaattcctggaaacatacagcactgctaaattaaatcaagaaaaaatagaaaccctgaacagaccaataacaggcagtgagattgaatcagtaataaataattgccaacaacaaaaaagtccaggaccagagtgattcacagctgaatactatcagatatttgatgaattggtaccaatcctactgaaaccattccaaaagatatagaaataaggamttctctttaaatcattctatgaagccagtaaccctaataccaaaaccaggaagggacataacaaaataaaaaggaaaatgagagaccaatatctctgattaacatagatgtaaaaatcctcaacaaagtactagctaactgatatgatttggatttctgttcctt

SEQ ID NO: 443904 - DNA, 541 bp, Homo sapiens
tgccaatgccactgtgattatgaaggcagtatcttatgaccagaaaataatacacaatgatattaaagggagccaggctaggtgcagtggctcatacctgtaatctcagcactttgggagaccaagctgggtgtatcagctgaggtcaggagttcgagaccagcctggccaacatggtaaaatcccgtctctactaaaaatacaaaaattagccaggcattgtggcatgtgcctgtaatcccagctacttgggaggctgaggcaggagaatcactggaacttgggaggcggaggttgcagtgagccgagatcacgctactgcactccagccggagatcagctccaaagtccrcttagcagcaggacatagatattgtagagatcagctttataaagaaaaacaaaaatgcaaggccataactaaagctattctttaaatggttaaagatgtaatttctgcaaataaaacagaaaacataaaagcaaacttccaaagaaattaaaggaactgaaaaaaaaaaaaaaccaacccacagaagct

SEQ ID NO: 443905 - DNA, 525 bp, Homo sapiens
cctccttcttgcctggggactagactgcctttgtaggactaacgttagccataagattagaaattatggtttaggagtcatgcagctggaggctacaagattctgaccctctctaagttgctcctaagatcagagcttgagatattttgcagaccctgcacttgatgtgtcagctggctccacccagatcaataaactggctcatctgatcttattttccccaaccaggaactgactcagtccaagaagacagctctcactcccagtgatttcatcccctaccaatcagcactcccagctcacyggcttttcccaacccacaaaattgtccttaaaaactctgctccctgaatgctcagggagactgatttgagtaataataacactctagtctcctggacagctggctctgagtgaattactctttctgtattgccattcccctgtcttaataaatcagctctgtctaggcagagggcaaggtgaacccgctgggcagttacacaatgggcaggaagaacttgt

SEQ ID NO: 443906 - DNA, 551 bp, Homo sapiens
tgcttctcttaagaaatccaaatgtccagggtaataatgcagcaggcttggtcagtggggacccttcccacttctgattcttctttactggcatctgagcaggtgcagctgctatatagatggaaactaggcccttcagaatgagacaagaatgtcttgaggagtgattataaccctctcagagctggaagggacattagagactgatcttagctctccactttgtcctctcaaaccatatcctcatattccctctgcctggaatgtgatgccaagttttagttcaagccctgttttctgaggcagctgcaggaactgagaaagaacatgcattggcttccttttgatcttcctgcttctggacatttcttcctgagcgttccaatattatttcaagccctktttttacaagtgaactcatgcacacacaaatttccctgtctcattgagctgtgttttcacctgtcacatggtgaggtttcctgccagctaagtactcatttgcagtggcattgccatctgtgtgtgtgtagtgtttaagcaatcatttg

SEQ ID NO: 443907 - DNA, 541 bp, Homo sapiens
acacatttctacagtgcctgctatgtgcaagactctcttggctttaaggcgtactttatattgttatgcacaagaccttgtttaaccaatgaggaaacaggttccaagatggtaagtgatttgcctagtgctggaatcaggatttgcatccaggtctrtggttccctcctccctttagcccccaaagggggctccccaaagcacctcagagctttgctgtctgtgtcaggttgctctgttatcatgatgatagaggtaggtaagactgtgagcttaatcagattaaggtgttattcttctctgtggacaatcttagagtttgcaaaagcatatatgtcattgcttcacagtgcaccattgatcttattcatttgaacattttcactgtggttcttctaacagtactgcgataactttgtttttgtccttgtaaccattaaggactcaaatacagagatactctccatgtccattttcgtgtatgcacattgactttgttgaaaatagagaaatttactatcttgttgtaaaatttttttgt

SEQ ID NO: 443908 - DNA, 615 bp, Homo sapiens
tcattgctctcaggtataaaaatttcagggcattgaacaaagagacasttcaaaatattgatttttggggaagcattttttatcaaggaaccatcttgctcttctactgagaccacaccatttctgattttttaaaccttttatgtttggtgattactttccaatatttgtaatatttatgttttgattaattgtatattagcaataatcataacaatgatgcaactcaaaatttaaaaaaactcttagtcttatggtcataagaaataaaaataattttaatttataaagttatttttgttatagaggcatatgagaggtgaccaatagcagactctgaaccattaaatatattagaataaaattatgaagcataactgtaatagaaatacaatttctttttcaaaaacattggattattttatttttatttttttatttttatagatttaggaggtacaagtgcaggattgtcacatgacagaaatacactgtcgaggaagaaaatctatacaattttggagtgttagaggcattttttatgtggattttatgaaatggatgatggtagatataaattgctatggcattttatctaattgtataaacttagta

SEQ ID NO: 443909 - DNA, 615 bp, Homo sapiens
tcattgctctcaggtataaaaatttcagggcattgaacaaagagacagttcaaaatattgatttttggggaagcattttttatcaaggaaccatcttgctcttctactgagaccacaccatttctgattttttaaaccttttatgtttggtgattactttccaatatttgtaatatttatgttttgattaattgtatattagcaataatcataacaatgatgcaactcaaaatttaaaaaaactcttagtcttatggtcataagaaataaaaataattttaatttataaagttatttttgttatagaggcatatgagaggtgaccaatagcagactctgaaccattaaatatattagaataaaattatgaagcataactgtaatagaaatacaatttctttttcaaaaacattgkattattttatttttatttttttatttttatagatttaggaggtacaagtgcaggattgtcacatgacagaaatacactgtcgaggaagaaaatctatacaattttggagtgttagaggcattttttatgtggattttatgaaatggatgatggtagatataaattgctatggcattttatctaattgtataaacttagta

SEQ ID NO: 443910 - DNA, 586 bp, Homo sapiens
ccctgtcctagctggtgataggtcagttaccaccatgtatttataaatttgttttgagatgagtgcttttttatgccaagcactgtgctagatgctgcttttgtttgggtggaaaaatcttgtttatccttgtttaaaccttgctttgggggaaccatttttgttgtgaatcactagctttctagcactgaagagcaaagtaattcctaagaagttttactaaaaagtttcctttttctttgttgaacttgtagattataggttttgtctttagtcttgattttcctaagaaggaacttgtttgtttctatgaaaagggamcacaggcatgtttgttccttgttattagggagttgtagttagttgtgtgagccactcaggcttaaaagactgattttccctattgtttatccatgaagaattcatcagttctgttatccccagatctgtggatacatagggtgggggtgggaggatagaagaatcattttcattgaacgtgtaatcaggttatgtttcaggaactctcaacattggttacttagaaatgcattcgtggaattctatctttgtaaagtggactaaa

SEQ ID NO: 443911 - DNA, 573 bp, Homo sapiens
cccagtagttcgatttattgagttttaagctatgttgatttaatttctgttattttcctttattatcttggagtctaacctctattagaaaagaggaaggagtgrccattagaaaaaaatttcctctgattattgtgggggaataaagcactaatcattttcttgtcaaggaattttttgacatattcttcctatgaatttgctagttcatcctggaagaatgtccaccaaaaaatagataactcatacagacagaatctagcaaaactgaaaagtgaatgtccctatagggagttctttgtgtcattctttctgttcctgcagagaaatcaatggaatttgcattggaagatactgttccttgtggaagtatcctaggcacctgtaatttctcactagggggaataaaaaagaaacctaacgtctctggctgttgagtagtgagtctcttgggtggcttcatagtctagatcaatctgtttaataaatgtctctgtttttacttgtgtcacacaattctaaacctgttctattcagatattagaattataagtatgtactacaaagtgccaa

SEQ ID NO: 443912 - DNA, 573 bp, Homo sapiens
cccagtagttcgatttattgagttttaagctatgttgatttaatttctgttattttcctttattatcttggagtctaacctctattagaaaagaggaaggagtgaccattagaaaaaaatttcctctgattattgtgggggaataaagcactaatcattttcttgtcaaggaattttttgacatattcttcctatgaatttgctasttcatcctggaagaatgtccaccaaaaaatagataactcatacagacagaatctagcaaaactgaaaagtgaatgtccctatagggagttctttgtgtcattctttctgttcctgcagagaaatcaatggaatttgcattggaagatactgttccttgtggaagtatcctaggcacctgtaatttctcactagggggaataaaaaagaaacctaacgtctctggctgttgagtagtgagtctcttgggtggcttcatagtctagatcaatctgtttaataaatgtctctgtttttacttgtgtcacacaattctaaacctgttctattcagatattagaattataagtatgtactacaaagtgccaa

SEQ ID NO: 443913 - DNA, 520 bp, Homo sapiens
gtaactttttactccccaagaacttaactaccaatagtcttatggatattataaacagttgattcgtacacattttatgtattatatatactgtgttcttacaacaaagaaagctagagaaaagaaattaagaaaatcataaagaagagaacttttcattaagtggaagtggatcrtcataaaggtcttcatcttcaccttcgtgttgagtagggtgaggaggaggaagaaaaggggaggttggtcttgctgtctcaggggtgccagaggtagaagaaaagccacgtataagtggaccttttctcaagggtcaactgtggttaaaagggttccaattatcttgtcctgttattttgggagtgttggtggcagttggattttttaagcctttgaagcaagagctgaggctaagtgtgagcaggtgtcaggatttcatacaaggtgatgaaacaatcgagctgcctgatcttagagagggtacatggaaatacttagggactgggaagcagtagatgagaag

SEQ ID NO: 443914 - DNA, 604 bp, Homo sapiens
actaacataccatttcaactaagtatactaacctataatcaattataactgccacaattttaatactttaatcataatgaagcaaacagctaaattctcccttaagagtcatcaaattggtgtgtaatacatatataaaataatccataaagccttaggctcacgtaatataayggatgtattttttaattcaataaacttcattgcacaactgcccatgcatgagagtttctcagtcttaccactactgacattttgggccacataactctttattgtgtgggttgtcctatgcacaatggaatgcttggcagcatccctggcctccacccactagatacaagtaggatttctcctagtcatgacaatcaaaattgtctccagacattgccaaatatcccctggaggacaaaattgctcctggtcaagaatcactccattgagtaaatgacaagcactatggaaggcacatcaccgaagaaagcattgcaccagtcccaaattgttaaaaaaaaaaaacactatgcttccagtttcacctttcctaacactgaatgaaaagtagttaatcgatcaagatcagagttgtgattttcttatggaa

SEQ ID NO: 443915 - DNA, 408 bp, Homo sapiens
actcagggctaatagggagtcttaaaggttccttcaaatcttggtcttggtttctgctaggatatagagaaaaccagggtaatctgaagtcagatccaggtacatggaattaggaaccaactaaccccagtgacattgaaatcccattcctagacctataaaaaacatttatatgcacatatkccaagtgttttagaattgaatattccgttcaaatgtattttgtttttaaacttgcatttttccacatagtatgtgatggtaatttttccatgtcacatgcataaatctgtttgcaaccttattaacagctgtagagtattctgtttaagaggagtcacattttagtcattttcctaatgacagacatgtgtttttttctcttcctctttaaaagataacacatac

SEQ ID NO: 443916 - DNA, 408 bp, Homo sapiens
actcagggctaatagggagtcttaaaggttccttcaaatcttggtcttggtttctgctaggatatagagaaaaccagggtaatctgaagtcagatccaggtacatggaattaggaaccaactaaccccagtgacattgaaatcccattcctagacctataaaaaacatttatatgcacatatgscaagtgttttagaattgaatattccgttcaaatgtattttgtttttaaacttgcatttttccacatagtatgtgatggtaatttttccatgtcacatgcataaatctgtttgcaaccttattaacagctgtagagtattctgtttaagaggagtcacattttagtcattttcctaatgacagacatgtgtttttttctcttcctctttaaaagataacacatac

SEQ ID NO: 443917 - DNA, 563 bp, Homo sapiens
atcgacaataaattggaaaacccagaagaaacagataaattcttagacacatatggcctaccaagatttaatgaaaaaaagaaatccaaagccttaatcggccaataaaaagtagtgagattgcagccataacaaagtttcccatcaataaaagccaataatctgatggcttcattgctgatttctaccacacatttaaagaagaactaatatcgatcctactcaaattattccaaaaaatagaagaggaggaaatacttacaaattcattctatgaggccattatcaccctgataccaaaaccagacaaagatataacaaaaaaaagagaactacaggccaatatctctgacaaacatagatgtgaaacgtcaacaaaatgccaccacaacaaattcaacaatacattaaaaagattgtttctcgtgrtcaagtaggattcatcccagggatgcaaggatggttcaacatatgcaaatcaatcaatgcaatatgttatatcagaatgaaggacaaagaccatatgatcatttcaactgatgctgaaaaagaactcaataaaa

SEQ ID NO: 443918 - DNA, 580 bp, Homo sapiens
ctggaagttctcatatcagtaagaactaaaacttctttatttaatatggcacctcttgccgtgttccctggcataatggctctcgatgtcccctgtgtatgcccctattctgctgcctccaactggaagacaacaggcctgccacattccgtttccaatcctgcctgcctcattccgctttttcagtctygcttttcctgttacaataacgtgaaagtgttgtcatggtttggatattggttgggttctaggcctagatttaccagactttttttgttttgatatttgagttttgcctttatcaaaatgaaacattatttcccagctcctcttatggggatgaaatgaggattgaataagataaagctggtgaagcatcttaaatctccatgaagagaggcactatgtaaatacaaactggagtgatggttgtggcttcatctgcaaaagcagagatacctcttatgttaaatgctccagcagcacaaatccagtcattattagttcttgtttgagcatgtagcagaaactggcccataattataggcaaattgaatgtatactacagcttcctaaatcc

SEQ ID NO: 443919 - DNA, 556 bp, Homo sapiens
tcctcacacagaaaaggcaatctgtgtctgtcgctgaatttatgatgtaaatcaaatcatagctttcctatattcagagatgtagcaagaaggttgaggtgacctaaaggttacaaataacttttgctttttgatttgcctatcacagactattttttttaaccccctcatttctmttaggattgatgtgtttatacttggaaaggtgaatccagttacagattttatcattgcctctgtgctagtctgggggaaccatgcatttatcattcactccttcctcactccattctgttaggatgcatgtactgtactgctctgtgctgttgatgatattaataaagagtgggaacactgaaatattaggtaccaactctgtgtgcttcctctgcttttttcttctctgaacagtgttgactttgggacaatgtgctagagggactgtgttaaattggcttcccatgatcctgtttattctgtcatttgcaacaacatgaatcaaccagtttaagagtttaaaaaggtgatttggggaaagtgtgtatgtgataattac

SEQ ID NO: 443920 - DNA, 556 bp, Homo sapiens
tcctcacacagaaaaggcaatctgtgtctgtcgctgaatttatgatgtaaatcaaatcatagctttcctatattcagagatgtagcaagaaggttgaggtgacctaaaggttacaaataacttttgctttttgatttgcctatcacagactattttttttaaccccctcatttctattaggattgatgtgtttatacttggaaaggtgaatccagttacagattttatcattgcctctgtgctagtctgggggaaccatgcatttatcattcactccttcctcactccattctgttaggatgcatgtactgtactgctctgtgctgttgatgatattaataaagagtgggaacactgaaatattaggtaccaactctgtgtgcttcctctgcttttttcttctctgaacagtgttgactttgggacaatgtgctagagggactgtgwtaaattggcttcccatgatcctgtttattctgtcatttgcaacaacatgaatcaaccagtttaagagtttaaaaaggtgatttggggaaagtgtgtatgtgataattac

SEQ ID NO: 443921 - DNA, 607 bp, Homo sapiens
actcaactgtgctgtaaaagtagtgtaaaagcagtcatagacaatacaaattccaataaaactttatttacaaaaacaggtggcagactggtttcagcccacragctgtagtgtgttaacctttgctctctggccctatgaattcttcatgttcacagagcatcttgaagaaatgaggcccaataaaatacctggttttatttcaaatctgccttcttgctgtaaatgacctacagctcaggaatatctcaatgaatacccacacatgttatctgtctttacatcggctaaaacctttgactagattatgagtactgtcctgtcagttgtgattcttctttccctagcaggctcctcacagctccccaattcacaatatttttctcagcacaacactttccagggtgtcaaaatgttcttaaccatcagctctgttttctcagagcctttgttgatgctttacagaagcctaggtaaattgggttccagtgctcctggtctcctgagctcctgctacattgacactgtgtttatgccacttgtgttgatccagatgtgatattaacttcccagtacccccaaaacagtcacacatagtgccacaaat

SEQ ID NO: 443922 - DNA, 607 bp, Homo sapiens
actcaactgtgctgtaaaagtagtgtaaaagcagtcatagacaatacaaattccaataaaactttatttacaaaaacaggtggcagactggtttcagcccacgagctgtagtgtgttaacctttgctctctggccctatgaattcttcatgttcacagagcatcttgaagaaatgaggcccaataaaatacctggttttatttcaaatctgccttcttgctgtaaatgacctacagctcaggaatatctcaatgaatacccacacatgttatctgtctttacatyggctaaaacctttgactagattatgagtactgtcctgtcagttgtgattcttctttccctagcaggctcctcacagctccccaattcacaatatttttctcagcacaacactttccagggtgtcaaaatgttcttaaccatcagctctgttttctcagagcctttgttgatgctttacagaagcctaggtaaattgggttccagtgctcctggtctcctgagctcctgctacattgacactgtgtttatgccacttgtgttgatccagatgtgatattaacttcccagtacccccaaaacagtcacacatagtgccacaaat

SEQ ID NO: 443923 - DNA, 631 bp, Homo sapiens
aaaacccaggactcagccagactgggacagatgtcaggatgacctgcctacggataggagctacccactctgggtgtcctctctgctgagggctgcacacttgtcaggacaacctgcctgtgaatagaagctacccactccaggtttcctccctgctgagggctgcacacttgggattacctgcttgtggataggagctacccactccaggtctgctctccactgagctgcacactcattgggacaatctgcttgaagataggagctacccactgggggtctcctctccwctgagggctgatcacttgttgggacaacctgcctgtggaaaggagctacccactttgggtctcctgagagctgtactgttgctcaataaaggacttcttcaccttgctcaccctccagtcgtctgcatatttcattcttcctggatgtgggacaagaactcaggaccccctgaatggtgggactgaaagagctgtaacacaaatagggctgaaacatgcccctaccaccccccctgcttgccatgttgccagcaatgagaaggagagaagggcagcagagaagagcagaggcccttccaggagcccaaacctagaggctccccaagccagggctgtgccac

SEQ ID NO: 443924 - DNA, 311 bp, Homo sapiens
ttacctttttgaggaacttccagacagactgttttccaaagtggccacaccatttcacatttccagcagcagtgtgcaagggttcacatttctccacatcctcatcaacacttgttattacctgtattttttattatagctatcctagtgggtatgaagtggtatctcatcatggttataaaacgtcttttttttagaaaaaaaagttaytttactttgaaggggtccaatttgttgatattttttcttttataggttgtgctttttgtgttgtatttaaacaatctttgacaaaactcaaatttcttaag

SEQ ID NO: 443925 - DNA, 613 bp, Homo sapiens
aactatggtctagcatagtttcttcacatgcaaactgttagttaaagacttgaaggaacccatctgcagctcgccacagcctctctctctcttcagctctctctgctccagcattctgccctgcaactctgctgccttaagagaattcctactgccagatgagaatgcttttttaattctcatttttctcctctatttaaaaactgctggattttgcttggatttggcctccctaaactacagcctgaaaaatctgtccaggcaattatctgaggcattgcagggatcatttcatttgttttycttttctcaaggattgctctttcttttgcactatttgttgtccaatgtctgaaattatcgtttcatactttttccaacttagctgtttaaagtaggagagtaaaccaggtcattgttactctatctttgctggaagcagaactgctattagtattgtttctgtctttatttcaccagtctggcttatgatataaagtgaccatcccaaacacacatgttcatatatgcacacacacacacacaccactactacctcctgttttctataaaactttctttttatagttgtgaaagttgtcaaaatcaaaat

SEQ ID NO: 443926 - DNA, 589 bp, Homo sapiens
taagcgctttaaatggagcccatgattcactttcatttatagagcccacatgctctctgtcaggcgcagaaggtgccagccctgcaggagcttcgggggcggagcagaaggccgcctaaaacagcctttgctaagagagcatgcgtaggcgacgcgctggtagagctgtggacctgccagcctgcgaggcggaggacgggctccatctcttagaaacgcctacggcgcatgctctatggggtcaactggggggctggcaagcggcmgcgctggtctggggcggagtctccgaggcacttcccggtggctggctgctctgattggctgaacaaatagtccgagggtggtgggcatccgccctcccgacaaggcagaccaggccccctgcaggtcccctatccgcaccccggcccctgagagctggcactgcgactcgagacagcggcccggcaggacagctccaggtgagagtgccggcgccgcggcgctgccaggtgcgggtgcggcgtggaagctggtgccttcagcaaggggagggtcgcgccccgaggctctgccggccggcaagaccctctgcgtttggacccag

SEQ ID NO: 443927 - DNA, 589 bp, Homo sapiens
taagcgctttaaatggagcccatgattcactttcatttatagagcccacatgctctctgtcaggcgcagaaggtgccagccctgcaggagcttcgggggcggagcagaaggccgcctaaaacagcctttgctaagagagcatgcgtaggcgacgcgctggtagagctgtggacctgccagcctgcgaggcggaggacgggctccatctcttagaaacgcctacggcgcatgctctatggggtcaactggggggctggcaagcggcagcgctggtctrgggcggagtctccgaggcacttcccggtggctggctgctctgattggctgaacaaatagtccgagggtggtgggcatccgccctcccgacaaggcagaccaggccccctgcaggtcccctatccgcaccccggcccctgagagctggcactgcgactcgagacagcggcccggcaggacagctccaggtgagagtgccggcgccgcggcgctgccaggtgcgggtgcggcgtggaagctggtgccttcagcaaggggagggtcgcgccccgaggctctgccggccggcaagaccctctgcgtttggacccag

SEQ ID NO: 443928 - DNA, 589 bp, Homo sapiens
taagcgctttaaatggagcccatgattcactttcatttatagagcccacatgctctctgtcaggcgcagaaggtgccagccctgcaggagcttcgggggcggagcagaaggccgcctaaaacagcctttgctaagagagcatgcgtaggcgacgcgctggtagagctgtggacctgccagcctgcgaggcggaggacgggctccatctcttagaaacgcctacggcgcatgctctatggggtcaactggggggctggcaagcggcagcgctggtctggggcggagtctccgaggcacttcccggtggctggctgctctgattggctgaacaaatagtccgagggtggtgggcatccgccctcccgacaaggcagaccaggccccctgcaggtcccctatccgcaccccggcccctgagagctggcactgcgactcgagacagcggcccggcaggacagctccaggtgagagtgccggcgccgcggcgctgccaggtgcgrgtgcggcgtggaagctggtgccttcagcaaggggagggtcgcgccccgaggctctgccggccggcaagaccctctgcgtttggacccag

SEQ ID NO: 443929 - DNA, 553 bp, Homo sapiens
gagagcttttagtttttcctgtgctcaaaacactcaaaacatatattttatgctagagcgagcatatgatcttggtttccttccttttttttcccccaaagaataacccctgtatactgatttcagacactgtataaagaaaaatgctttatattatttttcttaaaattatagttgattaattagtaacgtgaatcactgttaaatgatggtaagcatctcagtaaaacttgctgagagctctcctcctatatccagcttcagacttctctctccatacagtggttaaaacactcagagtcacatgccctacctgtgtgtatcacactgttgcaggggaaggtgcagtgccctggaatatgaagaaagtgagcatgagtcttgatatgctcccaggtaatagaaaggagacttakgggaccttggtgctacacctgggtttgcccctgacttcttgtgtgctttgttttttcttttttttttttaacctctgtgggatatattatatatactttattttatttttggcaagagggttggggattgggagagt

SEQ ID NO: 443930 - DNA, 560 bp, Homo sapiens
ttttctccagcaggaatttattgtttcaggcttgataactttcacagctttttctgtaacaacaatggcatcttcagtggtgtaattcttccagaccttcatgatgttctctctgttggggttctcttccaattcaatcctttccatagtgtatgtgtgtaatgagccttaaaggtccttatgacctcctgatttagagactgaattaaagatgtgtttgggggcaagtagaccacttcgatgcctttggtattgaattcatggggttctgggtggccagaggcattttcctatatcaaaagaactttgaaaggcagtcccttactggcaaagcacttcctgacttcagggaaaaaagcatcaatggaaccartctggaaaaatagttctcattgtccagtccttcttattgtacagccaaaagactgacagctgatgtctatattttccctttaaggctcagggattagcagatttataggtaagggcagacctgaccatcaaccctactgcatttgcacagaacagtagagttagcctatcccttcttgccttaaatc

SEQ ID NO: 443931 - DNA, 592 bp, Homo sapiens
tgaccatcaaccctactgcatttgcacagaacagtagagttagcctatcccttcttgccttaaatcctggtgcttgtttctcttccttactaataaacgtcctttgtgggatatatatatatatwtttttttgttagaatggaacactttcatctgcattaaaaacctgttcaggcagatacattttcctctaggaatttatatgcagcctcttggttggcaggagctgcttcttctgttatcttgacatatttttaaagtttttaaaatttttaattcttaaaattaattaatttttggttttttagagacagcatcttgctctgtcaccaagctggagtacagtggcaccattatagctcactgtaacctcaaactccttggctcaaccagtcttctcacctcagccttctaagtagctaggactacagacatgtgccaaccatactcggctaatttttaaaacaatttttgatagagatggggatctcactgtgtttttcagactggtttcgaacacctggcctcaagaggtcctcccactttggcctcccaaaatgctgggattacaaacataagccaccgtgcctgg

SEQ ID NO: 443932 - DNA, 496 bp, Homo sapiens
caattttgccctgaaacgttgcattactttaaggtgggaagtggaagaaacaattcttacaaatgggcatttttgtcatttcttatataaaaacaaacccaaagcttagcatttatttttattgatgtagtgaatgctggtcagcagcaaaaaaagaatttctcctcaaaagtgtaatgacctaatctattatctaaaactagtctaatctctaatggtgggaagcagatcagtggttgcctggagatggtggggattgagtaggaaggctcccaaaagaatctttttagaatcataggaatagtctatagggaggtagtgatggtggctacatatgcataaacatttaccaaaactcatcagactatacactgaaaatgggtgcatcttattgtatataaagcataatctcagtaaacttgatttttaaatttatatattgwcctcctggagttcttcaggggatagcatgttagggagaactaagagaaaagga

SEQ ID NO: 443933 - DNA, 589 bp, Homo sapiens
agccatcatgaggtaaatagtccctgcttctatgataggaaacagaatttcttatgtacaacttcctgacttatgctatttcagtgtttgcttaaaaatgaaatatgcatttatctaattcaagcataaatctgccttaccaattcatgcatttttatttctgtagctctttgtgatgtatagagttaggcagccaaaggacacagggaaatgggagctgggagctgggaagggwcggggcatattgagagatcctagagagcccatgctcagatgctttcaggtaaaatcgggccagtgaaagctggggcctggagggaagttactggaggttctggttcgtcttttgtttcttatatttagaaagcctaagtcagaggtttgtggttttgttgtgactgtggttatttttaaaccatgcttgcttctcagcaaatgtgtcaataattaacatagcactgcaaaattccaatttatgttgaggtcacttttaccttgaaatgcactttttcataattgggggatatgtctacttgagttgtcctctagcaggtctagtgacctgctaagcctcccacgtgatcaatga

SEQ ID NO: 443934 - DNA, 533 bp, Homo sapiens
tcctcctgctccttaaacaaaagaacctttagggcaattgtctaaaaggaaacaacataccagaaatacaattcctgggttaaagcaagcaaagctgcttttctaataactcccattttctatgcataccctgggtccagcattccatcttccaggtatggttagaaaagagatcagaccttagtgactgctggtgaagtgaattgcatgctgcagcccctcatcagcatctttgtacagctcagtttcrtgttttctgcagaatcaggagctgacaatcaaaatggcccctcactcacattcattggtcagactgggcttgtgataacaatttagactaatcactgacaagcagggatggggagcactgaagtcagctattggctgtgtcccggagcagttgggcattctgccactggatgctgcttttgtaatcttgtcatatgacaaagcattatgatgttcttttgttttccttggattggcttaagggctggtgagaagcaggaaatattctgccatgggaagtctac

SEQ ID NO: 443935 - DNA, 533 bp, Homo sapiens
tcctcctgctccttaaacaaaagaacctttagggcaattgtctaaaaggaaacaacataccagaaatacaattcctgggttaaagcaagcaaagctgcttttctaataactcccattttctatgcataccctgggtccagcattccatcttccaggtatggttagaaaagagatcagaccttagtgactgctggtgaagtgaattgcatgctgcagcccctcatcagcatctttgtacagctcagtttcgtgttttctgcagaatcaggagctgacaatcaaaatggcccctcactcacaytcattggtcagactgggcttgtgataacaatttagactaatcactgacaagcagggatggggagcactgaagtcagctattggctgtgtcccggagcagttgggcattctgccactggatgctgcttttgtaatcttgtcatatgacaaagcattatgatgttcttttgttttccttggattggcttaagggctggtgagaagcaggaaatattctgccatgggaagtctac

SEQ ID NO: 443936 - DNA, 533 bp, Homo sapiens
tcctcctgctccttaaacaaaagaacctttagggcaattgtctaaaaggaaacaacataccagaaatacaattcctgggttaaagcaagcaaagctgcttttctaataactcccattttctatgcataccctgggtccagcattccatcttccaggtatggttagaaaagagatcagaccttagtgactgctggtgaagtgaattgcatgctgcagcccctcatcagcatctttgtacagctcagtttcgtgttttctgcagaatcaggagctgacaatcaaaatggcccctcactcacattcattggtcagactgggcttgtgataacaatttagactaatcactgacaagcagggatggggagcactgaagtcagctattggctgtgtyccggagcagttgggcattctgccactggatgctgcttttgtaatcttgtcatatgacaaagcattatgatgttcttttgttttccttggattggcttaagggctggtgagaagcaggaaatattctgccatgggaagtctac

SEQ ID NO: 443937 - DNA, 582 bp, Homo sapiens
aggcaatagttgaagagacaatgaccgaaattttcggaattaatgaaaaatgctaatcctcaaatacatgaattycacaaaagatcacccaagcagatgtcacctaaaaacatagtagtatcttttaagtgcctttgaggcagaaagatttttaaaacgacaaaaaacagaagaaatatctgtgaaggaattggtattaggttaagctcagacttctcaatagcaaccaaaacacagtgggaaatagtttcaaaatgccaagagaaaataattgtcagcctataatttgactttttaaccctttttatttgaaatgattttagacttaaagttgtaaaaatggtgcccagaattcccatataccctttacgcagcttcccatcatgttaacaccttacataaacatagaataatctttaagacaggaaactaacagtgacaacatataatcaactaatctacaagtcttgttcaaattttaccagttgtcccactaatattctttttctagttcaacatccaacctgggatcttccccaaaatgacctttgttcacagtgtcataattcaccctgcaacaca

SEQ ID NO: 443938 - DNA, 582 bp, Homo sapiens
aggcaatagttgaagagacaatgaccgaaattttcggaattaatgaaaaatgctaatcctcaaatacatgaatttcacaaaagatcacccaagcagatgtcacctaaaaacatagtagtatcttttaagtgcctttgaggcagaaagatttttaaaacgacaaaaaacagaagaaatatctgtgaaggaattggtattaggttaagctcagacttctcaatagcaaccaaaacacagtgggaaatagtttcaaaatgccaagagaaaataattgtcagcctataatttgactttttaaccctttttatttgaaatgattttagacttaaagttgtaaaaatggtgcccagaattcccatataccctttacgcagcttcccatcatgttaacaccttacataaacatagaataatctttaagacaggaaactaacagtgacaayatataatcaactaatctacaagtcttgttcaaattttaccagttgtcccactaatattctttttctagttcaacatccaacctgggatcttccccaaaatgacctttgttcacagtgtcataattcaccctgcaacaca

SEQ ID NO: 443939 - DNA, 582 bp, Homo sapiens
aggcaatagttgaagagacaatgaccgaaattttcggaattaatgaaaaatgctaatcctcaaatacatgaatttcacaaaagatcacccaagcagatgtcacctaaaaacatagtagtatcttttaagtgcctttgaggcagaaagatttttaaaacgacaaaaaacagaagaaatatctgtgaaggaattggtattaggttaagctcagacttctcaatagcaaccaaaacacagtgggaaatagtttcaaaatgccaagagaaaataattgtcagcctataatttgactttttaaccctttttatttgaaatgattttagacttaaagttgtaaaaatggtgcccagaattcccatataccctttacgcagcttcccatcatgttaacaccttacataaacatagaataatctttaagacaggaaactaacagtgacaacrtataatcaactaatctacaagtcttgttcaaattttaccagttgtcccactaatattctttttctagttcaacatccaacctgggatcttccccaaaatgacctttgttcacagtgtcataattcaccctgcaacaca

SEQ ID NO: 443940 - DNA, 582 bp, Homo sapiens
aggcaatagttgaagagacaatgaccgaaattttcggaattaatgaaaaatgctaatcctcaaatacatgaatttcacaaaagatcacccaagcagatgtcacctaaaaacatagtagtatcttttaagtgcctttgaggcagaaagatttttaaaacgacaaaaaacagaagaaatatctgtgaaggaattggtattaggttaagctcagacttctcaatagcaaccaaaacacagtgggaaatagtttcaaaatgccaagagaaaataattgtcagcctataatttgactttttaaccctttttatttgaaatgattttagacttaaagttgtaaaaatggtgcccagaattcccatataccctttacgcagcttcccatcatgttaacaccttacataaacatagaataatctttaagacaggaaactaacagtgacaacatataatcaactaatctacaagtcttgttcaaattttaccagttgtcccactaatattctttttctagttcaacatccwacctgggatcttccccaaaatgacctttgttcacagtgtcataattcaccctgcaacaca

SEQ ID NO: 443941 - DNA, 603 bp, Homo sapiens
ggtccatccccttagtccttagcaaggcaactttatagtaaaattattatttctaggatctctgtcagtattgatctcagttttttccaatacattcagtatttatcctcttttaaggatcctgaatttagccagcttaaacaaatctgattaattataaaggtctatcttagaagtccagagagcttcctccgtacatgtctatattaaacttttaacctggtggcacatcacagctgaggccaggaaagtaaagtggacctgatcaccttcctgggctgagacagtgtcatgacagtcaggtacacacagacacaaagcacaatcccagaggacatgcatggcagcccaagcgggacatgccttaggcagtacaggtttacaacccccaccatgtggccttccatggtgrggcctaccaccgtaaggtttccatcccagtccaaaaaatacactgaagtccttgctttcagaggaactgccttcaagctatcagttccaaacacaggagtgaggaagacatctgaggttttctggatggaaagttccagagtggatccccacctccaaccccagtgctgtctgttgtgctcagaggctcag

SEQ ID NO: 443942 - DNA, 603 bp, Homo sapiens
ggtccatccccttagtccttagcaaggcaactttatagtaaaattattatttctaggatctctgtcagtattgatctcagttttttccaatacattcagtatttatcctcttttaaggatcctgaatttagccagcttaaacaaatctgattaattataaaggtctatcttagaagtccagagagcttcctccgtacatgtctatattaaacttttaacctggtggcacatcacagctgaggccaggaaagtaaagtggacctgatcaccttcctgggctgagacagtgtcatgacagtcaggtacacacagacacaaagcacaatcccagaggacatgcatggcagcccaagcgggacatgccttaggcagtacaggtttacaacccccaccatgtggccttccatggtgaggcctaccaccgtaaggtttccatyccagtccaaaaaatacactgaagtccttgctttcagaggaactgccttcaagctatcagttccaaacacaggagtgaggaagacatctgaggttttctggatggaaagttccagagtggatccccacctccaaccccagtgctgtctgttgtgctcagaggctcag

SEQ ID NO: 443943 - DNA, 649 bp, Homo sapiens
gtaaatatacttacataggatgtgaggaccactttttcaactattaaggacaaatttctttttcttccttcatgttcttatagggagactaggacttcagttccacttcagaggagcgtgaactrttggggaaaaaaacccttctggtcccactgacttcatattattctctcttcctcatgagtggctgagagattactacaattgttgagattttatagcctgtcctccactaggcttcagggttacttgatgtcaggagcactgacttacaaaagtgggacttgccacttcttcaaagagacacatcttacctatgtaatgttcattcatgcctcttcttctgtccccatcagtaaggctgcccttgtgaggtggttccacccacttggaacccctccatttaggattggttgagtaagtgcacacaggcaaaggagttagaaaccctaccacattctccaacctggcttgagcattcatgaagtcctgcatttgaaaccatatttggctctcatattttactcagaacccttcatgggaggagagaaaaccaaaatgtgtttacgtgttgagaacatgaaaaagatgagtaaggaacccacctttctgtgaaccctctctccacatttcttctgactgcattagt

SEQ ID NO: 443944 - DNA, 649 bp, Homo sapiens
gtaaatatacttacataggatgtgaggaccactttttcaactattaaggacaaatttctttttcttccttcatgttcttatagggagactaggacttcagttccacttcagaggagcgtgaactattggggaaaaaaacccttctggtcccactgacttcatattattctctcttcctcatgagtggctgagagattactacaattgttgagattttatagcctgtcctccactaggcttcagggttacttgatgtcaggagcactgacttacaaaagtgggacttgccacttcttcaaagagacacatcttacctatgtaatgttcattcatgcctcttcttctgtccccatcagtaaggctgcccttgtgaggtggttccacccacttggaacccctccatttaggattggttgagtaagtgcacacaggcaaaggagttagaaaccctaccacattctccaacctggcttgagcattcatgaagtcctgcatttgaaaccrtatttggctctcatattttactcagaacccttcatgggaggagagaaaaccaaaatgtgtttacgtgttgagaacatgaaaaagatgagtaaggaacccacctttctgtgaaccctctctccacatttcttctgactgcattagt

SEQ ID NO: 443945 - DNA, 562 bp, Homo sapiens
taaatccacttcatatattttttaactttgtgttcatcttttttattatcaatattttcctggtgtccgtaatgaggtttcataaaatggattattaaaaatctctgtgaaatttgcctggaggcaagctcccaattcaagaataattaaagtgacagtttaagagcaaattatgcgagccagagatgtacrgtgagtatattgtcacgctcatctctgtactctgcaaaaagaaagtgattcagcttaatttttcatcaagtagtatcttcccaggaggcattatggaagagtggagtatgaaagcgtatatcagctttcacaaagtgatggcgtaaataacatgtggtattcatatttgtgtgtgtgttgaaaaaagaatggtcagagctaatttttatttctattttgacataattaaaaaaaacgcactggctgtgctaacttaagtataatgtgtttgttaaataaactagtttttctttctgtttgattaagagctttttaaaatcagtctcttaaaaattataaactttagccatatttacaatgtgatgggtag

SEQ ID NO: 443946 - DNA, 550 bp, Homo sapiens
attgtggcttagaacaaaaaaatggtaattgctcaatgcaacccaacacctggaaacagtatcagagtcaccataatacaaatgcaagacaactcattaatttgatcataacaaggagcatatgtgttcaaactgaataaatccatgggatttattttaacttatttacatgttctagctcctttgggtgcatatgcataaccattgtacaaaaacaaattagtgattcagagactatcaatagcaatgtcctgagcctttttattttagaggccctattgactctactaagtcagattatttctggaaaagtgttgacctttttagagaaatcattagctccttgcactctaattcccaacatgtctcctgcctttgcaatccaaaataatactattatcattgtttctcattaaggcatgtgggaaggatcagaaaggcaaattgtgcmtggagataatatttgtacatgccttttactcctagaactctatgacaggcctgaaaggatctagtgtggtcttgtcagataatcttggacaattaattt

SEQ ID NO: 443947 - DNA, 514 bp, Homo sapiens
gtccatttaactttaccaacatttggtatatttaaagaataagagaaccagaggatgagttttacttttccctctttctttaggttttgtttgatcatagagtcattccaatgccgtctcagtcatgaaggtgtcagtagcatgtaacaatgtttcctaaaattttctgctaaaaatcactaatggcattagagagtcatgttagtcaccttgatcttgtattagcctgttcttatgttgccartagagacattccgaagactgggtaatttataaagaaaaagaggtttaatggactcagttccacatggctggggaggccacactatcatggtggaagctgaatgaggagcaaagtcatatcctaacacggcagacaagagaagaggacttgtgcagggaaattcctctttataaagttatcagatctcatgagactttttcactatcacgagaacagcacaggaaagacccatgcccatgattcgattacctcccactgagtccctcccag

SEQ ID NO: 443948 - DNA, 514 bp, Homo sapiens
gtccatttaactttaccaacatttggtatatttaaagaataagagaaccagaggatgagttttacttttccctctttctttaggttttgtttgatcatagagtcattccaatgccgtctcagtcatgaaggtgtcagtagcatgtaacaatgtttcctaaaattttctgctaaaaatcactaatggcattagagagtcatgttagtcaccttgatcttgtattagcctgttcttatgttgccaatagagacattccgaagactgggtaatttataaagaaaaagaggtttaatggactcagttccacatggctggggaggccacactatcatggtggaagctgaatgaggagcaaagtcatatcytaacacggcagacaagagaagaggacttgtgcagggaaattcctctttataaagttatcagatctcatgagactttttcactatcacgagaacagcacaggaaagacccatgcccatgattcgattacctcccactgagtccctcccag

SEQ ID NO: 443949 - DNA, 632 bp, Homo sapiens
tactctgtaatctacttatactatttaaatatacaatgaataaatttaactgaactttaaataaaattaaagctccagagatatgggcatattttttctgtagtttcatatattctctgggaaactcaaggttgcagtctataaacttcagtttgaaaattatgataataatgtttcatgacatgcagtgtttagtaaaccactcagaagcaggacattaggctaaatagtttactgtggggatctgacaaacaccgtccaaccactgctgtgttaacctgtccagattaacctgcatgtacaattatgtatttctgggattcaggctatgattttacccatttcaaaccaacttacaaagtgataacatgattatattggtctttactgacacaccaggaaacaaaataaagaacaacaaccaaaaaaaagtgtctctccacagaaarcagaagatgaaaacaaaataagtaaaacatagcaaccctttaagtggttgcccaatatttgaagagcgttatataaactcactgactttgtcccactagacatcctactgttatccctttgaggaactcaatgaggaggtgagtcctatttagtgagcatcttgaagaggtttgaactatcct

SEQ ID NO: 443950 - DNA, 610 bp, Homo sapiens
tatggtattatgtcttagatttgagtaattaatccatcttgagttgatttttgtataaggtgagagatgaggattcagtttccttcttctacatgtggcttgccaattattccagcaccatttgttgaatatggtgtcttttcctcactttatgtttttgtttgctttgtcaaagatcagttggttgtaagtattttggtttatttctgtgttctctattctgttcctttgktctatgtgcctatttttacatcaatacatgttgttttgctgactatgggcttatagtatattaaaaagtcaggtaatgtaatgcctccagatttgttctttttgcttagtctttctttggctatgcaggcacttttttggttgcatgtgaattttaagattttttttctagtgctgtgaagaatgatggtggtattttgatgggaattgcattgaatttgtagatcatttttggcagtatggtcattttcacaatattgattctacccatccatgagcatgggatgtgtttccatttgtttgtgacatctatgatttttttcagcagtgttttgtagttttccatgtagaggtcttttaccttcccaattaagtgcat

SEQ ID NO: 443951 - DNA, 610 bp, Homo sapiens
tatggtattatgtcttagatttgagtaattaatccatcttgagttgatttttgtataaggtgagagatgaggattcagtttccttcttctacatgtggcttgccaattattccagcaccatttgttgaatatggtgtcttttcctcactttatgtttttgtttgctttgtcaaagatcagttggttgtaagtattttggtttatttctgtgttctctattctgttcctttgttctatgtgcctatttttacatcaatacatgttgttttgctgactatgggcttatagtatattaaaaagtcaggtaatgtaatgcctccagatttgttctttttgcttagtcttyctttggctatgcaggcacttttttggttgcatgtgaattttaagattttttttctagtgctgtgaagaatgatggtggtattttgatgggaattgcattgaatttgtagatcatttttggcagtatggtcattttcacaatattgattctacccatccatgagcatgggatgtgtttccatttgtttgtgacatctatgatttttttcagcagtgttttgtagttttccatgtagaggtcttttaccttcccaattaagtgcat

SEQ ID NO: 443952 - DNA, 585 bp, Homo sapiens
attatatcattattatcttgcaaaacatttcaatgaatttagttcggtttaaagagccaagacgtataaataagtagaaagaagagacttgaagtggaaactcatcatatgtataaaagctgaattcaaatctcaacatctgccctaccaccagtgtaaaggccttcaaattagcataggctgttcaagtgaaaagggytgttgagtaatatacaagataaagatttgagacgttactaacagaactcaaatataagaaagtcacctaacatagtgaggcaaacatcactacctttttttaaataaatatattctttggcaacatagtctatttttgtatttgacttttaccttccctttgcccatataggcgaagaaaaaactattttatccaatttttccaagatattcctacctgaacatgagcacctgtgccaaggaaagcagaatttggtgctctggggtttgtttcagtctaagaatttctctgcccacaaaacagcaaattaggagacttaccttcattatcaaattcaaatttttgcagaaaggggaagtagaattattaatcatttaaaaatgttc

SEQ ID NO: 443953 - DNA, 410 bp, Homo sapiens
tccctgacaccttgagtcttaatgtaaaaacctagtccaaactataaccatttggcactctcagatcagagcaatcaagcagataaatggccacagatctaattctcataagtgaagagtaaaatattcctagggaaagggaaaacattgtatataytgtaaaatgtctatgagtcaggaagctaggacattatataagagtactgaggaatacagagagcttttatttctccacaacaggctacatctagacatctaccagaaaatgtttaagccattgtaatcacatatcttttattagcatgaaaatataactccaagttcataaaatgtttgactttaaagtaacaaaaatttagataaaatctagcttccagctcaaaggactagtgactatcacagcgctagaa

SEQ ID NO: 443954 - DNA, 586 bp, Homo sapiens
ggacacattcgtgttacaactgactgaattcccagcatttagctcagtcagtgcctaacttctttattttttaaaaaattaattcctctgtctcttttatttttctttcacaaaatgttattcattatttccyaacaacagtcagaaaatgatctgctgtaactttggtggcatttttaaaattgcattattttctagccatgaatcattgtcctatggttgtctactttgcgacatagcagtggacaaaattacactccacaaaaaaaagagacgaaagcagatgatatagccctagagaactgatttcctgcttcaaatacgtttcctgattgaagattgcacacctaggaggtgagatgagagagctattctataaaagtgtccagcagatgtactgcagtaattcccactgtattcatcatttactgaattgctcacacaccagaggtataatccaatgtaaatgatctcatcacccatcagtatgagggctcaaaaattcagcttggcctcaagctaaaacttgacatttcaaggttttcaaatccacagtaagtaagcagtatgttgatgacttccaaac

SEQ ID NO: 443955 - DNA, 534 bp, Homo sapiens
taagagaaatagaatgtgaaaaggtggaaatttctaaaaaataaagagaaatcggatagataacttcttctacccaagatggactaacaagaattgaacttacattcttacattcttagtataaaaaatagatagaaaataaaataagatacattaaaaattcattttagatattagaaagcaggaaaaagaaaactatgattcctgagaraagaaaaaaacaaacaaggtagccatacagttgacttggattcctgcctaaggtacgttctagaccatggtgcatgaaggggtatcctaaacagagcacagcagttttactcagttgaggaaacagagatcaaactttaagaagttgaactggctaaatattttagatcagagtttcagaaaagaaggagctacaacattaaaacaaaaccaaaaccaaaaaatgacctaaaaatttgcactgggacatcttgggactaagactcaggaatgaatagcatgaaatgccacaaggttggacaaaaatcgacacggcagctataa

SEQ ID NO: 443956 - DNA, 611 bp, Homo sapiens
tcttctacccaagatggactaacaagaattgaacttacattcttacattcttagtataaaaaatagatagaaaataaaataagatacattaaaaattcattttagatattagaaagcaggaaaaagaaaactatgattcctgagaaaagaaaaaaacaaacaaggtagccatacagttgacttggattcctgcstaaggtacgttctagaccatggtgcatgaaggggtatcctaaacagagcacagcagttttactcagttgaggaaacagagatcaaactttaagaagttgaactggctaaatattttagatcagagtttcagaaaagaaggagctacaacattaaaacaaaaccaaaaccaaaaaatgacctaaaaatttgcactgggacatcttgggactaagactcaggaatgaatagcatgaaatgccacaaggttggacaaaaatcgacacggcagctataagtttaataattttcaactcttattgcaaaacatggaattaatgtaatcttagagcttcagtaagtcaggatctacaatcctcactgattgactagggtttgtgacagattcccagaatcatcatgccctattttaggactgc

SEQ ID NO: 443957 - DNA, 471 bp, Homo sapiens
gatcccaatcttttttagcttgtagggtttctgctgagaaatctgctgttcatctgattrataggttttcctttataggttatctcatggttttgcctcacaactcttaagattctttcctttgtcttgactttacataacttgacgactatgtgcctaggtgatgatctttttgtgatgaatttcccagttactctttgagcttctggtatttgatggtctagatctttagcaaggccagaaaagttttccttgattattctctcaactatgttttcaaaacgtttagatttctcttcttcctctggaacaccaattattcttaggtttggttgtttaatataaccccaaacttcttggagggtttgttctttttttaattcttttttttttttttgtattgggttaattggaaagccttgtcttcaagctctaaagatttttttctacttattcaattctattgttaga

SEQ ID NO: 443958 - DNA, 586 bp, Homo sapiens
atgcagcctagggttttggtgccctgtgtcccagctgctacagccgtggctgaaaggggccaatgtagaactcaggccatggcwtcacagggtgaaagccccaagccttgagagtttccacatggttttgagcctgcaagtgcacagaagtcaaaaattgtggtttgggaacctccacccagattttagaggttgtatggaaatgcatggatgtccaagaaaaagtttgcttcaggggcaaggccctcatggagaacccctgctagggatatgcagagggaaaatgtgggactggagctcccacagagtccccattggggaactgccttgtggagctgtaagaagagggccaccattctctagacctcagaatggtagatccacgacagcttgcactatgtgcctgaaaaagccatggacactcaacagcagcccattaaagcattcgggtgggagtctgtaccctgcaaagccacaggggcagagctacccaagacaataggaacgcacctcttgcatcagaatgacctggatgtgagacatggattcaaaggagatcattttggagctttaagatttgactgcc

SEQ ID NO: 443959 - DNA, 586 bp, Homo sapiens
atgcagcctagggttttggtgccctgtgtcccagctgctacagccgtggctgaaaggggccaatgtagaactcaggccatggcttcacagggtgaaagccccaagccttgagagtttccacatggttttgagcctgcaagtgcacagaagtcaaaaattgtggtttgggaacctccacccagattttagaggttgtrtggaaatgcatggatgtccaagaaaaagtttgcttcaggggcaaggccctcatggagaacccctgctagggatatgcagagggaaaatgtgggactggagctcccacagagtccccattggggaactgccttgtggagctgtaagaagagggccaccattctctagacctcagaatggtagatccacgacagcttgcactatgtgcctgaaaaagccatggacactcaacagcagcccattaaagcattcgggtgggagtctgtaccctgcaaagccacaggggcagagctacccaagacaataggaacgcacctcttgcatcagaatgacctggatgtgagacatggattcaaaggagatcattttggagctttaagatttgactgcc

SEQ ID NO: 443960 - DNA, 586 bp, Homo sapiens
atgcagcctagggttttggtgccctgtgtcccagctgctacagccgtggctgaaaggggccaatgtagaactcaggccatggcttcacagggtgaaagccccaagccttgagagtttccacatggttttgagcctgcaagtgcacagaagtcaaaaattgtggtttgggaacctccacccagattttagaggttgtatggaaatgcatggatgtccaagaaaaagtttgcttcaggggcaaggccctcatggagaacccctgctagggatatgcagagggaaaatgtgggactggagctcccacagagtccccaytggggaactgccttgtggagctgtaagaagagggccaccattctctagacctcagaatggtagatccacgacagcttgcactatgtgcctgaaaaagccatggacactcaacagcagcccattaaagcattcgggtgggagtctgtaccctgcaaagccacaggggcagagctacccaagacaataggaacgcacctcttgcatcagaatgacctggatgtgagacatggattcaaaggagatcattttggagctttaagatttgactgcc

SEQ ID NO: 443961 - DNA, 577 bp, Homo sapiens
aaattgtcttagggatacaatatagaggagtaagaaggaggatgagaacaaaaaggagaaggggaagcagaaggtgaaggggaagaagcttattttgatgttggacactaacatcaccatgttgagcccttactaggggcttcaatagtactgtcttagcactttaaatatattttctttattgtcataaaagcagtaaaaagttagggattattactgactattttacaaatgaggaagtgagactctgcaaagctaagcatctcagccaaactgataacctttgtgattatctgccctaagttaccttctaacttaaaatactaaggaattactcatttgatacaaataaastaaagtcactatttgcccctgtgctcttggcttctatttatttcttcgctatatatttttcaacattgagtttataatcctttacatgattatgcacaaattaggaaaataagcattgaagtaaaaataacagaactaatgggtaataaatgttcccaaacaaaggtcctaaataaagattactcctaatttacatatgaattggttacatgcaaattagtgt

SEQ ID NO: 443962 - DNA, 617 bp, Homo sapiens
ttattatttggggaggcgggatttaagctatgcttcttcaaaccttaatgtgcttgtgtatccctttaagatcttgctaaaatgtatcttctgattcagtaggtctgggtggggcctgagactccactttcaaaataagtctgggcaaatactctcaaatctaccacagcccccaacactccttggtgtattacaactggctagctaaactcatgtatttgtctacctggctttggtcattggagtttgatggttctgctaacatttttaggtaatctacattttatcccattkcaatacccagtctactgcacgtacacgccctcttcctctctgtcatatctgcaccttctctcctgttcaagaaccagtactccttcctccaacaatgcatctcaccctgactttcctacctcactgtcagggaccatctctgtcttataaagtgcctccacatagtccatcctgtgagggctgaccaagacaaccttaacacttccctcaccctgactaaacattagataggcttctttctagctataagcctctgaactctcttttctcagtgcatttactttcgatgactttcagttgaaaatattttccctacacctcgg

SEQ ID NO: 443963 - DNA, 536 bp, Homo sapiens
aaatgttaacaattggtgaatctagttgaagtgtacacktgagtctatgattttgtttcaacttttctgtaggtttgaaattttccgaaataaaatcccctcccctatacacagaaaggcaaatgaagaggaacaaacacccagggtggcggcggtagcgggacagatttgtgaaatccaaggcgcaagagagtttcaatgttacagaagcgttcaacattatcaaatagctacaaaataatcaagtacggctaggactgaaaaatgtctcatagatttagcaacacaatgttcctgataacttggggacagagtgtccagggagtaaatgcaggcaccttgccctttagtaccttgcttctctgcagatcgtcatttagctgaagaaccataatttcagttctattattgagtttcccagactttgaaaaatgtgaatatcatgttcaaagttctggaatagtccctgtcggaggaatatagagccactcataaactcgcaatttattggaggagcacataaactaaatacactg

SEQ ID NO: 443964 - DNA, 536 bp, Homo sapiens
aaatgttaacaattggtgaatctagttgaagtgtacacgtgagtctatgattttgtttcaacttttctgtaggtttgaaattttccgaaataaaatcccctcccctatacacagaaaggcaaatgaagaggaacaaacacccagggtggcggcggtagcgggacagatttgtgaaatycaaggcgcaagagagtttcaatgttacagaagcgttcaacattatcaaatagctacaaaataatcaagtacggctaggactgaaaaatgtctcatagatttagcaacacaatgttcctgataacttggggacagagtgtccagggagtaaatgcaggcaccttgccctttagtaccttgcttctctgcagatcgtcatttagctgaagaaccataatttcagttctattattgagtttcccagactttgaaaaatgtgaatatcatgttcaaagttctggaatagtccctgtcggaggaatatagagccactcataaactcgcaatttattggaggagcacataaactaaatacactg

SEQ ID NO: 443965 - DNA, 585 bp, Homo sapiens
gttctgttgtttgtagaatgatcatgatataactagaaaaaattataccagtgttggtgtaggtgggtgtatgtgtgggaaggggtaaatcatgttatatataaataatgttatggaatatgtggttaaggcaactttcaataccatttaatgttttaaatgtatattattgtcttatgttgccatttgcttgtcctaagtagtagctagttttgccttccttttattagtactatttctwttttttttttttggagatggagcctcattctatcacccaggctggagtgcagtggcgccatctcggctcactgcaagctccgcctcccgggttcacgccgttctcctgcctcagcctcccgagtagctgggactacaggcgcccgccaccacgctcggctaattttttgtatttttagtggagacggggtttcaccgtgttagccaagatggtcttgatctcctgacctcgtgatccgcccacctcagcctcccaaagtgctgggattacaggcgtgagccaccgtgcccggctattagtactagttctaatattaagactggtttagcatcgtgctgtttatt

SEQ ID NO: 443966 - DNA, 585 bp, Homo sapiens
gttctgttgtttgtagaatgatcatgatataactagaaaaaattataccagtgttggtgtaggtgggtgtatgtgtgggaaggggtaaatcatgttatatataaataatgttatggaatatgtggttaaggcaactttcaataccatttaatgttttaaatgtatattattgtcttatgttgccatttgcttgtcctaagtagtagctagttttgccttccttttattagtactatttctattttttttttttggagatggagcctcattctatcacccaggctggagtgcagtggcgccatctcggctcactgcaagctccgcctcccgggttcacgccgttctcctgcctcagcctcccgagtagctgggactacaggcgcccgccaccacgctcggctaattttttgtatttttagtggagacggggtttcaccgtgttagccaagatggtcttgatctcctgacctcgtgatccgcccacctcagcctcccaaagtgctgggattacaggcgtgagccaccgygcccggctattagtactagttctaatattaagactggtttagcatcgtgctgtttatt

SEQ ID NO: 443967 - DNA, 585 bp, Homo sapiens
gttctgttgtttgtagaatgatcatgatataactagaaaaaattataccagtgttggtgtaggtgggtgtatgtgtgggaaggggtaaatcatgttatatataaataatgttatggaatatgtggttaaggcaactttcaataccatttaatgttttaaatgtatattattgtcttatgttgccatttgcttgtcctaagtagtagctagttttgccttccttttattagtactatttctattttttttttttggagatggagcctcattctatcacccaggctggagtgcagtggcgccatctcggctcactgcaagctccgcctcccgggttcacgccgttctcctgcctcagcctcccgagtagctgggactacaggcgcccgccaccacgctcggctaattttttgtatttttagtggagacggggtttcaccgtgttagccaagatggtcttgatctcctgacctcgtgatccgcccacctcagcctcccaaagtgctgggattacaggcgtgagccaccgtgcccggctattagtactagttytaatattaagactggtttagcatcgtgctgtttatt

SEQ ID NO: 443968 - DNA, 588 bp, Homo sapiens
ttatagcctacatatgcaggattcccaaaagaacaacaacaaccacaaaactgcagatttgtatcattktatcccctcttatgcagaataaaatgctcctgaaatgaaaatgcttctgtcaatggtggtgcttggtgttaagagtttaaagttatctgggtttgtacttttggttacctttttaaaaagatttaactaaagcgctttacaaactttagaaaaattatcagaatatcaatctattttgtaggtaaaataaaacacgtaaaaccaacacacattaccttctttgtccaaaagtagttactgctttttttcctaaccagaagaaatcaagcacaggcatactgtattagccagggttctccagagaaacagaatcaacgagagagagagagagatttattttaaggaattgactcacacgattgtggaggctggtaagtccaaaatcacaggatgggccagtggaacaggagacccagggagagcaaaggttcagctcaaaggtcatcaggctggaagagctgatgctgcagatgaagtctgaaggcaatcggctggagaattctgttactaatgggagag

SEQ ID NO: 443969 - DNA, 588 bp, Homo sapiens
ttatagcctacatatgcaggattcccaaaagaacaacaacaaccacaaaactgcagatttgtatcattgtatcccctcttatgcagaataaaatgctcctgaaatgaaaatgcttctgtcaatggtggtgcttggtgttaagagtttaaagttatctgggtttgtacttttggttacctttttaaaaagatttaactaaagcgctttacaaactttagaaaaattatcagaatatcaatctattttgtaggtaaaataaaacacgtaaaaccaacacacattaccttctttgtccraaagtagttactgctttttttcctaaccagaagaaatcaagcacaggcatactgtattagccagggttctccagagaaacagaatcaacgagagagagagagagatttattttaaggaattgactcacacgattgtggaggctggtaagtccaaaatcacaggatgggccagtggaacaggagacccagggagagcaaaggttcagctcaaaggtcatcaggctggaagagctgatgctgcagatgaagtctgaaggcaatcggctggagaattctgttactaatgggagag

SEQ ID NO: 443970 - DNA, 633 bp, Homo sapiens
cttggtgttaagagtttaaagttatctgggtttgtacttttggttacctttttaaaaagatttaactaaagcgctttacaaactttagaaaaattatcagaatatcaatctattttgtaggtaaaataaaacacgtaaaaccaacacacattaccttctttgtccaaaagtagttactgctttttttcctaaccagaagaaatcaagcacaggcatactgtattagccagggttctccagagaaacagaatcaacgagagagagagagagatttattttaaggaattgactcacacrattgtggaggctggtaagtccaaaatcacaggatgggccagtggaacaggagacccagggagagcaaaggttcagctcaaaggtcatcaggctggaagagctgatgctgcagatgaagtctgaaggcaatcggctggagaattctgttactaatgggagagtcaatctttttgttctactcaggctttcaactgattggatgaagcccaccaataaaatggagggcaatctgctttacttaactccaccaatttaaatgttaatctcacccaataacaccctcagagaaacacccacaataatggttgactcataaaatttaccatcacatatata

SEQ ID NO: 443971 - DNA, 588 bp, Homo sapiens
aagggagttaagagtccagatttgtctctttccaccatgcgaggacacagggagaagatgccttctgtgaaccagggagtaggccctcaccagacactgaatctgttggcaccttgaggaacttcccaccctccagaactgtgaraattaagtgtttgttataagctactcagtttatggtattttgctatggtacccctaacggactaaggcatctgatcagctgtgccatggtttaacgtcattaagggagatgactttcatgtgttttttgtaaccataattaagttctttcaacaagctgattctaaaaacagaatactaatacacagtaatgcttacattaatatgatatgtaaaattaagtgtcaaacaaaagtgctctgataacaattcttttctacatttcaatattataaatcctgttccacttaaggcaaagaagagtctcctttcctacatttcaccagtgacttgaaatcattcctcattttagttacttcacatataattcattgcatgcttatatggattttttctctttttaaaaacagctttattgaggtattacttacataccataacatt

SEQ ID NO: 443972 - DNA, 502 bp, Homo sapiens
attttctgagaagaaatccaagccagctgcagaaatttgcaaaagtgacaagaagccaaatgctaacccccaagacmataggaaaatgtctccagggcatgtcagaggtcttcacagcagcccctcccatcatagaccaggaggcctaggaggaaaaagtagtttcatgggccgggcctagggtccccgtgctgtgcgcagtctagggacttggtgctctgcatcccggctgctccagcactggctgaatggggccaacatggagcttgggccatggcttcagagggtgcaagccttaagccgtggcagcttccctgtgatgttgagcccacagatgcacagaagtcaagaattgaggtttgggaacctccacctaaatttcagaggatatatggaaatgcctggatgcccaggcagaagtttcctgcagggtcagggctctcatggagaacctctgcttgggcagtgcagagggaaaatgtggagtaggagcccccataca

SEQ ID NO: 443973 - DNA, 618 bp, Homo sapiens
gattaggtacttctaaactttgatgccaatgactactagatagacaggaaatgttcatgtactaatacttgctatgtggtcatttatctcaaaattgctcagtgcagactgtataaaatcaaaaggcatctggttagcagctgaaattcacttatcaggaattccagcctccaaagtattttagtaagaacttcaaagatgcttaccaaaaacaccagagggtttcttagcataaagaatattagaaatcatttttctctggtgaaataaatggaaataagtaaaattcaggatatatcatgggttagaaagatacttggggccgcactaacctttcttaaaacaggagaataaaatcagcaatcccagtgtcttaatatcttgggacaatccagggctgtatttggtcctatgtccctttcacactgcrgaagactatcaatttacccaaataagaagttcacatctactcaccagaatggtgttgcattggctcacaggaagcctctcattcaagatgcttagagaaatgccaaaagtcggagaataaggcactttctgggcttacaagaataggtaggtagtataactgttttaatgtatctttactcattaaaa

SEQ ID NO: 443974 - DNA, 587 bp, Homo sapiens
atagtacctccttttaactttatatcactgaaagaagcactgaagagactaaaaacagtcctgaatcaccgttgtgaccccttcctcactccctgccttggtggcatggtatggagggattctctgggtgctgggggagggagaatacagcaattgtgatgcactgaactcactgctgtcctgtcagagcagaaaggaaaaccagaccaaactcagctgacacccacccacagagggaacatttaagccaggcttagccagaggggaatcaccaatcccagaagtctgagcttgagtgcctccaaaccttgcctccaagggctatagcactctgtctccaagtaaacttgaaaggcaatctaggccataaggactacaactcttaggcgagtcctagggctgaactaagcccagagatagtggacaccagctgtggcagccaagggagtgctcgcatcatacctcctstaaccccaggctacaactcacaactccaaaagagaccccttccttccacttaaggagaggagtgggaagagtaggaaggatgttgtcttacatctatgataccagctcagccacagcaa

SEQ ID NO: 443975 - DNA, 535 bp, Homo sapiens
ccatctttgttaatcctaggtaaatggtatagccacaattctgaatgttttaaaacccaggatctactctgtaagaagtctcaaagttgatcccaagtgaattacttagacccaggcgaacctgacatcctgaggcactgatgtgctgtttggtagtttaatactcatcactatgctcattaaattaaatcaacattttggtggtctgcatgtctacacagaagtttagtaattattgttgcctgaaaaaatatagacttcatctttctcaagccagatgaaacactaccaggttattgagaattatttttacctttaaaaaacttgtagctgatttgctgaataagcatgtagataagtatatctatatagggaaasagaaagtagggaaatatgttcttcttcttctggaggttggaataaaaatcaatcttatactacagtgggtcaagggatgctgaaagcaatgaaatttcttcttacttaaaaacagactttgttgctcagtggttctaacacagtttcttcctgtatc

SEQ ID NO: 443976 - DNA, 556 bp, Homo sapiens
gttcttcttcttctggaggttggaataaaaatcaatcttatactacagtgggtcaagggatgctgaaagcaatgaaatttcttcttacttaaaaacagactttgttgctcagtggttctaacacagtttcttcctgtatcctcagagggccccattggttttctcaataggatggttcaaagggtggagatcagctccaaagtatctgttctcattatgttatcaggtataagactcagctctgccttttatcaacccaaatggtagaactatcccagaacttcagtttgtgaagactgaagtctttgttggagacaacacataacagaagagaagacmcagagatgaaactcaactctgtcacttgagttaagcagccttgggcctgtcattttcattctgtttcttcatctgtaaaatatatcaataataatgcaatattaaataaaaatgcaaattttggggggaccaagtataataaattagtctagttccttgtccagtgcaaaaagttacactatgaacatttgttgaataaatgttgaaagacaaccac

SEQ ID NO: 443977 - DNA, 621 bp, Homo sapiens
tatattaaatatttttttttcatagagacgaagtctcactatatttcccaggctggtttcaaactcctgagctcaagcaatcctcccacctcagcctcccaaaatgctaggattacaggcatgagctaccatgcctggcctatatttaatattrtaataattttaaatttgcaaaaagaaacaaatataggagcaaccagaaattaataaaagtattacctatataagatgggtggcaacagggactgtataatttttactttaaatcatgttaagatttttacatcttcaaaacctaaaattaactcaaaaaggatagaattctgaaactgaccttaagttgtgtatcaaattaataatatctacattgttttttaaaattaattcaaatatatcttgaacccagtatgctgatattgtcctccatggcatagtataagaacagtatcaactgcaaaggaatcttaaattttacttaaggtttattattcgtaactgtattggtgttgatttttaatatatttattgtaagatagagcaaataaataaatatattgatattactcacaggtttctcactgtggaataagaacacaggaacaagaggaaggaccctgtagc

SEQ ID NO: 443978 - DNA, 621 bp, Homo sapiens
tatattaaatatttttttttcatagagacgaagtctcactatatttcccaggctggtttcaaactcctgagctcaagcaatcctcccacctcagcctcccaaaatgctaggattacaggcatgagctaccatgcctggcctatatttaatattataataattttaaatttgcaaaaagaaacaaatataggagcaaccagaaattaataaaagtattacctatataagatgggtggcaacagggactgtataatttttacttwaaatcatgttaagatttttacatcttcaaaacctaaaattaactcaaaaaggatagaattctgaaactgaccttaagttgtgtatcaaattaataatatctacattgttttttaaaattaattcaaatatatcttgaacccagtatgctgatattgtcctccatggcatagtataagaacagtatcaactgcaaaggaatcttaaattttacttaaggtttattattcgtaactgtattggtgttgatttttaatatatttattgtaagatagagcaaataaataaatatattgatattactcacaggtttctcactgtggaataagaacacaggaacaagaggaaggaccctgtagc

SEQ ID NO: 443979 - DNA, 621 bp, Homo sapiens
tatattaaatatttttttttcatagagacgaagtctcactatatttcccaggctggtttcaaactcctgagctcaagcaatcctcccacctcagcctcccaaaatgctaggattacaggcatgagctaccatgcctggcctatatttaatattataataattttaaatttgcaaaaagaaacaaatataggagcaaccagaaattaataaaagtattacctatataagatgggtggcaacagggactgtataatttttactttaaatcatgttaagatttttacatcttcaaaacctaaaattaactcaaaaaggatagaattctgaaactgaccttaagttgtgtatcaaattaataatatctacattgttttttaaaattaattcaaatatatcttgaacccagtatgctgatattgtcctccatggcatwgtataagaacagtatcaactgcaaaggaatcttaaattttacttaaggtttattattcgtaactgtattggtgttgatttttaatatatttattgtaagatagagcaaataaataaatatattgatattactcacaggtttctcactgtggaataagaacacaggaacaagaggaaggaccctgtagc

SEQ ID NO: 443980 - DNA, 581 bp, Homo sapiens
ggctgaagccatggtagaagaacataaattgtgaagatttcatggacttttattagttccccaaattaaaacttttataatttcttacacctgtctttactgcaatctctgaacatgaattgtgaagatttcatggacacttatcacttccccaatcaatattcttgtgatttcctatgcctgtctttactttaatctcttaatcccgtcatcttcggaagctgaggaggtatgttgcctcaggaccctgtgatgatcgcgttaactgcacaaattgtttgaacaatatgaaatctgggcaccttgaaaaaagaacaggatacagygatgttcagggaacaagggagataaccattaggtctggctgcctgagagctgggtggaagagtcatatttctcttctttcaaaagtaaataggagaaatactgctgaattctttttctcagcaaggaacatccctgagaaagagaatgcattcctagggagcggtatctaaaatggccactctggggacgtctgtcttttacggttgaagataagggatgaaataagccccagtctcctgtagcattcccaggcc

SEQ ID NO: 443981 - DNA, 387 bp, Homo sapiens
ttgcccaagggacatgatttacctctgttagtacctgtgcctgctctgtcatttcaaccataggttaacatgctctaactgcattgtggactgggcccacacctatgctgaggtgaccaatgtttccaactgttggaaccataccacctttccagcagcagctgcagatggcttgccgtggcacatacattccrtgtctgcagagaaatggacatggctggagacttgtggtcccatggccgaagcctggaatacaacacagcaagctttggacaaaggatgctacaagacccatggtgcacctgccccctggctggcctgtagcatttatgacgggtgggctggctagttggggattatgtagtacccccagcccaggtgccacag

SEQ ID NO: 443982 - DNA, 583 bp, Homo sapiens
ccatgcttggtgaatggaccagggcatgatcattcaatccctgagtgtgcagctgtgctgcctagcacccagtaggatttatgctttaataaatccttactgcatctgggaacttttaaaaaaatatcgaagcccaggtgccatatcctgctaattaaatagttgagggataagacccaggtatctgttatttaaagcttctcaggttattctaatgaaagcactgtgactagcatcttagtttgtgctgctataacagaatacctgaaactggacaatttatwaaaaaataaatttatttatcacagttctggaggctgggaagtccaaaatcaaggtgccaacacctgacatgggccttcttactgcattctgacatggtggaaggacaagacagcaaactagccaaatgctgctgcaagaagcctcttttctaagggccttaattccattaatgagggaggcatcctctcggccttaccacctctgaaaggccccacctcttgataccatcacaattggcaacacctgagttttggagagaccattaaaaccacagcaaacggtgatccaacggaaataa

SEQ ID NO: 443983 - DNA, 572 bp, Homo sapiens
tatcagagcactcaccacacagttatagacttgtgtgattactgcatttacaaggccaagagtagtggcagttctgctcccccctgtattaagtgtacttgctctggaacacaatggctgtagaataaatatttgttggctgcattaattagtgacactattrcacattaatcttcataataatgcttgaagatgagtggacaatggtagcattaagctcattttaaacatgagggtactcaagacctgaaatatttggagtgatttgccataacactattcctaaagtggtggagctagaattcaactcattcaaggtcaggtggtccaagagcccagcgctgtcttttatccacttgatgcgatgaataaataatgaagtgtgctgtgttttcaatagcaaataagttgcagactcacagggttagacaagcatatcatcaaaaccagatctatgcccatttgcctttcttatttccccagaatcagaaaacacgaatattctgtttttgattgatagtcactgaaagtccacagttttaggcaccgtatagaacaaggccttggttcca

SEQ ID NO: 443984 - DNA, 360 bp, Homo sapiens
cagaactcagaagctgcctgcatataattcctttgccagctttttttttttttttcccaaaacacccaaggccctatggggagagaaagaatttgaraaataaagttgaggacaaagaggtctgtaaatctagagagcaaatgacatatagactgctccctggctgtatggtaaccacacctgatagcagtagcttaagcatgcccgtagaatgaccctctatagcagatgcatctgaatgtgtgttccaagacagggaattcaggagtggccaacccagagattcattccttgcctatgtggaaaacctgatccaacggctaacctatggaacatgggacatacaagggaatgaggccc

SEQ ID NO: 443985 - DNA, 360 bp, Homo sapiens
cagaactcagaagctgcctgcatataattcctttgccagctttttttttttttttcccaaaacacccaaggccctatggggagagaaagaatttgagaaataaagttgaggacaaagaggtctgtaaatctagagagcaaatgacatatagactgctccctggctgtatggtaaccacacctgatagcagtagcttaagcatgcccgtaraatgaccctctatagcagatgcatctgaatgtgtgttccaagacagggaattcaggagtggccaacccagagattcattccttgcctatgtggaaaacctgatccaacggctaacctatggaacatgggacatacaagggaatgaggccc

SEQ ID NO: 443986 - DNA, 360 bp, Homo sapiens
cagaactcagaagctgcctgcatataattcctttgccagctttttttttttttttcccaaaacacccaaggccctatggggagagaaagaatttgagaaataaagttgaggacaaagaggtctgtaaatctagagagcaaatgacatatagactgctccctggctgtatggtaaccacacctgatagcagtagcttaagcatgcccgtagaatgaccctctatagcagatgcatctgaatgtgtgttccaagayagggaattcaggagtggccaacccagagattcattccttgcctatgtggaaaacctgatccaacggctaacctatggaacatgggacatacaagggaatgaggccc

SEQ ID NO: 443987 - DNA, 589 bp, Homo sapiens
aataatctccaggttggccactcccagattccctcgyttggaacacacattcaggtgcacctgtcatacagggtcattctaagtttatgcttaagttattgctttcaggtgcatttaccctgcagggaggtaagtttgagcaagagtatactgtgaggttgggagcttcaagctgaaatcaagttgatttccagaaaaaaaaaaattaaatgcagtatttcctggatttctgagttagttaactgtaattcctatcacttcaatatgataacctgtatcaagaccaatgaggcgtagtcgcaatgagcagacttgcagaggagaaaatggcacagacaaactaccctgagagctggatgagaacagaagaaaaaacactccccctgcttttgtgaagagggtagaaatagctttgactggttaagaatttgttttacttttaacagtgtacaattcagtcattattttctgcagtcttagagcctagcattgaatagacattaaatgattaattcattttaatttttagttactggtagaattgttcatttaagttatgtcactatattaagaactgtatcaggaataa

SEQ ID NO: 443988 - DNA, 589 bp, Homo sapiens
aataatctccaggttggccactcccagattccctcgcttggaacacacattcaggtgcacctgtcatacagggtcattctaagkttatgcttaagttattgctttcaggtgcatttaccctgcagggaggtaagtttgagcaagagtatactgtgaggttgggagcttcaagctgaaatcaagttgatttccagaaaaaaaaaaattaaatgcagtatttcctggatttctgagttagttaactgtaattcctatcacttcaatatgataacctgtatcaagaccaatgaggcgtagtcgcaatgagcagacttgcagaggagaaaatggcacagacaaactaccctgagagctggatgagaacagaagaaaaaacactccccctgcttttgtgaagagggtagaaatagctttgactggttaagaatttgttttacttttaacagtgtacaattcagtcattattttctgcagtcttagagcctagcattgaatagacattaaatgattaattcattttaatttttagttactggtagaattgttcatttaagttatgtcactatattaagaactgtatcaggaataa

SEQ ID NO: 443989 - DNA, 554 bp, Homo sapiens
aaattaatatataagggtttccaatcaaaaagcaggataatcatttggttttccttcaaggctgatatggtttggatctgtgtccccacccaaatatcatgttgaaatataatccccaatactggaggtgggcctggtgggaggtaattggatcatgggggcagtttctcatggcttaacaccatccccccagtgctgtcattgtgatagtgataatgagttctcatgagatcttgttgtttaaaagtttatagcacctccctattctctctcctggtcctgctcctgatatgtaagatgtttgctcccwctttgcctccatgattgtaagtttcccaaggcctcccaggaaacaaatgttgccatgcttcctgtacagcctgcagaattctgagccaattaaacctcttttctttataaattacccagtctcatgtagatctttatagcagtgcaagaatggactaatacaaaaaaacttttattaaggagtggagcattgctataaagatacctgaaaatgtggaagcagctttgcaactgggtaatagcca

SEQ ID NO: 443990 - DNA, 612 bp, Homo sapiens
cttttcaacttagttgataataggttatactcaaacacaaaatcagaccaactgtgatgatttgtagtgatgttaatgattattatttcttayggaacaaaatatcactgagaaaagaccccagaatatatccacttggcgattgttttcagagaaaagaaataatgttgaggggaaacgttgctgaaaagaaaaaaaaaatctatagaaaaaaagaactggaaagaaagaaattatatttgcttcttaagaaagtaatctttttatcaagagttattttccataagatattggggtacaggtggtatttggttacacgaggaagttctttagtggtgattcgtgaaattttggtgcacccatttttatatgggaaaagaaatgtacatcagcagttgaccttggaaactataaaacaatcagaaatccacttagtaaccaaaaccctaaaaatattaccttagcatggtggtcctccataaagatagttgctatctgttcaacaaatatattaccaccaaagagataaaagcaagtacaacctacaaatttacagtgtttctctgtacgttgttcaaaaaatagaattcactggaaggatgaagcaggcaa

SEQ ID NO: 443991 - DNA, 562 bp, Homo sapiens
agcagttgaccttggaaactataaaacaatcagaaatccacttagtaaccaaaaccctaaaaatattaccttagcatggtggtcctccataaagatagttgctatctgttcaacaaatatattaccaccaaagagataaaagcaagtacaacctacaaatttacagtgtttctctgtacrttgttcaaaaaatagaattcactggaaggatgaagcaggcaatgtgattaattcatagaagagttcaatcttattacagccattaccttctaagtgaagatatagtgcaaacaatgctgtattttttagactgctgttatcaattccagatattaaaataattattttaagctgttatagcctacaggcaaaacaaaatagcacaggaactataaagctttgtaaaacaaaacatataagtagtcaaactgggcttatcccacccctgccagataaaaaggctgatcatcagtcaagaaataagcacattaatcctgaaggaaaaaaatttgcatttctataatgtgaaattactcctgcactgaaagatcttgttgaaaaa

SEQ ID NO: 443992 - DNA, 604 bp, Homo sapiens
ttgaaaaaacttaatgtatttctcccaaaaacaattttttaaaaggtacttccatgctgggatttcttttgcacaaaaaaatgaaataaaaatcatctactttcatagtataataaatttttaggagtaattgttcttcaacagagatagaaagctccactattaatgtgcatgattttctagatattattaaaagcaatgcaattacagttatggtaattgatatggttcttacatgataatgatcacgggtcaagagtttaaaacataaagcagaacatgctttgcactttttaaagtcaactgagcgattgaaacttggctttgctatgaaagacagtggactctttttgccctaactgcttgaggtagaagtgggggcagagtgttgcttagaaatcccatgtcccttctttcatttaccctcttatctcctccaaaccagaactgttctttccttaggaaaagaaggtaattctcagttayctgggcaaatgagagtcatgcataacaaggataaatcaatttcacagttaatctcaaacccccatttcagccccgttttattagtgtcctagccttccttaataaactgactaaacag

SEQ ID NO: 443993 - DNA, 555 bp, Homo sapiens
attgagctctggcgaccagaagtctaaagtcaaggtgttggcgtggcgcgacctcactccctcccaaggctccccggttccttgcctcttccagtttctggtgtctgttggcattcactgtggctgcatccctccaatctctgcctccgtcttcacatggctctctcatctgtgtgtccgtgtcttcccttcttctgtcccttacaaagacacttgtcattggatgtagggtccacttggtaatccagaatgatctcatcttaagattcttaacttaattacacctgcaaagacacccttaccctcacattcataggttctggggacatatttttttgggggacaccattcaacccactacaacactcaagtttgagaagcagtggtagaggcagaatgaatgaggaaattccacatggaaaggtgctcccttcaatttcacaaaaatccycccccccttttcattttctcctcttgttcacttctttctcttccttttattcacttgattgttatgtgtttctatttcttttccactattttttttttcctcat

SEQ ID NO: 443994 - DNA, 580 bp, Homo sapiens
gctctcaaatactacaagcccaactaacaactttcaggtgcctgggacaaaagattatagtcaaaacataaaataagttgcccaaggcaaaggctgaggaaaatttctttaggaaatcaggacattcaaaagtagtcatgtatactgggaatttagaaagccatgtacacacccaggacaaaacacatacagaagaaagacctaagatgaccctacactttcaccttgagttgatctgtagactcagtgtgaggrtggctaactgttgaaggaagggcacacatgcacatatacagaggcagtctggaaagattagtagaggtggttttccctttctctccctttgttttgttttgtttttagttcctggcactcacggaaatctcagtcagaacactagctgaatataagctaaggaacaaagacttctatgacctcacatgataaaaaatatagtcttttcaataatagtttggaaaaaatactaaacaaacagactactataaccttcaacaataaaaaaaatcacaaggcatacaggaaacaggaaattgtagcccattcaaaggaacaaaataaa

SEQ ID NO: 443995 - DNA, 576 bp, Homo sapiens
tttttatattttgtcagagttgatctacaacaaggcagcagcacatcattatcagaatgggaaatcctttatataagcttgaaaagactgtgtgttctacaattctggggtgcattgatgtatacgtgtgttagactrtctattgatttttgtatttatgtcttattacagatttaattatgtctgcttaatcaatatgtgtccaaatctatcagtatgactattgatttgtcaatttccattatttgtcctatcgaactttgtcaattcagaaaccatgttattcagtctacactgtactagaattattatattttcctggagaattaaatctttaaaggcttttatcattatttagtatcacacttttattgttaatggtatttgtgccttaaaaatctacttggcacatatatacatattttccctggaagattggttttaaaaataatcctgtatgttatgacaatccttaactagaacatttaatcgatttacatttgctgcaatcaaaaatttatttcacagcaatattcctttttctagcgtttcttgacctcttttggatttcttaat

SEQ ID NO: 443996 - DNA, 569 bp, Homo sapiens
aacttaatttcgtagcaattaccacggggatcacaataaacatcctatttataacaatctagttagaattaatataaacttaatttcgtggtatacaaaatctttgctcctgtatagtttgtttcctttccactttttgagctgttgtcatattacacaatgtgtgcccactaacttagagttttaattattgctttatgtggttcatataggagagaaatattattatcaacaagtagtacattcatattttcttatttattttcttatatatttttgacattgttctttatttattgatgtagtttcaaattcatatttttgacctttcattttaacttggaggactcttctggtatgtttttgtaggacacatctacttatagtgttgaataccctcagtttttgtttatgtgggaacttaaaaatttctccttatttttcaagaatacttttgctggatatagaattcttggttgactttttttttttttttttttttttcctatcagcactttttcctatcctctcactacttactggyttccatcctttctgatgagaaatta

SEQ ID NO: 443997 - DNA, 578 bp, Homo sapiens
tctgcagaaccatgagctaaaataaacccctcttttctttataattacccagcctcaggcatttctttatagcaacaaaaaatggagtaatacacctagataaatttaaaaaaawttttgtgttaacattttttttttaattttagcgaggtttattactatgagtcttgctatgttgcccagacttgactgagagtcctggactcaggtatcctcccagcttagcctcccaaattgctgaaattacagatgttaggctaccacatctggcctcattatccttaatttttgatttttagatatagtttcatttagtcttttgaacatatttaaaatagctgacttaaacttcatcagtaaattctaaggattgggcttcctcagggacagcttcttttgattgtcttcttttctgtgtataggccatattttttttgtttctttgtatgtcttataatgttatgttgaaaagaggacattttaaataatacaatggggcaattctttaaatcagatcctctccccacacagtgtttgatatttttgctgctggttgtagttaccatttttgtttttag

SEQ ID NO: 443998 - DNA, 578 bp, Homo sapiens
tctgcagaaccatgagctaaaataaacccctcttttctttataattacccagcctcaggcatttctttatagcaacaaaaaatggagtaatacacctagataaatttaaaaaaaattttgtgttaacattttttttttaattttagcgaggtttattactatgagtcttgctatgttgcccagacttgactgagagtcctggactcaggtwtcctcccagcttagcctcccaaattgctgaaattacagatgttaggctaccacatctggcctcattatccttaatttttgatttttagatatagtttcatttagtcttttgaacatatttaaaatagctgacttaaacttcatcagtaaattctaaggattgggcttcctcagggacagcttcttttgattgtcttcttttctgtgtataggccatattttttttgtttctttgtatgtcttataatgttatgttgaaaagaggacattttaaataatacaatggggcaattctttaaatcagatcctctccccacacagtgtttgatatttttgctgctggttgtagttaccatttttgtttttag

SEQ ID NO: 443999 - DNA, 578 bp, Homo sapiens
tctgcagaaccatgagctaaaataaacccctcttttctttataattacccagcctcaggcatttctttatagcaacaaaaaatggagtaatacacctagataaatttaaaaaaaattttgtgttaacattttttttttaattttagcgaggtttattactatgagtcttgctatgttgcccagacttgactgagagtcctggactcaggtatcctcccagcttagcctcccaaattgctgaaattacagatgttaggctaccacatctggcctcattatccttaatttttgatttttagatatagtttcatttagtcttttgaacatatttaaaatagctgacttaaacttcatcagtaaattctaaggattgggcttcctcagggacagcttcttttgattgtcttcttttctgtgtataggccatattttttttgtttctttgtatgtcttataatgttatgttgaaaagagracattttaaataatacaatggggcaattctttaaatcagatcctctccccacacagtgtttgatatttttgctgctggttgtagttaccatttttgtttttag

SEQ ID NO: 444000 - DNA, 633 bp, Homo sapiens
tgaataacaagccttctcctatcacggatttgtacagctatattaaaaattagtcaaatatcaaaaggaacaccaaagcttgtaggtaaaatgtcatcttagaattgcattttgaactttgggagcagtaaaaggcttgacaattaaaatgtcagagcggtcttatcaaaaaatatcttcagatattatttctttcctttttttgtttttcatagaatcaaatggagacctagccacatacayagacaggcaggcacacacccacacatgtgtagttcattaaatgaaatgcaataatatggaaattgggtgtagtttcatttagctcatatccatatttagatttataaatgtgaaatttggactaggactttcccagactaggaggttttaacatggtttattctgccagtattggaaggtttactacgagtggtatgtttggtgaatgtaaagacattcagcaacatatatgatgaggaaattgtaatatttagaatcagaagatttagttaggaactcagctctaccatagaagtgacacataaaaaaattatttctttttttgagactcaattgctcatctgttaaatgagaattagagtcaaagtatagttgattctcattattcat

SEQ ID NO: 444001 - DNA, 540 bp, Homo sapiens
aagacttctaagagccagattctgggctaaaagctacatatggatatatgcaattgttcataggtatcatcaattcattttttcgtagatgattatcctgtgagattgtaacatctcattctatgattatattaattaaagttcctttaaggtaaacaccatatctaagctttcttttatgtgcaacagcatatgtgtaagagagtcctgttgaataaaaaattgtcactggcatggagtatgcacagcctcattgcagagtgatggtgaaattaaaggggaaagtaagaaaggtgaatggagtcttcatcaaacagcagagaagtcattacaatatcactaacataaaatgagaactctaaggcagagttccccaacccttttgatacaaatgaccagtttcatggaaaacaattttttcatgggccagggggtgggggatgatttctggatgatgcaagcaaattacrtttaccatgtactttatttctattattattacattggaatatataatgaaataattatacaactcatcat

SEQ ID NO: 444002 - DNA, 301 bp, Homo sapiens
agaatgattttgatgagttgacagaagtagacttcygaaggtcggcaataataaacttctccaagctaaaggagcatgttctaacccatcacaaggaagctaaaagccttaaaaaaaggttagatgaatggttaactagaataaccagtgtagagaagagcttaaatgaccatatggagctgaaaaccacagcacaagaacttcgcgaagcatgcacaagctttaatagccaattcaatcaagtggaagaaaggataccagaaattgaagttcaaatgaataaaataagtgagaagacaag

SEQ ID NO: 444003 - DNA, 594 bp, Homo sapiens
atgggtaatagtaagtacacagaaaaacatagaatattataacactgtaattgtgatgtgtaaactactcatatcttgagtaaaaagactaaaaggtgaactgatcaaaaatagtaactacaacaactttttaagacatattcastacagtacagtataaatagaaataacaaacagttaaaatatgggggggtgaagttaaagtgtaaacattttgttagctttctttttgtttgttagattgttcatgcaatcagtgctaagttgccatcagtttaaaataatgggttataaaatagtatttgcaagcctcatggtaatctcaaatcaaaacacatacaacaaatacataaaaaataaaaagcaagaaattgaaatatacccccagagaaaatcatcctcattaaaaagaagacaagagggaaggaaaaaagaaagagaagactatacagcaaccagaaaacaaatacaaaaatacaggagtaagtccttacttatcaacaataacattgaatgtaaacggattaacctctccaatgaaaagacacagaatggctgaatggattaaaaaaaaatcatctgttgcctatggaa

SEQ ID NO: 444004 - DNA, 511 bp, Homo sapiens
accagtgtcaattcacaagagtatataacaattgtaaatatgtatgcacccaacactggagcactcagatatataaagcaaatattattagacctaaagaaggaagaagaaaatagaccctgttaaatttatgactggagattttaagaccccactttgggcattgaacagatcatttagacagaaaatcaataaggaaacatcaaatttaatctgcactatagaccaaaagtacctactagatatttgcataaatttcatgtaacagctgcagaaaacacatttgtctctttagcacatggattattctcaaggacagactacaagttasgtcacaaaacaagtctcataacattcagaaaattaaaataatatcaagcatcttctctgaacatatgtaataaaactagaaatcaataacaagaggaatttttaaaactatacaaacacatgtatattaaacaatatgctttcaaatgaccagtgggtcaataaagaaattaagaagaaa

SEQ ID NO: 444005 - DNA, 527 bp, Homo sapiens
agcagctttggaactgggtaacaggaagaggctgaaagagtttggagggctcagraaacgacaggaagatgagggacagttcataacttcctagaaactggttaaaccattgtgaccaaaatgctgatagtgatatggacagtgaagtccaggctattgaggtctcacatggagatgaggaactttttgggaactgcaacaaaggtcatttgtgttatgccttagcaaagagcttgcctgcactctgtttatgtcctagggatcagtggaagttttaacttcagagtgatgatgcagggcatctagcagaagaaatttctaagcagcaaagcattcaagatgtggcctggctccttctaacagcctatgttcagatgtgggagccaagaaatgacttaaagttgagatttttatatttaaaagggaagcagagcataaaagtttggaaaatttgcagcctgtccatgcaacagagaaaggaaacacttttttcaagagaggaattaaggcaggttgtggggcaacaa

SEQ ID NO: 444006 - DNA, 527 bp, Homo sapiens
agcagctttggaactgggtaacaggaagaggctgaaagagtttggagggctcaggaaacgacaggaagatgagggacagttcataacttcctagaaactggttaaacmattgtgaccaaaatgctgatagtgatatggacagtgaagtccaggctattgaggtctcacatggagatgaggaactttttgggaactgcaacaaaggtcatttgtgttatgccttagcaaagagcttgcctgcactctgtttatgtcctagggatcagtggaagttttaacttcagagtgatgatgcagggcatctagcagaagaaatttctaagcagcaaagcattcaagatgtggcctggctccttctaacagcctatgttcagatgtgggagccaagaaatgacttaaagttgagatttttatatttaaaagggaagcagagcataaaagtttggaaaatttgcagcctgtccatgcaacagagaaaggaaacacttttttcaagagaggaattaaggcaggttgtggggcaacaa

SEQ ID NO: 444007 - DNA, 519 bp, Homo sapiens
tctggtttggggactgcccaattcctgaatgttttttttgctcaattaaaccatgttaaatgtaatttgtctaaggttttccttttagcaggtgactgagtgaaacccagaatgatgttgccaggcctcactagctcctggtgtacagaggtcacaggaacagccagaatctgtgtcttctggttcctacttgcacctactcatgagggaccacagggcctctcttatccctttttagttatttctgggaggccctaatgtgtttctctctatgcttgtgggacccaagtgtctcatatttttcttctccagagactctgttggtgtccactgctcacagggtagttaagggagggatcttgyccttgcccttctgctgatgtgtccaccccaaaggatcacagggtccccctgccattcactgcagctccagagctcccttagagaaggaaggtccttccctcctcagggtccagtggagcctctcaggtggggctggagtggatgctatgtccttcc

SEQ ID NO: 444008 - DNA, 534 bp, Homo sapiens
aataagtagccatagacaaaattaaagaaatgtatacatgtgccatgttgatgtgctgcacccattaactcttcatttaacattaggtatatcgcctatgtaacaaacctgcatgttgtgcacatataccctaaaacttaaagtataataataaaaaagaaatgtacattgctgtattccaataaaccatggatattgaaatataaattttgtacagttttcacttgccacagaatattattcttctcttgaagttttcagctgtttacaaatgttaaaaccattcttagctcactgaccaaacaaaaatagcttgcaggttggatttggccagggcccataattttctgactccaggtctaaagtgtgagtcctctcagataatttttctatatttaccagtayattagattgcttcaacagaagtaatcagcaatttcaggtattgtgtgtagagacatgggggaagcttcgaatcatagctcagagttgactgcctgtccatcttccttctttaagatcagctatgcaaag

SEQ ID NO: 444009 - DNA, 534 bp, Homo sapiens
aataagtagccatagacaaaattaaagaaatgtatacatgtgccatgttgatgtgctgcacccattaactcttcatttaacattaggtatatcgcctatgtaacaaacctgcatgttgtgcacatataccctaaaacttaaagtataataataaaaaagaaatgtacattgctgtattccaataaaccatggatattgaaatataaattttgtacagttttcacttgccacagaatattattcttctcttgaagttttcagctgtttacaaatgttaaaaccattcttagctcactgaccaaacaaaaatagcttgcaggttggatttggccagggcccataattttctgactccaggtctaaagtgtgagtcctctcagataatttttctatatttaccagtacattagattgcttcaacagaagtaatcagcaatttcaggtattgtgtgtagagacatgggggaagcttcsaatcatagctcagagttgactgcctgtccatcttccttctttaagatcagctatgcaaag

SEQ ID NO: 444010 - DNA, 580 bp, Homo sapiens
tagaatattggttgagtgcagtgccacctagccatcgggtatcaaatacctatggtagcaaggcaacgagtagaagttggatcttcctggctagtctgttctgtgtctcttattttggcaaagtgaatctacaggtaaaagggcaagtttattatcttaaagctattccttgttatttctcttcgtgaagatgaacgaaaaagtggcatgaaragaaaacagatacatcttcaagtctgaggacacgcgggctcctgggaaaaagtctgtttcatgactgtgagaatgactgctgaacctcaagaaagccctagaagtatacttggtgtttttttctagttgatagagtgaaaggcagttgggatagagatgaaagccgtgttaaatagaatagaaggcttgactctttctaagtatgtagtgcaatttgctaacaaaaccacttatttattttagtaaaaccataggtttagccagactttggttttataggtttaacataatttcagcatcatttattataatctagctcttaaggtttttgaccttaagaatcttgagaagaaataaagtagaaaat

SEQ ID NO: 444011 - DNA, 599 bp, Homo sapiens
gcatccttgaagcttagaggtctgcagtgaggctttcagaggagcctggagactgcctgtcagtcttgctgtgtgaatccttgagaatttacagctttcaggacatggacccagctttgagtccttccaggccagtcatgctcactaggggtaattttatatagtccaagatccaagaccccagatactgacgctctgttttttctggttaccattgtcactcgggaagctttgcargccctcagttgaggaccaaagggcctctcacttccgcttccttccctggacccttggctatccaggtggaccggcagacagctttttcctactgaaccatgattgcataaagcaggggctgtcctctccccttacatgtaacgatcagcaaaggctgttctacttactgactttgtataaatagacaaattgtgcaagaaaaataacaagaacaataataataactgatatctaatggagcacttatgatgtgttccaaacctttaacctctattagcattttaatccatataaaaacctatgaggtagatactaatatttccccattttgcagatgaggaaattgagtcatgcagcagtgt

SEQ ID NO: 444012 - DNA, 599 bp, Homo sapiens
gcatccttgaagcttagaggtctgcagtgaggctttcagaggagcctggagactgcctgtcagtcttgctgtgtgaatccttgagaatttacagctttcaggacatggacccagctttgagtccttccaggccagtcatgctcactaggggtaattttatatagtccaagatccaagaccccagatactgacgctctgttttttctggttaccattgtcactcgggaagctttgcaagccctcagttgaggaccaaagggcctctcacttccgcttccttccctggacccttggctatccaggtggaccggcagacagctttttcctactgaaccatgattgcataaagcaggggctgtcctctccccttacatgtaacgatcagcaaaggctgttctacttactgactttgtataaatagacaaattgtgcaagaaaaataacaagaacaataataataactgatatctaatggagcacttatgatgtgttccaaacctttaacctctattarcattttaatccatataaaaacctatgaggtagatactaatatttccccattttgcagatgaggaaattgagtcatgcagcagtgt

SEQ ID NO: 444013 - DNA, 532 bp, Homo sapiens
cctcttggagtcagactcacgcatctccaaagaagaacttttgagagcccaggcgctgagagagcagggtcagacactcccgagcctctcggtacagctgtaggggcgacacaggtaggcttgcagctgcgggaacagtgccacctccscacctaagcactcccattcctggccagcatccttggggctcatctcatacaatagcccccggtctcagagctacctccttctccagctcttcctcgtcctcaggcctgtgctccccagtcagcagctgtagccgttccatgtactgccgctgcatgcggccaggcaggaagaagttgaggggaaagggcatagcctctgcataccacttcctgggtcacttccactgtagttcttggtgtctatccaaaaagtatgtacctgtgattgggtaggcaggaagaaacaggtaggtctgagccagtgcacctgtctgattcaaggtgggcttctgacccccatgctttcctgagcctgtgtgtgggtctgtgtgttcccgaaccct

SEQ ID NO: 444014 - DNA, 427 bp, Homo sapiens
ttgtcaaatgcatagagttgtgtatcctccaccaccatcaagatacagaacggttccatcccctgcaaaattttactcatgctgctccttcatagtaactgcctctccctcccactacactctggcaaccattgatttgttctccatctatatatttgtattttgagtctggcttctttcatgtgctgtaacgcattcaagattcattcatgttgcatgtgtcaacagtttattccttttaattatgaaatagtatgtcattgtatagatgcactaccttttgtttagccatgtgccagttgacaggtatttgaattgtttccagtttaggagtaattytgaatcaagctgctgcaaacattaagttttttgtgaacatattttcattattcttgggtaaacagctgtgagccatgaatagagttta

SEQ ID NO: 444015 - DNA, 576 bp, Homo sapiens
ctcgcacaatttgagcccaatttgattccggagccatgacttgcagcacattgaagaccagaagacgcccaaaggtagggaggcgacagataccrcttggcctcaggagctcctctggccgttgctgaaccaaggttcccccagagacatccacagcctggggctcctcccttcttcacctagttcctttcctaggcccaggccccaagcatgaggactggcactgcctggcgtctccatcccttggtctttccctgttgcatccagctggtttcttttctcctccctacccatatgcccagttatgggccctcttcttcttcctagaggctggccaaaaactaagttttcaaagtacaaaatggatgctacagatttcgttgctttagaggaaatgtctgacggttcttgtatttaaacttaagtagctacactgggactcacagtttcatatcttgagttctagaccagagctatcaaccctaaagcaacggcaaggggttagaggtactcttcttgattcgaataataaaaaatgattttttttttgtagggacaaggtctcactgtgttgcc

SEQ ID NO: 444016 - DNA, 576 bp, Homo sapiens
ctcgcacaatttgagcccaatttgattccggagccatgacttgcagcacattgaagaccagaagacgcccaaaggtagggaggcgacagataccgcttggcctcaggagctcctctggccgttgctgaaccaaggttcccccagagacatccacagcctggggctcctcccttcttcacctagttcctttcctaggcccaggccccaagcatgaggactggcwctgcctggcgtctccatcccttggtctttccctgttgcatccagctggtttcttttctcctccctacccatatgcccagttatgggccctcttcttcttcctagaggctggccaaaaactaagttttcaaagtacaaaatggatgctacagatttcgttgctttagaggaaatgtctgacggttcttgtatttaaacttaagtagctacactgggactcacagtttcatatcttgagttctagaccagagctatcaaccctaaagcaacggcaaggggttagaggtactcttcttgattcgaataataaaaaatgattttttttttgtagggacaaggtctcactgtgttgcc

SEQ ID NO: 444017 - DNA, 576 bp, Homo sapiens
ctcgcacaatttgagcccaatttgattccggagccatgacttgcagcacattgaagaccagaagacgcccaaaggtagggaggcgacagataccgcttggcctcaggagctcctctggccgttgctgaaccaaggttcccccagagacatccacagcctggggctcctcccttcttcacctagttcctttcctaggcccaggccccaagcatgaggactggcactgcctggcgtctccatcccttggtctttccctgttgcatccagctggtttcttttctcctccctacccatatgcccagttatgggccctcttcttcttcctagaggctggccaaaaactaagttttcaaagtacaaaatggatgctacagatttcgttgctttagaggaaatgtctgacrgttcttgtatttaaacttaagtagctacactgggactcacagtttcatatcttgagttctagaccagagctatcaaccctaaagcaacggcaaggggttagaggtactcttcttgattcgaataataaaaaatgattttttttttgtagggacaaggtctcactgtgttgcc

SEQ ID NO: 444018 - DNA, 576 bp, Homo sapiens
ctcgcacaatttgagcccaatttgattccggagccatgacttgcagcacattgaagaccagaagacgcccaaaggtagggaggcgacagataccgcttggcctcaggagctcctctggccgttgctgaaccaaggttcccccagagacatccacagcctggggctcctcccttcttcacctagttcctttcctaggcccaggccccaagcatgaggactggcactgcctggcgtctccatcccttggtctttccctgttgcatccagctggtttcttttctcctccctacccatatgcccagttatgggccctcttcttcttcctagaggctggccaaaaactaagttttcaaagtacaaaatggatgctacagatttcgttgctttagaggaaatgtctgacggytcttgtatttaaacttaagtagctacactgggactcacagtttcatatcttgagttctagaccagagctatcaaccctaaagcaacggcaaggggttagaggtactcttcttgattcgaataataaaaaatgattttttttttgtagggacaaggtctcactgtgttgcc

SEQ ID NO: 444019 - DNA, 529 bp, Homo sapiens
ttcaaatacaatgaatgtggtcagtgggtcacacctggagaaatcattttctaacctgtaatcaagactgaattactcccttcactggaaagaataaaatattaccacataaattcgtattatgataatggcccactatgaatgctttggtgttcttaattttcttaagatttattaatatttctgaagtaactactaaatgccaagcaatatattttctaatttaatctttcattgacttttactttcacttcaattgagctactcactttcatggctataaacttaacttttcaatcacttaaaaattgatttctaatgttataaactttaatgtyccactctgtgacctgctctttcagactcttccttactgtcaattcaccttctcttctatctcttccagtgcctcagtatcttgactcttccattttcttttttctttgcttttattaagtagatacatgataatttcacatgttgatggggtacaatgtggtattttaatacatgacgcattgttaaaacc

SEQ ID NO: 444020 - DNA, 529 bp, Homo sapiens
ttcaaatacaatgaatgtggtcagtgggtcacacctggagaaatcattttctaacctgtaatcaagactgaattactcccttcactggaaagaataaaatattaccacataaattcgtattatgataatggcccactatgaatgctttggtgttcttaattttcttaagatttattaatatttctgaagtaactactaaatgccaagcaatatattttctaatttaatctttcattgacttttactttcacttcaattgagctactcactttcatggctataaacttaacttttcaatcacttaaaaattgatttctaatgttataaactttaatgttccactctgtgacctgctctttcagactcttccttactgtcaattcaccttctcttctatctcttccagtgcctcagtatcttgactcttccattttcttttttctttgcttttattaagtrgatacatgataatttcacatgttgatggggtacaatgtggtattttaatacatgacgcattgttaaaacc

SEQ ID NO: 444021 - DNA, 586 bp, Homo sapiens
tcacaggtaacattctacctaattatagagctttacrcttttcaataaattttgttgtacataatacagtcactctatgaattcagtgagacagatagttatccacattttacataaaaagaaagaaaaggcagaaaagaagtgatttgcttgaagtgacacagaaatagctggtagaaccatgcactgtgtagatggcagggctactgacttctcatttcacaccagaaatgtagacagaattagatataatgacagttattatatttttaaacctttcaaataagaatatccttggaattcattaacaaagcacaaagcatgtgattagcatctgaaaatgttttattatacaatcactagacacaaaaagaggtttccattttcctgtgtatttgaaagagttcaacagccctaagtcacacagttggaggaaactcaaacaagggaaggttcgtttgaattgatgaaattagcaggatgaagtttacaatacaaagatttttgtttcaagactctgaggttttgtagggaggaaggggaaaggcagatgacaccaaataagactggtcggagaggggatgag

SEQ ID NO: 444022 - DNA, 519 bp, Homo sapiens
tccagaaaatcacaatcacaggagagttgtaccacgttagttgcatcatgttaggtacaactgttgctttgttttctttttatttggaaattatgtatggtttaaggaggtccatatgggtgccacatctacaaggggtggacttgcagacttaatttcaggtgtcaacttgactggattaaggaatccctggaaagctgggaaagcattattttgggtatgactgtgatggttttctcagaagagatcagtgtgtgggtctgagcrgactaggtggggaagatctgctgtcactgttttgaatgtcttgaatatcacagaagaagttaaaatgaaagttaaaaatgaacaaaatcttgtctgccaaattatgtaatcatgtaccaagcacctctacacgtagcaccatgcttgccttcacaaaatgccttttgtcagataataaaaatagttcaacaaattcagtggccttctgagccagacaccttctggcacagagcttcctccagtgctacaaga

SEQ ID NO: 444023 - DNA, 586 bp, Homo sapiens
tcacaggtaacattctacctaattatagagctttacgcttttcaataaattttgttgtacataatacagtcactctatgaattcagtgagacagatagttatccacattttacataaaaagaaagaaaaggcagaaaagaagtgatttgcttgaagtgacacagaaatagctggtagaaccatgcactgtgtagatggcagggctactgacttctcatttcacaccagaaatgtagacagaattagatataatgacagttattatatttttaaacctttcaaataagaatatccttggaattcattaacaaagcacaaagcatgtgattagcatctgaaaatgttttattatacaatcactagacacaaaaagaggtttccattttcctgtgtatttgaaagagttcaacagccctaagtcacacagttggaggaaactcaaacaagggaargttcgtttgaattgatgaaattagcaggatgaagtttacaatacaaagatttttgtttcaagactctgaggttttgtagggaggaaggggaaaggcagatgacaccaaataagactggtcggagaggggatgag

SEQ ID NO: 444024 - DNA, 479 bp, Homo sapiens
gtctggcctcatgaagatgccagaataaatggcaggtatatcctgaatgaatgtgagatttttactctgtgaatttcctrtgaggagtggtgagttatcttctgaaaactttatgatgaaaatgcagacaagagtatcttaagattatcgtaataatcataattaatgcttatatagcactttcaatgcgccaagaaattgtaggcattttgcacattaacttttttcaaatccctcttgggtttttatttttttattgcgatgtaattcataattataaaattcacccttttgtacagtcagtggtttttagtatatatccaagaggttcaccactgtctagttgctcagcatttttgtcatctcaaaaggaaatctcttcctacccattaaagctgtcacatcccatcttccccctctcctagtccatggcaaccactagtctgctatctatgtgaaattgcctattctgaatattt

SEQ ID NO: 444025 - DNA, 479 bp, Homo sapiens
gtctggcctcatgaagatgccagaataaatggcaggtatatcctgaatgaatgtgagatttttactctgtgaatttcctgtgaggagtggtgagttatcttctgaaaactttatgatgaaaatgcagacaagagtrtcttaagattatcgtaataatcataattaatgcttatatagcactttcaatgcgccaagaaattgtaggcattttgcacattaacttttttcaaatccctcttgggtttttatttttttattgcgatgtaattcataattataaaattcacccttttgtacagtcagtggtttttagtatatatccaagaggttcaccactgtctagttgctcagcatttttgtcatctcaaaaggaaatctcttcctacccattaaagctgtcacatcccatcttccccctctcctagtccatggcaaccactagtctgctatctatgtgaaattgcctattctgaatattt

SEQ ID NO: 444026 - DNA, 561 bp, Homo sapiens
agtggtgagttatcttctgaaaactttatgatgaaaatgcagacaagagtatcttaagattatcgtaataatcataattaatgcttatatagcactttcaatgcgccaagaaattgtaggcattttgcacattaacttttttcaaatccctcttgggtttttatttttttattgcgatgtaattcataattataaaattcacccttttgtacagtcagtggtttttagtatatatycaagaggttcaccactgtctagttgctcagcatttttgtcatctcaaaaggaaatctcttcctacccattaaagctgtcacatcccatcttccccctctcctagtccatggcaaccactagtctgctatctatgtgaaattgcctattctgaatatttcctaagaaatcatgtaacatgtggccttttgtatctggcttctttcacttacaacattcttgaggtccatcattgttgtagcacttgttcctttttatggctgcgtagtgtagtccattgtatggatgtaatattttgttcatccattcatcagttgatgaacattt

SEQ ID NO: 444027 - DNA, 561 bp, Homo sapiens
agtggtgagttatcttctgaaaactttatgatgaaaatgcagacaagagtatcttaagattatcgtaataatcataattaatgcttatatagcactttcaatgcgccaagaaattgtaggcattttgcacattaacttttttcaaatccctcttgggtttttatttttttattgcgatgtaattcataattataaaattcacccttttgtacagtcagtggtttttagtatatatccaagaggttcaccactgtctagttgctcagcatttttgtcatctcaraaggaaatctcttcctacccattaaagctgtcacatcccatcttccccctctcctagtccatggcaaccactagtctgctatctatgtgaaattgcctattctgaatatttcctaagaaatcatgtaacatgtggccttttgtatctggcttctttcacttacaacattcttgaggtccatcattgttgtagcacttgttcctttttatggctgcgtagtgtagtccattgtatggatgtaatattttgttcatccattcatcagttgatgaacattt

SEQ ID NO: 444028 - DNA, 561 bp, Homo sapiens
agtggtgagttatcttctgaaaactttatgatgaaaatgcagacaagagtatcttaagattatcgtaataatcataattaatgcttatatagcactttcaatgcgccaagaaattgtaggcattttgcacattaacttttttcaaatccctcttgggtttttatttttttattgcgatgtaattcataattataaaattcacccttttgtacagtcagtggtttttagtatatatccaagaggttcaccactgtctagttgctcagcatttttgtcatctcaaaaggaaatctcttcctacccattaaagctgtcacatcccatcttccccctctcctagtccatggcaaccactagtctgctatctatgtgaaattgcctattctgaatatttcctaagaaatcatgyaacatgtggccttttgtatctggcttctttcacttacaacattcttgaggtccatcattgttgtagcacttgttcctttttatggctgcgtagtgtagtccattgtatggatgtaatattttgttcatccattcatcagttgatgaacattt

SEQ ID NO: 444029 - DNA, 521 bp, Homo sapiens
aattcacccttttgtacagtcagtggtttttagtatatatccaagaggttcaccactgtctagttgctcagcatttttgtcatctcaaaaggaaatctcttcctacccattaaagctgtcacatcccatcttccccctctcctagtccatggcaaccactagtctgctatctatgtgaaattgcctattctgaatatttcctaagaaatcatgtaacatgtggccttttgtatctggcttctttcacttacaacattcttgaggtccatcattgttgtagcacttgttcctttttatggctgcgtagtgtagtccattgtatggatgtaatattttgttcatccattcatcagttgatgaacatttagattgtttcccctttttkactattgtgactaatgctagtgtgaatattcttatgtaagtatttttgtgggtgtacgttttcatttcccttgggtatacatacttaggagtaaaattgctgggtcatatggtaactctttaactttttgaggaac

SEQ ID NO: 444030 - DNA, 521 bp, Homo sapiens
aattcacccttttgtacagtcagtggtttttagtatatatccaagaggttcaccactgtctagttgctcagcatttttgtcatctcaaaaggaaatctcttcctacccattaaagctgtcacatcccatcttccccctctcctagtccatggcaaccactagtctgctatctatgtgaaattgcctattctgaatatttcctaagaaatcatgtaacatgtggccttttgtatctggcttctttcacttacaacattcttgaggtccatcattgttgtagcacttgttcctttttatggctgcgtagtgtagtccattgtatggatgtaatattttgttcatccattcatcagttgatgaacatttagattgtttcccctttttgactattgtgastaatgctagtgtgaatattcttatgtaagtatttttgtgggtgtacgttttcatttcccttgggtatacatacttaggagtaaaattgctgggtcatatggtaactctttaactttttgaggaac

SEQ ID NO: 444031 - DNA, 521 bp, Homo sapiens
aattcacccttttgtacagtcagtggtttttagtatatatccaagaggttcaccactgtctagttgctcagcatttttgtcatctcaaaaggaaatctcttcctacccattaaagctgtcacatcccatcttccccctctcctagtccatggcaaccactagtctgctatctatgtgaaattgcctattctgaatatttcctaagaaatcatgtaacatgtggccttttgtatctggcttctttcacttacaacattcttgaggtccatcattgttgtagcacttgttcctttttatggctgcgtagtgtagtccattgtatggatgtaatattttgttcatccattcatcagttgatgaacatttagattgtttcccctttttgactattgtgactaatgctagtgtgaatattcttatgtaagtatttttgtgggtgtacgttttcatttcccttgggtatacatacttaggagtaaaattsctgggtcatatggtaactctttaactttttgaggaac

SEQ ID NO: 444032 - DNA, 648 bp, Homo sapiens
agctgggaccacagtcttgtaccaccatacccagctaatttcttaatttttttgtagagatgggggtctccttttgttgcctaggctgattttgaactcctgggcttaagtgattctcctgyttccacctctcaaagtgctggattacaggcatgccagacatatggaaacattctcaactatctgaaaatacgtgaaaagctttgttatgcattgtgagacaatacagcaggaatatttcaccatctgcctaaggtttaaaaggaaataactttaagcatgtgtctaaataggaagtaatgttttagagcggattctcttaaattcagcttgtgcgtctgcagcatatacacagcttgagctgtaacctgacatagagacaggcaacttcagtgcccactgttcttaggatccactgctttttcacagctaaaacccctgagtggcactgttaagtattatgttatgttactttagtcgttaaacgtataagcatacctccaaaggttgaatgtaggccacttgcagaaagtaggcagaatgctcacatttaattcttgataatactgtgtttagctttcttattctttgaaatctcattgagaagaaatactggcatctgttcaaagtaatttctttttcagttga

SEQ ID NO: 444033 - DNA, 648 bp, Homo sapiens
agctgggaccacagtcttgtaccaccatacccagctaatttcttaatttttttgtagagatgggggtctccttttgttgcctaggctgattttgaactcctgggcttaagtgattctcctgcttccacctctcaaagtgctggattacaggcatgccagacatatggaaacattctcaactatctgaaaatacgtgaaaagytttgttatgcattgtgagacaatacagcaggaatatttcaccatctgcctaaggtttaaaaggaaataactttaagcatgtgtctaaataggaagtaatgttttagagcggattctcttaaattcagcttgtgcgtctgcagcatatacacagcttgagctgtaacctgacatagagacaggcaacttcagtgcccactgttcttaggatccactgctttttcacagctaaaacccctgagtggcactgttaagtattatgttatgttactttagtcgttaaacgtataagcatacctccaaaggttgaatgtaggccacttgcagaaagtaggcagaatgctcacatttaattcttgataatactgtgtttagctttcttattctttgaaatctcattgagaagaaatactggcatctgttcaaagtaatttctttttcagttga

SEQ ID NO: 444034 - DNA, 648 bp, Homo sapiens
agctgggaccacagtcttgtaccaccatacccagctaatttcttaatttttttgtagagatgggggtctccttttgttgcctaggctgattttgaactcctgggcttaagtgattctcctgcttccacctctcaaagtgctggattacaggcatgccagacatatggaaacattctcaactatctgaaaatacgtgaaaagctttgttatgcattgtgagacaatacagcaggaatatttcaccatctgcctaaggtttaaaaggaaataactttaagcatgtgtctaaataggaagtaatgttttagagcggattctcttaaattcagcttgtgcgtctgcagcatatacacagcttgagctgtaacctgacatagagacaggcaacttcagtgcccactgttcttaggatccactgctttttcacagctaaaacccctgagtggcactgttaagtattatgttatgttactttagtcgttaaacgtataagcatacctccaaaggttgaatgtaggccacttgcagaaagtaggcagaatgctcacatttaattcttgataatactgygtttagctttcttattctttgaaatctcattgagaagaaatactggcatctgttcaaagtaatttctttttcagttga

SEQ ID NO: 444035 - DNA, 558 bp, Homo sapiens
agaattggctccttatgacatgaagaatgaatgaggtcccagcacataacatggtgccttcttttcyccagtcccctggctactcttccagcagcattaccactggtatacttatgcgtacctctgtgacccttcaactaatgcttcataatgatcatgactgtcagtctcttcatgtacctcaataacttgtgcctcacacccttctactgatggccgtccactgcctttcaatttttctttctgtacactaggcaaattctgattctctaaaccttctattcaaccttcaatgcactctccaaatacctcctcttctctgaagccttttttgcccagcatcctccaatcttaagcaaaactgattcgtcccttcttcgtaccaccagtgtaccttaaccattatttctgtaactggtttacttgtctatatgtcttcttgggcaatgagattctccaaagcagagatgtgccttatcatttcctcgtgcacctcctctctgtactgggcacagtatctggcccagagcagtgtggtcaccagcctgcccagggcag

SEQ ID NO: 444036 - DNA, 558 bp, Homo sapiens
agaattggctccttatgacatgaagaatgaatgaggtcccagcacataacatggtgccttcttttctccagtcccctggctactcttccagcagcattaccactggtatacttatgcgtacctctgtgacccttcaactaatgcttcataatgatcatgactgtcagtctcttcatgtacctcaataacttgtgcctcacacccttctactgatggccgtccactgcctttcaatttttctttctgtacactaggcaaattctgattctctaaaccttctattcaaccttcaatgcactctccaaatacctcctcttctctgaagccttttttgcccagcatcctccaatcttaagcaaaactgattcgtcccttcttcgtaccaccagtgtaccttaaccattatttctgtaactgstttacttgtctatatgtcttcttgggcaatgagattctccaaagcagagatgtgccttatcatttcctcgtgcacctcctctctgtactgggcacagtatctggcccagagcagtgtggtcaccagcctgcccagggcag

SEQ ID NO: 444037 - DNA, 406 bp, Homo sapiens
aagcagatgttggcattatgctccctgtacagcccatggaaccaggagccaattatgtctctcttcttataaattatccaatctcaggtatttctttattyttgcaatgcaagaatgaccaaatacagcatatatgccacattttctttctccattcattcattgatggacacttaggttgattctaggctattgtgaatagtgctgtaataaacatgagagtccagaaatctctttgacatactgatttaatattctttgaatatatacccagtagtgggattgctggattatgtgataagtctatttttaatgtttttggaagttatattgtattccataacaattgctctaatttacatttccaccaacagtgtatgaacattcccctttcttcacatccttg

SEQ ID NO: 444038 - DNA, 557 bp, Homo sapiens
atgaattttgtcaaatgtgttttctgcatccattggaatgttatttttatctttcattctgttaatgtggtatatcacattattaatttttacacattgaaacatccttgtatcacatagataagttacaattggtcatggtgtatgaccttttcaatgtgcttttgaattcagtttgctagttagtattttaytgagaatttttgcatctatattcgttaaggatactggtctgtaattattttttcttgtgttgtcttcgtctagcttttaagtcatggtaacatcggcctcatgaaatgagtttgagagtattctctcttctattttttctgaagagtttaagaagttttggtgttagttcttctttgaatgtttggtagaagttgcccatgaaagcatctgcacctgggcttttctttgttgggaaattattgattactgattaaatctctttgcttgcttttggtctgttctatttcttttttgttccattttggtagattgcatctttctaagaatttatccatttattctaggttatccaatttattggc

SEQ ID NO: 444039 - DNA, 321 bp, Homo sapiens
tgttactgatttctccccttagctttgttgatattaactttatatatttaggtgttctaatgttgggtggatatatattttcaatcttcccattgrattgaacttttatcattatataatgacattcttagtctctagtgacagttttttatttcaagtctattttttctgatctaaatatagatacccttgctcttttttgtttaccatttgcgtacagtatcttttcccatcccttcactttgagcctctatgtatctttatatctaaagtgactcccttataaatatgtactgatgagtatcttttatgcattgtgcc

SEQ ID NO: 444040 - DNA, 321 bp, Homo sapiens
tgttactgatttctccccttagctttgttgatattaactttatatatttaggtgttctaatgttgggtggatatatattttcaatcttcccattggaktgaacttttatcattatataatgacattcttagtctctagtgacagttttttatttcaagtctattttttctgatctaaatatagatacccttgctcttttttgtttaccatttgcgtacagtatcttttcccatcccttcactttgagcctctatgtatctttatatctaaagtgactcccttataaatatgtactgatgagtatcttttatgcattgtgcc

SEQ ID NO: 444041 - DNA, 444 bp, Homo sapiens
cttctaattttattccattgtggaatgagaagatacttggcattatatcaaacttcttaaatttgtagtatgccttgtgacctaagatttgatctatctcagagaagattctgtgtgcacttgagaagaatgtatattctgctgctgttggatggaaagttgtgtatctgtcagtgtttaatctactgtgttgttcaagtcagctgtttccgctttttttattccctcctagatgttctatccattattgaatttggggtactgaagttggctactattattttagtgttactgatttctccccttagctttgttgatattaactttatatatttaggtgttctaatgttgggtggatatatattttcaatcttcccattggattgaacttttatcattatataatgrcattcttagtctctagtgacagttttttatttcaag

SEQ ID NO: 444042 - DNA, 444 bp, Homo sapiens
cttctaattttattccattgtggaatgagaagatacttggcattatatcaaacttcttaaatttgtagtatgccttgtgacctaagatttgatctatctcagagaagattctgtgtgcacttgagaagaatgtatattctgctgctgttggatggaaagttgtgtatctgtcagtgtttaatctactgtgttgttcaagtcagctgtttccgctttttttattccctcctagatgttctatccattattgaatttggggtactgaagttggctactattattttagtgttactgatttctccccttagctttgttgatattaactttatatatttaggtgttctaatgttgggtggatatatattttcaatcttcccattggattgaacttttatcattatataatgacattcytagtctctagtgacagttttttatttcaag

SEQ ID NO: 444043 - DNA, 321 bp, Homo sapiens
tgttactgatttctccccttagctttgttgatattaactttatatatttaggtgttctaatgttgggtggatatatattttcaatcttcccattggattgaacttttatcattatataatgacattcttagtctctagtgacagtttttkatttcaagtctattttttctgatctaaatatagatacccttgctcttttttgtttaccatttgcgtacagtatcttttcccatcccttcactttgagcctctatgtatctttatatctaaagtgactcccttataaatatgtactgatgagtatcttttatgcattgtgcc

SEQ ID NO: 444044 - DNA, 321 bp, Homo sapiens
tgttactgatttctccccttagctttgttgatattaactttatatatttaggtgttctaatgttgggtggatatatattttcaatcttcccattggattgaacttttatcattatataatgacattcttagtctctagtgacagttttttatttcaagtctattttttctgatctaaatatagatacccttgctcttttttgtttaccatttgcgtasagtatcttttcccatcccttcactttgagcctctatgtatctttatatctaaagtgactcccttataaatatgtactgatgagtatcttttatgcattgtgcc

SEQ ID NO: 444045 - DNA, 609 bp, Homo sapiens
atcattatataatgacattcttagtctctagtgacagttttttatttcaagtctattttttctgatctaaatatagatacccttgctcttttttgtttaccatttgcgtacagtatcttttcccatcccttcactttgagcctctatgtatctttatatctaaagtgactcccttataaatatgtactgatgagtatcttttatgcattgtgccactctatgtcttttaattagatagtttaatcctttcacatttaaagtcattgttgataggtaaggagtaacttgcgtttggttaattgtttttcatatgttttgcagttcttttttttttccctctcttgctgtcttcttagtttggttatttcttgtagcggtttggtttcatttatttttcttcacattctgtgtagmtcctataagcttttaatggttgcaaatttacatcttctataaacagatgtcttaatgttatcagcttttttggaatcattttctttctgtttcctcttcagacatatttgcaaatactgtttttcaagacacaagtaaatagggctctagttaaaaatttaacaatacgaaaaaaaagatcctctgagtcttttg

SEQ ID NO: 444046 - DNA, 609 bp, Homo sapiens
atcattatataatgacattcttagtctctagtgacagttttttatttcaagtctattttttctgatctaaatatagatacccttgctcttttttgtttaccatttgcgtacagtatcttttcccatcccttcactttgagcctctatgtatctttatatctaaagtgactcccttataaatatgtactgatgagtatcttttatgcattgtgccactctatgtcttttaattagatagtttaatcctttcacatttaaagtcattgttgataggtaaggagtaacttgcgtttggttaattgtttttcatatgttttgcagttcttttttttttccctctcttgctgtcttcttagtttggttatttcttgtagcggtttggtttcatttatttttcttcacattctgtgtagatcctataagcttttaatggttgcaaatttacatcttctataaacagatgtcttaatgttatcagcttttttggaatcattttctttctgtttcctcttcagacatatttgcaaatactgtttttcaagacacaagtaaatagggctctagttaaaaatttawcaatacgaaaaaaaagatcctctgagtcttttg

SEQ ID NO: 444047 - DNA, 494 bp, Homo sapiens
gtgagatgatatctcactgtggatttggcttgcatttctctgattattagtgatggtgagcattttttcatatacctgttggtgatttttttgtcttatttggagaaatgtctattcagctatcttgactattttctaatccaattatttgtatttttgctattgagttgtttgagttttctataaatttggggtattaaccccttatgaagtgaatagattgcagatattttctcccattttgtaggttgtctcttcactctcatgattgtttcctatgcagtgcagaagtttttatttggtgttatcccatttgtttatttttgcttttgttgtgcatgtcttttgatgtmttttctaaaaagtccttgcccagaccaatgacatataacatttcacctatgttttcttctactagtttcatagtttggggtcttacatttaaatatttaatttattttgagttgatttttttatatgatgagatatagggg

SEQ ID NO: 444048 - DNA, 584 bp, Homo sapiens
aatgacatataacatttcacctatgttttcttctactagtttcatagtttggggtcttacatttaaatatttaatttattttgagttgatttttttatatgatgagatataggggtctactttcattcttttgtatgtggatatgcacttttcccagcaccatttgttgaaaagactgtcttttcccaattgaatgtttgcacctttgtcwaaaataagtttcatgtaaatatgtgcatttatgcctgagctctctatttttgttccactggtctacatgcctgtttttatgccaataccatgctgttttagttaggatagctttgtaatatattttgaaattagatagtgtaatacctctagcattgctctttttgcttaagatttatttggctatttggggtgttttgtagtttcacatggattttaagatattttttaatatctgtgaagaatgaagttggaaatttgatagagattatattggatttatagattgatttgagtagtatggtcatttcaacaatattaattcttctagtccatgaacatgggatatctttctatttattttaattttttaa

SEQ ID NO: 444049 - DNA, 584 bp, Homo sapiens
aatgacatataacatttcacctatgttttcttctactagtttcatagtttggggtcttacatttaaatatttaatttattttgagttgatttttttatatgatgagatataggggtctactttcattcttttgtatgtggatatgcacttttcccagcaccatttgttgaaaagactgtcttttcccaattgaatgtttgcacctttgtctaaaataagttkcatgtaaatatgtgcatttatgcctgagctctctatttttgttccactggtctacatgcctgtttttatgccaataccatgctgttttagttaggatagctttgtaatatattttgaaattagatagtgtaatacctctagcattgctctttttgcttaagatttatttggctatttggggtgttttgtagtttcacatggattttaagatattttttaatatctgtgaagaatgaagttggaaatttgatagagattatattggatttatagattgatttgagtagtatggtcatttcaacaatattaattcttctagtccatgaacatgggatatctttctatttattttaattttttaa

SEQ ID NO: 444050 - DNA, 584 bp, Homo sapiens
aatgacatataacatttcacctatgttttcttctactagtttcatagtttggggtcttacatttaaatatttaatttattttgagttgatttttttatatgatgagatataggggtctactttcattcttttgtatgtggatatgcacttttcccagcaccatttgttgaaaagactgtcttttcccaattgaatgtttgcacctttgtctaaaataagtttcatgtaaatatgtgsatttatgcctgagctctctatttttgttccactggtctacatgcctgtttttatgccaataccatgctgttttagttaggatagctttgtaatatattttgaaattagatagtgtaatacctctagcattgctctttttgcttaagatttatttggctatttggggtgttttgtagtttcacatggattttaagatattttttaatatctgtgaagaatgaagttggaaatttgatagagattatattggatttatagattgatttgagtagtatggtcatttcaacaatattaattcttctagtccatgaacatgggatatctttctatttattttaattttttaa

SEQ ID NO: 444051 - DNA, 559 bp, Homo sapiens
attccaccaccagtgggaggacagaattgcaatgtggcagcaatctgtaaatataatatttatcactcactcacatttatttagagtctaatgtgttctaggctctgaaattaagcaaagaaaatctagatatgcataagtccaagactttgcctttgtgacagtcaaaataatgaccccataaagatgttctagtcactggaatctgtgaccatattactttacatggggcaaaagggactttggagatgtgattaacccttragttagggggattatccttgattatcttgggagccaatctaattgcatgtgtctataaaatcagataatctttcctagctacagtcagaaggtgatatggctacagaacaatggccacagacatcccacattactagctttgaagatggagggatggtcccatgatccaaggaatagggacagcatctaaaagttggaaaaggaaatggattctctctagagcctccagaaagcaatacagccctgacaacaccttgacttaagcccagtaagaccacagtcagaggtttgccct

SEQ ID NO: 444052 - DNA, 584 bp, Homo sapiens
aatgacatataacatttcacctatgttttcttctactagtttcatagtttggggtcttacatttaaatatttaatttattttgagttgatttttttatatgatgagatataggggtctactttcattcttttgtatgtggatatgcacttttcccagcaccatttgttgaaaagactgtcttttcccaattgaatgtttgcacctttgtctaaaataagtttcatgtaaatatgtgcatttatgcctgagctctctatttttgttccactggtctacatgcctgtttttatgccaataccatgctgttttagttaggatagctttgtaatatattttgaaattagatagtgtaatacctctagcattgctctttttgcttaagatttatttggctatttggggtgttttgtagtttcacatggattttaagatattttttaatatctgtgaagaatgaagttggaaatttgatagagattatattggatttatagattgatttgagtagtatggtcatttcaacaatattaattcttstagtccatgaacatgggatatctttctatttattttaattttttaa

SEQ ID NO: 444053 - DNA, 512 bp, Homo sapiens
ttggggtgttttgtagtttcacatggattttaagatattttttaatatctgtgaagaatgaagttggaaatttgatagagattatattggatttatagattgatttgagtagtatggtcatttcaacaatattaattcttctagtccatgaacatgggatatctttctatttattttaattttttaaattgcttttatcaatgtttaataattttcatctttctgtggcttaatttacttataggtattttggttttttatagctttttaaatgggggattattttcttgattcctttttcagatagtctgctattgktgtagagatgttactgaatttttatgtagcttttgtatcctgaaaccttattgtattcatttactatttctgattctcagtggtgtatttagggttttttacatatatgatcatgtcgtctgcaaagagggacaatttgacttttttttccaatttggatgccttttatttctttctcttacataattgttatg

SEQ ID NO: 444054 - DNA, 586 bp, Homo sapiens
taatgttgcctgtgggttatcacatatggtctttattttattatgttgttttataactaatttgttaaaaggtttgatcataaaaggatgtctaattttgtcagatgctttttctgcatctattgaaatkattatatgctttttatccttctttgtttaatgcgatgtatcacattttattgatttacatgtattagactatccttacctccccgggtaaataccacttgattatggtgaataatctttttaatgtgcttttgaattatcattgctagaactgctggttttgaatgtttgcatctatgtttatcaatgatattggcctggagttttcaaagagttccctccttttcatttttttgaaatagtttgtaaataatttgtataagtttttaaaatgttttgtagaatttgtcagcaaaaaccaccaagtcatgaacttttctttcttcctctatttttttagagacagggtctcactctatcactgaggctggcatacagtggtgcagtcatagctgactgcagcctcaaactcctggtcttaagtgatcctcctgcctcagcctcctgagtaaaagta

SEQ ID NO: 444055 - DNA, 586 bp, Homo sapiens
taatgttgcctgtgggttatcacatatggtctttattttattatgttgttttataactaatttgttaaaaggtttgatcataaaaggatgtctaattttgtcagatgctttttctgcatctattgaaatgattatatgctttttatccttctttgtttaatgygatgtatcacattttattgatttacatgtattagactatccttacctccccgggtaaataccacttgattatggtgaataatctttttaatgtgcttttgaattatcattgctagaactgctggttttgaatgtttgcatctatgtttatcaatgatattggcctggagttttcaaagagttccctccttttcatttttttgaaatagtttgtaaataatttgtataagtttttaaaatgttttgtagaatttgtcagcaaaaaccaccaagtcatgaacttttctttcttcctctatttttttagagacagggtctcactctatcactgaggctggcatacagtggtgcagtcatagctgactgcagcctcaaactcctggtcttaagtgatcctcctgcctcagcctcctgagtaaaagta

SEQ ID NO: 444056 - DNA, 586 bp, Homo sapiens
taatgttgcctgtgggttatcacatatggtctttattttattatgttgttttataactaatttgttaaaaggtttgatcataaaaggatgtctaattttgtcagatgctttttctgcatctattgaaatgattatatgctttttatccttctttgtttaatgcgatgtatcacattttattgatttacatgtattagactatccttacctccccgggtaaataccacttgattatggtgaataatctttttaatgtgcttttgaattatcattgctagaactgctggttttgaatgtttgcatctatgtttatcaatgatattggcctggagtttwcaaagagttccctccttttcatttttttgaaatagtttgtaaataatttgtataagtttttaaaatgttttgtagaatttgtcagcaaaaaccaccaagtcatgaacttttctttcttcctctatttttttagagacagggtctcactctatcactgaggctggcatacagtggtgcagtcatagctgactgcagcctcaaactcctggtcttaagtgatcctcctgcctcagcctcctgagtaaaagta

SEQ ID NO: 444057 - DNA, 653 bp, Homo sapiens
taatgttgcctgtgggttatcacatatggtctttattttattatgttgttttataactaatttgttaaaaggtttgatcataaaaggatgtctaattttgtcagatgctttttctgcatctattgaaatgattatatgctttttatccttctttgtttaatgcgatgtatcacattttattgatttacatgtattagactatccttacctccccgggtaaataccacttgattatggtgaataatctttttaatgtgcttttgaattatcattgctagaactgctggttttgaatgtttgcatctatgtttatcaatgatattggcctggagttttcaaagagttccctccttttcatttttttgaaatagtttgtaaataatttgtataagtttttaaaatgttttgtagaatttgtcagcaaaaaccaccaagtcatgaayttttctttcttcctctatttttttagagacagggtctcactctatcactgaggctggcatacagtggtgcagtcatagctgactgcagcctcaaactcctggtcttaagtgatcctcctgcctcagcctcctgagtaaaagtacataccactatacctggggaatttttatttttatttttagagatgcagtctcattgtgttgcccagg

SEQ ID NO: 444058 - DNA, 629 bp, Homo sapiens
acacaccaggaatatgttccacctgttgaaatgtggctcaagctttagaagcccccaaatacctaattctttctttctcccaaacataatggagaacactgcttcttgcagaaatagctgatttcttaacttggtgctttcaacaacaccagccataaataaagatttattgaataatatatatttttaaataaacaacctttgtatgccataatgtaaatctggaactaagaaaagtaatcgctatttaattgcaatacttagtcattaaacagaagggcagatgcagagccagttagggcacacatgccccatacatgttagctccagatgtgttcattaattctctgctttccagtgcatggctcattatatgatcaaagggtcagcagacagagagctttcctacttaccccatcagcatcaaatgcagctccaaatccatattctcctcctttcattgcttccagaagagtcattgcatatgtcaggtttgggtcagggtgctgccctccaaagtcttccaggggaacacagtttattgcagaattggctggggcccccagctcatcacacagaacttttctcacataaggtyccataactaaaaatagatacacagcaatatt

SEQ ID NO: 444059 - DNA, 571 bp, Homo sapiens
tctgctcgtatttttctccagtaactttcctatgtttgtgaggttattcagtcataatgatcctagtgaaatttttttcaagcttgactaatcgtaatcactgtggacgtttgtttaaaatgtgtattcccaggcctctctcctgctgattctgattcaggagatcacggatggaactcagaatacatgtgtttgacaaataccacaagtggttcttatggtcagggaaatttgggactctaaccagaaatttatgtttttatgactggcagctagaaaagattcctagagtctttgctttttgaaaataaaatatttcttttttaaaaggaaaattgtatgactagatacaacatttatayatgtggcacatgtactgtactgtgtgcttttgtcatatttacagttgaagatgtgtaagaacactctgagaaaaattatctattaaatgcaaagaggggtaagtcagggtgggggagaaatgggaagggtgtgcttattgttgctaaaaggtagaaaagccagaatgatagcatctagggttgcaaatagcacattgtaagttgaggga

SEQ ID NO: 444060 - DNA, 576 bp, Homo sapiens
tatgtttttatgactggcagctagaaaagattcctagagtctttgctttttgaaaataaaatatttcttttttaaaaggaaaattgtatgactagatacaacatttatacatgtggcacatgtactgtactgtgtgcttttgtcatatttacagttgaagatgtgtaagaacactctgagaaaaattatctattaaatgcaaagaggggtaagtcagggtgggggagaaatgggaagggtgtgcttattgttgctaaaaggtagaaaagccagaatgatagcatctarggttgcaaatagcacattgtaagttgagggagcttcataatcatgtctgaaaccttctttgatatactgagttgtaaacagtggctttggacaagatttgagggagaaaccaactatgctttaaagtgttcatttaaaaggctttaattaaaggaaagtctttatatttacttgagctaatttaacttcaggactttaacaaattactagcccttaacctcttaaaaattgtctttcatttcaaatgaaagtttaaggtggcctttatgtttgattggtatacttatg

SEQ ID NO: 444061 - DNA, 380 bp, Homo sapiens
gttattctaccaaaaagagatatgcacttgcatgttcatcgcaacactattcacaatagcaaagacatggagtcagcctaggtgcccatcaacagtggattggatcaataaaatgtggtrcatccacacagtattattaggccattcttgcattgctatgaagaaatacctgagactgggtaatttgtaaggaaaagagatttaattggctcatagctctgcaggctgtacgggaagcatggtgacggcatctgcctggcgcctgtggagtctccagggagcttttactcatgatggaaggccaagagggagtaggtacttcacatggccagagcaggagcaagagagaatgggagtaggggtaagtaccacacaccctt

SEQ ID NO: 444062 - DNA, 380 bp, Homo sapiens
gttattctaccaaaaagagatatgcacttgcatgttcatcgcaacactattcacaatagcaaagacatggagtcagcctaggtgcccatcaacagtggattggatcaataaaatgtggtacatccacacagtattattaggccattcttgcattgctatgaagaaatacctgagactgggtaatttgtaaggaaaagagatttaattggctcatagctctgcaggctgtacgggaagcatggtgacggcatctgcctggcgcctgtggagtctccagggagcwtttactcatgatggaaggccaagagggagtaggtacttcacatggccagagcaggagcaagagagaatgggagtaggggtaagtaccacacaccctt

SEQ ID NO: 444063 - DNA, 380 bp, Homo sapiens
gttattctaccaaaaagagatatgcacttgcatgttcatcgcaacactattcacaatagcaaagacatggagtcagcctaggtgcccatcaacagtggattggatcaataaaatgtggtacatccacacagtattattaggccattcttgcattgctatgaagaaatacctgagactgggtaatttgtaaggaaaagagatttaattggctcatagctctgcaggctgtacgggaagcatggtgacggcatctgcctggcgcctgtggagtctccagggagcttttactcatgatggaaggccaagagggagtaggtacwtcacatggccagagcaggagcaagagagaatgggagtaggggtaagtaccacacaccctt

SEQ ID NO: 444064 - DNA, 380 bp, Homo sapiens
gttattctaccaaaaagagatatgcacttgcatgttcatcgcaacactattcacaatagcaaagacatggagtcagcctaggtgcccatcaacagtggattggatcaataaaatgtggtacatccacacagtattattaggccattcttgcattgctatgaagaaatacctgagactgggtaatttgtaaggaaaagagatttaattggctcatagctctgcaggctgtacgggaagcatggtgacggcatctgcctggcgcctgtggagtctccagggagcttttactcatgatggaaggccaagagggagtaggtacttcacatggccagagcaggagcaagagagaatgggagtrggggtaagtaccacacaccctt

SEQ ID NO: 444065 - DNA, 390 bp, Homo sapiens
tagcatgttcacatgcatagtttctgagtcagtagcaaactaagaacttcttgtgtgattcaagctaacccctcgattatcagaagcagatgtttcaaacgactgaagatcartgaggcatatcctatttacaggttaataattgactactagatgcaggtgccccaaatggtcttagagacattagataggagagacaatgtcagtgctccccctaccctgcctcccctaatctaaagcctactctgtttcttttatcaagtgattggctgtatgttaacagagcctggggcactttcctgttgaaatgcctttaatcccaagcaactgtattgatttttttttttttttggatggtttagattggatgactgattattggacagaatg

SEQ ID NO: 444066 - DNA, 390 bp, Homo sapiens
tagcatgttcacatgcatagtttctgagtcagtagcaaactaagaacttcttgtgtgattcaagctaacccctcgattatcagaagcagatgtttcaaacgactgaagatcaatgaggcatatcctatttacaggttaataattgrctactagatgcaggtgccccaaatggtcttagagacattagataggagagacaatgtcagtgctccccctaccctgcctcccctaatctaaagcctactctgtttcttttatcaagtgattggctgtatgttaacagagcctggggcactttcctgttgaaatgcctttaatcccaagcaactgtattgatttttttttttttttggatggtttagattggatgactgattattggacagaatg

SEQ ID NO: 444067 - DNA, 390 bp, Homo sapiens
tagcatgttcacatgcatagtttctgagtcagtagcaaactaagaacttcttgtgtgattcaagctaacccctcgattatcagaagcagatgtttcaaacgactgaagatcaatgaggcatatcctatttacaggttaataattgactactagatgcaggtgcmccaaatggtcttagagacattagataggagagacaatgtcagtgctccccctaccctgcctcccctaatctaaagcctactctgtttcttttatcaagtgattggctgtatgttaacagagcctggggcactttcctgttgaaatgcctttaatcccaagcaactgtattgatttttttttttttttggatggtttagattggatgactgattattggacagaatg

SEQ ID NO: 444068 - DNA, 390 bp, Homo sapiens
tagcatgttcacatgcatagtttctgagtcagtagcaaactaagaacttcttgtgtgattcaagctaacccctcgattatcagaagcagatgtttcaaacgactgaagatcaatgaggcatatcctatttacaggttaataattgactactagatgcaggtgccccaaatggtcttagagacattagataggagagacaatgtcagtgctccccctaccctgcctcccctaatctaaagcctactctgtttcttttatcaagtgattggctgtatgttaacagagcctggggcactttcctgttgaaatgcctttaatcccaagcaactgkattgatttttttttttttttggatggtttagattggatgactgattattggacagaatg

SEQ ID NO: 444069 - DNA, 539 bp, Homo sapiens
gttgaagagaggttgacaaatggtctttcatattttttgaagctacggttgttgatttgcatgggaaaattattatgtcttattatttcttgtcccactttaccataagggctcctcagcttcttacttcaatgggccttctatgacaaacacactttattaactctaagagtggaatttattttaacagataattagcataggtcaatatatgcttaaaatagagtcaaattaaacctactagctgttataaaggacagatgacaaattaaaatccacatagaagcatcgactcttaaakaatctgaaagtactacttctaagaggggtgggcatgggtgaagggaatggtggacatgtttcagaatttcaaacagccaactttaaccaatcttttcctcattttgttcaccttcttgggggcttatgctaaagtgaagtgaatagccataaggctggcttcaggagaaaggtggtctaaaagaactggataattataagcaaaattggtcttgaatgattgaaaattgatgagaatg

SEQ ID NO: 444070 - DNA, 512 bp, Homo sapiens
agtactgtttcccttactgtccaagcatggttttactcctctttgcagtccaaaggggcttcatagactcactcatgtattcagggttcattagctcttgtaaaggtaatttcatatgtggatagttgttcatatagatgtgtccataggggtatgattactggagagatcgactccactaccttgctctgcccaaatccttcccctttccaacaagagtttgccacctcctagttttcttttttcttaaccaaactaagtttagccttttaatccttcaccctcctccacttctaatrccattgcttctctgtatgcttattgtattttccatgctatatgactttcagctggttatttacagtatgtaagttttaatatcctgtaaaagggggataataatagcatccgtttgataaagatgttaaagatactaaatgacactgtccatgttaaataactttttgagatatattgagatgtttctgcacttccttgttctggccttcctg

SEQ ID NO: 444071 - DNA, 545 bp, Homo sapiens
ttggatcccaaaggctttggtcttttttgatatcctattggataatcataagcaggctagaaaaatagaaaactagaatttattatttttgaactgacaaatctgaccagtgggctgcattctctatatctgaacaatcttggttttgatggaaaaagttaattttaaaaagcaattttcattttttaaattaaatttcatttttttttgagacagggtctcactttgttgcccaggctggagtgcaatggcacagtcttggctcactgtagccttgacctccccagattcaggtgatcttcccacctcagcctcctgagtagctggggctataggtgcatgccactatgcacagctkatttttgtgtttttactactcatagggtttctctgtgttgcccagtctagtctcaaactcctgatctcaagagatctgcctgccttggcctcctgaagtgtcatgaaccaccatgcccagcctacaaagcaatgttctaggaaaaactagttactctttgattatgtaattgctggagaagaaaaac

SEQ ID NO: 444072 - DNA, 545 bp, Homo sapiens
ttggatcccaaaggctttggtcttttttgatatcctattggataatcataagcaggctagaaaaatagaaaactagaatttattatttttgaactgacaaatctgaccagtgggctgcattctctatatctgaacaatcttggttttgatggaaaaagttaattttaaaaagcaattttcattttttaaattaaatttcatttttttttgagacagggtctcactttgttgcccaggctggagtgcaatggcacagtcttggctcactgtagccttgacctccccagattcaggtgatcttcccacctcagcctcctgagtagctggggctataggtgcatgccactatgcacagcttatttttgtgtttttactactcatagggtttctctgtgttgcccagtctagtctcaaactcctgatctcaagagatctgcctgccttggcctcctraagtgtcatgaaccaccatgcccagcctacaaagcaatgttctaggaaaaactagttactctttgattatgtaattgctggagaagaaaaac

SEQ ID NO: 444073 - DNA, 417 bp, Homo sapiens
cagagaccccatagaaacagataactcaggttattctagacaaggctgagatttccattaaagacactcagtggtaatttcrttggtccatcttaaaatctttccattttctcctgaaacaaattgctcaagcaattcaaatacaatgaatgtggtcagtgggtcacacctggagaaatcattttctaacctgtaatcaagactgaattactcccttcactggaaagaataaaatattaccacataaattcgtattatgataatggcccactatgaatgctttggtgttcttaattttcttaagatttattaatatttctgaagtaactactaaatgccaagcaatatattttctaatttaatctttcattgacttttactttcacttcaattgagctactcactttcatggctata

SEQ ID NO: 444074 - DNA, 337 bp, Homo sapiens
ctcctggcctcaagtgatccttccagcttggtctccctgaaatatcttttgtggctggtttgttcaaattagtttcttctaatcaagggacacacattgcatttgattatttagctcaagacttttttaacctggaaaatacccttactctttgtttatgtatttatttartgaaattgacttgttgaaagactagtcaattgtcctgtagaatatttccccttctggaattttctggttgctttttatggtgtcatttaacttttcactctgttttttcctggttaactggaagttagttctaaaggcttttaggcctgctataacaaaataccaa

SEQ ID NO: 444075 - DNA, 337 bp, Homo sapiens
ctcctggcctcaagtgatccttccagcttggtctccctgaaatatcttttgtggctggtttgttcaaattagtttcttctaatcaagggacacacattgcatttgattatttagctcaagacttttttaacctggaaaatacccttactctttgtttatgtatttatttagtgaaattgacttgttgaaaractagtcaattgtcctgtagaatatttccccttctggaattttctggttgctttttatggtgtcatttaacttttcactctgttttttcctggttaactggaagttagttctaaaggcttttaggcctgctataacaaaataccaa

SEQ ID NO: 444076 - DNA, 337 bp, Homo sapiens
ctcctggcctcaagtgatccttccagcttggtctccctgaaatatcttttgtggctggtttgttcaaattagtttcttctaatcaagggacacacattgcatttgattatttagctcaagacttttttaacctggaaaatacccttactctttgtttatgtatttatttagtgaaattgacttgttgaaagactagtcarttgtcctgtagaatatttccccttctggaattttctggttgctttttatggtgtcatttaacttttcactctgttttttcctggttaactggaagttagttctaaaggcttttaggcctgctataacaaaataccaa

SEQ ID NO: 444077 - DNA, 417 bp, Homo sapiens
cagagaccccatagaaacagataactcaggttattctagacaaggctgagatttccattaaagacactcagtggtaatttcgttggtccatcttaaaatctttccatttyctcctgaaacaaattgctcaagcaattcaaatacaatgaatgtggtcagtgggtcacacctggagaaatcattttctaacctgtaatcaagactgaattactcccttcactggaaagaataaaatattaccacataaattcgtattatgataatggcccactatgaatgctttggtgttcttaattttcttaagatttattaatatttctgaagtaactactaaatgccaagcaatatattttctaatttaatctttcattgacttttactttcacttcaattgagctactcactttcatggctata

SEQ ID NO: 444078 - DNA, 575 bp, Homo sapiens
tttcaccatgtcggccaggctggtcttgaactcctgacctcaagggatctgcctgccttggcctcccaaagtgctgggattacacgtgtgagccactgcgcccggccgtttctgactttttctaaagtcttctttctctggagatgacattatataatagcactgttcaatagaagtttctttgatgatggaactgttctgtaatctgcattgtcccagccactagccatatgtgactactgaacacttgaaatgtgrctagagcaactgaagaactgaattttgcattttacttaattttaattaattaaaatagaaatgcaaataaccataagtggttagtagctaccatactggacagcaaagatctataattcagcatttaaaatcgattttgttttgttttcaaaaatggagtcagactgttacaacccacaagaactgtaggttaaattaaggtaaatcaccaaatactacatacacatttgggaaatccaaaccagattttttcatgtgataaccacaccctcttttgactttagccttggaggtaatggagtatggcagaaaaaacc

SEQ ID NO: 444079 - DNA, 575 bp, Homo sapiens
tttcaccatgtcggccaggctggtcttgaactcctgacctcaagggatctgcctgccttggcctcccaaagtgctgggattacacgtgtgagccactgcgcccggccgtttctgactttttctaaagtcttctttctctggagatgacattatataatagcactgttcaatagaagtttctttgatgatggaactgttctgtaatctgcattgtcccagccactagccatatgtgactactgaacacttgaaatgtgactagagcaactgaagaactgaattttgcattttacttaattttaattaattaaaatagaaatgcaaataaccataagtggttagtagctaccatactggacagcaaagatctataattcagcatttaaaatcgattttgttttgttttcaaaaatggagtcagactgttacaacccamaagaactgtaggttaaattaaggtaaatcaccaaatactacatacacatttgggaaatccaaaccagattttttcatgtgataaccacaccctcttttgactttagccttggaggtaatggagtatggcagaaaaaacc

SEQ ID NO: 444080 - DNA, 575 bp, Homo sapiens
tttcaccatgtcggccaggctggtcttgaactcctgacctcaagggatctgcctgccttggcctcccaaagtgctgggattacacgtgtgagccactgcgcccggccgtttctgactttttctaaagtcttctttctctggagatgacattatataatagcactgttcaatagaagtttctttgatgatggaactgttctgtaatctgcattgtcccagccactagccatatgtgactactgaacacttgaaatgtgactagagcaactgaagaactgaattttgcattttacttaattttaattaattaaaatagaaatgcaaataaccataagtggttagtagctaccatactggacagcaaagatctataattcagcatttaaaatcgattttgttttgttttcaaaaatggagtcagactgttacaacccacaagaactgtaggttaaattaaggtaaaycaccaaatactacatacacatttgggaaatccaaaccagattttttcatgtgataaccacaccctcttttgactttagccttggaggtaatggagtatggcagaaaaaacc

SEQ ID NO: 444081 - DNA, 631 bp, Homo sapiens
aagctgtgcttcaatacctagggcttctttcctggaatggatctgagaatctgggattgggtggctaatatctcatctctagaagggagaaagaactgggtggtgatggctttgtattttctactggagttcactacagaataggtgaatggaatgggctgctatgatccagacattagggaggacaggtttgtgatacattagaaaacttgaaygagcccttctatgattctctcttccctctttctgcttccctttctgaatcaccatccccaggttgtggaattagcaaatctattatgtgagcaatagcaaacttacaggagccctcggctccatctatctccctgtttgtgtcagttcattctggatgcttttagtctgtggtcttcattcactctttttatggggaagtaaaaggagtgggacagattatgagaacagctgggtcctcccagttgctggggtggttattttaagctttgtttaatgtgtccagagacccagatggcatttttaactaagctgctttattaaatcttgtgataaagcatagtgatgtttattgaaaaggcagacacacatcagcaacattatgcatgaaacttgctctaagaattttctataaaac

SEQ ID NO: 444082 - DNA, 631 bp, Homo sapiens
aagctgtgcttcaatacctagggcttctttcctggaatggatctgagaatctgggattgggtggctaatatctcatctctagaagggagaaagaactgggtggtgatggctttgtattttctactggagttcactacagaataggtgaatggaatgggctgctatgatccagacattagggaggacaggtttgtgatacattagaaaacttgaacgagcccttctatgattctctcttccctctttctgcttccctttctgaatcaccatccccaggttgtggaattagcaaatctattatgtgagcaatagcaaacttacaggagccctyggctccatctatctccctgtttgtgtcagttcattctggatgcttttagtctgtggtcttcattcactctttttatggggaagtaaaaggagtgggacagattatgagaacagctgggtcctcccagttgctggggtggttattttaagctttgtttaatgtgtccagagacccagatggcatttttaactaagctgctttattaaatcttgtgataaagcatagtgatgtttattgaaaaggcagacacacatcagcaacattatgcatgaaacttgctctaagaattttctataaaac

SEQ ID NO: 444083 - DNA, 421 bp, Homo sapiens
gtaaaaaagatgaaattacccagagttggtgtaggtgatggaaaattgtcatgtttgtatactgttcatagaagttaaattgacataactttttggtcaggcaatttggaagtatatatctaaattaatagagwagttttctaataacctgggaatctcttaatctaagaatctttactgtagatttttctagaacaaatgtacaaacatctatgtacaagggtactcactgcagcattttgctaaggaaaaactcagaaaaaaatctatatgttcaacagagaacaggtacataatttatgacacaaccgcacaatatacaccactaaaataaaggatataaatttatgtatagtatgaaaaagatgtgaatgatagcttgttggtgaaaaacagcaatgactggaatattgtgtgtaat

SEQ ID NO: 444084 - DNA, 537 bp, Homo sapiens
tacaacaaatatttaatatctatgacatgtaaaaaggttttccaaatcaagaaaattcaaacaattcaatacaaatatcatcaataataacacatgaagaggtggccaaccttattaataaccagagaaatataaattaaaacaatccatcaacttgtaaaaaagatgaaattacccagagttggtgtaggtgatggaaaattgtcatgtttgtatactgttcatagaagttaaattgacataactttttggtcaggcaatttggaagtatatatctaaattaatagagaarttttctaataacctgggaatctcttaatctaagaatctttactgtagatttttctagaacaaatgtacaaacatctatgtacaagggtactcactgcagcattttgctaaggaaaaactcagaaaaaaatctatatgttcaacagagaacaggtacataatttatgacacaaccgcacaatatacaccactaaaataaaggatataaatttatgtatagtatgaaaaagatgtgaatgatagctt

SEQ ID NO: 444085 - DNA, 537 bp, Homo sapiens
tacaacaaatatttaatatctatgacatgtaaaaaggttttccaaatcaagaaaattcaaacaattcaatacaaatatcatcaataataacacatgaagaggtggccaaccttattaataaccagagaaatataaattaaaacaatccatcaacttgtaaaaaagatgaaattacccagagttggtgtaggtgatggaaaattgtcatgtttgtatactgttcatagaagttaaattgacataactttttggtcaggcaatttggaagtatatatctaaattaatagagaagttttctaataacctgggaatctcttaatctaagaatctttactgtagatttttctagaacaaatgtacaaacatctatgtacaagggtactcactgcagcattttgctaaggaaaaactcagaaaaaaatctatatgttcaacagagaacaggtacataatttatgacacaaccrcacaatatacaccactaaaataaaggatataaatttatgtatagtatgaaaaagatgtgaatgatagctt

SEQ ID NO: 444086 - DNA, 616 bp, Homo sapiens
acttgaccaaacatatacaaaatactggaaggagagttttacaacaaatatttaatatctatgacatgtaaaaaggttttccaaatcaagaaaattcaaacaattcaatacaaatatcatcaataataacacatgaagaggtggccaaccttattaataaccagagaaatataaattaaaacaatccatcaacttgtaaaaaagatgaaattacccagagttggtgtaggtgatggaaaattgtcatgtttgtatactgttcatagaagttaaattgacataactttttggtcaggcaatttggaagtatatatctaaattaatagagaagttttctaataacctgggaatctcttaatctaagaatctttactgtagatttttctagaacaaatgtacaaacatctatgtacaagggtactcactgcagcattttgctaaggaaaaactcagaaaaaaatctatatgttcaacagagaacaggtacataatttatgacacaaccgcacaayatacaccactaaaataaaggatataaatttatgtatagtatgaaaaagatgtgaatgatagcttgttggtgaaaaacagcaatgactggaatattgtgtgtaat

SEQ ID NO: 444087 - DNA, 537 bp, Homo sapiens
tacaacaaatatttaatatctatgacatgtaaaaaggttttccaaatcaagaaaattcaaacaattcaatacaaatatcatcaataataacacatgaagaggtggccaaccttattaataaccagagaaatataaattaaaacaatccatcaacttgtaaaaaagatgaaattacccagagttggtgtaggtgatggaaaattgtcatgtttgtatactgttcatagaagttaaattgacataactttttggtcaggcaatttggaagtatatatctaaattaatagagaagttttctaataacctgggaatctcttaatctaagaatctttactgtagatttttctagaacaaatgtacaaacatctatgtacaagggtactcactgcagcattttgctaaggaaaaactcagaaaaaaatctatatgttcaacagagaacaggtacataatttatgacacaaccgcacaatatacaccactaaaataaaggatrtaaatttatgtatagtatgaaaaagatgtgaatgatagctt
